United States Patent Application Publication US 2011/0183924 A1 - sequence listing, part 291

SEQ ID NO: 934947 - protein, 187 aa, Homo sapiens
MSKRYSFTPHSKFCCGSLFESVPSLRTLTLTAKNSAVNPYGPGLVFVGPPGAENLAVNPSGPGLILVGPSTLTKETQRANTHLVEWEPEAETAFKTLKQSLVQTPGLRLPTGKNFSLYITERAGIALAVLSQTCGTIPQPVAYLSKEIDIVAKTWPHCLWVFVAVAVLVSEATKIITRKRSHCLDYS

SEQ ID NO: 934948 - protein, 134 aa, Homo sapiens
MMKYGKVNIVTISDHFIDINYVVYIFRYDSTHGKFHGTVKAEKRKPVINRNPITTSRSEIPPKSNGAMLALITAITATQKTVDDPSGKLWCDTHGALQNILSVSTDTANAVGKIISKLNGKFTSMVFHVPPPTC

SEQ ID NO: 934949 - protein, 145 aa, Homo sapiens
MVNSMPSTPPRLQHCRGKAPTKASVIVGIPIPTKHDYFRSTSDCCAGSENFKPVVLTLLGSVGVGPTEPDHLAPLLQPPFQGILLLPYDVPALSLPSAMSKSSLRPPQKRLSGCDQNADSDDSEVQVYKKKFLNSKTSERKNSGF

SEQ ID NO: 934950 - protein, 324 aa, Homo sapiens
MLHHLYLALSLFSGPPPKNKVLSNNASSQKPTHSSCIPLLRLPDKQQKVNESIKTDMLCTDKEEECPAASLLQKYTNNSEKPSGKRQCKTKHLISQDLRQGFLLTGKCYSTVPRFRKQLEPSSNYDLTSSKQEMKPFNCLQELLPASQSMKLPHSCSPQETNQSRPVQLRARRIIVDRHAGETLLQQAAWLGYELLETIILHSTFMTSTFPTYEPLHGAVENDCLEIVRLLLSYGAGPTLATYSGRTIMKMTHSKVMEMFLTEPDNGGESNVLADPPGPEDQDDDNEACSDVFEFKFSDTPSYLVKTFKFHLCRGEHGCYVTEN

SEQ ID NO: 934951 - protein, 992 aa, Homo sapiens
MTSHQGGQFHSREWDIGKKYEILKRAKRLLQADVILNYLAVSLMYCYCCFEGVSQVTSMLLLCQGGCKLAYQIDGLEALIMDHTGLKQEGLLQKRTTEDGHQSPERHQFPHLSSYSEQETTRVPFAKAVASGFPGDTTLVFCASPQPSPQVHLPTQAVADIFSEFHEHYARISTAPSVTLSKANMMGSEFPTARLSNSKYPETLEVGESAQPVPMYTWKTVAQDRKDGVSPPLLEKQSITKSISNKPVELSSKVVEVDASKADHMKKMASMGLVHSMAGSGLVLSRSEILKEISSLRNGCAIYRSEFISTDPSSWVVPRPRTNEENNGESMLKNKVMDWMIIQQQSSFYLCMNGKGTMIPNVLGSVSCAGHPTSILTLYYQSPTPHRADGTRTNRSSVDTTSSIIQQVGQPPTVPVKQSSSTSSKVAKASSPELSFKANKNGLQPSPLFLPPNEAFRPPSISHPRSYFPYPVPKATAIRPFSLHDKGPVYPHPVLLPNNSLFLGCLASKPRLPYVVPMGHPEFLIYQDALGFGMVQPMLITHRPIEITKKEKPERRSHSQERACRKDPTLQNQFSEMLEASSTAFHPEVPNDSLKLNPSWNQDSNQQREKRGETRERSHSHERACHKDPTVQNQFSEMLEAGSTEFHPEVHTDNLKLNLSWNQGKTVSRNKKIVYIDLLQEEPDAKTEANMSKPCFTVKNIGQNAKPAKPPIVKASLQQHGDFIMLREELGHIGDLHEAYALKRTPANKENIGMPVSTSFLEPTLVSDGHAVTFGKIQEYPKPYCLGSAPLSMDIISTYTKDGANEAKSSDGKLLKPKPSNLVKRVTTSAGCMADRLKCVTTELYADSKTKDAKPYKFSTADSERWKGNQDKKPKCLLEEDIASQNNCERCSRPGVCLVAMPGQKLLAQELLFQENMPECFVDYLELDTEKVDARDGEGISYNKTPLRSTLSLPRFSAFLWQLFPSADFAGNCHVLDHGPYGRDDYFCPLRV

SEQ ID NO: 934952 - protein, 415 aa, Homo sapiens
MTQKLLPLSSFLGKAKNTPRLSPNLGLTCIVSVWCPTWDKEEYDSVKVGDGVISEVMSREDKFVRKGDKMGRTLLCAGFLALYRDLNLRARCRMCLACDTLRHPEAALDMLQDLLVAAPLPCILGMKLTDHGGEAFGCAAEFGPSAAGLLEFAGGPLQTLFARVSPAEAAEQQILQNGKCCCLILPLETSSQRSSQLYVSWLLLADASQLRYSEVRDTLEETDCPFSDLKLCAGRTTTLFKAARQGRLSLQKFLLPYVQLCPASRHEVYRGRQVSLCSDGVFVWVSFLFVSFPSNIQDPQLQVCWSLLKVHSRPYFPGYQQQSLQNSRYWNQRTVQLTVREMFQCESQMPLLHKRSHTRKWGSRWQPCHECDQSKSGVLQSSLPRGWREGWCFNPRGLTPFVKDEECTIWQDVHR

SEQ ID NO: 934953 - protein, 160 aa, Homo sapiens
MASCKEQTLDTPPLRTVTLISRVRGFILEVSETKNPPILDTGGPPSSRPQNSRSTDSLNFVPGEATDTECQLVETGAKLDLHDTDTRTNPTVPRGTGPQIPIAKLLESSSFSTNSLGQSKSSPVLPVVAALKEKTMGFPFDQGKLLALPQLGVVPGADPS

SEQ ID NO: 934954 - protein, 151 aa, Homo sapiens
MAPHGRWKGSSAVLIADHTDQVEKGISQPSCCAPCPGDQRIGGLLTDPSSQSPPNLLVYKLFVLRGHPWLPWVSHTGEKKSSGIPETLFPTENELSCSGVLAMFNDFCQRTQKPPAKCKQPQPPLRDQDPQPGLQPAYPKSLVLPEIPGGQ

SEQ ID NO: 934955 - protein, 154 aa, Homo sapiens
MRIREAGKASRLAELSGCLSTGKCTVRADLVQMRLREYLGNVCGGAKSEIVSSSAVKGHCVFPLKAKKNQGSTERKSCLMVKSKQCSKTPVRGPKSLLQSANNLSPHNETTTHNLECSQPTPSPFCSLKSLAAKRSGVRGSAMQQQPNERAPPQ

SEQ ID NO: 934956 - protein, 379 aa, Homo sapiens
MVANAVIHVHCFAGAEALTSAGVAVVPASGALEARALASYSRAAAGGCAGEDGLCTEQEGNPGGRGMLVGDDIIAEMEVVAKEEANVEPQQEDLQAQPGPGPSTPRPATDSLDVLHLERSYMNVPGCRASPASGPEPYPCSCQFGMLHGESQAQPCSYFYAQQFHGVDTCTPQGDQEKERPHTQTAAEPVQHPAQEGLLQLRNTEQVVASHNNTLPATPCQLLQCQPLVRAGCLGLSPPTTKTTTALMVPYTPERDRGPGREGALPHTLRALANLQGVSLHAHPIIWRLLDQRQIVQHTQMLAGITNDDEVLLSYVCDGFAGKGRNATIPGTGGRMKFSLYHNLYFHNEVIIQEYCFGILDKRGHYTGNLENHTGLTVL

SEQ ID NO: 934957 - protein, 332 aa, Homo sapiens
MRPEGSLTYRVPERLRQGFCGVGRAAQALVCASAKEGTAFRMEAVQEGAAGVESEQAALGEEAVLLLDDIMAEVEVVAEVEVVAEEEGLVERREEAQRAQQAVPGPGPMTPESALEELLAVQVELEPVNAQARKAFSRQREKMERRRKPHLDRRGAVIQSVPGFWANIANHPQMSALITDEDEDMLSYMVSLEVRPGRLGLEGLAGEEYRASHSTPIEWYPDYEVEAYRRRHHNSSLNFFNWFSDHNFAGSNKIAEILCKDLWRNPLQYYKRMKPPEEGTETSESMRSKAENHSVQSVALDSTAVNPTGSHPANPMRLGSLNMKQFQHEHPC

SEQ ID NO: 934958 - protein, 285 aa, Homo sapiens
MEAVQEGAAGVESEQAALGEEAVLLLDDIMAEVEVVAEEEGLVERREEAQRAQQAVPGPGPMTPESALEELLAVQVELEPVNAQARKAFSRQREKMERRRKPHLDRRGAVIQSVPGFWANIANHPQMSALITDEDEDMLSYMVSLEVRPGRLGLEGLAGEEYRASHSTPIEWYLDYEVEAYRRRHHNSSLNFFNWFSDHNFAGSNKIAEILCKDLWRNPLQYYKRMKPPEEGTETSESMRSKAENHSVQSVALDSTAVNPTGSHPANPMRLGSLNMKQFQHEHPC

SEQ ID NO: 934959 - protein, 309 aa, Homo sapiens
MPSSRRLGHLFEEQKRVQSGRGFSVNKAIFKGIANHPQMSALITDEDEDMLSYMVSLEVEEEKHPVHLCKIMLFFRSNPYFQNKVITKEYLVNITEYRASHSTPIEWYPDYEVEAYRRRHHNSSLNFFNWFSDHNFAGSNKIAEILCKDLWRNPLQYYKRMKPPEEGTETSESMRSKAENHSVQSVALDSTAVNPTGSHPANPMRLGSLNTSEALERESCPPLTTVPLTHKHRRNRCSKQIILKTVGTLWPPQAALYPTVCMSKTLWSNRAELYRLCNASSTEYPYTWATDAKGTDKFAPCLSNSEAHL

SEQ ID NO: 934960 - protein, 279 aa, Homo sapiens
MEAVQEGAAGVESEQAALGEEAVLLLDDIMAEVEVVAEEEGLVERREEAQRAQQAVPGPGPMTPESALEELLAVQVELEPVNAQARKAFSRQREKMERRRKPHLDRRGAVIQSVPGFWANIANHPQMSALITDEDEDMLSYMVSLEVRPGRLGLEGLAGEEYRASHSTPIEWYPDYEVEAYRRRHHNSSLNFFNWFSDHNFAGSNKIAEILCKDLWRNPLQYYKRMKPPEEGTETSESMRSKAENHSVQSVALDSTAVNPTGSHPTNPMRLGSLNVRSQ

SEQ ID NO: 934961 - protein, 243 aa, Homo sapiens
MEAVQEGAAGVESEQAALGEEAVLLLDDIMAEVEVVAEEEGLVERREEAQRAQQAVPGPGPMTPESAPEELLAVQVELEPVNAQARKAFSRQREKMERRRKPHLDRRGAVIQSVPGFWANIANHPQMSALITDEDEDMLSYMVSLEVRPGRLGLEGLAGEEYRASHSTPIEWYPDYEVEAYRRRHHNSSLNFFNWFSDHNFAGSNKIAEILCKDLWRNPLQYYKRMKPPEEGTETSGDSQLLS

SEQ ID NO: 934962 - protein, 298 aa, Homo sapiens
MRPEGSLTYRVPERLRQGFCGVGRAAQALVCASAKEGTAFRMEAVQEGAAGVESEQAALGEEAVLLLDDIMAEVEVVAEVEVVAEEEGLVERREEAQRAQQAVPGPGPMTPESALEELLAVQVELEPVNAQARKAFSRQREKMERRRKPQLDRRGAVIQSVPGFWANIANHPQMSALITDEDEDMLSYMVSLEVRPGRLGLEGLAGEEYRASHSTPIEWYPDYEVEAYRRRHHNSSLNFFNWFSDHNFAGSNKIAEILCKDLWRNPLQYYKRMKPPEEGTETSDETVPTRASMLTTRY

SEQ ID NO: 934963 - protein, 197 aa, Homo sapiens
MIWWTGQIGRDRSGSGSKPIPPMPRNVEEGSDLRETRAFTCMTLEPLDCSGASRPVSWRETSQEGARQAQLPRYYPLYSSGRMPTQYSLQLLSSIMEAKVIWTKPPVLVHFHAAEEDIPETGNKRRFNWTDSSTWLWRPQNHGIRIKALLTWQCQERMRKNLRQKPLKNPSDPEESFISLNIYETIQIIYVFLYQFY

SEQ ID NO: 934964 - protein, 141 aa, Homo sapiens
MKLPLHSPVSPSWTGRWRNSATLNTRGRKKFAFHHNIYFGNKVTTKEYCFPAGHCLSFFSWLSDCEGPGYGTIAEVGQLWGIMAKDLLRHSLASEELALNQNLTCHDQFAQSTRSSARACGSIFCSTTQGILVRTPSVSWP

SEQ ID NO: 934965 - protein, 146 aa, Homo sapiens
MEAKVIWTKPPVLVHFHAAEEEIPETGNKRRFNWTDSSTWLWRPQNHGIRIKALLTWQCQERMRKNLRQKPLKNPSDPKDSSQGLGTTHEKSLIADSLPVDLDSTGLYLHSKGETEANPFLFPSSRNFGQSSLGAEQNKEANRKDL

SEQ ID NO: 934966 - protein, 136 aa, Homo sapiens
MPFRQCACLCAHAQGQETLGVLTNTEVGLNIQPDCLLETHGMSCSVLPSLHISSPVSPVWSSRFPVRWPAFFGVGSCWVNEDGGGNQVCQWSVVSSKRYLAGLGESFWEDADLERPQVGICVEGERSLVEPKLNPR

SEQ ID NO: 934967 - protein, 166 aa, Homo sapiens
MRPEFPPTHRLQKGQRRVPVLWVGLHRRWSMGVRRRTPSSGCTVFTLPEAQREEATLKQETVLVLDDIMAEVGVMAEEEALVERQKDQRAQPGPGPMTPESALEELLAVRVGLELVNAQARKAFSRQREKMERRCKPHLDRRGAIIQSIPGFWANVVSFSVFLLPF

SEQ ID NO: 934968 - protein, 145 aa, Homo sapiens [sequence omitted]

SEQ ID NO: 934969 - protein, 320 aa, Homo sapiens
MGVWTSWRSSNARIFLAAPLTNQNLSCSRMVDTFTTLSCAPGCLRPSITAVSSGLLYFPPSIEETPGVENVVAASGRSTQVLEVPWELAEEAMDRRTGEETRGKITEKDGKMQNEGNAQEEKIEQEEHSVCGDGREQDRKKKKEEQREIREVLTLPALKTAKHSIISASDWIQCMSALATDVQMCPEFLPSDGFVVSLTSRVKLQTFPVNVTALKGVTAPELFVPPAGFLVSLTSGMKPQTLRTISVIAFLQGLIAGDLPGIHVDYKILVDVQHGSVIVIYHVPRDLLLEFQPESTFLRSGPQYLIFMPNPGSHSFSFSL

SEQ ID NO: 934970 - protein, 142 aa, Homo sapiens
MVPWCPNLKIACSASMSGWSLALTMSEFIEIIQVPEKPGIMLHHLETMHIVIMVILFRMNIPLEDIVTVMATVRPMVEIILNIQVEVLTEMHFRDMRTAGHSLRNSGWSPKDVRVCYIPENKIVKVVNIQWLSVQIQSEHNE

SEQ ID NO: 934971 - protein, 220 aa, Homo sapiens
MNKSPADSKVAGPDTSYLHSHWTISYGEMEEPQVTLEVEECNDNCKQTFNTLKEKLGSAAAVGVPKLDELFFLYVTKKQSTGLGDIAATTFLAGKANKLTLEQHLQVFDPTSREDEAAKAPALKGSMKLMGVLASIHRTEPEHSEEEEKWARDFISVNLSKIEKPIQLTSFPQLGKDHSKDIGALQQTFNAKGLTNGYTCVEVKLLLILGAESEADGCGT

SEQ ID NO: 934972 - protein, 136 aa, Homo sapiens
MSQNRITSCGRPYAVKDPMNGISGLVKGSQGSLFSFHHVRTHLGGALYKEQALNRHPICHYLDLPFASIQTYESGPSAASLLEFTGGPLQTLFTWVSAAMAAEQWILVNRKCCCLMLPLEVLSQRSTQSCEVSVHP

SEQ ID NO: 934973 - protein, 147 aa, Homo sapiens
MRYRPFLGSKNRSPVKTRLLLSVLLHKGILRGKPHLVGPRAGALSVRTADSLYLGFHWPQPGTWALADSGPSWPLRRCQKPHLVLGCPSDCGSCLSGNTGNLSSMHGHLKPQELRTQGRHPPHCFQKRMLRVSYRLSLDLSSSWVCG

SEQ ID NO: 934974 - protein, 172 aa, Homo sapiens
MCNIVDGEARVGTGAACGACVPAGVPGGHGLCGPRTRSSQPALLAPGSGELSTRASGCGGCTGSPSSASPPALRSISHRALAAFPRGRARDLQPAMPEPPTHSMSSCAARASRTSTTPCSTAPSPIDHPRAEQCERTARDWQAAPPAAPVRDPLGEASWAPESGGDVESLYI

SEQ ID NO: 934975 - protein, 138 aa, Homo sapiens
MLEGEANTSFFTWQQEKEVLSKRRKTLHKTIGSCEKSLSITRTAWRLYRKHDAGICLASGEAFTVITEGEGQASKQQNLENRLTFLCSLSPVMKGPHSWASGQERNTTKGLGSQTTQKLHETSPHLCMELLERDYGIF

SEQ ID NO: 934976 - protein, 160 aa, Homo sapiens
MTLQICSQGTNPGVYLYISKKPQTRPAQQFLVFESFYEHINQELPEPSPLSRNLFVQLAESIASSLGISSCYVCGGTNMGDQWPWEARDLMPHDNFTLVAPSPKPMLTDRSIWLLKTSIVGMFCIACWGKAFTDPNFGEFKYSLEDSIGYFGFALCKWRG

SEQ ID NO: 934977 - protein, 152 aa, Homo sapiens
MWTLRFPSEDDCLGADDPPFTFSRFGHSEFFGHFLEPEVAIHFFQRVCGFLWLSWYGPAVVLQAKVLDMGIHMLLCPCKWELQSLQPQSQEDAAVSSTSHVLACFGRHAPRHGAHPCAGLGSLAAALRHPVRQLLPGGGQLALLRLPECGAL

SEQ ID NO: 934978 - protein, 140 aa, Homo sapiens
MNGLGHFHGNMHISQVLAVAVVGQAGGQDLRPVGNVLNMNNGSSSVGITVYVGECLWGSEDVEMLVLLGLKANYNQPPLVIPREIGSGVDLQQTPADLQQRGLTVRRKTNKQKGIASTSTQRTSTQKPHQKVTTSKTKGR

SEQ ID NO: 934979 - protein, 156 aa, Homo sapiens
MGPPWAQTVAGRRPTPFLDQPCGGKNALLPLQPGNLHILPLSVLAVAVVGQAGGQDLRPVGNVLNMNNGSSSVGITVYVGECLWGSEDVEMLVLLGLKANYNQSRKAVRDCAMRNSALQPRYYAFPMVFASHRPGDSLGCLCHQGPGFQAQNWVTI

SEQ ID NO: 934980 - protein, 188 aa, Homo sapiens
MFLSPDPFKGLGGPSSNHWYCACISFNENEPKIIKIQIQQIISKPEMMNNTDDILMEQQMNPFNALVYFVVPWRCESYEVFEMWQLVERAITNRNERLGYDKRWWRPKFYYADGASRKVETTQVKVPQLGASRLQVGLDLSAMYSGVDSCNFTAEGIERRTVQGPCQLDIGTEGCEIFTNTTFSVAIL

SEQ ID NO: 934981 - protein, 164 aa, Homo sapiens
MPRKAVRAQKPLPRYERMSRRAELQGTRQKSITWSGITSRDPSLDNDHLRLVAGPPLTNHRLLGFITRLQSRQAPKSETQSVTLEEVHYISENLLEFSNLYRHKYKEYVWKWILKVWDNGGRNIKFEQTKFIDMGSLSRDSTFNAVNQRVIKYFHSLFGWLTEA

SEQ ID NO: 934982 - protein, 175 aa, Homo sapiens
MKGKTKAWLALPPPNCRAPDIKPILPSRRNAQVKAGQQCCGPLTAETRSPQLEQQRLAAVGCVAHLHFPPTKVALGFINTLGGMHMCWASLLSLWPWSGKDLACGCGSCKGLVSDLWECALRGTHSHSCSVQMKVGQVHWRPKDDKAHLAGSSEVGELWGIKSVAVLYLICSYLC

SEQ ID NO: 934983 - protein, 155 aa, Homo sapiens
MPTRALLYEFELPGSFVYTVALKLPTQASAMADAPSPTKLDHPMWISDCCCAGSQNFKPVDLSFLGSMGVVKTVIQVQYLCRSSSGSDLDGFPWVAGGIPRTLVLPRVIVVSTDMQNYDKKIRNIRGKYYPLKTNKHHRESGLRVTAFSLKTRLV

SEQ ID NO: 934984 - protein, 162 aa, Homo sapiens
MGSRIHLTKHFGCPLVEGVCSTGGKLTHQGFPDSSELVGGKTKSPGLWRLRPTIPLGAQSQGDQSFVPEPLAGAVGVLAGSPCSGSVAATLPPKSSAGLESRQLQQCQSTESPNIAKRQKEGKLSLFLNWNIRLLLLDIDALGSQACGLQDLHQWIPQFSGL

SEQ ID NO: 934985 - protein, 134 aa, Homo sapiens
MVANLMIILIMKIIAAHQTQQLRLFNTSGDATNPDRMYDLVAVVVHCGSGPNRGHYIAIVKNGDEEFTGNWSKCLSCCALAKRLAASCLCPRDLWNFEFERDDLGYLAEETSKQQGIQDVTWLFINAYSHMHSQ

SEQ ID NO: 934986 - protein, 149 aa, Homo sapiens
MLREYLNPKGLHKFSLKVFLYIVNYNKWRYNPDDSLYLCQSPSFGQSNVANCSNHVQISQMPSCNQFSCFCTLLPFTVCHFPFSVHKSSSTMSLCWSPSACSSSGGCLIRESSIAQLNFFKFNLAEVFLLTVGIRSEIQSRASNDLQER

SEQ ID NO: 934987 - protein, 157 aa, Homo sapiens
MYNRLHILLYLPKAELPCLGSHPKTIDTIFLLRQVWCQHLQENNSEVRHPLLQNPNPDYSAQASVKVKHFTGVRAVRNNLPNHLTTRWTKAQMKKQPASYHILLGESTRRSTTFYRYKGQNHLIMGTSYQYPAGQQAILPRPLLPIPRNYPSGGHCH

SEQ ID NO: 934988 - protein, 146 aa, Homo sapiens [sequence omitted]

SEQ ID NO: 934989 - protein, 237 aa, Homo sapiens
MPREEPPTSQPLGQNQCAYYKQKGHWKLEFPKQPQLGLSKAGKPELLSHPNSKDGNLHLLLEVLSQQVSKSLQLENTGGCGSRLWLGGSTLSDSYFYWEAQKSTISKASMSPYVPEWQLCQGSKWAIKLPYYSLFFRGRAVSLSSSNVSIWMFQLKIVHYNNVKKNYYRKLVSSEKWGFALKIPENVEMTIKLDLLNGFDQNAEVQAEKVSDEDEELTANWVQYKGQMDCDTALRRS

SEQ ID NO: 934990 - protein, 153 aa, Homo sapiens
MGALLDQEHSEHPAGSREMEVSGGSVTAANSSRGQRAKAQNIHVHQENYNEELAHETVETKSHNLLNTNWNPKKANGVIQSWTKGLRTSGAKGGIISSLRIKENELKYWTLSGGHSQVALGELKAMLLSKSPFLLPWPLREPLSNDGVAGERG

SEQ ID NO: 934991 - protein, 143 aa, Homo sapiens
MEVITTIKNEKSKNLDVYLVFYCIAADLALTPQDGVFLILPSSFQRQSSHISWPTPLQAHGEYCQTTADVSKCLGSSAWNGGPQNCDQYPILLWLSSYLRCKTKSSPLFSLLSSVEKKRHLLEPQVVQPGARCGVMPALPHPC

SEQ ID NO: 934992 - protein, 172 aa, Homo sapiens
MTPKNVEYSAPHCLLACTVSAERSAANLMDFTFQAPLLQVCWHLLEVYFRPCLPGYHQQRLQNSKDCCLFLPLEASSQRGTHQMPAGAVPASRQKCLSPLKLHPQPPLPPGALSQGDGCFFYKPLTGAAAFLSEMPCPERKNLERQSGYSGFAELRWALSSSNFPAALFTLI

SEQ ID NO: 934993 - protein, 137 aa, Homo sapiens
MHQSALSSLLKSGRPRNYQKEETPDTSEYLKEQTLDTPSLRTLTLTAKVCSFIPEVNKTKNPPEGINSGHNFTSFHSYQQCKSVLFSPYPHQSLFFFIMSILAEVRLYCIVVFISISLIINDAEYFYMFVGNLRIFS

SEQ ID NO: 934994 - protein, 184 aa, Homo sapiens
MHSQRDGLKWELMFKKEAEHKGLENLQADHVVEKNNPCSWEEYKLAAEICISSEESNVNHQDNGAKVSRAFRRSSWQLFPSQAWRLRREKWFCGPGIWPCYSVQPQKLVPYIQATPASPMHKRDKHAAQAITSEGESPKPWQLPHGVGPVGALKPRVEVWEPQPRFERMYGKAWMSRQKSAAGA

SEQ ID NO: 934995 - protein, 143 aa, Homo sapiens
MESSSRCWDYALPSHNPGAGGELLQLQFLLDGKDCSQGQLGDLELIVEQQGPVCSTTKADIQVFGTSVSWMSSLNFPTLPVQRSLCRWGLWEWSSLLQAQADFQEFRAPASLVQQPELPHLSCADILVQGTHSTSSQGRLLGI

SEQ ID NO: 934996 - protein, 149 aa, Homo sapiens
MKTKYFSQNILFSEFHARPCEETTKQALCEHHGCLFHLGAGGLSPKRESAKGGGLSLVLIGFGIGDKVKSNVLRNWGIATKITENVEGALELGWLSGCNQNADKDMDNKVQGDEVSDGDEEDIGNKNKGLWVEETCLVSDETFDFGLRS

SEQ ID NO: 934997 - protein, 131 aa, Homo sapiens
MVCLRLHPNIILNCSFHNPHVLWEKLGGSQRLQEIWDYVKWPNIRIIGVPEEEEKYRSLENVFGGIIEEIFPGLARDLDIQIQEAQRTPEKFIAKRLSSSVVDPDICLVQPPPGVPHPCGTVKYNLFDSPH

SEQ ID NO: 934998 - protein, 139 aa, Homo sapiens
MLKGGQKEHLPIHRSQNDTDLSPMCGLGEGLHPSFTAWAGSAAIRGLAYDPVTSQPKWQTVPNEAKGAGTFHAIGIVPSSRACGGNFCMAECQHRQSPGRKPHHGHRSGTADSHDIGIAPLSLPDVVCMLITSKSHVEM

SEQ ID NO: 934999 - protein, 142 aa, Homo sapiens
MAHVYICNKPPQQPLLLPKAPLKKICVHQNHYQFQLEAPFACDPRMVFDALKFTIMVEGNGETGTFFTGQQDRVFDMTHGEQEKAGWCNGPPGSHTGQVHATKALSHNRPVQILNGHLAGDRLRLPSCWGEGWPLSRQLTAA

SEQ ID NO: 935000 - protein, 150 aa, Homo sapiens
MNLPLQGSSLQWVQTSSFSSEKFVITDFLKPTSVNSSKSFSVQLCSIAGEQLLSFGGEKTATLAVSKAPWVWDPLSQARGIISWCAVCCDHWKSTVLGWECPDFPGTVCHSFPWLGKGNPPTPCASQVRQYPDLLWLTLDGLHPLSNESQ

SEQ ID NO: 935001 - protein, 182 aa, Homo sapiens
MWDPVHVRRDAASMHIFLCVYRYLCVPGHVGVCLCVCAYACISGWVFTLPRATVMKLVAVFHVHLPCSPLEPIGRNIRGGGCLQISITLPTSEPQEQRRQHPNLWICKCGLCKNSLSITYAHLSNKDANSTPDPMEQKRRGLHSSQAMETSKVEEVLLVNILKCVFQLVSILPICFWYSTQS

SEQ ID NO: 935002 - protein, 180 aa, Homo sapiens
MEGFQKSFLKTQRKFDSGAQLASPSGSHTGAAGGAACQSCAVRSHSSALGWSMGLGAVEQGVVLIGEARAAQEPMEWVGGSGMAGCRSRALPHGKAGKARREIKRSAGGPARLGHSVHPPQPLARVLSPPLPGASRAGRLLRVWGPPSPRPPGTPAGPQARHTAPVPARASPSTPPCKLS

SEQ ID NO: 935003 - protein, 182 aa, Homo sapiens
MFLFISRSSKMRTHGHRLNTYFLNESMNGRYWKKDSGKDFQNPIKERRTQSSLGLWEESADLPHSKGKPPSHFISLLALHPSAENYHSIKPCTHSPSPRVRQSFRYTKAGSPGIQKALCLFNAAWDRSPTTCPNCSLGDGRNIYIVIKKIVILAENGTYFNVDFAELLLFATVDSRSYFNVH

SEQ ID NO: 935004 - protein, 172 aa, Homo sapiens
MYDMWANKGCAGEEGVEMDTFGSGGLVAGPEGQLVGRGFWWEQCDRGQVGLRGCHRGRVGQRGNREDVFQMKMYHLRSSSGITFRPQIGPEPCSAGRQLRPREKWSTAAAGPGGKPLTAWGLWAILPLQCGVHRSHAHPELALAHKHRAQPWFPLVIVVATVRAMVEIILNI

SEQ ID NO: 935005 - protein, 145 aa, Homo sapiens
MDKCDHGKPEQTFLHIVLTGGRSEASCSSLQDHVVLSDAPYFQNKVITEEYLVNVTGTGGSQDRASHSTPIQWYEDYEVEACGHRHYNSGLNLFNWFSDHNFTGSNRIAEVVSQYEGSHQCEKKWACKVYGGTVEKVTEACGKAV

SEQ ID NO: 935006 - protein, 138 aa, Homo sapiens
MGLFLQSLVLAHVRMCIGESILENQNIKTSKGITFVQFLLTDFHVKKERTRAKKMMGQRKGPAILPSHHSSPCLQKWPDSESLDTNRLGHTSDHFQKGGRLVNAVFCLGMVNGEHGICTDVAPNRSPKSHCDPTKILS

SEQ ID NO: 935007 - protein, 137 aa, Homo sapiens
MKTKHLFKKMFGLSYHPKQLFSSSFCILILEKLIIAELPGSSTVRLTSLCDLPTQLLELYQQGFSLAAMHPFVQPTHGQEKTPLEHIFRAILIKKTDSSVALSLHQCKLEFAVKGGTCLCSNLEFTHFLESCKHQAR

SEQ ID NO: 935008 - protein, 182 aa, Homo sapiens
MEWALHKGRRVTYCKARHTGEGTAFPEVHCELSLGQNPNNVETQPTGDIITYLWAYELGDVSLMPVPCHREHCDRALDIVSSLTEHKRVHTGTKPYKYKERGKHLHAPQPLFKHKRNHTGGKPYKCEECGKAFKYFSDLTNHKKIQTVGKPYKCEKCDKTLSLFSQLIGHKIIHSREKVHKC

SEQ ID NO: 935009 - protein, 138 aa, Homo sapiens
MYTFDRSKGKGRVLHKSIEPYPVVEVDRHCTGTGGGGNWHWVVGIEFEELQRERFIISLAFNSAIAPLSCTLRFKDYGYGELPGIQTTRSPSSTHHLLNTSVDRSIRAEERREGEQRRREVDGGKQDSKPLKERIPER

SEQ ID NO: 935010 - protein, 162 aa, Homo sapiens
MGYCWAQNPDNMTLMTVRNTRRFYIFTKLTEAYNTNLYCINSLVVENFMGLLMMNDSTHWVLPRRWNVTSHWRHLDIEWAVHKGSIVTYCQARPTGKDTLLPEPCPKDCILTYLWTYHLGVLTMSSYSLLAQMIYVHKFTGAEKHHQFGPQICVFDSLMSGE

SEQ ID NO: 935011 - protein, 136 aa, Homo sapiens
MTREQHLLLTSIRCSAASAADTQANRVWHRPPANANSPAAEGPVRRKTNKQKGHPHENLIYEWLIRITNAEKSLKDLMELKTVARELCDECTSLSRRFDPLEERMSVMEDQMNEMKREKKFTEKIIKRNEQNLKEI

SEQ ID NO: 935012 - protein, 137 aa, Homo sapiens
MGPVHQHGICIHMPGAQNLVVVVHQHENTSPGAYQQLYFAWLPDSGCLVVRTVHHILPSRGGVQVFAIVNSATINLSLEVQEECKLIPGKPTLPAPKSLRLLESPFPERADTCVFSPAAVLVTFNWPTISWYLAPEF

SEQ ID NO: 935013 - protein, 155 aa, Homo sapiens
MVVQRGQKIEQNNNPVRLVISVVYKDTLKKIVQQEISCCLAHVHYAKAIIGRHTAPEDKVSLCQKPPTRQSNNRTEGAWGKCQLMAEAHKGLLDIVKHLKAQGLVRKYSSPCNTPILGAQKLNDIKTVVRVPCTSLAFADYGSLNTARWPDHSRL

SEQ ID NO: 935014 - protein, 171 aa, Homo sapiens
MQLALWDLEAGCIGPEGGATLRLFLLLKFTFIFCFSGQWKIIFPQTRVAQGKKAARWTLLGVGTGVWDPKGTWWGGASCGSSVTGGRWGSEASMGTGWGSRDGGRASKDGSKSKSRDFAFIISENPADAKNAAKDMNGKVKKYSSFSLQIKEVTRVRPTFLIFLCLLENSP

SEQ ID NO: 935015 - protein, 139 aa, Homo sapiens
MSWLRVFQSTYLESSSTCRANKSPLEKQDSYLIYTVIVQVYLWKERDQECRLGSAKLCGSHREKCKVCINTEPSNEISSPRETVGSNFAGFAYQKKLFQLNTPWSPDVFKGHILATDSYRSVSGTLGAHTIASALVGHV

SEQ ID NO: 935016 - protein, 151 aa, Homo sapiens
MYKSPDFTLRLFSGKESQPQKCDESWFKCYQITCESKPSRATVQDSVSKQKQRQKNKEEGGEEEEEEEEEEEEEEEEEEEEEEEEEVGEGEGEGEGEEEGEGGGEEEEEEEEEEEEEEEEEEEEEEEEEEEEEEERRRRRSLNLGAGLCNM

SEQ ID NO: 935017 - protein, 160 aa, Homo sapiens
MPAVFFCESIVSDGFLLGYMALCSLFFCESLICGEYINGPGPPSVSVSSNKVSVDLPFPSWEIRSAPPQHCGTYFQACHRHRQPLTHCLHIICSSGRPVLFYQSQNPEKHTRLHSNPQRTLYLYIASFGNGVRRVVSSDHLTVSKHVLIQWEQTTKTAKT

SEQ ID NO: 935018 - protein, 134 aa, Homo sapiens
MRHSIDYQAKARHGSLLLILQESCSTPIKVVEQKLPWSSSVNWETFNMEDTEPDQGNPRLTRNMEDRKRRSKCGGHIPSCIYQSHFQVEPSRKALKLGVCQDGPSLHIKYSLHVGVLPPEHQAIVWTTCVIKDM

SEQ ID NO: 935019 - protein, 137 aa, Homo sapiens
MVCYLPTANARQGPTVPPFIQAYGAAPFEDIQGDFTEMLQCRGDCLWTKDWNVAPLGPRWKGPQIIILTTPMAGECVALGINGARLDPPVNILVQGEVYKHSPEQVCQTFYDELNVPVPKIPGKTRNLFLQLAEHTA

SEQ ID NO: 935020 - protein, 279 aa, Homo sapiens
MRVLLGRQLPQWNVSPEQCMAGPRRGSRQWLNTGKEMAKGFNGDYGVTMTPGKCRTYFEIDWSKLEVGWPSEGNLERSLVSKVWHKVTGKSGHSDQFPYIATWLQLVLDPPQWLRGQAAAVLVAKGQIAKEGSYSTRRGKSTPEVLFDPTSEDPLQEMEPVIPVVPSPYQGKMLPTLEPTVLVPPQDKHIPRPPGVDKRGGEASRETPTLAARLRPKTGIQMPLREQWYTGIDEDGHMVERYVFVYQPFTSANLLNWKDNTPSYTEKLQALIYLLQTII

SEQ ID NO: 935021 - protein, 141 aa, Homo sapiens
MVEADCPGKLSLVASIEKPVKKMLKEVFAKHGPLLEDDDGYTLDLNMSSSRGAIPVKRGPSSRSGGLPPKKSAPSAMARSNSWMGGQVIVMATMTPVVEIILNVHVEVLIDMYFRDKAEDPAAFCSVCVPGYLRLGSGDDS

SEQ ID NO: 935022 - protein, 156 aa, Homo sapiens
MSSITSTFSSHEGTSTLCALAGLSCRASKFNGVPPLEKKTHASALLADMFLRRCDSNLISDNGAHYCKYHTYRSKVGGQGRRRRMRWKRRRRRRRRRRRRRRRRRRRKRKKEGRRKEGRKEEEEEEEEEEQEEEKEENSKLLSLYICNTRSETQYS

SEQ ID NO: 935023 - protein, 145 aa, Homo sapiens
MTRTGPRGTGPKGKARSEKGHSLSHGPRRDKLLWFREDRKCSRPVSWQAPAYVITLTEPQVHLTIEDQEIDFLLDTGTAFSVLIFCPGRLSSRSVTIQGILGQPVTRPESQKGLQDIAKHLKAQSSLSKEMQQSLQHPNSRSTRK

SEQ ID NO: 935024 - protein, 137 aa, Homo sapiens
MYQLELKEDHIIRTNGQIEDERKNKGKAVSLQVELLAINVKKEELNQSVNCMKEFKMTLTVGAFCLLPGSQLLLTDAQIILDLGAVINNKKQTTTKKTQDNSSISDGISKMMVLNNLKSAFIWCLRPVRRECIAAPP

SEQ ID NO: 935025 - protein, 148 aa, Homo sapiens
MTGLGPRQRSLPLWPAPQLIHRGYFQSTADVHLNPKDSQSPFDEYYQAWNLPFRAVGSPLAQVMSINIDEESLGLDSGTPRVVVLYYYSSSGTQGSCSHDLIISKRPHFLTLGIRFQDFWGDTKFMPNQTVRMTKVEKYIRPYLYTYV

SEQ ID NO: 935026 - protein, 134 aa, Homo sapiens
MSENTRLATILEVARGHFGSDPPPSWELWEQGPPGNTLTPCLTYRAYWCKGCAPKALDSPTLVNFQVQPPQLLLTGSAAFPEAQCKLPAYQPFWDLEDAGPLLTSLLGNASVGTPGPPPLRVPSVGHQIQTENM

SEQ ID NO: 935027 - protein, 151 aa, Homo sapiens
MGHITVFQPMMDLICKGELERCSGRSTALFRASRQGRLSLLKLRPQPPLTPGALSQGDGSFIYKPLTGAAAFLSEMPCPERRNLERQSGYSSFAELWLPPLSSNFQAALITLCVPHLEIQKSPSSALILSEAADRRCSYSAILPAQKDVSY

SEQ ID NO: 935028 - protein, 193 aa, Homo sapiens
MARADAEAEEVLRASLLQVCWSLLEFHSRPCLPGYHQWQLQNSKDCCLFLPLEASSQRATCQMPASTLLYEVSVDPCWVVSPSQEAWRQESLSLLKLHPQPPLPPDALSQGDVSFIYKALTGAAAFLSEIPCPERRNLERQCDYSSFVELQLEVPCPERWNLERQSGYSSFAELQRAPLSLTCLAALVTLQKR

SEQ ID NO: 935029 - protein, 138 aa, Homo sapiens
MAYQWPWKFSYSHSLQMGTGWVHWETVTVDLEEAVPVHHLETGKPSADFEVDPYSSARSADQRPGVKRKSNLLVNGKVPNGKLREETQGLLESLQEEAQMQKREAARTLKYLGSGHKVHKVNLKYLVIPETIEMIKNH

SEQ ID NO: 935030 - protein, 166 aa, Homo sapiens
MLQPWLNGAKVQLRLWLQKVKDPHLGSFNMVLSLQVHRSQLIEVWEPPPRFQRMYAKAWISRQKFAAKVEPSWRTSARTVQKENVGLEPPNRVPTGSLPSGAAKRGPPSSRPQNGRSSVSLHHVPRKAIDTQCQPVKAAKRGDVSCKATEAELPKAMASCISVIWL

SEQ ID NO: 935031 - protein, 166 aa, Homo sapiens
MASTTLSNYAYIMFLRIHSANKPNRYLHLFQLKHYADAIGAHCKVSMELPFWGLEDCGLLLTAPLSNYQPQLTLNQEKAGPTLLQDWGMSALHILLLASLSQCPCLATPQECVDSVASTAQPGCCASPNYLPCSLGTLWIPQHTWYLTLLVQRIELRASPGTLGLQ

SEQ ID NO: 935032 - protein, 128 aa, Homo sapiens
MIIPTISALSLTKAQRFFLHTMHPLPSYERVVLAIPNYLSYLVNASFSDKKLKPGTVITQRIFGSYDDVYHHENTQKYKSSNKKEENKGLTFYHDRNPTDHNDNLVTAFLKHRGSESSIPLSETQGKS

SEQ ID NO: 935033 - protein, 138 aa, Homo sapiens
MIVRLPQPHGTVSPIKSLSFVNCLVSGTGASPSGHHHHQHTGNLPGNHYCSLNIPRALQSACGECRQAWDSLYSEIITPESQGMIIHTEEPVKGVRGNSHNDRGKQGERSIIEIEKGQSHEDSGPQCKISKRDEIPTE

SEQ ID NO: 935034 - protein, 149 aa, Homo sapiens
MPSKRQVLKSGIQRPHLCAIPLIENPFRCSSETGKPGEAQQTLTVEEICLGLSFHGELSPLSLSLSQLGTLSRQRLSTSQLQVTDWSYTQPDHAIEKKNPFLWGEIQAGHRICISNEKLNIISQANGKNVSRVCQRPPCQPSPIKGPEA

SEQ ID NO: 935035 - protein, 267 aa, Homo sapiens
MWESLELLRDLINGFDQNADNNMDNKVQAEVVLERDGKLVGNWSKGHCCYAKRLVAFCSCPRDLWNIEFVRPDLGYLAKEISKQQRIQEEAENKSLENLQPDHGIGKKIPFSEEKFKPTAEICISNEELDVNHQDNGVNVSRACQRPSQQPLPSQTPRPRKEKWFPGPGPGTHYSIQPWDLVPYIPATPGMAIRGQRTAQAIASESVRPNPWQLSHGVGPVGAYKSRIEVKKPLPRFQMKGFSHNSESWLKSSNGKLSFQEPHNGNI

SEQ ID NO: 935036 - protein, 149 aa, Homo sapiens
MSSKISLKESKRCDNRNTQRKKWEKDANIAGFVDGGKTQKPRNPGIIHQCRSYDAETLGTQGCPASRHYQAGASVAASITRDAQARLVLSNGQDCSTEFRFDSSPSAKVFYGNKLSLITGSGLALLSEKITKLENTDKILSADVGKHVA

SEQ ID NO: 935037 - protein, 204 aa, Homo sapiens
MQSGTGAHLKAETSGECSRVAQRRPGNGAPHFSDGGAARERRSLLPRRWRSGAEALVKCGRQAEAHLTSQAGPPQGRGASHFPGRTATGQRRSSLPRRCGSQAEALLTSQTVGHPGRGASHVPVGAAAGQRVTSLPRWWDGRADVLPTSQTVGQPGRGAPHFPDDGAAGQRGSSLPRWWGVWAEALLTSQMDATIAIEEEEPEG

SEQ ID NO: 935038 - protein, 217 aa, Homo sapiens
MRSQMLIPKTTGKMSPGHVTVLRDSLSHYRPVGLGGKSGFIGWAQGPHAVCSLWTWYPASQPLQPWLKGANIELGLWLQKVQTPSLGSFHLVLSLVPTVAPPSGAVSKGPQSSRTQNCRSTDSLHSVAGKAAYTQHQPMKTARREAVPCKATGVELPKTMGTHLLHARHGIKRDNFGALRFDCPGGFQTFMGPVAPLFWPISPVWKGCIYPMPVPPL

SEQ ID NO: 935039 - protein, 139 aa, Homo sapiens
MCLLPLHTSAMTAKFENKQTQTPLLCFLSGSSGILQKGHLSNQQVSPCAQLCPKLNEFTFCVEAKTAVGEAGFSASKDALTFISTPTSIWPHFISLPQPQSKAQNLGRQSQRRSYNHGYINVAMGEKAGMTPNILIKEI

SEQ ID NO: 935040 - protein, 148 aa, Homo sapiens
MEAKVIWTKPPVLVHFHAAEEDIPETGNKRRFNWTDSSTWLWRPQNHGIRIKALLTWQCQERMRKNLRQKPLKNPSDPKDSSQGLGTTHEKSLIADSLPVDLDSTGLYLHSKGETEANPFLFPSSRNFGQSSLGAEQNKEANRKDLCP

SEQ ID NO: 935041 - protein, 148 aa, Homo sapiens
MKPPEEGTEISDEPLNSLCSGLPVWGVGSCWVNEDGGGDQACQGSVVSSKRDVAGLGEPFWEDADLERPQGSPIMKCGYYSSLMGLSPPAHDGLSLFTAVSSLSLGFSMCVLTPGPTGLSTPSPGLLPWPLLCSLSEGLTPLHSAAEY

SEQ ID NO: 935042 - protein, 170 aa, Homo sapiens
MCSLWVNGLPHSGCQLGHRAHMPTFPKVTQPACAWMQRYLALALRASQSRLTPGGWDCRPALVGAAQGDAHRLALIGRRGRLAVLARLQVPFECSPLGGAWKPGACALRPAHPQATERAAQGSCAMGRAAQAVVYGSPEKDTVFRVHRLHSARGAEGGGNLEAGDSAGVG

SEQ ID NO: 935043 - protein, 151 aa, Homo sapiens
MINLPKKLMYNWFLQQCRDKFKWKWHRNGEQRRNQIAFQGKNYFTQAKRTTSREEVNKFYCEKPRGHRTIVNHSLNQTTLQQKAKEKQIHGFTGQLAQAHAGELPFIKPSDLMRLIQHHKNSTGKIYSHDSITSYWVPPMTHGDYGSYNSR

SEQ ID NO: 935044 - protein, 138 aa, Homo sapiens
MSGHDLNGKLKKEGLDLFESPGETAGVPKRQTANILSILQKLIPQRTRSSMKRTVTLGNAFGGCLGNCQGQSTVRSVHTDAPTFFSGLNRDEETAEFLRSCIIPEDLAFSRGHPYGTGRTQTIKATLGQRKCKQSTNH

SEQ ID NO: 935045 - protein, 138 aa, Homo sapiens
MPVHQLLQTAGEVMHVQGSCDAGTIRCMLSSLANFKNFSVELGSHYVALGSGYPPTSTSQSAGMTGVSYHAWDSCFFLKLYFNILFMIKKKRRKESWMQSQTRKPIGIRMLLFLGNFQGNCWLQMLHLPYISSDFMWI

SEQ ID NO: 935046 - protein, 50 aa, Homo sapiens
  misc_feature (15)..(15): Xaa can be any naturally occurring amino acid
  misc_feature (41)..(41): Xaa can be any naturally occurring amino acid
MVHITGLCVDTPKYXPGATVALLDGKSPRGEIEITTTFGSXENPIPGGNW

SEQ ID NO: 935047 - protein, 62 aa, Homo sapiens
DIPECRRVAALYDILVCRRVAALYDIPRYVTFRCAGVRPRYMTFRLYDIPRYVTFRCAGVGR

SEQ ID NO: 935048 - protein, 88 aa, Homo sapiens
  misc_feature (2)..(2): Xaa can be any naturally occurring amino acid
  misc_feature (28)..(28): Xaa can be any naturally occurring amino acid
EXIPPSGALKACGMNNSSSSGPVPRYKXCTEQQDEQRQEESWLEDTYPLKIKREVALVLHSSHVRLGQFLFTEDYKTPAPSSLGLMPF

SEQ ID NO: 935049 - protein, 41 aa, Homo sapiens
  misc_feature (20)..(20): Xaa can be any naturally occurring amino acid
  misc_feature (22)..(22): Xaa can be any naturally occurring amino acid
PGVGTQRCWNFVACLPVRAXIXRPQTIIPNKQPKAMGPTPP

SEQ ID NO: 935050 - protein, 128 aa, Homo sapiens
RGAWLSPLSAMACARPLISVYTEKGEAAGKNVTLPAVFKAPIRPDIVNFVHTNWRKNNREPYAVSQLAGHQTSAESWGTGRAVARIPRVRGGGTHRSGQGAFGNMSRGGRMYAPTKTWRRWHRRVNKT

SEQ ID NO: 935051 - protein, 74 aa, Homo sapiens
  misc_feature (8)..(8): Xaa can be any naturally occurring amino acid
  misc_feature (33)..(33): Xaa can be any naturally occurring amino acid
  misc_feature (63)..(63): Xaa can be any naturally occurring amino acid
GLRNSLKXKGGTQGAIAIVEAVKALSSGSPCYXLAANKETCGENVEVKRICCIKHMIYSCDGXAFIWNMFCYLR

SEQ ID NO: 935052 - protein, 131 aa, Homo sapiens
  misc_feature (42)..(42): Xaa can be any naturally occurring amino acid
  misc_feature (59)..(59): Xaa can be any naturally occurring amino acid
LSVPELQETMEKLTWLASERRMSQEGESEEENSQEENSEPEXEEEEEAEGMESLQKEDXMTDEAVGDSAEKPPTFASPETAPEVETSRTPPGESIKAAGKGRNNHRARNKRGKSGSGQQGHLPSCCLLVID

SEQ ID NO: 935053 - protein, 159 aa, Homo sapiens
  misc_feature (5)..(5): Xaa can be any naturally occurring amino acid
  misc_feature (20)..(21): Xaa can be any naturally occurring amino acid
  misc_feature (54)..(54): Xaa can be any naturally occurring amino acid
  misc_feature (64)..(64): Xaa can be any naturally occurring amino acid
  misc_feature (79)..(79): Xaa can be any naturally occurring amino acid
  misc_feature (109)..(109): Xaa can be any naturally occurring amino acid
  misc_feature (120)..(120): Xaa can be any naturally occurring amino acid
EVIRXFQDGTLNLLVATSVXXEGLDIPHCNVVVRYGLLTNEISMAPGQGVAGRXQSVYAFVATXGSRELKRDWFNEALXTLMEQAVAAVDKWTRPSTKAKIRDLQQAAXDQAGGPGSHSXMNQRHSFPVEHVQLLCINCMVAVGMASDLRKVEGTTMSM

SEQ ID NO: 935054 - protein, 105 aa, Homo sapiens
  misc_feature (42)..(42): Xaa can be any naturally occurring amino acid
  misc_feature (50)..(50): Xaa can be any naturally occurring amino acid
  misc_feature (101)..(101): Xaa can be any naturally occurring amino acid
  misc_feature (104)..(104): Xaa can be any naturally occurring amino acid
LQEHTCVLHSISGLGGAPWDAGRAWRVPPVTLTPTIPRARMXSESLFKDXEAAACYHHPGLPSPGSLAEVLILNSDCSATQGAEPEASPTRSSSDVGLPEXPPXS

SEQ ID NO: 935055 - protein, 87 aa, Homo sapiens
  misc_feature (24)..(24): Xaa can be any naturally occurring amino acid
  misc_feature (29)..(29): Xaa can be any naturally occurring amino acid
  misc_feature (43)..(43): Xaa can be any naturally occurring amino acid
  misc_feature (46)..(46): Xaa can be any naturally occurring amino acid
  misc_feature (76)..(76): Xaa can be any naturally occurring amino acid
GTLAAEIRALREAYIRDGGRDPVXWARYXVCRWRRLHWSCSGXSRXRLPPSSSVSLVCELQVWQGLAWAEGTTAKXVGSHLDYLTKI

SEQ ID NO: 935056 - protein, 150 aa, Homo sapiens
  misc_feature (14)..(14): Xaa can be any naturally occurring amino acid
  misc_feature (18)..(18): Xaa can be any naturally occurring amino acid
  misc_feature (23)..(23): Xaa can be any naturally occurring amino acid
  misc_feature (91)..(91): Xaa can be any naturally occurring amino acid
  misc_feature (100)..(100): Xaa can be any naturally occurring amino acid
KGRTIFSPHFGKVXVIVXAMCPXDRLERRGTTGESVREPAGEKKKQQFNSRRPPVPACSGCSSESAAALHFSPAKPPLLLLPPSSLVVATXVLQAPGFIXSVGGAPTWIPQSFGPNGVWEEKTTNRFNRLGPILGSTPEGKKNWLGRGTI

SEQ ID NO: 935057 - protein, 145 aa, Homo sapiens
  misc_feature (9)..(9): Xaa can be any naturally occurring amino acid
  misc_feature (127)..(127): Xaa can be any naturally occurring amino acid
SNEGPFSKXPPKNSFNLPRKIRPWHGCLKIRGFVSFPNASKFPCKTCCSGKNQASDCRVHFQPPVDTSEGGLQQQGPSFLGREERGPGVPFQRGQPFEVLIIASDDGFKAVVGDAQYHHFRHRLPLXVRLVEVGGDVQLDSVRIF

SEQ ID NO: 935058 - protein, 110 aa, Homo sapiens
  misc_feature (2)..(2): Xaa can be any naturally occurring amino acid
  misc_feature (19)..(19): Xaa can be any naturally occurring amino acid
  misc_feature (83)..(83): Xaa can be any naturally occurring amino acid
  misc_feature (91)..(91): Xaa can be any naturally occurring amino acid
MXKSFLVSKETPRNESKLXDAQKYKLPEVMRPYYSLGVQYRRSSLFRQLCCANGGEENFGSSQDPGSAGAGPVPARRINRQLXLENDNFQXGPHAGFPQLGKRLPQFDDD

SEQ ID NO: 935059 - protein, 61 aa, Homo sapiens
  misc_feature (55)..(55): Xaa can be any naturally occurring amino acid
GSGNRSGNATSSAARRLGLQALGCSAGLVCSGATTAHGSLSHPDVSDLVPTSASXSSGSRI

SEQ ID NO: 935060 - protein, 88 aa, Homo sapiens
  misc_feature (2)..(2): Xaa can be any naturally occurring amino acid
  misc_feature (28)..(28): Xaa can be any naturally occurring amino acid
  misc_feature (42)..(42): Xaa can be any naturally occurring amino acid
EXGVVGQSPEELGPAQAHRAGHTQRPPXSHPWGHALMPGAGXKLHVWCLSVFVFQEMIQIAAWILKFTVTVSVHVWDPVSFLHQFGKN

SEQ ID NO: 935061 - protein, 112 aa, Homo sapiens
  misc_feature (9)..(9): Xaa can be any naturally occurring amino acid
  misc_feature (12)..(12): Xaa can be any naturally occurring amino acid
  misc_feature (25)..(25): Xaa can be any naturally occurring amino acid
  misc_feature (27)..(27): Xaa can be any naturally occurring amino acid
  misc_feature (80)..(80): Xaa can be any naturally occurring amino acid
  misc_feature (89)..(89): Xaa can be any naturally occurring amino acid
  misc_feature (110)..(110): Xaa can be any naturally occurring amino acid
VRRQVERQXYGXFTCEGCKSFFKRXVXRNLIYTCRANRNCPIDQHHRNQCQYCRLKKCLKVGMRREAVQRGRMRRTQPTXGQFALTNGXPLNCHSYLSGYISLLLRADPXAH

SEQ ID NO: 935062 - protein, 75 aa, Homo sapiens
  misc_feature (57)..(57): Xaa can be any naturally occurring amino acid
  misc_feature (67)..(68): Xaa can be any naturally occurring amino acid
RAVSTPRSMPGASQIPALPPVGRTLSGLLESLIPELDSWMTFLDLLWAREETTSLKXTQRSHYIAQXXLELLGSN

SEQ ID NO: 935063 - protein, 62 aa, Homo sapiens
  misc_feature (16)..(16): Xaa can be any naturally occurring amino acid
  misc_feature (32)..(32): Xaa can be any naturally occurring amino acid
  misc_feature (48)..(48): Xaa can be any naturally occurring amino acid
  misc_feature (54)..(54): Xaa can be any naturally occurring amino acid
GISSQSPVSRLSPRRXAGPSCHLSALFLSLPXFPNGSGRSGIAEPGTXRALGTXKCPWAIPQ

SEQ ID NO: 935064 - protein, 85 aa, Homo sapiens
  misc_feature (3)..(3): Xaa can be any naturally occurring amino acid
  misc_feature (8)..(8): Xaa can be any naturally occurring amino acid
  misc_feature (25)..(25): Xaa can be any naturally occurring amino acid
  misc_feature (36)..(36): Xaa can be any naturally occurring amino acid
  misc_feature (52)..(53): Xaa can be any naturally occurring amino acid
  misc_feature (61)..(61): Xaa can be any naturally occurring amino acid
  misc_feature (72)..(72): Xaa can be any naturally occurring amino acid
LSXGDILXVILEGEDGWWTVERNGXVVRPWFLPGEXLRKARSPWTCLPVEPXXPQHCPTLXGPEPSVPQPDXEPVVSQGIKECVL

SEQ ID NO: 935065 - protein, 84 aa, Homo sapiens
  misc_feature (5)..(5): Xaa can be any naturally occurring amino acid
  misc_feature (32)..(32): Xaa can be any naturally occurring amino acid
  misc_feature (48)..(48): Xaa can be any naturally occurring amino acid
  misc_feature (60)..(60): Xaa can be any naturally occurring amino acid
RHRMXFGAGAPGRFLVGRWRGRSFCKARDGGXAQAALFRALRSSISLXWIPPLGPGCPAXPEHPPALPSQSHAEAEVARGRPRL

SEQ ID NO: 935066 - protein, 84 aa, Homo sapiens
  misc_feature (12)..(12): Xaa can be any naturally occurring amino acid
  misc_feature (37)..(37): Xaa can be any naturally occurring amino acid
  misc_feature (47)..(48): Xaa can be any naturally occurring amino acid
  misc_feature (51)..(51): Xaa can be any naturally occurring amino acid
ANSSLLSSLMNXMSQGNPGLGSLLNIKAEQRGAPLRXLALPRQGVEXXGSXEVGRAWKVYLRRFGTKDFCDGQCDFLHKAHFHL

SEQ ID NO: 935067 - protein, 60 aa, Homo sapiens
  misc_feature (37)..(37): Xaa can be any naturally occurring amino acid
  misc_feature (40)..(40): Xaa can be any naturally occurring amino acid
MSPPIQATLPENATHPARVLSGKIFVLLTLAFLPWSXGLXKESTLGQGGRGAQATGSPGG

SEQ ID NO: 935068 - protein, 136 aa, Homo sapiens
  misc_feature (13)..(13): Xaa can be any naturally occurring amino acid
  misc_feature (27)..(27): Xaa can be any naturally occurring amino acid
  misc_feature (85)..(86): Xaa can be any naturally occurring amino acid
  misc_feature (133)..(133): Xaa can be any naturally occurring amino acid
QGLANPVTFKTFXWLRKRPAWARSREXALVFHSCATFLNDSPGKTDLAWGVQAGPGSPDGLLAGMDPLVVEEGRALTEAAATLRXXRRLLARVNSPVAEQHWPLAKPCHSPRSGRPLARVQELVLGEVGAVAXQRG

SEQ ID NO: 935069 - protein, 74 aa, Homo sapiens
  misc_feature (19)..(19): Xaa can be any naturally occurring amino acid
  misc_feature (22)..(22): Xaa can be any naturally occurring amino acid
  misc_feature (32)..(32): Xaa can be any naturally occurring amino acid
  misc_feature (46)..(46): Xaa can be any naturally occurring amino acid
CLLVTLAAHLPAEFTLGAXLPXKFLASVSTVXPPNTVKLDLGAMLXSLASPQPLLPFLHPYPRGLLIKSEWAAK

SEQ ID NO: 935070 - protein, 77 aa, Homo sapiens
  misc_feature (55)..(55): Xaa can be any naturally occurring amino acid
  misc_feature (58)..(59): Xaa can be any naturally occurring amino acid
LGGPGQLQAPKPLPAGDPGAHLPAEFTLGDASLDKFLLSVSTVLPPNTVKLDLGXMLXXLASPQPLLPFLHPYPRGL

SEQ ID NO: 935071 - protein, 90 aa, Homo sapiens
  misc_feature (48)..(48): Xaa can be any naturally occurring amino acid
  misc_feature (53)..(53): Xaa can be any naturally occurring amino acid
  misc_feature (58)..(58): Xaa can be any naturally occurring amino acid
MRLFVSDGVPGCLPVLADSRACPGLCFEVLISTVGPDDCVVPFLTRPXVPVLXLDCGXYLFSTSAICRYFFLFSGWELDDLSFLWLVWDA

SEQ ID NO: 935072 - protein, 102 aa, Homo sapiens
  misc_feature (6)..(6): Xaa can be any naturally occurring amino acid
  misc_feature (60)..(60): Xaa can be any naturally occurring amino acid
  misc_feature (77)..(77): Xaa can be any naturally occurring amino acid
MGYHYXAQAGLKLLDSSYLSALASQSARITGMSHCAQLVAYFLSDLMVTSVLRGHFLGYXGGPSVIKRLYNLCNTDXANLSSVQYHHFHFRYYLQPEKTKAY

SEQ ID NO: 935073 - protein, 114 aa, Homo sapiens
MDKANYRNNCKNEKIRPCSSSNLERVSPDSLFGDWFSFFRGFKTLIAVVLAVLGSCLILLCLLPLLARSIQSAIEAIVARQTTTQLTALHKYQPLPKEENLSLDAELSNSEAFY

SEQ ID NO: 935074 - protein, 160 aa, Homo sapiens
  misc_feature (10)..(10): Xaa can be any naturally occurring amino acid
  misc_feature (29)..(29): Xaa can be any naturally occurring amino acid
  misc_feature (64)..(64): Xaa can be any naturally occurring amino acid
  misc_feature (72)..(72): Xaa can be any naturally occurring amino acid
  misc_feature (129)..(129): Xaa can be any naturally occurring amino acid
  misc_feature (153)..(153): Xaa can be any naturally occurring amino acid
  misc_feature (156)..(156): Xaa can be any naturally occurring amino acid
IVPYSSNKDXHPPAHCDSHHEGPQPSLSXTTAPPTVSDIVLLLVGQESLLVVEGLATDGTAEGXVPDVALAXGDEVGLLAEAAVAVGTGVGRSPVWMRRCDTRLDFWLKLCRSRGRREASRRCGMPVRXQVGFVAEALPQSGHTKGRSGAWIXYAXQMAA

SEQ ID NO: 935075 - protein, 109 aa, Homo sapiens
  misc_feature (8)..(9): Xaa can be any naturally occurring amino acid
  misc_feature (27)..(28): Xaa can be any naturally occurring amino acid
  misc_feature (41)..(41): Xaa can be any naturally occurring amino acid
  misc_feature (62)..(62): Xaa can be any naturally occurring amino acid
  misc_feature (64)..(64): Xaa can be any naturally occurring amino acid
FRTRAHGXXSRAACLSSFWRPRSPRWXXTPILGFARFAAEXLPDLEGRWLEQRVVCVLSPLXRXGDPKVRGSEEVTRGASRPWPCPHSPSLPGVSSLSVTMSAAWIPAL

SEQ ID NO: 935076 - protein, 66 aa, Homo sapiens
  misc_feature (13)..(13): Xaa can be any naturally occurring amino acid
  misc_feature (26)..(26): Xaa can be any naturally occurring amino acid
QVCVRWCCRSLRXSRKPFRTRRRGRXLAAVVRLVCRSPATRTKPCRSRDRRVPCARVDLQVLGQVG

SEQ ID NO: 935077 - protein, 55 aa, Homo sapiens
SRAPEYMSSRASVCLLWDMYLKNRVRYIWCASEYSPFSTGAQLALHTLAQHAVAA

SEQ ID NO: 935078 - protein, 125 aa, Homo sapiens
  misc_feature (19)..(19): Xaa can be any naturally occurring amino acid
  misc_feature (61)..(61): Xaa can be any naturally occurring amino acid
  misc_feature (63)..(63): Xaa can be any naturally occurring amino acid
  misc_feature (74)..(74): Xaa can be any naturally occurring amino acid
  misc_feature (83)..(84): Xaa can be any naturally occurring amino acid
  misc_feature (102)..(102): Xaa can be any naturally occurring amino acid
RSKSEWKDLGENLRGTGLXGASAQATQTGAGCYSESANPSRCRIPSPPPWPAYKLVLIRHXRXAWNLENQLQAXVRRRPEPGXXEEANAGGQALRDAGYEFXICFTSVQKRADSDPLGQVAKMPI

SEQ ID NO: 935079 - protein, 80 aa, Homo sapiens
  misc_feature (24)..(24): Xaa can be any naturally occurring amino acid
  misc_feature (75)..(75): Xaa can be any naturally occurring amino acid
GLRQPLRQRNRSAAPGWAAGSRLXAGLVCSGATTAHGSLSHPDVSDLVPTSASRVVDLGSGFQHVAALGLPLLPXCVGEA

SEQ ID NO: 935080 - protein, 63 aa, Homo sapiens
  misc_feature (28)..(29): Xaa can be any naturally occurring amino acid
  misc_feature (32)..(32): Xaa can be any naturally occurring amino acid
MAAPRRSLRRRKTGYSDPEPESPPAPGXXPQXISGPSPHGHLLADPDRAPEGPSFVYFVAFLC

SEQ ID NO: 935081 - protein, 51 aa, Homo sapiens
  misc_feature (5)..(5): Xaa can be any naturally occurring amino acid
DVNFXSLPKKRLNINYIANMSKVFKKTSSNGKLSIYLGKRDFVDHVDTVEP

SEQ ID NO: 935082 - protein, 30 aa, Homo sapiens
PFYESVISNPFVAESEGTYDTYQACSQWKA

SEQ ID NO: 935083 - protein, 86 aa, Homo sapiens
  misc_feature (7)..(7): Xaa can be any naturally occurring amino acid
  misc_feature (46)..(46): Xaa can be any naturally occurring amino acid
  misc_feature (55)..(55): Xaa can be any naturally occurring amino acid
SRKRDPXAPVPHLGGRQRAPTRPDLRASSLTARARSPAVTPRQDPXSLAPGRCGXGAGLRPSGLRETEPGRAQIRALTALPLPGDV

SEQ ID NO: 935084 - protein, 165 aa, Homo sapiens
  misc_feature (57)..(58): Xaa can be any naturally occurring amino acid
  misc_feature (60)..(60): Xaa can be any naturally occurring amino acid
  misc_feature (114)..(115): Xaa can be any naturally occurring amino acid
YQSEVGPKLGVTKSTSPPVLSKVSSGRDRQEVWMHFSVLDKILSTFPFPIGCSHQDXXSXVSGSRRAIRPPPTREAAARRMGDHFGYPNKRSKDGVFQGMAAKFAIIPFEEWPXXFCSLGWVGIQLPLVDHIQEAFQGCNAWSHRTGTASRFIADSLLPKNRKKQ

SEQ ID NO: 935085 - protein, 116 aa, Homo sapiens
KTISKYLYILNIRKGDSKNTAFGQGAGCHARNPSTLGGQGGRITRGQEFKTSPTNMEKPRLYQRHKTSRLRWRKPAIPATREAEAEESPEPGSGGRGEPRPHHCNAAWATRAKPRP

SEQ ID NO: 935086 - protein, 38 aa, Homo sapiens
MAEPKQERVARAKHQRSETVRGYDWGLDISLVTLLRSF

SEQ ID NO: 935087 - protein, 88 aa, Homo sapiens
  misc_feature (2)..(2): Xaa can be any naturally occurring amino acid
  misc_feature (4)..(4): Xaa can be any naturally occurring amino acid
  misc_feature (16)..(16): Xaa can be any naturally occurring amino acid
  misc_feature (57)..(57): Xaa can be any naturally occurring amino acid
QXPXKRCILTLTQGQXRLQRRIKGPKSFSSEGIKDFFSMKPEWENLNQSNVRRMHTXVRLNEVIVKKSRDAKLVLLNMPGPPRNRNGD

SEQ ID NO: 935088 - protein, 72 aa, Homo sapiens
SHYGAAEPGFEPSRSPDPDWSTRGPAMVPWVLMGKAVSSPEMNQFRDHSLERVRANEVSIQLCWTPSNTKLF

SEQ ID NO: 935089 - protein, 65 aa, Homo sapiens
  misc_feature (14)..(14): Xaa can be any naturally occurring amino acid
  misc_feature (62)..(62): Xaa can be any naturally occurring amino acid
  misc_feature (64)..(64): Xaa can be any naturally occurring amino acid
SAQGLEKGGGGRRXVERGSGVPVEIRGGRQIRWLPSPLLCIGLKTTTNISHERSKSQQYQPXHXQ

SEQ ID NO: 935090 - protein, 96 aa, Homo sapiens
  misc_feature (58)..(59): Xaa can be any naturally occurring amino acid
  misc_feature (62)..(62): Xaa can be any naturally occurring amino acid
  misc_feature (64)..(65): Xaa can be any naturally occurring amino acid
PVAPEAILGWLWLFLSQGLKKLLPDLGVRARQAAGGGAGGAAWKVLQVLALLCRASPXXETXTXXIAHPTLEDQPQRVLLEPAVCGDNGGAFVRDC

SEQ ID NO: 935091 - protein, 93 aa, Homo sapiens
  misc_feature (4)..(4): Xaa can be any naturally occurring amino acid
IRHXAIETLYSGPEAQAAASVTDEFCKKMPGRAPQGLEAHRKGSGLSAFTKYMFTLLGVCRGVAKTATWLRCGMKLDQVEAEGPASPGRRERM

SEQ ID NO: 935092 - protein, 83 aa, Homo sapiens
EFPPPPPPPMGICKFLLVPTGTFIGAIPALWKPLVLTPSHVSDKSSVNMSHPPRGLPDHPGIKHSPLSLSDHYGDGRLALVNP

SEQ ID NO: 935093 - protein, 54 aa, Homo sapiens
  misc_feature (31)..(31): Xaa can be any naturally occurring amino acid
PLPERYAQSLVVVASGEHHRQPGIQGLDCVXNSRPLMPGMEMSENTILKAFRVG

SEQ ID NO: 935094 - protein, 34 aa, Homo sapiens
  misc_feature (31)..(31): Xaa can be any naturally occurring amino acid
FISPSFLEQGLRPCHISYAPAIHASFAHQRXIDA

SEQ ID NO: 935095 - protein, 77 aa, Homo sapiens
  misc_feature (18)..(18): Xaa can be any naturally occurring amino acid
RSPQTALQPGGARPPPPXAAATGPSSSSFGSQDEETESQRGEDDLPKITAIITSPWAPRPSSQQPPPWAMSSSDEET

SEQ ID NO: 935096 - protein, 107 aa, Homo sapiens
  misc_feature (28)..(28): Xaa can be any naturally occurring amino acid
  misc_feature (30)..(30): Xaa can be any naturally occurring amino acid
  misc_feature (39)..(39): Xaa can be any naturally occurring amino acid
  misc_feature (46)..(46): Xaa can be any naturally occurring amino acid
  misc_feature (48)..(48): Xaa can be any naturally occurring amino acid
  misc_feature (93)..(93): Xaa can be any naturally occurring amino acid
  misc_feature (99)..(99): Xaa can be any naturally occurring amino acid
  misc_feature (104)..(104): Xaa can be any naturally occurring amino acid
GTRRSCWEEKFLCSGAGVHPPGKEATAXKXQILAQEENXKFEKNNXYXDTVYTIEVPFHGKTFILKTFLPCPADSVVPGGDPAAREMVLWDRXVTACQXLAAEXKDN

SEQ ID NO: 935097 - protein, 143 aa, Homo sapiens
  misc_feature (17)..(17): Xaa can be any naturally occurring amino acid
  misc_feature (19)..(19): Xaa can be any naturally occurring amino acid
  misc_feature (21)..(21): Xaa can be any naturally occurring amino acid
  misc_feature (38)..(38): Xaa can be any naturally occurring amino acid
  misc_feature (50)..(50): Xaa can be any naturally occurring amino acid
  misc_feature (91)..(92): Xaa can be any naturally occurring amino acid
MGLEDEQKMLTESGDPXLXEXEEEELVDPLTTVREQCXQLEKCVKARERXDLCDERVSSRSHTEEDCTGGSSWTSLACEGTIWVGPQTSLXXFENKWWWTLISPPVFHHLGIRIFPYGFGCTIWFLICVTVSSHEPHGFGLGW

SEQ ID NO: 935098 - protein, 67 aa, Homo sapiens
RQSLALSSSLKCGGIIMAHCSFHLVGSGDPVTSVSRVAGTVGVRHHAWITKKIFFIDELSLCCPGWS

SEQ ID NO: 935099 - protein, 59 aa, Homo sapiens
  misc_feature (14)..(14): Xaa can be any naturally occurring amino acid
  misc_feature (27)..(27): Xaa can be any naturally occurring amino acid
SLSSGRRGRRGRDXDEIAKAQARSAWXDTIFGKIIRKNIPAKIIFEDDRCLAFHDISPQ

SEQ ID NO: 935100 - protein, 58 aa, Homo sapiens
  misc_feature (21)..(22): Xaa can be any naturally occurring amino acid
QFSFKDLNFRMFDVGEADSEXXKWIHCFEGVTCIIFIAALSVPDMVLVEDDEVNRMHE

SEQ ID NO: 935101 - protein, 76 aa, Homo sapiens
  misc_feature (43)..(43): Xaa can be any naturally occurring amino acid
  misc_feature (56)..(56): Xaa can be any naturally occurring amino acid
LSTVPGQGKASLADLGWRGRRLRARSLSQWGAGGQHPCAPNTXNRANSGAQGFRVXPSVAPALPRFVGACSCPRHS

SEQ ID NO: 935102 - protein, 129 aa, Homo sapiens
  misc_feature (101)..(101): Xaa can be any naturally occurring amino acid
  misc_feature (110)..(110): Xaa can be any naturally occurring amino acid
GVSSASEAVVRRQQRFFIHALRGDKLRRLTVTECDGAGFIQQQNVNVTCRFNCTSLVAITFAPSIRLIPATPIADNRPPIVVGIRQTSSATSTVTLTALPXHAENGHSVXVASKKTVSQGNQQNGQGIS

SEQ ID NO: 935103 - protein, 82 aa, Homo sapiens
  misc_feature (74)..(74): Xaa can be any naturally occurring amino acid
TALTNFVQMLAIFLIPTALCFAFGEVMGDRRQGRMLLWAMSVIFVICVGVVMWAEVQGNPHLLALGTDSSINMXGKESRFGV

SEQ ID NO: 935104 - protein, 57 aa, Homo sapiens
  misc_feature (22)..(23): Xaa can be any naturally occurring amino acid
RVQRVGCWMAEPQAESEPLLAXXARGGGDWPAGLTTYRSIQSALVPQARWDLLPVFE

SEQ ID NO: 935105 - protein, 120 aa, Homo sapiens
  misc_feature (95)..(95): Xaa can be any naturally occurring amino acid
  misc_feature (106)..(106): Xaa can be any naturally occurring amino acid
SPFSRFPSLNHSWYQLEAPNTWQAPSGLYWICGPQAYRQLPAKWSGACVLGTIRPSFFLMPLKQGEALGYPIYDETKRKSKRGITIGDWKDSEWXPERIIQYYGPXTWAEDGMWGYRTPV

SEQ ID NO: 935106 - protein, 112 aa, Homo sapiens
  misc_feature (52)..(52): Xaa can be any naturally occurring amino acid
  misc_feature (67)..(67): Xaa can be any naturally occurring amino acid
LRRGKLRPARREAESGDQAAPSLLSGPSPPCACSYGLGRRPSPAGSGAQACXAGGASSSAPSPCSPXASLSSELSSSKYGNLPPCAGAAGCGASRGHPRRSFCSIRREETAV

SEQ ID NO: 935107 - protein, 55 aa, Homo sapiens
  misc_feature (1)..(1): Xaa can be any naturally occurring amino acid
  misc_feature (24)..(24): Xaa can be any naturally occurring amino acid
  misc_feature (36)..(36): Xaa can be any naturally occurring amino acid
  misc_feature (39)..(39): Xaa can be any naturally occurring amino acid
  misc_feature (50)..(50): Xaa can be any naturally occurring amino acid
XSARRNKLEEMINELAVAIDSCKXRTGIHGSPGENXQSXHRHPNSRVVLXSLFEA

SEQ ID NO: 935108 - protein, 44 aa, Homo sapiens
  misc_feature (32)..(32): Xaa can be any naturally occurring amino acid
  misc_feature (43)..(43): Xaa can be any naturally occurring amino acid
ATSAARAMAYVPAPGIPATYNPTLPYYQPIPXGHQRGNVCLTXE

SEQ ID NO: 935109 - protein, 71 aa, Homo sapiens
MGQQCQAFEAKGKAVLVGTTWPGTSKGPGVRYTQSWGLNAKIALPKHRLKPSSQRGVVGDLLYLASFSLFF

SEQ ID NO: 935110 - protein, 133 aa, Homo sapiens
  misc_feature (14)..(14): Xaa can be any naturally occurring amino acid
  misc_feature (34)..(34): Xaa can be any naturally occurring amino acid
  misc_feature (39)..(39): Xaa can be any naturally occurring amino acid
  misc_feature (92)..(92): Xaa can be any naturally occurring amino acid
  misc_feature (99)..(99): Xaa can be any naturally occurring amino acid
  misc_feature (129)..(129): Xaa can be any naturally occurring amino acid
  misc_feature (131)..(131): Xaa can be any naturally occurring amino acid
PNRRKQVKKLITAXDIREAHARGEQAMSVVLRAXLLPRXPVKERIYWVLPSPNVMNDPGNASVPDSVPADKTESQRIRKPSLPSCRKQFTEXLVHSDGXSDEGKQSLEQGAMQPSFKSVTGKGGIKVIXGXSV

SEQ ID NO: 935111 - protein, 50 aa, Homo sapiens
  misc_feature (24)..(24): Xaa can be any naturally occurring amino acid
MSSKVSADTLYEAMREVLHWNQRXRKFLETVELQISLKNYDPQKDENFSN

SEQ ID NO: 935112 - protein, 108 aa, Homo sapiens
  misc_feature (11)..(11): Xaa can be any naturally occurring amino acid
  misc_feature (17)..(17): Xaa can be any naturally occurring amino acid
  misc_feature (78)..(78): Xaa can be any naturally occurring amino acid
  misc_feature (90)..(90): Xaa can be any naturally occurring amino acid
RGETRQMSRGXCAPSIXYPRKPVKWRIYWVLPITECDESIPVNGVRARQRASRQNRKPSIRETIIAQLPEGQFTESLXPQLMEKVMKEKXSLEQGAMQPSFKSVTGKG

SEQ ID NO: 935113 - protein, 77 aa, Homo sapiens
  misc_feature (17)..(17): Xaa can be any naturally occurring amino acid
  misc_feature (26)..(26): Xaa can be any naturally occurring amino acid
  misc_feature (40)..(40): Xaa can be any naturally occurring amino acid
  misc_feature (55)..(55): Xaa can be any naturally occurring amino acid
EHSRTRVCASVVGVPPXAHAPGAAGXGGRRWLQKKGSCPXQSNTEATALADNILXNSDGVTLSASVTSIRRPPRLGP

SEQ ID NO: 935114 - protein, 73 aa, Homo sapiens
  misc_feature (4)..(4): Xaa can be any naturally occurring amino acid
  misc_feature (39)..(39): Xaa can be any naturally occurring amino acid
PYAXASFAHASARTSPVEIGKEEFITKTTAAATGTAFGXAIFFDENLTERRTSERDIRRLALPSVGRNQNLIS

SEQ ID NO: 935115 - protein, 64 aa, Homo sapiens
  misc_feature (2)..(2): Xaa can be any naturally occurring amino acid
GXVRPGTYAAAMEAPGFAGDWNKIGIIPTDAPTILMDHTHSWMLKSRLGSGAAFRGSWDPKGVQ

SEQ ID NO: 935116 - protein, 119 aa, Homo sapiens
  misc_feature (5)..(5): Xaa can be any naturally occurring amino acid
  misc_feature (41)..(41): Xaa can be any naturally occurring amino acid
  misc_feature (52)..(52): Xaa can be any naturally occurring amino acid
  misc_feature (67)..(67): Xaa can be any naturally occurring amino acid
  misc_feature (78)..(78): Xaa can be any naturally occurring amino acid
FGDTXKKKGKGERKKNLPEETGRGSASPAGQEIALRRHDEXEERQQQEEALXRLEERRREEEERRNXEELLLKQEYGXLQNGPGKKKNPSVRLEEEPGLPDWKEEASQTPGIEGKNEPE

SEQ ID NO: 935117 - protein, 86 aa, Homo sapiens
  misc_feature (23)..(23): Xaa can be any naturally occurring amino acid
  misc_feature (83)..(83): Xaa can be any naturally occurring amino acid
SCVECAVYTSALFHTHCKFLLGXLSGAKALFSVLGSTASEQRRQYSLLTEIDKIWASFELDNTFPWTIGHLSTLGYTFVPVSXSTD

SEQ ID NO: 935118 - protein, 130 aa, Homo sapiens
  misc_feature (7)..(7): Xaa can be any naturally occurring amino acid
CQEFRHXKIVHMLLAIQGEVSDLLDLRTKWNGIAIRTECNGMEWNGLEWNRVEWNGVEWNVIKWNGIKWTGIELNCKEQNGMGCYQKISNGMECSGMDLNGMDWNGMESNGMEWNGVDSNGMETNGTGME

SEQ ID NO: 935119 - protein, 117 aa, Homo sapiens
  misc_feature (37)..(37): Xaa can be any naturally occurring amino acid
  misc_feature (110)..(110): Xaa can be any naturally occurring amino acid
KLSHVAEHQGEVSDLLDLRTKWNGIAIRTECNGNGMXMDSNGIESNGMGVEWECNQMENGNQMDWEFEFKLLREQNGIGVFIQKISDWDWDCQLDWTLIGIGPWDWELGXRIGNWEL

SEQ ID NO: 935120 - protein, 109 aa, Homo sapiens
  misc_feature (6)..(6): Xaa can be any naturally occurring amino acid
  misc_feature (54)..(54): Xaa can be any naturally occurring amino acid
  misc_feature (106)..(106): Xaa can be any naturally occurring amino acid
ITHFSXRSYDRSCQMKKPPLPLTQLRMRQHTAWPCCEKLMCSYDFIANDKNLVXAIACHKAAKSACCQTVALGLCGVLRITSLVRSLNNAANSCQSTRKCGGCSAXTLH

SEQ ID NO: 935121 - protein, 63 aa, Homo sapiens
  misc_feature (11)..(11): Xaa can be any naturally occurring amino acid
SNGMEWNGMEXNRIEESGIEWNGMLSNRMEWKGMESTRVEWNGMERNGMEWNGYGIEWNGTKW

SEQ ID NO: 935122 - protein, 147 aa, Homo sapiens
  misc_feature (4)..(4): Xaa can be any naturally occurring amino acid
  misc_feature (6)..(6): Xaa can be any naturally occurring amino acid
  misc_feature (20)..(20): Xaa can be any naturally occurring amino acid
  misc_feature (24)..(24): Xaa can be any naturally occurring amino acid
  misc_feature (44)..(44): Xaa can be any naturally occurring amino acid
  misc_feature (147)..(147): Xaa can be any naturally occurring amino acid
RRLXEXHILLLLTTGIIDNXRHNXPIFTAAFEDPTFCNGVIDKXTIVANQQYRALIAVDQFFQQFQRFDIKIVGRFVKNQKVAWFEEQTRQQQAVPLTARKRTYRRHRPFRMEQKVLQIAQYVAWLAVNHHLLLTSARLSITVSSGX

SEQ ID NO: 935123 - protein, 67 aa, Homo sapiens
  misc_feature (13)..(14): Xaa can be any naturally occurring amino acid
ADVIVHGYRAGAXXKLGYGAEQLRALSPGLIDVCLNAYGGQVHGVEDVVFDSLVQMSCGLAESGMAW

SEQ ID NO: 935124 - protein, 126 aa, Homo sapiens
MQPGVKELKKKDYVEGTMRRLKHKCHQYLRRKSAEHRGADRGEKQIVGVTAEIIEAKRLDNNTFKVLRKKQLATRNYIPAVPPGFKRFSCLSLPRCQPPHLAHFCILSRDRISPCWAGWSQTPCLK

SEQ ID NO: 935125 - protein, 124 aa, Homo sapiens
  misc_feature (15)..(15): Xaa can be any naturally occurring amino acid
  misc_feature (29)..(29): Xaa can be any naturally occurring amino acid
  misc_feature (49)..(49): Xaa can be any naturally occurring amino acid
  misc_feature (82)..(82): Xaa can be any naturally occurring amino acid
  misc_feature (91)..(91): Xaa can be any naturally occurring amino acid
  misc_feature (117)..(117): Xaa can be any naturally occurring amino acid
LAVGGSRGGDPAGMXQRRRGVGAGPRGQXEAVPAGAAEFLHLQPALLAXGIGETSQCQVYKRVQNWWVSLTSRMKPLDPPGXNSPRCFEAXLGFPTTSKSCKTQGRAREPWPALPAXPKPLASP

SEQ ID NO: 935126 - protein, 68 aa, Homo sapiens
  misc_feature (10)..(10): Xaa can be any naturally occurring amino acid
  misc_feature (31)..(31): Xaa can be any naturally occurring amino acid
  misc_feature (53)..(53): Xaa can be any naturally occurring amino acid
VGDVSRGRVXRVGTLGAEACLISIRTHEAAXGPSGTASVGPWLITRATEPTVXGTGPGQPRIPPPLFR

SEQ ID NO: 935127 - protein, 115 aa, Homo sapiens
  misc_feature (83)..(83): Xaa can be any naturally occurring amino acid
  misc_feature (92)..(92): Xaa can be any naturally occurring amino acid
MAPDEQLLAVERQTNFLLNNALSKIAPKVAVPIPPNVKPPSVRAKSPAPSTKVTATIIKLPFWLKSTRFCTHILAPATAISPXTTIDAPPIXRGRNGMNQAHQIFGEKPNRHGRV

SEQ ID NO: 935128 - protein, 48 aa, Homo sapiens
MPISPILRPTCLVGQGKVAGGSGGQPPVAATSTILVVFAFPNKVTMFQ

SEQ ID NO: 935129 - protein, 83 aa, Homo sapiens
  misc_feature (6)..(6): Xaa can be any naturally occurring amino acid
  misc_feature (41)..(41): Xaa can be any naturally occurring amino acid
RLRATXEGGDALTNAVAVDDMPNALSALSDLHAHKLRVDPXNFKLLSHCLLVDPGPPTSPPSSPLRCTPPGDKFLGFLLRHRV

SEQ ID NO: 935130 - protein, 56 aa, Homo sapiens
  misc_feature (33)..(33): Xaa can be any naturally occurring amino acid
  misc_feature (48)..(48): Xaa can be any naturally occurring amino acid
MRSRTSAHPQGLGAGHDAIPALGWATAAHAGTXEVEVDGLTAYVAGEXPDPLGPRS

SEQ ID NO: 935131 - protein, 42 aa, Homo sapiens
  misc_feature (22)..(22): Xaa can be any naturally occurring amino acid
  misc_feature (30)..(30): Xaa can be any naturally occurring amino acid
  misc_feature (36)..(36): Xaa can be any naturally occurring amino acid
MAKEKQCYLQQVKQFCIRVENXWHRVYLGXNSSASXGLEFVH

SEQ ID NO: 935132 - protein, 65 aa, Homo sapiens
  misc_feature (16)..(16): Xaa can be any naturally occurring amino acid
  misc_feature (42)..(42): Xaa can be any naturally occurring amino acid
DCKYKLKCSHFHCTFXVCRNTVVGMSQMDSHKRKHEKQDASXPRQRPAPGPPISLDGSLSLGAEP

SEQ ID NO: 935133 - protein, 94 aa, Homo sapiens
  misc_feature (47)..(47): Xaa can be any naturally occurring amino acid
  misc_feature (59)..(59): Xaa can be any naturally occurring amino acid
  misc_feature (86)..(88): Xaa can be any naturally occurring amino acid
  misc_feature (90)..(90): Xaa can be any naturally occurring amino acid
GKGFRGKSSGAVAAPAHTHAERPYRCPHLGKASGRAPTCNTTCASNXGERPYACSHCSXVGQSSALLQHLHVHSGERPYMLSALRXXXAXSSLT

SEQ ID NO: 935134 - protein, 42 aa, Homo sapiens
MRFLNHFSGNPQRCIAHVNGVARFQVKQSIRRGASNTLPAAV

SEQ ID NO: 935135 - protein, 106 aa, Homo sapiens
  misc_feature (79)..(79): Xaa can be any naturally occurring amino acid
  misc_feature (99)..(99): Xaa can be any naturally occurring amino acid
  misc_feature (105)..(105): Xaa can be any naturally occurring amino acid
SIIPGANFPAAEKGGEHSLRVRGRGSGGRPDSWRGRTVTTRSVQQGTTRRCAPQPPIGAPQLGSRDLRGPGPPFLPPCXTRAHLAKAPGIRPGRRGLGXLVPRAXR

SEQ ID NO: 935136 - protein, 38 aa, Homo sapiens
  misc_feature (20)..(20): Xaa can be any naturally occurring amino acid
  misc_feature (28)..(28): Xaa can be any naturally occurring amino acid
FPPVHNGPGSFYPSMFLPPXLGGLTLPXVPSIGKDFRM

SEQ ID NO: 935137 - protein, 95 aa, Homo sapiens
  misc_feature (2)..(2): Xaa can be any naturally occurring amino acid
  misc_feature (4)..(4): Xaa can be any naturally occurring amino acid
  misc_feature (16)..(16): Xaa can be any naturally occurring amino acid
  misc_feature (25)..(25): Xaa can be any naturally occurring amino acid
  misc_feature (47)..(47): Xaa can be any naturally occurring amino acid
  misc_feature (56)..(56): Xaa can be any naturally occurring amino acid
  misc_feature (59)..(59): Xaa can be any naturally occurring amino acid
  misc_feature (81)..(81): Xaa can be any naturally occurring amino acid
VXRXPLVVSQPAIQFXQCMQTTGHXCMVPEPTKHYVQHVHRACNYDXHVNQLLNWXNFXSLLKSTFSSDLVPPGQLETGVXILMRQSAHRGSGFR

SEQ ID NO: 935138 - protein, 93 aa, Homo sapiens
  misc_feature (12)..(12): Xaa can be any naturally occurring amino acid
  misc_feature (82)..(82): Xaa can be any naturally occurring amino acid
VEQIATQHQQQXSSIKESENAKADLTLTTADVTGGYPRRRGSDFSVMRRSTFSSIQPSTPHSKASTYRARQHRPKQHVATHXSGEQQHNHHTD

SEQ ID NO: 935139 - protein, 34 aa, Homo sapiens
  misc_feature (2)..(2): Xaa can be any naturally occurring amino acid
  misc_feature (20)..(20): Xaa can be any naturally occurring amino acid
AXTSSIKCLQIPEKLELTNXTSENPTQVTMVFTV

SEQ ID NO: 935140 - protein, 140 aa, Homo sapiens
  misc_feature (29)..(29): Xaa can be any naturally occurring amino acid
  misc_feature (56)..(56): Xaa can be any naturally occurring amino acid
  misc_feature (130)..(130): Xaa can be any naturally occurring amino acid
PPRPGAAPGHTLVLSRLQLSAQKSPGAMXYYSYVKSTKLVLKGTKAKSWVLQLQRXLLSSFRMHSTPANPVEAVVRRAGFVASQVSRPPRFRPDPVWAGRRLDLRFLAPVQRGAASRADDPVNRIDGRVXVAPYPRVWVR

SEQ ID NO: 935141 - protein, 49 aa, Homo sapiens
  misc_feature (9)..(9): Xaa can be any naturally occurring amino acid
  misc_feature (14)..(14): Xaa can be any naturally occurring amino acid
  misc_feature (16)..(16): Xaa can be any naturally occurring amino acid
  misc_feature (31)..(31): Xaa can be any naturally occurring amino acid
  misc_feature (41)..(41): Xaa can be any naturally occurring amino acid
  misc_feature (49)..(49): Xaa can be any naturally occurring amino acid
MYESLSRLXSNYYXHXYPRPRDTSFSGLSWXEYKPDPVHKXPLERALRX

SEQ ID NO: 935142 - protein, 74 aa, Homo sapiens
  misc_feature (34)..(36): Xaa can be any naturally occurring amino acid
  misc_feature (53)..(53): Xaa can be any naturally occurring amino acid
MHQYPVQCRHKSRGKMAGAALTNNVQKEGSTLIXXXALARRLTRPIPCCNANXCGSQPPTTHGRQHLDATPALV

SEQ ID NO: 935143 - protein, 142 aa, Homo sapiens
  misc_feature (26)..(26): Xaa can be any naturally occurring amino acid
  misc_feature (91)..(91): Xaa can be any naturally occurring amino acid
  misc_feature (95)..(95): Xaa can be any naturally occurring amino acid
  misc_feature (97)..(97): Xaa can be any naturally occurring amino acid
  misc_feature (99)..(99): Xaa can be any naturally occurring amino acid
  misc_feature (101)..(101): Xaa can be any naturally occurring amino acid
TLYCKVRKQPLTVKNSSGLQQLALPXCEIRRYRGVLESADPSGGETRSTESSSKNVKGPKKLFPDLPFGNMDSDRVEARKSLLESFLIGGXAIPXIXNXGXVQEFLALNTDARIAFVKKPFMVSRIDKVLPIWKLEITFLLK

SEQ ID NO: 935144 - protein, 155 aa, Homo sapiens
  misc_feature (36)..(36): Xaa can be any naturally occurring amino acid
  misc_feature (131)..(131): Xaa can be any naturally occurring amino acid
SYLVDQWRWRVFDGSITKENYNQELVDLRLKYPASXPQCPGLKGDFDPGAKVPHSFLACLTIRYFVSFIIQFQFHEALSRQHATRAPMHKCDIYPVQGGQGKRLRPPMKLGFSEAVAGSHAADHGQPNMSXSAMLSYFKPLLELLRTENELHGEK

SEQ ID NO: 935145 - protein, 39 aa, Homo sapiens
  misc_feature (14)..(14): Xaa can be any naturally occurring amino acid
DKSYFPSIPKLLRXWCPRTLSGSSPDDWKRSIVAYFNKH

SEQ ID NO: 935146 - protein, 142 aa, Homo sapiens
  misc_feature (27)..(28): Xaa can be any naturally occurring amino acid
  misc_feature (39)..(39): Xaa can be any naturally occurring amino acid
  misc_feature (119)..(119): Xaa can be any naturally occurring amino acid
  misc_feature (135)..(135): Xaa can be any naturally occurring amino acid
  misc_feature (137)..(137): Xaa can be any naturally occurring amino acid
PGPPFPPDHREFNEGDGRGAARGPQGXXKAADLEMTASXGILMTRDFEGAGKRALEEVLPQDTKGRAPPRGRDNFPGPDDFGPEEGFDASDEAARGRDLRGRGRGTPRGGSRKCLLPTXDEFSPLFKEDGSQTSXMXIESPG

SEQ ID NO: 935147 - protein, 78 aa, Homo sapiens
  misc_feature (70)..(70): Xaa can be any naturally occurring amino acid
GPVIECDIVKIMPLYTWSGQRMRWRPIRGLDNTEFQGGMCVAEIPKLRLCMRNTTLRGAPSSGDVLGSVXSVPRNRGP

SEQ ID NO: 935148 - protein, 100 aa, Homo sapiens
KIYKAAVSVHGLLSDLFCVPHNLGLTSYTWNISWSPIYTSGLGPWINPGSWCAAKDRVSTPLLGFKNLERGHAMCDTANPKMLGPHDYFIPCPENTKLGA

SEQ ID NO: 935149 - protein, 107 aa, Homo sapiens
  misc_feature (19)..(19): Xaa can be any naturally occurring amino acid
  misc_feature (32)..(32): Xaa can be any naturally occurring amino acid
  misc_feature (34)..(34): Xaa can be any naturally occurring amino acid
  misc_feature (59)..(59): Xaa can be any naturally occurring amino acid
EQLCSSFPGSGGSGSSSGXVGSSSRAAMEGSXAXLDPSVQRHSPGHITFLLSLGGSHRXNSASQGFSHLSSHHTQGNSYSSALPQPSSTSNSAATTDGNDHANIQTT

SEQ ID NO: 935150 - protein, 152 aa, Homo sapiens
  misc_feature (1)..(1): Xaa can be any naturally occurring amino acid
  misc_feature (56)..(57): Xaa can be any naturally occurring amino acid
  misc_feature (83)..(83): Xaa can be any naturally occurring amino acid
  misc_feature (106)..(106): Xaa can be any naturally occurring amino acid
  misc_feature (108)..(108): Xaa can be any naturally occurring amino acid
  misc_feature (126)..(126): Xaa can be any naturally occurring amino acid
  misc_feature (143)..(143): Xaa can be any naturally occurring amino acid
XSSVAGAERGRWEPDSTLRTGGRNTSSWADGAACHRPPGQKLLIIRSAPATELLDXXTLGGGTARCSSWPHRRQPSLGPAGPXGSSLPDGASGPRRAWAWCYDPSXLXPSRLSRLYPQSSWCTRFXEEAVIPLPPRTETPTHXQPGREQGCR

SEQ ID NO: 935151 - protein, 77 aa, Homo sapiens
  misc_feature (33)..(33): Xaa can be any naturally occurring amino acid
  misc_feature (38)..(39): Xaa can be any naturally occurring amino acid
  misc_feature (48)..(48): Xaa can be any naturally occurring amino acid
  misc_feature (55)..(56): Xaa can be any naturally occurring amino acid
ARLTTRKREPKRLMKTISNSSLMDCMEGPVANXPRFGXXFLLCYVFQXDRVALEXXLAKAQALVQYLEEPLTQVAAS

SEQ ID NO: 935152 - protein, 90 aa, Homo sapiens
  misc_feature (70)..(70): Xaa can be any naturally occurring amino acid
FLKSSAPSAWEKMVNVLKGVLIECDPAMKQFLLYLDEANALGKKFIIQDIDDTHVFVIARAGQQSSRSEXGELMDQNAFSLTQEVKKRWC

SEQ ID NO: 935153 - protein, 84 aa, Homo sapiens
  misc_feature (29)..(29): Xaa can be any naturally occurring amino acid
LNAGGSRGSSGHWGSRTTVGGSQDREALXVEGAVTREGCFLQQPLSLCTENNLRTRTVAWLEWLGLLRASVVQLGLHLRLTPGL

SEQ ID NO: 935154 - protein, 99 aa, Homo sapiens
  misc_feature (35)..(35): Xaa can be any naturally occurring amino acid
  misc_feature (58)..(59): Xaa can be any naturally occurring amino acid
  misc_feature (64)..(64): Xaa can be any naturally occurring amino acid
PERCALNARPQDVRNINMNRFFPVNRRHNAASKKXAALFRTIDRNIAILIMFNGKRDXXRCRDXFRVYGIATVGKIAPHSVGEKLVVRGIGPVFHMQRM

SEQ ID NO: 935155 - protein, 69 aa, Homo sapiens
  misc_feature (12)..(12): Xaa can be any naturally occurring amino acid
  misc_feature (39)..(39): Xaa can be any naturally occurring amino acid
EEGGGEVLHTFXQLDLVRTHYHKNSKGEFCALIQVTSHXGSSSNSGDYNFDMRFELGTQIQTISVSLKQ

SEQ ID NO: 935156 - protein, 111 aa, Homo sapiens
MFKHWQGNTCYIVFLCSDLHLGFIYILDNCGAEVPCCEFASANEKAASLITSPISILVSIIFFRICRNRRVKASDFFFRRFRPVCAPFNRAFMMVCAIREGKISIRSLPDI

SEQ ID NO: 935157 - protein, 91 aa, Homo sapiens
  misc_feature (21)..(21): Xaa can be any naturally occurring amino acid
  misc_feature (29)..(30): Xaa can be any naturally occurring amino acid
  misc_feature (58)..(58): Xaa can be any naturally occurring amino acid
  misc_feature (73)..(74): Xaa can be any naturally occurring amino acid
  misc_feature (78)..(78): Xaa can be any naturally occurring amino acid
EPAKSAPAPKKGSKKAVTKAXKKDGKKRXXPQESYSVYVYKVLKQVHPDTGISSKAMXIMNSFVNDIFERISXXASRXAQLQQSRSTNHVR

SEQ ID NO: 935158 - protein, 113 aa, Homo sapiens
  misc_feature (19)..(20): Xaa can be any naturally occurring amino acid
  misc_feature (61)..(61): Xaa can be any naturally occurring amino acid
  misc_feature (63)..(63): Xaa can be any naturally occurring amino acid
  misc_feature (65)..(65): Xaa can be any naturally occurring amino acid
  misc_feature (101)..(101): Xaa can be any naturally occurring amino acid
  misc_feature (103)..(103): Xaa can be any naturally occurring amino acid
SDHEIDRLELQNGRCWESXXQHAGDLEAAHGSEATLELLGRVLLDMDLLGCLEDIEEAALXPXTXRPRPVFSDEAAPCGSFLRTVLRDRLPTPLFSWERRXPXRGKQELAAAY

SEQ ID NO: 935159 - protein, 31 aa, Homo sapiens
MAELKYISGFGNECASEDPRCPGSLPKGQNN

SEQ ID NO: 935160 - protein, 83 aa, Homo sapiens
  misc_feature (1)..(1): Xaa can be any naturally occurring amino acid
  misc_feature (81)..(82): Xaa can be any naturally occurring amino acid
XPFDHADPSIFTVLTAKSLRPGVAIADFVIYPPRWGVADKTFRPPYYHRNCMSEFMGLIKGHYEAKQGGFLPGGGSLHSAXXL

SEQ ID NO: 935161 - protein, 57 aa, Homo sapiens
  misc_feature (51)..(51): Xaa can be any naturally occurring amino acid
HERTERAVEPWTEVDEEGKFVRLQNKSNEDQSMGNWQIKRQNGDDPLLTYXFPPKFT

SEQ ID NO: 935162 - protein, 122 aa, Homo sapiens
  misc_feature (5)..(5): Xaa can be any naturally occurring amino acid
  misc_feature (8)..(8): Xaa can be any naturally occurring amino acid
  misc_feature (43)..(43): Xaa can be any naturally occurring amino acid
  misc_feature (117)..(117): Xaa can be any naturally occurring amino acid
  misc_feature (119)..(119): Xaa can be any naturally occurring amino acid
GLVPXGCXPGVGLQVLSVFVLCPAKAVELVRAGRGLSEEPHAXHPMVHLTTLLCKAHRGATFNHPPCPGVAAPIGRSTALWLLTTSVPGDGPFRRSSLGFLLIHLPNSSWEKNSFAXKXRTG

SEQ ID NO: 935163 - protein, 92 aa, Homo sapiens
  misc_feature (16)..(16): Xaa can be any naturally occurring amino acid
  misc_feature (19)..(19): Xaa can be any naturally occurring amino acid
  misc_feature (58)..(58): Xaa can be any naturally occurring amino acid
STGIKLYSIQQDLGCXASXGVISDNLLVTGGQGCVSFWDLNYGDLLQTVYLGKNSEAXPARQILVLDNAAIVCNFGSELSLVYVPSVLEKLD

SEQ ID NO: 935164 - protein, 35 aa, Homo sapiens
MGRLQPWRTPSEREQPGALSSPPLLTGSDHTSLTV

SEQ ID NO: 935165 - protein, 154 aa, Homo sapiens
PGGLLIGCSPGFMNVPKIKGTHTAMKSGSLAAESIFKQLTSENLQSKTTGLHVTEYEDNLKQSWVWKELHAVRNIRPSCHGILGVYGGMIYTGIFYWILRGMEPWTLKHKGSDSDQLKPAKDCTPIEYPKPDGQISFDLLSSVALSGTNAMNMT

SEQ ID NO: 935166 - protein, 43 aa, Homo sapiens
  misc_feature (14)..(14): Xaa can be any naturally occurring amino acid
YGLAATMIQEGLTXEGFQTAEGCIPTVWERLGLAFQTQRHTAA

SEQ ID NO: 935167 - protein, 131 aa, Homo sapiens
  misc_feature (37)..(37): Xaa can be any naturally occurring amino acid
  misc_feature (69)..(69): Xaa can be any naturally occurring amino acid
  misc_feature (76)..(76): Xaa can be any naturally occurring amino acid
  misc_feature (86)..(86): Xaa can be any naturally occurring amino acid
  misc_feature (131)..(131): Xaa can be any naturally occurring amino acid
PSMQKDASLSGFLPSFQHFATQAIHVGQEPEQWNSRXVVLPISLATTFKQDFPGQSSGFEYSRSGNPTXELLGKSXWLRWMGQSTXLAFASGLAATITITHLLKAGDEIICMDEVFGGTNRYFRRVASEFX

SEQ ID NO: 935168 - protein, 147 aa, Homo sapiens
FFSPAHIMRLLEVIPSRYSSPTTIATVMSLSKRIGKIGVVVGNCYGFVGNRMLAPYYNQGYFLIEEGSKPEDVDGVLEEFGFENGTLQVSDLAGLDVGWKVRKGQGLLDRSLPPGTPTRKRGNTRYSPIADMLCEAGRFGQKTGKGW

SEQ ID NO: 935169 - protein, 43 aa, Homo sapiens
MSPVPPAMSSSWVPGSGCIFLISKSFQARWMPRLIMSFIRSYF

SEQ ID NO: 935170 - protein, 100 aa, Homo sapiens
  misc_feature (14)..(14): Xaa can be any naturally occurring amino acid
  misc_feature (34)..(34): Xaa can be any naturally occurring amino acid
  misc_feature (45)..(45): Xaa can be any naturally occurring amino acid
  misc_feature (67)..(67): Xaa can be any naturally occurring amino acid
PKMYKTTPDVIFVXGFRTHFGGGKTTGFGMIYDXLDYAKKNEPKXRLARHGLYEKKKTSRKQRKERXNRMKKVRGTRRPMLVLAKRSEWRLDTAKGVDLR

SEQ ID NO: 935171 - protein, 112 aa, Homo sapiens
  misc_feature (34)..(34): Xaa can be any naturally occurring amino acid
  misc_feature (70)..(70): Xaa can be any naturally occurring amino acid
  misc_feature (112)..(112): Xaa can be any naturally occurring amino acid
MCGYVHLSVDRNYLMWVVGPEFGSSVISLDLRLXYKILSDTEQNFKEYQSLGPCQVWWHTPIISGFGKLXAGEQLSLGQHRLYWETMSQTHKAGRTAERRCLPQAHSGKRNX

SEQ ID NO: 935172 - protein, 101 aa, Homo sapiens
  misc_feature (3)..(3): Xaa can be any naturally occurring amino acid
  misc_feature (29)..(29): Xaa can be any naturally occurring amino acid
HLXVVMDPSFGQHKYEHDFRGCSRRLLSXDEDDDLEKVKLEPCGQKSSFIGNCPVMSAVQRVCHLYLAKQIVYFIGMLKEMNGLRVNVAVKHTFIFVDLHI

SEQ ID NO: 935173 - protein, 33 aa, Homo sapiens
  misc_feature (18)..(18): Xaa can be any naturally occurring amino acid
SSSRTGAETLLEGSAAMXAQGEPQVQFKLVLVG

SEQ ID NO: 935174 - protein, 69 aa, Homo sapiens
  misc_feature (32)..(32): Xaa can be any naturally occurring amino acid
  misc_feature (45)..(45): Xaa can be any naturally occurring amino acid
RPEPKRAVVCRERGWWRRFWKRPGQAAMGTEXSAAWCSPVPSTRXRTGRAPGPGLAGGGSRCGAHFHAI

SEQ ID NO: 935175 - protein, 129 aa, Homo sapiens
  misc_feature (14)..(14): Xaa can be any naturally occurring amino acid
  misc_feature (32)..(32): Xaa can be any naturally occurring amino acid
  misc_feature (48)..(48): Xaa can be any naturally occurring amino acid
  misc_feature (50)..(50): Xaa can be any naturally occurring amino acid
  misc_feature (53)..(53): Xaa can be any naturally occurring amino acid
  misc_feature (68)..(69): Xaa can be any naturally occurring amino acid
  misc_feature (74)..(74): Xaa can be any naturally occurring amino acid
  misc_feature (83)..(83): Xaa can be any naturally occurring amino acid
MGPHSILRTVHCRXTKTPPEPSGESHPLSFLXSSNTSLAGTSLGRDLXPXGGXPPSGQTPRNPESSRXXLGIPXEGECAVLPXPHGAREGQAQPAGVRGGSAVRLRTPPPGRLRWGHGGRARPAYRSPQ

SEQ ID NO: 935176 - protein, 140 aa, Homo sapiens
FILLLILSGELYAEEKQCDFPTVENGRIAQYYYTFKSFYFPMSCRQKTIILLFGWLCNRKWEARRANQVHSRRLVSKPKVLKKCLKPDLRNGYVSNDKVLYKLQERMSYGLLFRDTKPLGGKDEGGGSTVFLQGWVFLNR

SEQ ID NO: 935177 - protein, 74 aa, Homo sapiens
SWSLPVPLLYWLAFLLETVSFLLSPIYRYIPPFNRHLVTLSGSTFTFSYKKAQRDLGYEPLVSWEEAKQKTSGS

SEQ ID NO: 935178 - protein, 123 aa, Homo sapiens
  misc_feature (65)..(65): Xaa can be any naturally occurring amino acid
  misc_feature (71)..(71): Xaa can be any naturally occurring amino acid
  misc_feature (101)..(101): Xaa can be any naturally occurring amino acid
  misc_feature (106)..(106): Xaa can be any naturally occurring amino acid
  misc_feature (121)..(123): Xaa can be any naturally occurring amino acid
MDFNPEWNGKEWNQPRVACHGMEWQGMEWNGMEWNGMVRNRRDWNEMKWNGMEWNGMEWNGMEWXRMERMXWNGINPSAMEWNRMEWNGMEWNGMEWNGFXPNGMXRNEINPSGMAWNGIXXX

SEQ ID NO: 935179 - protein, 39 aa, Homo sapiens
  misc_feature (9)..(9): Xaa can be any naturally occurring amino acid
DSEFTVQSXTGHCVHMRGLPYKATENDIYNFFSPLNPVR

SEQ ID NO: 935180 - protein, 114 aa, Homo sapiens
  misc_feature (19)..(19): Xaa can be any naturally occurring amino acid
  misc_feature (79)..(79): Xaa can be any naturally occurring amino acid
  misc_feature (104)..(104): Xaa can be any naturally occurring amino acid
LGGGVLKTLAVQAFGERGXACCAPGSPGAAADGPASRIVVGVGARRDEAAVGVPALGSDVVTPPREGRADQIFLGPGTXGLRGKGLTLSHPHSFGLDLPASPPXDFPLLGHDQI

SEQ ID NO: 935181 - protein, 79 aa, Homo sapiens
  misc_feature (33)..(33): Xaa can be any naturally occurring amino acid
  misc_feature (64)..(64): Xaa can be any naturally occurring amino acid
  misc_feature (66)..(66): Xaa can be any naturally occurring amino acid
  misc_feature (74)..(74): Xaa can be any naturally occurring amino acid
KIRDQDRNTRRMRRLATRPRLGNQPISTRLPRXSQKIGPPLLHLLARTEARGQPSAILRIGWEXSXGFQVALPXTHSIC

SEQ ID NO: 935182 - protein, 124 aa, Homo sapiens
  misc_feature (7)..(7): Xaa can be any naturally occurring amino acid
  misc_feature (120)..(120): Xaa can be any naturally occurring amino acid
VRNSATXREAPNPSQSKSLTGYYPEFYYVPPIPFSPMESRRARPTLFQKPYKLEVDNSDVNFMGKPLYLTCEPLRTHQNVRHHNNSYSNCKPGEQVDDFTLWDSFSKDVQNKTSPFMIRXPTPL

SEQ ID NO: 935183 - protein, 120 aa, Homo sapiens
PSTEESPGIDYVQVGFPPLLSIVSRMNQTTITSVLEYLSNWFGERDFTPELGRWFYALLACLEKPLLPEAHSLIRQLARRCSEVRLLVGSKDDERVPALNLLICLVSRYFDQRDLADEPS

SEQ ID NO: 935184 - protein, 87 aa, Homo sapiens
  misc_feature (38)..(38): Xaa can be any naturally occurring amino acid
  misc_feature (71)..(71): Xaa can be any naturally occurring amino acid
YTHVRGWYLPVLPDASPYTHVRGCTYLSFQTCLHARTXQAVLTCPSRHPDTSPCMHVRGWTHLSFQTRLHXRTCAAGLTCPSRHVSM

SEQ ID NO: 935185 - protein, 72 aa, Homo sapiens
  misc_feature (35)..(35): Xaa can be any naturally occurring amino acid
  misc_feature (44)..(44): Xaa can be any naturally occurring amino acid
  misc_feature (46)..(46): Xaa can be any naturally occurring amino acid
  misc_feature (62)..(62): Xaa can be any naturally occurring amino acid
  misc_feature (72)..(72): Xaa can be any naturally occurring amino acid
PQPQIPGQAEGLPRGKRGSERPALDPAGLEELSSXKGFPLSPPXNXIPWHNLTGRSRAQCPXAQAVTTFSSX

SEQ ID NO: 935186 - protein, 38 aa, Homo sapiens
MVNIEIWIWINILEEAEVAVVEIMPFYSSLGNKSETPS

SEQ ID NO: 935187 - protein, 51 aa, Homo sapiens
MEQRHKFIHWILPHWVQRRPFVLGLSEGGGPGYPNFGPIVEVVFTISLGRR

SEQ ID NO: 935188 - protein, 50 aa, Homo sapiens
  misc_feature (48)..(48): Xaa can be any naturally occurring amino acid
LDNWNVSVWEIWMPNEIGAMQGLCGGYVVDVAEGRAGDFVIATGEVHXVR

SEQ ID NO: 935189 - protein, 99 aa, Homo sapiens
  misc_feature (41)..(41): Xaa can be any naturally occurring amino acid
LLRGKGPGLARDLDIQIQETQRTPGHFSTKRSSPKHVVVRXSKLKTKKRILRAVRQKHQVTSKGKPIRLTGVFSAETLESIDGIQALSSALLKQITYQP

SEQ ID NO: 935190 - protein, 94 aa, Homo sapiens
  misc_feature (18)..(19): Xaa can be any naturally occurring amino acid
  misc_feature (47)..(47): Xaa can be any naturally occurring amino acid
  misc_feature (49)..(49): Xaa can be any naturally occurring amino acid
SHHHPLAAPSLGEAAISXXFQSLACSPGLPAADRLSYSGRPGSRQEXLXQHGDSAVLVLPPSPGPRSSRPSMDSEGEKLLLDEDSEVFKMLQEN

SEQ ID NO: 935191 - protein, 37 aa, Homo sapiens
EKAHMMNAIKKYQKGFSDKLVFLEGDQKPLAQHKKAG

SEQ ID NO: 935192 - protein, 74 aa, Homo sapiens
  misc_feature (49)..(49): Xaa can be any naturally occurring amino acid
TVKIVLKEKHKKACVHGGKTYSHGEVVAPGLPCLRPLPCILCTCEDGRXDLPACDLSHRVPPARHPREKWPGKC

SEQ ID NO: 935193 - protein, 69 aa, Homo sapiens
  misc_feature (2)..(2): Xaa can be any naturally occurring amino acid
  misc_feature (4)..(5): Xaa can be any naturally occurring amino acid
  misc_feature (19)..(19): Xaa can be any naturally occurring amino acid
PXSXXAKARKHLSNLQSGXGTAEDVIGSRRQPRAPKEKAQPLGRSGQLPRALSNTRPHLRELGKWVLLD

SEQ ID NO: 935194 - protein, 169 aa, Homo sapiens
  misc_feature (86)..(87): Xaa can be any naturally occurring amino acid
  misc_feature (142)..(142): Xaa can be any naturally occurring amino acid
  misc_feature (144)..(144): Xaa can be any naturally occurring amino acid
  misc_feature (157)..(157): Xaa can be any naturally occurring amino acid
  misc_feature (159)..(161): Xaa can be any naturally occurring amino acid
  misc_feature (163)..(163): Xaa can be any naturally occurring amino acid
  misc_feature (168)..(168): Xaa can be any naturally occurring amino acid
TESSQSSSTFSDNEHIRHTSCASSPGSQKIPTNLPNVPFTPSLPSQTSRTCLPHLASFLRASMPSFQGQSICLDGDYLLTSSTSFXXSLRKHRHAARFLYPSPSEVRVWFDLSFIILRAQGGGAVRVAGVEGWGARSGQARXAXPGSAKGSREGELXRXXXHXWPAAXR

SEQ ID NO: 935195 - protein, 160 aa, Homo sapiens
MGSNPVHGDLQCLQSYSHHRKLVNTLERDDPKSNEENVIINCTELVTYDLMKGALVNNKILADDVPCHLLSALVAGFCTTLLASPVDVVKTRFINSLPGQYPSVPSCAMSMYTKEGPTAFFKGFVASFLRLGSWNVIMFVCFEQLKKELMKSRQTVDCTT

SEQ ID NO: 935196 - protein, 69 aa, Homo sapiens
  misc_feature (20)..(20): Xaa can be any naturally occurring amino acid
PASGEGKCGEPVESGDGKGXGQSSPEAAEVMNHEPGTKEGKLKEEEPKPIYACQWMMGMLVPSETEAGL

SEQ ID NO: 935197 - protein, 97 aa, Homo sapiens
  misc_feature (30)..(30): Xaa can be any naturally occurring amino acid
NPFTERIVLTWSNPEPEQVSVNSLTQVITXYFVKLHFQVISKIHPCLKLEGKHYLLRIFRTDQLYVKGLKGNVNFSLLWHEVVSCTLILPPVPETFW

SEQ ID NO: 935198 - protein, 85 aa, Homo sapiens
  misc_feature (84)..(84): Xaa can be any naturally occurring amino acid
EDQKIEDHFEEPEINLRNIVTHSEYTQYEHEEYEEKPPDSNFLTSVEGYMETHTVNGPSECEVCLKSYGLYHLTYKWPITTMKXQ

SEQ ID NO: 935199 - protein, 82 aa, Homo sapiens
  misc_feature (56)..(56): Xaa can be any naturally occurring amino acid
PAESSPDVKTPMANEANPCPCDIGHKLEYGGMGHEVQVEHIKAYVTRSPVDAGKAXIVVQDIFGWQLANTRYMADMIARKWI

SEQ ID NO: 935200 - protein, 97 aa, Homo sapiens
  misc_feature (29)..(29): Xaa can be any naturally occurring amino acid
  misc_feature (71)..(71): Xaa can be any naturally occurring amino acid
  misc_feature (83)..(83): Xaa can be any naturally occurring amino acid
VPACGIDRGPWRHLPDPPALAPGGSLRLXSFGLRSDSGLEIKTRSVEQTLLPLVSQITTLINHKDNTKKSXLKLLQAIQRVGXKLFNLGSWEGFFKV

SEQ ID NO: 935201 - protein, 38 aa, Homo sapiens
  misc_feature (37)..(37): Xaa can be any naturally occurring amino acid
DPITSSGIKFANDENVKHISCPLLILHTEDDPVVPFXL

SEQ ID NO: 935202 - protein, 102 aa, Homo sapiens
  misc_feature (27)..(27): Xaa can be any naturally occurring amino acid
  misc_feature (65)..(65): Xaa can be any naturally occurring amino acid
  misc_feature (74)..(74): Xaa can be any naturally occurring amino acid
MGAHLTRRYLWDASVEPDPEKIPSFPXGTSAFPERKERVMVATQQEMMDAQLTLAANVTTCCPLXHPGCLKVAXRDKLSPTFLALQSTEQHRLGTTCEATWG

SEQ ID NO: 935203 - protein, 129 aa, Homo sapiens
  misc_feature (124)..(124): Xaa can be any naturally occurring amino acid
ASSVLRCGKKKVWLDPNETNEIANANSRQQIRKLIKDGLIIRKPVTVHSRARCRKNTLARRKGRHMGIGKRKGTANARMPEKVTWMRRMRILRRLLKEIPGNPRRLTAIMYHSLYLKVKGNVFXNKRIL

SEQ ID NO: 935204 - protein, 138 aa, Homo sapiens
  misc_feature (6)..(6): Xaa can be any naturally occurring amino acid
  misc_feature (59)..(59): Xaa can be any naturally occurring amino acid
  misc_feature (90)..(90): Xaa can be any naturally occurring amino acid
MSRKIXGGSVVEMQGDEMTRIIWELIKEKLILPYVELDLHSYDLGIENRDATNDQVTKXAAEAIKKYNRGAVKCATITPDEKRVEEFKLXQMWKSPNGTIRNILGGTVFREAIICQNIPRLVTGWGKTIIIWPTCLWG

SEQ ID NO: 935205 - protein, 107 aa, Homo sapiens
  misc_feature (4)..(4): Xaa can be any naturally occurring amino acid
  misc_feature (79)..(79): Xaa can be any naturally occurring amino acid
  misc_feature (81)..(81): Xaa can be any naturally occurring amino acid
MESXRVEWNGMEWFGMECSGIEQNHSDWNGRECNPVEWKGMESTRVEWKGMELNERKGMESTRVEWNGMGMGMGMGMGXGXGIIPSCNGMGLGFGLDWIGLGLYPDW

SEQ ID NO: 935206 - protein, 98 aa, Homo sapiens
MTLIPKTEQIHNNKKENNSPIPLMNIDTKILKKILTNHIQYHIDKLIHHDQVGFIPGMQGWFNIGKSITVIHHISRIKNQNHMIISIDVEKAFGKIQH

SEQ ID NO: 935207 - protein, 105 aa, Homo sapiens
  misc_feature (7)..(7): Xaa can be any naturally occurring amino acid
CRGMEWXGMECNGIESTRVQWNGMDWNGMEWNGMEWNGMIRNRMEWNEMEWKGMEWNGMEWNGMEWNRSEWNRRECIRVEWKENGKNLSGIEGNGIEWKLIERIN

SEQ ID NO: 935208 - protein, 156 aa, Homo sapiens
  misc_feature (22)..(23): Xaa can be any naturally occurring amino acid
  misc_feature (56)..(56): Xaa can be any naturally occurring amino acid
  misc_feature (92)..(93): Xaa can be any naturally occurring amino acid
  misc_feature (110)..(110): Xaa can be any naturally occurring amino acid
  misc_feature (119)..(119): Xaa can be any naturally occurring amino acid
ASSKISCLSFALDDLDDQADAXXARRAGKPGQEPRRGHQLPARPRPEEEENRLREXGSQEWEAQARKVKDEEMEVTFSYCDGSGHRRTVRVXXGNTVCKQFLKKALQGLXKDFPGAALXPALEQLMFHQGGPHPCRSYHTFYDFIIARARGKSGPL

SEQ ID NO: 935209 - protein, 97 aa, Homo sapiens
EVHCCCALPDPGLAGAQGLQPAVRRSAVYEVDATEDFPNCETHEKIHCMVVMGWSMYSPAEQHSSYPRTLEHQATGGHYGSEADLSAHVFNDRLCVG

SEQ ID NO: 935210 - protein, 97 aa, Homo sapiens
TLIRNVKPEDIKRVASKMLRGKPAVAALGDLTDLPTYEHIQAALSSRNGHLPRSYRLFRESPLELAVECLCACYCWCRHCIRLASCVNSANSETLET

SEQ ID NO: 935211 - protein, 121 aa, Homo sapiens
  misc_feature (51)..(51): Xaa can be any naturally occurring amino acid
  misc_feature (73)..(73): Xaa can be any naturally occurring amino acid
  misc_feature (88)..(88): Xaa can be any naturally occurring amino acid
  misc_feature (117)..(117): Xaa can be any naturally occurring amino acid
MLKGSLPTGPGAAPLKLKFSNLMPVDFLARFNVRSQSSRCRAGGTVFNLHXPQPLSWETYVDAFRQAGHAFEXVSVAYWQRYLHTVDXRNALFGVLGFYLNGVGEDIGDTSMIRHDXRRRG

SEQ ID NO: 935212 - protein, 158 aa, Homo sapiens
  misc_feature (1)..(1): Xaa can be any naturally occurring amino acid
  misc_feature (6)..(6): Xaa can be any naturally occurring amino acid
  misc_feature (17)..(17): Xaa can be any naturally occurring amino acid
  misc_feature (30)..(30): Xaa can be any naturally occurring amino acid
XLQAPXENGGSSSGDGXIVLAAHQCGLRPXMGYELNPWLVGLARLHAWRAGCSASVCYHRKDLWKVSLRDCHNVSVFLAPSVLQLLEDKLQAELPVGARVVSGRFPLPTWQPVAVVGEGTDRVWAYDVHGSGPTVSSCGVPIKAIPESSSTLVPRAPV

SEQ ID NO: 935213 - protein, 120 aa, Homo sapiens
  misc_feature (15)..(15): Xaa can be any naturally occurring amino acid
  misc_feature (106)..(106): Xaa can be any naturally occurring amino acid
MDQDDPAEALTELRXKRWAAGDSASGGRLGIGRLYYMGAAAAPGFRRVPLRLQVPYVGASARQVENVLSLLRGRPGKMVDLGSGDGRIVLAAHQCGLRPAMGYELXPCLLDFTLHAGEPV

SEQ ID NO: 935214 - protein, 152 aa, Homo sapiens
  misc_feature (150)..(150): Xaa can be any naturally occurring amino acid
QKQLAAWCSLVLSFCRLHKQSSMTVMEAQESPLFNNVKLQRKLPVESIQIVLEELRKKGNLEWLDKNKSSFLIMWRRQERMGETHLPMGFQEVAKNNSVVYSVMNLTSGEDTEDEEFHGLDEATLLRALQALQQEHKAEIITVSDGRRVXFF

SEQ ID NO: 935215 - protein, 77 aa, Homo sapiens
  misc_feature (5)..(5): Xaa can be any naturally occurring amino acid
FGIGXFTTEEEVDYTAEKCIHHVKRLREMSPLWEMVQDGIDLKSIKWTQHSEEWAVTLCWPGCSGLTDLCTARNLTA

SEQ ID NO: 935216 - protein, 125 aa, Homo sapiens
  misc_feature (111)..(111): Xaa can be any naturally occurring amino acid
MVISGGLDKEKVVRIHYRILYSHKKNKIMSSVSNMNGAEGQYPKRNNAGAENQILHVLTYEKVLNIEYTYDMKEGNKYTRAYLEDGRVRREGGGFENYLICCYYCFIYLGXNGINSCYHHIPHQN

SEQ ID NO: 935217 - protein, 135 aa, Homo sapiens
  misc_feature (96)..(96): Xaa can be any naturally occurring amino acid
SLPISTMNPSAAVIFCLILLGLSGTQGIPLARTVRCNCIHIDDGPVRMRAIGKLEIIPASLSCPRVEIIATMKKNDEQRCLNPESKTIKNLMKAFXKKGLKGLLNWSEATHTPRCCDGWTAESLSPSLPFTQWMG

SEQ ID NO: 935218 - protein, 91 aa, Homo sapiens
MSFLIELWCRGSTVCCEPGAQHVYPQKVKGPAWSQKPEGPDVEGETAEHLNNGCQKDHILKVLCHALLHVEVHATSIKGPISEKDAEHRAG

SEQ ID NO: 935219 - protein, 78 aa, Homo sapiens
NKSLLADEEASERERDSGVNITAKGIPVHGFKIGDRVEFLSLLGLWSVMLGSWAGMIANSDLGVIRGSSAFRQPDDDA

SEQ ID NO: 935220 - protein, 103 aa, Homo sapiens
  misc_feature (63)..(63): Xaa can be any naturally occurring amino acid
  misc_feature (75)..(75): Xaa can be any naturally occurring amino acid
  misc_feature (82)..(82): Xaa can be any naturally occurring amino acid
SPEASSLWQVLGYSHPFNPSTLKTKTAPSGDHWPSLIFFLRSGLQIPAGRSEDTGLPSVNSVXLTYSEQLLTPTXAKALTKXWSVRQGAGNPGGLPAKGSISS

SEQ ID NO: 935221 - protein, 126 aa, Homo sapiens
  misc_feature (24)..(24): Xaa can be any naturally occurring amino acid
  misc_feature (30)..(30): Xaa can be any naturally occurring amino acid
  misc_feature (43)..(43): Xaa can be any naturally occurring amino acid
  misc_feature (49)..(49): Xaa can be any naturally occurring amino acid
  misc_feature (62)..(63): Xaa can be any naturally occurring amino acid
  misc_feature (95)..(95): Xaa can be any naturally occurring amino acid
PKLGAHLVHLLPQSAPWSCPRQGXGCSPWXDNWREILDSKARXCAAGMXGDPRAAAGAKGRXXPQGPPQSRVGAASCMASGPVEWSRQIPLSAVXNGPAQPPGTSREAVPGPWLAWKYSGKTSRDL

SEQ ID NO: 935222 - protein, 103 aa, Homo sapiens
DPTQVWIYNEDHELILNNLLCLDMSETRSSDPPRLMKCHGSGGSQQWTFGKNNRLYQVSVWAVLRVMDLMDQKGYVGMAICDGSSSQQVASKKVKGGPWLDTT

SEQ ID NO: 935223 - protein, 67 aa, Homo sapiens
VTLHADAIHRGGGQIIPTARRCLYASVLTAQPRLMEPIYLVEIQCPEQVVGGIYVLLNRKRGHVFEE

SEQ ID NO: 935224 - protein, 37 aa, Homo sapiens
  misc_feature (1)..(1): Xaa can be any naturally occurring amino acid
XTELVRGCRLHCPVVGLLPLGLRPALPGTRPKGCSDR

SEQ ID NO: 935225 - protein, 133 aa, Homo sapiens
MSRYGRYGGETKVYVGNLGTGAGKGELERAFSYYGPLRTVWIARNPPGFAFVEFEDPRDAEDAVRGLELGKVICGSRVRVELINRHASGDLVLIGHLPVRPFDPNDRCYECGEKGHYAYDCHRYSRRRRSRSR

SEQ ID NO: 935226 - protein, 87 aa, Homo sapiens
  misc_feature (50)..(50): Xaa can be any naturally occurring amino acid
  misc_feature (52)..(52): Xaa can be any naturally occurring amino acid
PRAAVTMGREFGNLARYGNVISYRLSPFEQRAFPSYFSKGIPNVSPHSLXHXSRAPPFVVVYLIYTWGNQEFEQSKRKNPAMYENDK

SEQ ID NO: 935227 - protein, 88 aa, Homo sapiens
  misc_feature (34)..(35): Xaa can be any naturally occurring amino acid
  misc_feature (54)..(54): Xaa can be any naturally occurring amino acid
  misc_feature (57)..(58): Xaa can be any naturally occurring amino acid
IFCPRAAVTMGREFGNLARIRHVISYSLSPFEQXXSQAIYSKGIPNVLRRTREXFLXXARLFVVVYLIYTWGNQEFEQVEKERIQPCM

SEQ ID NO: 935228 - protein, 99 aa, Homo sapiens
  misc_feature (74)..(74): Xaa can be any naturally occurring amino acid
ANAERFKVDLSPYPTISHINKELLALEVFQVSHPRRQPDTPAELRTYSQTMPIGTGKGVGPDCWVFYCCEETPXTMATLTKKDVQLAYSFRDSVHYHDG

SEQ ID NO: 935229 - protein, 81 aa, Homo sapiens
ARRSDTGPCCEQSETSKPTPRDTTSSKKATPPISATPYMPFYSNQNRPRNECIIAEDLNLSSFLRKQQIHGVQAISSRSPY

SEQ ID NO: 935230 - protein, 116 aa, Homo sapiens
DAVREILKYDDVTEKVNLQNNPGAMEHFHMKLFRAQRNLYIAGFSLLLSFLLRRLVTLISQQATLLASNEAFKKQAESASEAAKKYMEENDQLKKGAAEDGDKLDIGNTEMKFRGE

SEQ ID NO: 935231 - protein, 84 aa, Homo sapiens
GGRLINYEMSKRPSAERYKDQLLKETVLQPLLQPQINVSMSSRAEGKTQNAILMTMPTLLNSRESLNPLSAALSMLNLICLHQE

SEQ ID NO: 935232 - protein, 89 aa, Homo sapiens
  misc_feature (13)..(13): Xaa can be any naturally occurring amino acid
  misc_feature (16)..(16): Xaa can be any naturally occurring amino acid
AMTWGKLPLRGLXSFXWVELKPKVLAAHRAGLKQIIIPQRNEKDLEEIPSNGQTGSKFCYSKLLDEVLNAAFDGGFPVKTRPGLIDSKL

SEQ ID NO: 935233 - protein, 105 aa, Homo sapiens
ELEVSERLSQPGVAIGLAWTPLGGKIMFVEASRMDGEGQLTLTGQLGDVMKESAHLAISWLRSNAKKYHLTNAFGSFDLLDNTDIHLALPSWSLSQKMDHLLVLP

SEQ ID NO: 935234 - protein, 129 aa, Homo sapiens
  misc_feature (112)..(112): Xaa can be any naturally occurring amino acid
LLKRKPSLDDLKELMPAVGRSMQQLLDYPEDDIEETFCLNFTITVENFGATEVKELVLNGADTAVNRQNRQEFVDAYVDYIFNKSVASLFDAFHAGFHKVCGGKVLLLFQPXELQAMVIGNTNYDSERT

SEQ ID NO: 935235 - protein, 101 aa, Homo sapiens
LTILSCLCRERGRKKFGTSLKLPVHRVLPSSLVGYSLEGTVTPPVSAWLPPTLADREHPLTCVVTPQDGETVSTNDRRKSELSWPFKYYYSVKQMRTRAVV

SEQ ID NO: 935236 - protein, 107 aa, Homo sapiens
  misc_feature (65)..(65): Xaa can be any naturally occurring amino acid
  misc_feature (68)..(68): Xaa can be any naturally occurring amino acid
  misc_feature (72)..(72): Xaa can be any naturally occurring amino acid
  misc_feature (100)..(100): Xaa can be any naturally occurring amino acid
MDRPSRSQICFPRKTRALKAALPTDLYSMLEEERQQRQSSDPRRGGVPKLVRAVTGVAKQGRRPXVGXLVGXSKPTQRPRRHSPSLVSGPVDGGGQARDXPQGWASF

SEQ ID NO: 935237 - protein, 95 aa, Homo sapiens
  misc_feature (69)..(69): Xaa can be any naturally occurring amino acid
  misc_feature (89)..(89): Xaa can be any naturally occurring amino acid
MSFFVLTEDCREQLSVMESQGCLPGHHRQPHRQHRFILSSSAGWKSEVEVPTGSVSGERLLVQRHPHVXRGLWCHLFPCEGPESHDPYXPIEAKI

SEQ ID NO: 935238 - protein, 33 aa, Homo sapiens
  misc_feature (8)..(9): Xaa can be any naturally occurring amino acid
KTIVHESXXTRGLKTCFALYDLSISRAAAFSDA

SEQ ID NO: 935239 - protein, 103 aa, Homo sapiens
  misc_feature (67)..(67): Xaa can be any naturally occurring amino acid
CWGVQMGRLRLGEPEISVAHWCVAAVHRPLGEVRTGLQSGVLLFCPLLKFNMLLIIRKLSSWARWLXLVIPALREAEVERSIEPRSSVPALGNIARPCLYQNF

SEQ ID NO: 935240 - protein, 82 aa, Homo sapiens
  misc_feature (2)..(2): Xaa can be any naturally occurring amino acid
  misc_feature (6)..(6): Xaa can be any naturally occurring amino acid
  misc_feature (12)..(13): Xaa can be any naturally occurring amino acid
  misc_feature (35)..(35): Xaa can be any naturally occurring amino acid
  misc_feature (46)..(46): Xaa can be any naturally occurring amino acid
  misc_feature (67)..(67): Xaa can be any naturally occurring amino acid
  misc_feature (73)..(73): Xaa can be any naturally occurring amino acid
RXDGSXLWASLXXSPSLARVGSKQPRMECPGVFAXEAGLSRARRHXAPGGADWLTVVDVINPIGRLXLWYKWXYRTQSSRPE

SEQ ID NO: 935241 - protein, 33 aa, Homo sapiens
  misc_feature (9)..(10): Xaa can be any naturally occurring amino acid
  misc_feature (28)..(28): Xaa can be any naturally occurring amino acid
GRDVISRAXXAAPHSRPPQDAALQPERXSPPRP

SEQ ID NO: 935242 - protein, 44 aa, Homo sapiens
TRSPPGLAVWGPGGLGCPGGPRLGNRRPRGLEDEDDVLLVPLAE

SEQ ID NO: 935243 - protein, 41 aa, Homo sapiens
MVAACQCAMSAAVVRGFQLWVLPVKASGSDCWFLSNKIDHG

SEQ ID NO: 935244 - protein, 109 aa, Homo sapiens
  misc_feature (22)..(22): Xaa can be any naturally occurring amino acid
HLEPQVSSVPLCQEECAGHSQXPGSTVCPSPRPRSDSTAMLRGVRITLQLLSIFIYINTYKYILFKNNLEILPKRYAEYTFQYECTSVLSRQNRSLDEWRLHQQSGTCS

SEQ ID NO: 935245 - protein, 117 aa, Homo sapiens
  misc_feature (39)..(39): Xaa can be any naturally occurring amino acid
  misc_feature (81)..(81): Xaa can be any naturally occurring amino acid
QTSVVSRYPQRAEGRLEASPQDRNPCKSWQLRWMSHADXVRGSALSLHLCTQNVLPEAPQPIPSGYHHHQHHHCLGATARXSISVEGDLECLVCREPTTVLGPPSCLAVSTPSVPYA

SEQ ID NO: 935246 - protein, 47 aa, Homo sapiens
  misc_feature (3)..(3): Xaa can be any naturally occurring amino acid
  misc_feature (44)..(44): Xaa can be any naturally occurring amino acid
KLXHFTPVPRRYRYKKKWATTEPQFTGQSAALQNFDMTYSVQFXDLW

SEQ ID NO: 935247 - protein, 155 aa, Homo sapiens
  misc_feature (65)..(65): Xaa can be any naturally occurring amino acid
GVYRVQTVPSARRPVVKFCHRPSGLHGDVSLSNRLALYNSRFLNLCSEMDGRVRPLVYTLRCWAXHNGLSGGGPLLNNYALTLLVIYFLQTRDPPVLPTVAQLTQRAGEGEQVEVDGWDCSFPKDASRLEPSTNVEPLSSPAGPVLLLRILLGSF

SEQ ID NO: 935248 - protein, 152 aa, Homo sapiens
ILVSNAAVNPFFGNLMDVTEEVWDKVLSINVTATAMMIKAVVPEMEKRGGGSVVIVGSVAGFTRFPSLGPYNVSKTALLGSYKNFAAELAPKNIRVNCLAPGLIKTRFSSVLWEEKAREDFIKEAMQIRRLGKPEDCAGIVSFLCSEDASYI

SEQ ID NO: 935249 - protein, 98 aa, Homo sapiens
  misc_feature (16)..(16): Xaa can be any naturally occurring amino acid
  misc_feature (84)..(84): Xaa can be any naturally occurring amino acid
IGVLQANSQGFTPPGXDRSSPDNSPVHWDVTVNHPSQLGVNIPIITELVNDTNVHVFGTNADDDDPDTELYLTAALCLWDSICXSVSWTHSMSATYFN

SEQ ID NO: 935250 - protein, 69 aa, Homo sapiens
GLKSRRSPGGVLGNSADAVPAPVIASEAAAAAASAHAMDRCTSTARPSNSLPANLCFQRQEGVIIATCK

SEQ ID NO: 935251 - protein, 118 aa, Homo sapiens
  misc_feature (7)..(7): Xaa can be any naturally occurring amino acid
  misc_feature (12)..(12): Xaa can be any naturally occurring amino acid
  misc_feature (89)..(89): Xaa can be any naturally occurring amino acid
  misc_feature (96)..(96): Xaa can be any naturally occurring amino acid
TELIYQXGENNXYACTNPEILEENQPKLLSKCVMKLLITDILPFKSYVLKMQSWQPGTNVQWMLQVEICCIGMRFGETANVTGLCSFLXVINMSGXPRGSISVKPFFLVHVKHTLFCN

SEQ ID NO: 935252 - protein, 56 aa, Homo sapiens
  misc_feature (16)..(16): Xaa can be any naturally occurring amino acid
SCIDEIRISFVFKWAXAQAQDSIFTLKMNSHVGTDEVAGQKRNPNTQVSVHAVLKL

SEQ ID NO: 935253 - protein, 142 aa, Homo sapiens
AFFKAILFICSGSIIHSLADEQDIRKIGNITKIIPFTSSCLVIGSLALTGIPFLTGFYSKDLIIEAINTCNTNAWALLITLIATSITAMYSIRIIYFVTITKPRFPPLISINENDPDLINPIKRLAFGSIFAGFVISYNIPP

SEQ ID NO: 935254 - protein, 79 aa, Homo sapiens
  misc_feature (42)..(42): Xaa can be any naturally occurring amino acid
SPESASQKPWTKKAQLLRGVASHWGPAWIHCTRTVSAKSRCXSGGKAKCSQFCTTGMDGGMSIWDVKSLESALKDLKIK

SEQ ID NO: 935255 - protein, 144 aa, Homo sapiens
  misc_feature (39)..(39): Xaa can be any naturally occurring amino acid
  misc_feature (47)..(48): Xaa can be any naturally occurring amino acid
  misc_feature (51)..(51): Xaa can be any naturally occurring amino acid
  misc_feature (94)..(94): Xaa can be any naturally occurring amino acid
  misc_feature (104)..(104): Xaa can be any naturally occurring amino acid
  misc_feature (109)..(109): Xaa can be any naturally occurring amino acid
SSCGWVHGVCFSASGSRVAWVSHDSTVCLVDADKKMAVXPWPLRHYXXWPXTFITENSLVAAGHDCFPVLFTYDKCCGDIELRWPAWNVPKQEXPSVAMTSPEXRFQEXWDKEGPALEGGLQATWGPGLGIQLQQEQVVKPNSW

SEQ ID NO: 935256 - protein, 123 aa, Homo sapiens
  misc_feature (31)..(31): Xaa can be any naturally occurring amino acid
  misc_feature (116)..(116): Xaa can be any naturally occurring amino acid
LSKEYGFVLLTGAASFVMVLHLAINVGKAAXKYKVEYPVMYSTDPENGHMFNCIQRAHQNTLEVYPPFLFFLTVGGVYHPRIASGLGLAWIIGRVLYAYGYFTQETLASGIEEPWXLFALFCP

SEQ ID NO: 935257 - protein, 101 aa, Homo sapiens
  misc_feature (19)..(19): Xaa can be any naturally occurring amino acid
  misc_feature (44)..(44): Xaa can be any naturally occurring amino acid
  misc_feature (69)..(69): Xaa can be any naturally occurring amino acid
PTRRNSFLAWAWPGLLGEXFTHMATTQETLASGIEDRGLSCPPXPDGHHRVLCFPASRLDQTRLRLRVXILPPLRCGGPSDSHSPPATHPDFQLHWFFFFF

SEQ ID NO: 935258 - protein, 87 aa, Homo sapiens
CEDGVAENKKNEARLRIAKTLEDFDLGTTEKCVRINSVSSGLAEVDLETFLQARVLPSSLMLPKVEGPEEIRWFSDKFSLHLKGPKT

SEQ ID NO: 935259 - protein, 90 aa, Homo sapiens
  misc_feature (61)..(61): Xaa can be any naturally occurring amino acid
  misc_feature (79)..(79): Xaa can be any naturally occurring amino acid
VERAGTLATFLCYLQLIGKGPMELPEASARKMSPHFSLSSSNVGQLPELTCMHKADIMGIXPTHAMMSPFTFVHLPCLXGSALISWTPED

SEQ ID NO: 935260 - protein, 87 aa, Homo sapiens
  misc_feature (15)..(15): Xaa can be any naturally occurring amino acid
  misc_feature (59)..(59): Xaa can be any naturally occurring amino acid
MSKEWGLRLIPAGVXSAPALLACFLLETVSFCYVQSTTIDHHLTASLITVLNSVFTFSXKKAQRDLGYEHLSAGRKQAENLRVDRDT

SEQ ID NO: 935261 - protein, 102 aa, Homo sapiens
  misc_feature (2)..(3): Xaa can be any naturally occurring amino acid
GXXLETAAGNGRRLHLGIPEAVFVEDVDSFMKQPGNETADTVLKKLDEQYQKYKFMELNLAQKKRRLKGQIPEIKQTLEILKYMQKKKESTNSMETRFLLAR

SEQ ID NO: 935262 - protein, 123 aa, Homo sapiens
RGREKGVLHLLPHLQLSHLGLPCSLGSANHSGCSVLAHIAFFSHWVQQLRRGLGDCFLLNVANSQENTVHIFLSALPVTKYLRGSFVQDIKHRGQHLIKSLQNCLLTVLNVRHLCNLNVRYRF

SEQ ID NO: 935263 - protein, 112 aa, Homo sapiens
KNPCIFFEPKILYRASSGTGPSENPTRSPCLRLKSIQEGSDVTLVAWGTQVHVIREVASMAQEKLGVSCEVIDLRTIVPWDVDTVCKSVIKTGRLLISHEAPLTGALPLRSA

SEQ ID NO: 935264 - protein, 89 aa, Homo sapiens
  misc_feature (53)..(53): Xaa can be any naturally occurring amino acid
  misc_feature (64)..(64): Xaa can be any naturally occurring amino acid
  misc_feature (70)..(70): Xaa can be any naturally occurring amino acid
NTELTEDCEIKHLGQSLDCNANVYMRPWENKVIPTVKCQALDKTIPIRRGLQXFSFPVSQSTRXKSRNNXAPTRVHVQGQTLKGRGTAR

SEQ ID NO: 935265 - protein, 86 aa, Homo sapiens
MVASALETGFRKGVLEHPEEFAKLVGMSVLLAKERLLLAEKMGHLCRDDSVEGLRFYPNLFMTQNKNFVPEMLYVNKLAFCQGLTT

SEQ ID NO: 935266 - protein, 106 aa, Homo sapiens
  misc_feature (2)..(2): Xaa can be any naturally occurring amino acid
  misc_feature (29)..(29): Xaa can be any naturally occurring amino acid
  misc_feature (38)..(38): Xaa can be any naturally occurring amino acid
TXILHLLSSVTADYQKRSLMKCHKHTWKXHMDLRKERXKERTLFGVCCCCWFALLALLFLPSVPLGPLVLAVLKYKPIKPRADKCPALGAHHCNFFPDFALRSVSM

SEQ ID NO: 935267 - protein, 157 aa, Homo sapiens
  misc_feature (31)..(31): Xaa can be any naturally occurring amino acid
  misc_feature (131)..(131): Xaa can be any naturally occurring amino acid
  misc_feature (144)..(144): Xaa can be any naturally occurring amino acid
ADSFSLNDALAGSGNPNPQGYPGAWGNQPGXGATQGLLILGPTQDKLLQGPTQDRLLQGPTQDRLLLVPTPAQLPLELILAQLPLELILAQLPLEPSQGNWGTWGLPQCSWRLSCCWPYGVPAGPLTVPYXLPLPGGVMPRMLXTIMGTVKPTQTGL

SEQ ID NO: 935268 - protein, 157 aa, Homo sapiens
  misc_feature (113)..(113): Xaa can be any naturally occurring amino acid
  misc_feature (157)..(157): Xaa can be any naturally occurring amino acid
AVPASRGITAFIVEKGMPGFSTSKKLDKLGMRGSNTCELVFEDCKVPAANVLSQESKGVYVLMSGLDLERLVLAGGPLGIMQAVLDHTIPYLHVREAFARKIGQFQLMQGKMXDMLHPPHGKFDSTSTMSPKPVTRGHIIPKDCAGVILYAAECATX

SEQ ID NO: 935269 - protein, 118 aa, Homo sapiens
  misc_feature (77)..(77): Xaa can be any naturally occurring amino acid
GFLHLECDDLDPSKVASDRYPTPFLGQTSGRVPFLFKGNRGITPFSCQILVVSFLEEKAKAISFLTVSPRARQLQKXYGRPRKDRVHSPGKTTQKIGSLVYLSLSASLCHRLALGLLM

SEQ ID NO: 935270 - protein, 84 aa, Homo sapiens
LVNEILWLILTHHNTIFLVVLLNVDHRFANNPITTSKVPVLNTGASSVDEEGGPSEHVTWSIQAKVVTLLSSSTYRFKIHSNKV

SEQ ID NO: 935271 - protein, 146 aa, Homo sapiens
AQRSQVTNYLGIEWMRRHFAPDYRVHIISFKDPNPMHIDATFNIIGPGLVLSNPDRPCHQIDLFKKAGWTIVTPPTPVIPDDHPLWMSSKWLSMKVLMLDEKRVMGKMPMKFQFKRCFEKLGISTIKVNIRNANSLGGGFHCWTCD

SEQ ID NO: 935272 - protein, 102 aa, Homo sapiens
  misc_feature (10)..(10): Xaa can be any naturally occurring amino acid
  misc_feature (16)..(16): Xaa can be any naturally occurring amino acid
  misc_feature (84)..(84): Xaa can be any naturally occurring amino acid
LSPPLGQEQXDPSASXVPLDPSPGATVAGWLLGIILQILKDVSQPFFIVGSIRAETVFICNTNSYLNEGGFQFDLLCLFKIGSXSLGSLVLYVSISVECPQP

SEQ ID NO: 935273 - protein, 83 aa, Homo sapiens
  misc_feature (9)..(9): Xaa can be any naturally occurring amino acid
  misc_feature (82)..(82): Xaa can be any naturally occurring amino acid
MPGEMRRAXQRHAKKCLVCAHNQAVIGAGFFRTRVSVSCNLGHLAGQSAIAAKSHRQTPSLPKFDPCLHNRGLRVKVGFQPXT

SEQ ID NO: 935274 - protein, 66 aa, Homo sapiens
MEQAMLKDAGFVWVLGNALLGVPQGFPVYDYDPSSLQEALSASVAKVNSQSLSPYLFLGDRSSLKR

SEQ ID NO: 935275 - protein, 90 aa, Homo sapiens
  misc_feature (18)..(18): Xaa can be any naturally occurring amino acid
LLSHETVLDGCSPEWAQXTKVRPALPALVPPTDLSLLRDGSSSPEKNDTASPRDMTEFHLLKPDSTSCAFLLGKKEFFFRNSAKNDINYF

SEQ ID NO: 935276 - protein, 75 aa, Homo sapiens
TPEEIRKTFNIKNDFTEEEEAQVRKENQWCEEKMNCCACHCNTRRVVPNASCTALFIIVNIRDQKTNIALSSLHV

SEQ ID NO: 935277 - protein, 135 aa, Homo sapiens
DALADGGVKMGVPRRLAVRLGAQALLGAAKMLLDSEDHPGQLKDNVCSPGEATIHALHFLESGGFRSLLINAVEASCIRTRELQSMADQEKVSPAALKKTLLDRVKLESPTVSTLAPPSSGKLLTRNPAQGSKKE

SEQ ID NO: 935278 - protein, 144 aa, Homo sapiens
  misc_feature (21)..(21): Xaa can be any naturally occurring amino acid
  misc_feature (97)..(97): Xaa can be any naturally occurring amino acid
  misc_feature (124)..(124): Xaa can be any naturally occurring amino acid
KNGELKSLRRRSSRSDSQVRXLREKLDELRRASLPYLPYLSGLLPPSHEPPKLNPVVEPLSWMLGTWLSDPPEVGTFTTLQPFQVPGRKVHISHVGXPMLNFSFNSFHPETHKPMHRECGFIRXKPDTNKMAFVSAQNTGDCGS

SEQ ID NO: 935279 - protein, 88 aa, Homo sapiens
  misc_feature (18)..(18): Xaa can be any naturally occurring amino acid
  misc_feature (30)..(30): Xaa can be any naturally occurring amino acid
  misc_feature (61)..(61): Xaa can be any naturally occurring amino acid
MVCGGGSRNPLLMALSGXITARHRSHHHLXVGISGDDMEAIVSPGLLADAGGITRKSAFRXLAQARRRYWGLFSPLTRDIRVELNFSY

SEQ ID NO: 935280 - protein, 103 aa, Homo sapiens
  misc_feature (67)..(67): Xaa can be any naturally occurring amino acid
TEFNLVCGDAWKVDLFQSCVNLGFFLGSLVVGYIADRFGKALPLILFGVLGLSAGAVTLLLPETKGXALPETIEEAENLGRRKSKAKENTIYLQVQTGKSPHT

SEQ ID NO: 935281 - protein, 168 aa, Homo sapiens
  misc_feature (1)..(1): Xaa can be any naturally occurring amino acid
  misc_feature (13)..(13): Xaa can be any naturally occurring amino acid
  misc_feature (133)..(133): Xaa can be any naturally occurring amino acid
  misc_feature (137)..(137): Xaa can be any naturally occurring amino acid
  misc_feature (140)..(140): Xaa can be any naturally occurring amino acid
  misc_feature (159)..(159): Xaa can be any naturally occurring amino acid
XSCSRSHGLRNAXIGKSAPDFTATAVVDGAFKEIKLSDYRGKYVVLFFYPLDFTFVCPTEIIAFSTMLQDFRKLGCEVLGVSVDSQFTHLAVDQYPTEGGRLGPLNIPLLADVTKSLSQNYGVLKNDEALLTXVSLXSMXGCLGRSQSMTYLWTLCRRXSPLVQPLSI

SEQ ID NO: 935282 - protein, 80 aa, Homo sapiens
GNKCDMDDKRVVPKGKGEQIAREHGIRFFETSAKANINIEKAFLTLAEDILRKTPVKEPNSENVDISSGGGVTGWKSKCC

SEQ ID NO: 935283 - protein, 100 aa, Homo sapiens
  misc_feature (31)..(31): Xaa can be any naturally occurring amino acid
  misc_feature (99)..(99): Xaa can be any naturally occurring amino acid
ARYQTIEENIKIFEEDAVEFISVPVPEFADXDPANIVHDFNKKLTAYLDLNLDKCYVIPLNTSIVMPPKNLLELLINIKAGTYLPQSYLIHEHMVITDXH

SEQ ID NO: 935284 - protein, 123 aa, Homo sapiens
  misc_feature (2)..(2): Xaa can be any naturally occurring amino acid
  misc_feature (20)..(20): Xaa can be any naturally occurring amino acid
  misc_feature (28)..(29): Xaa can be any naturally occurring amino acid
  misc_feature (46)..(46): Xaa can be any naturally occurring amino acid
  misc_feature (78)..(78): Xaa can be any naturally occurring amino acid
  misc_feature (112)..(112): Xaa can be any naturally occurring amino acid
PXAAVAQSAPPLQSRAHELXRQGAIRTXXPASRDPSLRRRRLGPQXHHGEGDVQLGAWPEGGKKDERKSSEEALIVLXDAVRWIQGPGGRGSGWTEESVVLVHVFRTWLHAXWRHPRRGVLYK

SEQ ID NO: 935285 - protein, 49 aa, Homo sapiens
  misc_feature (40)..(40): Xaa can be any naturally occurring amino acid
KLLESGDLSMNSIKVDGISMSFQNLLAKICFYHHFSVVEXSRLLCLHVQ

SEQ ID NO: 935286 - protein, 87 aa, Homo sapiens
  misc_feature (7)..(7): Xaa can be any naturally occurring amino acid
VAILQSXGAAGLSVPSTVIVGSAGSAVVASVMNICESFYPFLMGSEVADMATEVADMAIEVADISTEEHCPTCLTQRRINYPQATIS

SEQ ID NO: 935287 - protein, 75 aa, Homo sapiens
  misc_feature (12)..(12): Xaa can be any naturally occurring amino acid
  misc_feature (14)..(14): Xaa can be any naturally occurring amino acid
YIKYLAVKQTRXRXTGRYPSSSAEAPWNRIPISDRSILRSSLSSLLFLQEKKVDPNDFSPCIKQKTIITVEFIFF

SEQ ID NO: 935288 - protein, 66 aa, Homo sapiens
  misc_feature (2)..(2): Xaa can be any naturally occurring amino acid
  misc_feature (12)..(12): Xaa can be any naturally occurring amino acid
  misc_feature (14)..(14): Xaa can be any naturally occurring amino acid
KXGFSWNWQDMXLXLVGLCILVPVVHRERQHLRFYTSTVNSSMPALAAFQDPHPKTEHTNAQTLQW

SEQ ID NO: 935289 - protein, 158 aa, Homo sapiens
  misc_feature (27)..(27): Xaa can be any naturally occurring amino acid
  misc_feature (123)..(123): Xaa can be any naturally occurring amino acid
MLGHIRANNPHGNPQYLPFFQKLGESXTPIPCDGPTDGGPFRWQPSTMMSFCCGEVLAKTISVWYRKMSSSSSEVMSFRSLPWTTQALASSGVHLVHWNVEAGSNVFHSLIAFSDNAYPLGNXFAVIGWSPVTMMTLIPALRHLPTASGTAARGGSIM

SEQ ID NO: 935290 - protein, 71 aa, Homo sapiens
GWTPIPVEQLIPYVDEDGSRNDDRAGPPRFAAEERREIVEVNKKLKQKNQQLKQIMDQLRNLIWDINPCWQ

SEQ ID NO: 935291 - protein, 126 aa, Homo sapiens
LREHRRKGGNRKREDAGDDDDKEGAIGVRNKVAGGKMKKRKGRYCFRKTSARLLASCEILSRDHSASWEKFLGIAVSLQWDNFYSVDTGLAALQLAFLTCDTSAVCSSCCTSAFPPASHGLADGER

SEQ ID NO: 935292 - protein, 31 aa, Homo sapiens
  misc_feature (29)..(29): Xaa can be any naturally occurring amino acid
DSPSGALQTAAEEEETKTFKDLGVTDVLXLG

SEQ ID NO: 935293 - protein, 142 aa, Homo sapiens
  misc_feature (17)..(17): Xaa can be any naturally occurring amino acid
  misc_feature (71)..(71): Xaa can be any naturally occurring amino acid
  misc_feature (88)..(88): Xaa can be any naturally occurring amino acid
  misc_feature (111)..(111): Xaa can be any naturally occurring amino acid
VHTGASKTLTPSGDLQXTFSGMDQVKVMKRIAEMTDIKPILRKLPRIKKYLLNCDNMRCSVNATRQQMPQXKKRWKTSLEMLAEAKRXGSLSARIFVEKPTPSGPSGAAHXSGVPDRQKIGDRPHLQTLPDEDTFCAALPCE

SEQ ID NO: 935294 - protein, 105 aa, Homo sapiens
  misc_feature (77)..(78): Xaa can be any naturally occurring amino acid
  misc_feature (83)..(84): Xaa can be any naturally occurring amino acid
SRGSRRPVSRSHRRHFYCKHGQRTKNPKTFCKKCGKHQPHKVTQYKKGKDSLYRPRKAALRIASRVATVGRQSQSFXXRPKPXXRLCSGLSVLSPTAESKEDAGH

SEQ ID NO: 935295 - protein, 77 aa, Homo sapiens
FDVQRNNIALALEVTYRERYMKAYKEVKNRLDYHISVQNMMRRKEEEHMIDWVEKHVVKSISVQQEKETIAKCIEDL

SEQ ID NO: 935296 - protein, 72 aa, Homo sapiens
  misc_feature (16)..(16): Xaa can be any naturally occurring amino acid
  misc_feature (30)..(30): Xaa can be any naturally occurring amino acid
SMPEGCAVWEKCLLTXTVGRFLDEPCQPSXQDRFLDDFETMLNSNINDLLMVTYLANLTQSQIALNEKLVNL

SEQ ID NO: 935297 - protein, 141 aa, Homo sapiens
  misc_feature (100)..(100): Xaa can be any naturally occurring amino acid
EVTNCFSVPHNESEDEVAVDMEFAKNMYELHKKVSPNELILGWYATGMDITEHSVLIHEYYSREAPNPIHLTVDTGLQHGRMSIKAYVSTLMGVPGRTMXVMFTPLTVKYAYYDTVNALEFDLIMKTCFSPNRVIGLSSDL

SEQ ID NO: 935298 - protein, 143 aa, Homo sapiens
  misc_feature (71)..(71): Xaa can be any naturally occurring amino acid
  misc_feature (88)..(88): Xaa can be any naturally occurring amino acid
DTNLRDKNCLQPVDGTMSLDMKEHPDAEVQKNQVLTLEDWKEKWVTRHISFHQEQGHQLLKKHLDTFLKGXEWTASVFPPLWKSPLRXKMVRRSGPHCVGVEISEIGIREFFAEQNLSYTEEPLAEIAGAKVFKSSSGSISLY

SEQ ID NO: 935299 - protein, 127 aa, Homo sapiens
  misc_feature (3)..(3): Xaa can be any naturally occurring amino acid
  misc_feature (127)..(127): Xaa can be any naturally occurring amino acid
MDXIKLHGGTPANFLDVGGGATVQQVTEAFKLITSDKKVQAILVNIFGGIMRCDVIAQGIVMAVKDLEIRIPVVVRLQGTRVDDAKALIADSGLKILACDDLDEAAKMVVKLSEIVTLAKEAPCGWX

SEQ ID NO: 935300 - protein, 71 aa, Homo sapiens
  misc_feature (9)..(9): Xaa can be any naturally occurring amino acid
  misc_feature (27)..(27): Xaa can be any naturally occurring amino acid
SGGIMLHSXQDNPDGPDPNATPKEILXLGKYSPSCCPPTIMGGFNPSGRKAPNAAHDGIDLIPGRQSKQTI

SEQ ID NO: 935301 - protein, 101 aa, Homo sapiens
  misc_feature (56)..(57): Xaa can be any naturally occurring amino acid
  misc_feature (92)..(92): Xaa can be any naturally occurring amino acid
  misc_feature (94)..(94): Xaa can be any naturally occurring amino acid
  misc_feature (99)..(99): Xaa can be any naturally occurring amino acid
KTPQQPVPKQNQLQLQSRATTRATVAAGKKEEHYALCPLKSLPARPVASVCLTCVXXAMGGDWSALPPPTVPSLPGAWEESRVPYIQLLSLXLXQGCPXFI

SEQ ID NO: 935302 - protein, 240 aa, Homo sapiens
  misc_feature (122)..(122): Xaa can be any naturally occurring amino acid
  misc_feature (127)..(127): Xaa can be any naturally occurring amino acid
  misc_feature (145)..(145): Xaa can be any naturally occurring amino acid
  misc_feature (163)..(163): Xaa can be any naturally occurring amino acid
  misc_feature (173)..(174): Xaa can be any naturally occurring amino acid
  misc_feature (177)..(177): Xaa can be any naturally occurring amino acid
  misc_feature (179)..(179): Xaa can be any naturally occurring amino acid
MWLLYLLVPALFCRAGGSIPIPQKLFGEVTSPLFPKPYPNNFETTTVKQSPREYRVKLVFQQFDLEPSEGCFYDYVKISADKKSLGRFCGQLGSPLGNPPEKRNLMSQGDKECCLTLHTDIXNRGEXGPTMFNKGVPANIQAVDXEERAFRSKIREEEAPPPXQPPLHTPTLXXYFXSXCPGYELQEDRHSCQAECSSELYTEASGYISSLEYPRSYPPDLRCNYSIRVERGLTLPPQVP

SEQ ID NO: 935303 - protein, 129 aa, Homo sapiens
  misc_feature (74)..(74): Xaa can be any naturally occurring amino acid
  misc_feature (111)..(111): Xaa can be any naturally occurring amino acid
  misc_feature (129)..(129): Xaa can be any naturally occurring amino acid
MNSMAPMSPMNELPSRSYPLRGSHSLDDLLDRPRQSHSVLEYWDSQSRSRPRAVSPAVPPAPHPRPYPGSMAAXVVGMHWGAATDVKKLMSWEQNPPELFPRGTNPFATVXASSHSHQRPVSTPHPLRX

SEQ ID NO: 935304 - protein, 116 aa, Homo sapiens
NTENEGSGLTNIKTEEISEVKMDAEFGHDSGFEVRHQKLVFFAEDVGSNKGAIIGLMVGGVVIATVIVITLVMLKKKQYTSIHHGVVEVDAAVTPEERHLSKMQQNGYENPTLQVL

SEQ ID NO: 935305 - protein, 139 aa, Homo sapiens
TFTTYSDNQPGVLIQVYEGERAMTKDNNLLGKFELTGIPPAPQWVPQIEVTFDIDANGSVNVSAVDKSTGKENKITITNDKGPLEKEDIERMVKKPEKYKAEDEKQRDKVSSKNSLESYAFNMKATVEDEKLQGKINDE

SEQ ID NO: 935306 - protein, 32 aa, Homo sapiens
SEAAPAAPAAAPPAEKAPAKKKAAKKPAGVRR

SEQ ID NO: 935307 - protein, 78 aa, Homo sapiens
LTDKGTAVLQFLTSLFKPFVESYQLLCRYLLHEEDYFGEKEYLVAARKFTRQLLDQGSSQCYDALSSELQKNALSSFP

SEQ ID NO: 935308 - protein, 103 aa, Homo sapiens
  misc_feature (4)..(4): Xaa can be any naturally occurring amino acid
  misc_feature (10)..(10): Xaa can be any naturally occurring amino acid
  misc_feature (12)..(12): Xaa can be any naturally occurring amino acid
  misc_feature (27)..(27): Xaa can be any naturally occurring amino acid
  misc_feature (43)..(43): Xaa can be any naturally occurring amino acid
  misc_feature (55)..(55): Xaa can be any naturally occurring amino acid
  misc_feature (92)..(92): Xaa can be any naturally occurring amino acid
GVRXVAACCXRXGPAAWAEGYRPEEGXSSEVKTEDELRVRHLXEENRGIMVLGIXRAYGKNALSKNPPQDVIKKPVDALKSDKKVRTIIIKXVKSLGYSVLGV

SEQ ID NO: 935309 - protein, 142 aa, Homo sapiens
  misc_feature (3)..(3): Xaa can be any naturally occurring amino acid
  misc_feature (47)..(47): Xaa can be any naturally occurring amino acid
  misc_feature (77)..(77): Xaa can be any naturally occurring amino acid
  misc_feature (135)..(135): Xaa can be any naturally occurring amino acid
SLXSTPINEAPVSWRVRIALALKGIDYEIVPINLIKEGEQQFTEEFXTLNPMKQVPALKIDGITIVQSLAIMEYLEXTRPIPRLLPQDPQKRAIVRMIFDLIASGHPAPSEPVCPEASGDRRNQMQWGPKGLLLXALTALGE

SEQ ID NO: 935310 - protein, 138 aa, Homo sapiens
  misc_feature (126)..(126): Xaa can be any naturally occurring amino acid
SGVAGGILLVVPNVMGMMCWSPPLDKMGNSVKGIHFCHDLVSLCNFHNYDNLRHFAKKLDPRREGGDQRVKSVINLLFAAYTGDVSALRSLLCQPWTWSSGIMTPEQPSMSQQQRVMLKLSSFCWXLQSKPFPQGQVE

SEQ ID NO: 935311 - protein, 128 aa, Homo sapiens
  misc_feature (43)..(43): Xaa can be any naturally occurring amino acid
  misc_feature (91)..(91): Xaa can be any naturally occurring amino acid
  misc_feature (93)..(93): Xaa can be any naturally occurring amino acid
HFHQQGNRSLARLPVRASTSLPVRRHLCPASSAGSFGPSSTCXGLRFEVSGQKKLEVDGPCVIISNHQSILDMMGLMEILPKRCVQIAKRXEXFTGPVGSIMYLGGVYFINRQQARTAMSVMADLGDL

SEQ ID NO: 935312 - protein, 123 aa, Homo sapiens
SLGPGNRKPFLAQAFRSRTLCNFPPQACASSIQMWPSSKVELAHKTTRHLGVHNTLPKAHPIVQDKCSETKQCLYQAIMKRRNLVSQSQGSLAHTAPEAEPAARTVRRPQSQITAVFGSFSIN

SEQ ID NO: 935313 - protein, 132 aa, Homo sapiens
MDLRSVVLLNECSKVVIDNVHGCPFKVLISILQSCRDLRYQNEDLFKSIAEYVATTFDIWKLKQVIFFLLLFETLGFRPPGLMDKLMEKVVQEPGSLNVKNIVSILHVYSSLNHVHKIHNREFLEALASALT

SEQ ID NO: 935314 - protein, 50 aa, Homo sapiens
  misc_feature (38)..(38): Xaa can be any naturally occurring amino acid
RASKLSRAFQAHVQSQKSSMAAAAANNLSLVVHGPGDXRLENYPIPEPGP

SEQ ID NO: 935315 - protein, 123 aa, Homo sapiens
  misc_feature (8)..(8): Xaa can be any naturally occurring amino acid
  misc_feature (55)..(55): Xaa can be any naturally occurring amino acid
  misc_feature (57)..(57): Xaa can be any naturally occurring amino acid
  misc_feature (104)..(104): Xaa can be any naturally occurring amino acid
  misc_feature (121)..(121): Xaa can be any naturally occurring amino acid
MNGRVDYXVTEEEINLTRGPSGLGFNIVGGTDQQYVSNTVAIYVSRIKEDGAAAXIXGSKEGDKILSVNGQDLKNLLHQDAVDLFRNAGCAVSLRVQHRLPVQXGPKYIEVKGEPSGVPVXYG

SEQ ID NO: 935316 - protein, 53 aa, Homo sapiens
MERFWKKNTKFKPSSVSPFDIYKWSLPMALSVCHRGSWNSLELEGSLFLACRH

SEQ ID NO: 935317 - protein, 70 aa, Homo sapiens
LSRLGRELSQSDHRGQFLLPPTSSILRMQCPCKSWFDDMTDTELLDLIPFFEGLSREDDVYSMLHRLCSR

SEQ ID NO: 935318 - protein, 136 aa, Homo sapiens
VEIDGTIHQVYVLKRPHVDEFLQRMGQLFECVLFTASLASMQTLLPTSWTSWGVFRARLFRESCVFHRGNYVKDLKIAWDGKLSKSDHRGQFSCLPTSSILEECKCPCSPGFDDMKDTEACLDLIPFFEGPEQGKT

SEQ ID NO: 935319 - protein, 98 aa, Homo sapiens
WDHGTFKHRKVTLMEEGLQSPRSSKDTLYFMDDAEKTFVPMTENIYNAIIDKTLKLWIFPGGLAHDISRKKLDRPRRATSYVESNFNLIEDYKVRFYF

SEQ ID NO: 935320 - protein, 106 aa, Homo sapiens
  misc_feature (14)..(14): Xaa can be any naturally occurring amino acid
  misc_feature (20)..(20): Xaa can be any naturally occurring amino acid
  misc_feature (24)..(24): Xaa can be any naturally occurring amino acid
LNSVSQKKNLWVPXLKTMGXGRAXWLTSVISALWEAEAGGSPEVGCSGPAWPTWQNPVSAKNTKIGQAWWFMSVVPAAWRLGRENRLNPGGIGCGESRSRHCPPAW

SEQ ID NO: 935321 - protein, 147 aa, Homo sapiens
  misc_feature (4)..(4): Xaa can be any naturally occurring amino acid
LKNXLSQTGVLFMASFGEGEEGEEEEKKVDSSGEAEKRDFRAALRKQHAAELHLGDFLVFLRRVVSSKAIQSKMASPKWTEVLLNIASQKCSSGIPLVGNLRTRLLALHVLEAVLPACESGVEDDQMAQVVERLFSLLSDCMWETPI

SEQ ID NO: 935322 - protein, 113 aa, Homo sapiens
NSSSVALLHKHLQLLLPHATDIYSRSANLLKESPWNGSVGEKLRDVIYVSAAGSMLCQIVNSLLLLPVSVARPLLSYLLDLLPPLDCLNRLLPAAALLEDQELQWASSWGGQK

SEQ ID NO: 935323 - protein, 90 aa, Homo sapiens
  misc_feature (34)..(35): Xaa can be any naturally occurring amino acid
  misc_feature (51)..(51): Xaa can be any naturally occurring amino acid
  misc_feature (53)..(53): Xaa can be any naturally occurring amino acid
  misc_feature (63)..(63): Xaa can be any naturally occurring amino acid
  misc_feature (73)..(73): Xaa can be any naturally occurring amino acid
GRSAVQRQLQGYSVEYQLLNGGDCIVLNIPNPAXXSLVVEDLLPNHSYVFXVXPKSQEGWGPXIVRVSSPFEXPRCTRKIPLVSPCQGSA

SEQ ID NO: 935324 - protein, 122 aa, Homo sapiens
  misc_feature (5)..(5): Xaa can be any naturally occurring amino acid
  misc_feature (43)..(43): Xaa can be any naturally occurring amino acid
  misc_feature (108)..(108): Xaa can be any naturally occurring amino acid
  misc_feature (122)..(122): Xaa can be any naturally occurring amino acid
RGGVXGSLEPGSATAEGGRRRQDGVAPGTTGGFTAWCRDPAEXTPRDAKPPRRARPPETSGRALPPGARAARVRLNPRRRRQAAAGAGVHWTQEVTHPSHRTPSFMQXQKAPNQNSSRNRAX

SEQ ID NO: 935325 - protein, 143 aa, Homo sapiens
  misc_feature (82)..(82): Xaa can be any naturally occurring amino acid
  misc_feature (124)..(124): Xaa can be any naturally occurring amino acid
  misc_feature (134)..(134): Xaa can be any naturally occurring amino acid
  misc_feature (143)..(143): Xaa can be any naturally occurring amino acid
VAFVAGEVGALRVGSLAHDGGAVRVGGFVDVDQWQQGGQRGDDGGQGRRRAFQGQRPFCGPTSGFLNVPFAYRAAQGDDAGXLGTGATSRSRVSLARLTLPVTFTTAVSVFEHEAGARRPGRFXHGKIAGQAVXMDLLVAENX

SEQ ID NO: 935326 - protein, 47 aa, Homo sapiens
  misc_feature (23)..(23): Xaa can be any naturally occurring amino acid
  misc_feature (47)..(47): Xaa can be any naturally occurring amino acid
NNLGLCCFYAQQYDMTLTFGLNXALSLAENEEEAVMSGTTWGHIAVX

SEQ ID NO: 935327 - protein, 103 aa, Homo sapiens
  misc_feature (21)..(21): Xaa can be any naturally occurring amino acid
  misc_feature (27)..(27): Xaa can be any naturally occurring amino acid
  misc_feature (29)..(29): Xaa can be any naturally occurring amino acid
MISPVRKRFTPRLAHFAVPSXTAALKXDXPQALLPRPLETSSLLRVIFMAQFFRSNPAGRCAGPPMTYTPQEALSATVSTNCIDQVANAAPHHFQRRKYPFNG

SEQ ID NO: 935328 - protein, 49 aa, Homo sapiens
  misc_feature (11)..(11): Xaa can be any naturally occurring amino acid
ARGTFLQSLKXSPRGDKLFGPDLKLVPPMEEDYPQFGSPKLRGRGCGIQ

SEQ ID NO: 935329 - protein, 117 aa, Homo sapiens
  misc_feature (61)..(62): Xaa can be any naturally occurring amino acid
ELIMKSIIPVVMAGIIAIYGLVVAVLIANSLTDGITLYRSFLQLGAGLSVGLSGLAAGFAXXSSEMLVFGALPAASLFVGMILILIFAEVLGLYGLIRGPNPLHKVVLFHHQSQDRM

SEQ ID NO: 935330 - protein, 69 aa, Homo sapiens
  misc_feature (1)..(1): Xaa can be any naturally occurring amino acid
  misc_feature (13)..(13): Xaa can be any naturally occurring amino acid
XTSSFAEVLGLYXLIVALNPLQQKKSFPTHPVNRIGCKRSPPPHSKNEQPDTCQRQLPLSSWSCKCAVS

SEQ ID NO: 935331 - protein, 85 aa, Homo sapiens
  misc_feature (83)..(83): Xaa can be any naturally occurring amino acid
SSQAGVQGEVCRSSTTSLKLRAAEGAVPPANCSACDPQNIRELWIIALNMKTAIFQVTSFYQWSYRINSIFNYWFITLQETLXCK

SEQ ID NO: 935332 - protein, 84 aa, Homo sapiens
  misc_feature (4)..(4): Xaa can be any naturally occurring amino acid
  misc_feature (51)..(51): Xaa can be any naturally occurring amino acid
  misc_feature (58)..(58): Xaa can be any naturally occurring amino acid
  misc_feature (70)..(71): Xaa can be any naturally occurring amino acid
GANXAASAFKVTSLPTDPALRVEEQLSVSQKASLFPLEQIGAPGRFGSCLXAKDTDLXAGGVWPLTLAEXXPWGGVLGREQGWQ

SEQ ID NO: 935333 - protein, 84 aa, Homo sapiens
ASAHASEKGPDFWLLLKNRKMWPGAVAHTCYPCSLGGRGRWITRIQEFKTSLVGESLEPGRRRLQWAEIAPLHSILVNKSETPS

SEQ ID NO: 935334 - protein, 108 aa, Homo sapiens
  misc_feature (1)..(1): Xaa can be any naturally occurring amino acid
  misc_feature (3)..(3): Xaa can be any naturally occurring amino acid
  misc_feature (24)..(24): Xaa can be any naturally occurring amino acid
XSXAASPSLAMEKTELIQKAKLAXQLSAYDDMATCMKAVTEQEPELSNEERNLLSVAYKNVVGGRRSAMEGHLSIEQKTDTSDKKLQLIKDYREKVESELRSICTTVL

SEQ ID NO: 935335 - protein, 169 aa, Homo sapiens
  misc_feature (2)..(4): Xaa can be any naturally occurring amino acid
  misc_feature (7)..(7): Xaa can be any naturally occurring amino acid
  misc_feature (15)..(15): Xaa can be any naturally occurring amino acid
  misc_feature (20)..(20): Xaa can be any naturally occurring amino acid
  misc_feature (58)..(59): Xaa can be any naturally occurring amino acid
RXXXNVXSRRAAAVXLKPEXQGSYTYLSLGFFFDRDDVALEGVGTFFRELAEEKREGXXHPRVSEDIGGRALFQDVQKPSQDEWGKTQEAMEAALAVEKNLNQALLDLHALGSARADPHLCDFLESHYLDKEVKLIKKMGNHLTNLRRLAGQNQRRLAAPGSLGEYLFE

SEQ ID NO: 935336 - protein, 117 aa, Homo sapiens
  misc_feature (39)..(39): Xaa can be any naturally occurring amino acid
  misc_feature (103)..(103): Xaa can be any naturally occurring amino acid
  misc_feature (108)..(108): Xaa can be any naturally occurring amino acid
GLLPEAKKPRLLHGTLIMKDSNFRLVSSEQALKELGLAXTNFSFTCRVHLQDTRKEQETALRVYSHLKSTLKDHCVQHLPDGSVTVESILIQAAAHSGGPLVXKVANXSPGTLPGLK

SEQ ID NO: 935337 - protein, 67 aa, Homo sapiens
  misc_feature (41)..(41): Xaa can be any naturally occurring amino acid
DPYENYRRNKSYSFIARMKARDEFSTFGTRKEEKEDDHRLXFAVWRACPAFALEEVLQNYSQCPDSK

SEQ ID NO: 935338 - protein, 123 aa, Homo sapiens
MTNEEFRQVVNGYRTKKHKKGRLFQEPLMLKIPKSVDWREKGCVTPVKNQGQCGSCWAFSASGCLEGQMFLKTGKLISLSEQNLVDCSHAQGNQGCNGGLMDFCFPVHLRKMEVWDSGGVLPL

SEQ ID NO: 935339 - protein, 96 aa, Homo sapiens
AASMSKAMQFGQLLTHLDTTPADDGQFLKDNTALLTQVQTTMRENLATVEGNFASIDALDEEAGKVSITGSWGAGMTLAPELCQTLPQGHSQPQPT

SEQ ID NO: 935340 - protein, 130 aa, Homo sapiens
  misc_feature (59)..(59): Xaa can be any naturally occurring amino acid
MAWNPCQSLTTSSFDDVGVLQKKLVPFLTELNMHLAQELEKLKDDPGEGGAAAGLAAGXTTAHTNEVIYQIHGNVWNCNNAWCPSTNLPKFKNNVLLLHFRPPGYPSKMSLVGPSLLGESSRENIAFTQG

SEQ ID NO: 935341 - protein, 138 aa, Homo sapiens
  misc_feature (41)..(41): Xaa can be any naturally occurring amino acid
WASLVGDHLDNIAHMVAKGAAVPGISDHVQDQCTQCTGGGXDNPFYKKECYMVVNPFTTTSLQKPLDRAVFWVEFVMRHKRAKHLRSLGHNLTWHQYHFLDVIGFLLSCVAVTIVLTVKCLLFIYRFFVKKEKKIKNE

SEQ ID NO: 935342 - protein, 97 aa, Homo sapiens
  misc_feature (37)..(37): Xaa can be any naturally occurring amino acid
  misc_feature (41)..(41): Xaa can be any naturally occurring amino acid
  misc_feature (69)..(69): Xaa can be any naturally occurring amino acid
  misc_feature (88)..(88): Xaa can be any naturally occurring amino acid
VSNNMSNYNMSNDTMSSYTGSSYTMNNYTVSSDVVSXYTMXNNTMSNMSSYNMSNDTMSSYTVSTYTMXYTVSNDIVSGDTVSSYTMXNNTTSNGMS

SEQ ID NO: 935343 - protein, 124 aa, Homo sapiens
KTPATLGHNTRVYKWLPQNDLLGHPKTKAFVTHGGANGVYEVIYHGIPMIGIPLFGEQHDNIAHMVAKGAAVTLNIRTMSRSDVLNALEEVIDNPFYKKNAIWLSTIHHDQPYRSPWTGLVFWG

SEQ ID NO: 935344 - protein, 66 aa, Homo sapiens
  misc_feature (14)..(14): Xaa can be any naturally occurring amino acid
  misc_feature (26)..(26): Xaa can be any naturally occurring amino acid
CPPQVKEAATNLIXFQNTAQSLNASXRRASSSRLRKRAPSRLLTGYRGVFNDSKQRMILPVSKAAY

SEQ ID NO: 935345 - protein, 152 aa, Homo sapiens
  misc_feature (136)..(136): Xaa can be any naturally occurring amino acid
ILTQGLAPRPKPQGNWACWGESPETSGSPYSPVLDTRNVLTSFQICFNRSLSTFLLGEDEEEDTTGETDGPGYPTAFMGFLPLFLGMYSSSGERGSGSSLHSGELWLCSALVLFWEALLAVAPERIPRRTRAFLAXPALQRRSSYRPPPMFG

SEQ ID NO: 935346 - protein, 124 aa, Homo sapiens
  misc_feature (15)..(15): Xaa can be any naturally occurring amino acid
  misc_feature (35)..(35): Xaa can be any naturally occurring amino acid
  misc_feature (74)..(74): Xaa can be any naturally occurring amino acid
MNEDTRPDSCATTSXEWKKAGVEQLRLSTVDMTGXPTLANLHKGVQFALKYQALGQCVYVHCKAGRSQKVPQWXQPNLIQVHNWSPEEAIEAIAKIRSHISIRPSQLEVLKEFHKEITARAAKN

SEQ ID NO: 935347 - protein, 30 aa, Homo sapiens
  misc_feature (25)..(25): Xaa can be any naturally occurring amino acid
MTTASVGVSSPGRVIFGPPSNMPCXCNISR

SEQ ID NO: 935348 - protein, 130 aa, Homo sapiens
  misc_feature (6)..(6): Xaa can be any naturally occurring amino acid
  misc_feature (13)..(13): Xaa can be any naturally occurring amino acid
  misc_feature (22)..(22): Xaa can be any naturally occurring amino acid
  misc_feature (34)..(34): Xaa can be any naturally occurring amino acid
  misc_feature (52)..(52): Xaa can be any naturally occurring amino acid
  misc_feature (58)..(58): Xaa can be any naturally occurring amino acid
  misc_feature (65)..(65): Xaa can be any naturally occurring amino acid
  misc_feature (70)..(70): Xaa can be any naturally occurring amino acid
  misc_feature (76)..(76): Xaa can be any naturally occurring amino acid
  misc_feature (82)..(82): Xaa can be any naturally occurring amino acid
  misc_feature (94)..(94): Xaa can be any naturally occurring amino acid
GLCAPXTAASFPXRHCLPHQYXRGSHYNPNCVAXTPGGYDPFRFNPREHQGXVTSGFXSLLAGPXNCIGXAFAMAXMKVVPXLTLLHFRSCRPXLNPAGNPSWYCAQRVDFGCGWSPWVRTHSDCPTHPP

SEQ ID NO: 935349 - protein, 149 aa, Homo sapiens
  misc_feature (137)..(137): Xaa can be any naturally occurring amino acid
MASSSGNDDDLTIPRAAINEDDQKRLFLMSGWPTIARELVVNCCTEFIHLISSEANEICNKSEKKTISPEHVIQALESLGFGSYISEVKEVLQECKTVALKRRKASSRLENLGIPEEGLLRQHRDYLPKLAATSRLXPQEWLPMQQQLQ

SEQ ID NO: 935350 - protein, 78 aa, Homo sapiens
  misc_feature (13)..(13): Xaa can be any naturally occurring amino acid
  misc_feature (15)..(15): Xaa can be any naturally occurring amino acid
  misc_feature (77)..(77): Xaa can be any naturally occurring amino acid
RGGEKALLDKLHXAXAAFEKMQEKRQMERILKKASKTHKQRVEDFNRHLDTLTEHYDIPKVSWTKYTCPWCKKAEGXG

SEQ ID NO: 935351 - protein, 65 aa, Homo sapiens
PHLYPPAGAESLRTTYVNGLSNASSLNSPCNPPRTHQTPGAVLQIRTIFQSSPDALVNSKLLGNL

SEQ ID NO: 935352 - protein, 97 aa, Homo sapiens
  misc_feature (80)..(80): Xaa can be any naturally occurring amino acid
PANSEWANARGTLLASNNVNQLFQPICTTYVSDNFHLSFHLSKHMDETHKQSRMGASFKAEQENEGGRLSRGSVHPQGTXLTSKSGFKKSQLCEDPE

SEQ ID NO: 935353 - protein, 98 aa, Homo sapiens
  misc_feature (96)..(96): Xaa can be any naturally occurring amino acid
FRGAVCVSEQKWELGQAGRWSLGRSRGAQMPWSQVPGTGEAAALDVVVAVALEKDLGGGGGLGGDVVVAVALEKDLGEEVGVWVVTWWWQWLWEKXLG

SEQ ID NO: 935354 - protein, 80 aa, Homo sapiens
  misc_feature (17)..(17): Xaa can be any naturally occurring amino acid
  misc_feature (25)..(25): Xaa can be any naturally occurring amino acid
RKFGNEENNNTTHARLXFFPYFWWXWGFNMLAGLVLRLLTSDDSPCLGLPRVLGLQVGATVSGPFLFTLKLIPRLGGSCL

SEQ ID NO: 935355 - protein, 101 aa, Homo sapiens
LTIYPCILDLGRALTIYPCILGLGRALTIYPCILGLSRALTVYPCILDLGRAPTVYPCILGLSRALTVYPCILDLGRALTVYPCILDLGRALTIYPCILGL

SEQ ID NO: 935356 - protein, 120 aa, Homo sapiens
  misc_feature (33)..(33): Xaa can be any naturally occurring amino acid
  misc_feature (102)..(102): Xaa can be any naturally occurring amino acid
MAVGGERWQFILSFFQPSMRTGNLLIHSFEGQXSALPEELGSLVYREGYLAGHRACLQLVVQCLQPSERLPGQEEREASAASLRQSSRLCGSPSRGENTLFXVSSRFFLEKGEQWFMGVT

SEQ ID NO: 935357 - protein, 68 aa, Homo sapiens
  misc_feature (50)..(50): Xaa can be any naturally occurring amino acid
PLEGTPRLTPCLLDMTTQLACHPAVHLPMALGSLTPSGAQIELQLVGGSXYVGCQRSSVLYQISAPSF

SEQ ID NO: 935358 - protein, 179 aa, Homo sapiens
  misc_feature (9)..(9): Xaa can be any naturally occurring amino acid
WLMYLPANXNGPGAVKKGSSCSNLASLENCMKLSQMAVQGLQQFKSPLLQLPHIEEDNLRRVSNHKKYKIKTSQDLVSLKESDRHSLLHFLEDEKYEEVMAVLGSFPYVTMDMKITGLDDEDSNNITVGSLVTVLVKLTRQTMAEVFEKEQSICAAEEQPTEDGQSDANKIKAKGGWQQ

SEQ ID NO: 935359 - protein, 112 aa, Homo sapiens
  misc_feature (104)..(106): Xaa can be any naturally occurring amino acid
  misc_feature (108)..(108): Xaa can be any naturally occurring amino acid
KIGNDEVALLNLALGTLAPNSGGCIYVLSALLLYVSTLLYSTEKSVQGLFELEGSSFCSLLWIMMVCFKITGMSARRKCTPVVPAIWEAEADGSRGQEIETIPXXXGXPRLY

SEQ ID NO: 935360 - protein, 161 aa, Homo sapiens
  misc_feature (30)..(30): Xaa can be any naturally occurring amino acid
  misc_feature (129)..(129): Xaa can be any naturally occurring amino acid
LHLSGGKFMTMGRQRQKLFEHVTSEIGAEXAEEVGVEHLLRDIKDTTVGTLSQRITNQVHGLKGLELPSFLDIRSFTWRRYQRKLPINHQIIYQLQDVFNLLPDASLQEFVKAFYLKTNDQMVVVYLAXLIRSVVALHNLINNKIANRDAEKKEGQEKEES

SEQ ID NO: 935361 - protein, 166 aa, Homo sapiens
  misc_feature (140)..(140): Xaa can be any naturally occurring amino acid
SNSFAVPFDEDDKDDSVWFLDHDYLENMYGMFKKVNARERIVGWYHTGPKLHKNDIAINELMKDTAPTQVLVIIDVKPKDLGLPTEAYISVEEVHDDGTPTSKTFEHVTSEIGAEEAEEVGVEHLLRDIKDTTVGTLSQXITNQVHGLKGLNSQLLDIRSYLEKVA

SEQ ID NO: 935362 - protein, 128 aa, Homo sapiens
  misc_feature (1)..(2): Xaa can be any naturally occurring amino acid
  misc_feature (29)..(29): Xaa can be any naturally occurring amino acid
  misc_feature (109)..(109): Xaa can be any naturally occurring amino acid
  misc_feature (126)..(126): Xaa can be any naturally occurring amino acid
XXLDPYITYNMWKEVRFGRLCLKVRVGSXVCTARVLPPLMFMAQEPQMPSLQDLRKVKVESTSFLILIKASNTIGPHLFRSTSYVCIRGFISSLVWVPSVNGKFFDSGXCSSSCLCPSTGLKLQAXHL

SEQ ID NO: 935363 - protein, 115 aa, Homo sapiens
VASGIPAGWMGLDCGTESSKKYAEAVGRAKQIVWNGPVGVFEWEAFARGTKSLMDEVVKATSRGCITIIGGGDTATCCAKWNTEDKVSHVSTGGGASLELLEGKVLPGVDALSNV

SEQ ID NO: 935364 - protein, 148 aa, Homo sapiens
  misc_feature (29)..(29): Xaa can be any naturally occurring amino acid
  misc_feature (52)..(52): Xaa can be any naturally occurring amino acid
  misc_feature (65)..(65): Xaa can be any naturally occurring amino acid
  misc_feature (139)..(139): Xaa can be any naturally occurring amino acid
KTPSDTHNKDCSIAATGKGHLPASPTSGXRRGGRWMMGWLREGAAIQHICDXAVRPERGLGPVQXEHATVPNLPRLDANSPSVRDVNALPAPPLPPLPEDEEGSEVTNSKSVDVYKLARQPTPPGANRRMPADSRIPSXLAALRCRAP

SEQ ID NO: 935365 - protein, 155 aa, Homo sapiens
  misc_feature (125)..(125): Xaa can be any naturally occurring amino acid
  misc_feature (147)..(147): Xaa can be any naturally occurring amino acid
YINKDSKHEELMLGDPCLKDLKKGDIIQLQRRGFFICDQPYEPVSPYSCREAPCILIYIPDGHTKEMPTSGSKEKTKVEISKKETSSAPKERPAPAVSSTCATAEDSSVLYSRVAVQGDVVRELXAKKAPKEDIDAAVKQLLTLKLXIERNWAGV

SEQ ID NO: 935366 - protein, 69 aa, Homo sapiens
LHLFDSLKPPSQVELIFYILSFCKSATVPFASVSLIPYCLAQDPGTDTQEVFVRHAESLVFKVNRHAKD

SEQ ID NO: 935367 - protein, 108 aa, Homo sapiens
  misc_feature (9)..(9): Xaa can be any naturally occurring amino acid
  misc_feature (93)..(93): Xaa can be any naturally occurring amino acid
  misc_feature (95)..(95): Xaa can be any naturally occurring amino acid
IPYSLYTRXFAETLSTKAAVNFQNILHFSPSAKKINHSVNYVVLLSSLAGVRPRSWRLANHHREKVPVLLRPLSYKLSKECLHLISLRYHRGXGXGGGYDSINFHKLL

SEQ ID NO: 935368 - protein, 179 aa, Homo sapiens
  misc_feature (161)..(161): Xaa can be any naturally occurring amino acid
AIVQPHGSQRWVTSRMGDKPIWEQIGSSFIQHYYQLFDNDRTQLGAIYIDASCLTWEGQQFQGKAAIVEKYLAFRSRKFSIASRRRTTKPTPDSCIISMVVGQLKADEDPIMGFHQMFLLKNINDAWVCTNDMFRLACTTSADLLLATVTLFPPPLSILAXPPDAPISSQRAGRADGVQ

SEQ ID NO: 935369 - protein, 168 aa, Homo sapiens
  misc_feature (164)..(164): Xaa can be any naturally occurring amino acid
EVPELPLVVEDKVEGYKKTKEAVQLLKKLKAWNDIKKVYASQRMRAGKGKMRNRRRIQRRGPCIIYNEDNGIIKAFRNIPGITLLNVSKLNILKLAPGGHVGRFCIWTESAFRKLDELYGTWRKAASLKSNYNLPMHKMMNTDLSRILKSQKSKEPSEHHARRXIAES

SEQ ID NO: 935370 - protein, 131 aa, Homo sapiens
  misc_feature (48)..(48): Xaa can be any naturally occurring amino acid
  misc_feature (68)..(68): Xaa can be any naturally occurring amino acid
  misc_feature (78)..(78): Xaa can be any naturally occurring amino acid
  misc_feature (117)..(117): Xaa can be any naturally occurring amino acid
  misc_feature (123)..(123): Xaa can be any naturally occurring amino acid
  misc_feature (130)..(130): Xaa can be any naturally occurring amino acid
SVPALSGRQGQPSLATNSPFSYLEEDSAIPITVPGRLPVSLAGHPVSXPQAAAVQAAAAQAAVANQAXALEQLREKLXVCRASGEEDGPGERIEQQRLDCNVHFQQKLSWAMAAQAXPLRHFXFNSQGNXT

SEQ ID NO: 935371 - protein, 104 aa, Homo sapiens
RSALPSERNTGQTEKASSWEAGSRDTRLQLQVVNSLKANEWPETGLGGLSTHVGAWGQGFLLSLWLAPPPLSHIPGQSRNPRTLTPLPLLYPGTPSLVLLLLLP

SEQ ID NO: 935372 - protein, 71 aa, Homo sapiens
KRKSRGWKKTELKAAPQIKLYLYTSTTDIKTDDQYKYILVDTTGPPSCVLETDFTCVSSYLNVTALEVSAL

SEQ ID NO: 935373 - protein, 88 aa, Homo sapiens
  misc_feature (50)..(50): Xaa can be any naturally occurring amino acid
  misc_feature (63)..(63): Xaa can be any naturally occurring amino acid
  misc_feature (74)..(74): Xaa can be any naturally occurring amino acid
  misc_feature (81)..(81): Xaa can be any naturally occurring amino acid
  misc_feature (86)..(86): Xaa can be any naturally occurring amino acid
MEHLCGGTPASLSNADPESAPGVGNFSQLERLHQSSCLGRPLLEDPNALXFKRREENLAILGXPEILKLLVKIXFFWEICXISIFXLE

SEQ ID NO: 935374 - protein, 104 aa, Homo sapiens
  misc_feature (25)..(25): Xaa can be any naturally occurring amino acid
LSALLSSTGRPIAFVRKIPWTAAEXELREHFAQFGHVRRCTVPFDKETGFHRGMGWVQFSSQEELQNALQQEHHIIDGVKIHVQAQRAKALHGAQTSDEERFLR

SEQ ID NO: 935375 - protein, 149 aa, Homo sapiens
ASPFEHCHVVTTTTHKTLRGCRAGMIFYRKGVRSVDPKTGKETYYELESLINSAVFPGLQGGPHNHAIAGVAVALKQAMTTEFKIYQLQVLANCRALSDALTELGYKIVTGGSDNHLIPMDLRSKGTDGGRAEKVLEAVLIACNKNTML

SEQ ID NO: 935376 - protein, 37 aa, Homo sapiens
RSCPTTARLDTTEKKTEQQRRRVEGCAQAAGTAGRVG

SEQ ID NO: 935377 - protein, 93 aa, Homo sapiens
  misc_feature (18)..(19): Xaa can be any naturally occurring amino acid
MEWNGINTIAIDWNGMEXXRIKWNGMEWNGTEWNGMERNGMERNGMEWNGMEWNGMEWNGINASVGEWNGMECNGMEWNGMQRNGINPSGIAW

SEQ ID NO: 935378 - protein, 84 aa, Homo sapiens
ECPIVVFLSLWGHKTERLTLPESLAPFTVIPYPLSVMDRGGPGLDKAPAAPCTNLHAFPRSKARIYRVHAAGSRIPSCGTERPF

SEQ ID NO: 935379 - protein, 102 aa, Homo sapiens
  misc_feature (94)..(94): Xaa can be any naturally occurring amino acid
PGRPRMEWQSRRIHGMSELVTPDSSREKKRTLLQFLSDHFQDIQTLREYLLQKQISKVNRENRLSMLEDSQGQPPGFQHFTVWPACSFLSFEEXLSHSSGQL

SEQ ID NO: 935380 - protein, 94 aa, Homo sapiens
VNHDAHYSFQVQCGLIVVAYKDGSPAHPHFMDEELCSKYWAKWFSTRRIYRKAKEPERSRASVEARDCLAMLRGDLCLGDALLSTEFLKRNAGN

SEQ ID NO: 935381 - protein, 179 aa, Homo sapiens
  misc_feature (59)..(60): Xaa can be any naturally occurring amino acid
SKGDVVCYYGNRGEPEPIVLTQADLLPIGTYGLSNALLETPWKKLCFGKQLFMEAVEQXXLPKDVLVTQLLDVLNNEEAQLPDPAIEDQGQEYVQPILNKYAAVCVRCATYGTRTNTIILVDANGHVTFTERSMLDKDTLAGRPTPYEFTLQSLPLPGSKDAVLKGNVDRNFHGHSASL

SEQ ID NO: 935382 - protein, 111 aa, Homo sapiens
  misc_feature (2)..(2): Xaa can be any naturally occurring amino acid
  misc_feature (20)..(20): Xaa can be any naturally occurring amino acid
  misc_feature (50)..(50): Xaa can be any naturally occurring amino acid
  misc_feature (106)..(106): Xaa can be any naturally occurring amino acid
MXISNHGKPDRPTPPHPSVXCFRGQLLSQDFYPSGNKLNHAHDLSVWCQXHSGSCYGMQRTTHIPVSNRMHRRDLKQQQVTRFTKGDSQSSLTHCLGCRAQLPSSXPGNIT

SEQ ID NO: 935383 - protein, 78 aa, Homo sapiens
  misc_feature (2)..(2): Xaa can be any naturally occurring amino acid
  misc_feature (7)..(7): Xaa can be any naturally occurring amino acid
  misc_feature (13)..(13): Xaa can be any naturally occurring amino acid
  misc_feature (27)..(27): Xaa can be any naturally occurring amino acid
  misc_feature (39)..(39): Xaa can be any naturally occurring amino acid
  misc_feature (41)..(41): Xaa can be any naturally occurring amino acid
GXKAVYXRCWRFXKSSPSAMGLTIKHXEETGDKRGPLIXQXKGNLNGQLRGCTQRVVMSPADLRRMAPNPPSDWPPRF

SEQ ID NO: 935384 - protein, 73 aa, Homo sapiens
  misc_feature (1)..(1): Xaa can be any naturally occurring amino acid
  misc_feature (29)..(29): Xaa can be any naturally occurring amino acid
XSRLAQVSAVPSARSRGPATAFLLPAPWXQLQLRCGVEWIAAVTFAAGTALSVYLAYKKFYAKENRTKAMGES

SEQ ID NO: 935385 - protein, 116 aa, Homo sapiens
  misc_feature (10)..(10): Xaa can be any naturally occurring amino acid
  misc_feature (29)..(29): Xaa can be any naturally occurring amino acid
  misc_feature (101)..(103): Xaa can be any naturally occurring amino acid
  misc_feature (106)..(107): Xaa can be any naturally occurring amino acid
  misc_feature (111)..(111): Xaa can be any naturally occurring amino acid
MAEQAVKHPXNAARCSCGWPPKSKACLGXRPYVAKPLWPIAKTAANLNLDSLNWVGLVKDVSVPGSERTELGVMRQPPPGDGFDRRQPSLTWLAATSAATXXXVRXXGVPXFSVGA

SEQ ID NO: 935386 - protein, 128 aa, Homo sapiens
  misc_feature (4)..(4): Xaa can be any naturally occurring amino acid
  misc_feature (86)..(86): Xaa can be any naturally occurring amino acid
  misc_feature (100)..(100): Xaa can be any naturally occurring amino acid
  misc_feature (107)..(107): Xaa can be any naturally occurring amino acid
GKAXHKLDADLVFVGYGTVAPEEGGWNDFKGMNLKGKVLVMMVNDPLPTATEPNRFNGEGLTYYGRWTYKFEESGAPRAPAANPLXPPDKVGLVRLERCXEQLGQLXALPAHRSKVGTGLQGWMTDDT

SEQ ID NO: 935387 - protein, 131 aa, Homo sapiens
  misc_feature (129)..(129): Xaa can be any naturally occurring amino acid
HSDVGSLTLVRAEFGVIPVYAEHIPCPLFSNIQPSPFRPSVRLHNRHPQLLACDLSGPASCLMEEVLKQELGNLTVLEEARSLHHGATHPDLRKPGELHTESTLAIIVTVSSIDRILSISRVLEAHEGXED

SEQ ID NO: 935388 - protein, 90 aa, Homo sapiens
  misc_feature (1)..(1): Xaa can be any naturally occurring amino acid
  misc_feature (7)..(7): Xaa can be any naturally occurring amino acid
  misc_feature (19)..(19): Xaa can be any naturally occurring amino acid
XSHPAAXRPLYAHGKMSTXPIPQCKVTQQPPMSLYAHGKISIAPPHSPVQSHPAVTRPLYAHRKMSTGPIPQCNLTQQSPILSMHTGRYP

SEQ ID NO: 935389 - protein, 97 aa, Homo sapiens
LTAHCDVSVMVPSALHSVHCDASVTVPSAPHTCSLSTVTCLSWSPRPCTRVHCDASVMVHSALHTCPLCRICHGPLGPAHVLTVHCDVSVMVPSALH

SEQ ID NO: 935390 - protein, 103 aa, Homo sapiens
  misc_feature (25)..(25): Xaa can be any naturally occurring amino acid
EFWILPLTPYFSSWLDDTPSTSILXLNIFNILILQYTDPSNTKASNYINSSPPMAFLSSFLSHYSHGHTLDFTCHYQKLLFLNFMHLTLWPLYSSLPVQSLIN

SEQ ID NO: 935391 - protein, 69 aa, Homo sapiens
ERHKQEQGKLPYKSVRPRENPLSRKQHGGNCPREPITSQLGITIRDEIWVGAQSLTIITTSLLRTQAPI

SEQ ID NO: 935392 - protein, 95 aa, Homo sapiens
TQDLMPLTKPQCPPVPPPDASSSAPVKMPSRLSFHTHCLSLPSVPQPFPLVLYSVAIPSPLLPPWHPGWGAPRETSAVPPTSVPSSGKGWGGPVL

SEQ ID NO: 935393 - protein, 67 aa, Homo sapiens
SHLKAYWGWRILFQDGVLKMAGKLVLVVGGRPQFLLYVGLFTGLSVLMTWQLHSPDRAMQENKTEAS

SEQ ID NO: 935394 - protein, 70 aa, Homo sapiens
GGPGPRAHGISAMLQLFPKPVFNTSSNVCQFSTFLHPRGVMRMPLISVYRFASQKHFFLEGHNLKMCTGA

SEQ ID NO: 935395 - protein, 42 aa, Homo sapiens
TDTGANVPPSAKVPLGLCCRRPHGAVEPGAGGGGCPLGFSCC

SEQ ID NO: 935396 - protein, 97 aa, Homo sapiens
AAVNLHLELLVHTVDLRGERGAEQSQFAFVEFEIRQPFLEFGLEFRDFGNVVQAIAFISGSQFQGGKVGQIIPRQMSLPEAQFCWNARIRSYICVTI

SEQ ID NO: 935397 - protein, 87 aa, Homo sapiens
  misc_feature (31)..(31): Xaa can be any naturally occurring amino acid
DASSSTLAPTSFLLGPGAFNAQESGQGSRAXPPTAPTPGDGGPGTPSKVTCFLPMDPATFWCKRPESVGDLELPGSTVIRVPPNTKT

SEQ ID NO: 935398 - protein, 35 aa, Homo sapiens
MEHRENTDEQALWPFKDTHCCLQLQQGKWSDMKFP

SEQ ID NO: 935399 - protein, 39 aa, Homo sapiens
  misc_feature (6)..(6): Xaa can be any naturally occurring amino acid
MANRIXSVEKSLNDLIELKTTAQELCDKCTSFRSLFDQL

SEQ ID NO: 935400 - protein, 83 aa, Homo sapiens
VPSGAILDPEKALNKTEFLSPDSLHSGGERQASEPVNRQYILWGISSVDACKEIATTLPRVSKEGLSTKVSPFRKSEEVSGEA

SEQ ID NO: 935401 - protein, 57 aa, Homo sapiens
PTGSLGGGQEHPVGVDKYFCECCRELLDTVDNYAVLQLDIVWYYFRLEQLECLDDAE

SEQ ID NO: 935402 - protein, 41 aa, Homo sapiens
LFTFREDLAVGFSDSDAKMGKSFANFMCKKDFHPASKSNIK

SEQ ID NO: 935403 - protein, 81 aa, Homo sapiens
ALQPIPKSCPVQGGAGIPQGCAALPQNQSTVGTPGCLPTTHLGTHAADRELVSIFGGLLVPCPGLEHISRLILKRPKPEAS

SEQ ID NO: 935404 - protein, 152 aa, Homo sapiens
  misc_feature (9)..(9): Xaa can be any naturally occurring amino acid
  misc_feature (22)..(22): Xaa can be any naturally occurring amino acid
  misc_feature (24)..(24): Xaa can be any naturally occurring amino acid
  misc_feature (27)..(27): Xaa can be any naturally occurring amino acid
  misc_feature (37)..(37): Xaa can be any naturally occurring amino acid
  misc_feature (85)..(85): Xaa can be any naturally occurring amino acid
  misc_feature (143)..(143): Xaa can be any naturally occurring amino acid
  misc_feature (149)..(149): Xaa can be any naturally occurring amino acid
KLCQAIGFXAVDPPRRPCGQTXVXLNXQASTPGKVTXDPGGKAGPWGLIRWAQGFLNSSSSTRFDELLQQLEKLPGGIRPETAGXLGSSKPAHSSIGELADASKASLKQGSELFEEQVVMAETLDAHGKASTTRQHVDGQDLXPPDEAXLTF

SEQ ID NO: 935405 - protein, 43 aa, Homo sapiens
  misc_feature (22)..(22): Xaa can be any naturally occurring amino acid
MNRLDLFGIEVQPLFSVLFPVXPMVGPPTTYLGARFLGVEFSR

SEQ ID NO: 935406 - protein, 98 aa, Homo sapiens
  misc_feature (52)..(52): Xaa can be any naturally occurring amino acid
  misc_feature (97)..(97): Xaa can be any naturally occurring amino acid
MYLGKKLDRKMIHHRTMSQSDCEEDPEVEFLKSLTTKQKQKLLRKLDRLEKXKKKKKSDKKKKKLQKSKLKHKKRKNKSPSSSSSSSSSSSSSSSSXS

SEQ ID NO: 935407 - protein, 118 aa, Homo sapiens
LPAFDVTELAGDAGPVSQIMQSVAFLHQTGSQAQCNLPLQAPGRVAHYSSPLLSVQGDAHQAGIGPIAVLAAFGVYRETPADIRNVPAGVMTDATVPLVFAGAVSERFGTSGMLGGIS

SEQ ID NO: 935408 - protein, 192 aa, Homo sapiens
  misc_feature (133)..(133): Xaa can be any naturally occurring amino acid
EGGAAPNQTVWGTPGGGTTRAKRPDSLGTHPVVQTSRGEEKFFTPPTGGPPGGPGNRAWVGRGNSFFSPHNLGRRPPSHTRGCFYPPQKRARFFSHREKVLGRKGDFRKTPWDTHPPRARVLLPWNFFPPSPXPRWPVTFCNKTSPRLKYKRAPIFLHGTMGRRYIGVLLTPGDGPALLARLGSTSPILSWL

SEQ ID NO: 935409 - protein, 129 aa, Homo sapiens
  misc_feature (104)..(104): Xaa can be any naturally occurring amino acid
  misc_feature (106)..(106): Xaa can be any naturally occurring amino acid
HGFCTAPKPASFSARQLPSCVPASSANGWWWPGPVGVCGSTGRRLPSALGKPAGADATSETVLSRNSGSYLVMTSSAGGVEALWPGSSRSRGQSRLFRHGRSAXCXRKPSSSDMAFVPDPARARERRPR

SEQ ID NO: 935410 - protein, 144 aa, Homo sapiens
  misc_feature (5)..(5): Xaa can be any naturally occurring amino acid
QNTGXQYDVISCLNLLDRCDQPLTLLKDIRSVLEPTQGRVILALVLPFHPYVENGGKWEKPSEILEIKGQNWEEQVNSLPEVFRKAGFVVEAFTRLPYLCEGDIDNDYLCFLDDAVFVLQTSINTWRPKSSESPLQPTLPEEEM

SEQ ID NO: 935411 - protein, 86 aa, Homo sapiens
  misc_feature (2)..(2): Xaa can be any naturally occurring amino acid
  misc_feature (55)..(55): Xaa can be any naturally occurring amino acid
YXAMTSALTQGLERIPDQLGYLVLSEGAVLASSGDLENDEQAASAISELVSTACXSSCTMARTSLSNACLWSLVNTRLLGDCFKDR

SEQ ID NO: 935412 - protein, 88 aa, Homo sapiens
  misc_feature (48)..(48): Xaa can be any naturally occurring amino acid
EVEVSSLEPHQALGTRATETVYSEIRKVDPNLMENRYSENGKAPLMEXKTVKAVHVPGRSSMSREEQPIPGLRKSCARIYEACPHRKQ

SEQ ID NO: 935413 - protein, 106 aa, Homo sapiens
  misc_feature (85)..(85): Xaa can be any naturally occurring amino acid
MNPSNLHLFISAYNSRRDLEIERPMPGTHTVTLQCPALLVVGDNSPAVDAVVECNSKLDPTKTTLLKMADCGRPSSDLSAPPKLXEAFKYFVQGMGIHGFLQHDSA

SEQ ID NO: 935414 - protein, 144 aa, Homo sapiens
  misc_feature (3)..(3): Xaa can be any naturally occurring amino acid
  misc_feature (12)..(12): Xaa can be any naturally occurring amino acid
  misc_feature (38)..(38): Xaa can be any naturally occurring amino acid
  misc_feature (42)..(42): Xaa can be any naturally occurring amino acid
  misc_feature (44)..(44): Xaa can be any naturally occurring amino acid
  misc_feature (119)..(119): Xaa can be any naturally occurring amino acid
  misc_feature (138)..(138): Xaa can be any naturally occurring amino acid
MTXVAAGGPGAXVGMDGERGGFREVSAVASGAGVTAVXWGRXEXADSARQGEDKEWMPVTKLGHLVKDMKIKSLEEIYLFSLPIKESEIIDFFPGGLSQGLRFSRLCQFKKQDPVPANXTKVQRHFVCYPGTYNGHVXLGVFKC

SEQ ID NO: 935415 - protein, 70 aa, Homo sapiens
  misc_feature (15)..(15): Xaa can be any naturally occurring amino acid
  misc_feature (58)..(58): Xaa can be any naturally occurring amino acid
GGKSAVGERLGSEGXNPAGIRAIRTATMTVGKSSKMLSILITGRGASCRTGRIFIGTXKLFDKHMNFDPL

SEQ ID NO: 935416 - protein, 125 aa, Homo sapiens
  misc_feature (10)..(10): Xaa can be any naturally occurring amino acid
  misc_feature (78)..(78): Xaa can be any naturally occurring amino acid
  misc_feature (82)..(83): Xaa can be any naturally occurring amino acid
SWLLQLSTTXVIKRLHPVQDRDRNLSALPHLQPDVLPTGHLRREKVRIPDSAEIPAPVSTSTLGFSIASGTTLSLKKXTDAXXRAGGVYFYENDLTDDPDATAEQPLLFNRLDVGRPHHAFLPHH

SEQ ID NO: 935417 - protein, 73 aa, Homo sapiens
  misc_feature (5)..(5): Xaa can be any naturally occurring amino acid
GLEPXDVEAFVIDAVGTKMVYCKIDQTQRKVVVSHSTHRTFGKQQWQQLYDTLNAWKQNLNKVKNSLLSLSDA

SEQ ID NO: 935418 - protein, 68 aa, Homo sapiens
  misc_feature (16)..(16): Xaa can be any naturally occurring amino acid
  misc_feature (27)..(27): Xaa can be any naturally occurring amino acid
  misc_feature (68)..(68): Xaa can be any naturally occurring amino acid
ARKKLLADQAEARRSXTKEARKRREEXLQAKKEEIIKTLSKEEETKKKASLVSVHSGLAVASCGSVFX

SEQ ID NO: 935419 - protein, 154 aa, Homo sapiens
  misc_feature (1)..(1): Xaa can be any naturally occurring amino acid
  misc_feature (14)..(14): Xaa can be any naturally occurring amino acid
  misc_feature (22)..(22): Xaa can be any naturally occurring amino acid
XGSPIRPQVRLPFXAREPKQQXLRLRQKCQRSLSISTTLWAGSWVVELKFALVLLAGPWWVGQEGVLCPHRQHSIQNYSHRVESLCSSPEVQSDSDGSFLPLNTAQPLSDHVLVTVFAAGTVSDEGLWEDGHSLPLGKAGALVSWEFKLHSRIE

SEQ ID NO: 935420 - protein, 87 aa, Homo sapiens
ETARPLSPVNPKLEKSDQSSTEDSGKPTGGNSGKPTGGDSGKPTEAGSNKATEDDSGKSTKVDLDKPTSKISPDTGDFRRLDKVQPT

SEQ ID NO: 935421 - protein, 83 aa, Homo sapiens
DAKDAVDLMKALQFKQVSLLGWSDGGITALIAAAKYPSYIRKMVIWGANAYVTEEDSRIYQGIRDVSKWSEKARKPLEALVWI

SEQ ID NO: 935422 - protein, 119 aa, Homo sapiens
DVAAQLGEYLEELDQICISFDEGKTTMNFIEAALLIQGSACVYSKKVEYLYSLVYQALDFISGKRRAKQLSLVQEDGSKKTVNSEDSLVKQRMSSWSLGRLPLTPGLNVGSGKMIQGIQ

SEQ ID NO: 935423 - protein, 89 aa, Homo sapiens
  misc_feature (1)..(2): Xaa can be any naturally occurring amino acid
  misc_feature (33)..(33): Xaa can be any naturally occurring amino acid
XXSPAFTMSVPAFIDISEEDQAAELRAYLKSKXAELSEENSEGGLHVDLAQIIEACDVCLKEDDKDVESVMNSVVSLPVDPGTRQAKKH

SEQ ID NO: 935424 - protein, 109 aa, Homo sapiens
  misc_feature (5)..(5): Xaa can be any naturally occurring amino acid
FSRAXFSDTNRTSPESNEGPENEMVSSLALQMSLYFNTYYFPLWWLSSIMMLHMKYSILPDYYKFIVITVIILITLIEAIRLYLGYVGNLQEKVPELAGFWLLSFYCSY

SEQ ID NO: 935425 - protein, 70 aa, Homo sapiens
  misc_feature (1)..(1): Xaa can be any naturally occurring amino acid
  misc_feature (62)..(62): Xaa can be any naturally occurring amino acid
XLHHVDPALPYISDTGTIPPERCLFGVMLNIAAVLGIATMYVRYKQVHALNPEENLIIKLNXGWALYLGY

SEQ ID NO: 935426 - protein, 107 aa, Homo sapiens
  misc_feature (28)..(28): Xaa can be any naturally occurring amino acid
  misc_feature (66)..(66): Xaa can be any naturally occurring amino acid
DLVPVSELGGPDGATAPIRSPTMAGGLXAMNRQYFNDLGQYDSGMDIWGGENLEISFPDLDVWRQXFILPCSRVGHIFRKRRPYGSPEGQDTMTHNSLEDWHMSGLG

SEQ ID NO: 935427 - protein, 76 aa, Homo sapiens
  misc_feature (18)..(18): Xaa can be any naturally occurring amino acid
  misc_feature (34)..(34): Xaa can be any naturally occurring amino acid
  misc_feature (74)..(74): Xaa can be any naturally occurring amino acid
EVCWGQRGEDGMCMGPLXDLPSLLMTAAAAKAAXGVPVQTVPATWHPGPSARLHRVRAIHSGTQAPLLLGKSPXDE

SEQ ID NO: 935428 - protein, 113 aa, Homo sapiens
RLAYLSDEMNEIESGKIIFSEHLPLSKLQQGIKSGSYLQGTFRASRENYLEATVWIHGDKEEEKEILIQGIKHQTELCNEDIVAVELLPRSQWVAPSSVVLDDEGQNEDDVEK

SEQ ID NO: 935429 - protein, 121 aa, Homo sapiens
VDRLAFSCIWEMNHNAEILKTRFTKSVINSKASLTYAEAQMRIDSAAMNDDITTSLRGLNQLAKILKKGRIEKGALTLSSPEIRFHMDSETHDPIDLQTKELRETNSMVEEFMLLANISVA

SEQ ID NO: 935430 - protein, 120 aa, Homo sapiens
  misc_feature (83)..(83): Xaa can be any naturally occurring amino acid
DKKPKKSTWRFHLDLTHPVEDGIFDSGNFEQFLREKVKVNGKTGNLGNVVHIERLKNKITVVSEKQFSKRYLKYLTKKYLKKXNLTVIGYVWVRILTKEDLRTSVISQIKSKMEDGFQKS

SEQ ID NO: 935431 - protein, 68 aa, Homo sapiens
FTLNRLRIKITVVSEKQFSKRYLKYLTKKYLKKKISVIGYVWSHLTRRLTELRYFQISQDEDGSESED

SEQ ID NO: 935432 - protein, 68 aa, Homo sapiens
  misc_feature (13)..(13): Xaa can be any naturally occurring amino acid
  misc_feature (26)..(26): Xaa can be any naturally occurring amino acid
  misc_feature (56)..(56): Xaa can be any naturally occurring amino acid
EDLSSWTAADTRXQITQRKWEAAQCXDRDRAYLEGLCVESLRRYLENGKETLQPRXPPKTHVTHHPIS

SEQ ID NO: 935433 - protein, 44 aa, Homo sapiens
  misc_feature (18)..(18): Xaa can be any naturally occurring amino acid
  misc_feature (32)..(32): Xaa can be any naturally occurring amino acid
KALQTTYGTNAPRMTSAXPALVYHHSQLQGTXRGRSNRWAMSKF

SEQ ID NO: 935434 - protein, 72 aa, Homo sapiens
  misc_feature (46)..(47): Xaa can be any naturally occurring amino acid
LTLPRAARGFGVQVSPSGEKITHTGQVTAAARHAWNPRHDGSRERXXVYDEKDYRRVRFVDRQKEVNENFAK

SEQ ID NO: 935435 - protein, 78 aa, Homo sapiens
  misc_feature (14)..(14): Xaa can be any naturally occurring amino acid
  misc_feature (62)..(62): Xaa can be any naturally occurring amino acid
  misc_feature (75)..(75): Xaa can be any naturally occurring amino acid
MAMKAVCVLKGDGXVLGTIHFEQEGKRVNQLCCQDKFTGINLKGKHGFKVHQYGDNTQGLYXLQGPSFLILNSEXNMG

SEQ ID NO: 935436 - protein, 96 aa, Homo sapiens
  misc_feature (7)..(7): Xaa can be any naturally occurring amino acid
  misc_feature (58)..(58): Xaa can be any naturally occurring amino acid
  misc_feature (79)..(79): Xaa can be any naturally occurring amino acid
  misc_feature (83)..(83): Xaa can be any naturally occurring amino acid
PDVCQAXFNEKNVCVLSEKEDRKQIRSVKSQKENTAGYTKMEHHGEVVRPGTASSEEXLIDESSAGSEQGALRGPAGVXEQQXGPVPLLSQRNNSE

SEQ ID NO: 935437 - protein, 74 aa, Homo sapiens
MSPDFTVFMIKYLMTLIVGITSGFWIWSGKTLNSWRKFYTRLTNSKQGETTVCNPDSYRYPFFGPIRSHRPGKG

SEQ ID NO: 935438 - protein, 76 aa, Homo sapiens
  misc_feature (17)..(17): Xaa can be any naturally occurring amino acid
  misc_feature (27)..(27): Xaa can be any naturally occurring amino acid
  misc_feature (43)..(43): Xaa can be any naturally occurring amino acid
  misc_feature (54)..(54): Xaa can be any naturally occurring amino acid
TLQKQSSVYGGKSTIRXRSSGTASSVXFTPLQGLEIVNPQAAXKKVAEDNQKYXSSMAEFLKVKGEKSGLMSTLND

SEQ ID NO: 935439 - protein, 72 aa, Homo sapiens
  misc_feature (9)..(9): Xaa can be any naturally occurring amino acid
  misc_feature (37)..(37): Xaa can be any naturally occurring amino acid
  misc_feature (51)..(51): Xaa can be any naturally occurring amino acid
QAGEPRALXQGDQNKGANLYRRGSGFPWTWVWDPEKXRKLGQLSSATPVGXGGLQGGSLLPGEGRRGANFSK

SEQ ID NO: 935440 - protein, 51 aa, Homo sapiens
MAWGRPLLAGLGGRALKRSGRVVIFHSEVRKAPTSPSLWWLLSALYSPAHL

SEQ ID NO: 935441 - protein, 54 aa, Homo sapiens
  misc_feature (46)..(46): Xaa can be any naturally occurring amino acid
  misc_feature (52)..(52): Xaa can be any naturally occurring amino acid
ASAINSIVYIISAPMSPLFGLLVDKTGKNIIWVLYAVAATLVSHMXLAFTFXNP

SEQ ID NO: 935442 - protein, 85 aa, Homo sapiens
  misc_feature (2)..(2): Xaa can be any naturally occurring amino acid
  misc_feature (31)..(31): Xaa can be any naturally occurring amino acid
AXLEACRALRLAMPSVGERIELGTATKSAKXQTLLGWKTVSAEGQNASDMRNKKLKYCANGPIEAKADTENFPLALLLLTLGISS

SEQ ID NO: 935443 - protein, 30 aa, Homo sapiens
MKPSVSDDEATVPLIVEGTRHFPVSQNLDI

SEQ ID NO: 935444 - protein, 66 aa, Homo sapiens
  misc_feature (17)..(17): Xaa can be any naturally occurring amino acid
  misc_feature (29)..(29): Xaa can be any naturally occurring amino acid
  misc_feature (47)..(47): Xaa can be any naturally occurring amino acid
  misc_feature (58)..(58): Xaa can be any naturally occurring amino acid
  misc_feature (64)..(64): Xaa can be any naturally occurring amino acid
LGPGSSFCMLAMSCRTXEDRRKREPSRDXGPPVVDSAAHASQGGPTXGVTGHQWTSAXWARSKXFE

SEQ ID NO: 935445 - protein, 78 aa, Homo sapiens
MLCSVLSQMSGISSVVFPADRINGFSEVIVKTQQLEDKTQFEVRLQRSFLPAAVEDGRGNAKRYSSYGHLVIYVSSLN

SEQ ID NO: 935446 - protein, 128 aa, Homo sapiens
  misc_feature (22)..(22): Xaa can be any naturally occurring amino acid
  misc_feature (44)..(44): Xaa can be any naturally occurring amino acid
QTPLFPFEPIPSWRVSYNQGIXWLRGTSLPKAYTFFIDILLEYXSRDEIAGCIEKAYEKILFAEATRILFFSTPKKMTDYAKKRGWVLGPNNYYSFASQQQKPEDSTIPSTELAKQVIEYARQLEMIV

SEQ ID NO: 935447 - protein, 68 aa, Homo sapiens
MRLRFRDTNGQLLCSVEVEAGWLDRGIRGNSWYLEDVNLDSYLCHQSSNGFSTPQLLMIEKKANDKEI

SEQ ID NO: 935448 - protein, 97 aa, Homo sapiens
  misc_feature (92)..(92): Xaa can be any naturally occurring amino acid
  misc_feature (95)..(95): Xaa can be any naturally occurring amino acid
EFSGVLHQCHILASEMVHFIHQMQYYITFEVLECSWDELWNRVQQAQDLDHIIAAHEAFLNTITSRCLLDSNSKGAFKPTEEPCLTKSLNFXNAXGR

SEQ ID NO: 935449 - protein, 108 aa, Homo sapiens
  misc_feature (5)..(5): Xaa can be any naturally occurring amino acid
AIGCXVSRTDTAIYRRFLYLKSYCSLACKKKEKQKERKRRKEKRERKEKMRFQPLFWVFFIFAMSLLFISEQKPVNFPKEKKTIQTQLLSQEMHSTSFSECPSHGENL

SEQ ID NO: 935450 - protein, 71 aa, Homo sapiens
  misc_feature (6)..(6): Xaa can be any naturally occurring amino acid
  misc_feature (27)..(27): Xaa can be any naturally occurring amino acid
GKACNXPKPIPENIKRIPQQLKSLLNXVAPLVSYGFAFPQFVTLQQLQFKNIKWKIPEIKNFKSQMVCPSE

SEQ ID NO: 935451 - protein, 117 aa, Homo sapiens
  misc_feature (23)..(23): Xaa can be any naturally occurring amino acid
PLGDLVAFSIFCLVSVWCLSLLXPLSCPPILLCCTHLPSVLEQNSVTYVPIVKTSGLTNKCLSFLLGRAASFASCPENAIILWVSIVGSLCSEEQAANATKGLAAVASGACGEPTLP

SEQ ID NO: 935452 - protein, 126 aa, Homo sapiens
TLEKCGHNKGYKGLDNCRFCPGSQCCVEDGPESIDSIIDMDAVCKRVTTLGLDVSVTISQDAGRYLCDFTYYTSLYQGPRRSAFVHVPPLGKKPYNADQAKAGRYEAIIRGDAGCPWSKPKGDISC

SEQ ID NO: 935453 - protein, 120 aa, Homo sapiens
YSFRALFYPIEGYLEHDPYALLNQNQTWCLNTVHMDTVALQEYSFSSRLPSEFMPRSVIKADTERHACYGITSTKLKSTTVSLPRTYLYAGRLGKAPTIRIDLYGYDGILTQAYPTIDPM

SEQ ID NO: 935454 - protein, 59 aa, Homo sapiens
  misc_feature (6)..(6): Xaa can be any naturally occurring amino acid
GGVDYXVEDEEVGYNTCSFQLYETGEREKQQFDLTVEDDGCMLLIVYVSIFVINRFNKA

SEQ ID NO: 935455 - protein, 130 aa, Homo sapiens
  misc_feature (10)..(10): Xaa can be any naturally occurring amino acid
STPAEAAEDXVIMAMFEQMRANVGKLLKGIDRYNPENLATLERYVETQAKENAYDLEANLASLKLYQFNPAFFQTKVTAQILLKALTNLPHTDFTLCKCMIDQAHQEERPIRQILYLRGPCWKTLPLFKA

SEQ ID NO: 935456 - protein, 57 aa, Homo sapiens
  misc_feature (1)..(1): Xaa can be any naturally occurring amino acid
XAQGTEGGIYNGFSRSATLIIFWLVFVSSKYLDGRKSLDTILTSQGLMFVCIDGPDF

SEQ ID NO: 935457 - protein, 144 aa, Homo sapiens
  misc_feature (58)..(58): Xaa can be any naturally occurring amino acid
  misc_feature (86)..(86): Xaa can be any naturally occurring amino acid
  misc_feature (133)..(133): Xaa can be any naturally occurring amino acid
KAINIQTKESHFKNPIHKKQPPGTFKQQSGGKNVSIAQFSSKYAREYNPITATIHRIXQCFLETLRFTVGSFQVAACAAQKGQRRXAALEELSLLENCSAPKESPRKAGPWAHNFILSPGSSSSTSLEVNVVXHREAHHPLPSQ

SEQ ID NO: 935458 - protein, 137 aa, Homo sapiens
  misc_feature (135)..(135): Xaa can be any naturally occurring amino acid
TGTLHQRSIAELVPKCHPLSSFEQMEAVNIAQTPAELYNAILVDTPLAAFFQDCISEQDLDEMNIEIIRNTLYKAYLEAFYKFCTLLGGTTADAMCPILEFEADRRAFIITINFSGTELSKEDRAKLFPHCGRLXPE

SEQ ID NO: 935459 - protein, 76 aa, Homo sapiens
  misc_feature (24)..(24): Xaa can be any naturally occurring amino acid
  misc_feature (38)..(38): Xaa can be any naturally occurring amino acid
  misc_feature (66)..(66): Xaa can be any naturally occurring amino acid
  misc_feature (74)..(74): Xaa can be any naturally occurring amino acid
AAAAAVAVPLAGGQEGSPGGGSSXEPGDHHGKEAEKAXSVIDSGHRGQRQTENLDQELLSLAKETXVTLEEKEXPC

SEQ ID NO: 935460 - protein, 140 aa, Homo sapiens
  misc_feature (8)..(10): Xaa can be any naturally occurring amino acid
  misc_feature (31)..(31): Xaa can be any naturally occurring amino acid
  misc_feature (34)..(34): Xaa can be any naturally occurring amino acid
RRRHRQRXXXSLERRERASRLCPDLGAYEQXAAXTDRYTIHSQLEHLQSKYIGTGHADTTKWEWLVNQHRDSYCSYMGHFDLLNYFAIAEEREQKPACVFNLIGENAAAQRAARGQSPRRTGGERCPVFPVCRLRAFLCS

SEQ ID NO: 935461 - protein, 133 aa, Homo sapiens
  misc_feature (28)..(28): Xaa can be any naturally occurring amino acid
  misc_feature (41)..(41): Xaa can be any naturally occurring amino acid
PNCFLHGPNLDLPSTYFAIARERRAKPXVRFQPDGEKLLAXQRAARGQSPRRTEVSAAQSSPCAGCEPPCSCISTIPCWLCRLTCVPVEDSEQVMERLSGSAPCELCRRSDPSIGKRGRRLHESDAHFESAFR

SEQ ID NO: 935462 - protein, 96 aa, Homo sapiens
  misc_feature (86)..(86): Xaa can be any naturally occurring amino acid
STVMLTGETKKRNGLIKKMLVLNRTRYRCLGRPVHANDRAPATEAVKMRLKVSNFTQHAFREKPFSVKKSAIPATVMEYRQHTPQXFCQRIQLSRL

SEQ ID NO: 935463 - protein, 103 aa, Homo sapiens
  misc_feature (1)..(1): Xaa can be any naturally occurring amino acid
XLPELFETSKKLLEDVEVATEPTGSRTIQDKVSKGLELLEKAAGMLSQLDLFSRNEDLEEIASTDLKYLMVPALQGALTMKQVNPSKASRSFAAGSRTLPYIS

SEQ ID NO: 935464 - protein, 79 aa, Homo sapiens
  misc_feature (4)..(4): Xaa can be any naturally occurring amino acid
  misc_feature (61)..(61): Xaa can be any naturally occurring amino acid
AKPXSADFPKSSSASRKIKSKKDEESEEKALHRMREWDGLEGHPSQGLRQPTEHGLVIQKXKGQRGAHLHTKDNFRRVQ

SEQ ID NO: 935465 - protein, 72 aa, Homo sapiens
  misc_feature (56)..(56): Xaa can be any naturally occurring amino acid
  misc_feature (72)..(72): Xaa can be any naturally occurring amino acid
KIELFADVVPKTAENFRQFCTGEFRKDGVPIGYKGSTFHRVIKDFMIQEVEILLMXMVLEVPSIYPGANFAX

SEQ ID NO: 935466 - protein, 100 aa, Homo sapiens
MRAMNGESLDGRQIRVDHAGKSARGSRGGAFGGRGRSYSRGGGDQGYGSGRYDSRPGGYGYGYGRSRDYSGRSQGGYDRYSGGNYRDNYDNLRLGHAHKI

SEQ ID NO: 935467 - protein, 51 aa, Homo sapiens
  misc_feature (12)..(12): Xaa can be any naturally occurring amino acid
  misc_feature (18)..(18): Xaa can be any naturally occurring amino acid
  misc_feature (32)..(32): Xaa can be any naturally occurring amino acid
  misc_feature (44)..(44): Xaa can be any naturally occurring amino acid
TPRSPLQAAPWXPTRQSXWGSAEPPAPLLPNXEASDDEALLAVXLLGSLVT

SEQ ID NO: 935468 - protein, 120 aa, Homo sapiens
  misc_feature (19)..(19): Xaa can be any naturally occurring amino acid
  misc_feature (22)..(22): Xaa can be any naturally occurring amino acid
  misc_feature (70)..(70): Xaa can be any naturally occurring amino acid
  misc_feature (75)..(75): Xaa can be any naturally occurring amino acid
IFKPISVDLFTHPVCWLYXWAXIVSFPKEKLAANCSYALSNSGHGLLGCLALAYQITPFACQYWGIRAQXCVCLXSGWEGSSRLVEGVLGMEEMPYFLSRERCFFFNCSKWTCLLNSFLY

SEQ ID NO: 935469 - protein, 108 aa, Homo sapiens
ELCGYRMEGSPCPQNLMTFEGGSKCLISVPQSPRQVCPQIRLLPVGDLEPVWPSPTFHPPTEVRSAPCLPLPRRPNIYRNSYSAQLLCNPDPPGSQIFIPRHPRGQVS

SEQ ID NO: 935470 - protein, 113 aa, Homo sapiens
  misc_feature (23)..(23): Xaa can be any naturally occurring amino acid
HEMVKKLHTATPPTFGVDLINEXGREFWQVSKMVWSASPLSLSARLSLKTTASPWTSLLCTLMPHLLTLANDRVPNVRVLLAKTLRQTLLEKEYFLASASCHQEAVEQTIMAL

SEQ ID NO: 935471 - protein, 253 aa, Homo sapiens
  misc_feature (242)..(242): Xaa can be any naturally occurring amino acid
MSDSHTNESEFLMGCTPLNLWDVFRNDGVPTPQVVVVTTNESPWPLGFKNRARPPRGRRYVSGVSREKWLSPRGPCGGRPKYFRGTPEGGNAQIGPTIPFYPGGATKLGLTHNARLRSQIIIPRRGGPQQGKEDKALACMSRIHRSISAQRVICDTFYGGTAPPQQSWVPNNTTPQQEMLGAPRPALAPNVSSTTPTAVPAGCPARVMRYNSPQGIYPPGPPSERCLDNTLGGKYMCSPSEXLHTEIVCVKLR

SEQ ID NO: 935472 - protein, 113 aa, Homo sapiens
  misc_feature (50)..(50): Xaa can be any naturally occurring amino acid
NSKIHLPLLGAGTKGLHHTPELVNCLLILNLVLSALRKLKRLTGVVVAQXVSSAVTSSKRMAWQWRLTNPKELCFLLAWNSLHRPDWPEESEICLLCLQRFPLVDVLIDRVCA

SEQ ID NO: 935473 - protein, 75 aa, Homo sapiens
SDGEIFEVDVEIAKQSVTIKTMLEDLGMDDEGDDDPVPLPNVNAAILKKVIQWCTHHKDDPPPPEDDENKEKPDR

SEQ ID NO: 935474 - protein, 40 aa, Homo sapiens
ANQSLPGSPHDISNSTGIKIHGQELVLKPKTCDDKVAALP

SEQ ID NO: 935475 - protein, 47 aa, Homo sapiens
  misc_feature (6)..(6): Xaa can be any naturally occurring amino acid
  misc_feature (20)..(20): Xaa can be any naturally occurring amino acid
GIRSFXGESGSPAGPGLQRXRFHRAQAAFSRPFLGGLRETWLGIGAP

SEQ ID NO: 935476 - protein, 126 aa, Homo sapiens
FINLSVLADILFMVQLNKMVMYFFPDCVPVYIYDSISYKSLNLLYPTYIVIKYVLPFAEAYSKSYSESKKEQKAIGNCYLKGSVLSFQTYFMSLGRLSCTYRHSNLFLPCQLLVHMCCVRNGTWMT

SEQ ID NO: 935477 - protein, 108 aa, Homo sapiens
  misc_feature (39)..(39): Xaa can be any naturally occurring amino acid
PQSQKCNGKDNCGDGSDEASCDSVNVVSCTKYTYRCQNXLLLSKGNPECDGKTDCSDGSDEKNCDCGLRSFTKQARVVGGTNADEGSGLGKVSLHALGQGTLCGASLI

SEQ ID NO: 935478 - protein, 122 aa, Homo sapiens
  misc_feature (5)..(5): Xaa can be any naturally occurring amino acid
  misc_feature (7)..(7): Xaa can be any naturally occurring amino acid
  misc_feature (21)..(21): Xaa can be any naturally occurring amino acid
  misc_feature (86)..(86): Xaa can be any naturally occurring amino acid
  misc_feature (115)..(116): Xaa can be any naturally occurring amino acid
LEKKXAXNPNLNTAVPLFDPXLVPWPKAGVLLDLSRSSAASYDWYQAKQPAADYDADPRSGCEIQYANIYEYYKQHRYQTVIMGAXFRKVEQILALAGCDRLTIAPNLLEQLKHXXQPVERN

SEQ ID NO: 935479 - protein, 70 aa, Homo sapiens
MLPFACHILGVKKNPSSPLYTTLGVITKGTVIEVNVSELGLVTQGGKVIWGKYAQVTNNPENDGCINAVL

SEQ ID NO: 935480 - protein, 43 aa, Homo sapiens
  misc_feature (39)..(39): Xaa can be any naturally occurring amino acid
  misc_feature (42)..(42): Xaa can be any naturally occurring amino acid
QREINLLAYHVACMGMVLFPTGSLLDLRFLSTFKPPAYXEGXC

SEQ ID NO: 935481 - protein, 30 aa, Homo sapiens
MSIWEPRIGLHETGRIVCLPFTFIWSPKYP

SEQ ID NO: 935482 - protein, 84 aa, Homo sapiens
AATICAGPSRDAEPRGHDLGRPRQCAPRMSWIKGTQVGDYFYSFGGCYWHASYLVAAARAILDKLVQSTLSDLRVYLGASTPDL

SEQ ID NO: 935483 - protein, 72 aa, Homo sapiens
  misc_feature (38)..(38): Xaa can be any naturally occurring amino acid
  misc_feature (51)..(51): Xaa can be any naturally occurring amino acid
  misc_feature (71)..(71): Xaa can be any naturally occurring amino acid
KLKSFLPIEGALRNKLLSCHQKLQLVNGLQLHSHEMQXNSHRKCHIKQSSXGLIVFETRVLSDLGFISLVXL

SEQ ID NO: 935484 - protein, 129 aa, Homo sapiens
  misc_feature (3)..(3): Xaa can be any naturally occurring amino acid
  misc_feature (14)..(14): Xaa can be any naturally occurring amino acid
  misc_feature (38)..(38): Xaa can be any naturally occurring amino acid
  misc_feature (53)..(53): Xaa can be any naturally occurring amino acid
  misc_feature (110)..(110): Xaa can be any naturally occurring amino acid
  misc_feature (113)..(113): Xaa can be any naturally occurring amino acid
LLXYNTEDAYTVQXLTDSTQIKMDILAQVLQIYLKSKXLVLEDENANVDEVEXKPDTLIKLYLGYKNKKLRVNINVPMKTEQKQEQETTHKNIEEDRKLLIQAAIVKIMXMRXVLKHQQFLVKSSSALL

SEQ ID NO: 935485 - protein, 148 aa, Homo sapiens
  misc_feature (11)..(11): Xaa can be any naturally occurring amino acid
  misc_feature (100)..(100): Xaa can be any naturally occurring amino acid
  misc_feature (122)..(122): Xaa can be any naturally occurring amino acid
  misc_feature (137)..(137): Xaa can be any naturally occurring amino acid
GLIHANPLRRXRSVFKKPKKKNMAALPPDELKELMVAIAIASIKRTTRCLIEWQLHTMTRPAEAATTRWADIDIEKKVWTIPAERMKKRRIHIVPLTDQXLALLLQQFKPYSGTPGSYVFPXQTVNPWNPLATAKPXTWELKRIGIWK

SEQ ID NO: 935486 - protein, 109 aa, Homo sapiens
  misc_feature (26)..(26): Xaa can be any naturally occurring amino acid
  misc_feature (84)..(84): Xaa can be any naturally occurring amino acid
  misc_feature (103)..(103): Xaa can be any naturally occurring amino acid
QHFEFLDRYPLANLFGEQLHVVVEAXKKTFTASQALFNVAQLRLLAWVQTVVTLHGQAVATQFVEAGNAPDVSTDVELFTQDDXRFTDFTQDGAGAHQAARGXRFLGVF

SEQ ID NO: 935487 - protein, 46 aa, Homo sapiens
  misc_feature (37)..(37): Xaa can be any naturally occurring amino acid
RRFGRLLPLQASLSMDAPGSGIAPRGIFTSTRQEGDXTPEQEGAEG

SEQ ID NO: 935488 - protein, 38 aa, Homo sapiens
  misc_feature (2)..(2): Xaa can be any naturally occurring amino acid
  misc_feature (23)..(23): Xaa can be any naturally occurring amino acid
  misc_feature (28)..(28): Xaa can be any naturally occurring amino acid
MXRKQRIVWQREAHKNIPARNVXRLEKXPERGVCRPGY

SEQ ID NO: 935489 - protein, 68 aa, Homo sapiens
  misc_feature (35)..(36): Xaa can be any naturally occurring amino acid
  misc_feature (46)..(46): Xaa can be any naturally occurring amino acid
  misc_feature (49)..(49): Xaa can be any naturally occurring amino acid
  misc_feature (63)..(63): Xaa can be any naturally occurring amino acid
STLQGEPRAPRHPRVLRSPGRGALLDEVARSTAAXXKAVPLLNFDXLLXAAPSVTREVEGEPXAPRPN

SEQ ID NO: 935490 - protein, 40 aa, Homo sapiens
FLMKSYLQAQVSPGSIPQKPLPQSVMYLATPKTSQVPSPD

SEQ ID NO: 935491 - protein, 102 aa, Homo sapiens
  misc_feature (27)..(27): Xaa can be any naturally occurring amino acid
  misc_feature (32)..(32): Xaa can be any naturally occurring amino acid
GPRGTGSEYVRSDSAGVFRSLLEAAYXKRLPXTAGDGGVRHAGGGVHIEARYRQFPQLTRFPGVPERVLQRTHVVLDSLALFGMTQKRCWVTFRILIFPVDR

SEQ ID NO: 935492 - protein, 81 aa, Homo sapiens
  misc_feature (63)..(64): Xaa can be any naturally occurring amino acid
  misc_feature (67)..(67): Xaa can be any naturally occurring amino acid
  misc_feature (70)..(70): Xaa can be any naturally occurring amino acid
HDMFTAYMEYTDPRKEIAMPVDTHPIRILSQRLSIAPFCEQDAVESFSCISPSLTRYMSWGAXXLTXKSXAQVWGPVACLR

SEQ ID NO: 935493 - protein, 135 aa, Homo sapiens
  misc_feature (116)..(116): Xaa can be any naturally occurring amino acid
KAAEEKKSLKRTFQQIQEEEDDDYPGSYSPQDPSAGPLLTEELIKALQDLENAASGDATVRQKIASLPQEVQDVSLLEKITDKEAAERLSKTVDEACLLLAEYNGRLAAELEDRRXWLGCWWIHPEPERGFVKKK

SEQ ID NO: 935494 - protein, 109 aa, Homo sapiens
SNQASGDPPDEEQVQNFTSDPSALPEFSQLLRNQIETQVKPLSLPGISSIKDLQDLFHKTGQDVDGMLTYQELWNSLGSAMPRPESLRAFDSNGDGRYSFLELRLALGI

SEQ ID NO: 935495 - protein, 89 aa, Homo sapiens
GDLVEVRSTCSCDERRRLVWRLQGVPSLEPAQLFSFPLEPRWLTRYLSSFSVRPESFIRQSLTPKAPAHSVSLPGFLSLVPTPSFHFKS

SEQ ID NO: 935496 - protein, 136 aa, Homo sapiens
  misc_feature (55)..(57): Xaa can be any naturally occurring amino acid
KPKGDDKDPSKNNSCQSSWAYWFVPIVGAILIGFLYRHFWADSKSSGGDLVEVRXXXPAMRGGDLCGGCRVFPPWNLPVVFFPLGAKMVDQDIYPPSSVRPESFIRQSLTPKAPAHSVSLPGFLSLVPTPSFHFKS

SEQ ID NO: 935497 - protein, 101 aa, Homo sapiens
  misc_feature (60)..(60): Xaa can be any naturally occurring amino acid
YQTTDKRVFNFHIKFCFADLFSPFSYHDYDMRVDDFLRRTQAVVSGRRSRPRERDRERDXTAPEITEEIESETEVVIEKEREKEYVIRDRDPRGEKVVIRR

SEQ ID NO: 935498 - protein, 105 aa, Homo sapiens
  misc_feature (4)..(4): Xaa can be any naturally occurring amino acid
  misc_feature (104)..(104): Xaa can be any naturally occurring amino acid
KKLXEEGEQFVKKIGGIFASNERWPWSKEATWVVDVKNGKGSVLPNSDKKADCTITMADSDLLALMTGKMNPQSAFFQGKLKIAGNMGLAMKLQNLQLQPGKAXL

SEQ ID NO: 935499 - protein, 125 aa, Homo sapiens
  misc_feature (19)..(19): Xaa can be any naturally occurring amino acid
PRVVPLQSRTRQPQGLPGXVCFSATAVGLCVGLCLPFSLLSLSLTLCVLLSLCVCVCVCVCVSLDECALCVKKGCLLCGPVFGEPLSASLPGSCGQLSIVFAAVPLWVCAGLDNVRGCIGPGAME

SEQ ID NO: 935500 - protein, 101 aa, Homo sapiens
  misc_feature (14)..(14): Xaa can be any naturally occurring amino acid
  misc_feature (17)..(17): Xaa can be any naturally occurring amino acid
  misc_feature (25)..(25): Xaa can be any naturally occurring amino acid
  misc_feature (38)..(38): Xaa can be any naturally occurring amino acid
  misc_feature (54)..(54): Xaa can be any naturally occurring amino acid
  misc_feature (89)..(89): Xaa can be any naturally occurring amino acid
AILHKLDQLDASRXRAXPFCGQRGXFKYEILVKKAGAXAQVRGRGGVAGPPLLXTGCAGLHPLGNESRRRRQNKGSFCKYCVKGSVCSXLGMTSLSHSIVP

SEQ ID NO: 935501 - protein, 50 aa, Homo sapiens
  misc_feature (23)..(23): Xaa can be any naturally occurring amino acid
MRPSETLVGLSGCPSGSARNGQXRGSVFMDLAVLRDPEDKCHFQRPQCRV

SEQ ID NO: 935502 - protein, 102 aa, Homo sapiens
  misc_feature (8)..(8): Xaa can be any naturally occurring amino acid
  misc_feature (12)..(12): Xaa can be any naturally occurring amino acid
  misc_feature (27)..(27): Xaa can be any naturally occurring amino acid
  misc_feature (58)..(58): Xaa can be any naturally occurring amino acid
  misc_feature (101)..(101): Xaa can be any naturally occurring amino acid
MAMLLRAXCELXMMCDIIYAGEKAQFXQAEILIGTIPGYGRHQVDSPVLLGSRWRWRXSSPVTGSQPRDAKQAGLVSKILSFLRHWLEGSHPVLQKKFASXF

SEQ ID NO: 935503 - protein, 100 aa, Homo sapiens
  misc_feature (60)..(60): Xaa can be any naturally occurring amino acid
  misc_feature (73)..(73): Xaa can be any naturally occurring amino acid
MDGSDVTQWTMPFSLYDGYTELSHPLKGTCTWVVLPEGILVPGSQGPPATLPIVMIGPDXGTVLHGTAEQHLXPVGRSEEQMMATHRTGSPNKLFSVVAH

SEQ ID NO: 935504 - protein, 43 aa, Homo sapiens
MAWWWAPVVPATREAEAGEWRELGKVELAVSQRTATALYPGRQ

SEQ ID NO: 935505 - protein, 115 aa, Homo sapiens
  misc_feature (62)..(62): Xaa can be any naturally occurring amino acid
MRSRQRRPMPGHPTEGLSDYTPSCLTLHTNRLRQSHFSPSRGVKAHLATVMGIVGRGRERVXRAPQSRGIRRMLGVYDALNHSKGCGLGIPGIFLSHLGSLPTHPSPKLGHDSLV

SEQ ID NO: 935506 - protein, 128 aa, Homo sapiens
  misc_feature (19)..(19): Xaa can be any naturally occurring amino acid
  misc_feature (49)..(49): Xaa can be any naturally occurring amino acid
  misc_feature (62)..(62): Xaa can be any naturally occurring amino acid
EPLLSPFRFLAASLGKFTXGHWRMCTATGLLLWRCHLGDSQFWRWVDFXGVTAAAVIFLKRXFNHTATIRKVEGNFNPFASPQKNRQSDENNLNRTLGVPSSTRSAKIHGLLFLSKASKIRIDCHRAL

SEQ ID NO: 935507 - protein, 80 aa, Homo sapiens
DPPGLQEFGTSKTHSLPSLAKTPTREYRFFTIDEPYIDTSLAGCWSHACNPQHFGRLRWVDTSGQEFETSLSNMAKPRLY

SEQ ID NO: 935508 - protein, 123 aa, Homo sapiens
SFVTRALLDSQFSYQHAIEESVVLIYDPIKTAQGSLSLKEYRLTPKLMEVCKEKDFSPCSIEKGKHQPFEHMFEEVPIVIKNSHLINVLMWELEKKSAVADKHELLSLASSNHLGKSLQLLMD

SEQ ID NO: 935509 - protein, 136 aa, Homo sapiens
  misc_feature (2)..(2): Xaa can be any naturally occurring amino acid
  misc_feature (9)..(9): Xaa can be any naturally occurring amino acid
  misc_feature (24)..(24): Xaa can be any naturally occurring amino acid
  misc_feature (36)..(36): Xaa can be any naturally occurring amino acid
  misc_feature (38)..(38): Xaa can be any naturally occurring amino acid
  misc_feature (74)..(74): Xaa can be any naturally occurring amino acid
  misc_feature (78)..(78): Xaa can be any naturally occurring amino acid
  misc_feature (109)..(109): Xaa can be any naturally occurring amino acid
GXNVPMKVXSPIDCKNPAIATTGXNCKHGNWKPCSXPXPWPTGYKVHTGMQQLDFCWYPQPPPKAESTPARWPXVPEXVSEHRSCCHRPKEALCLAPPIRGLWLMDQEXLDPLMQQVPNLTGPDNKAGVLVPTPQT

SEQ ID NO: 935510 - protein, 88 aa, Homo sapiens
NTSKQQQQKHQYQQRRQQENMQATESEASPPLPEEDLSKLFKPHQAPARMDSLLIAGQINTYCQNIKEFTAQNLGKLFMAQALQEYNN

SEQ ID NO: 935511 - protein, 34 aa, Homo sapiens
  misc_feature (4)..(4): Xaa can be any naturally occurring amino acid
  misc_feature (14)..(14): Xaa can be any naturally occurring amino acid
  misc_feature (28)..(28): Xaa can be any naturally occurring amino acid
KITXVLHFTKDVKXLLNQMRNFLVRASXSLRLEP

SEQ ID NO: 935512 - protein, 127 aa, Homo sapiens
SSSELGMIFNERDQELRDLGYQKHAFNMLISNRLGYHRDVPDTRNAECRRKSYPTDLPTASIVICFYNEAFSALLRTVHSVVDRTPAHLLHEIILVDDKQLTFDDLKGELDEYIQRYLPAKVKVIRK

SEQ ID NO: 935513 - protein, 148 aa, Homo sapiens
EIDEDRIPNSLLKSTLSMSPRQRKKMTRTTPTMKELQTMVEHHLGQQKQGEEPEGATESTGNQESCPPGIPDTGSASRPDTPGTAQKSAESNPKTQEQCGVEPRTEDSSAHIATTGIPREPSFGSDRSWYPGDSPLQCGKFMDTGMFL

SEQ ID NO: 935514 - protein, 130 aa, Homo sapiens
  misc_feature (25)..(26): Xaa can be any naturally occurring amino acid
  misc_feature (33)..(34): Xaa can be any naturally occurring amino acid
  misc_feature (40)..(40): Xaa can be any naturally occurring amino acid
  misc_feature (128)..(128): Xaa can be any naturally occurring amino acid
EGYRFEKLRLQYRSDSFENPVLQSXXREPGSLXXGSDGSXEQAVDLDIAPRLKQLNKRLGSLVDEFKELVYPPDYNLEGKSYQGGKHGLMEGSWEAKRPQGGEFFQEGGSLKDPTSSQGVRLGQFSLXAP

SEQ ID NO: 935515 - protein, 119 aa, Homo sapiens
  misc_feature (2)..(3): Xaa can be any naturally occurring amino acid
  misc_feature (22)..(22): Xaa can be any naturally occurring amino acid
  misc_feature (24)..(24): Xaa can be any naturally occurring amino acid
  misc_feature (30)..(30): Xaa can be any naturally occurring amino acid
  misc_feature (43)..(43): Xaa can be any naturally occurring amino acid
  misc_feature (80)..(80): Xaa can be any naturally occurring amino acid
  misc_feature (94)..(94): Xaa can be any naturally occurring amino acid
MXXSSSLEAVRRKIRSLQEHVXAXQERAGXCSATDQERNWGNXEADVASLNRRIQLVEEELDRAQERLATALQKLEEPEXADESERGMKVIENXSPKKMNEKMEIQEIQLKEAKHIAED

SEQ ID NO: 935516 - protein, 36 aa, Homo sapiens
  misc_feature (26)..(27): Xaa can be any naturally occurring amino acid
QCANTSGEPAALCGSVTTGVVGLGEXXDLGATPRSK

SEQ ID NO: 935517 - protein, 102 aa, Homo sapiens
  misc_feature (84)..(84): Xaa can be any naturally occurring amino acid
  misc_feature (91)..(91): Xaa can be any naturally occurring amino acid
  misc_feature (96)..(96): Xaa can be any naturally occurring amino acid
  misc_feature (100)..(100): Xaa can be any naturally occurring amino acid
LYQPNCFAYPPHGAKPIYSPILNTSLYYPLLCSGSQTCFLYCSLAPLIPASLRFHLGLTLTSIKLSKLPRAVLPAKVSQDRPPXISGQGPXFFPSXVYLXWG

SEQ ID NO: 935518 - protein, 131 aa, Homo sapiens
  misc_feature (8)..(8): Xaa can be any naturally occurring amino acid
  misc_feature (13)..(13): Xaa can be any naturally occurring amino acid
  misc_feature (22)..(22): Xaa can be any naturally occurring amino acid
  misc_feature (69)..(69): Xaa can be any naturally occurring amino acid
  misc_feature (105)..(105): Xaa can be any naturally occurring amino acid
  misc_feature (114)..(114): Xaa can be any naturally occurring amino acid
  misc_feature (127)..(127): Xaa can be any naturally occurring amino acid
APGTKSWXREPHXQHTIQALQXELDSLRADNIKLFEKIKFLQSYPGRGIGSDDTELRYSSQYEERLEPXSPPFSKRERQRKYLGLSPWDKATLGIGRLILFQQDXPRTISFFYXLFLHCLGLSGAVXAGME

SEQ ID NO: 935519 - protein, 106 aa, Homo sapiens
  misc_feature (9)..(11): Xaa can be any naturally occurring amino acid
  misc_feature (13)..(13): Xaa can be any naturally occurring amino acid
SDRRASGGXXXAXVVVMSDKDPPESPVVTGVASTLKDENCEPVEKPEDKSQPVVSTRKRPETKPSSDLEASALPAQETASKDVPQTGWGYWGSWGKVSALLSLKLR

SEQ ID NO: 935520 - protein, 104 aa, Homo sapiens
  misc_feature (76)..(76): Xaa can be any naturally occurring amino acid
  misc_feature (79)..(79): Xaa can be any naturally occurring amino acid
HVTTRGHLFFQHFLQQETQIAGGGQGNDLIIAGDFCQRLIGTLIGTINAYGDAHQAWILLWQCKSSGETFNSCLGXFAXSLQALNRGNLTGKEDFFLNMFRGFS

SEQ ID NO: 935521 - protein, 78 aa, Homo sapiens
  misc_feature (18)..(18): Xaa can be any naturally occurring amino acid
  misc_feature (37)..(37): Xaa can be any naturally occurring amino acid
SISQLVAAAATTDPATAXITLNLGSDYCALHSQRLKXSLVPAIENAQGITSLLTFPKTMERQLSPEFEEDRITACSRC

SEQ ID NO: 935522 - protein, 105 aa, Homo sapiens
  misc_feature (59)..(59): Xaa can be any naturally occurring amino acid
  misc_feature (102)..(102): Xaa can be any naturally occurring amino acid
MCYVKCARYIGYSLVWAAVFCIVANALLYFPNGETKYATEDHLSRFVWYFAGIVGGGCXMLLPAFVFIGMDEEDCCGCCGYENYGKRCSMLSSVLAALIGIXGSC

SEQ ID NO: 935523 - protein, 103 aa, Homo sapiens
EALEETRGFWRKKDPVPLFKVYVEELVQRLQEQVLSRPAVVQKEPVTTPEHWAQPPLWAVGEPHLACAEHTVPVVDFSENPSVPGPRGSLERSRCLSKLVKSF

SEQ ID NO: 935524 - protein, 171 aa, Homo sapiens
  misc_feature (45)..(45): Xaa can be any naturally occurring amino acid
  misc_feature (52)..(52): Xaa can be any naturally occurring amino acid
  misc_feature (160)..(160): Xaa can be any naturally occurring amino acid
LIFLVMAPLVTVVSSPRARLFACFLRLGTQQAGPLQLHTGACCTXRTTMRCXVLGGGAGGITMATRMKRRVGAENVAIVEPSERHFYQPIWTLVGAGAKELSLSVRSTLSVIPSGVQWIQDRVAELNPDENCIPHRQWQGDLLQIPYHRSLESSWTMKKXKGLPEGFAYPK

SEQ ID NO: 935525 - protein, 45 aa, Homo sapiens
  misc_feature (31)..(31): Xaa can be any naturally occurring amino acid
  misc_feature (44)..(44): Xaa can be any naturally occurring amino acid
QIQRQRDTREPTKTYTVGCEECTDPVTFPSXGGAVLRCFPVYPXP

SEQ ID NO: 935526 - protein, 31 aa, Homo sapiens
  misc_feature (3)..(3): Xaa can be any naturally occurring amino acid
AEXVQNAVTTLPVKAKYASTASQPRRPVATP

SEQ ID NO: 935527 - protein, 80 aa, Homo sapiens
MASNVTNKTDPRSMNSRVFIGNLNTLVVKKSDVEAIFSKYGKIVGCSVHKGFALAKYVNERNARAAVAGEDGRMIAGQVL

SEQ ID NO: 935528 - protein, 99 aa, Homo sapiens
MYGSSFDLDYDFQRDYYDRMYSYPARVPPPPPIARAVVPSKRQRVSGNTSRRGKSGFNSKSGQRGSSSKSGKLKGDDLQAIKKELTQIKQKVDSLLESL

SEQ ID NO: 935529 - protein, 145 aa, Homo sapiens
  misc_feature (74)..(75): Xaa can be any naturally occurring amino acid
  misc_feature (77)..(77): Xaa can be any naturally occurring amino acid
DHGGRVVPVAARRARIDVVLQTLEGREHPLESVGVERCHVAVSVDLEEQFRAADVGEDGVEGDLLLPRLPAQRXXTXAGALKLVQRGKELIDRPGLLGDAAFWKAAFEYQNQPIAMDVDRDGVVSGPLTLTVLRIGAGSSLSQPP

SEQ ID NO: 935530 - protein, 105 aa, Homo sapiens
  misc_feature (94)..(94): Xaa can be any naturally occurring amino acid
  misc_feature (96)..(96): Xaa can be any naturally occurring amino acid
IYVSQDPKDQLLLGPTYATPKVLEKAGLTMNYIDAFEFHEAFSGQILANFKAMDSDWFAQNYMGRKTKVGSPPLEKFNIWGGSLSLGHPFGATXCXAGHGSCQQD

SEQ ID NO: 935531 - protein, 102 aa, Homo sapiens
WDSSMLSVTAQAKVYERCEFARTLKRNGMAGYYGVSPGPTWVCLAQHESNYNTPSLQTYNPWRPKHLTMGYFRSIARYWCNDGKTPRAVNACGINCSALLQD

SEQ ID NO: 935532 - protein, 120 aa, Homo sapiens
  misc_feature (7)..(7): Xaa can be any naturally occurring amino acid
GEQRRLXLVLIAHDVDPIELVVFLPALCRKMGVPYCIIKGKARLGHLVHRKTCTTVAFTQVNSEDKGALAKLVEAIRTNYNDRYDEIRRHWGGNVLGPKSVARIAKLEKAKAKELATKLG

SEQ ID NO: 935533 - protein, 107 aa, Homo sapiens
  misc_feature (14)..(14): Xaa can be any naturally occurring amino acid
  misc_feature (56)..(56): Xaa can be any naturally occurring amino acid
  misc_feature (69)..(69): Xaa can be any naturally occurring amino acid
LCWVAEKESQLETXKPVGSNCCLLPSSLAGKALVLPGPSSSWGSNPPPITAGLVAXLHAGLLLSHPVAXSLWAFPHCTSLFPCLPPQGLPILAGPLSFLHSPQALPT

SEQ ID NO: 935534 - protein, 93 aa, Homo sapiens
ARIHRFLAQPECEFVRHCIQKSQERVEGKVQVSVFKGQVYILGRESPLSLYNEELVSMNVQGDYEPIDATGFININSLRLKEYHRLQSKVTAK

SEQ ID NO: 935535 - protein, 95 aa, Homo sapiens
  misc_feature (71)..(71): Xaa can be any naturally occurring amino acid
FGVVRWIVFPGIHCKVPVLSSVLRAWCVEGDGFSFLVRLWQFLEVDESGHTASAHVPCLTACSAVLKVYIXGDVTIAALEIMKLILNIALLDMPF

SEQ ID NO: 935536 - protein, 68 aa, Homo sapiens
  misc_feature (3)..(3): Xaa can be any naturally occurring amino acid
  misc_feature (6)..(6): Xaa can be any naturally occurring amino acid
  misc_feature (23)..(23): Xaa can be any naturally occurring amino acid
TGXQSXMSQVLNDPRGTPPDTPXQLPLLGPWQLEVPFYVLVSFPRCLELLFYNVCSMNLSQYAMTLHN

SEQ ID NO: 935537 - protein, 131 aa, Homo sapiens
  misc_feature (65)..(65): Xaa can be any naturally occurring amino acid
  misc_feature (107)..(107): Xaa can be any naturally occurring amino acid
  misc_feature (125)..(125): Xaa can be any naturally occurring amino acid
  misc_feature (130)..(130): Xaa can be any naturally occurring amino acid
SSLPFPGTKRLVSGWIPWRSGNGEGRGRKLSSPGIPGAGHFAYPLQPRTPCWLLKDSHWNSDPVXQLLPPAILSGWQALGVPGTLLQLGVLNSPFPFTSRPSFAFPXIAGFASCFQPCWAKSPFXFFPKXA

SEQ ID NO: 935538 - protein, 33 aa, Homo sapiens
  misc_feature (7)..(7): Xaa can be any naturally occurring amino acid
MAPSGMXGLEAHFTRTGSGGGTWFNQPARKIRR

SEQ ID NO: 935539 - protein, 104 aa, Homo sapiens
WNAMEWNPSRNAMEWNGMEWNGINPECNGMEWNGMEWNGTTRMEWNVMESKGVEENQSECNGMEWNGMELNGMEWNAWNGINPSSTEWRGLEWNGIETTRMEWN

SEQ ID NO: 935540 - protein, 114 aa, Homo sapiens
  misc_feature (12)..(12): Xaa can be any naturally occurring amino acid
WITAANQTSPSXDHCFEHLKADTTYELPSVSALVSALHTDWCQPRKEDLQNKKHRFLVNLVKWMPGITDEEWLCLFTKFTAAREECSEVQEPESCFSPESSKTGDESQATEKQR

SEQ ID NO: 935541 - protein, 137 aa, Homo sapiens
  misc_feature (1)..(1): Xaa can be any naturally occurring amino acid
XKGATVTGHELNSHRSPHGLQTGRCPFAASPAVSGLKSHSPPAPHPTSTSAVCSLTLGPWRFPEPTAACHCPGDLEHSSAPAHSVPQQPGPGRACLGQPSPHSTDPSLCRAAGHTEMDVNHSLAQARAILEGIQGAG

SEQ ID NO: 935542 - protein, 116 aa, Homo sapiens
MYLDQSQGKTSEHHRMQAVQQTNEVQGASIQDVMPSVLSVHQSPPSSPHRLTTNKSLNLIRPVFLLLLLFPPLKHSSRGQRTPVHISSLPSLCRSLPRTGSAHRSLLAGLKGLYVC

SEQ ID NO: 935543 - protein, 139 aa, Homo sapiens
  misc_feature (72)..(72): Xaa can be any naturally occurring amino acid
  misc_feature (93)..(93): Xaa can be any naturally occurring amino acid
  misc_feature (115)..(115): Xaa can be any naturally occurring amino acid
  misc_feature (126)..(126): Xaa can be any naturally occurring amino acid
  misc_feature (137)..(139): Xaa can be any naturally occurring amino acid
QSISRVSLLFFFKFSQNRRIHLFPGGKLVMPALPTPQVSVAGLCPAQVLLVLPSRVGRGLPPPNRPWPTSRXSQGIPCLDAVPSDNTQPRNTXSPSILQKYGAGQATLWTPPWPXSLESQSRAQHXLPASNLRVPGXXX

SEQ ID NO: 935544 - protein, 129 aa, Homo sapiens
GVEEPDVCTVLPKAAVIGLTKSVAADFIQQGIRCNCVCPGTVDTPSLQERIQARDNPKEALKTFLNRQKTGRFASAEEVALLCVYLASDESAYVTGNPVIIDGAGACDREDPCWEDRPFLATEQSKLPG

SEQ ID NO: 935545 - protein, 127 aa, Homo sapiens
  misc_feature (1)..(2): Xaa can be any naturally occurring amino acid
  misc_feature (50)..(50): Xaa can be any naturally occurring amino acid
XXRATALQPWATERDSVSDKNQKTIKHRGAPRLHHGVSAATWAMGGTGQXFPSAAQNRPTIVHSVCIQRLRILKCPLEEDGASASAPGRCPGGEDVPHHVAMARQCDWAPRSGCCMLGMAGDGARVG

SEQ ID NO: 935546 - protein, 139 aa, Homo sapiens
  misc_feature (13)..(13): Xaa can be any naturally occurring amino acid
  misc_feature (139)..(139): Xaa can be any naturally occurring amino acid
DARSPRPPRPALXHARAAARPQRTMASGSMATSEEERSLRECELYVQKHNIQALLKDSIVQLCTTRPERPMGFLREYFERLEKEEARQIQCLQKTGIRTDSREDEISPPPPNSSGEGADGAEGAISAEVYTEGRIAASX

SEQ ID NO: 935547 - protein, 53 aa, Homo sapiens
  misc_feature (29)..(29): Xaa can be any naturally occurring amino acid
  misc_feature (49)..(49): Xaa can be any naturally occurring amino acid
MASSLVLLHWTACWLAESRAVTKVLPYPXGIRSALTDSGWGWQQASSIXGLNL

SEQ ID NO: 935548 - protein, 142 aa, Homo sapiens
  misc_feature (138)..(138): Xaa can be any naturally occurring amino acid
LFIIIASEQFSSNHVKLSKIIQSMGKRFYIVWTKLDRDLSTSVLSEVRLLQNIQENIRENLQKEKVKYPPVFLVSSLDPLLYDFPKLRDTLHKDLSNIRCCEPLKTLYGTYEKIVGDKVAVWKQRIATSPVKNSLGVXDDDN

SEQ ID NO: 935549 - protein, 143 aa, Homo sapiens
  misc_feature (83)..(83): Xaa can be any naturally occurring amino acid
  misc_feature (131)..(131): Xaa can be any naturally occurring amino acid
  misc_feature (138)..(138): Xaa can be any naturally occurring amino acid
SSNVDKSLQESLQKTIYKLEEQLHNEMQLKDEMEQKCRTSNLKLDKIMKELDEEGNQRRNLESAVSQIEKEKMLLQHRINEYXRKVEQENEKRRNIENEVSTLKDQFEDLPESKSDLTSLPNEKADHSYRXSWKKRMXFFGTE

SEQ ID NO: 935550 - protein, 141 aa, Homo sapiens
  misc_feature (141)..(141): Xaa can be any naturally occurring amino acid
NWTHWASSVHFHHTVYFGNKPKACKEANCSCKKEEDQNHYHSITEVQDCTCCPRDLQFGEEVVYGVYQEVNSCEAAGKEGTPLPMVILCTEVKVAKKYSCFGTGNNQNDKHQKQETKHVIHLVGPNAIQNEEKLYKDAAKX

SEQ ID NO: 935551 - protein, 147 aa, Homo sapiens
  misc_feature (3)..(3): Xaa can be any naturally occurring amino acid
  misc_feature (13)..(13): Xaa can be any naturally occurring amino acid
  misc_feature (20)..(20): Xaa can be any naturally occurring amino acid
MSXSISQLESLTXELRERKXNFREFQVTSRQGLLTSCKLYWKLSEETEGSDSEMIGDLQARITSLQEEVKHLKHNLERVEGERKEAQDMLNHSEKEKNNLEIDLNYKLKSIQQRLEQEVNEHKVTKARLTDKHQSIEEAKSVAMCEM

SEQ ID NO: 935552 - protein, 162 aa, Homo sapiens
  misc_feature (33)..(33): Xaa can be any naturally occurring amino acid
  misc_feature (79)..(79): Xaa can be any naturally occurring amino acid
  misc_feature (101)..(101): Xaa can be any naturally occurring amino acid
  misc_feature (149)..(149): Xaa can be any naturally occurring amino acid
  misc_feature (151)..(151): Xaa can be any naturally occurring amino acid
  misc_feature (159)..(159): Xaa can be any naturally occurring amino acid
RAESLLGVLGRSWKLTATFSNSQHAVGVGRPVXSGAYAGPDEDDVVCGRRAPRFRDRFLACGLASRARAAPERRASSAXESCGPPGRAHKNTCLLGTNVSXCFHTQVDKPENGKADLYWKPGPNDIWCEMFLLFYKCCQPLKYFPVTSXHXNNINVLEXLPF

SEQ ID NO: 935553 - protein, 71 aa, Homo sapiens
  misc_feature (19)..(19): Xaa can be any naturally occurring amino acid
  misc_feature (49)..(49): Xaa can be any naturally occurring amino acid
  misc_feature (55)..(55): Xaa can be any naturally occurring amino acid
RAIVASAVSWRHLCRALWXSHELASPGFPTPGSPALPSCPPCLLPAQSXPRHLCXASHQPEQDALSGLVPH

SEQ ID NO: 935554 - protein, 56 aa, Homo sapiens
  misc_feature (39)..(39): Xaa can be any naturally occurring amino acid
MYTLDHLTIHLHYTRNLILLRTLSLHLTCYEAKNTVAAXWNTADCSRPYHAVQGLF

SEQ ID NO: 935555 - protein, 119 aa, Homo sapiens
  misc_feature (41)..(41): Xaa can be any naturally occurring amino acid
DEKQRDKVSSKNSLESYAFNMKATVEDEKLQGKINDEDKQXDFDKCNEIISWLDKNQTAEKEEFEHQQKELEKVCNPIITKLYQSAGGMPGGMPGGFPGGRSSPIWLVASSGPTIEEVD

SEQ ID NO: 935556 - protein, 124 aa, Homo sapiens
  misc_feature (77)..(77): Xaa can be any naturally occurring amino acid
QRYLPAKVKVIRNMKREGLIRGRMIGAAHATGEVLVFLDSHCEVNVMWLQPLLAIILEDPHTVVCPVIDIISADTRXYSSSPVVRGGFNWGLHFKWDLVPVSELGSLTAHGPNKVTYNGWRLVC

SEQ ID NO: 935557 - protein, 73 aa, Homo sapiens
PRCLKSSPTCLTTAGVREKADVLNPVITAVFLEASNSASYIQDAFQLLLPVLQISLIESKTESSTCEPQSRDL

SEQ ID NO: 935558 - protein, 39 aa, Homo sapiens
  misc_feature (1)..(1): Xaa can be any naturally occurring amino acid
  misc_feature (37)..(37): Xaa can be any naturally occurring amino acid
  misc_feature (39)..(39): Xaa can be any naturally occurring amino acid
XLPFGAEVVAKFLHKHDLDLICRAHQVVEDGYEFFAXRX

SEQ ID NO: 935559 - protein, 133 aa, Homo sapiens
  misc_feature (47)..(48): Xaa can be any naturally occurring amino acid
RFTTLQSPSKGMWGGEGLILGYRYANNDKLSKRVKKVWKPQLFTREXXYEILDKKFTVTVTMRTLDLIDEAYGFDFYILKTPKEDLGSKFGMDLKRGMLLEACSPGPPLHPEEPLEPESKPIYDKYRSFCHPP

SEQ ID NO: 935560 - protein, 120 aa, Homo sapiens
  misc_feature (119)..(119): Xaa can be any naturally occurring amino acid
IPTLFPQRTSQNLASSHTYDNFHSNSVLLQPVSLHTATAAAAANQRLPPLPSSHPVLKDGDLQPPNYYEVMEFDPLAPTTEAVYEEIDGYHQKEAQSHSDLLRYTKGQLSKRNTLIQQXA

SEQ ID NO: 935561 - protein, 79 aa, Homo sapiens
  misc_feature (62)..(62): Xaa can be any naturally occurring amino acid
FRTMVNVLGDAFGTGIVEKLSKKELEQMDVSSEVNIVNPFALEPTTLDNEDSDTKKSYVNGXFAVDKSDTISFTQTSQF

SEQ ID NO: 935562 - protein, 31 aa, Homo sapiens
  misc_feature (13)..(13): Xaa can be any naturally occurring amino acid
MLSEAVLPSMWPXNVFRKAADDTWGANLPLG

SEQ ID NO: 935563 - protein, 67 aa, Homo sapiens
  misc_feature (53)..(53): Xaa can be any naturally occurring amino acid
FFVGLSKWTNHRGAEIVADTFRDFAVSTVPVSGSSHLRGLCGMGGPRTVVAGXARLPKSSQGNGSAD

SEQ ID NO: 935564 - protein, 71 aa, Homo sapiens
  misc_feature (2)..(2): Xaa can be any naturally occurring amino acid
  misc_feature (4)..(4): Xaa can be any naturally occurring amino acid
  misc_feature (49)..(49): Xaa can be any naturally occurring amino acid
  misc_feature (68)..(68): Xaa can be any naturally occurring amino acid
PXGXEEERRAGFNFLMFCLHSLPPPGVPASPRSAAAVALSPRRRVMEAXDSGLSAAAGAEALAGEERXMSL

SEQ ID NO: 935565 - protein, 30 aa, Homo sapiens
  misc_feature (28)..(28): Xaa can be any naturally occurring amino acid
IGVGNPSMTNICNIQYMQATSYCLPNYXLR

SEQ ID NO: 935566 - protein, 94 aa, Homo sapiens
GKPNKQKGIAHPRQRPHPKSPTSNTEGRHIHKDGEKPAAKRPENSKSQNACCPPKDHSSLPAREQTWMENEFDELTEVGFRRWVITNSSKLKEH

SEQ ID NO: 935567 - protein, 82 aa, Homo sapiens
  misc_feature (42)..(43): Xaa can be any naturally occurring amino acid
  misc_feature (81)..(81): Xaa can be any naturally occurring amino acid
AYRIFKEHQIINVIGVQRILNALLIIIQNESCFRCHMAAPKXXTFPAHQKLTPPLSSVVNEPISTRIPCCRQINRQLPLIXP

SEQ ID NO: 935568 - protein, 39 aa, Homo sapiens
  misc_feature (30)..(30): Xaa can be any naturally occurring amino acid
KLQSLGASLINFRLYDEAFICGPAAMMDEXETALKALGM

SEQ ID NO: 935569 - protein, 106 aa, Homo sapiens
  misc_feature (7)..(7): Xaa can be any naturally occurring amino acid
  misc_feature (26)..(26): Xaa can be any naturally occurring amino acid
  misc_feature (32)..(32): Xaa can be any naturally occurring amino acid
  misc_feature (45)..(45): Xaa can be any naturally occurring amino acid
  misc_feature (47)..(48): Xaa can be any naturally occurring amino acid
  misc_feature (92)..(92): Xaa can be any naturally occurring amino acid
RKTGPNXTFRTLAPIPQIFGHPMPGXSPGRRXLPTVAILPVNLKXFXXVPQPIYQDGQSVDKIGRLRVFIQVAEVGSFIRASQILMMPKTTXSAAIQQLEHEMGAR

SEQ ID NO: 935570 - protein, 95 aa, Homo sapiens
  misc_feature (35)..(35): Xaa can be any naturally occurring amino acid
  misc_feature (89)..(89): Xaa can be any naturally occurring amino acid
FLRRHWFGTDEVGRDLFSRVLVGSQQSILAGLVVXAIAGMIGSLLGCLSGVLGGRADAIIMRIMDIMLSDSFVGTDNGNCCRSRAEFVXTMLAIA

SEQ ID NO: 935571 - protein, 124 aa, Homo sapiens
  misc_feature (11)..(11): Xaa can be any naturally occurring amino acid
DQVRILEAKTXFHVIRINSLRDPQPMIDSDGAVMPPLVLIADEPTTALMSLFSAQILQLIKVLQKEMSMGVIFITHDMGVVAEIADRVLVMYQGEAVETGTVNRFFMHRNILTPVRCELLFRNL

SEQ ID NO: 935572 - protein, 105 aa, Homo sapiens
  misc_feature (29)..(29): Xaa can be any naturally occurring amino acid
  misc_feature (40)..(40): Xaa can be any naturally occurring amino acid
  misc_feature (70)..(70): Xaa can be any naturally occurring amino acid
  misc_feature (72)..(72): Xaa can be any naturally occurring amino acid
PPNFTPGKVPVLVCANSGAVQTLQADHCXPFGVFAQPQFXHGLPAGPQRIVNRLPGQGLQFAQLGLQGAXRXAQLQQRLPVLWQDVEGGAYLLLLDGQADQLVEG

SEQ ID NO: 935573 - protein, 148 aa, Homo sapiens
LWPRVLLFGDSITQFSFQQGGWGSLLADRLVRKCDVLNRGFSGYNTRWAKIILPRLIRKGPGMENPVAVTIFFGANDSSLKDENPKQHVPLDEYKRQNLRDMVQYLRSVDVPRERVILITPPPLLRTAWEKECVLKGCKLNRLNSVVG

SEQ ID NO: 935574 - protein, 124 aa, Homo sapiens
  misc_feature (10)..(10): Xaa can be any naturally occurring amino acid
  misc_feature (12)..(12): Xaa can be any naturally occurring amino acid
  misc_feature (27)..(27): Xaa can be any naturally occurring amino acid
  misc_feature (36)..(36): Xaa can be any naturally occurring amino acid
  misc_feature (63)..(63): Xaa can be any naturally occurring amino acid
GPVLPAEPAXEXAANIIFASTGARAVXTAQQPTAMXGTMTVKMLAGNEFQVPEQLHVGVRAEXQITQKIGVHHSSSVWLSTRAVWRCRTGSPCQPGLGPASTVLLVVDKCDDLLNILVRNNKGP

SEQ ID NO: 935575 - protein, 148 aa, Homo sapiens
  misc_feature (40)..(40): Xaa can be any naturally occurring amino acid
  misc_feature (66)..(66): Xaa can be any naturally occurring amino acid
DLRAMEERYRRYVDKARTVIQTLEPKQRPPTVVSPEFHTXEVTALGAEPCGYGSMEMDYEKSRRGXEQEEKLLISAWYSMGMAWSIGLGKSTLLPMPSPSWHNKDWPPMLAVDPWGPGSEPPPHLTSTDKTSTSCCLLGVFQFTFTQL

SEQ ID NO: 935576 - protein, 141 aa, Homo sapiens
  misc_feature (28)..(28): Xaa can be any naturally occurring amino acid
  misc_feature (47)..(47): Xaa can be any naturally occurring amino acid
  misc_feature (89)..(89): Xaa can be any naturally occurring amino acid
  misc_feature (93)..(93): Xaa can be any naturally occurring amino acid
VTTGAIFRCHLQDIFLPAHITRFHIQRXRLAGAFSIASGGTTFARIXECGQAATSGLHWVQSSSFQMGISSAILRFSQRVVPSARCRLXNAEXRGGRHQARRASKPVTVFTKSGAASETTGGRLALLEFTGCNGTSSTDSR

SEQ ID NO: 935577 - protein, 167 aa, Homo sapiens
  misc_feature (53)..(53): Xaa can be any naturally occurring amino acid
  misc_feature (85)..(85): Xaa can be any naturally occurring amino acid
  misc_feature (106)..(107): Xaa can be any naturally occurring amino acid
  misc_feature (143)..(143): Xaa can be any naturally occurring amino acid
TIFLREYQDPTGPSASYNTQPYLNVQREKWDPSPRYVGGQEHFAHLLILRDTXTYMLAFDVNDEKNWGLSVYADKPETTKEQLEXFYELSTFRIPKSDSCNPIGKXXNCAPLEKQHEKERKQEEGNPSRTQPWIRTETLGHPXLQPDMCTSAFPSLASIKLLCFEQL

SEQ ID NO: 935578 - protein, 66 aa, Homo sapiens
MTKGLMVEDVAFLLPEDLINWIEIPTPNLDSLKDHRGRKLHKEAYISGKRTGVLTKELKKVTYWFY

SEQ ID NO: 935579 - protein, 109 aa, Homo sapiens
  misc_feature (19)..(19): Xaa can be any naturally occurring amino acid
MRVSSACGRASHHTMPDWXPHCPHLHLLGTDEQGLQASLPQWLIWHGPRTSVPGFQAIHCYYSRYALEDLDSATPGLFYLFSLSSVVFSFAVKNLVCSPPTPACLLVLA

SEQ ID NO: 935580 - protein, 139 aa, Homo sapiens
  misc_feature (4)..(4): Xaa can be any naturally occurring amino acid
  misc_feature (7)..(7): Xaa can be any naturally occurring amino acid
  misc_feature (20)..(20): Xaa can be any naturally occurring amino acid
  misc_feature (86)..(87): Xaa can be any naturally occurring amino acid
  misc_feature (94)..(95): Xaa can be any naturally occurring amino acid
  misc_feature (99)..(99): Xaa can be any naturally occurring amino acid
  misc_feature (101)..(101): Xaa can be any naturally occurring amino acid
  misc_feature (104)..(104): Xaa can be any naturally occurring amino acid
  misc_feature (128)..(128): Xaa can be any naturally occurring amino acid
GEEXSPXTQKGQVGAWLLTXPQVPHRAPSVAPACLPWLLFEGEKCKICTEKASPACLVSPGSRAAMGTQEKQEPFPKSPEIPGAKXXKSPRNLXXRGPXKXPRXPCCLPQMHVMASPFPKLNISMRPXQGLFRCMNLFI

SEQ ID NO: 935581 - protein, 76 aa, Homo sapiens
CERRLVKLRTPNMDLVTYDDVHVNFTQEEWALLDASQKSLYKGVMVETYRNLTAIGYSWEEHTIEDHFQTSRSHGR

SEQ ID NO: 935582 - protein, 66 aa, Homo sapiens
ARPCQEANCGLPVVLLLLLQSAQGVYIKYHGFQVQLESVKKLNELEEKEMSNPQPSEKWPPPCCVP

SEQ ID NO: 935583 - protein, 39 aa, Homo sapiens
  misc_feature (15)..(16): Xaa can be any naturally occurring amino acid
  misc_feature (28)..(28): Xaa can be any naturally occurring amino acid
HQGCGGANSDPLAKXXGPFADPPQRLCXAALPLLSTIVF

SEQ ID NO: 935584 - protein, 76 aa, Homo sapiens
  misc_feature (19)..(19): Xaa can be any naturally occurring amino acid
  misc_feature (21)..(21): Xaa can be any naturally occurring amino acid
  misc_feature (43)..(43): Xaa can be any naturally occurring amino acid
  misc_feature (75)..(75): Xaa can be any naturally occurring amino acid
MSEEEAKEGVKTENDHINXEXWPGKTASVVQVKDKEATPLEQXDEGLLREAGLVNEADQIQVRRAAINETDTPAXL

SEQ ID NO: 935585 - protein, 70 aa, Homo sapiens
WKVGQERQMTHVKQIRGARPKRRSGPKAKFGTSSNNLVRCLTKLPYDNTSVRKFPNYRTYNPELWSSVEY

SEQ ID NO: 935586 - protein, 56 aa, Homo sapiens
MGQGLLSFLQPKYSPAPEPSIPPGAGINKSFPKILRYLLSEQHPQLFPTGPGSHAA

SEQ ID NO: 935587 - protein, 102 aa, Homo sapiens
  misc_feature (14)..(14): Xaa can be any naturally occurring amino acid
  misc_feature (25)..(25): Xaa can be any naturally occurring amino acid
TPKLWIIGTIFPYXLAYQPWVSSWXRLAGQPWYRCRTVALETGMQNTQLCSTIVQLSFSPEDLNLVFTFPLIYTVFQLVFAAVILGIYVTYRKCYGKNDAEF

SEQ ID NO: 935588 - protein, 115 aa, Homo sapiens
  misc_feature (109)..(109): Xaa can be any naturally occurring amino acid
DRTGASVDLAICTAQAVMDNSSVCPPNATVCEGDSCVVPESNFNAILNTVMSTVLTILLAMVMFSMGCNVEVHKFLGHIKRPWGIFVGFLCQFGIMPLHKAFILSVASXSFLYRL

SEQ ID NO: 935589 - protein, 57 aa, Homo sapiens
  misc_feature (27)..(27): Xaa can be any naturally occurring amino acid
  misc_feature (40)..(40): Xaa can be any naturally occurring amino acid
CTWTDPLPASAPGDVEWGGLAAEMPSXLRGPIPDVTFELXREGETKAVKLVAPPGPR

SEQ ID NO: 935590 - protein, 95 aa, Homo sapiens
  misc_feature (3)..(4): Xaa can be any naturally occurring amino acid
  misc_feature (55)..(56): Xaa can be any naturally occurring amino acid
  misc_feature (63)..(63): Xaa can be any naturally occurring amino acid
  misc_feature (66)..(66): Xaa can be any naturally occurring amino acid
  misc_feature (69)..(69): Xaa can be any naturally occurring amino acid
  misc_feature (73)..(73): Xaa can be any naturally occurring amino acid
SSXXFAMRKLQRLNSCETKSSTSSSQKTTPDASESCPAPLTTWRQKREQSPSQHXXDPASHPXSEXGTXAHAXDGEAQGHRGMKKKMEALSARQP

SEQ ID NO: 935591 - protein, 86 aa, Homo sapiens
  misc_feature (4)..(4): Xaa can be any naturally occurring amino acid
  misc_feature (59)..(59): Xaa can be any naturally occurring amino acid
CCSXCRTGCGTRGNLVWAMRMYCTTTSSQCPVAEFHQLSQIGVVAFQVVPKFGVRLEMXVLAQLCCGFATSIVYLTWFRLTKHSFQ

SEQ ID NO: 935592 - protein, 40 aa, Homo sapiens
  misc_feature (20)..(20): Xaa can be any naturally occurring amino acid
  misc_feature (34)..(34): Xaa can be any naturally occurring amino acid
RGGSDMDRGEQGHAEDRAGXEEGEDAVTMLSAPXALTEEE

SEQ ID NO: 935593 - protein, 138 aa, Homo sapiens
NVTTCTTGFLQLEPLRVYVFGLCRRIHYGPTGRQSYCPDSLPLKGLDGHPALAFAREGAKVIATDINESKLQELESYRGIQTRVLDVTKKRQIDQFASEIQRIDVLFNVAGFVHHGTILDCEEKDWDFSMNLNVRSMF

SEQ ID NO: 935594 - protein, 116 aa, Homo sapiens
  misc_feature (16)..(17): Xaa can be any naturally occurring amino acid
  misc_feature (25)..(25): Xaa can be any naturally occurring amino acid
  misc_feature (30)..(30): Xaa can be any naturally occurring amino acid
  misc_feature (85)..(85): Xaa can be any naturally occurring amino acid
MKWMFKEDHSLEQQMXXKSAKIRAXYPDRXPVIVEKVSGSQIVDIDKRKYFGPLDITVAQFMWIIRKRIQLPSEKAIFPVCGQDXSHSPAYLWDSFTRRKKDEDGFLYVAYSGENT

SEQ ID NO: 935595 - protein, 111 aa, Homo sapiens
MEPVQFEDGQKIVVQGEPGDEFFIILEGTAAVLQRRSENEEFVEVGRLGPSDYFGEIALLMNRPRAATVVARGPLKCVKLDRPRFERVLGPCSDILKRNIQQYNSFVSLSV

SEQ ID NO: 935596 - protein, 30 aa, Homo sapiens
  misc_feature (7)..(7): Xaa can be any naturally occurring amino acid
  misc_feature (25)..(25): Xaa can be any naturally occurring amino acid
MPGMCLXISICLSEFASAPKTRAVXKHVLP

SEQ ID NO: 935597 - protein, 98 aa, Homo sapiens
MTLFTLCECRLNDSFKPVNSGYMIPYICNYLIVNSKVTTDEFEKMITEGSNTASAEIDRVIDAGKCAGLSTMKIKPYRLPLKRVLPDIAAGSDVIHAQ

SEQ ID NO: 935598 - protein, 112 aa, Homo sapiens
  misc_feature (6)..(6): Xaa can be any naturally occurring amino acid
  misc_feature (52)..(52): Xaa can be any naturally occurring amino acid
  misc_feature (78)..(78): Xaa can be any naturally occurring amino acid
  misc_feature (82)..(82): Xaa can be any naturally occurring amino acid
  misc_feature (86)..(86): Xaa can be any naturally occurring amino acid
  misc_feature (90)..(90): Xaa can be any naturally occurring amino acid
  misc_feature (95)..(95): Xaa can be any naturally occurring amino acid
HDGGGXVCMGQMEPDQVYEGITFEDFLKIWQGIDIETKMHVRFLNMETMALXPLTHRHLRGETALCNGSASRVLEQPXRRTXLLQXGYIXKARLXTLCLVGYGMWDFAVFIS

SEQ ID NO: 935599 - protein, 118 aa, Homo sapiens
  misc_feature (91)..(91): Xaa can be any naturally occurring amino acid
  misc_feature (94)..(94): Xaa can be any naturally occurring amino acid
  misc_feature (99)..(99): Xaa can be any naturally occurring amino acid
  misc_feature (114)..(114): Xaa can be any naturally occurring amino acid
RIASTGGAALIADYGHDGTKTDTLRGFYGHQLHDVFNRSLEQQTLQPDVDFSYPAQNGTRKSSLSGVQWNSETFLKNMGIDVRLKFSLDKXKVXPSCGXQAYFGRGMDMVNGIXQKDW

SEQ ID NO: 935600 - protein, 118 aa, Homo sapiens
TWVKHPRWVTRHLIQEHFYWHQVGAPQGQRSQRKEWGPIFAVLQHPLVTSSGVGGTQIKGLEVNPQQTTAALQKRYLTVERKTESNNNINQKVPTENLILKVSSLQRFKLRTNSLEDE

SEQ ID NO: 935601 - protein, 137 aa, Homo sapiens
  misc_feature (12)..(12): Xaa can be any naturally occurring amino acid
  misc_feature (31)..(31): Xaa can be any naturally occurring amino acid
  misc_feature (34)..(34): Xaa can be any naturally occurring amino acid
  misc_feature (40)..(40): Xaa can be any naturally occurring amino acid
  misc_feature (100)..(100): Xaa can be any naturally occurring amino acid
  misc_feature (104)..(104): Xaa can be any naturally occurring amino acid
  misc_feature (119)..(119): Xaa can be any naturally occurring amino acid
  misc_feature (126)..(126): Xaa can be any naturally occurring amino acid
  misc_feature (136)..(136): Xaa can be any naturally occurring amino acid
MSVICNCWVCGXLLQPTLGTLTRKKVRIEKXESXRVLGAXEEEGRAVYQTVRGESVWGLVSCIRRQRDKATELGAQNQVAAVTGAVPLKKEDPRLLWTEXFARXLTRCPFLLLHPRTQXHSVTPTXTPDSDSSPSXH

SEQ ID NO: 935602 - protein, 68 aa, Homo sapiens
CNPCLITYPIPGNDDSPQAIQLFCKLFRTTINRAKEKRRQMEALHRLQSPKGSEGSGTSPVPDKSHSP

SEQ ID NO: 935603 - protein, 67 aa, Homo sapiens
  misc_feature (8)..(9): Xaa can be any naturally occurring amino acid
  misc_feature (14)..(14): Xaa can be any naturally occurring amino acid
VSEASGAXXVTTAXRPGAAEPSPDGTTGHTYNQYTQRYNQRTNTNVNCPIECFMPLDVQADRDDSRE

SEQ ID NO: 935604 - protein, 81 aa, Homo sapiens
  misc_feature (2)..(2): Xaa can be any naturally occurring amino acid
  misc_feature (8)..(8): Xaa can be any naturally occurring amino acid
  misc_feature (37)..(37): Xaa can be any naturally occurring amino acid
  misc_feature (55)..(55): Xaa can be any naturally occurring amino acid
  misc_feature (61)..(61): Xaa can be any naturally occurring amino acid
  misc_feature (70)..(70): Xaa can be any naturally occurring amino acid
SXPCPLTXLHPCPFFLPFLTEEGLRNTLERLQAGHGXQLSPGCSFSLLAHVGAQXQLPARXRFFLCPPAXPGVASTHSFQQ

SEQ ID NO: 935605 - protein, 169 aa, Homo sapiens
  misc_feature (19)..(19): Xaa can be any naturally occurring amino acid
  misc_feature (21)..(21): Xaa can be any naturally occurring amino acid
  misc_feature (36)..(36): Xaa can be any naturally occurring amino acid
PFHGRRIFLGPKAKGFLAXDXKAASQGIHGCLRRNXRNAPERCCWSPFPLRLSWRNFQLGPETLLQDNPKLIYARLSGFGQSGIFSKVAGHDINYLALSGVLSKIGRSGENPYPPLNLLADFGGGGLMCTLGIVLALFELHTLCRGQVIDSSMVEGTAYLSSFLWKTQP

SEQ ID NO: 935606 - protein, 141 aa, Homo sapiens
  misc_feature (2)..(2): Xaa can be any naturally occurring amino acid
  misc_feature (5)..(5): Xaa can be any naturally occurring amino acid
  misc_feature (22)..(22): Xaa can be any naturally occurring amino acid
  misc_feature (52)..(52): Xaa can be any naturally occurring amino acid
  misc_feature (56)..(56): Xaa can be any naturally occurring amino acid
  misc_feature (64)..(64): Xaa can be any naturally occurring amino acid
  misc_feature (79)..(79): Xaa can be any naturally occurring amino acid
  misc_feature (85)..(85): Xaa can be any naturally occurring amino acid
PXSPXRLANGAAWRQGCGAWQXGPGRFCGMVLADFGAEVVRVNRLGSTGENXLARXSASLAVDXEALSGSHGVAAHVHXRRVAGXFRCGVMEKLQLGPETLLQDNPKLIYAKAEGFGQSGIFSKVAGHDINYLALSGVLSK

SEQ ID NO: 935607 - protein, 72 aa, Homo sapiens
KDPHNRQRRAQAEAAKDVTPTGKAGDSGTGNSFFSFSFSFSFWRQSSRSVAQAGVQWQPINGSLPLTLPRLR

SEQ ID NO: 935608 - protein, 112 aa, Homo sapiens
  misc_feature (93)..(93): Xaa can be any naturally occurring amino acid
  misc_feature (107)..(107): Xaa can be any naturally occurring amino acid
NFAPLEREMPVQFQVVELPSGHHLCKVRALNKGDANSEVTVYYQSGTRSLREYTLMELLVMHMEEPCFDFLRTKQTLGYHVYPTCRNTSGILXIFCNCWDSGNQIQXPETCL

SEQ ID NO: 935609 - protein, 63 aa, Homo sapiens
  misc_feature (23)..(23): Xaa can be any naturally occurring amino acid
  misc_feature (57)..(57): Xaa can be any naturally occurring amino acid
FTKRCSEAFVREPSKHSVGELQXMMAECSKYHGQLTKEAAMGQGFDRHLFAPTVSGXRQKGVN

SEQ ID NO: 935610 - protein, 43 aa, Homo sapiens
  misc_feature (40)..(40): Xaa can be any naturally occurring amino acid
LFSDCPVSGKQGGKARAKAKSRSSRAGIQFPVGRVHRLLXNGN

SEQ ID NO: 935611 - protein, 88 aa, Homo sapiens
  misc_feature (5)..(5): Xaa can be any naturally occurring amino acid
  misc_feature (15)..(15): Xaa can be any naturally occurring amino acid
QPNWXKPVIAKVPQXASWSSLHPESSLPVNLPGRQSWYSSLCVSTKSHQNGTLLTPAVRYGKHLRRQPVQFLVPCSVWLCNPLGPYDL

SEQ ID NO: 935612 - protein, 108 aa, Homo sapiens
FGGGMKQEDNAIIEISLKLANIYAAQNKQEFALAGYEFCISTLEGKIEREKELAEDIMSEETANTYLLLGMCLDSCARYLLFSKQLSQAQRDVLKKALQDLSRNSKGE

SEQ ID NO: 935613 - protein, 144 aa, Homo sapiens
  misc_feature (3)..(3): Xaa can be any naturally occurring amino acid
  misc_feature (15)..(15): Xaa can be any naturally occurring amino acid
  misc_feature (17)..(17): Xaa can be any naturally occurring amino acid
  misc_feature (125)..(125): Xaa can be any naturally occurring amino acid
  misc_feature (133)..(133): Xaa can be any naturally occurring amino acid
  misc_feature (135)..(135): Xaa can be any naturally occurring amino acid
WCXSVSRLLGRSATXGXPYVEWRHGKRAQLACGRLSPSSSRSRGGSHMLNVYLKSHHGEHERPEFIAYPISASGPSVSWGDGNHTLFITSCESLPTGYEDEEENLDHYRAPGTTALVWTVTLHMXQKKYIGLXSXSLLVSNDAG

SEQ ID NO: 935614 - protein, 67 aa, Homo sapiens
PSDVRRPLYKNIVLSGGSTMFRDFGRRLQRDLKRTVDARLKLSEELSGGRLKPKPIDVQVITHHMQR

SEQ ID NO: 935615 - protein, 79 aa, Homo sapiens
  misc_feature (6)..(6): Xaa can be any naturally occurring amino acid
GNEKQXYGYENTKRKIVVGLLKKDVGAQPYWLKTCNLSTLEAEMGGLLELMSSRSAWADTVRPVKNSRVQAILLPQPPE

SEQ ID NO: 935616 - protein, 104 aa, Homo sapiens
AKPKPPRRSVRFGPLFLPPVSTSPFPRMSTLKSLKAIPGPQRVKKDDEEEDPLDQLISALAVCLHFAVQEYMPNTRTGGNPTTRCRLQGFHYHTGERQRTSRGG

SEQ ID NO: 935617 - protein, 156 aa, Homo sapiens
  misc_feature (17)..(17): Xaa can be any naturally occurring amino acid
  misc_feature (41)..(41): Xaa can be any naturally occurring amino acid
  misc_feature (105)..(105): Xaa can be any naturally occurring amino acid
  misc_feature (113)..(113): Xaa can be any naturally occurring amino acid
  misc_feature (136)..(137): Xaa can be any naturally occurring amino acid
LNMLNISPFSFGLVTKXVFDNGSIYNPEVLDITEETLHSRXLEGVRNVASVCLQIGYPTVASVPHSIINGYKRVLALSVETDYTFPLAEKVNLLADPSPLCCCPXLCHHSCSXLCSPAKVEAKKSRRSRTRIWDLXXLTNHQKATNLASFICKTRK

SEQ ID NO: 935618 - protein, 63 aa, Homo sapiens
AGEGGWAGQASRSPLAIAFCPQGENCTYKAVHNTAVLFLTERPCFASGAPTLKRLQELECCLP

SEQ ID NO: 935619 - protein, 80 aa, Homo sapiens
DDLRKEISKTMFAEMEIIGQFTGFTKLNEDIFIVDQHATDEKYNFEMLQQHTVSQCQRLIAPQTLNLTAVNEAVLIKNLE

SEQ ID NO: 935620 - protein, 55 aa, Homo sapiens
PIPRLPLSLVSFETEHSYLCTVTWSAGKGIQVELYSFPRDPEIEMSGGLVNWSSV

SEQ ID NO: 935621 - protein, 83 aa, Homo sapiens
IRHEALQDPRCRAGVGRHAPEILIRSECGLAAVGYSKADIPATSERERCPQERGHQALHPGPSQKGGLAFLFFKASIETCINW

SEQ ID NO: 935622 - protein, 67 aa, Homo sapiens
QTPSRDHQPDVRSYTITGLQPGTDYRIYLHMSWGPEKGGIQGVTLMKAPVFDDGKTIPRWEPRCKRE

SEQ ID NO: 935623 - protein, 108 aa, Homo sapiens
  misc_feature (14)..(14): Xaa can be any naturally occurring amino acid
  misc_feature (35)..(35): Xaa can be any naturally occurring amino acid
  misc_feature (62)..(62): Xaa can be any naturally occurring amino acid
  misc_feature (70)..(70): Xaa can be any naturally occurring amino acid
  misc_feature (80)..(80): Xaa can be any naturally occurring amino acid
  misc_feature (85)..(85): Xaa can be any naturally occurring amino acid
LSTRLPGPTFLPLXFVSVSYFLFSVSCLHLARNTXRCGRQAPFNTKKIYMGLDFFSLGKKIXIIWPGANXGAAVPALWEXEAGGXLELRSSRPVWTNMAKPRYLQSKK

SEQ ID NO: 935624 - protein, 60 aa, Homo sapiens
VTTGVRQSSGSLPQSPELKVPKWWDTVKLAKHKGLLLRETGSTRDCSTAGPYLRVGLGLG

SEQ ID NO: 935625 - protein, 33 aa, Homo sapiens
EWLCRSRFDNRYALCSMADQLITEQIADLQEVF

SEQ ID NO: 935626 - protein, 37 aa, Homo sapiens
MGLTTHHIHNTTPSFTREYHPHVHTPIRHSPPIPQPP

SEQ ID NO: 935627 - protein, 52 aa, Homo sapiens
RVDMISWPLTFSDDNATMQSPVCRGQFSQAFWKQGFRGGLHHLTEHSLMSPA

SEQ ID NO: 935628 - protein, 37 aa, Homo sapiens
AGNRNSLNYPARHDPSPNRPPSYDPLHTDEVNDPSLP

SEQ ID NO: 935629 - protein, 52 aa, Homo sapiens
PGELSSQGCVTSTEDKTESSRRPSKLFDRTSNGQGSLFKASLGLVQGPGKNP

SEQ ID NO: 935630 - protein, 69 aa, Homo sapiens
VSVAGRPLLSDVAARAMLSPSESFIVALGYKSKIFKSRELEESRRWPTSAGTSPATGLCVCCRAYYLKE

SEQ ID NO: 935631 - protein, 70 aa, Homo sapiens
KRSGDTCVSQIAGLCPVLQLDVTPVHSSTEHQPKKYALSQSYQHFRTRTSIKSVHLRPPISPDTDTACRS

SEQ ID NO: 935632 - protein, 42 aa, Homo sapiens
MAHEISYGSFGRSLLSTTLLFRQDRGRATGLEACRRNFGRMA

SEQ ID NO: 935633 - protein, 36 aa, Homo sapiens
RRVVYAECKRRFRLCSKDDRVETDKNQPVQRTPTHI

SEQ ID NO: 935634 - protein, 68 aa, Homo sapiens
VTHVRHMACGGPLRGIYAYGFENHQQSSNEQSRQDHQRGEMSSHSLSPGTGKTATFSISVPPVFGIFR

SEQ ID NO: 935635 - protein, 45 aa, Homo sapiens
SYTATMPFGNTHTTFRLITAQEEYPALSNHNHPHGQGPYPWTSTG

SEQ ID NO: 935636 - protein, 82 aa, Homo sapiens
NYTAVSSQDEIWDILKYQILWRITTITSVVFNICLLSLPVDVVVMYESALTDQIELFTSIRVDACKAAILDLVFLNRGDWSL

SEQ ID NO: 935637 - protein, 46 aa, Homo sapiens
EYFQESKLDPEPDELPENSIRAHPLFSKMVEILWKRRQTHPSPVNP

SEQ ID NO: 935638 - protein, 34 aa, Homo sapiens
KPQGDGGPFETQIWLKSDCHIKRIPCVQTLLQSL

SEQ ID NO: 935639 - protein, 38 aa, Homo sapiens
MASRPRHESLSERALINHPDRNSDQSKVKKEEKKFKEV

SEQ ID NO: 935640 - protein, 71 aa, Homo sapiens
LRHQGFCSPTWSTYGEIEDTHQKGFVLKKEADVKTTPSLTLHADYEEDKGVLATKRAGHITAVDPTRNSRP

SEQ ID NO: 935641 - protein, 30 aa, Homo sapiens
MSLPQGQPRNCLLQSTHNECQLIQEAAYQH

SEQ ID NO: 935642 - protein, 59 aa, Homo sapiens
MSRTGGTEEKPRCIFGNRRTCAGKGEVERAFRYYWPLDLYGFEKPPGFPFVDSRSRDAE

SEQ ID NO: 935643 - protein, 37 aa, Homo sapiens
EAMSSKDTRATPRYEAVREGPHGTQRKPCKFPGDGGS

SEQ ID NO: 935644 - protein, 75 aa, Homo sapiens
RHRDRERDRTTQIGVSLEANVILMDLHLLTFIRTKGRSVPTLPSSKPLTSVPDNQGITLDPTGLRLLRSPIHTLF

SEQ ID NO: 935645 - protein, 63 aa, Homo sapiens
QKPPVEQKGQEDVKPEKEAKMTDFDRFKVMKAKKMRTDYQDEVKSFKGSSPEASPKSTWYSGY

SEQ ID NO: 935646 - protein, 72 aa, Homo sapiens
IKPVQPVMKVAVKMLKPTARSSEKQALMSELKVMTHLGPQFEHVNLLGACTKSGPFTSSQGIASMKVGNYLH

SEQ ID NO: 935647 - protein, 87 aa, Homo sapiens
MLLMGTSQKNKLLFPFRELFDHGCDSLSTVFMAVELPIAVAEELILLVFFPLLLFGMFGVLLRSMADLCFRHVEIWKVDVTEIQIAL

SEQ ID NO: 935648 - protein, 58 aa, Homo sapiens
NTEPILSTAITIYWVSIYLLQASEYFGSPFTISDGIYGFTIFVATAFPRTSRHYWLTF

SEQ ID NO: 935649 - protein, 110 aa, Homo sapiens
RRRAYNGSVRKAVRLRFQGICEARRSIHHEQSSPSELKNLWTGGIIEIKCGRHVHGYCGDLILMTFDNECVRWRLVDTDNIGWWYTRNSIIMLEPWTSINNGCSAENHVL

SEQ ID NO: 935650 - protein, 64 aa, Homo sapiens
ATDIAIQAGGDHEALRGSSINIYAKDTNQASRYRVRHGEGPYMSPMEPRNLHFSKVLATSQDGE

SEQ ID NO: 935651 - protein, 99 aa, Homo sapiens
LRTREHASRKGSPSSLSEEERRNTRERLVQSPNFLIHGCEMPRMLEITTVFSHAQTVVLCVGCSTVLASLQEESRLTEDVPQRSSIKHFSQMSGTINNH

SEQ ID NO: 935652 - protein, 46 aa, Homo sapiens
RCRGIFYSETWNFIPGQTFRALDTQTPCDDLPGFNLFSYLWNQIWT

SEQ ID NO: 935653 - protein, 53 aa, Homo sapiens
TDFSAYEFSLMQGKGLYDKEETRHLRGGQWRLGSPWTSFIFFWGGEVPEKGGK

SEQ ID NO: 935654 - protein, 84 aa, Homo sapiens
GNSSTMDLTLFAAEAIALTASYLSTENELAEEPEALADGLCSMKLSLLQSPGPETLGQAGRVKTGAANSTLNAPYTYRPSRRIS

SEQ ID NO: 935655 - protein, 50 aa, Homo sapiens
GKHSAQPRGPSGESLSDQSPVRGQEFPKVLAHLLSVCSSEPLDMRQPDVP

SEQ ID NO: 935656 - protein, 98 aa, Homo sapiens
TKHLKRACSTEALDAGQTNGCICTSSIARSHKLRVMSSTDRFLGQLKYALTGDEVKKICIQRFIKIDAKVELISIPLFMDVISIERQVTFRMDLPRPV

SEQ ID NO: 935657 - protein, 43 aa, Homo sapiens
EIASLCRRFIDTTLAITSRFARCTEEASRPSPEDDKRQRTVTK

SEQ ID NO: 935658 - protein, 61 aa, Homo sapiens
GNVLAGYPIKLPKSQTPMGPFPQRRPKATIHKPCGAKVQMWKMLEGTPWAGSLIALPPGPR

SEQ ID NO: 935659 - protein, 276 aa, Homo sapiens
MPYSPPLFPGKTGATWNSNYFLKIIQLLDYYPKFFIFGSDNLGSKQMQQILIFLRGNSFFLMGKNTIIRKAIRGHLENNPALEKLLPHILGNFGFFFTKEDLTEIRDIFLANNFPSSSLSFSISPFYFTLPAQNTGLGPEKTSFFQALGITTKISMGTIYILIYVQLIKTGDKVGASEATLLNMLNISPFSFGLVIQQVFDNGSIYNPEVLDITEETLHSRFLEGVRNVASVCLQIGYPTVASVPHSIINGYKRVLALSVETDYTSHLLKSQGLLG

SEQ ID NO: 935660 - protein, 31 aa, Homo sapiens
GDHQLIQEALVFDNKHTNYTMEHIRLGWDLL

SEQ ID NO: 935661 - protein, 70 aa, Homo sapiens
VTRTLPIHVFRRYIKDPTALYLLGFYLSNTRKEKARLTLRLHERRTLPQFSKMEEEYIQQLFQDISTEAR

SEQ ID NO: 935662 - protein, 78 aa, Homo sapiens
SGEAEYIEKVVYTVKQSPEDVKKTLDGELDEKYKPRNFNSKKPEESADARRKAEMLQNEGKTFLAQANSKLPPLKGLD

SEQ ID NO: 935663 - protein, 33 aa, Homo sapiens
LLKVIILGDSGVGKTSFMNQLCLIRIQQSVAKP

SEQ ID NO: 935664 - protein, 84 aa, Homo sapiens
NKRQPFWQKGIQIQNAELQRMEQEAERRSSHNEAEPESEVEEKKAERRKRETMEEEEEQSKALSETTLRPSALSICFLCQCIAT

SEQ ID NO: 935665 - protein, 113 aa, Homo sapiens
  misc_feature (96)..(96): Xaa can be any naturally occurring amino acid
  misc_feature (105)..(105): Xaa can be any naturally occurring amino acid
  misc_feature (107)..(107): Xaa can be any naturally occurring amino acid
GYSGKTPISTENIKVSQVWWCTSVIPATQEDEVGGGGGFSELRLCHCTPAWATRVRSCLKKKKKTKKERERSNYHSHPSLQQPRPWVSSHSTSRQXPPLGKKILXYXKASVIC

SEQ ID NO: 935666 - protein, 44 aa, Homo sapiens
GALSVNKKAQALAYSVALWCVLMRTKIFYSVTKQGARTAKELMS

SEQ ID NO: 935667 - protein, 108 aa, Homo sapiens
  misc_feature (85)..(85): Xaa can be any naturally occurring amino acid
MAICTDSGCTTTNFDAIGGGSSYINSECIRANLAKAPEAVSIIAIGFNGTVCSEIDNRVFLYVYPHGAVALNIQIVRSVAVKRAXPLGVIAVETTDINTCTSIGRDFT

SEQ ID NO: 935668 - protein, 54 aa, Homo sapiens
YLKQLCSSVSSKHKEVSPGGGQLQLWRHGPPPQTHLMHTANPLPQERALGRSPR

SEQ ID NO: 935669 - protein, 59 aa, Homo sapiens
RKVMAVVRRLSGQDVGSFAYLTIKDRIPQILTKVLIHCIDIKVNFFETTGEEGVELKRK

SEQ ID NO: 935670 - protein, 38 aa, Homo sapiens
MTVDIPDHVDITLKGRQLSCRAHDDPRRDVITSVRLSL

SEQ ID NO: 935671 - protein, 71 aa, Homo sapiens
  misc_feature (41)..(41): Xaa can be any naturally occurring amino acid
  misc_feature (57)..(58): Xaa can be any naturally occurring amino acid
VHKNVARSLLMERDALKPQLAPDRAAHPKQLPSTSCSEQPXASTLQNLSGGVLRQSXXHRVRVRRRPEHVC

SEQ ID NO: 935672 - protein, 33 aa, Homo sapiens
  misc_feature (28)..(28): Xaa can be any naturally occurring amino acid
EVLRSWGCLGIHHSLFGDVKKLITDEFXKQKYL

SEQ ID NO: 935673 - protein, 42 aa, Homo sapiens
RIGTKAAAVLPQFLAHLTMFPWSKRTNRSSSEHSAHMAATPE

SEQ ID NO: 935674 - protein, 60 aa, Homo sapiens
RAYHQKIDSNLDELSIGLGSSSGHSPGDADRIEEQNDILTADTKWQVDVTIKAQKKVDTL

SEQ ID NO: 935675 - protein, 53 aa, Homo sapiens
VGKTSALRKAAKREPRRKWLFHFTKKDWYDVKEATMFNIRHIGKTLVNRIHGP

SEQ ID NO: 935676 - protein, 135 aa, Homo sapiens
  misc_feature (6)..(6): Xaa can be any naturally occurring amino acid
  misc_feature (20)..(20): Xaa can be any naturally occurring amino acid
  misc_feature (26)..(26): Xaa can be any naturally occurring amino acid
  misc_feature (30)..(30): Xaa can be any naturally occurring amino acid
  misc_feature (83)..(83): Xaa can be any naturally occurring amino acid
  misc_feature (101)..(101): Xaa can be any naturally occurring amino acid
  misc_feature (121)..(121): Xaa can be any naturally occurring amino acid
  misc_feature (133)..(133): Xaa can be any naturally occurring amino acid
WDPKLXLGPREEAWFWPQEXSSQKKXFPFXSYCVLKTPGILSPCSLPALESQFLRTSGSLLQNGGPCLPPKDLLRPNVPTAPXQHLVSFNNKFLPDHRSRXLCRMEYGRAPGQPSSMGRNXSLTSPLNPPPFXSA

SEQ ID NO: 935677 - protein, 34 aa, Homo sapiens
MAFKDTGKTPVEPEWQFTEFESPNKAARKFLEKV

SEQ ID NO: 935678 - protein, 73 aa, Homo sapiens
  misc_feature (66)..(66): Xaa can be any naturally occurring amino acid
ACLSLPKCWDYRHEHHARPGMGHFSWYCSIHQRGLQQTLEGQSLRPERHRAASRWVWAAQDNGEGXQRGLPCP

SEQ ID NO: 935679 - protein, 43 aa, Homo sapiens
SRGGLRAAPCTNSVARASGKSFPPEMLGEIKNQPDQLLTRYRQ

SEQ ID NO: 935680 - protein, 66 aa, Homo sapiens
QAKSCLFCKLGACRRGPAANSDLSGPHAVTRQSSQYSVNNGITACHRQHSKDLHSSEVSYMSPEHG

SEQ ID NO: 935681 - protein, 66 aa, Homo sapiens
  misc_feature (9)..(10): Xaa can be any naturally occurring amino acid
  misc_feature (55)..(55): Xaa can be any naturally occurring amino acid
  misc_feature (58)..(58): Xaa can be any naturally occurring amino acid
TTASTPSSXXCMAFPETFAKGTVESIMRDKMPKKGGRWWFSWRGRNTTIKEESKXEQXLAGKAHST

SEQ ID NO: 935682 - protein, 85 aa, Homo sapiens
KEEKESEDKPEFEDVGSDEERKRRMVQEEEEEIRESTSIRGAHKQAIWTRIRRYTMRSTRSYRATMTGRSLALAFSVEDSGFRAF

SEQ ID NO: 935683 - protein, 80 aa, Homo sapiens
LPTRCQVSSRVYPASARLHPAPVPPVWPTGAHTPLTITLKHLRVRRGEEDSQPEEKKNPDELETDCPRIGQKMTSHIISE

SEQ ID NO: 935684 - protein, 54 aa, Homo sapiens
MPPLKAPGEGTQSTVITGVDIVMTITFRKQVSQKSLQESSRFHESFKGTLRQDR

SEQ ID NO: 935685 - protein, 66 aa, Homo sapiens
KKEASPLPKLKPKLKALKAKKAVLKGVHSHKKRRIRTSPTFRRPRTIRFRRQPKYPRKSASTANHA

SEQ ID NO: 935686 - protein, 117 aa, Homo sapiens
IAHRKGWLSLHTGNLDGEDHAAEQPVEDVFLRKFMWGTFPGCLADQLVLKRRGNQLEICAVVLRQLSPQSTTSRGSVNFAVYFTMSVRLTQLCLSVYSTLTSLFHQLSSNERGRLYW

SEQ ID NO: 935687 - protein, 64 aa, Homo sapiens
TGCGVCCYSRASQLPPKDDKKEEGQVGKSAKKDKDPVNESGGKAKKEEVVEGKVRDKLILSFVC

SEQ ID NO: 935688 - protein, 46 aa, Homo sapiens
CTFGIDEDFMRSFEFLPGWSLSRMRFCRYVMFRSRPVPASAPGAKA

SEQ ID NO: 935689 - protein, 45 aa, Homo sapiens
DNHLMGPIQDTSEYIIFMSSCWALMMDPYSSGVLDFYQCHSDRLP

SEQ ID NO: 935690 - protein, 67 aa, Homo sapiens
RNKAVGEKVVRDAFPEAIIVKPSDIFGGEDRFLNLLQYASVWSYTLGPWLETVNTSICVMIKNCNAV

SEQ ID NO: 935691 - protein, 47 aa, Homo sapiens
GIKNPVNKGTTTVDGAGFGIYRPAEFSKEDASIKAFPKRMMLAYRSA

SEQ ID NO: 935692 - protein, 64 aa, Homo sapiens
KRRRKLLPLLKLEAKAKAFKETKKAVLKVSTATQEEASDVDHLPRRDIDSAQPNISEASREQLT

SEQ ID NO: 935693 - protein, 52 aa, Homo sapiens
TNREAVEVTFADFRWGPLSIFQILMETNKSDGQYFFEFYKDFKHMSDELLKR

SEQ ID NO: 935694 - protein, 55 aa, Homo sapiens
LDNTLLMKTLQQTYDDSAPTRGLRHFMGRQKSRGQHTNDHLAAVAAPTGHPRESS

SEQ ID NO: 935695 - protein, 37 aa, Homo sapiens
  misc_feature (7)..(7): Xaa can be any naturally occurring amino acid
TRGTGEXFTFTHFVQMRAKNLIFNKSFFLQSFQGRSS

SEQ ID NO: 935696 - protein, 70 aa, Homo sapiens
MPPYTVVYYPVRGTLRRRIAAGRSGPELEGGGVTVETWQEDSLKASCLYGQLTKIQDGDLTLYQYNTSAY

SEQ ID NO: 935697 - protein, 55 aa, Homo sapiens
EKGRLGAQGPPGAPGPLWIAWDHCSTGSCRTTRHARSRGSLPSGVRVKWNQSYVS

SEQ ID NO: 935698 - protein, 38 aa, Homo sapiens
KTFGCVIDRNDSLTADPRYRGHALRQPTLKYRYGYLDS

SEQ ID NO: 935699 - protein, 63 aa, Homo sapiens
ALHDISEVDSTDEEQATRLERKIMLAAKKGLDPYTVLPQGSFRHQEGPNLVPSISTRRLVGCI

SEQ ID NO: 935700 - protein, 41 aa, Homo sapiens
TGRLDLDQIVFKMAKLGRRRKNVEPVKRPSTMAEENPVNGR

SEQ ID NO: 935701 - protein, 112 aa, Homo sapiens
  misc_feature (55)..(55): Xaa can be any naturally occurring amino acid
  misc_feature (59)..(59): Xaa can be any naturally occurring amino acid
  misc_feature (61)..(61): Xaa can be any naturally occurring amino acid
  misc_feature (100)..(100): Xaa can be any naturally occurring amino acid
  misc_feature (103)..(104): Xaa can be any naturally occurring amino acid
SAISVARTLLVFEVKKPFLFVLWDQQHKSLSSWGEYMTPGPETCRIRLGERYLSXLSSXVXPAAACLDLPLPPPASGVRYPPKGLLRVWEGPASISPSSXLHXXQTTFCSFL

SEQ ID NO: 935702 - protein, 60 aa, Homo sapiens
ARKEAPAPPKAEAKARLLKARRQCGKVSTATKGGDPTRTTFRAEQLDSDSPISGDRSRRQ

SEQ ID NO: 935703 - protein, 38 aa, Homo sapiens
MLHRFKPCVQSLTTAVMPMYDRRLESTLLKIIHLLIDI

SEQ ID NO: 935704 - protein, 80 aa, Homo sapiens
MLRIPVRQALVGFLSLLKDVFEQLPQQQATCIRVFVDGQSLMAGTGTTFSKLVRRIGMQIPRFCYHEGCLVAGTAGRSLM

SEQ ID NO: 935705 - protein, 71 aa, Homo sapiens
  misc_feature (5)..(5): Xaa can be any naturally occurring amino acid
  misc_feature (14)..(14): Xaa can be any naturally occurring amino acid
  misc_feature (26)..(26): Xaa can be any naturally occurring amino acid
  misc_feature (33)..(33): Xaa can be any naturally occurring amino acid
  misc_feature (60)..(60): Xaa can be any naturally occurring amino acid
QDLTXRQLILKYVXPLSGRVPFNHEXSGAYLCXLSPVSGQTSSRQIFMINQRRGLMPTSXHHQNVNTITSL

SEQ ID NO: 935706 - protein, 30 aa, Homo sapiens
  misc_feature (10)..(10): Xaa can be any naturally occurring amino acid
  misc_feature (16)..(16): Xaa can be any naturally occurring amino acid
DGLALSVALXQPLNRXERPVIVLYYLMAAM

SEQ ID NO: 935707 - protein, 100 aa, Homo sapiens
MGLEDEQKMLTESGDPEEEEEEEEELVDPLTTVREHASSWRMCKGPERKSSVMSVYLSITYREDCTQQLFDSCIEHMRATSLYTEYMCDLFTHLIIWHQI

SEQ ID NO: 935708 - protein, 38 aa, Homo sapiens
DLTFPIAFCRTYNVRASESARDRQHTEWLHILLSISTV

SEQ ID NO: 935709 - protein, 78 aa, Homo sapiens
  misc_feature (4)..(4): Xaa can be any naturally occurring amino acid
  misc_feature (28)..(28): Xaa can be any naturally occurring amino acid
  misc_feature (43)..(43): Xaa can be any naturally occurring amino acid
  misc_feature (47)..(47): Xaa can be any naturally occurring amino acid
KLGXPLIPKRTPSSSLPNDTSDEIMTFXSVSTKTVLVLSCLEXNVPXNRKSLRRTLKSGLGDDLVQALGLSKGPGLEV

SEQ ID NO: 935710 - protein, 44 aa, Homo sapiens
MPSKGPLQSVQVFGRKKTATVGRTTNAAMVSSRYTGAPRDDDAA

SEQ ID NO: 935711 - protein, 44 aa, Homo sapiens
MPTSSQSPRDAELIAEAKLTASTQGRLGPGSIRRTTINSWDHNY

SEQ ID NO: 935712 - protein, 109 aa, Homo sapiens
  misc_feature (4)..(4): Xaa can be any naturally occurring amino acid
  misc_feature (10)..(10): Xaa can be any naturally occurring amino acid
  misc_feature (19)..(19): Xaa can be any naturally occurring amino acid
  misc_feature (26)..(26): Xaa can be any naturally occurring amino acid
  misc_feature (38)..(38): Xaa can be any naturally occurring amino acid
  misc_feature (61)..(61): Xaa can be any naturally occurring amino acid
  misc_feature (104)..(104): Xaa can be any naturally occurring amino acid
QAIXARAGTXKRTSTQTPXGEVRLVXLNNISTLLQVWXPPHSLLSSIPNKHLKPNLDSSVXLKFVLWESPGYNSTAQLLNFANPLCRKWHLIVLIFISLLPNNXEHLLI

SEQ ID NO: 935713 - protein, 93 aa, Homo sapiens
MVFRRFVEVGRVLCLLWTSCRKLVAIVDVIDQNRALVDGLALKLRRQAMLSSACSSLISSQFRTVPPEYVDSCRADIIQMAATDGQSLAERKP

SEQ ID NO: 935714 - protein, 135 aa, Homo sapiens
  misc_feature (1)..(1): Xaa can be any naturally occurring amino acid
  misc_feature (59)..(60): Xaa can be any naturally occurring amino acid
  misc_feature (71)..(71): Xaa can be any naturally occurring amino acid
  misc_feature (87)..(87): Xaa can be any naturally occurring amino acid
  misc_feature (97)..(97): Xaa can be any naturally occurring amino acid
  misc_feature (108)..(108): Xaa can be any naturally occurring amino acid
  misc_feature (127)..(127): Xaa can be any naturally occurring amino acid
XADKACEPGVTMCTRPDWSRLAANTLRVHHAIEQTIKSARMRCRLDSSARYQPIKCREXXAERRTLPHVGXSSDFWERSPTSAHHRXDTWVSTGREXNPRRRDQKQSXPRALPRAWLSLCPTATPPXPTPDKAPP

SEQ ID NO: 935715 - protein, 48 aa, Homo sapiens
ITHLNNNFIFRQKLNLSFSKQTAIMPGQAYGWKTGHCRYKDFSKFRNN

SEQ ID NO: 935716 - protein, 36 aa, Homo sapiens
GPFERSRPYSRCFPRIASRGRPRPALELSPLVYNHV

SEQ ID NO: 935717 - protein, 47 aa, Homo sapiens
  misc_feature (24)..(24): Xaa can be any naturally occurring amino acid
  misc_feature (46)..(46): Xaa can be any naturally occurring amino acid
AEMLCKPATVLITRATWVTVTPVXPDERDLFNSGIGSWARDDPDKXL

SEQ ID NO: 935718 - protein, 37 aa, Homo sapiens
MELVQGPKTRAAADHRARRVFRGYLRVFFRQIMQGWY

SEQ ID NO: 935719 - protein, 55 aa, Homo sapiens
  misc_feature (3)..(3): Xaa can be any naturally occurring amino acid
  misc_feature (40)..(40): Xaa can be any naturally occurring amino acid
  misc_feature (54)..(54): Xaa can be any naturally occurring amino acid
ISXMTITWDNLKGKKSCQRIWQNRWLEHPHGLLYNKINHXRFDEFFSEGCAPWXK

SEQ ID NO: 935720 - protein, 65 aa, Homo sapiens
KYFQIGTIFDNPADFYHYTNSQEAKKKIYCGGPLCLILNSEDTPEEGTQRSWLKAAIQQEKVRRG

SEQ ID NO: 935721 - protein, 69 aa, Homo sapiens
AHQGFPTSFPAPLKAQAGLESSGPGCSVLKEFASALAGTCESHLTGRAPPGRARRLLSLPRQLAQTTFF

SEQ ID NO: 935722 - protein, 69 aa, Homo sapiens
HRKHFFLGKVESVVRSRSAPTDNKEIVHCCEEQVLTLATEQTYAVEGEDTINRLSCCSLAGSCDQMAVS

SEQ ID NO: 935723 - protein, 115 aa, Homo sapiens
  misc_feature (29)..(29): Xaa can be any naturally occurring amino acid
  misc_feature (36)..(36): Xaa can be any naturally occurring amino acid
  misc_feature (48)..(48): Xaa can be any naturally occurring amino acid
  misc_feature (58)..(58): Xaa can be any naturally occurring amino acid
  misc_feature (73)..(73): Xaa can be any naturally occurring amino acid
AHAVLEDFAGNLASRVRPRDLPLLRVPAXFRRPAWXRRWKVSTEREFXGLGDFLVKIXKSDGIRGLYQGFSVXVQGIIIYRAAYFGVYDYGQGMLPDPKNTHIVVSWMIAQTVTA

SEQ ID NO: 935724 - protein, 66 aa, Homo sapiens
PTGPPGTVRHIRGGQVPAEMACRREQGTVVSVQRTGLALPAMNRLAMLDLFVWFLVFEVGFTVLPG

SEQ ID NO: 935725 - protein, 52 aa, Homo sapiens
RLRAPESPRNPQRDPLKLEIMLKLNPYQKTMRRTPFFARPGIKSSGWIRQLL

SEQ ID NO: 935726 - protein, 67 aa, Homo sapiens
PTPHCTHSNRNGIPNAYRTKNSQAIYNYAKAQRCRPYGYYNLLLTHKLFTKSPKTAHLHDLYITARP

SEQ ID NO: 935727 - protein, 74 aa, Homo sapiens
FVRAEDFWSERFLLPDLSVRSRQRNKSVRKPARNNMAFKDTGKTPVEPEWTINRIRITLRRERKILERCVLIDK

SEQ ID NO: 935728 - protein, 85 aa, Homo sapiens
FMDRSSNQPHSLSQRLIQSKALSLCNSMKAERGEEVLEEKLKASRGWFMSLWKDVVSIAEKHKVKQQMLMEKLQQVIQKINLDNG

SEQ ID NO: 935729 - protein, 39 aa, Homo sapiens
YRPPFTKRNAMTVLLISRTRQKYILSTPVAKALAVSKRK

SEQ ID NO: 935730 - protein, 33 aa, Homo sapiens
HIPRHTHHLSKKATIRDNPIYTSEVFSSQDFLS

SEQ ID NO: 935731 - protein, 35 aa, Homo sapiens
VTRDEESTRKEEVTREEMAAVGLTVTVTHSNRSTT

SEQ ID NO: 935732 - protein, 42 aa, Homo sapiens
RLPEVRGGDDFFVPIPKSGMFIVSYSPLFLVDNLHNRQLEVY

SEQ ID NO: 935733 - protein, 40 aa, Homo sapiens
GLSAGKIALAIAGLSGFAVVSAGEFFETTGATLRKLPEQP

SEQ ID NO: 935734 - protein, 32 aa, Homo sapiens
MNKPYPKSRFCRGVPIATITNFDLGGKGKSGR

SEQ ID NO: 935735 - protein, 32 aa, Homo sapiens
MLLRIPENTLAEWHSPIRITYKPHVNLGKCVC

SEQ ID NO: 935736 - protein, 30 aa, Homo sapiens
  misc_feature (16)..(16): Xaa can be any naturally occurring amino acid
KWYTLTLTIKGHFASXLLNDKSLWTDIPVN

SEQ ID NO: 935737 - protein, 44 aa, Homo sapiens
MKSGIHTLDIKIPRGPPPSRRRYGDVYCRAPKGGYYKTALGPGR

SEQ ID NO: 935738 - protein, 106 aa, Homo sapiens
  misc_feature (3)..(3): Xaa can be any naturally occurring amino acid
  misc_feature (8)..(8): Xaa can be any naturally occurring amino acid
  misc_feature (74)..(74): Xaa can be any naturally occurring amino acid
CKXQHSGXPRRDGSSDVRSLRTTLANMVKPCLLKIQNISPAWWCTPIIPTTQEEAEAGESLEPGRAQVAVSQDXPLHSNLGDRARLPSQKKTKKPLKHKYGWKSFI

SEQ ID NO: 935739 - protein, 54 aa, Homo sapiens
GVGGLCSNGQESRLENLRGKEQEELLKQLDALKEQLSHLPFRQSYKRSAQALKS

SEQ ID NO: 935740 - protein, 68 aa, Homo sapiens
ETICSGDITAPLLDLDYDLQRNYYDEDIQLPSTCTSSYYYCIETVVPYNNVSVVSGNTYTKGKSRLQF

SEQ ID NO: 935741 - protein, 51 aa, Homo sapiens
FDSASQLMEPGRQSMDLVELVSLFPTLAGLAGLRFTGCPSSFTLSCTERQD

SEQ ID NO: 935742 - protein, 38 aa, Homo sapiens
ACGSPQKLIDGFLKHEGPPAEKPLEGTLCFYFRRSRAF

SEQ ID NO: 935743 - protein, 33 aa, Homo sapiens
ALCPLMSQHIHLKVIEQRPEPPVAQEYDVPVLQ

SEQ ID NO: 935744 - protein, 52 aa, Homo sapiens
GYLSSQVSTTRAHNRDRKHIIHNACSPIYYSHRYLHDRRLGTGYSLNPKVNP

SEQ ID NO: 935745 - protein, 40 aa, Homo sapiens
KGELDFHQLANSFREYRPAASKGIKRSLLLPVLWRLQSLN

SEQ ID NO: 935746 - protein, 46 aa, Homo sapiens
MFKMSDKILLCVLERLETLYSFAEYIQKTSTFIDANELFSSTAAAN

SEQ ID NO: 935747 - protein, 66 aa, Homo sapiens
MSKRGRGGSSGGEFRISLVFGRSLVINCADNTRGQKPYIISVKGIKGLAEQNFPLLVLDTCDATVK

SEQ ID NO: 935748 - protein, 82 aa, Homo sapiens
EKKKEVPAVPETLKKSEGISQRLKDQAPQKGSFAQKMLRKARRSLSIKAKHYHRNMADVQTSNRCRMARKAGHSMLPPHPNW

SEQ ID NO: 935749 - protein, 69 aa, Homo sapiens
AKPTSPKSQVTLTKEFPVSILDLNNREKRRRIGVYGDGFLEEKISEETQVMIMFQQAILPSEPVDISTA

SEQ ID NO: 935750 - protein, 62 aa, Homo sapiens
MRRLLQETELVSAAPQRTLPNQAQVRFLKSGAMKEGADLRFARLKASDPMGDVNTVPQCVWK

SEQ ID NO: 935751 - protein, 39 aa, Homo sapiens
MESQTFVKVTLTSEEEAPFKKSPDTLWGDPKGRCNFKGL

SEQ ID NO: 935752 - protein, 34 aa, Homo sapiens
ANRCPMLSPELAAFIGIHGSRYSVIVAALGLDRR

SEQ ID NO: 935753 - protein, 49 aa, Homo sapiens
QDNRFSNKQKETTEAAEICRMPRKKVDMSKVNLEVIKPSDNKRVTEILG

SEQ ID NO: 935754 - protein, 34 aa, Homo sapiens
SYPDTPYTIPHHPTEELIETRSVARSRSSQSHES

SEQ ID NO: 935755 - protein, 35 aa, Homo sapiens
DIVFKPCVAILDGSAVMAQGGQGGPGSPTYFLKII

SEQ ID NO: 935756 - protein, 38 aa, Homo sapiens
  misc_feature (4)..(4): Xaa can be any naturally occurring amino acid
  misc_feature (20)..(20): Xaa can be any naturally occurring amino acid
QHSXLRGIHERPSSVPGEAXEAGSFAGRKGADQEEDEA

SEQ ID NO: 935757 - protein, 69 aa, Homo sapiens
LFAKACNVNIGASSAMWGRWTCSSSLVLNQQGGSSPFICLLASAEEKKVEAKKGGFQEFYDDMGFGLFD

SEQ ID NO: 935758 - protein, 49 aa, Homo sapiens
MAVSLTAAETLALQGHRGQERYYYGPKGEDTLLSITPRLPGDHSTTKGS

SEQ ID NO: 935759 - protein, 46 aa, Homo sapiens
KTFTSVYWNTSSNYQKTTGKDLGQTMSISDTRREDDQATRALLSEQ

SEQ ID NO: 935760 - protein, 70 aa, Homo sapiens
  misc_feature (14)..(14): Xaa can be any naturally occurring amino acid
  misc_feature (19)..(19): Xaa can be any naturally occurring amino acid
  misc_feature (25)..(25): Xaa can be any naturally occurring amino acid
  misc_feature (31)..(31): Xaa can be any naturally occurring amino acid
  misc_feature (45)..(45): Xaa can be any naturally occurring amino acid
  misc_feature (49)..(49): Xaa can be any naturally occurring amino acid
  misc_feature (62)..(62): Xaa can be any naturally occurring amino acid
  misc_feature (68)..(68): Xaa can be any naturally occurring amino acid
PGESRPDVKPVFPXGNSRXHAKNNXLSFPVXEMFNPPPVELERPXLNTXIISVEPQKGHTLXYSAPQXPF

SEQ ID NO: 935761 - protein, 73 aa, Homo sapiens
RSLQDPGRLSHRRWNRACLLTKISLVDLPPACTPQFRALWHPGSSCLEWELPRWEPPLLPPHTTHTSNKAPKY

SEQ ID NO: 935762 - protein, 68 aa, Homo sapiens
RDFGLRAGRGDWRRCRACFRWRVLGWWDSRPKKHHDFGAQFLDELIGPGPNLSPDEKHRTSVGHESFE

SEQ ID NO: 935763 - protein, 88 aa, Homo sapiens
QTQAQVGGGCGHHSCVNVGQGPVRGTRSCQSWMTELMPSGREHHNLRAVCQAKEEYLLENCKMMIMLGAIFAIIVVVIVSSIAEVAGG

SEQ ID NO: 935764 - protein, 113 aa, Homo sapiens
  misc_feature (20)..(20): Xaa can be any naturally occurring amino acid
  misc_feature (54)..(55): Xaa can be any naturally occurring amino acid
  misc_feature (59)..(59): Xaa can be any naturally occurring amino acid
  misc_feature (84)..(84): Xaa can be any naturally occurring amino acid
  misc_feature (100)..(101): Xaa can be any naturally occurring amino acid
SKIDDIWNLEVKENFAGEAXLQRMIILWEHSTKNHLQLEASFSPTENIQGKPPXXLSMXMSALVQAMKSAQSSMISLPCQKCPXLTLRTRRSDGKMKSGXXLGFPDHAEPYAI

SEQ ID NO: 935765 - protein, 86 aa, Homo sapiens
SQLAVTCGGPRDDGLQLKVTGWRTPAPRSPAAALLLTSLFEVLDAFLWVFGAIFKILYGSFCGFRHFLTHVHFDVVVITKSTLLLV

SEQ ID NO: 935766 - protein, 61 aa, Homo sapiens
ERPEDLNLPIAVITRIIKEALPDGVNISKEARSAIFCAASFFVLYVTSCAKTLQLKESGEV

SEQ ID NO: 935767 - protein, 138 aa, Homo sapiens
PRSRHCTLAWATQQDFRLQKKKICLRLIFIQVPTCFQLWGWGVGWEGNDLHTVLPDEESGLALFSLPFLSCHWLSALLHAPACCFSHSQFLPIPFTSLYSLPRSVLGVLLFLFSISGSCLCLSVSVSPQVSLFLGFCD

SEQ ID NO: 935768 - protein, 35 aa, Homo sapiens
MSYQGKKNIPVACPPTLRMASIPQPLILPLTNGNA

SEQ ID NO: 935769 - protein, 101 aa, Homo sapiens
QSPHRPEALCLYPVQEEFPHQGELYSAWQNPHRRDTLSVRPVWKSFTQRGSLAVHQRTLHRGSPLTTFLRESLMIRVHISEMSTYQSMDDEIFRSHIGRQL

SEQ ID NO: 935770 - protein, 42 aa, Homo sapiens
MIDTIMNQDILAILQAQVRFGGDQVLLAVSTKVVHSTATADD

SEQ ID NO: 935771 - protein, 62 aa, Homo sapiens
GVEGSDPSVLVLLPDSPTNSSSGRTAGRFPRGSGSYPSRSSWGDMMRQRRASISSSGARRGA

SEQ ID NO: 935772 - protein, 56 aa, Homo sapiens
MAVDGGFGDTGDWEGLLDPCKEFLERSGPTHTLISTRALISPVLVEHVSLVIDLRL

SEQ ID NO: 935773 - protein, 129 aa, Homo sapiens
  misc_feature (8)..(8): Xaa can be any naturally occurring amino acid
  misc_feature (29)..(29): Xaa can be any naturally occurring amino acid
  misc_feature (59)..(59): Xaa can be any naturally occurring amino acid
  misc_feature (62)..(62): Xaa can be any naturally occurring amino acid
  misc_feature (65)..(66): Xaa can be any naturally occurring amino acid
  misc_feature (70)..(70): Xaa can be any naturally occurring amino acid
  misc_feature (72)..(72): Xaa can be any naturally occurring amino acid
  misc_feature (84)..(84): Xaa can be any naturally occurring amino acid
  misc_feature (110)..(110): Xaa can be any naturally occurring amino acid
  misc_feature (115)..(115): Xaa can be any naturally occurring amino acid
NGTSQNSXLFGQEGAGKNQKALNLLGAPXMLVDCVPLVEVDDMMIMEEADPKCVFTYVXCSXTTXXPRTXLXARMSSLPARMAXSGNCRPHSPGTVSCLSSAHRCPVCCXTLPPXDTRSVLINYWFSTK

SEQ ID NO: 935774 - protein, 35 aa, Homo sapiens
LCPHTPHCELVLLCTAISSLLEDCRLLVKAEVAET

SEQ ID NO: 935775 - protein, 99 aa, Homo sapiens
  misc_feature (19)..(19): Xaa can be any naturally occurring amino acid
  misc_feature (24)..(24): Xaa can be any naturally occurring amino acid
  misc_feature (45)..(45): Xaa can be any naturally occurring amino acid
  misc_feature (92)..(92): Xaa can be any naturally occurring amino acid
SKSPRRPLNSLSIKTSSGXGVGYXSATHSQPSPTPSNESTDTASXIGSAFNSPLARLIRSANPTRPSSPVTFHISKVLFGEDDSLLRVDCIXYNRAVRD

SEQ ID NO: 935776 - protein, 150 aa, Homo sapiens
  misc_feature (23)..(24): Xaa can be any naturally occurring amino acid
  misc_feature (48)..(49): Xaa can be any naturally occurring amino acid
  misc_feature (89)..(89): Xaa can be any naturally occurring amino acid
  misc_feature (98)..(98): Xaa can be any naturally occurring amino acid
VNLGSNARILTSYSYALPRHVRXXWKVLSAQVCPKSREGHGGAATGAXXFSVEHCAYFPELFAAEAVTADSEVLEERQKRLPYVPEPYXPESGWGPPXGACLAKMNSREFQRTFANYLVKTGSLQQGIHLGWGVLGGITSFLFHVKTTIH

SEQ ID NO: 935777 - protein, 74 aa, Homo sapiens
HEELLRADLCRDKFSKCGVMASSGLANPWQPPVPGAVELLGCAGILSPGPLGSWASGLPDLVFFPIPCPLFWKR

SEQ ID NO: 935778 - protein, 35 aa, Homo sapiens
SFDPFPDASKGNDLFPLALRVLSPYRLTQKPHRGP

SEQ ID NO: 935779 - protein, 61 aa, Homo sapiens
  misc_feature (53)..(53): Xaa can be any naturally occurring amino acid
IHGKETCEWVAEEQWTRESDMRTERFGQGGAGLWVDKGLEEWGLELQQDMVEXEKSTKAQT

SEQ ID NO: 935780 - protein, 58 aa, Homo sapiens
MVDGNPVNLGLWIQLDKKVITDSPPILSANRCVLNLLSLVVLPYLKCRQSVLGADPVT

SEQ ID NO: 935781 - protein, 34 aa, Homo sapiens
VGNLCAMRAKLRKKRIQGLKRKRREIRQSSKYTV

SEQ ID NO: 935782 - protein, 139 aa, Homo sapiens
  misc_feature (6)..(6): Xaa can be any naturally occurring amino acid
  misc_feature (20)..(20): Xaa can be any naturally occurring amino acid
  misc_feature (28)..(28): Xaa can be any naturally occurring amino acid
  misc_feature (58)..(58): Xaa can be any naturally occurring amino acid
  misc_feature (66)..(66): Xaa can be any naturally occurring amino acid
  misc_feature (131)..(131): Xaa can be any naturally occurring amino acid
GYADEXPQSEMAPAVVSLRXPSSASWLXGWLQVTGVHTPFHLVIHNESTCEQLAKGNXGKAKEPTXITASIQGKTFPVDEKALQDQLVLVAAKLDTEDKLRAAMVGMLANFLGFRIYGMHSELWGVVHGAXVLFPTAVF

SEQ ID NO: 935783 - protein, 37 aa, Homo sapiens
  misc_feature (11)..(11): Xaa can be any naturally occurring amino acid
  misc_feature (27)..(27): Xaa can be any naturally occurring amino acid
  misc_feature (30)..(30): Xaa can be any naturally occurring amino acid
TEPGLGPDPKXTIIDVVGAPLTPNSRXRRXSASSSSS

SEQ ID NO: 935784 - protein, 85 aa, Homo sapiens
ALDRSTTAYLVVAANDGPAQTREHSLLARQFGVGHVVVYVNKLTLSRISRDVWNCVELEIRELLTEFGYKGGGDPSHRRLFSLSP

SEQ ID NO: 935785 - protein, 39 aa, Homo sapiens
SVRACKDPEKGMWGLVNNDGISTSGMVEFNILENYMHVA

SEQ ID NO: 935786 - protein, 101 aa, Homo sapiens
WSDPTVLSMPGQIPRSCRVRRQWQPMRAPEEVTGAQAGVSGVISARYNHHLLQPALAFQSAEIAASAQPPPRLGSEERLCLAAHRLGCEEPLRPAAAPSEK

SEQ ID NO: 935787 - protein, 73 aa, Homo sapiens
  misc_feature (15)..(15): Xaa can be any naturally occurring amino acid
  misc_feature (32)..(32): Xaa can be any naturally occurring amino acid
  misc_feature (45)..(45): Xaa can be any naturally occurring amino acid
  misc_feature (53)..(53): Xaa can be any naturally occurring amino acid
WACVPPRDLGQLDPXEGHLWNLLRALASHLPXLGGWATWCFPGGXTGPLSGAXCGRRDLGVWEVGGTGPPNYE

SEQ ID NO: 935788 - protein, 115 aa, Homo sapiens
AAAAMVAQLQKRLAFRCPPPFARRRVWLDPNETNYIANSNLPLQIRRLIKDGLIIRKPVTAPFPGLDAGKTPWPAGGQAHGIGSRGLQPMPYTESTWMRDEICAAAERYRNLEVV

SEQ ID NO: 935789 - protein, 63 aa, Homo sapiens
  misc_feature (5)..(5): Xaa can be any naturally occurring amino acid
  misc_feature (14)..(14): Xaa can be any naturally occurring amino acid
  misc_feature (36)..(36): Xaa can be any naturally occurring amino acid
  misc_feature (42)..(42): Xaa can be any naturally occurring amino acid
  misc_feature (49)..(49): Xaa can be any naturally occurring amino acid
  misc_feature (61)..(61): Xaa can be any naturally occurring amino acid
  misc_feature (63)..(63): Xaa can be any naturally occurring amino acid
NPCEXGGRCESAPXSCLSAPAPRVARPMPERWLVQXGVGSFXCSCLPGXAGPRCARDVDEXLX

SEQ ID NO: 935790 - protein, 49 aa, Homo sapiens
AVDTGVHNYRRCRVLLTLLYKIAKRPRQGKHQPMNPSSPTQQSSVFVSP

SEQ ID NO: 935791 - protein, 58 aa, Homo sapiens
  misc_feature (8)..(8): Xaa can be any naturally occurring amino acid
  misc_feature (21)..(22): Xaa can be any naturally occurring amino acid
NDSTCSSXLSILGPVTCLLLXXTQPGTLQPPMVSSDFPPLACFLNNILVAFNDLRLCC

SEQ ID NO: 935792 - protein, 67 aa, Homo sapiens
EEQTRKALELDQNENEQKKEAERLEKERRAAEEAKSAIAKQAADQMRIQEQLAAELAEFTAKIALLE

SEQ ID NO: 935793 - protein, 68 aa, Homo sapiens
KESTMRRASWMSFGIIVTRLASKAYLVGLFEDTNLCAIHANVKLSKAIQLARRNVESVLKDSTFDGKH

SEQ ID NO: 935794 - protein, 44 aa, Homo sapiens
LPYGQVITIGNERFLLCLRHSSSPPSFGIESACIMNTYNSSHDV

SEQ ID NO: 935795 - protein, 71 aa, Homo sapiens
SADAPMFVMGVNMRRYDNSLKDHQAMALHHHLLRTPGPRVSLTTFGIREGYCPQALHYCQPGGLDGPSGKL

SEQ ID NO: 935796 - protein, 87 aa, Homo sapiens
ESIVTMWPTSSLSKGELQRHFIMQQHFCFKNKALEVAKSHARCKGHPIFASSWSFQLLNSQELLILPLEKLLRQTGYIHRGSDEGCT

SEQ ID NO: 935797 - protein, 41 aa, Homo sapiens
QRGGRTMTRSYCKRREPAGGFVKDSWQAFLKKVTEAERSNH

SEQ ID NO: 935798 - protein, 56 aa, Homo sapiens
DVGPVCFYNQLYLNPTKNLTHMCPLVLIWSPVQVTHNFQLLFQMFGNQLFGQGNGN

SEQ ID NO: 935799 - protein, 37 aa, Homo sapiens
MPSKRTLQSVQVSDEEDSDTLAHCKRGNGLIKVTGPA

SEQ ID NO: 935800 - protein, 54 aa, Homo sapiens
RGRRVRLFRRLRRRRRRMAYVASYLWLPWGTSSPAPGHKEVLDNWYSGDETAYK

SEQ ID NO: 935801 - protein, 61 aa, Homo sapiens
MLRKRVREEKAVLPSTRVNRDTPSPLQAHPWSGFKKGPPRALKRDSEISIKELDLQFSHFN

SEQ ID NO: 935802 - protein, 61 aa, Homo sapiens
MALRSQFWGSRFAGPWSGSQPCQPASRRQPNLSGPVEIKLCPDSPTGPPDLELLSVARKDG

SEQ ID NO: 935803 - protein, 57 aa, Homo sapiens
LTSTMSYHRELSFGIHRELNSLISPILRLHPRPNLRQNPFNYTYYIGVNLTFLPTQF

SEQ ID NO: 935804 - protein, 78 aa, Homo sapiens
MNDTVNYPHEKVHDQPTTSEETNEVMMSFTREGDSAQDRIRENSQMYKTHLVSSLYLVQTHLVVQTLAWHDYDSWICK

SEQ ID NO: 935805 - protein, 43 aa, Homo sapiens
AKAAKEANGRTVKIEWKIKLPWNWAKPKVKVAYGGRGGSRSVL

SEQ ID NO: 935806 - protein, 52 aa, Homo sapiens
EQEAPSWEETYRHNKDRKFAQEPKSQDIYLRLFVKLYRFLGQKDPPPQFNQV

SEQ ID NO: 935807 - protein, 80 aa, Homo sapiens
MIWGPHPVPVASGLPPWCEAGLCSWHFLLAPTLQQEGFPETPVYVNILASCYLGAWEAGVPMLQTCCPSVYKSWGMPPRM

SEQ ID NO: 935808 - protein, 96 aa, Homo sapiens
HSARDLSGVSNATKGAWGTTLNIATVLTSIQLLMSEPTLMTRSRLTYPQNLNIIDRTSSGNAGQWRRGMQAEPKGCWGEMLYTIPELCSESTLQEK

SEQ ID NO: 935809 - protein, 74 aa, Homo sapiens
LGIELRSEATKRPAEARSKKLEDELVSLQKKLRGTKMNWTNTLRLLKNAQGKLELAEKKATCLSRRSFFEQTHP

SEQ ID NO: 935810 - protein, 38 aa, Homo sapiens
VKADEHVIDQEDMEHFYVMTGTYCQFWYKRLFKPALFG

SEQ ID NO: 935811 - protein, 84 aa, Homo sapiens
NRGVCCFSNEDNILRWKLRLLSGEVESQMDGDKGKSLLIMNTLHLQRWKGAALGGKSLGGKIHHQKGCRATFGGKNFNKATVHD

SEQ ID NO: 935812 - protein, 106 aa, Homo sapiens
  misc_feature (45)..(45): Xaa can be any naturally occurring amino acid
  misc_feature (70)..(70): Xaa can be any naturally occurring amino acid
MASLGTSWFSVWVSHHGQGESPKEHDPFTYDYQSLQIGGLVIAGXLFILGILIVLSRRCRCKFNQQQRTXEPDEEEGTFRSSIRRLSTRSGRNTWGDGIRPGGSLG

SEQ ID NO: 935813 - protein, 66 aa, Homo sapiens
HICQSLESARAGTRFPGPQWGVCKPERPGLQIRESQHHVWQLQYRSQRPPMKVLEQSPVLGAGSSI

SEQ ID NO: 935814 - protein, 67 aa, Homo sapiens
KFSQEKAIFSSSAKIVSPMGEPDEFESAISQALLELEMNSDLKAEAQELNIPPPKEIKWYCRKAIII

SEQ ID NO: 935815 - protein, 74 aa, Homo sapiens
WNYRRVSHAQLVFCIFSRDGVSPCWPGWSQTPDLVIRLPASKVLDYSVNHCSWPSSKLLSTGHESALSLEGEVK

SEQ ID NO: 935816 - protein, 398 aa, Homo sapiens
ATLVRHQRTHTGSEAVLHVADCVTAASAESSTAAAPSVRSHQWLMRATCCAATCWQGFRAALLTWCVHQRIHTGCEALRCAPDVLACSAFMVTCSVTITNAPVLHCTLVDECPYRLLNLCVQCWFTVLLSKSQSVALERNQCLATMPQQIAPDVACNGPSAGQPSNAMHFAPGNDCTLWLNWAKAGVAAEVLAQVLQTNMPLSLVTRHSSWVPQAISWLPLTPGDRTGTGFGRIPMFPGNDLCNIGPSRSYSRVVCQVLRHHVEKMAGGGSIHNFRIDTLKGFTRWEWAYWQLEGGYSSLKRGVGVLVAKWQALLISKSARCGNETVDVRQRFRYAFVTGILVGENEGKRTWVGGPSHYHIIPQGITMRWGHKHPHLHGLWTDLMVTIWDTTYNGPIN

SEQ ID NO: 935817 - protein, 62 aa, Homo sapiens
MAMYPDHNALLKAGFSLTRVHEEPPKKTYTTNSQIMGNENIHLTSTGDRISEGYTLVEYNNR

SEQ ID NO: 935818 - protein, 39 aa, Homo sapiens
RRCQMLKLDKGEPPLDRAEQAEADKEGRRRQEPSSLKID

SEQ ID NO: 935819 - protein, 112 aa, Homo sapiens
RSWCRHGPPPARCYRYCKNKPYPSLASAEVSSCKIRIFDLGRKKAKVDEFPLCRHMVSDEYEQLSLSPEAARICANKYMVKVVARWLHIRSLTLHVSHHRCVCLAEGQQDQV

SEQ ID NO: 935820 - protein, 40 aa, Homo sapiens
AIQTEEDPETEGHVARPRLEEGPEGPCGLGNLVLHTTDYT

SEQ ID NO: 935821 - protein, 70 aa, Homo sapiens
MPSKGPLQSVQVFGRKKTATLWAHCKRGNCLIKVNRPPLEMIEPRTLQYKLLEPVLLLGKEPFSGVDIPV

SEQ ID NO: 935822 - protein, 81 aa, Homo sapiens
AGILAGKKYVQGIATTAALKCFDKFCATPVWNASKPIGADLQEVHYKNRFYMTPASAVPSDFTFGQGDFVAKTTVLCTVHI

SEQ ID NO: 935823 - protein, 111 aa, Homo sapiens
GLCSNGQIRARDLRGRRKEELLKQLDELKVELSQLRVGKVTSGPASKLSKIQSRPEIIAVFSQLLTDSEETSGILQGKSTALELRLRDSACARSQDERLRQSSTKERLPLR

SEQ ID NO: 935824 - protein, 95 aa, Homo sapiens
KQDIYFSFLVNIINFVELSDSLTASSLQFFTVPPLFDRPTVSRRSVVQVTTAGREAYTQAAGSSQTATRFVISDIVRRSCRYYSQTLLSFRYLLG

SEQ ID NO: 935825 - protein, 73 aa, Homo sapiens
RPSKEGTGSTATSSSSTAGGQGKGKGKGGSGDSAVKQVQIDGLFGIKDNQTLSRGGTRNLGCSGGLLVCLEIA

SEQ ID NO: 935826 - protein, 65 aa, Homo sapiens
EEADMQTERPTQKQPSISITKMWFPAGRYFQGDASSDYKINGLGFKTPKEAIEGTHTDKMMPLTV

SEQ ID NO: 935827 - protein, 33 aa, Homo sapiens
GRLDLDQISLQDAKLERRQQNVERVNRPYYDAE

SEQ ID NO: 935828 - protein, 38 aa, Homo sapiens
GNLLGRRAASMDNNSKFAKSRSRAAKREGSLQSWPEGA

SEQ ID NO: 935829 - protein, 80 aa, Homo sapiens
APEDPHGEKPYTCSECGKAFSDRSVLIQHHNVHTGERPMSSVSVGRPSATVHTVDHERITPRKALCMYDVEVLFQHYTYQ

SEQ ID NO: 935830 - protein, 34 aa, Homo sapiens
RTFTEVKVVPPYIYSMLVRIINQQLYRITGSISS

SEQ ID NO: 935831 - protein, 40 aa, Homo sapiens
MGKGDPTAAGKMSSYASSSDLRESTRRDTRLFRQFRGFSE

SEQ ID NO: 935832 - protein, 35 aa, Homo sapiens
QAYGVEDPEYAVTQPSSTNHVDQSLGKLSLDKSSG

SEQ ID NO: 935833 - protein, 68 aa, Homo sapiens
WVSLFVSLWWTLLVICRILVSANRSNADLRETLTGKIITLEVEPSDTIENVRSRSRIRRHSPDQQSSS

SEQ ID NO: 935834 - protein, 48 aa, Homo sapiens
NQSAKPCPLLGLTKCKHQPRQLTTRYAASKRAAITEYNDSATDMQQPM

SEQ ID NO: 935835 - protein, 38 aa, Homo sapiens
AKKRRNNGRAKKGRGHVQPIRCTNCAPCVPKHKPISNA

SEQ ID NO: 935836 - protein, 53 aa, Homo sapiens
IWKRLFTALGIRISLGSSSPRSLVSLNRAAVSVSPWASESQKIYSSLYKLLGS

SEQ ID NO: 935837 - protein, 51 aa, Homo sapiens
KVFFSSFFPLAPLLTFAPGSFLADVFLGLGSGLVEQVSLTIQRRRRVPSPL

SEQ ID NO: 935838 - protein, 37 aa, Homo sapiens
HNVEKGGKHKIGQISKVSFGRRTGQALDTLTQRNKTK

SEQ ID NO: 935839 - protein, 34 aa, Homo sapiens
TVITTTIRHPIHGTDLGSMNLRRLLSRQFHPYTI

SEQ ID NO: 935840 - protein, 58 aa, Homo sapiens
DSSHTLQRDWPSRKAGTRAKVAATSKAQRGSSTAFSMFDQPRYQEFIELQLYRQIVCI

SEQ ID NO: 935841 - protein, 334 aa, Homo sapiens
  misc_feature (90)..(90): Xaa can be any naturally occurring amino acid
MGHLVVPRSYSLGRSSYLGLPRKHACCVRGRPPFSEGGATIRAAWDLPLLATSRARFPTPFVWLPQATRPHTLWWDPSGWAFLGRPPGFXVELPFFPSPDIFCGRKESGETLAAFSHAEKRFPVNTAPRWKGRSPPTIRTLARSDTQGAPTSLRVSTERPQGSPRGGPGPLETPQKVGTPRAPREGDTSGLFRGASCFLEENHFTLPTRNTPHCGGSSPSEEEAAKHAKVETLFGVLGLPQNYPRARHNELLTALAAQGVNNVWLPPPRGARINKGHAGATGTAASLLCSTHRSHHNPCHAQPWETLPQHSPGKKAVASRAPPQCPENKVLLDF

SEQ ID NO: 935842 - protein, 34 aa, Homo sapiens
NTLLALLLLIITFGLPHLNGSHRKFHPYGVRLRP

SEQ ID NO: 935843 - protein, 43 aa, Homo sapiens
IGQGPEQGDEGVADALQIQCKNVLRIRGEEMNHHKYRSCEETR

SEQ ID NO: 935844 - protein, 55 aa, Homo sapiens
AAVGRCSISHGRVFRRMGLGPESRIHLLRNLLTGLVRTNDSAPMARFDEMRATEK

SEQ ID NO: 935845 - protein, 68 aa, Homo sapiens
MNQIEPGVQYNYVYHEDEYMIQEEELDPDLLLDPALEKQQRRTFTAWCNSHLRKGGTRLRTWGSFQEW

SEQ ID NO: 935846 - protein, 55 aa, Homo sapiens
GLTTREFSRPRAGERPGTLAVGARQTPCDRSEAQMLSMAVVSCQVNDIAEKRKAR

SEQ ID NO: 935847 - protein, 58 aa, Homo sapiens
VSKARKKYKGGGILSWYRHGTLKMGHIFNCIQRAHQTTLECILPSYFFYLLEVFTTSV

SEQ ID NO: 935848 - protein, 32 aa, Homo sapiens
PSAVGGSNAEPARADITYESVRKPASTAAAAW

SEQ ID NO: 935849 - protein, 35 aa, Homo sapiens
  misc_feature (7)..(7): Xaa can be any naturally occurring amino acid
  misc_feature (27)..(27): Xaa can be any naturally occurring amino acid
AQQSDQXVEAEEEDLNELALRGPGQGXQAGWSWPH

SEQ ID NO: 935850 - protein, 33 aa, Homo sapiens
KRKPCRESKKFTTIVGLKEPPIKKAFKLNTITK

SEQ ID NO: 935851 - protein, 103 aa, Homo sapiens
EGGPLYRHIADLAGTLTSYSSASLQCDHGGSMLEQLAMQEFMILPVGASSSRSHAHWREVYTTSGGHQASMALTDRSDCALRSSVWQYTTHEIESFGTGNLSG

SEQ ID NO: 935852 - protein, 79 aa, Homo sapiens
MAGFGAMEKFLVEYKSAVEKKLAEYKCNTNTAIDLKLVRFPEDLENDIRLSFLSIPINSLGMMNCFWYKGLRSVYYIAV

SEQ ID NO: 935853 - protein, 46 aa, Homo sapiens
EGGGTGLDVGRPAMRPPVSITNRYFDSSDEEPIEDDRLQFIYHGYL

SEQ ID NO: 935854 - protein, 65 aa, Homo sapiens
  misc_feature (22)..(22): Xaa can be any naturally occurring amino acid
  misc_feature (24)..(24): Xaa can be any naturally occurring amino acid
  misc_feature (63)..(63): Xaa can be any naturally occurring amino acid
GPEANSARMRNKAVGQARPQAXAXVGQPLPEASGRKAQVFPEMPQPVAGARPPPREKLGGPGXPG

SEQ ID NO: 935855 - protein, 39 aa, Homo sapiens
  misc_feature (21)..(22): Xaa can be any naturally occurring amino acid
  misc_feature (29)..(29): Xaa can be any naturally occurring amino acid
QGLAKSRARFNRCVTGTRSPXXPGGRAHXQMLIKPASVP

SEQ ID NO: 935856 - protein, 137 aa, Homo sapiens
  misc_feature (5)..(5): Xaa can be any naturally occurring amino acid
  misc_feature (19)..(19): Xaa can be any naturally occurring amino acid
  misc_feature (43)..(43): Xaa can be any naturally occurring amino acid
  misc_feature (74)..(74): Xaa can be any naturally occurring amino acid
MWSKXPEAPLNLSFAGLKXVPKGLPAKLQSARSQLQQTEQAPXPDELPEVDNLTLDGNPFLALELPPPRGLNEXRRGPSLCTFDLSVGVSEPWCSSKGPGLPKIQDRIMNDSNSLASGEPVRTLSLFDQFNPLPHLY

SEQ ID NO: 935857 - protein, 44 aa, Homo sapiens
CLNEVCFYSLRRVYVINMEICVQYSVFHEELLRADLCRDKFSKC

SEQ ID NO: 935858 - protein, 85 aa, Homo sapiens
  misc_feature (6)..(6): Xaa can be any naturally occurring amino acid
  misc_feature (73)..(74): Xaa can be any naturally occurring amino acid
SRAYAXTLTKAPVDLLGVAHNNLMAMAQETGDNLYWGSVTGSQSNAVSPTPAPRNPSDPMPQGPALWIETTAXXLLHLLLHEGKA

SEQ ID NO: 935859 - protein, 84 aa, Homo sapiens
  misc_feature (22)..(22): Xaa can be any naturally occurring amino acid
  misc_feature (79)..(79): Xaa can be any naturally occurring amino acid
YADKPETTKEQLGEFYEALQTXRIPKSDVVYTDWKKDKCEPLEKQHEKERKQEEGESKQTQPWIRTETLAILPSNPTCXLSFFP

SEQ ID NO: 935860 - protein, 86 aa, Homo sapiens
EAAVVPIKLRGRRWQPRALEPEREHLDENSPLGTFFGGFWMFLPFQIAIRLRARTTGFCLLISMASVATGPDVAADLQEELQDWVK

SEQ ID NO: 935861 - protein, 68 aa, Homo sapiens
SYMIWDYTSVSILAMREEFGGRALALWRWRPYFANHETKVAMAVPAAAVAMAVAEDFNEDNSLAGEES

SEQ ID NO: 935862 - protein, 34 aa, Homo sapiens
DYQAVDDESRPILRVDISEDDIDDGFRRLFAQWQ

SEQ ID NO: 935863 - protein, 69 aa, Homo sapiens
GVVGVVSRYGEVRFVAAPARELACSCLCDPESFWGAYSPALGATWFVACLIPVRGLLTTTRLENASTVT

SEQ ID NO: 935864 - protein, 75 aa, Homo sapiens
  misc_feature (51)..(51): Xaa can be any naturally occurring amino acid
SRELLNPEPRRLEPRVEATAYMITLGDACTTSPTAGRGAAFASSWKTGLAXSLAVFCHELPHELGGLRRLAARGA

SEQ ID NO: 935865 - protein, 114 aa, Homo sapiens
  misc_feature (1)..(1): Xaa can be any naturally occurring amino acid
  misc_feature (23)..(23): Xaa can be any naturally occurring amino acid
  misc_feature (37)..(37): Xaa can be any naturally occurring amino acid
  misc_feature (39)..(40): Xaa can be any naturally occurring amino acid
  misc_feature (91)..(91): Xaa can be any naturally occurring amino acid
  misc_feature (97)..(97): Xaa can be any naturally occurring amino acid
XDPGRDSPSLAQTETRVTPGSGXAWGMDPETRDERRXPXXASFSHLGRRMQLPLLTDKTKARLGPPQIRLSAFRVARPQGVESPRASPVDXVLQGLXAFGTLIFQNPVFLDDEL

SEQ ID NO: 935866 - protein, 81 aa, Homo sapiens
AAAFPEHQPHQPEEKMDADLSQLQTEVEEAVQESRNSEEKPKKPITDAAMMAEELKKEQDTSPHLERMKKNGQPIKAYSTS

SEQ ID NO: 935867 - protein, 135 aa, Homo sapiens
RPYPLFPRDGGNDSSKGIEGALIGKHKVSRSSPLQIDALCPLGKFIVPPSFPPNSLGCVTAKGRDTAKIGLTHWQAHCPGVASNWSFPRGNPFCWQELTQDAIAGLDLLRREELRYLGVIYRSQYDMTPWTTRAA

SEQ ID NO: 935868 - protein, 53 aa, Homo sapiens
PDRRWSSLDTMNHTVQTFFSPVNSGQPPNYEMFKGGPGCFSWAPKTFSPRSTF

SEQ ID NO: 935869 - protein, 83 aa, Homo sapiens
MASRKAGPRGKVAAPKQAHRGSSPVFSMFSDQAQIQGYRGRLPPFPPVPWWSYSAGRPGGPFSLVGGGFPPGGGGRFLTDGPL

SEQ ID NO: 935870 - protein, 39 aa, Homo sapiens
TRLRSYSCASLRFFLRNHVLTKPDMAEIENSICRLRRQT

SEQ ID NO: 935871 - protein, 89 aa, Homo sapiens
  misc_feature (1)..(2): Xaa can be any naturally occurring amino acid
  misc_feature (5)..(5): Xaa can be any naturally occurring amino acid
  misc_feature (13)..(13): Xaa can be any naturally occurring amino acid
  misc_feature (49)..(49): Xaa can be any naturally occurring amino acid
XXPAXWIETTAYXLLHLLLHEGKAEMADQAAAQSPVSSFQGGFRSTQDXVIALDALSAYWIASHTTEERGLNVTLSSTGRNGFKSHALQ

SEQ ID NO: 935872 - protein, 42 aa, Homo sapiens
RKKPVSILLCIRCSCDVVEIGSSRAVLHGELDTMFVVEVPVF

SEQ ID NO: 935873 - protein, 46 aa, Homo sapiens
LVLSPSIPTNPLHKDEVNESSLPSNQIGHMVLTYEYNRLRRINSQL

SEQ ID NO: 935874 - protein, 90 aa, Homo sapiens
  misc_feature (3)..(3): Xaa can be any naturally occurring amino acid
SPXPFQDESCGLTLASLPDGEPGRHFWQQDEPPQSPWDRVKDLATVYVDVLKDSGRDYVSQFEGSAGGKQLNLKLLDNWDSVTYTFSKLR

SEQ ID NO: 935875 - protein, 57 aa, Homo sapiens
MVGWAEGLLRGRRGQRKRGILTLKYPIENGIVTNWDEMKKIWNKPSKRAALGPERTQ

SEQ ID NO: 935876 - protein, 33 aa, Homo sapiens
MAALRPLVRPEIVKRETKRFIRHQSDLYVQIGR

SEQ ID NO: 935877 - protein, 77 aa, Homo sapiens
  misc_feature (20)..(20): Xaa can be any naturally occurring amino acid
RISNPSNITPGLAQFPQLEXPPFGEEMPCCFKKPNIKEYQRKFPPNEKFDFPQPTPNITFFVYVSNFTLAHQNSGAN

SEQ ID NO: 935878 - protein, 63 aa, Homo sapiens
YCKYSNADVNRLRVHAMTQHWLQPMLRAPCVRHMLNNQDSTSSLHLPTIHSVATLLGGEVIMT

SEQ ID NO: 935879 - protein, 48 aa, Homo sapiens
TAAYIGECGLCSQGGLTEIRDMLLANKVQLLPCWCHCPMWSTVPDQNT

SEQ ID NO: 935880 - protein, 51 aa, Homo sapiens
IAYMDQASGNVKEGPKADGVKYEGDSGLRELAIHLHSSGGWFHETHWGLEQ

SEQ ID NO: 935881 - protein, 59 aa, Homo sapiens
APSVSVKPPDPGSALPCPAPPRQKYMRGAEMSTQLLARSRANLNLRLNFLTEVLMPFFQ

SEQ ID NO: 935882 - protein, 72 aa, Homo sapiens
ERLSVDYGKKSKLGVLPFYPAPQGFHRLLVEPLQLPFSTTTTTLEHSDCAFNGDNEAILYICVETSISSANL

SEQ ID NO: 935883 - protein, 44 aa, Homo sapiens
MLEEVQKMQGVYPWVQSLPGTFFMLPSILSRYYPRDQHGPTSQV

SEQ ID NO: 935884 - protein, 98 aa, Homo sapiens
VFKVSHFSKYGLQDSDEEEEEHPSKTSTKKLKTSPLPSARQTTALQSRLFNVQTCTSTSGREKRTVYLNRVRDTQLRARAYSSYTAAFMTPGALKSTH

SEQ ID NO: 935885 - protein, 56 aa, Homo sapiens
ELRTRGKYLRHVRTSGHVYGEYKVSWFVCLPTPKCHTPPLYRMRIFASNNVVGKSR

SEQ ID NO: 935886 - protein, 41 aa, Homo sapiens
GAAPMQTGSPNRDGSQGMDGALALEVGPSFLPPPLRQQLLI

SEQ ID NO: 935887 - protein, 58 aa, Homo sapiens
  misc_feature (2)..(2): Xaa can be any naturally occurring amino acid
  misc_feature (12)..(12): Xaa can be any naturally occurring amino acid
  misc_feature (23)..(23): Xaa can be any naturally occurring amino acid
  misc_feature (25)..(25): Xaa can be any naturally occurring amino acid
  misc_feature (55)..(55): Xaa can be any naturally occurring amino acid
QXPAIEGRLTSXLMVELAIVPTXFXNCRGETDVSSDSPLHTPRYFFLSILCWADXGFT

SEQ ID NO: 935888 - protein, 65 aa, Homo sapiens
AEAATMPGVTVKDVNQQEFEESLAAFLKKSGTLKVPLWWDTNKLANHKDLSPYDETCSTSELLTQ

SEQ ID NO: 935889 - protein, 89 aa, Homo sapiens
PLLDRGSRAGVRAARTRPFYSPGFPVPRSPWDPFVNIEACQLSFYHHGPIFFGRPKTQKTYFGKTKRPLTVPFGTCPHQKPRPTEKHHT

SEQ ID NO: 935890 - protein, 106 aa, Homo sapiens
MASTDYSTYSQAAAQGALPVLTPPSPLRDIHRPPRHMGNKAMEPMDSPLMSAVTRFSPLHPMADPYALLWTLPLVYTPLPQDKAACQGMHWSYIHTAQYTPGSSAS

SEQ ID NO: 935891 - protein, 67 aa, Homo sapiens
GCGVCCYSPSFEMPPKDGRKKKDAGKSAKKDKDQLTNIRGQGQKEEVVQGKVRDKLNNLALFTRLPL

SEQ ID NO: 935892 - protein, 50 aa, Homo sapiens
MSGVAHRAFENDVDALCNLRGFFNYLPLRRKGPGSRPWVQIPVTLWFLRF

SEQ ID NO: 935893 - protein, 49 aa, Homo sapiens
MVTETQQAAGKMSSYAFFVDLREGPKRTPVISVNSRNSPKVSRIETISP

SEQ ID NO: 935894 - protein, 54 aa, Homo sapiens
RVPPFFRAFPLAAAGRKAEMADEIPSLRSSRPGGDTIFGKIIPQELPPKIIFED

SEQ ID NO: 935895 - protein, 34 aa, Homo sapiens
SRGEGRVLEAGVAGSSLIGVRGLSRSVPGFSLER

SEQ ID NO: 935896 - protein, 54 aa, Homo sapiens
PRVATSFGRPPIPGVIRHQTASTMPPKFDPNEIKVVYLRCTAVRSVPLLPCPKI

SEQ ID NO: 935897 - protein, 44 aa, Homo sapiens
ARAPAGEKIETELRDICNQCTVSLRKVLDPNASQAESKVFYLKM

SEQ ID NO: 935898 - protein, 114 aa, Homo sapiens
  misc_feature (1)..(1): Xaa can be any naturally occurring amino acid
  misc_feature (6)..(6): Xaa can be any naturally occurring amino acid
  misc_feature (20)..(20): Xaa can be any naturally occurring amino acid
XGALPXILKWPALNEDPITXNYCSIIILWALALTQFGGTKYTARIAKVGFFDRYPVTCIYFDRISGYLSDSGAPVAIEMDSKTFFPDFSKVGTLVVFVAFILSYMGVEDPQPTS

SEQ ID NO: 935899 - protein, 43 aa, Homo sapiens
TILGLPAAVLIILFPPLIDPNHPNYSINLAMGHAPYGAVSEVM

SEQ ID NO: 935900 - protein, 134 aa, Homo sapiens
  misc_feature (2)..(2): Xaa can be any naturally occurring amino acid
  misc_feature (41)..(41): Xaa can be any naturally occurring amino acid
  misc_feature (81)..(81): Xaa can be any naturally occurring amino acid
  misc_feature (116)..(116): Xaa can be any naturally occurring amino acid
  misc_feature (129)..(129): Xaa can be any naturally occurring amino acid
DXWEEGGVFAWVSNTLGPRWGFAAISFGYLQIAIGFIPMLXFVLGALSYILKWPALNEDPITKTIAALIILWALALTHFGXTKYTARIAKVGFFGGILLPAFILIALALIYLHSGXPVCYPKWIPKTLXPRTCC

SEQ ID NO: 935901 - protein, 97 aa, Homo sapiens
NGQQEGGDRGKVAAPSRPTWFFQRLFMFEQAQIQEFKEASVYRPDRVASSAGRPEADYSSWEGECPERSWTHAAEGKAHHSRLLRSLGELMQTETIL

SEQ ID NO: 935902 - protein, 35 aa, Homo sapiens
LKGVTIASRGVLAQHTLRVLAKKRGSKGKKEAIIT

SEQ ID NO: 935903 - protein, 46 aa, Homo sapiens
RLASRKAGDRGKWQHQAGQRGSYNVFAMSDKPDTEFKSSAVSTRIV

SEQ ID NO: 935904 - protein, 36 aa, Homo sapiens
MAPAKKCGEKKKSRSPCNEVNHDDDNMNMHTRSSAS

SEQ ID NO: 935905 - protein, 34 aa, Homo sapiens
HLLGCRPVGFKSDRILDSQLNLPVCPNCMALILL

SEQ ID NO: 935906 - protein, 64 aa, Homo sapiens
NKGRSPRTSGLLLVLFSPRISGRFGSVSLARVNVEALFPPGPWSPKLLTWKTLPPPPEYEFAPS

SEQ ID NO: 935907 - protein, 31 aa, Homo sapiens
MAAEPSCSCFCLFLLASGTIGLPPGLKGPCR

SEQ ID NO: 935908 - protein, 35 aa, Homo sapiens
VQNGTSKGKERRKTSHQPRTSVAEGENVFGVCHIF

SEQ ID NO: 935909 - protein, 68 aa, Homo sapiens
VPLPGPLEQKDFRGPQACPRCPKEDRGLFPEPQEKGQGLAKERKGRCWAKPRHLVFHGAPRPQKVFDG

SEQ ID NO: 935910 - protein, 154 aa, Homo sapiens
  misc_feature (55)..(55): Xaa can be any naturally occurring amino acid
  misc_feature (58)..(58): Xaa can be any naturally occurring amino acid
MCERLLVPAHNEHTEAYHRRPFVAPPSHDDLVLSLLGIEGAVITIWGALSFLATXQGXPYHPRVGGAPHAVSLLPPFATRDHLGMLWATGDPGPHTVVFVRSCCHEKLCETTCAGPPTGDNLCTTGLGQETPHLRRCFALSLSLDTTSAFLCCI

SEQ ID NO: 935911 - protein, 33 aa, Homo sapiens
AAGYDLYSAYDYTIPPMQKHVVETAIQDRRSIH

SEQ ID NO: 935912 - protein, 50 aa, Homo sapiens
AIVSLKAPRRLKVCHFKRGPEICNYSYSTTFLAEAQQAEADSMPGGVLYI

SEQ ID NO: 935913 - protein, 37 aa, Homo sapiens
NVDLTEFQTNLGAYPRYHFQSWPNNAPVNLLLGKPTM

SEQ ID NO: 935914 - protein, 56 aa, Homo sapiens
GSDIVFKPCVAILTHRRDAQGRQGDLEVQLFPEDHRKSRHLLMIIRMFICGADIWV

SEQ ID NO: 935915 - protein, 35 aa, Homo sapiens
PEKTHAADFVFFRTTFTEVSRAFFFLSKNGNLLGK

SEQ ID NO: 935916 - protein, 38 aa, Homo sapiens
ATSERSNFAPVRELAHHRLEPAFSKDGRQNCCLIPPSA

SEQ ID NO: 935917 - protein, 35 aa, Homo sapiens
LLALSKMYTCKHPPFQFEVHPLNNPGPKGQSPKRG

SEQ ID NO: 935918 - protein, 76 aa, Homo sapiens
ETPASAEVIAEEERGFGRETQDEYRGAARDHNCCRGAFVRLASLLRLYAVLRAEAEIHNTKVAGVSAVNIQLLGAS

SEQ ID NO: 935919 - protein, 101 aa, Homo sapiens
QARKAERGAGLGAAKEREVLQLQEEVKNFITRENLEARVEAALDSGRLQLAITREGLVVRPQRRDSSGPSKDSAARPMYVSCEIALPGEAVFAIEFTLSAS

SEQ ID NO: 935920 - protein, 34 aa, Homo sapiens
VTLKTLQQQTFKIDIDPEETAESTVKRGLNSEKG

SEQ ID NO: 935921 - protein, 36 aa, Homo sapiens
RRVLACCQKTFKKKRRDFRRAVRSSALERGLPKRCF

SEQ ID NO: 935922 - protein, 34 aa, Homo sapiens
SNEGTGSADAIDGYEADDAEGGDGTDPGTEPEDS

SEQ ID NO: 935923 - protein, 37 aa, Homo sapiens
EPGYIQQPCPRDLQLGIDLGTTYSCVGVVSTESRDNC

SEQ ID NO: 935924 - protein, 104 aa, Homo sapiens
SLADTQAALGDELVRLRTGQHCIRKQWGRGEMAEVVSILTFRGLFLFVLIFARLILKLMWRTQGCLETKPMTGQSTIFTSLSYCFMIPHVVFAQESLGIRIFEP

SEQ ID NO: 935925 - protein, 58 aa, Homo sapiens
IAIMNDTVTIRTRKFMTNRLLQRKQMVIDVFTPEGDSPKTEIRENKPNVKTQPMSSCI

SEQ ID NO: 935926 - protein, 97 aa, Homo sapiens
  misc_feature (44)..(44): Xaa can be any naturally occurring amino acid
  misc_feature (90)..(90): Xaa can be any naturally occurring amino acid
VTAPRTLLLAALGGSGLTETWAGSHSMRYFHTSVSRPGPGKPRXISVGYVDDTQFVRFDSDAASPRTEPRAPWDRAGGAGVFGDRETQIXQDQHTDL

SEQ ID NO: 935927 - protein, 74 aa, Homo sapiens
GTMEGVEEKKKEVLLCQKPLRKAKEFPELKIKLLERSLPKRCFERQEEFILEKQMTSQGLAVDRSIRSRVAEIG

SEQ ID NO: 935928 - protein, 107 aa, Homo sapiens
NFPILVSLEATAGDQGCISVLYLNRIKTDTPSTAIYRPPPRNAFLPQGYSLLGKEFSNISATHTYIYKLSAEEKYGSILPDPQTVRPYGYLPLFLKITVILFFFKVH

SEQ ID NO: 935929 - protein, 113 aa, Homo sapiens
  misc_feature (2)..(2): Xaa can be any naturally occurring amino acid
MXDRREPDFLALCPLGAGQANSANLSPQARDPTTHRLRPEPAADLDTIKTPKTFIMSQMLWKRFWENPEDPPVAANVKTDAEEDPNCHEQHPSNTATYWGKIKKLFTDGGKKT

SEQ ID NO: 935930 - protein, 46 aa, Homo sapiens
LGCQNQLAIRWTGDKDQLMSLMAKNAPTLFLYSGEGILECKMDSAQ

SEQ ID NO: 935931 - protein, 43 aa, Homo sapiens
GRTLRTTWATTCRFLPAKSGEEDEMEVEDPGELRSQKPNIINF

SEQ ID NO: 935932 - protein, 41 aa, Homo sapiens
AKRIAQQAAGGLSFRAASSLPVSLTLAVSMKAFSPVSPLGK

SEQ ID NO: 935933 - protein, 44 aa, Homo sapiens
GPKKHLKRVAAPKHWMLDKLTRVFAPRPSTVTHKWRECVTPNHF

SEQ ID NO: 935934 - protein, 43 aa, Homo sapiens
LPRAPDDRPDGAFPDFLLVPSPIWQPLKDQLIYTLLKEDRPPR

SEQ ID NO: 935935 - protein, 34 aa, Homo sapiens
ARERSAYNSCAVGYHPHDGGPRTVSSMELARAVP

SEQ ID NO: 935936 - protein, 41 aa, Homo sapiens
EDEKGAGSRSTLGCQLRYEKWKYVLGYKQTVKMIRQGKAKC

SEQ ID NO: 935937 - protein, 80 aa, Homo sapiens
  misc_feature (10)..(10): Xaa can be any naturally occurring amino acid
  misc_feature (79)..(79): Xaa can be any naturally occurring amino acid
HEQQPGNRAXSSGAFSIATLLDFGVGKRGIEERIQEEAGFLIDALRELAAQFIDPTFFLSRTVFQMSFSSIVFWGTAFXY

SEQ ID NO: 935938 - protein, 49 aa, Homo sapiens
ETYLCRRPDSTWHSAEVIQSRVNDQEGREEFYVHYVGFNRRLDELVKKN

SEQ ID NO: 935939 - protein, 57 aa, Homo sapiens
LSGQLAQRRKPGGKRKPFHKKRKFEFGRPACNTKFGPAAFTQVRVGRVQEFPSPGLD

SEQ ID NO: 935940 - protein, 45 aa, Homo sapiens
DTSYPPVSPSSPSPTIPHAICIHILSPGTALGACTSLCNSGSSMA

SEQ ID NO: 935941 - protein, 49 aa, Homo sapiens
ELGSDKMAGCPQIIKETSVSADQFCIKPTRWEHAVFHVVNAGLRIPLEE

SEQ ID NO: 935942 - protein, 30 aa, Homo sapiens
MVSAALMKKYIHVAKIIKPVLTQESPPTFQ

SEQ ID NO: 935943 - protein, 36 aa, Homo sapiens
KGEPGMPMDIVNNLWAAFFINQQGKITLEVDHCDLQ

SEQ ID NO: 935944 - protein, 31 aa, Homo sapiens
MTCMTFPKLNLPHLSLLCWQMWLNWGVNAAP

SEQ ID NO: 935945 - protein, 63 aa, Homo sapiens
MASRKAGTGASGSTRQAQRGSSNVFSMFDQAQIQEFKSFSPPSTFLRAGASPTLRPHPQASAD

SEQ ID NO: 935946 - protein, 68 aa, Homo sapiens
LTVITKETEKAVPQDIEEGNVKMLGMQIPIKNVEMLASVLVAISVPFCSLFWLLVEWFWYTIDEKLHE

SEQ ID NO: 935947 - protein, 88 aa, Homo sapiens
LGGRYHRSLNPAWQSLTHRRDAQGGQADLEVHLLLRIIHLLDDYRNVSLLEQTLWAQQMQQIRMSFAEGCGADGQTHDAKAIRGTGNT

SEQ ID NO: 935948 - protein, 40 aa, Homo sapiens
DDHLDSQDFHGLGTTLHDVDDTDDSHQSDESHHSDDSDDL

SEQ ID NO: 935949 - protein, 38 aa, Homo sapiens
FSYLSSPSCWASLYYYQNANLNNTFFDPPERRTPFYTT

SEQ ID NO: 935950 - protein, 89 aa, Homo sapiens
SSKSSHCDSPPRSQTPQDTNRASETDTHSIGEKNSSQSEGDDIERGKEVESILKKTQIGYGFVKSAGNIPPGVLFNTLSDGTSAEAELM

SEQ ID NO: 935951 - protein, 48 aa, Homo sapiens
  misc_feature (2)..(2): Xaa can be any naturally occurring amino acid
  misc_feature (17)..(17): Xaa can be any naturally occurring amino acid
EXHILSFPKSRIVRSLXPFSPYEPLNFHDMFQPFLEMIHEAQQAMDIH

SEQ ID NO: 935952 - protein, 84 aa, Homo sapiens
MGQFTKEDKATITSLLGKVNVEDAGGETLARLLVVYPSTQTFFDNFCNLSSASPSWQPKVKAHCKKVLDFLGDSIKHLDDLKGT

SEQ ID NO: 935953 - protein, 78 aa, Homo sapiens
LHAKNIIHRDMKSNNIFLMKAEQVKNLEIFGFATVKVTLSCSQQVEQPTGSVLWMGPRGDPHAGNNPFSFQSDVYSSG

SEQ ID NO: 935954 - protein, 85 aa, Homo sapiens
LLLVSHPSFPALEEGTLLFPVFGHPNPGIRKGLNRPEVFSSARGPQLIDAEVAITRHAFRRRFLYSGNSPDFSSCYYEALLPQNL

SEQ ID NO: 935955 - protein, 44 aa, Homo sapiens
PRSTTPGTPFHHRDNPSLDVNSDLVGGRTTQPNAKPISLFLVAK

SEQ ID NO: 935956 - protein, 56 aa, Homo sapiens
MSQDIVKYNTYMRSTSKHQQQNISISSVASRRYAAQSRGDPRPEEDCPTFQTPSRC

SEQ ID NO: 935957 - protein, 104 aa, Homo sapiens
VLVLLISTVDCLAAEGNCTFKKKISRAAFHNAVAVVIYTNKSTEEPVTMTHPGTEDILRYLETNISVHMTIAVDLVCTQTSAVLSSLRVNILYCFDDYFFSMAH

SEQ ID NO: 935958 - protein, 119 aa, Homo sapiens
  misc_feature (84)..(84): Xaa can be any naturally occurring amino acid
  misc_feature (102)..(102): Xaa can be any naturally occurring amino acid
  misc_feature (117)..(117): Xaa can be any naturally occurring amino acid
TNNIPELKYYDKTVRGATEKEKITKKTVRESNFHIHDILFPSVPDTKCVENFPPTHSFYSGKSETEVNNQLLHNLEFSGEKIFXCLNAQEVFESTQKGDVPXRKARDKVVEVRVPAXCL

SEQ ID NO: 935959 - protein, 93 aa, Homo sapiens
EERMELENIRRRKRELLVEISAFGRSSVKPEQVEGLEAIRQQTFNDPKMAWQKSSHAPRGYQFLVEITLQTHRESPSSQGRVSQTPRLYSGEE

SEQ ID NO: 935960 - protein, 43 aa, Homo sapiens
DDRLMKIELITVSSPNVANQPPSPGGKSAYASGPQRDNICLYW

SEQ ID NO: 935961 - protein, 73 aa, Homo sapiens
KVAPLHSSLGNKSETSSLIIIIIIIIIIIIIVIMLKVDNHWSIKVGEEVLFAFAVFLLPYHLGQYTEGDADYV

SEQ ID NO: 935962 - protein, 32 aa, Homo sapiens
NNNSSSSSNSGWDQLSKTNLYIQDCSHTRQTV

SEQ ID NO: 935963 - protein, 56 aa, Homo sapiens
MLDKLTGVFAPRHPPGPHKLRECLPLIIFLRDRLKDALAESEGKEVCIQRFIKIDG

SEQ ID NO: 935964 - protein, 67 aa, Homo sapiens
MAHLNIVVAIAEIKCDLIDVREVMERDARTYADSINAILRDQRKNAININDSLYELVESHSTDATCH

SEQ ID NO: 935965 - protein, 39 aa, Homo sapiens
DVHPASSWRSPGAAGLVCSEGGSEPAAVFAGEAPQAGCF

SEQ ID NO: 935966 - protein, 32 aa, Homo sapiens
MSVGQESKTDYISRLMPMCHWHQAIIQPHATL

SEQ ID NO: 935967 - protein, 34 aa, Homo sapiens
MSSIECFSVGRLGHWARDVLTVGGVVVDESRGRV

SEQ ID NO: 935968 - protein, 94 aa, Homo sapiens
ATEVAAIFLLRQSMGRPSRPFVEGPRSSKRDPRRFNPAPVKTDMSKFKRNLAGKPKRHLTTRVRRRFKGQILMPTLVMEHKKQRNRRQSFRSPR

SEQ ID NO: 935969 - protein, 91 aa, Homo sapiens
  misc_feature (34)..(34): Xaa can be any naturally occurring amino acid
  misc_feature (39)..(39): Xaa can be any naturally occurring amino acid
EKRASQGWLETHGEFGEKGDPRDSLGIPGKSSPXKHGPXNVCHGPPGAQAPKVNLGDYKATQKIAFSATRTINVPLRRDQTIRFDHVITNM

SEQ ID NO: 935970 - protein, 44 aa, Homo sapiens
MARGPKKHFKRVAAPKHLILDKLPGVFALVIHRSHKLREFLPSS

SEQ ID NO: 935971 - protein, 48 aa, Homo sapiens
MVHITEEDKDYITKPLGKVMKRCWSRTLETLIVYHEPEILDSFAPVSA

SEQ ID NO: 935972 - protein, 49 aa, Homo sapiens
KQGQERLVLSDCVSSPQGKSDQLLPTCAPPSHFVRCIIPMSKVPGVCNP

SEQ ID NO: 935973 - protein, 46 aa, Homo sapiens
GVTVRGAPLANYGNPSQGQPCQRDSQVPWPIGCNCDPQGSVRAQVD

SEQ ID NO: 935974 - protein, 85 aa, Homo sapiens
GDRVQLADITVVCTLLWLYKQVLEPLSASLSNTNRWFLTSINKPSSGCLGEWNCVRDGQFDAKSCRDQPKGHTRKRGLTGESRAQ

SEQ ID NO: 935975 - protein, 69 aa, Homo sapiens
KIETSCLDGENRRVLINTDIGLPNGLTLTRSLNCSSGQMQEPKTGVYTTYGTGRRVSQNNLKHPSASRH

SEQ ID NO: 935976 - protein, 51 aa, Homo sapiens
VVGSMRVVMARLLSEGEQGIPTACAAFAQNPGGRPQSRPCWGRRGGPQYNW

SEQ ID NO: 935977 - protein, 71 aa, Homo sapiens
RRRRFLLFQKTLKKSEEFPELRIKRLRKRFAQKMLRKARRRLIYEKQALSQDYRQMSRPEFEWRGWQESWH

SEQ ID NO: 935978 - protein, 34 aa, Homo sapiens
GRAVRLSSPRSEPCRQGPPAVCQGFRTQEESHTL

SEQ ID NO: 935979 - protein, 37 aa, Homo sapiens
VQVLQQQEWLVLVLVWEQYCWQTLIDWVMTETLALMQ

SEQ ID NO: 935980 - protein, 37 aa, Homo sapiens
KLYLSILICTYDSLKPCRSPDRSGNSTFRSTLETRRY

SEQ ID NO: 935981 - protein, 62 aa, Homo sapiens
MRKGPSPKRRYKNQKFGFVEEERLKVDIGRLYDVSSFQAKKLMAEAQEAGKKGSIRDSQTNR

SEQ ID NO: 935982 - protein, 55 aa, Homo sapiens
VSLLRVTIELQVESRVPLGFSTIAGDMKTQIKSYKTTPLTTAFPPEQTEHLETTM

SEQ ID NO: 935983 - protein, 52 aa, Homo sapiens
MAGEKVEKQILKRRDPKPRRVDAWWQGEKEVTSKLKSPEGEPHCSGTLFLFR

SEQ ID NO: 935984 - protein, 34 aa, Homo sapiens
GYVAIIDPSLTSPPCVQCSIMIHHGTSMARQAEH

SEQ ID NO: 935985 - protein, 42 aa, Homo sapiens
INSQGLVKESYLKPKKYQGLLLTIYTSVLHLNSRQCEYAKVG

SEQ ID NO: 935986 - protein, 64 aa, Homo sapiens
  misc_feature (49)..(49): Xaa can be any naturally occurring amino acid
MPGSCKRPAILYALLSSSLKVSPDPVAAAYEANRPVQLCAPHRTCRELXDVLAKTVGFPQGTCH

SEQ ID NO: 935987 - protein, 40 aa, Homo sapiens
KLDKLKAELETLVSPFDIFLVGNFETSKDHCDYSFDAPGQ

SEQ ID NO: 935988 - protein, 69 aa, Homo sapiens
THHIGQVGLDLTILASGDPPASASKSVGIMGVRAHGARPVLLFENKYRLLLSRIVDRVYTVFECRLRQS

SEQ ID NO: 935989 - protein, 74 aa, Homo sapiens
QNTGVVKATTKRQNWERKGLISTIVVIGTVDSGRSTTTGHLIYKFGGIAKDHLKFRGGFLHGEGLLQVFLAFDK

SEQ ID NO: 935990 - protein, 76 aa, Homo sapiens
  misc_feature (8)..(8): Xaa can be any naturally occurring amino acid
  misc_feature (15)..(15): Xaa can be any naturally occurring amino acid
  misc_feature (17)..(17): Xaa can be any naturally occurring amino acid
GTGLGCSXPKRPRLXGXTRSEAVVIVVLEGASLETVKVGKTYELLNCDKHKSILLKNGRDPGEARPDITHQSFADA

SEQ ID NO: 935991 - protein, 84 aa, Homo sapiens
DVVKEDAFYSWESSKDPAEQQGKGVALKSVTAFFKWLREAEEESDHNWGLVGPGTWSPMDTQMARLAPGLQGGGRAAVQMGPVD

SEQ ID NO: 935992 - protein, 61 aa, Homo sapiens
APVKKLVVKGGKKKRQVLKFTLDCTHPLEDGFMDAANFEQFFKKGSSDRKSWDLGGGVVPS

SEQ ID NO: 935993 - protein, 40 aa, Homo sapiens
NRSWKQAKEEVQVEIEQYRLQREEDFKAKEAAALGSVQLQ

SEQ ID NO: 935994 - protein, 112 aa, Homo sapiens
  misc_feature (24)..(25): Xaa can be any naturally occurring amino acid
  misc_feature (63)..(63): Xaa can be any naturally occurring amino acid
VVLMQLSAWGMKVWAPLALSGCAXXFSFPLPGALGTVLGRGSLFVSFPFTSAEPRASDALWPXLRTQPAALSAEQAKVVLAEVIQGFSAPENCSAHGTRFRDKRLATTWGKG

SEQ ID NO: 935995 - protein, 34 aa, Homo sapiens
MPRGPLLTNPYYSHQGYQSPELTIVYRNTETNNS

SEQ ID NO: 935996 - protein, 110 aa, Homo sapiens
RNANQNNKIPFHTSQNGIIKKLKKNRWLQGCGEKWTLIHCWWECKLVQPLWKVVWRFLIEIKQKYHLIQHPLLSMYPRNINCSVIKHMPSMFTAAYYIASMDHLMPLWWT

SEQ ID NO: 935997 - protein, 32 aa, Homo sapiens
HCFPEILWSLNVDLTEFQSNPGAPTAAMHVPS

SEQ ID NO: 935998 - protein, 51 aa, Homo sapiens
QLQTEVEEEDRKSRNAEAQAKKAITDAAMMAEELKTEQDNSRHLEPMKENM

SEQ ID NO: 935999 - protein, 102 aa, Homo sapiens
  misc_feature (6)..(6): Xaa can be any naturally occurring amino acid
  misc_feature (12)..(12): Xaa can be any naturally occurring amino acid
MGHAFXKDEGQXEHVGQVEELSKSERREFEGCILMFHHPYFKVTVSSVGTMIFDVGGTSLGETVPPIAGYLATHITSGTMVIVIPKMSPHFSGEDPAGKATS

SEQ ID NO: 936000 - protein, 142 aa, Homo sapiens
  misc_feature (19)..(19): Xaa can be any naturally occurring amino acid
  misc_feature (46)..(46): Xaa can be any naturally occurring amino acid
  misc_feature (91)..(91): Xaa can be any naturally occurring amino acid
  misc_feature (95)..(95): Xaa can be any naturally occurring amino acid
  misc_feature (133)..(133): Xaa can be any naturally occurring amino acid
MGTLVGSYASVARMLDERXKRALVRRRAVNLRRFSVGNRKLRRAHXTTDAMPRPSTCADSGGGMMTTLTARPEAITFDPQQSALIVVDMQXAFAXPGGYLDLAGFDVSTTRPVIANIQTAVTQRERQEMLIIXFRNGWDEQY

SEQ ID NO: 936001 - protein, 75 aa, Homo sapiens
  misc_feature (5)..(5): Xaa can be any naturally occurring amino acid
LALSXPGSYGQNPPGAEPIFIDANFQSTVPGGPIGGQTRVTLRNEHLQYIVTWYGLSAATSYLWFKKFLRGTPGV

SEQ ID NO: 936002 - protein, 49 aa, Homo sapiens
ECGSECRGQASYATPAAEHKILNEGLPNQVLKPFLEDSKSQICCPIVGT

SEQ ID NO: 936003 - protein, 126 aa, Homo sapiens
  misc_feature (1)..(1): Xaa can be any naturally occurring amino acid
  misc_feature (6)..(6): Xaa can be any naturally occurring amino acid
  misc_feature (12)..(12): Xaa can be any naturally occurring amino acid
  misc_feature (21)..(21): Xaa can be any naturally occurring amino acid
  misc_feature (43)..(43): Xaa can be any naturally occurring amino acid
  misc_feature (45)..(45): Xaa can be any naturally occurring amino acid
  misc_feature (66)..(66): Xaa can be any naturally occurring amino acid
  misc_feature (88)..(88): Xaa can be any naturally occurring amino acid
  misc_feature (111)..(111): Xaa can be any naturally occurring amino acid
  misc_feature (124)..(124): Xaa can be any naturally occurring amino acid
XSELVXETGSGXLGLYRLAAXSPNNCVSSIENMENISTAGPRXVXDPGGTEEKRMSEYITTALRDXRTTRRFYDSGAIMLRDEATILXGMLDRTEAIDFQLLSKGGSPGTXKTPVGHRFTKALXKV

SEQ ID NO: 936004 - protein, 69 aa, Homo sapiens
ETSQAPRTVALPRCGSVPLILALSLLPRLGGIRPRNLWDNREWKVLGSRSLEDLTAVHFLDPLQAALTL

SEQ ID NO: 936005 - protein, 57 aa, Homo sapiens
PPYAASAEEVAKDLKSKSGDRSPLLCLQTGPAETEYAPGDAAPQMTGPGYAGPTHFK

SEQ ID NO: 936006 - protein, 60 aa, Homo sapiens
VDEQMLNVQNKNSSYFVEMDPNNVKTAVCDNPPRALKMQSPHCNSTAIKSFQAHLEQFTP

SEQ ID NO: 936007 - protein, 82 aa, Homo sapiens
EESNRLFRAMQLLKEEARKAHQPLAFSGGIKVQHEDLICRNTYYPLGSAVEAIKANCSDNEFTKLYTAAILQSPDPWVYSKD

SEQ ID NO: 936008 - protein, 112 aa, Homo sapiens
  misc_feature (18)..(18): Xaa can be any naturally occurring amino acid
  misc_feature (28)..(28): Xaa can be any naturally occurring amino acid
  misc_feature (37)..(37): Xaa can be any naturally occurring amino acid
  misc_feature (46)..(46): Xaa can be any naturally occurring amino acid
  misc_feature (56)..(56): Xaa can be any naturally occurring amino acid
  misc_feature (80)..(80): Xaa can be any naturally occurring amino acid
YSNEKPFTGFEAFYAAEXIDECQVAPGXAPTCDHHCXNHLGGFYCXCREATSCTVXSAPAQSRASSLPWSSGLPSRSEAXTTCWPQLRVGLKNVVPQLPFTHHGPNNKPGPT

SEQ ID NO: 936009 - protein, 42 aa, Homo sapiens
ARHHINETRSTLNTHYQKIPKPYNLTCLTPNFDPIYSPYTTT

SEQ ID NO: 936010 - protein, 32 aa, Homo sapiens
MAEVQVLVLDGRGHFPGPPGNSLAKTGTVGRK

SEQ ID NO: 936011 - protein, 65 aa, Homo sapiens
GQWYGNAQQIGQYMPNGLASSCIWDVWPGMEPAMDLIRHSLLHMDGPIMSHRLRQMQHVPISSGI

SEQ ID NO: 936012 - protein, 42 aa, Homo sapiens
MAGNSILPGCCLYSSRPVSKVILLSSWKGKIKIQSYAPAVTW

SEQ ID NO: 936013 - protein, 40 aa, Homo sapiens
EEAENGRDAPPNGNANKENGEQEADNKVDEEEERLGEERR

SEQ ID NO: 936014 - protein, 135 aa, Homo sapiens
  misc_feature (4)..(4): Xaa can be any naturally occurring amino acid
  misc_feature (7)..(8): Xaa can be any naturally occurring amino acid
  misc_feature (23)..(23): Xaa can be any naturally occurring amino acid
  misc_feature (30)..(30): Xaa can be any naturally occurring amino acid
  misc_feature (99)..(99): Xaa can be any naturally occurring amino acid
  misc_feature (113)..(113): Xaa can be any naturally occurring amino acid
  misc_feature (119)..(119): Xaa can be any naturally occurring amino acid
GVWXLRXXFPSGLLGAGGEITVXCAGLSSXLSDDEVPLGNRGTVLKTPGRGSAEDLSLEEEARFSSQQPPAQLSHRHRGARCCGQREALQLPGIRRWRXRPFLSAWSQVPVNXEDVAVXLSWGGAKMHWTQLSGD

SEQ ID NO: 936015 - protein, 83 aa, Homo sapiens
DNHKMAALEAKICHQIEYYFGDFNLPRDKFLKAQITLDEGWVTFGDNHKIQQVDRLTTDFHVIVEHLANPGRTHGNQSDQLKS

SEQ ID NO: 936016 - protein, 62 aa, Homo sapiens
EAFSCIDQNRDGIICKADLRETYYQLGKVSFPEEELDGCCKREGPINERFLYVFWGEVNGTD

SEQ ID NO: 936017 - protein, 34 aa, Homo sapiens
MTLQRLFRLSSVIRSAVSVQLRRTLVLQQCINKD

SEQ ID NO: 936018 - protein, 69 aa, Homo sapiens
PPYAASAEEVAKELKSNLGIEVLCYVFRRVLAETDTAEEKPAPDDGSTGTQAPSHSESALNMTLNVNQI

SEQ ID NO: 936019 - protein, 34 aa, Homo sapiens
VGKTVLIMELINNVAKVHGGYSVLLGFGDPTLKA

SEQ ID NO: 936020 - protein, 35 aa, Homo sapiens
KWKYERPDGSPVFIALRSSKKKSVQYDDVPDYKSD

SEQ ID NO: 936021 - protein, 33 aa, Homo sapiens
LNPQDFWNCGCQIIAMNFPDSGSNDGPSHGLGS

SEQ ID NO: 936022 - protein, 83 aa, Homo sapiens
  misc_feature (7)..(8): Xaa can be any naturally occurring amino acid
  misc_feature (10)..(10): Xaa can be any naturally occurring amino acid
  misc_feature (39)..(39): Xaa can be any naturally occurring amino acid
  misc_feature (61)..(61): Xaa can be any naturally occurring amino acid
GGGRRRXXAXLLGPECVRRVHLCPVCGESFASKAVRNRXPVLHAAQVFPCKYCPATFYSSXRLTRHINKCHPSENRQVILLQV

SEQ ID NO: 936023 - protein, 66 aa, Homo sapiens
KTLTGKTITLEDEPSDTIEMKAKIQDKEGFLLISRDLSFAGKQLEDGRTLSDYNIQRVYSSSVLRL

SEQ ID NO: 936024 - protein, 111 aa, Homo sapiens
  misc_feature (2)..(2): Xaa can be any naturally occurring amino acid
  misc_feature (18)..(18): Xaa can be any naturally occurring amino acid
  misc_feature (26)..(26): Xaa can be any naturally occurring amino acid
  misc_feature (52)..(52): Xaa can be any naturally occurring amino acid
  misc_feature (60)..(60): Xaa can be any naturally occurring amino acid
  misc_feature (66)..(67): Xaa can be any naturally occurring amino acid
  misc_feature (70)..(70): Xaa can be any naturally occurring amino acid
  misc_feature (76)..(76): Xaa can be any naturally occurring amino acid
MXVWNASVPALKPQDGRXVAGGLVPXGGTSLGVSNVCSSRAGTFLNIKKGVXFNFFCKVXFGLLLXXGVXLFCAVXNVRSVRSPDVLPWLGDCTRVQAHGNCIACNNVIKS

SEQ ID NO: 936025 - protein, 35 aa, Homo sapiens
SLHIPLCTYSPQLAPKKPDAKKDDARQAPKQLQLP

SEQ ID NO: 936026 - protein, 119 aa, Homo sapiens
  misc_feature (13)..(13): Xaa can be any naturally occurring amino acid
  misc_feature (22)..(22): Xaa can be any naturally occurring amino acid
  misc_feature (59)..(59): Xaa can be any naturally occurring amino acid
  misc_feature (70)..(70): Xaa can be any naturally occurring amino acid
  misc_feature (78)..(78): Xaa can be any naturally occurring amino acid
MLLCPLFPFGKRXCFRRKPLAXNGAPFLLPSPTVMQNFPPSSPSPVTLRTIDRVPPKAXWLCPRSPRNYXHELPCPLXEGCAGAGLVGGARERRGQGGVRGRGGYKNGGKMRERKGRGG

SEQ ID NO: 936027 - protein, 101 aa, Homo sapiens
WEVSVAPGVRSLSGCGSPRAMALAVRVVLLWRLRLQVQVSSAQEKLEDEFPGRLDICGEGTPRPPGSLNDGSRKLIHSKKKGDGYVDTEAVLSWCRHQAAC

SEQ ID NO: 936028 - protein, 53 aa, Homo sapiens
ALKANSDEEAAVQGKRPLVGKKGKRLLFGFRRQKRLLVEKRQAATRKPALKGG

SEQ ID NO: 936029 - protein, 48 aa, Homo sapiens
MAQPTVFLDIAVDGGALGREFSFELFADKGPKTAEIFRALALREGLWY

SEQ ID NO: 936030 - protein, 122 aa, Homo sapiens
  misc_feature (17)..(17): Xaa can be any naturally occurring amino acid
  misc_feature (25)..(25): Xaa can be any naturally occurring amino acid
  misc_feature (43)..(43): Xaa can be any naturally occurring amino acid
  misc_feature (72)..(72): Xaa can be any naturally occurring amino acid
  misc_feature (82)..(82): Xaa can be any naturally occurring amino acid
  misc_feature (92)..(92): Xaa can be any naturally occurring amino acid
  misc_feature (100)..(100): Xaa can be any naturally occurring amino acid
  misc_feature (102)..(102): Xaa can be any naturally occurring amino acid
  misc_feature (120)..(120): Xaa can be any naturally occurring amino acid
GGAGGGGFEFAAKYSVXALETQPQXPPFHAMDLTLRSALLLQXFGFSRSKVLKLTRKIDNVETSWALGAIFXYIDSLNRQKXPASSGRASLXPSAVSVCXHXPSCPGRDFILRSHSTGRXGH

SEQ ID NO: 936031 - protein, 36 aa, Homo sapiens
GGSYIVFKPCVAIPERTVVMSREDRLDLEGPTYFLK

SEQ ID NO: 936032 - protein, 46 aa, Homo sapiens
MLDLSKPLVDRALSLSVDVETYHFRLGKSVNLDVQFSDSLKESDSI

SEQ ID NO: 936033 - protein, 49 aa, Homo sapiens
DFRACLISMGYNMGEAEFARIMSIVDPNRLGVVTFQAFIDFMSRVTVYK

SEQ ID NO: 936034 - protein, 33 aa, Homo sapiens
ALKGEGKKEEQVISLGPQVAEERCICVCISCIL

SEQ ID NO: 936035 - protein, 37 aa, Homo sapiens
MVFRRFVEVGRVANVSFGPHAGKLVAILDVIDHDRAL

SEQ ID NO: 936036 - protein, 75 aa, Homo sapiens
MTLCMWKDYDHIIFHQKTLMALRKLCYAPGSPEHILFTCFKAFGKVITYLTGKFNCIASRSPFPTVQWGPHLPLE

SEQ ID NO: 936037 - protein, 81 aa, Homo sapiens
  misc_feature (8)..(8): Xaa can be any naturally occurring amino acid
  misc_feature (59)..(59): Xaa can be any naturally occurring amino acid
AAQVNGAXTGHCALFAGSPGSGEQLMSSAVQDMNCIRQPTMCPAAQWWRGRRLVVLLSXLVLLVTGLTLAGWRRPCPCSAA

SEQ ID NO: 936038 - protein, 42 aa, Homo sapiens
ARAWTQKQVKSLQSLLKDTQIQLDDAVRANDDLKENIAIVER

SEQ ID NO: 936039 - protein, 44 aa, Homo sapiens
MDDIYKAAGSSSDKRSRKMTFKAASDIFVLALRMAASAPRSWQG

SEQ ID NO: 936040 - protein, 50 aa, Homo sapiens
VERDRPTEAVSEKPALASAKVISSRRDHELATPWTCCYLQPAWAHCQCNF

SEQ ID NO: 936041 - protein, 57 aa, Homo sapiens
REEPETRPEAELGLLQDWPGFPAGFNKETQRFHAEPAPAIKPTRLEQRRYFNVGIAC

SEQ ID NO: 936042 - protein, 69 aa, Homo sapiens
SKELWLYIGINTFDYLDSEDRAQVRHIDPCRSHMGPVQDPSSGGLSQVKVSVGDNESPSVQSPGLFCLT

SEQ ID NO: 936043 - protein, 302 aa, Homo sapiens
RREQGCPGPPVISSATLPTVASDSGERPPWPQEHAVSSFLDSPPCPKAAAGGRAAAWVAAAGSCPPGPLAEPAPADRAPQPEVEARATRAPARDPSPAAPPPRPTRTPAAAHSPPHSAEYWSPQSPDCGLQPPPPAGGLLLLPVLQLLLEQGERRVVLGGQGAWPQPGGQDPQQQQQQDTPGGARGGHSAAPEAAAAAAAGRCHLPSRRMCDNPVPGSQASPPLTYGGQVDRGKGAGQGEKIFVVGMVVPARPARGRLAGAGTTNPNKPARRKSSGLASDVLPSTESEVLDCSGVEMGNGGR

SEQ ID NO: 936044 - protein, 36 aa, Homo sapiens
MAKTHINIVVIRHVESGKSTTTGHLSYKYGGIDIVS

SEQ ID NO: 936045 - protein, 61 aa, Homo sapiens
RLQRHGPSQEVLRCGETVKMNGAEEEFGELIGTLNAAKVPPTLVFVLPYCYIDFAAELDPR

SEQ ID NO: 936046 - protein, 84 aa, Homo sapiens
KTVTSASNNETYCRSFYPAHSIKEWLIGMELVSVVLGFPGAFPSPLSLSSTSLLAKAILGVQVPGEAKEREGHFFSGGGSLFLG

SEQ ID NO: 936047 - protein, 34 aa, Homo sapiens
IFNGRKSPVLGQLETVVVTQITFTKGKLFFRNYS

SEQ ID NO: 936048 - protein, 124 aa, Homo sapiens
  misc_feature (36)..(36): Xaa can be any naturally occurring amino acid
  misc_feature (94)..(94): Xaa can be any naturally occurring amino acid
  misc_feature (116)..(116): Xaa can be any naturally occurring amino acid
PGLTWEMLTGQERVALETRKRECGNPLTSGRTSSGXNSYDLAIKAITSSAKVDMTFEEEAQLLQLKVKCLNNLGGPPESSTTTAQPAFLQPCAXSTSQTTSRLFFRKGKVLAQQGXVTVRPSPS

SEQ ID NO: 936049 - protein, 56 aa, Homo sapiens
RLFSGAAFFISSAFSLPKCGSAPDGKDSDGHGHEAPLGPQELSFRGVELKGDKGII

SEQ ID NO: 936050 - protein, 35 aa, Homo sapiens
ARAHEGKGKALFQVNQWLTWLETAEEEESEEKLTK

SEQ ID NO: 936051 - protein, 103 aa, Homo sapiens
ELARLQGHGPRPARCYRYCKNKPYPKSRFCRGVPDAKIRIFDLGRKKEKWMSFRFVAKWCKMNEQLSSEALEAARICANKDKEKGCGKMASISGRAPPFQVIR

SEQ ID NO: 936052 - protein, 106 aa, Homo sapiens
MLHPQRRRIWGVGPGCRASAVASSAADALFSTGASSAERGEALLHRRGCVVPRRQHFVISHQRRGGCCPLSESSLSGDTLFSLCGEIPPQQRRVAAWDDTTGFSTS

SEQ ID NO: 936053 - protein, 51 aa, Homo sapiens
KLELARRCFSKATLRMMTRWLLRLSAQHHHCPANSGRISPRSTRVQELDGD

SEQ ID NO: 936054 - protein, 38 aa, Homo sapiens
DEGNVIVGKRRNKTHTLCRSCGYKDLNTTEVDIWQMWL

SEQ ID NO: 936055 - protein, 59 aa, Homo sapiens
VPLGLLGAALSSFTLYTRKLAGTMGKNKTGESGGGLERRKRICGGKVLDRRVVKGKVEY

SEQ ID NO: 936056 - protein, 89 aa, Homo sapiens
VLLEFLSASFLENPTYGSSLIRFSMSSVVAAALVHFYGVSNLQEFRSRPEKAAVLMTPFSEPSHLRGGARSYQVLLKITTLLSERRSEL

SEQ ID NO: 936057 - protein, 62 aa, Homo sapiens
MTLPTALQPVRGRDDVLESPAAITAQFPGGPSTVFLVAVIALTFVMSAFQVTKLSWMTLAQG

SEQ ID NO: 936058 - protein, 98 aa, Homo sapiens
  misc_feature (6)..(6): Xaa can be any naturally occurring amino acid
ILPWGXEFGTSFFQRRNTIYFKEDIQMAQKAHEKVLNIISPLGKCKFKTHIENTPLPYPNRMTKIKESQMLIKMWKQPSVVAHTCNPSILGGRGEQIT

SEQ ID NO: 936059 - protein, 38 aa, Homo sapiens
LRHEAYFKASGLLTASSRDLKVNVPDLLCVLGSSIDIK

SEQ ID NO: 936060 - protein, 31 aa, Homo sapiens
ELRRTTAIALDKTLATRQGGSVSHVSSQSPQ

SEQ ID NO: 936061 - protein, 62 aa, Homo sapiens
  misc_feature (3)..(3): Xaa can be any naturally occurring amino acid
  misc_feature (16)..(16): Xaa can be any naturally occurring amino acid
  misc_feature (18)..(18): Xaa can be any naturally occurring amino acid
  misc_feature (22)..(22): Xaa can be any naturally occurring amino acid
LLXEVSFQEITLSDDXTXPSSXPRSPVALAGGKCSYPYHTLSQSSDEFLDEPLPPVHHYTSQ

SEQ ID NO: 936062 - protein, 55 aa, Homo sapiens
  misc_feature (7)..(7): Xaa can be any naturally occurring amino acid
  misc_feature (9)..(9): Xaa can be any naturally occurring amino acid
  misc_feature (32)..(32): Xaa can be any naturally occurring amino acid
  misc_feature (34)..(34): Xaa can be any naturally occurring amino acid
MTEPLKXPXNHHQNKKTPQQAQRDGPGSRAQXVXVKEELLAVGKLTQTSGESTHT

SEQ ID NO: 936063 - protein, 38 aa, Homo sapiens
MIYGMISDDLVLSIRRPRDGLESAYIPQQESLPMRIGG

SEQ ID NO: 936064 - protein, 39 aa, Homo sapiens
NREGKDKEIGSVSSSETPPPPPPPNEINLSSTYMEEEED

SEQ ID NO: 936065 - protein, 49 aa, Homo sapiens
TQEFERRQQEREEAQRQYTKRTMEVFRILNTKINRGQPNLIVHMEYLLH

SEQ ID NO: 936066 - protein, 39 aa, Homo sapiens
LGELFCVPVVDVVGDWQDPGISLTGQMQDFVKTVTGKAI

SEQ ID NO: 936067 - protein, 32 aa, Homo sapiens
FRVREYSRPLPCIIVRVAGTEPTWQRGRAIFI

SEQ ID NO: 936068 - protein, 56 aa, Homo sapiens
RRWHLSAPWLLPAVQPLRCSAEACLEPQIPFLLHISTLYFTETVYIVEIFLTCKTG

SEQ ID NO: 936069 - protein, 47 aa, Homo sapiens
MVYYPDLFVLGKSRTISNRAWRKAPKGASCPKENPRDVSTVLLIHGS

SEQ ID NO: 936070 - protein, 98 aa, Homo sapiens
QGTHWPRRPPAPLPRALTRLPGPRQDGREAEETKIIFVVGGLAQEGHPVSEKIVQKYGYTTFHRDLLRSEVSSGSPGQRACGIMKKGSLFHGDSFDIV

SEQ ID NO: 936071 - protein, 45 aa, Homo sapiens
  misc_feature (11)..(11): Xaa can be any naturally occurring amino acid
LAGKGCSSLGXGNPEPAPEPKVLATSLLQGALPAGQCFYNPAQWH

SEQ ID NO: 936072 - protein, 48 aa, Homo sapiens
TDEVNDSFLYHQIQFGHHWYCTYEYTDYGGLIFNCYILPHYSYEPGDC

SEQ ID NO: 936073 - protein, 68 aa, Homo sapiens
YILLSTLEPTDAGILGRLRTHQAGSAHGASSIIFMMESGPVRLSSGGAAQLGLRWGYIIHSWDVRAHH

SEQ ID NO: 936074 - protein, 68 aa, Homo sapiens
NFSGRGGFGGSRGGGGYGAVGYGYNGFGNDGKQFWEVVELQCIWGITTISLQIVRPMEGGYFGRQKLS

SEQ ID NO: 936075 - protein, 36 aa, Homo sapiens
DPSNASTTAMPVTQSVKKPRKACKKNHAFKMFGRPS

SEQ ID NO: 936076 - protein, 137 aa, Homo sapiens
  misc_feature (22)..(22): Xaa can be any naturally occurring amino acid
  misc_feature (39)..(39): Xaa can be any naturally occurring amino acid
  misc_feature (51)..(51): Xaa can be any naturally occurring amino acid
  misc_feature (57)..(58): Xaa can be any naturally occurring amino acid
  misc_feature (86)..(86): Xaa can be any naturally occurring amino acid
  misc_feature (104)..(104): Xaa can be any naturally occurring amino acid
PPTMPTETLQTGSMVKRSAPRXFTSAVALRILNKGPDYXRSRPSQPQEAQXVERLEXXTRYVKSQEVINAKQEPVKPAVLAKPPGXRCQGALGSPTLKVFGNHXKTESGVQRENLKLEILKNIINSSEGSSSGSGHK

SEQ ID NO: 936077 - protein, 49 aa, Homo sapiens
RKLRRREEEVKRKKGPQKNKLPKDAKKSSTPLSEAKKPAALKPKVPKKE

SEQ ID NO: 936078 - protein, 37 aa, Homo sapiens
  misc_feature (35)..(35): Xaa can be any naturally occurring amino acid
TAELAGVTHSVAGFHFGLLSQGLIGGANRDISILXTT

SEQ ID NO: 936079 - protein, 73 aa, Homo sapiens
KLENGLPQQKTVASISPLLQQQWRDGSTETTQTLSQELVNLRGELVTASTTCEKLENSQDEYKQCMKHSSSST

SEQ ID NO: 936080 - protein, 77 aa, Homo sapiens
MMKMLLDPMGGIVMTNDGNAFFERFKSSIQRPSPVLVLSQNTKRESGRKVHSGNIIAAKTIADIIRHVWHTSVLFSQ

SEQ ID NO: 936081 - protein, 67 aa, Homo sapiens
QVITIGNERFGFEAAVQLPFWYGIFGIHETTFNFIMSVTWTSQDLYANRFFWAAPPFTGIAQYSEGD

SEQ ID NO: 936082 - protein, 49 aa, Homo sapiens
MVGVNGFGRIGAWSPGLLLTSGKVDIVPSMTLPLNLNYHGFTSSHMIHH

SEQ ID NO: 936083 - protein, 49 aa, Homo sapiens
VETSPSIYRQRVHVKPGSNVSLDITFSDPSLYGPKSESLGGPSDPKRRQ

SEQ ID NO: 936084 - protein, 53 aa, Homo sapiens
MDDKSYKGLRVEQLDKKSRKNEVQGSLRQSSCWALRMASFDQGAGQGNEGLGQ

SEQ ID NO: 936085 - protein, 57 aa, Homo sapiens
VQLPSTCTSSSSYCSGCSALETVKRVSGNHSQKGPKVASILKSGPAGISHAGKVKRS

SEQ ID NO: 936086 - protein, 44 aa, Homo sapiens
AAAVPEEDEVSSTSETAARVGHPSPCGLCAAVVWALLLVSAVYP

SEQ ID NO: 936087 - protein, 45 aa, Homo sapiens
DGKSKVTHVMIRCQELKYDVGREDRFDLLTDLVDNYKRIPMVEPL

SEQ ID NO: 936088 - protein, 85 aa, Homo sapiens
PGSFGARRLCRPLTFNFQDLPSAMSSEEGKLFVGGLNFNTDEQALEDHFSSFGPISEVVVVKDRETKDPGVLAYTLQPRACLDAM

SEQ ID NO: 936089 - protein, 122 aa, Homo sapiens
  misc_feature (88)..(88): Xaa can be any naturally occurring amino acid
  misc_feature (100)..(100): Xaa can be any naturally occurring amino acid
SGFSFHRFKDQELRGSSLLSRTQFRACPTLGIDAVISSLSLCNSSSLTESILKSQERNKGRKDSKGRLLAFSFKRLADHIPDSGLSQXRGWPQRCRSGRXDLRLASCLMTDLRQFLGQRKRA

SEQ ID NO: 936090 - protein, 128 aa, Homo sapiens
  misc_feature (47)..(47): Xaa can be any naturally occurring amino acid
  misc_feature (66)..(66): Xaa can be any naturally occurring amino acid
  misc_feature (70)..(70): Xaa can be any naturally occurring amino acid
  misc_feature (72)..(73): Xaa can be any naturally occurring amino acid
  misc_feature (75)..(76): Xaa can be any naturally occurring amino acid
  misc_feature (84)..(84): Xaa can be any naturally occurring amino acid
  misc_feature (91)..(91): Xaa can be any naturally occurring amino acid
ARRLVVWFWDFPNSMAPKRQSPLPPQKKKPRPPPALGPEKTSASAGXRKKGGKEQQEAIEHIDEVXNVIXTXXCXXPMWGDFEXGTEFFQXPPTIFSEEVRFDRQNPKFLGNNICQPSTSVCTAWGGR

SEQ ID NO: 936091 - protein, 102 aa, Homo sapiens
  misc_feature (6)..(7): Xaa can be any naturally occurring amino acid
ATQVWXXIGVHHHARLTFVFLVETGFRRVGHAGLGVLTSGDLPASASQGAGIAGVTPIPGPPGIGGSGPAWPAMVGPCLYWEYRDWPAMVTHFCGPKLLWEA

SEQ ID NO: 936092 - protein, 139 aa, Homo sapiens
ASDAVAVTFADQIFGVFNWIIPVAVAFSCFGGLNASIVAASRLLFVGSREGHLPDAICMVHVERFTPVPSLLFNGVLSLVYLCVEDIFQLINYYSFSYWFFVGLSIVGQLYLRWKDPDRPRLSSSAFPSHHLLPLAPSS

SEQ ID NO: 936093 - protein, 133 aa, Homo sapiens
LEQDLADSKIADLEPSTMRAQRGLILLLLLLAVFCSTAVSLTCYHCFQPVVSSCNMNSTCSPDQDSCLYAVAGMQVYQRCWKQSDCHGEIIMDQLEETKLKFRCCQFNLCNKSDGSLGKTPLLGTSVLVAILN

SEQ ID NO: 936094 - protein, 132 aa, Homo sapiens
MSVSALSPTRFADSLSGFLQVASVLGLLLLLVKAVQFYLHRQWLLKAFQQFPSPPFHWFFGHEKFKGDQELQEIVSCIENFPSAFPRWFWGSKAYLTVYDPDYMKVILGRSDPKANGAYRLLAPWIGYGLLL

SEQ ID NO: 936095 - protein, 72 aa, Homo sapiens
  misc_feature (67)..(67): Xaa can be any naturally occurring amino acid
LAGVELTESGKVWLQAELKPSQLLWFQLLGKEDSALFATYLVNKGGYFNVNPEMKEDFGRKKAFGAXTRPFG

SEQ ID NO: 936096 - protein, 123 aa, Homo sapiens
SWAQASAYLSLIKCWNCRCEPLHLAKNLVFLISKLISSVICSQGDPFSIYVSRVLGGSDCPHLFCPATKPSADSAECRPHLCILLIPFPVLKVGALCLSLRTLTGSSLKAYFVQSIVLSTVCV

SEQ ID NO: 936097 - protein, 73 aa, Homo sapiens
  misc_feature (5)..(5): Xaa can be any naturally occurring amino acid
  misc_feature (48)..(48): Xaa can be any naturally occurring amino acid
  misc_feature (52)..(52): Xaa can be any naturally occurring amino acid
  misc_feature (60)..(60): Xaa can be any naturally occurring amino acid
  misc_feature (70)..(70): Xaa can be any naturally occurring amino acid
RGPEXGVLDRLYGHPCHNVWLSSGSSHPLAKNWVMRMVFLGSKPFATXWLVXSCWVKEGXSARLREGKYXGLL

SEQ ID NO: 936098 - protein, 46 aa, Homo sapiens
MSCTIEKALADAKALVERLRDHDDAAESLIEQTTALSKRKWKRMKQ

SEQ ID NO: 936099 - protein, 142 aa, Homo sapiens
  misc_feature (2)..(2): Xaa can be any naturally occurring amino acid
  misc_feature (12)..(12): Xaa can be any naturally occurring amino acid
  misc_feature (17)..(17): Xaa can be any naturally occurring amino acid
  misc_feature (33)..(33): Xaa can be any naturally occurring amino acid
  misc_feature (37)..(38): Xaa can be any naturally occurring amino acid
  misc_feature (58)..(58): Xaa can be any naturally occurring amino acid
  misc_feature (75)..(75): Xaa can be any naturally occurring amino acid
  misc_feature (79)..(79): Xaa can be any naturally occurring amino acid
  misc_feature (116)..(116): Xaa can be any naturally occurring amino acid
  misc_feature (138)..(138): Xaa can be any naturally occurring amino acid
PXAPWAERALRXEPAAXVWLTLTAAFLLTLLLXSCSXXAPGLRDLQDLIRYGKTKCGXRRAPPPAEPLMSQEIFXHFYXISVLWNGFLPLVPYSISVPGNTFSKLASWFAQNSRGXQFREGELALSAFLVLVFLWLTXTKTL

SEQ ID NO: 936100 - protein, 137 aa, Homo sapiens
  misc_feature (4)..(4): Xaa can be any naturally occurring amino acid
  misc_feature (14)..(14): Xaa can be any naturally occurring amino acid
  misc_feature (16)..(16): Xaa can be any naturally occurring amino acid
  misc_feature (66)..(66): Xaa can be any naturally occurring amino acid
  misc_feature (98)..(98): Xaa can be any naturally occurring amino acid
  misc_feature (111)..(111): Xaa can be any naturally occurring amino acid
  misc_feature (134)..(134): Xaa can be any naturally occurring amino acid
RQCXSRSVPSPLSXPXNSSCSSHGPAMGARHGFTLAPSWGASWAPLCHGEGLRWYAGHAEASWHPXHWVHGPCLGHALLSHGVRLLPWSGKKLGGFTXKAVVPPGPLHWAXGPELGMAPIFFGADKWAGLGGSXAGQ

SEQ ID NO: 936101 - protein, 102 aa, Homo sapiens
MGYYMPSAGICGMIRAYGMSGFNTSGLLMMYVISKVHLLLPVYNLALTDRPDYKRQVKNISCFALERSEDKRLYKFCFIIRLLLQTGCLYYTYCPYAHQSYV

SEQ ID NO: 936102 - protein, 32 aa, Homo sapiens
  misc_feature (32)..(32): Xaa can be any naturally occurring amino acid
MPFEREQLDPDELETITMHKILETTTFFQRAX

SEQ ID NO: 936103 - protein, 136 aa, Homo sapiens
  misc_feature (15)..(15): Xaa can be any naturally occurring amino acid
  misc_feature (21)..(21): Xaa can be any naturally occurring amino acid
  misc_feature (64)..(64): Xaa can be any naturally occurring amino acid
  misc_feature (67)..(67): Xaa can be any naturally occurring amino acid
  misc_feature (80)..(80): Xaa can be any naturally occurring amino acid
  misc_feature (87)..(87): Xaa can be any naturally occurring amino acid
  misc_feature (90)..(90): Xaa can be any naturally occurring amino acid
  misc_feature (108)..(108): Xaa can be any naturally occurring amino acid
  misc_feature (123)..(123): Xaa can be any naturally occurring amino acid
  misc_feature (128)..(128): Xaa can be any naturally occurring amino acid
  misc_feature (131)..(132): Xaa can be any naturally occurring amino acid
  misc_feature (135)..(135): Xaa can be any naturally occurring amino acid
SPPVSRPTRARIAGXALRLPXARLLSVPRSVPAAPPRGPACSKGSGDPSSSSSSGNPLVYLDVXANXKPLRRVVLELKAXVVPNTSXELXKPCALVRKGFGYKGSTFXRVIPSFMCQAGDFNXHNGTXREXXLRXP

SEQ ID NO: 936104 - protein, 142 aa, Homo sapiens
  misc_feature (6)..(6): Xaa can be any naturally occurring amino acid
  misc_feature (36)..(37): Xaa can be any naturally occurring amino acid
  misc_feature (45)..(45): Xaa can be any naturally occurring amino acid
WLGFGXHGGAQGFTSKADPQGSGGSRCGDRAPGASXXVDFGSREXWRELEKAIAFADRYAAVDTDGVEPWNRSWRQMSIPEIRQCGRRQLCLMNYYKTPIASWKEYFCWPPPGNISFAKAGLNKKPFPHSLSSSFLERGGTL

SEQ ID NO: 936105 - protein, 105 aa, Homo sapiens
  misc_feature (4)..(4): Xaa can be any naturally occurring amino acid
  misc_feature (21)..(21): Xaa can be any naturally occurring amino acid
  misc_feature (81)..(81): Xaa can be any naturally occurring amino acid
  misc_feature (102)..(102): Xaa can be any naturally occurring amino acid
MGAXGPKLGAMSYQPRGLDGXHQEAAGAEQALVRPRASMCPLRIHAPALGFCYFSLSHWASSIFWSETNMPRPPPLPTLKXLGEGKVLILEWLPLLEQIKDXDWP

SEQ ID NO: 936106 - protein, 104 aa, Homo sapiens
PEAPFDPSKPPVIEGFSRTVYSNPEAFKEKFIRKTRENLNGAYRVSGDGGCLTYGLYCFHRGQSTDPNIMMRTRIAAQGFTVRSHLVGVSGICYEVSSLSIAGS

SEQ ID NO: 936107 - protein, 43 aa, Homo sapiens
  misc_feature (22)..(22): Xaa can be any naturally occurring amino acid
  misc_feature (37)..(37): Xaa can be any naturally occurring amino acid
  misc_feature (41)..(41): Xaa can be any naturally occurring amino acid
RLQLPEQQPQHQEQERQSDGGXASPTPIPTVTAPSLXAAEXAA

SEQ ID NO: 936108 - protein, 134 aa, Homo sapiens
WVGQWDWVLDRMALMDQRLFPGGENQALIPDLASIMKKLLTKYDNLFETSFPYSMGWHGAPTGLKTGATCDHLAAPAHYYPPLLAIRNLSGKFMVGYENACPRPSVTFTPRNKAAEKIKGRFPRRYTNLPWRRK

SEQ ID NO: 936109 - protein, 47 aa, Homo sapiens
  misc_feature (41)..(41): Xaa can be any naturally occurring amino acid
LASKCPKCDKTVYFHDGKPFCHKPCYATPVWNPKAFNIGGXGLLHLR

SEQ ID NO: 936110 - protein, 60 aa, Homo sapiens
  misc_feature (48)..(48): Xaa can be any naturally occurring amino acid
  misc_feature (53)..(53): Xaa can be any naturally occurring amino acid
WRAQEACGGNVGHWIRSASAMVAPPVFQKWRLSIGFVFGSFIGSWYKXGRRRXEQDGLPG

SEQ ID NO: 936111 - protein, 33 aa, Homo sapiens
MSHGKQTEFFDNTVDCIPWPASPLSSYADKAKD

SEQ ID NO: 936112 - protein, 306 aa, Homo sapiens
YGRVRFRVRPLRGVSPRPPKCPCLGNLPTSARPSHTCAPAGLLSGGVELRPPPIFRRPKMSSICAWGEFWPIAPLHLAHPFVWGVFLASPPTSSMRCPLRHILQPLGHHCLARALYHFWGSTRGAPSEAYLVRAPKHFPWKAPSVATNTWGGTDRPPLSPPLVCGLYHQLRPAPLLSALQAAFVGVSSAAHRHRCTPGPLQMLAPPRPLVVSVPSFPEVDLSLQNPSVHLWSPPYAGTSHFLWHTCWLDMRPHGRNSCFFPPLLPAPHVLVEWLTTRPLDDHFHRAGPPGKPPGFFAPKKPPRPHN

SEQ ID NO: 936113 - protein, 41 aa, Homo sapiens
  misc_feature (13)..(13): Xaa can be any naturally occurring amino acid
  misc_feature (20)..(20): Xaa can be any naturally occurring amino acid
  misc_feature (27)..(27): Xaa can be any naturally occurring amino acid
MDRMMVEHLLRCXYYNTAVXWRARAAXEDLVNIEMFLTAKE

SEQ ID NO: 936114 - protein, 63 aa, Homo sapiens
  misc_feature (8)..(9): Xaa can be any naturally occurring amino acid
  misc_feature (27)..(27): Xaa can be any naturally occurring amino acid
  misc_feature (58)..(59): Xaa can be any naturally occurring amino acid
MSRSSASXXRSCSGDGHNDTGTTPEAXRNALNCYMRSAVPAATAGQEVLGVWPPVDTXXRGGG

SEQ ID NO: 936115 - protein, 79 aa, Homo sapiens
  misc_feature (3)..(3): Xaa can be any naturally occurring amino acid
AHXEILGEQGFQSLMETVDTEIVTQLQEFFKDSKSTCHVATIPSEKKLSNPACHPFMSLPEIRSFVYEYKETKTINFLL

SEQ ID NO: 936116 - protein, 122 aa, Homo sapiens
  misc_feature (37)..(37): Xaa can be any naturally occurring amino acid
  misc_feature (39)..(39): Xaa can be any naturally occurring amino acid
  misc_feature (41)..(41): Xaa can be any naturally occurring amino acid
  misc_feature (45)..(45): Xaa can be any naturally occurring amino acid
  misc_feature (56)..(56): Xaa can be any naturally occurring amino acid
  misc_feature (106)..(106): Xaa can be any naturally occurring amino acid
  misc_feature (108)..(108): Xaa can be any naturally occurring amino acid
IEPGERASARRGLSRAGCLALTLPALLLVTHQVPAEXRXSXHGGXTALESLIEMGXPGDARRRLWPHREPGHRGCDGLADGARRRPRCGRAFRDSPWTYPVDGSPXSXRTRRPFERIWVLLA

SEQ ID NO: 936117 - protein, 143 aa, Homo sapiens
  misc_feature (42)..(42): Xaa can be any naturally occurring amino acid
  misc_feature (126)..(126): Xaa can be any naturally occurring amino acid
RTQPTCTQVIKSFIAHTKPVWWSLHTDNMKFGAVTRIGGPPXGRINPLSSCSLLREKDPPTTSGPQTDQPNEHLTNFKSGPTQSALLILDLDETDTLRRPQQNQLLGLCEQNDRECGDPPHGEATXEPVFFLKSNRGTNFQGL

SEQ ID NO: 936118 - protein, 53 aa, Homo sapiens
  misc_feature (27)..(27): Xaa can be any naturally occurring amino acid
MLSGGFGYSPSSASQMATCQGPGLQPXDAAGWSCLPFWIAGNVGWFMDMFGMM

SEQ ID NO: 936119 - protein, 85 aa, Homo sapiens
  misc_feature (16)..(16): Xaa can be any naturally occurring amino acid
  misc_feature (20)..(20): Xaa can be any naturally occurring amino acid
  misc_feature (34)..(34): Xaa can be any naturally occurring amino acid
  misc_feature (67)..(68): Xaa can be any naturally occurring amino acid
KFDSTQTLVAMPVKTXMAYXRGAQNAVQRRIEEXAVARLRQHNIRQAAAPVHPPVDNPRSLSPAISXXAAGFTHGFQGVRFMKIR

SEQ ID NO: 936120 - protein, 139 aa, Homo sapiens
  misc_feature (68)..(68): Xaa can be any naturally occurring amino acid
HHGLRNGRQAPLTSSTPDAAHPHEGLDEEDFLSFPPKHVPHEPLCKYGGANLWSAFIILLLLLLLRRXLQAGVQVAQSRSLQPQPLGSSDSPASASASRVAGTTGVHHQAWLIFVFLVEMEFNHVGQAALELLASSDPP

SEQ ID NO: 936121 - protein, 145 aa, Homo sapiens
  misc_feature (1)..(1): Xaa can be any naturally occurring amino acid
  misc_feature (142)..(142): Xaa can be any naturally occurring amino acid
  misc_feature (145)..(145): Xaa can be any naturally occurring amino acid
XRLTAKVVEFADDDQRHIVRRVPGLAHLLQLLLGQVPDLKPLRAFQAQASHPADCWRCGPGLAVEKTLQTRVMATVLALDHAFGGVDRIVVNAGLGQQTEQQVEHFALILRRGFDDERGVGVAGERVPLTAQRLMRSSRPPXPSX

SEQ ID NO: 936122 - protein, 112 aa, Homo sapiens
  misc_feature (9)..(9): Xaa can be any naturally occurring amino acid
  misc_feature (104)..(104): Xaa can be any naturally occurring amino acid
FAKKHNKKXLKKMQANNAKAVSARAEAIQGPGEPQAIKPKMPKGPKLKRLAFIAHPKLGKRIRSYMAKGQSSANRSLRSKPRQGPKLQLRPRLQLQLRLPKVLXPPKVPRPL

SEQ ID NO: 936123 - protein, 98 aa, Homo sapiens
  misc_feature (74)..(74): Xaa can be any naturally occurring amino acid
CLERTITLIAKINMYLTSRVLYALCRLGVEKGYIPALKWDPFPLHTAVIWGLVLWLFEYHRPTLQPSLQSSMTXLYEDSNVWHDLSDFLIFNKSHPSK

SEQ ID NO: 936124 - protein, 129 aa, Homo sapiens
PGLCLWCLRFQRVQEEQGSQERGMLGTWHEVLEGERRHEHCGSHGAFWVQEWQDQQEDHHFRLWTALISFDLRAFYPSNHSFCSSGERPYPICSQCPVISALTEVLWVPYFPHSPSSLAGLQSEVYDYE

SEQ ID NO: 936125 - protein, 136 aa, Homo sapiens
  misc_feature (91)..(91): Xaa can be any naturally occurring amino acid
  misc_feature (130)..(131): Xaa can be any naturally occurring amino acid
LCWSSGLLGLVGLPVLIIGFVTAHAIARRFGRPIEALAKAADNIGQGNFEVTLPISSAMEMNQLTKRFGLMAEAARASGDKRGRIAGRSAXLQAVLDSIDDGLLMIDREGHLEHLNPVAQRQLGWDSDRXXKAWAP

SEQ ID NO: 936126 - protein, 50 aa, Homo sapiens
MKPRAGGICPLKYPIEHGIITNWDDMGEDLAPHLLTMSSVVASRGAPHPG

SEQ ID NO: 936127 - protein, 133 aa, Homo sapiens
MVSAQCIGNACSTPPGQPSFAAERLGLLCLASQHPCLLRFLPCLHRIGASLHQRWALPLPGAACSMEDSSFCLLWNLDGSFHSGSKGEEVALDAKASRAESRIARFKKSHQGNTQKLCQRIFGRCSQIAERKA

SEQ ID NO: 936128 - protein, 112 aa, Homo sapiens
  misc_feature (3)..(3): Xaa can be any naturally occurring amino acid
  misc_feature (96)..(96): Xaa can be any naturally occurring amino acid
NRXSQNITYHCKNSIAYLDEETGSLNKAVLLQGSNDVELVAEGNSRFTYSVLSDGCSKKTNEWGKTIIEYKTNKPSRLPFLDIAPLDIGGADQEFXCGGWPRLFQISELNLN

SEQ ID NO: 936129 - protein, 84 aa, Homo sapiens
KLSKDPNIVIAKMDATANDVPSPYEVKGFPTIYFSPANKKLTPKKYEGGRELNDFISYLQREATNPPIIQEEKPKKKKKAQEDL

SEQ ID NO: 936130 - protein, 95 aa, Homo sapiens
  misc_feature (18)..(18): Xaa can be any naturally occurring amino acid
  misc_feature (43)..(43): Xaa can be any naturally occurring amino acid
  misc_feature (63)..(64): Xaa can be any naturally occurring amino acid
  misc_feature (76)..(76): Xaa can be any naturally occurring amino acid
  misc_feature (88)..(88): Xaa can be any naturally occurring amino acid
  misc_feature (92)..(92): Xaa can be any naturally occurring amino acid
TNKKTTFFGGNSISMIDXLIWPWFERLQAMKLNECVDHTPKLXLWMAAMKGDPPVSALLTSEXXWQGFLELYLQNXLRPVTMGSERGXSQQXSYV

SEQ ID NO: 936131 - protein, 214 aa, Homo sapiens
MRLPPCHVVYRPRPRALPTQLPLPRPLFDSPPRASGTQAPASRLEAEEERFPRHRRVLRAAPRLPEGPKVSSSPSGPVWILPAPVPRTSASPGPRAPAGAPPLWSAAPETPGSPPPGISLPEFLKLICRLRNFSVLPLSLRGPPCTPRGVLWSPVRPRLFCVAPPGSPPYARGCSALPCPRPAWLGPSPRGPTARAPISCQQARERSRRAEPPP

SEQ ID NO: 936132 - protein, 134 aa, Homo sapiens
  misc_feature (29)..(29): Xaa can be any naturally occurring amino acid
  misc_feature (127)..(127): Xaa can be any naturally occurring amino acid
TVTLGGIFQLGNWSGLNSVRDHNTIWKSXCKLEPTLKNARIVGELTGFRPVRPQVRLEREWLHFGSSSAEVIHNYGHGGYGLTIHLGLCKEAGQPLRENSRGKEVVQVASLPPLRTLVITVCPKTTXPPSANDM

SEQ ID NO: 936133 - protein, 136 aa, Homo sapiens
  misc_feature (102)..(102): Xaa can be any naturally occurring amino acid
  misc_feature (104)..(104): Xaa can be any naturally occurring amino acid
  misc_feature (124)..(124): Xaa can be any naturally occurring amino acid
  misc_feature (126)..(126): Xaa can be any naturally occurring amino acid
QQDEVDCNIKEAHEKLEMEMEVARLHQCQVMLMRQDLMRCQEELWRMEKLNNQEMQKRRQLEPMREELQALGGSNALGNGRKDSLGTFSDMRQQEDTDGPDXCXEVPIGITGGTMPPASCASWXPXFLQEPETYDA

SEQ ID NO: 936134 - protein, 112 aa, Homo sapiens
  misc_feature (66)..(67): Xaa can be any naturally occurring amino acid
GGAGLWPSLPSSGYGTNTPSSTVSSSCSSQEKLHQLPFQPTADELHFLTKHFSTESVPDEEGRQSXXHAASLPEPQVRVLSAHCSSACGFQLVCITQRWAHYAIKGQDSKYF

SEQ ID NO: 936135 - protein, 153 aa, Homo sapiens
  misc_feature (114)..(114): Xaa can be any naturally occurring amino acid
  misc_feature (143)..(143): Xaa can be any naturally occurring amino acid
  misc_feature (145)..(145): Xaa can be any naturally occurring amino acid
RLPAGLNEVIIETFHHAFDDKLFWQWGNNESGVCFFKVCPSTTGNLDNVRLTSNSLESNSPRDVLVTILEVMKVSIVVTWLSGASTVMKRSFKSGPSSNLIWFIIDKGDVGIIXLNEFMSIREASLLNTSRSSSSSSRSSTIXAXQAAGTAAT

SEQ ID NO: 936136 - protein, 116 aa, Homo sapiens
  misc_feature (5)..(5): Xaa can be any naturally occurring amino acid
  misc_feature (102)..(102): Xaa can be any naturally occurring amino acid
NIKPXKESWKVFEEMIEPYRLHESHKDLTTAEKLKRESPWKITDAELEAVKEKSYRQVRLNELLQEHSRAANLIVLAFQWQEKDLFPDLLYMAVVRNPDQRXFLLCYWLEEITKMS

SEQ ID NO: 936137 - protein, 97 aa, Homo sapiens
  misc_feature (62)..(62): Xaa can be any naturally occurring amino acid
  misc_feature (74)..(74): Xaa can be any naturally occurring amino acid
NPPPIDPASLEEFKKRILESQRLPVATLLPNPAVEDPAAADAGCQNRHLWMGAAGATVLDTXRACRKPPPPRLXWHPFTVPCIPAIPQTLDLRHTQL

SEQ ID NO: 936138 - protein, 41 aa, Homo sapiens
  misc_feature (15)..(15): Xaa can be any naturally occurring amino acid
MADYTGAAAGARGMXGHGMGNRGGFHRGFGSGIRGRGHGSG

SEQ ID NO: 936139 - protein, 133 aa, Homo sapiens
  misc_feature (59)..(59): Xaa can be any naturally occurring amino acid
  misc_feature (85)..(85): Xaa can be any naturally occurring amino acid
  misc_feature (111)..(111): Xaa can be any naturally occurring amino acid
  misc_feature (121)..(121): Xaa can be any naturally occurring amino acid
  misc_feature (130)..(130): Xaa can be any naturally occurring amino acid
TLSPRKRHGGSLKAGRFSAVAKELELSYSEAGWSDPLMCQHFSRTSLPKDGVVPSTFTXSPKPPTLVPRLHLSTGPVRGVVSVLXLGADPCLGTLESPASVVELLFWLASXQPCNKSTWGXLDKVGLPDXRFN

SEQ ID NO: 936140 - protein, 86 aa, Homo sapiens
LPVTYSKPRIGHILAYAKVELVPPTPAEIPTAIQSVKKIIQSAKTGSFKHLTVKEAVLNGLVATEVWMWFYIGEIIGKRGIVGYDV

SEQ ID NO: 936141 - protein, 152 aa, Homo sapiens
  misc_feature (27)..(28): Xaa can be any naturally occurring amino acid
  misc_feature (72)..(72): Xaa can be any naturally occurring amino acid
  misc_feature (82)..(82): Xaa can be any naturally occurring amino acid
  misc_feature (118)..(118): Xaa can be any naturally occurring amino acid
QNWTNWPLPFPWDQNLGASVPHRQCPXXFCLSFFPLACSVSELCVLRSFHGWESLMLPLPSDAGLALLLQVXFSHKLVAARXLKFYKGRSPVGSLLAPKPTSWQLELVLNHTIWGAAXPLGKGPFGGFLNFPIPFHCGLRGGVRGWRGRGCL

SEQ ID NO: 936142 - protein, 72 aa, Homo sapiens
  misc_feature (29)..(29): Xaa can be any naturally occurring amino acid
  misc_feature (50)..(50): Xaa can be any naturally occurring amino acid
GKRLSREETWPEPGSLSPSHASHVPYLLXTPGLQCERAVNSDTLGFPQGXPEVFKLSYAAYFLFFGPFFLEM

SEQ ID NO: 936143 - protein, 80 aa, Homo sapiens
  misc_feature (16)..(16): Xaa can be any naturally occurring amino acid
  misc_feature (32)..(32): Xaa can be any naturally occurring amino acid
LGSPGLEVLGNGTSNXMSPSSEGSREVRPVAXQFGGVQRYQVRSGSPEGKGGGLGRSVLLAPLSSNVQNVGGPLFISTPG

SEQ ID NO: 936144 - protein, 74 aa, Homo sapiens
  misc_feature (9)..(9): Xaa can be any naturally occurring amino acid
  misc_feature (63)..(63): Xaa can be any naturally occurring amino acid
MSFTFASPXQVFFDSANVKQVDVPTLTGAFGSWHPMSPHYRSYGWAGSGSHKKTGPRLKYFVXSGSVTVNADSS

SEQ ID NO: 936145 - protein, 123 aa, Homo sapiens
KFLSQDQINDKNGELDFSTFLTIMHMQIKQEDPKKEILLAMLMADKEKKGYIMASELRSKLMKLGEKLTHKEVDDLFKEAGIEPNGQVKYDTVYPEDHHSCAETTKGSQDQESRWRAFGALKT

SEQ ID NO: 936146 - protein, 103 aa, Homo sapiens
  misc_feature (95)..(95): Xaa can be any naturally occurring amino acid
  misc_feature (97)..(97): Xaa can be any naturally occurring amino acid
MESYSVTQAGVQWRDLGSLQPPPPGFKQFSCLSLLSSWDYRRLHHAWLIFVFLVETGFQHIGQGWSQTPNLAIRPPWPPKVLGIPGRDNPRPGQXSXLYLNSS

SEQ ID NO: 936147 - protein, 117 aa, Homo sapiens
  misc_feature (14)..(14): Xaa can be any naturally occurring amino acid
  misc_feature (27)..(27): Xaa can be any naturally occurring amino acid
  misc_feature (59)..(59): Xaa can be any naturally occurring amino acid
  misc_feature (80)..(80): Xaa can be any naturally occurring amino acid
  misc_feature (87)..(87): Xaa can be any naturally occurring amino acid
  misc_feature (89)..(89): Xaa can be any naturally occurring amino acid
  misc_feature (93)..(93): Xaa can be any naturally occurring amino acid
SGGAIETHPRRVPXGLPALPSRSASAXSASSLARSASLLPAAQWVWRWRRWRRSSGHAXPGTSSCRMKKSLENLNRLQVXVSTLQQXFXRERXYFDYKDESGFQSPILQCSYNTAQL

SEQ ID NO: 936148 - protein, 128 aa, Homo sapiens
  misc_feature (1)..(1): Xaa can be any naturally occurring amino acid
  misc_feature (18)..(18): Xaa can be any naturally occurring amino acid
  misc_feature (30)..(30): Xaa can be any naturally occurring amino acid
  misc_feature (37)..(37): Xaa can be any naturally occurring amino acid
  misc_feature (89)..(89): Xaa can be any naturally occurring amino acid
  misc_feature (115)..(115): Xaa can be any naturally occurring amino acid
XAKKEAPAPPKAETKAKXLKAKKAVLKGAXSHKKKKXRTSPPSGGRRHCDSGDSQISSEEPLPGETSLTTMLSSSFRLTTESAMKKIEXNNTLVFIVDVKTNKHQIKQAVKKLYXIDVAKVNTLIRAD

SEQ ID NO: 936149 - protein, 128 aa, Homo sapiens
TLQSQEISWHPPGKRDKSCPGTSRLKVTLPEHAQMNQGFNHGWNLRSQTGEQGLNEDADPEWQDTESNQMEPWCHLMAGSSQIMRPWQHFIGRLNQIMAHYCTPIKPDPVPSSGRQIGAFPPVSLTIS

SEQ ID NO: 936150 - protein, 69 aa, Homo sapiens
CSVPSVENLFRRQAEATVQKDADAVDKVMKELDENGDGEVDFKEYVVPGGCSHSGLEQLLLGDQLSTVL

SEQ ID NO: 936151 - protein, 91 aa, Homo sapiens
  misc_feature (52)..(53): Xaa can be any naturally occurring amino acid
  misc_feature (80)..(80): Xaa can be any naturally occurring amino acid
  misc_feature (90)..(90): Xaa can be any naturally occurring amino acid
HELAVLGSEGVIYRRLHCICRALIERNSPIAIIFGVWKVRDSFFEINLGERXXAISDERIVVSTAIRVIHASIGLLCALXRPQEALLLRXL

SEQ ID NO: 936152 - protein, 108 aa, Homo sapiens
MKQKITDYLDEIYGGTFTATHLQKLVTRLESAKRLITQRRKKHWDESDVVLITYADQFHSNDLKPLPTFNQFYHQWLQSIFSHVHLLPFYPWSSDDGFSVIDYHQVAS

SEQ ID NO: 936153 - protein, 104 aa, Homo sapiens
MLRLEYEGFSEGHGRRGSSHKGKYKNLGQQRTQSQLSPTTADEHGRLCRKEREPVLSNRYSTQAMVNCWLFAPHSILWQKGTINVDSSFSKRKLVKYRIVGLGL

SEQ ID NO: 936154 - protein, 101 aa, Homo sapiens
  misc_feature (53)..(53): Xaa can be any naturally occurring amino acid
  misc_feature (57)..(57): Xaa can be any naturally occurring amino acid
  misc_feature (66)..(66): Xaa can be any naturally occurring amino acid
PPLQTSAPSGRIPTQSPGALDPALFPQHLPSPLPTAHVAPRSIAGGAPQKAMXPWMXEMRLDATGXEQGAVRVVGTQMRAGRGGTQEGGGFLHDRTGRFYK

SEQ ID NO: 936155 - protein, 108 aa, Homo sapiens
  misc_feature (85)..(85): Xaa can be any naturally occurring amino acid
MRTGRPARVMRRAERPAWRPCRPRAAAPGLATSWLRLRVVVAARSERSWGGTVDGGQGGAGVQVSQARAATLSLLPPGPTAAQAXGAKLSLDAAGLARRGERKLTAFP

SEQ ID NO: 936156 - protein, 104 aa, Homo sapiens
  misc_feature (5)..(5): Xaa can be any naturally occurring amino acid
TGKFXGNPWYYGKVTRHQAEMALNERGHEGDFLIRDSESSPNDFSVSLKAQGKNKHFKVQLKETVYCIGQRKFSTMEELVEHYKKAPIFTSEQGEKLYLVKHLS

SEQ ID NO: 936157 - protein, 136 aa, Homo sapiens
  misc_feature (91)..(91): Xaa can be any naturally occurring amino acid
  misc_feature (116)..(116): Xaa can be any naturally occurring amino acid
  misc_feature (124)..(124): Xaa can be any naturally occurring amino acid
  misc_feature (134)..(134): Xaa can be any naturally occurring amino acid
MSPRSTPRRQKKDVRLRQLARTPALIRAGSRVAYRPISASVLSRPETRTGEGSTVFNGAQNGVCQLIRRRFQTSVISRDIDTACQIHWCRXCNSEELLVLVLVLEQSLAVLSLVMXETLHLKQXLFSYAILGFXLS

SEQ ID NO: 936158 - protein, 111 aa, Homo sapiens
  misc_feature (18)..(20): Xaa can be any naturally occurring amino acid
  misc_feature (27)..(28): Xaa can be any naturally occurring amino acid
  misc_feature (107)..(107): Xaa can be any naturally occurring amino acid
CCLGLGPAADMNNARYLXXXDFARVTXXPLRVLGALRELRATRLAASCARHRRSLRLLEPFEVRTRLLGWDDRAFYLEARFVSLRDGFVCALLLFRQHLLGTLPERXVQHL

SEQ ID NO: 936159 - protein, 53 aa, Homo sapiens
  misc_feature (24)..(24): Xaa can be any naturally occurring amino acid
  misc_feature (26)..(26): Xaa can be any naturally occurring amino acid
  misc_feature (47)..(47): Xaa can be any naturally occurring amino acid
MPVCAASVMPKHEFSVDMTCEGCXEXVSRVLNKLGGVEFNIDLPNKXVCIDSE

SEQ ID NO: 936160 - protein, 113 aa, Homo sapiens
  misc_feature (14)..(14): Xaa can be any naturally occurring amino acid
  misc_feature (38)..(38): Xaa can be any naturally occurring amino acid
KTRFPESFKQAWEXWSSTLTLPKKKVCIDFGHSSDTLXATLNKTGKAVSYLAPSSQDLGESSGYKLKRQAVDLVSPADLEHQLLSPVQPSHGVPAQTGLPRWLPASFHVIKSS

SEQ ID NO: 936161 - protein, 81 aa, Homo sapiens
  misc_feature (9)..(9): Xaa can be any naturally occurring amino acid
MPCRYSDHXWTAMVLIIVGCASVSSNLVVQGAGGPGQAILESLYTFVADIAKGAIGEHRYKTYLPLLCAMFTFILGSNLLG

SEQ ID NO: 936162 - protein, 69 aa, Homo sapiens
  misc_feature (28)..(28): Xaa can be any naturally occurring amino acid
  misc_feature (64)..(64): Xaa can be any naturally occurring amino acid
GDRLKACEKAVKKHRSGEEHDKLQQLLXEMEQQEMAQQERKQQQELALALKQERRAQAQQGIAXLPEEI

SEQ ID NO: 936163 - protein, 68 aa, Homo sapiens
ETHLHWHTVAKETCSEKSTNLHDYGMLLPCGIGVHLENNVERNKPFRLFTHPRLLTAVLNTSRCLNLN

SEQ ID NO: 936164 - protein, 112 aa, Homo sapiens
  misc_feature (25)..(25): Xaa can be any naturally occurring amino acid
  misc_feature (28)..(28): Xaa can be any naturally occurring amino acid
  misc_feature (90)..(90): Xaa can be any naturally occurring amino acid
  misc_feature (102)..(102): Xaa can be any naturally occurring amino acid
  misc_feature (108)..(108): Xaa can be any naturally occurring amino acid
MPNWQQLNQNRPRHYPIIMTKMSLXDDXPQRLSDIWLRLSRHFTPESALFRHAVKNVAVVVLRLRNHSDNPECITGYWILLDKFVCLPAXTITPRRNRLEVXELIGTXVGIA

SEQ ID NO: 936165 - protein, 81 aa, Homo sapiens
  misc_feature (33)..(33): Xaa can be any naturally occurring amino acid
  misc_feature (50)..(50): Xaa can be any naturally occurring amino acid
IRDGGGWFRRCIGGRDRLAGPQARPFRRSLLEXCDPLSAARLSRTRRQRXQVELGNKLTTYTELCRINEDQKVALDLDPYV

SEQ ID NO: 936166 - protein, 191 aa, Homo sapiens
  misc_feature (17)..(17): Xaa can be any naturally occurring amino acid
  misc_feature (27)..(27): Xaa can be any naturally occurring amino acid
  misc_feature (29)..(29): Xaa can be any naturally occurring amino acid
  misc_feature (36)..(36): Xaa can be any naturally occurring amino acid
  misc_feature (47)..(47): Xaa can be any naturally occurring amino acid
  misc_feature (85)..(85): Xaa can be any naturally occurring amino acid
  misc_feature (94)..(94): Xaa can be any naturally occurring amino acid
  misc_feature (172)..(172): Xaa can be any naturally occurring amino acid
  misc_feature (178)..(178): Xaa can be any naturally occurring amino acid
  misc_feature (186)..(186): Xaa can be any naturally occurring amino acid
GPESWRGVRAPSALLRXVVTLGATGAXPXGTQEPEXIEWRWRRRRVXGRGIDGKPVPPLSPSSSCLGAWRDGSYSFCPAPGPGEXPGLHVEAGXGAKTREYKTSFHALTKYPEGRRLKGHLHWAVRLACCVKHLTTTRLGIYTVLFERLTGADGYSPGFLLKAVIGMNRSAXGAFVGXQPKCSYPXNADAG

SEQ ID NO: 936167 - protein, 180 aa, Homo sapiens
  misc_feature (30)..(30): Xaa can be any naturally occurring amino acid
  misc_feature (64)..(64): Xaa can be any naturally occurring amino acid
  misc_feature (128)..(128): Xaa can be any naturally occurring amino acid
  misc_feature (159)..(159): Xaa can be any naturally occurring amino acid
MYAFVRFLEDNVCYALPVSCVRDFSPRSRXDFDNQKVYAVYRGPRNWAPGQRSPPRAPRDWGLXLLHKAQILALDEDKSDLENSVIAEENKNPQAFSYHVRRRWERLKIMGEEDLQLRHIKRPEGRNXGESGAQEHRGSCGSLEKQNGLSLGHSTCPEXVFREASQAQKDMDSLEDSVGP

SEQ ID NO: 936168 - protein, 138 aa, Homo sapiens
SLDLPAVARSGKDTVASMLLKHEGVTTYALADPLKIGCQILFGLTDAETWHDNIKEEVILHWGWSPRKFFQTVGTDWLRELNSDHWLLRANLAFNQYKTNEPDKSQLDFTDPKAPFKLARASYFWNYSRRVLEPFIIK

SEQ ID NO: 936169 - protein, 124 aa, Homo sapiens
  misc_feature (7)..(7): Xaa can be any naturally occurring amino acid
  misc_feature (12)..(12): Xaa can be any naturally occurring amino acid
  misc_feature (33)..(34): Xaa can be any naturally occurring amino acid
  misc_feature (37)..(37): Xaa can be any naturally occurring amino acid
  misc_feature (40)..(40): Xaa can be any naturally occurring amino acid
  misc_feature (98)..(98): Xaa can be any naturally occurring amino acid
  misc_feature (123)..(123): Xaa can be any naturally occurring amino acid
AAVYPAXRQPRXVPETLGNRPELRERGGYGGPXXPGXAQXAQQKFHLVPSINTMSGSQELQWMVQPHFLGPSSYPRPLTYPQYSPPQPRPRKSSGPWXALQGVRRRPCEQISPEKEERRRVRXR

SEQ ID NO: 936170 - protein, 90 aa, Homo sapiens
  misc_feature (6)..(6): Xaa can be any naturally occurring amino acid
  misc_feature (9)..(9): Xaa can be any naturally occurring amino acid
  misc_feature (89)..(89): Xaa can be any naturally occurring amino acid
VSGQPXCTXNWRESVFHFGGPTWRHFILDSNPLVLRLSVSCGCSIAAGLQTSTGRQPTCATPEFVQGKEFKDFPDVLLPNYFTCRRARXR

SEQ ID NO: 936171 - protein, 89 aa, Homo sapiens
MGIVTNEVKSDGRGLTNNIYCESVSCQGAVFALNNDSFCISRGVVDIDGDIITQVDIARRVSCWGHYTIEVSCWIGGISCNSVTIINSN

SEQ ID NO: 936172 - protein, 84 aa, Homo sapiens
TPMLIGRLCGTRIETLALIHGGIIIASNCTQEPEFRSEIATSSQPLISYGNDAFRPCAMLSSHKAESGSPTLFTLVHLLPLLLQ

SEQ ID NO: 936173 - protein, 103 aa, Homo sapiens
  misc_feature (15)..(15): Xaa can be any naturally occurring amino acid
  misc_feature (64)..(65): Xaa can be any naturally occurring amino acid
  misc_feature (103)..(103): Xaa can be any naturally occurring amino acid
LEAVSPAPGSHGSCXGALLVFAAYSRHVELRAPRVARHSSLRLPDYHRVIHINEVVLLDAPVVXXGAVADESGHVVWRWLPPPETPMTSSHPLRGGTSSAGNX

SEQ ID NO: 936174 - protein, 308 aa, Homo sapiens
  misc_feature (1)..(1): Xaa can be any naturally occurring amino acid
XRTGPSGTTGRVYVHLMEPSQWHYESSPLAVQNYREQAATYPIQISWWGQLRMVRQTRKLDVCYKQADQGLHPLTPLRVIGPIPRGAPLYCTHPGDDAFIIPQEQPTNTPPVYPPAPYSQAGFFRTPPQVRCSGSPFHEASSAFPYSVLLPAVNQPFFRVSPGVLPLSCGGSSNQSVFKVLSVLFQMITMLTPTFFCGAHSGCLPPFVFVNHLGRPIFPGGPKSKLCKKKTGFIPISLSLSFRQFHAPYGRNPGPWARPHRRLATPLVGRTTVYRHRPRPEQTSAGSGGPLSRLGRYAWEGINWGHRG

SEQ ID NO: 936175 - protein, 135 aa, Homo sapiens
  misc_feature (63)..(63): Xaa can be any naturally occurring amino acid
  misc_feature (100)..(100): Xaa can be any naturally occurring amino acid
VSYYNALEKARVENQDLQVQLGHALQQAADPNSKGNSLFAEVEDEGWQWNASINLMKDKYQSXEEAKCVHQRSDEQDEVTNLHIAEDEGLADLSLNSRSXLFAMIEQKNGEIKHLLGEINKLEKFKNLYESMESR

SEQ ID NO: 936176 - protein, 146 aa, Homo sapiens
  misc_feature (2)..(2): Xaa can be any naturally occurring amino acid
  misc_feature (4)..(4): Xaa can be any naturally occurring amino acid
  misc_feature (140)..(140): Xaa can be any naturally occurring amino acid
HXWXGWSRTPDLKLSARLSFLKCWDYRHEHRASTLLFYFLIERRCHFVTQAGVQWPDIAQYSLEPLGSSNPLVSAFWVAGIIGTCHHTWANFFVVVSNICRDRVLLCLPSWYGYSDPPAFSLPKGNEVIGNGGHRTQPKXTFRGER

SEQ ID NO: 936177 - protein, 86 aa, Homo sapiens
EVVATWEAISHGEAASAEYFNFAHDVLDVWSQLEKTGHRPPNPAFWWVNGSGTEVKWTFEELGKQSRKVAFISEPAKDGFWKDPKE

SEQ ID NO: 936178 - protein, 71 aa, Homo sapiens
  misc_feature (9)..(9): Xaa can be any naturally occurring amino acid
  misc_feature (13)..(13): Xaa can be any naturally occurring amino acid
  misc_feature (21)..(21): Xaa can be any naturally occurring amino acid
  misc_feature (56)..(56): Xaa can be any naturally occurring amino acid
IPPELQPRXFRAXAALPLNFXRSSLSSQRIYSLKPETEPRHGKGVRGGAKPQQSKXKNQRAAFPEHQLRVG

SEQ ID NO: 936179 - protein, 103 aa, Homo sapiens
  misc_feature (3)..(4): Xaa can be any naturally occurring amino acid
  misc_feature (50)..(50): Xaa can be any naturally occurring amino acid
  misc_feature (57)..(57): Xaa can be any naturally occurring amino acid
STXXPAPAARTPGHSAPHGRASFPAPEAAAAAAMGAYLSQPNTVKCSGDXGRRPACXLPYGFSAMQGWRVSMEDAHNCIPELDSETAMFSVYDGHGGEEVALY

SEQ ID NO: 936180 - protein, 124 aa, Homo sapiens
  misc_feature (23)..(24): Xaa can be any naturally occurring amino acid
  misc_feature (38)..(38): Xaa can be any naturally occurring amino acid
  misc_feature (41)..(41): Xaa can be any naturally occurring amino acid
  misc_feature (53)..(53): Xaa can be any naturally occurring amino acid
  misc_feature (69)..(69): Xaa can be any naturally occurring amino acid
  misc_feature (74)..(74): Xaa can be any naturally occurring amino acid
  misc_feature (92)..(92): Xaa can be any naturally occurring amino acid
MRSLAEKDVRSRSTRPCPILGLXXLLGLGRCGSCIDEXRVXPLMKPVPPASAXLPHAPTPTEEPLSSGXSQATXQGLSVRKWQHVEVKSCSXLRHLRGFWVAPAMTSPGMLAVEGLGPQAGEEE

SEQ ID NO: 936181 - protein, 50 aa, Homo sapiens
  misc_feature (19)..(19): Xaa can be any naturally occurring amino acid
ALLPYALTLGAVDLYEYSXGDEDLEPLCRRPENAATGPLPTCHHRPPRLV

SEQ ID NO: 936182 - protein, 90 aa, Homo sapiens
MAPHTRAFAHAGWVSPHTEVDWRSAGMEEEEVVTGLDASGTDQWGLGDAVERPTLAQRKRISLDIESGPRSWTGHFGNEVNSNLEGLSFL

SEQ ID NO: 936183 - protein, 64 aa, Homo sapiens
  misc_feature (4)..(4): Xaa can be any naturally occurring amino acid
  misc_feature (38)..(38): Xaa can be any naturally occurring amino acid
FGTXQFFMLQTYGQQLQKAMLQLLEDKDTYSWLLKDVXTLATTYEFLKERLARLTQARRRLASS

SEQ ID NO: 936184 - protein, 48 aa, Homo sapiens
  misc_feature (4)..(4): Xaa can be any naturally occurring amino acid
  misc_feature (40)..(40): Xaa can be any naturally occurring amino acid
SDCXKGAGEEVTEGVAMGGRRGGERAPGSVQASPPSLFTXLGPAHKAP

SEQ ID NO: 936185 - protein, 102 aa, Homo sapiens
EMEFHSFAQAGVKWFDLGSLQPPPPGFKRFSCLSLLSSWDYRRVPPCLAIFFFFFVFLVETGFHHVGQAGLELLTSGDPPTSASQSARTPWKHSVLSVKMAT

SEQ ID NO: 936186 - protein, 121 aa, Homo sapiens
  misc_feature (89)..(89): Xaa can be any naturally occurring amino acid
  misc_feature (117)..(117): Xaa can be any naturally occurring amino acid
WLDITHKDESFVKEHFPTLYARLLELGIDITKDMIPVVPAAHYTCGGVVVDEHSQTDIAGLYAIGETSYTGLHGANRMASNSLLECFVXGMSATKHIQENFKADQPTPAVPTWDDSXVTNP

SEQ ID NO: 936187 - protein, 100 aa, Homo sapiens
  misc_feature (38)..(39): Xaa can be any naturally occurring amino acid
  misc_feature (62)..(62): Xaa can be any naturally occurring amino acid
  misc_feature (64)..(64): Xaa can be any naturally occurring amino acid
MKLLKLENWLNLPPDVIATLCMDNMIQMASLHRGGSIXXKTNHRSIQSDSEAKGAVVTSTVXGXQVSAALRHFSIGLVYPRVNSTLSDSERRDTEHPLLF

SEQ ID NO: 936188 - protein, 74 aa, Homo sapiens
  misc_feature (6)..(6): Xaa can be any naturally occurring amino acid
SRKTRXPIGVIAVETTDINTCTSIGRDFTSASKIDTGAIVIDGEAYTVRVFNGELSGAVSVELMPINDARHRYS

SEQ ID NO: 936189 - protein, 114 aa, Homo sapiens
  misc_feature (39)..(39): Xaa can be any naturally occurring amino acid
RGGDRSMPPDMNSLEQAEDLKAFERRLTEYIHCLQPCHXDVGECFLYVVSVCTATGAWNWLIDPETQKVSFFTSLWNHPFFTISCITLIGLFFAGIHKRVVRTINYELLDVERY

SEQ ID NO: 936190 - protein, 307 aa, Homo sapiens
RTRAGMAGAVAARQVTGLGAEERDLSGERAGAGASGGSEVPGPVHAGRCLRPGLLCQRRPRGVLARLGAAPAAPAAFSPAPPAAARPGPPARPAPPPPPSRPAPPRPPPPPLPPPPPPPPPPPPPPPRPPPPPPPPPPPPPPARPAPPPSSPPPAPPRAPPPPRPPPPRPPPPSPPFFSYALLPGVLPYSLCPAGGFAPSDVFPPPPPPPLCLLLELEEGKAGSGLRLSSLSKIEELQLIVNDKSQNLRRLQAQRNELNAKVRLLREELQLLLEQGPPPPPPPPPPPEKKVLVKVHPESKFVVDVDK

SEQ ID NO: 936191 - protein, 117 aa, Homo sapiens
  misc_feature (6)..(6): Xaa can be any naturally occurring amino acid
  misc_feature (27)..(27): Xaa can be any naturally occurring amino acid
  misc_feature (38)..(38): Xaa can be any naturally occurring amino acid
  misc_feature (63)..(63): Xaa can be any naturally occurring amino acid
  misc_feature (92)..(93): Xaa can be any naturally occurring amino acid
  misc_feature (100)..(100): Xaa can be any naturally occurring amino acid
THTHPXTGFVKDAEPGNRIKLKTLRVXGSIPLLNNIPXANLLLLIVPILIAMAFLMLTERKIXGYIQLRKGPNVVGLRATTTLSDAIKLFTXXPLKPATXTITLYITAPTLALTIAL

SEQ ID NO: 936192 - protein, 152 aa, Homo sapiens
  misc_feature (19)..(19): Xaa can be any naturally occurring amino acid
  misc_feature (36)..(36): Xaa can be any naturally occurring amino acid
  misc_feature (77)..(77): Xaa can be any naturally occurring amino acid
WRCFPISTITPGYLVSVEXTHWRNSASYSVLVEINXMRAVPLIGEVYQFSGYCQRQSFTADGFTDSNAFNNISGNSXRSDKLFIAGYGNKYFDCGVNAQIIFMQELAISAIFLFSEQFYAGENIIAEHNKKYPEGACCYRFATNVVQCCKLI

SEQ ID NO: 936193 - protein, 145 aa, Homo sapiens
APPLYWYQFIVLVCSHAADEDHTQNWAIYKRKRFNGLTVPHGWGCLTIMTEGKEEQVTSYMGGSRQSKRTCAGELPFSKPSNLLRLIHYHKNSIGKTWPHDSITSHQSLPQHMGIQDEIWLGTQPNHITCQQKYNASHISKKQKK

SEQ ID NO: 936194 - protein, 99 aa, Homo sapiens
  misc_feature (36)..(36): Xaa can be any naturally occurring amino acid
  misc_feature (66)..(66): Xaa can be any naturally occurring amino acid
  misc_feature (84)..(84): Xaa can be any naturally occurring amino acid
  misc_feature (95)..(95): Xaa can be any naturally occurring amino acid
EKTKKAERELSEQIQRALQLVEERKRAQEEAERLEXDRMAALRAKEELERQAGGSDKEPGAAWLGXCRIHLPRLPSWKRRGAKXRMKFERVGSTXAKRS

SEQ ID NO: 936195 - protein, 137 aa, Homo sapiens
IPRQMLTTPVEPARTNYWRVGRPSHLCPVPGGPQHHPELGLPPSMIADCFSPQSNDGRKQQTMDQAATISFSSGLAPEKNRQDILCPRMMKTQHRLALPNKSTVSPLGLFLCDMQSSLPGFWEILVTFLSIQFRSVE

SEQ ID NO: 936196 - protein, 146 aa, Homo sapiens
EAFISSTICQSQQSFPEVSRRLRANVIPEALLIHCIKACEISFICLLDLVVEDFNQGIFICASSLHGFLQGGRIKQGWCSNKSHHDVLEVAREITLQVIFQLLFIRCLVLLDKSACLRVRPLRQNVDEGFLVSPKSSDRFPDSFGI

SEQ ID NO: 936197 - protein, 80 aa, Homo sapiens
  misc_feature (8)..(8): Xaa can be any naturally occurring amino acid
  misc_feature (25)..(25): Xaa can be any naturally occurring amino acid
  misc_feature (61)..(61): Xaa can be any naturally occurring amino acid
  misc_feature (71)..(71): Xaa can be any naturally occurring amino acid
EEELSSSXEEEGEEDRDADEEGEGXEDTPTSDPGSCLTARNPYACSGRMSAEPHLVPRPPXQLCFWAELEXSSLCPPDCE

SEQ ID NO: 936198 - protein, 63 aa, Homo sapiens
  misc_feature (37)..(37): Xaa can be any naturally occurring amino acid
  misc_feature (52)..(52): Xaa can be any naturally occurring amino acid
  misc_feature (56)..(56): Xaa can be any naturally occurring amino acid
LFLIKEKSQLVRPLQPAEYLNTRGEWTKDVSLAQPAXHLGDPTALRYLTYIXNPLXARCCGDY

SEQ ID NO: 936199 - protein, 186 aa, Homo sapiens
  misc_feature (6)..(6): Xaa can be any naturally occurring amino acid
  misc_feature (18)..(18): Xaa can be any naturally occurring amino acid
  misc_feature (33)..(33): Xaa can be any naturally occurring amino acid
  misc_feature (105)..(105): Xaa can be any naturally occurring amino acid
  misc_feature (125)..(125): Xaa can be any naturally occurring amino acid
  misc_feature (146)..(146): Xaa can be any naturally occurring amino acid
  misc_feature (149)..(149): Xaa can be any naturally occurring amino acid
  misc_feature (162)..(162): Xaa can be any naturally occurring amino acid
  misc_feature (166)..(166): Xaa can be any naturally occurring amino acid
KLSAVXQVFLKLFLLQFXGAFFCKRLRTLAFQXHDPCLEVQRSGSSQSSSVKPKTMIASHQGGQQRGAANFNAATPVSQSPIISKSALRISFRRLRPPLRGFRGXRLRRQAPRLRSGRRRRAPRXPRHVGEHGRAAAPGHDQPVRXLAXARPTRRSSCCRRXTPYXETALSTFFQETNIPNSHHHH

SEQ ID NO: 936200 - protein, 105 aa, Homo sapiens
  misc_feature (86)..(86): Xaa can be any naturally occurring amino acid
RPTFKQLVEALDKVLLAVSEEYLDLRLTFGPFSPSNGDASSTCSSSDSVFSHDPLPLEPSPFPFSDSQTTCAGEQQCCMGYAAHGXGLLAELQPDASTFNVGSVR

SEQ ID NO: 936201 - protein, 159 aa, Homo sapiens
  misc_feature (16)..(16): Xaa can be any naturally occurring amino acid
  misc_feature (77)..(77): Xaa can be any naturally occurring amino acid
  misc_feature (85)..(85): Xaa can be any naturally occurring amino acid
  misc_feature (94)..(94): Xaa can be any naturally occurring amino acid
  misc_feature (155)..(155): Xaa can be any naturally occurring amino acid
  misc_feature (157)..(157): Xaa can be any naturally occurring amino acid
EPLRLGAKMAAAATAXRFLKQQLWSFLRPGRSGSFDSHRLPGDCFLLLVLLLYAPVGFCLLVLRLFLGITSSGQLRXARQRPSQXRSADHVCGXRARGRQEDSGLRDHSVRVSFQPCDTFLTTTSQFAYHLYNPLLNKSPNFVCWSRGFMEMNGXGXLV

SEQ ID NO: 936202 - protein, 69 aa, Homo sapiens
GRQVEGMEDWKAGQPNFKKAPGGTSLMETPEKTSVEVLTNDKYTFPQEEAEPPGKTKTQLDPRDALSWR

SEQ ID NO: 936203 - protein, 316 aa, Homo sapiens
CCVRPRLSFLDALFMLPRFGPFHIFFALIGPFGPRFSLRVGQPLAGPPCARDSSPTGLGSPKTFCLTCLLEALFSPTDKPWFLPGATWCSFNLPRLGKSASPRAPVPRCPPRRPKVVLPSTGSSLGNFLDPAVPARPAVSSPRDRPWFGRDTSSPSCDGGRTLHRDTAAILRPVPASKFIARRYSGLLAQNGRTIFPRGPLRLVLPGEHRPCPWRTSTLVARSVTLPRKTMVACRRRPGAQHLFCPHFTRRWFLRHLAARLKGGPHPASLAPTVRGPRHLILPLRSPPLRPGSSSDQFPPLRGVAPLKNRPPPKIT

SEQ ID NO: 936204 - protein, 138 aa, Homo sapiens
  misc_feature (50)..(50): Xaa can be any naturally occurring amino acid
  misc_feature (53)..(53): Xaa can be any naturally occurring amino acid
  misc_feature (60)..(60): Xaa can be any naturally occurring amino acid
  misc_feature (71)..(71): Xaa can be any naturally occurring amino acid
  misc_feature (125)..(125): Xaa can be any naturally occurring amino acid
KSKEDLVSQGFTEFTIEDFHNTFMDLIEQVEKQTSVADHAWPPFNDQSTXRYXCGPTVRXAHPRAYLQREXMFLRALHPRVDGLSRKFCQQEGGAMCKEKRPHPHHCAGPGLSVSIQVEYMDRGXGGTTNPYIFPEGS

SEQ ID NO: 936205 - protein, 144 aa, Homo sapiens
  misc_feature (1)..(1): Xaa can be any naturally occurring amino acid
  misc_feature (3)..(3): Xaa can be any naturally occurring amino acid
  misc_feature (34)..(34): Xaa can be any naturally occurring amino acid
  misc_feature (45)..(45): Xaa can be any naturally occurring amino acid
  misc_feature (76)..(76): Xaa can be any naturally occurring amino acid
  misc_feature (88)..(88): Xaa can be any naturally occurring amino acid
XRXTGGGIQAPQQTPIMGSQSSKAPRGDVTAEEXQALPPRRPTQXEWHVKSNGDLSPRVKGSRPCERKQMRQPGHXDCIEPAPPSQGXEARGRSPKETPKKKKKFSFKKPFQIERLSFKRNRKEGGGDSSASSPQRKSRTGGIV

SEQ ID NO: 936206 - protein, 115 aa, Homo sapiens
  misc_feature (2)..(3): Xaa can be any naturally occurring amino acid
CXXFRIKYVGAIEKLAVSEGKSLEGPLDLINYIDVAQQDGKLPFVPLEEEFILGVSKYGIKVSTTDQHGVLHRHALYLIIRMVCYDDGLGAWEKLAGTQDHRCKQRRVQPVGLPV

SEQ ID NO: 936207 - protein, 121 aa, Homo sapiens
  misc_feature (4)..(4): Xaa can be any naturally occurring amino acid
  misc_feature (16)..(16): Xaa can be any naturally occurring amino acid
  misc_feature (105)..(105): Xaa can be any naturally occurring amino acid
  misc_feature (121)..(121): Xaa can be any naturally occurring amino acid
GSRXPKMAWSASVRGXGQRVLACSRELHGAWHTCTPPLVCAKNRAARVPLAKGNKPVSYEEAHAPHYIATEKAWLSLHTGNLDGEDHAAERTLEDVFLRKFMMGXFPGCLADQIVLKRRAX

SEQ ID NO: 936208 - protein, 99 aa, Homo sapiens
  misc_feature (4)..(4): Xaa can be any naturally occurring amino acid
  misc_feature (73)..(73): Xaa can be any naturally occurring amino acid
SADXHQCHGLSPRCHTCPHARHMDAHACAKTTQGPGTDLLPSEPDGPQVCSSKWPVSQAVGTLAAVSPSCRSXALPKAPDFPQGSLTVFSIQSEKPLSF

SEQ ID NO: 936209 - protein, 122 aa, Homo sapiens
  misc_feature (4)..(4): Xaa can be any naturally occurring amino acid
APAXIGPYSQAVQVDRTIYISGQVGLDPSSGQLVPGGVVEEAKQALKNLGEILKAAGCDFNNVVKTTVLLADMNDFGTVNEIYKTYFQGSLPARAAYQVAALPRGSRVEIEAIAVQGPFIKA

SEQ ID NO: 936210 - protein, 51 aa, Homo sapiens
  misc_feature (11)..(11): Xaa can be any naturally occurring amino acid
MEAIAKYDFKXYFSDELELSKGGTSLKVLNEEFDQNLVQRQSLIEKTASFP

SEQ ID NO: 936211 - protein, 134 aa, Homo sapiens
  misc_feature (3)..(3): Xaa can be any naturally occurring amino acid
  misc_feature (6)..(6): Xaa can be any naturally occurring amino acid
  misc_feature (57)..(57): Xaa can be any naturally occurring amino acid
  misc_feature (76)..(76): Xaa can be any naturally occurring amino acid
  misc_feature (91)..(91): Xaa can be any naturally occurring amino acid
RGXGAXRRCSHGGARPAGLERGTRPRSDPDHTDTGSRSKQRINNWKESKHKVIMASXLLRGNQDKDAHFPPPSKQXCCFVQNQNCTSTRAXDLKRLMRRIVKEESFLEEKLLPFSLVSMLCHPGTKSTKVILGS

SEQ ID NO: 936212 - protein, 47 aa, Homo sapiens
  misc_feature (31)..(31): Xaa can be any naturally occurring amino acid
LPQTFALNADRWYQYFTKTVFLSGLPPAPAXRARAEPEPEPALDLAA

SEQ ID NO: 936213 - protein, 133 aa, Homo sapiens
  misc_feature (18)..(18): Xaa can be any naturally occurring amino acid
  misc_feature (45)..(45): Xaa can be any naturally occurring amino acid
  misc_feature (61)..(61): Xaa can be any naturally occurring amino acid
  misc_feature (66)..(66): Xaa can be any naturally occurring amino acid
  misc_feature (69)..(69): Xaa can be any naturally occurring amino acid
  misc_feature (71)..(71): Xaa can be any naturally occurring amino acid
  misc_feature (78)..(79): Xaa can be any naturally occurring amino acid
  misc_feature (103)..(103): Xaa can be any naturally occurring amino acid
SGWKSTPVTCPRNPRASXLQLGTGWLTQGGSGVPGRGVGVPARAXECPGWSDLLRAALERXWASWXSQXRXLFPVVCXXPAAESPVQVDVLLDGVDTSQLELXSSDPKLAIIPQEALFVQWDCSGKPGPPGPT

SEQ ID NO: 936214 - protein, 97 aa, Homo sapiens
  misc_feature (20)..(20): Xaa can be any naturally occurring amino acid
SRNIVIRSPFACRKVLGRQXCHYSSVIVITLNVPFLAENDRWRDAQSGILAAAGIYALKNNVARLQEDHDNACLEADSLRETGRENVMRQDTNMLVC

SEQ ID NO: 936215 - protein, 91 aa, Homo sapiens
  misc_feature (27)..(27): Xaa can be any naturally occurring amino acid
  misc_feature (37)..(37): Xaa can be any naturally occurring amino acid
  misc_feature (56)..(56): Xaa can be any naturally occurring amino acid
  misc_feature (66)..(66): Xaa can be any naturally occurring amino acid
  misc_feature (74)..(74): Xaa can be any naturally occurring amino acid
  misc_feature (76)..(76): Xaa can be any naturally occurring amino acid
KRLASVTHKISNTEFLQVIEIHNHQPXSKLFSFYDYXASEEESLDRILKDRRKKVXGVVRFRRNTXQKMSYREXGXHKQLTRILGVPTSAF

SEQ ID NO: 936216 - protein, 127 aa, Homo sapiens
  misc_feature (5)..(5): Xaa can be any naturally occurring amino acid
  misc_feature (23)..(23): Xaa can be any naturally occurring amino acid
  misc_feature (52)..(52): Xaa can be any naturally occurring amino acid
  misc_feature (65)..(65): Xaa can be any naturally occurring amino acid
  misc_feature (110)..(110): Xaa can be any naturally occurring amino acid
AQKLXSLCGFREKELCCHCSSGXAAWGPARTVELFYDVLSTYSWLGFEILCXYQNIWNINLQVAXQASITGIMKRQWKQSLQVCFPAKDYTLENDFKAPCDNNFQNSQSXFPKDFLGLVMLEKRKFV

SEQ ID NO: 936217 - protein, 126 aa, Homo sapiens
RLPTFGGLLVTNVLQVMAPESNWAQIVLSSNAVEPGPTPTYTSWISELQGCSAHLTLKLASLGAGIGGQHVLGVSASFCWCLYLCWLPTHRYQSHRTAPQNPCAWLPGDGFGAHVTGHRGPMGHLC

SEQ ID NO: 936218 - protein, 130 aa, Homo sapiens
  misc_feature (78)..(78): Xaa can be any naturally occurring amino acid
KRYILHVVCDFVSVRIIIVQFLLLLYQYHLVFFLILRVLIRVFLSRETQNKSKLCNRKRNSLTTRTEKLPDLTCLGFXYMYSFKWHPVTLSLLYSPNISSMFTSMNFRLKQHHWLLTRIFSSTNFKLEHQ

SEQ ID NO: 936219 - protein, 137 aa, Homo sapiens
QLHDPQTRTSAPPQISSCTTLKLEDELLTRVSSSMTLKLEQHQLLPESPAERPSNKNNIRSSLSLQPHNPQTRTSDLLSVSSCRTLIIEKRQRLPGSKAARPSNKNTSSSLGLKLHETQIRTTPAPLWVSSSMTLKG

SEQ ID NO: 936220 - protein, 127 aa, Homo sapiens
  misc_feature (17)..(17): Xaa can be any naturally occurring amino acid
  misc_feature (69)..(69): Xaa can be any naturally occurring amino acid
PQRGGNEHQLVHGQPRXAYKRHHKFPLWSMGLACLAPSLQGLPGLKVGPHQGPTPFLPGTCVPPAAIHXTQAVGAKVHCRPVLSCPQPLVNFPPKAHQCQMSGRGLSWQGAGMSALALSMCTSDWAA

SEQ ID NO: 936221 - protein, 108 aa, Homo sapiens
  misc_feature (11)..(12): Xaa can be any naturally occurring amino acid
  misc_feature (26)..(26): Xaa can be any naturally occurring amino acid
  misc_feature (32)..(32): Xaa can be any naturally occurring amino acid
  misc_feature (34)..(34): Xaa can be any naturally occurring amino acid
  misc_feature (52)..(52): Xaa can be any naturally occurring amino acid
  misc_feature (72)..(72): Xaa can be any naturally occurring amino acid
  misc_feature (94)..(94): Xaa can be any naturally occurring amino acid
  misc_feature (101)..(101): Xaa can be any naturally occurring amino acid
AQTRWACGARXXSSSNSSSSSNSSNXSSSSNXSXAAAAAAVLTLCLHCQTAXCSEPGICFAAVLLPFRHCRXQSGSGIVQRRHHSTGEDVKPSXSQCKLSXKLRRPRF

SEQ ID NO: 936222 - protein, 43 aa, Homo sapiens
  misc_feature (17)..(17): Xaa can be any naturally occurring amino acid
  misc_feature (37)..(37): Xaa can be any naturally occurring amino acid
PGPKPVPEPEPEPEPEXEPVRGGSGMWDRWAQDWRPXWEAFFG

SEQ ID NO: 936223 - protein, 89 aa, Homo sapiens
  misc_feature (4)..(4): Xaa can be any naturally occurring amino acid
  misc_feature (14)..(14): Xaa can be any naturally occurring amino acid
  misc_feature (16)..(16): Xaa can be any naturally occurring amino acid
  misc_feature (38)..(38): Xaa can be any naturally occurring amino acid
  misc_feature (50)..(50): Xaa can be any naturally occurring amino acid
  misc_feature (86)..(86): Xaa can be any naturally occurring amino acid
LRGXGLSGACAQAXRXGRAATPESANPSRCRIPSPPPXRLQTGADPAREXHGTWRTASGVVRRRPEPGANEEANAAGRRYEMLAMXFDI

SEQ ID NO: 936224 - protein, 80 aa, Homo sapiens
  misc_feature (9)..(9): Xaa can be any naturally occurring amino acid
  misc_feature (11)..(11): Xaa can be any naturally occurring amino acid
  misc_feature (35)..(35): Xaa can be any naturally occurring amino acid
  misc_feature (40)..(40): Xaa can be any naturally occurring amino acid
  misc_feature (67)..(67): Xaa can be any naturally occurring amino acid
  misc_feature (71)..(71): Xaa can be any naturally occurring amino acid
  misc_feature (75)..(75): Xaa can be any naturally occurring amino acid
RCRQQQQRXRXAQARLKLKPRLRLRLKPGPGQAPXITAAXAAESRAESNSTTTLPVSWGSPQVGVGXDSNXKPSXPKLFL

SEQ ID NO: 936225 - protein, 127 aa, Homo sapiens
KKKDGCMITHDTSSSMSHVTPQPQTYPLHPLSTLLLTPCPAWLPANVPMPRLLFLPPPPAPSPCSLSLLSLGVGTTQVTARLVGRRVPWGSQEAKAQPSSVLWTWRLAVVFLGLQTLEMSIVCSVSF

SEQ ID NO: 936226 - protein, 138 aa, Homo sapiens
  misc_feature (10)..(10): Xaa can be any naturally occurring amino acid
  misc_feature (80)..(80): Xaa can be any naturally occurring amino acid
  misc_feature (90)..(90): Xaa can be any naturally occurring amino acid
  misc_feature (127)..(127): Xaa can be any naturally occurring amino acid
  misc_feature (135)..(135): Xaa can be any naturally occurring amino acid
  misc_feature (138)..(138): Xaa can be any naturally occurring amino acid
NSPGSWAISXGPLSLKPGPAVLGLRPRYHQCPDITQIIGFLLFFPPQGGRGLAFRTVKSPKKGGSRGDWGWTLQPVPAGXPLLSLLKHLXDGSVYAARTCYNGGFSPRRGLSWRLWTCLALPNHSCXQHVVCMKXKIX

SEQ ID NO: 936227 - protein, 102 aa, Homo sapiens
  misc_feature (12)..(12): Xaa can be any naturally occurring amino acid
  misc_feature (44)..(44): Xaa can be any naturally occurring amino acid
  misc_feature (46)..(46): Xaa can be any naturally occurring amino acid
  misc_feature (63)..(63): Xaa can be any naturally occurring amino acid
  misc_feature (77)..(77): Xaa can be any naturally occurring amino acid
  misc_feature (80)..(80): Xaa can be any naturally occurring amino acid
RSGKAGVDLGYXQLGVAGSPTCGRDWDTLWPLFVPFQSSTPPLXPXGERKTKKRQNAPPARDXDRCAHRDAALSARXRDXLDFVYKLCTLYIYVHRMYICWE

SEQ ID NO: 936228 - protein, 92 aa, Homo sapiens
  misc_feature (6)..(6): Xaa can be any naturally occurring amino acid
  misc_feature (36)..(36): Xaa can be any naturally occurring amino acid
  misc_feature (38)..(38): Xaa can be any naturally occurring amino acid
  misc_feature (41)..(41): Xaa can be any naturally occurring amino acid
  misc_feature (43)..(43): Xaa can be any naturally occurring amino acid
  misc_feature (62)..(62): Xaa can be any naturally occurring amino acid
  misc_feature (77)..(77): Xaa can be any naturally occurring amino acid
  misc_feature (87)..(87): Xaa can be any naturally occurring amino acid
LIAACXNDQTVRVWVVATKECKAELREHDHVVECIXGXQKXIXSISEATGSETKKSGKPGPXLLSGSETRLLRCGMXYWHVLMTPWXDNWVR

SEQ ID NO: 936229 - protein, 133 aa, Homo sapiens
NTNLLADDTALRALIPQRADRFPMNAVRSTLKEEEKLVNSSDWGYGRSGLCPLAPEYGYFAKQAGFTVKTSASLAALWQVVNQIGGKERYFFGNILWQTRALMDRAIGHKLAKGRPEREYLQTGDAVDSWKVI

SEQ ID NO: 936230 - protein, 107 aa, Homo sapiens
  misc_feature (11)..(11): Xaa can be any naturally occurring amino acid
LVRLRRTFCVXECTRDRTAGRNYRWRRFRGVRSHADMVYNLPVLTPPRWVRSRTTPIALENLLHYLVALLDHPASEHRIFEAAGPEVLSYQQQFEHFMAVSGKRPLV

SEQ ID NO: 936231 - protein, 110 aa, Homo sapiens
TCFLCHLLRGRRQHGSLDTSLRAVLLLVLLGVCTVRSDTPANCTYPDLLGTWVFQVGPEVPEATLTARVMEATEEKVVVHLKKLDTAYDELGNSGHFTLILQPRLRDCVE

SEQ ID NO: 936232 - protein, 135 aa, Homo sapiens
  misc_feature (49)..(50): Xaa can be any naturally occurring amino acid
  misc_feature (57)..(57): Xaa can be any naturally occurring amino acid
  misc_feature (60)..(60): Xaa can be any naturally occurring amino acid
  misc_feature (81)..(81): Xaa can be any naturally occurring amino acid
  misc_feature (89)..(89): Xaa can be any naturally occurring amino acid
HGDAGPSTRTSYAASGWQLWRILASRTRVLGPSEGTARVLLRQFCARQXXAWAVHRXPMXIAWEPAPQHCEAATPVVSRRXPETPRSPXKPGPCFLEVFSNHICYWKELYWLECSTSKKEKAEKLEKERQRHIGK

SEQ ID NO: 936233 - protein, 107 aa, Homo sapiens
  misc_feature (7)..(7): Xaa can be any naturally occurring amino acid
  misc_feature (13)..(13): Xaa can be any naturally occurring amino acid
  misc_feature (37)..(37): Xaa can be any naturally occurring amino acid
  misc_feature (40)..(40): Xaa can be any naturally occurring amino acid
  misc_feature (61)..(61): Xaa can be any naturally occurring amino acid
  misc_feature (65)..(65): Xaa can be any naturally occurring amino acid
  misc_feature (76)..(76): Xaa can be any naturally occurring amino acid
  misc_feature (82)..(82): Xaa can be any naturally occurring amino acid
  misc_feature (96)..(96): Xaa can be any naturally occurring amino acid
GRVRLLXNWDVCXDMVGTFTDTEDPAKFKMKYWGYAXLQXGNDDHWIVDTDYDTYAVQYSXRLLXLDGTCADSYSXVFSRDXNGLPPEAQKIVRQXQEELCLARSTG

SEQ ID NO: 936234 - protein, 74 aa, Homo sapiens
PILPVLKPDKTYKLVQDLCLINQIVLPIPLVVPNPNTLLSSIPSSTTHYSVLDRKDAFFTVPLHPSSPPLFAFT

SEQ ID NO: 936235 - protein, 70 aa, Homo sapiens
  misc_feature (7)..(7): Xaa can be any naturally occurring amino acid
  misc_feature (42)..(42): Xaa can be any naturally occurring amino acid
  misc_feature (45)..(45): Xaa can be any naturally occurring amino acid
VSDFGLXALLEDDPEATYTTSGGKIPSLDRPEPFPTEVHLCXRRXTFGIVMWEGDDLMATALLEVVNHEV

SEQ ID NO: 936236 - protein, 118 aa, Homo sapiens
MIPVHINTNANCLPGRDTIDFLSVEKRMIPARRGGSTCGSSTLGGRDGRITGSGVRSQPGQYGETLSLLGMRELAGRGGGRLWSRLLWRVRRESCLNLGGGVCGELSPRHCIPAWATE

SEQ ID NO: 936237 - protein, 144 aa, Homo sapiens
  misc_feature (7)..(7): Xaa can be any naturally occurring amino acid
IPEEEAXWLGLTLEEPIEKQRLLEEKDPVPLFKDLCAGADPAAQQQALSEPAVVQKRPVASDHTAPPCLTNRPSFPCQALCTEDTDPGELLRATGGQWVDPGFVCCPCTFQPGPAWQGSPGGLGPQRLLSAGPRRLRQCSFGPW

SEQ ID NO: 936238 - protein, 76 aa, Homo sapiens
  misc_feature (4)..(4): Xaa can be any naturally occurring amino acid
  misc_feature (18)..(18): Xaa can be any naturally occurring amino acid
  misc_feature (60)..(60): Xaa can be any naturally occurring amino acid
  misc_feature (65)..(65): Xaa can be any naturally occurring amino acid
  misc_feature (70)..(70): Xaa can be any naturally occurring amino acid
SFCXFGSPANRKIGVCTXKDGAPCIFGGTVYAAESPPEQLQVPPARALDGAVGCMPLCSXDVRLXSPDCXFPRRVK

SEQ ID NO: 936239 - protein, 61 aa, Homo sapiens
  misc_feature (39)..(39): Xaa can be any naturally occurring amino acid
  misc_feature (56)..(56): Xaa can be any naturally occurring amino acid
  misc_feature (60)..(60): Xaa can be any naturally occurring amino acid
HGRERHKHHAVARQFSTHRELWGAAVGKEDTDSHYPWSXVISVLFKKFFTNLRITXPSAXY

SEQ ID NO: 936240 - protein, 160 aa, Homo sapiens
  misc_feature (46)..(47): Xaa can be any naturally occurring amino acid
  misc_feature (56)..(56): Xaa can be any naturally occurring amino acid
  misc_feature (76)..(76): Xaa can be any naturally occurring amino acid
  misc_feature (80)..(80): Xaa can be any naturally occurring amino acid
  misc_feature (100)..(101): Xaa can be any naturally occurring amino acid
  misc_feature (108)..(108): Xaa can be any naturally occurring amino acid
  misc_feature (120)..(120): Xaa can be any naturally occurring amino acid
  misc_feature (157)..(157): Xaa can be any naturally occurring amino acid
SFPHPRGPSRWRLRSSGLLISAKRLKDAPTADGTFSPPAGRTSSVXXPALPRRRRXASQNRTPLDARRPAPTAQRXRAPXLHAIPASLAPRLLFRWRGLXXALKPRCXAGRKAGEDRVDXGKSGRMVRRKPALARPGSRSWGREQGSREGSAPNLNXGSD

SEQ ID NO: 936241 - protein, 95 aa, Homo sapiens
  misc_feature (14)..(14): Xaa can be any naturally occurring amino acid
  misc_feature (21)..(22): Xaa can be any naturally occurring amino acid
  misc_feature (36)..(36): Xaa can be any naturally occurring amino acid
  misc_feature (42)..(42): Xaa can be any naturally occurring amino acid
MLDNSYDTYANSTXTPVAPEXXQPHQDPHESGVRVXKTCLSXLYLTQKLGSLGELVEVCLNSECSGSGLHSLLVGSSLCQPQPLLRGTPCPLEAQ

SEQ ID NO: 936242 - protein, 83 aa, Homo sapiens
  misc_feature (8)..(8): Xaa can be any naturally occurring amino acid
TAQGFRTXLELVINYQQLCIYWTKYYDFKNPIIEKYLRRQLTENPGPVIPGPGGPLPGKTWVGGRTKRVWEASLATKKLEALA

SEQ ID NO: 936243 - protein, 76 aa, Homo sapiens
  misc_feature (4)..(4): Xaa can be any naturally occurring amino acid
KKGXQNPQAESGGLQQHLDTLTEHYDIPKSAGRIAACPSMSSIEGSQRHTGVVCVSLDNPGTWLTHLASSATDCFR

SEQ ID NO: 936244 - protein, 135 aa, Homo sapiens
MEAYEAGPKGTPEAERRRRAGSDQAVRPEGPRDSVFIPLRPFLGTPGPDPPTGRLLMSFSKKKKKKDKEKAKLLEAMGTSKKTERERSNTAWKRGPPPRQPPRNAGEAANGRILKKASKTHKQKWRTSTDTWAHS

SEQ ID NO: 936245 - protein, 322 aa, Homo sapiens
LESVMEAYEQVPKGTPCKLKGVASSWECTKRQEATHSTGTHSTTANTPWHSHMGNAANTAHRRQAAQRAAGPGTTACTLVTPGRNIPQHTHARQHSAHNRQQASVTAQAILNNRHQCNAAVRSALPSQHHPGTTPPLRSHSRTIPQQSSSRNAQSASTCTPKYWTPDIRRSISQQRPQLERVSSSSYSIQGILSWNTLGLQQHTICIILGLTRTWHYSQDLWYGLPFLANLHLTRKDSILGTSRFKGLSFGPTIPDRLHPINRTGHWTTPFLNVLSQQAYQTHSCDLRVNVQHWYKPRSSHCKRLCRPDQAVFSVAAAPPRG

SEQ ID NO: 936246 - protein, 111 aa, Homo sapiens
  misc_feature (70)..(70): Xaa can be any naturally occurring amino acid
  misc_feature (83)..(83): Xaa can be any naturally occurring amino acid
YYPFILFWISDMLSLLLLCTLHPSLSLPSLRLTLTPIRLNKLPGLHCHKASQTAPITFSEAQISSSSVSXTPVHRSQLLIHAXALLYTAGLHCFSKTSQLISPGANPQTGN

SEQ ID NO: 936247 - protein, 48 aa, Homo sapiens
  misc_feature (8)..(8): Xaa can be any naturally occurring amino acid
DLAHANWXPAYPAPSAASNNSNSLNVNNGVPAGGRALLSHRRSCLRHH

SEQ ID NO: 936248 - protein, 124 aa, Homo sapiens
  misc_feature (10)..(10): Xaa can be any naturally occurring amino acid
  misc_feature (31)..(31): Xaa can be any naturally occurring amino acid
  misc_feature (64)..(64): Xaa can be any naturally occurring amino acid
  misc_feature (114)..(114): Xaa can be any naturally occurring amino acid
PDCAPLARPXFPASSGSGSTGGRVRVVARQXNMIRRLEIEAENHYWPEHATYMTREQERRPPGXRKEGGLRGNKGGRTSKFPRIDSLRTSSTISMSPRNGPNPEIVTLGFYGSXELTIFTWSWN

SEQ ID NO: 936249 - protein, 53 aa, Homo sapiens
  misc_feature (46)..(46): Xaa can be any naturally occurring amino acid
GGAWSLDPVTSSRLKHGSGRRNRPFSVLVFLTARTEPNPEERPLEXQEPTRRR

SEQ ID NO: 936250 - protein, 32 aa, Homo sapiens
  misc_feature (4)..(4): Xaa can be any naturally occurring amino acid
IRHXGEEETQEETPGPPRPPRLEIQNFCLRPL

SEQ ID NO: 936251 - protein, 125 aa, Homo sapiens
  misc_feature (9)..(10): Xaa can be any naturally occurring amino acid
  misc_feature (28)..(29): Xaa can be any naturally occurring amino acid
  misc_feature (33)..(33): Xaa can be any naturally occurring amino acid
  misc_feature (70)..(70): Xaa can be any naturally occurring amino acid
  misc_feature (76)..(76): Xaa can be any naturally occurring amino acid
  misc_feature (91)..(91): Xaa can be any naturally occurring amino acid
PGLGTVALXXPKAVDPGAKPSQHVCGVXXTLLXNNEGSLLAYSGYGDHVTPGSPRAIASNIWAAYDRNGXQAFNEXNLKFILMDCMEGRVXITRVANLLLVYVCQGYRWAFGMLKAKGQALVAGT

SEQ ID NO: 936252 - protein, 85 aa, Homo sapiens
  misc_feature (25)..(25): Xaa can be any naturally occurring amino acid
  misc_feature (45)..(45): Xaa can be any naturally occurring amino acid
  misc_feature (47)..(47): Xaa can be any naturally occurring amino acid
  misc_feature (57)..(57): Xaa can be any naturally occurring amino acid
  misc_feature (82)..(83): Xaa can be any naturally occurring amino acid
VTTPAAHSSALHSRSLTHRPQPHLXVEDGERTTYYDCFWGVNPMXLXEEFEKGLEEXWPLKYHPDKNPNEGEKFKQISQAYXXRL

SEQ ID NO: 936253 - protein, 108 aa, Homo sapiens
  misc_feature (44)..(44): Xaa can be any naturally occurring amino acid
  misc_feature (68)..(68): Xaa can be any naturally occurring amino acid
  misc_feature (86)..(86): Xaa can be any naturally occurring amino acid
  misc_feature (93)..(93): Xaa can be any naturally occurring amino acid
  misc_feature (108)..(108): Xaa can be any naturally occurring amino acid
ADGAGGRRGRRRSGVSGSQRVLMEPDAGAGVAVMKFKNPPVNSXEPGVSDESWSSAVEKLENDKSFRXCHSDLGPARVSSRPAWTXTEMCGRXPAHYAWVLERPVQEX

SEQ ID NO: 936254 - protein, 109 aa, Homo sapiens
  misc_feature (3)..(3): Xaa can be any naturally occurring amino acid
  misc_feature (16)..(16): Xaa can be any naturally occurring amino acid
  misc_feature (25)..(25): Xaa can be any naturally occurring amino acid
  misc_feature (38)..(38): Xaa can be any naturally occurring amino acid
  misc_feature (42)..(42): Xaa can be any naturally occurring amino acid
  misc_feature (100)..(100): Xaa can be any naturally occurring amino acid
MAXAYVPPLLLSAALXAWVVAAPPXGSHCNQDRSGGGXMKRXGRSIAHVGTVRAGRGEGKCNMAAAMETEQLGVEIFETCGPVRRILNHRNRPKIGAFLXLSRYSLESA

SEQ ID NO: 936255 - protein, 37 aa, Homo sapiens
  misc_feature (24)..(24): Xaa can be any naturally occurring amino acid
  misc_feature (28)..(28): Xaa can be any naturally occurring amino acid
PHIEEYRCTSPMAYTMVYWHALDXWRCXPVQAVFARG

SEQ ID NO: 936256 - protein, 82 aa, Homo sapiens
  misc_feature (13)..(13): Xaa can be any naturally occurring amino acid
  misc_feature (57)..(57): Xaa can be any naturally occurring amino acid
  misc_feature (64)..(64): Xaa can be any naturally occurring amino acid
  misc_feature (76)..(76): Xaa can be any naturally occurring amino acid
LAAAAAASRRSAXLECYTCVQKADDGSPEQDEDSEVRAGVDVCTEAVGLVETSRTIXLAVGVRXGTPGKNDRGWIXRASAFI

SEQ ID NO: 936257 - protein, 115 aa, Homo sapiens
  misc_feature (43)..(43): Xaa can be any naturally occurring amino acid
KRRLFLGVYLLLMSYRFQDILQGIPKPESSAAFSMCLFLFWGXGGGMESCSVAQAEVAVSQDCAIVLQPGQQEQNSISKKKKRPGAGVTPVILALWEPRRGDHEVSRSRPSRLTR

SEQ ID NO: 936258 - protein, 67 aa, Homo sapiens
  misc_feature (8)..(8): Xaa can be any naturally occurring amino acid
PEEETGSXGLEKDPLQGAPWQVLVPTSAQDPAVLSEALGASVVLTAQERAEGGCPGQGVNFLPWFSL

SEQ ID NO: 936259 - protein, 101 aa, Homo sapiens
  misc_feature (24)..(24): Xaa can be any naturally occurring amino acid
  misc_feature (37)..(38): Xaa can be any naturally occurring amino acid
  misc_feature (40)..(41): Xaa can be any naturally occurring amino acid
  misc_feature (80)..(80): Xaa can be any naturally occurring amino acid
QSILDMMGLMEVLPERCVQIAKRXCIFLEARGSIMYXXGXXFFINRAALVALANDSDGRPGRAAWSGRTSKCGSIPEGYXATTNWGPCCLFKERAPFLTLA

SEQ ID NO: 936260 - protein, 35 aa, Homo sapiens
  misc_feature (3)..(3): Xaa can be any naturally occurring amino acid
GPXKSQGSGNEAEPLGKGNSATNTEDSRTTLSGPK

SEQ ID NO: 936261 - protein, 114 aa, Homo sapiens
  misc_feature (8)..(8): Xaa can be any naturally occurring amino acid
  misc_feature (11)..(11): Xaa can be any naturally occurring amino acid
  misc_feature (74)..(74): Xaa can be any naturally occurring amino acid
  misc_feature (90)..(90): Xaa can be any naturally occurring amino acid
  misc_feature (95)..(95): Xaa can be any naturally occurring amino acid
  misc_feature (110)..(110): Xaa can be any naturally occurring amino acid
AHGLGVEXACXPAADAEHARGRMHQRLRNSRDHPWGHHDRGAAGSLSSLWWPPCPPPDTAAVQAGRSGDQGLTXIRTHCAVASTRARHLXLHGLXPLWGGPAGCCQPIPXKFRR

SEQ ID NO: 936262 - protein, 63 aa, Homo sapiens
  misc_feature (9)..(9): Xaa can be any naturally occurring amino acid
  misc_feature (37)..(37): Xaa can be any naturally occurring amino acid
VQGARACRXLPGRSVRSGYLLVKHSQTDQEPMCPVHXNKLWSGYSLLYFEGQEKAHNQGPGAG

SEQ ID NO: 936263 - protein, 94 aa, Homo sapiens
  misc_feature (57)..(57): Xaa can be any naturally occurring amino acid
  misc_feature (82)..(82): Xaa can be any naturally occurring amino acid
QSARSQLQQTEQGGRTCRAPEVDNLTLDGNPSWSWNCPPPRGSMNSGVVQLCTFDLXWGCREPGAAQGAGGFLRSRQIMNGXKLPWVQGSPVRR

SEQ ID NO: 936264 - protein, 46 aa, Homo sapiens
  misc_feature (26)..(26): Xaa can be any naturally occurring amino acid
QAQLKSIRSVGMVKHNYCRNPDNRSXPWCYVQVGKALVQECMVHDC

SEQ ID NO: 936265 - protein, 81 aa, Homo sapiens
  misc_feature (10)..(10): Xaa can be any naturally occurring amino acid
  misc_feature (12)..(12): Xaa can be any naturally occurring amino acid
  misc_feature (15)..(15): Xaa can be any naturally occurring amino acid
  misc_feature (20)..(21): Xaa can be any naturally occurring amino acid
  misc_feature (77)..(77): Xaa can be any naturally occurring amino acid
  misc_feature (81)..(81): Xaa can be any naturally occurring amino acid
DFEDDPRALXWXTCXFCQQXXYQLQEQMNRAVYEDRPPAAWCHVSSRGKSGMRGHVTERELCLCGMYHVFDQHVDEXVQGX

SEQ ID NO: 936266 - protein, 66 aa, Homo sapiens
  misc_feature (31)..(31): Xaa can be any naturally occurring amino acid
MRVTAPRTVLLLLWGAVADRDLGRLHSMRYXYTAMSRPGAGSPFIAVGYVDDTQSVRFDSDAASPM

SEQ ID NO: 936267 - protein, 37 aa, Homo sapiens
  misc_feature (30)..(31): Xaa can be any naturally occurring amino acid
MEFKRGRFRLSLFSDLARGHGVAEEAETNXXLMMEGG

SEQ ID NO: 936268 - protein, 47 aa, Homo sapiens
  misc_feature (8)..(8): Xaa can be any naturally occurring amino acid
  misc_feature (31)..(31): Xaa can be any naturally occurring amino acid
MRARTSTXRRSGPGSGEVLPLLMAATLGRRXGMLPQNDTRLDPKPMG

SEQ ID NO: 936269 - protein, 34 aa, Homo sapiens
  misc_feature (5)..(5): Xaa can be any naturally occurring amino acid
NTVGXLHSDLEYTVTYMKEGLCSDLAVEGTIGDF

SEQ ID NO: 936270 - protein, 30 aa, Homo sapiens
  misc_feature (13)..(13): Xaa can be any naturally occurring amino acid
CIEDKMAIDDKYXLEEEYRGFTQDFKEKDG

SEQ ID NO: 936271 - protein, 30 aa, Homo sapiens
QVVRSGRVKKAVANAVQQEVKSLCGLEASQ

SEQ ID NO: 936272 - protein, 141 aa, Homo sapiens
  misc_feature (4)..(4): Xaa can be any naturally occurring amino acid
  misc_feature (41)..(41): Xaa can be any naturally occurring amino acid
  misc_feature (75)..(75): Xaa can be any naturally occurring amino acid
  misc_feature (92)..(92): Xaa can be any naturally occurring amino acid
RESXRRTGAARQACGTCRGRTSSSPAAGEASGVSRPRVRKXAPERLFSWGRTEKCLKETTEEIRQMGTESVYLHXVMWATGTTVYQTAKAAXEKVGDITILVNNAAVVHGKSLMWTVMMMPSSSPNTSTPLGQFWTTKAFL

SEQ ID NO: 936273 - protein, 82 aa, Homo sapiens
  misc_feature (12)..(12): Xaa can be any naturally occurring amino acid
  misc_feature (14)..(15): Xaa can be any naturally occurring amino acid
  misc_feature (49)..(49): Xaa can be any naturally occurring amino acid
  misc_feature (66)..(66): Xaa can be any naturally occurring amino acid
  misc_feature (69)..(69): Xaa can be any naturally occurring amino acid
ILAGLIHAQGGXAXXLCRGLEFGADGSSGMTRRTRSQIRWPGNGFTDGXGFRIARRLARTGPVVVXAEXQNFDKPCTLRGRA

SEQ ID NO: 936274 - protein, 103 aa, Homo sapiens
  misc_feature (10)..(10): Xaa can be any naturally occurring amino acid
  misc_feature (31)..(31): Xaa can be any naturally occurring amino acid
  misc_feature (39)..(39): Xaa can be any naturally occurring amino acid
  misc_feature (43)..(43): Xaa can be any naturally occurring amino acid
  misc_feature (60)..(60): Xaa can be any naturally occurring amino acid
GHRGGRGGCXGGEPGSRATPAQPHHRRPAAXKEEMAAEXGKRXSPMDDGFVSWTRPPYVXYRDRAEWADIDPVPQNDGPIPGQIIYSDKFRDVYDYFRAVLQR

SEQ ID NO: 936275 - protein, 31 aa, Homo sapiens
ERQKEIEEREKRRKDRHEASGFARRPDPDSD

SEQ ID NO: 936276 - protein, 108 aa, Homo sapiens
  misc_feature (46)..(46): Xaa can be any naturally occurring amino acid
  misc_feature (72)..(72): Xaa can be any naturally occurring amino acid
ADAHPVAAKRSRAVVPALAAANEDPLRSGNATALVAPDLKTFSMPXESSPGGPREHSLPGPPHLVNADGQYXFCRYWKPTRHTQGPHLCVPWKPEENSGRYEELGSEC

SEQ ID NO: 936277 - protein, 30 aa, Homo sapiens
DQNRPEWIISELACYTYSMVAVPLYDTLGP

SEQ ID NO: 936278 - protein, 85 aa, Homo sapiens
  misc_feature (40)..(40): Xaa can be any naturally occurring amino acid
  misc_feature (42)..(42): Xaa can be any naturally occurring amino acid
  misc_feature (44)..(44): Xaa can be any naturally occurring amino acid
  misc_feature (69)..(70): Xaa can be any naturally occurring amino acid
  misc_feature (74)..(74): Xaa can be any naturally occurring amino acid
ALRRALEGEDGAQTLTMTPHRHAAPLLLLLALLLAASPGXPXGXPRLRARGAGGLSGGVRGGGGWGVAXXARGXEGCLRREGQES

SEQ ID NO: 936279 - protein, 30 aa, Homo sapiens
  misc_feature (16)..(16): Xaa can be any naturally occurring amino acid
  misc_feature (28)..(28): Xaa can be any naturally occurring amino acid
TARSAAAQRGRQRHEXRQRHSEVGSGTXVG

SEQ ID NO: 936280 - protein, 30 aa, Homo sapiens
KRSAGVEPPIAVDSSGIDQRPRRPFHQRKR

SEQ ID NO: 936281 - protein, 30 aa, Homo sapiens
  misc_feature (20)..(20): Xaa can be any naturally occurring amino acid
IWRVFRPLSSATVTEKLSDXFGKQDVLTRR

SEQ ID NO: 936282 - protein, 31 aa, Homo sapiens
ALEVCQDSGTVFPAGRGNVVTGDRDHLTRCL

SEQ ID NO: 936283 - protein, 78 aa, Homo sapiens
  misc_feature (5)..(7): Xaa can be any naturally occurring amino acid
  misc_feature (14)..(14): Xaa can be any naturally occurring amino acid
ESPPXXXRKASQVXSCKPRAAQRAQGKDVTLLHLWLVLRLCVRPEWGCGDREAVALECLCTSLFQDTEQELGTHRGTP

SEQ ID NO: 936284 - protein, 30 aa, Homo sapiens
  misc_feature (25)..(25): Xaa can be any naturally occurring amino acid
EPGRYKRQTIAAVKLSTSLASAATXPDLLT

SEQ ID NO: 936285 - protein, 102 aa, Homo sapiens
  misc_feature (40)..(40): Xaa can be any naturally occurring amino acid
ATDSRGASHLSKSQPVRGLSSPGFALSTLLPAQLRDRTEXERAHATSPAAPDHSLGAACRPRRQAQSAVPRRVNAKYSHERKKVLADGGKKRVGEEPSNEGR

SEQ ID NO: 936286 - protein, 97 aa, Homo sapiens
  misc_feature (77)..(77): Xaa can be any naturally occurring amino acid
DSWQAWRQNFQCFPQWPHWRGRGEDRRLGGGSKEEEREEATGGGLGWGLPLPAGGDGQLTTCTKCRGGSSDYGDAGXPGHRNGFLTVGPLDPTGFGV

SEQ ID NO: 936287 - protein, 115 aa, Homo sapiens
  misc_feature (16)..(16): Xaa can be any naturally occurring amino acid
  misc_feature (20)..(20): Xaa can be any naturally occurring amino acid
  misc_feature (39)..(39): Xaa can be any naturally occurring amino acid
  misc_feature (46)..(46): Xaa can be any naturally occurring amino acid
  misc_feature (54)..(54): Xaa can be any naturally occurring amino acid
  misc_feature (68)..(68): Xaa can be any naturally occurring amino acid
  misc_feature (78)..(78): Xaa can be any naturally occurring amino acid
  misc_feature (97)..(97): Xaa can be any naturally occurring amino acid
TLRSQLGQSKKPKKAXGGAXPKKSAKKTPKKAKKAAAAXVTKKVLXSPKKAKVXKPKKAAKSAAKAVXPRPLSPRLSXLKKAAPKEEISERLLLKPXNVFSEPPLISIKELVNFF

SEQ ID NO: 936288 - protein, 155 aa, Homo sapiens
  misc_feature (15)..(15): Xaa can be any naturally occurring amino acid
  misc_feature (60)..(60): Xaa can be any naturally occurring amino acid
  misc_feature (66)..(66): Xaa can be any naturally occurring amino acid
  misc_feature (100)..(100): Xaa can be any naturally occurring amino acid
  misc_feature (111)..(111): Xaa can be any naturally occurring amino acid
MEWNLMEWSRRNGQXCSVLQWNGMDQNGFEQIGMKSNGMHWNGMELNQNGLERNVNNWNXNEWNGXKWNGMQWNGKERNQMESNGMEWNGMDWNRMDSNXIESIAMVYNGXEMNGMESNGRYWNRMASNEMNGTEWNGPEWNGMDSNVMDSNRID

SEQ ID NO: 936289 - protein, 76 aa, Homo sapiens
  misc_feature (11)..(11): Xaa can be any naturally occurring amino acid
  misc_feature (26)..(26): Xaa can be any naturally occurring amino acid
  misc_feature (58)..(58): Xaa can be any naturally occurring amino acid
  misc_feature (66)..(66): Xaa can be any naturally occurring amino acid
  misc_feature (75)..(75): Xaa can be any naturally occurring amino acid
ESLAGRARFRXTSACGFATGGWGPRXIGGSGPRFRLGTGERELQEVERYGFSRAPAVXQGLVPGAXGAPLGPGVXR

SEQ ID NO: 936290 - protein, 127 aa, Homo sapiens
  misc_feature (1)..(1): Xaa can be any naturally occurring amino acid
  misc_feature (28)..(28): Xaa can be any naturally occurring amino acid
  misc_feature (69)..(69): Xaa can be any naturally occurring amino acid
  misc_feature (71)..(71): Xaa can be any naturally occurring amino acid
  misc_feature (103)..(103): Xaa can be any naturally occurring amino acid
  misc_feature (121)..(122): Xaa can be any naturally occurring amino acid
XRPAEDVKLSRLLRCGSALASLSSPSAXAPARPAPAMEKTELIKGKLASSERYDDMATCMKAVTEQGAXLXNEERNLLSVAYKNVVGGRSPPWKVISSIEQKXDTFDKKLQLIKGLSGRSXXRTEIH

SEQ ID NO: 936291 - protein, 57 aa, Homo sapiens
  misc_feature (18)..(18): Xaa can be any naturally occurring amino acid
  misc_feature (40)..(40): Xaa can be any naturally occurring amino acid
  misc_feature (45)..(45): Xaa can be any naturally occurring amino acid
  misc_feature (55)..(55): Xaa can be any naturally occurring amino acid
ALEVASTLLVGAAGGAGXKGASVRLSRGFLHADPRFVGLXCWVTXPCIRGAVVSXTA

SEQ ID NO: 936292 - protein, 47 aa, Homo sapiens
  misc_feature (3)..(3): Xaa can be any naturally occurring amino acid
  misc_feature (22)..(22): Xaa can be any naturally occurring amino acid
DIXSYCDRQPVMDVAFVQFLAXVSGKVSCLDTCGTLLVTLQILSRQV

SEQ ID NO: 936293 - protein, 84 aa, Homo sapiens
  misc_feature (21)..(21): Xaa can be any naturally occurring amino acid
  misc_feature (73)..(73): Xaa can be any naturally occurring amino acid
MDDSKVVGGKVKKPVKRGRNXAKIDLKAKLERNPAECKRMPSPKKAEISVFGRVGIQSRKSYMCPQRGTGNVXAVVHGNGPRKK

SEQ ID NO: 936294 - protein, 187 aa, Homo sapiens
  misc_feature (3)..(3): Xaa can be any naturally occurring amino acid
  misc_feature (61)..(61): Xaa can be any naturally occurring amino acid
  misc_feature (63)..(63): Xaa can be any naturally occurring amino acid
  misc_feature (71)..(71): Xaa can be any naturally occurring amino acid
GTXLSAGNQWLMPYNPQPLWEGPRLGRIHEVQEIETMLAYTMVKPPVFYLKNYPKNLAKAXGXGRLLVPSXFGRLEAGEWREPGRRSLQRAKVTPLHSSLGDRARLHLRKKYKRKERKPQSYEAITPKPSTKRSLISKLFSSPQQRSNILGQAQWLMPVIPALWEAEAGGSRGQEIETILANMVKPR

SEQ ID NO: 936295 - protein, 48 aa, Homo sapiens
  misc_feature (36)..(36): Xaa can be any naturally occurring amino acid
  misc_feature (41)..(41): Xaa can be any naturally occurring amino acid
  misc_feature (47)..(47): Xaa can be any naturally occurring amino acid
KPSDYSSPFVIQTTQGLNVGNLHFGVQSLTCCEDLXRNEGXATPEMXF

SEQ ID NO: 936296 - protein, 79 aa, Homo sapiens
  misc_feature (8)..(8): Xaa can be any naturally occurring amino acid
  misc_feature (19)..(19): Xaa can be any naturally occurring amino acid
  misc_feature (22)..(22): Xaa can be any naturally occurring amino acid
  misc_feature (62)..(62): Xaa can be any naturally occurring amino acid
  misc_feature (73)..(73): Xaa can be any naturally occurring amino acid
LSNERLLXCFVSLREQVTXAQXAWTPHQAGTGLAPCPHKNSQYSLNSVRSNQQEDPRFLSAXLHLLLLRVIQXQFCDLH

SEQ ID NO: 936297 - protein, 106 aa, Homo sapiens
  misc_feature (31)..(31): Xaa can be any naturally occurring amino acid
  misc_feature (44)..(45): Xaa can be any naturally occurring amino acid
  misc_feature (80)..(80): Xaa can be any naturally occurring amino acid
  misc_feature (101)..(101): Xaa can be any naturally occurring amino acid
LSSPSQSWARSQSVQLSPPCPAPSSPRTSWXRSDLRLLLSAGLXXSPFEHLPAYRSAPGAFCKVGQLRAQFCLSTSPSLXPRRPRFPRSLSLGSSQFQRVXNFAPL

SEQ ID NO: 936298 - protein, 58 aa, Homo sapiens
DVVASDAKTLRCWQSSPVQSPQQLGLFVGIVADNRTVIIDLITHQIARFVAVLGGCHN

SEQ ID NO: 936299 - protein, 142 aa, Homo sapiens
  misc_feature (38)..(38): Xaa can be any naturally occurring amino acid
  misc_feature (56)..(56): Xaa can be any naturally occurring amino acid
  misc_feature (67)..(67): Xaa can be any naturally occurring amino acid
  misc_feature (75)..(75): Xaa can be any naturally occurring amino acid
  misc_feature (86)..(86): Xaa can be any naturally occurring amino acid
  misc_feature (91)..(91): Xaa can be any naturally occurring amino acid
  misc_feature (96)..(96): Xaa can be any naturally occurring amino acid
  misc_feature (118)..(118): Xaa can be any naturally occurring amino acid
  misc_feature (137)..(137): Xaa can be any naturally occurring amino acid
APRTVLLLLSAALALTETWAGSTPGGISHLRVRPGAGXPFITVGYVDDTQFVRFDXDAASPREEPAXPVDRAGGXPEYWDRNTQIXKEGQXDRVGXRNLLRYYNQSEDGSHTWQTMYXSTWGGRGLLRGYNSSPTTXGLHRL

SEQ ID NO: 936300 - protein, 132 aa, Homo sapiens
  misc_feature (3)..(3): Xaa can be any naturally occurring amino acid
  misc_feature (14)..(15): Xaa can be any naturally occurring amino acid
  misc_feature (44)..(44): Xaa can be any naturally occurring amino acid
  misc_feature (101)..(101): Xaa can be any naturally occurring amino acid
  misc_feature (116)..(116): Xaa can be any naturally occurring amino acid
  misc_feature (122)..(122): Xaa can be any naturally occurring amino acid
  misc_feature (125)..(125): Xaa can be any naturally occurring amino acid
RVXVGWLCGPGLLXXRSHLHRPEAHGGCISVMSEVARPAHQDVXVWCFLREREPQMAHAAFKRGAFILQSGQVPLSHSHVSTKTSTEEGASFTRDNVRCGXAPVPRKGLTPDDVQXWLQSPXSMXLFSGKFH

SEQ ID NO: 936301 - protein, 119 aa, Homo sapiens
  misc_feature (17)..(18): Xaa can be any naturally occurring amino acid
  misc_feature (68)..(68): Xaa can be any naturally occurring amino acid
  misc_feature (79)..(79): Xaa can be any naturally occurring amino acid
  misc_feature (116)..(116): Xaa can be any naturally occurring amino acid
HEKLRHAESVGDRRACXXSREKHALLEEGTKELGYTVKKHLQDLSGRLSRARHNELRRHWGAQPGRKXASVKDLGSWQXNFRGQPAVRLAGAGTGCRGKEGFVSWVTASRCPSRHXGFG

SEQ ID NO: 936302 - protein, 61 aa, Homo sapiens
  misc_feature (8)..(8): Xaa can be any naturally occurring amino acid
  misc_feature (22)..(22): Xaa can be any naturally occurring amino acid
  misc_feature (42)..(42): Xaa can be any naturally occurring amino acid
  misc_feature (44)..(44): Xaa can be any naturally occurring amino acid
  misc_feature (54)..(54): Xaa can be any naturally occurring amino acid
EPEEPGSXDITVPPPSYQKRRXSAHKHGFSWYGLVTPSSCAXYXTTDASPSPSXVLPLVSA

SEQ ID NO: 936303 - protein, 56 aa, Homo sapiens
  misc_feature (15)..(15): Xaa can be any naturally occurring amino acid
  misc_feature (25)..(25): Xaa can be any naturally occurring amino acid
  misc_feature (42)..(42): Xaa can be any naturally occurring amino acid
RAEPPGAGDPVQAPXPLVLPARGRXTRHDPLAKSKIELSEHXARVDPAEFFVLMER

SEQ ID NO: 936304 - protein, 85 aa, Homo sapiens
  misc_feature (2)..(2): Xaa can be any naturally occurring amino acid
  misc_feature (77)..(77): Xaa can be any naturally occurring amino acid
  misc_feature (80)..(80): Xaa can be any naturally occurring amino acid
MXCTASHSDPTVPQRWSSLWIGYSFVMHTSAGAEGSGKPWRPPASCLEEFRSAPFIECHGPLDLQLLRKRLQLLARXIEXSEMFK

SEQ ID NO: 936305 - protein, 46 aa, Homo sapiens
MRASVVLTSFKTHFERIPYCKIYLRFHARVYTPLALQTYEVLRPSM

SEQ ID NO: 936306 - protein, 63 aa, Homo sapiens
CIVGRTRVCHREVITGLSSEPVTSNPEFRYVADLQGCILRFSNKLTALYPYPTEDTDLVNLIS

SEQ ID NO: 936307 - protein, 62 aa, Homo sapiens
MVFQSVGNYRGSPLTAGTGGFAEGGYGAVFCFVWQNLFDAPLSNSISVPRRVTFGSELAARL

SEQ ID NO: 936308 - protein, 109 aa, Homo sapiens
  misc_feature (20)..(20): Xaa can be any naturally occurring amino acid
  misc_feature (92)..(92): Xaa can be any naturally occurring amino acid
  misc_feature (99)..(99): Xaa can be any naturally occurring amino acid
LNFGIFSRRQVLPILVRLVXKLLTFVICPTLASQKVLGLQSVSHCACPPSRKISSKVDAKTLAGTETRDQPRDTCPFTPHCPNGEPGQQACXAPRVPGXGTFASGPRNG

SEQ ID NO: 936309 - protein, 62 aa, Homo sapiens
VPSIGYYRCSPMTSEPWRVRQKEHYGAVFDFHAMQNLFAASLDIILLSPTEYNRSVSADHRI

SEQ ID NO: 936310 - protein, 79 aa, Homo sapiens
MRLQLVIQSVGNYRGTPLTEGTGRLAEGGPQGCSLAFTYGQKIILRHLIEIPVRYQESLKLEVSETAGWIKASYATAWP

SEQ ID NO: 936311 - protein, 110 aa, Homo sapiens
TTGVPFVSLNSSRVMRLPPAAATGQNPHSVRFRPPTGAFSKLIYTLDVVHPGADVNAWFDSPLGTALLRATSLTSPVWVGLGAVLPVPTTAYWDGPNKPIGRNEGIVELD

SEQ ID NO: 936312 - protein, 45 aa, Homo sapiens
ELLPQLLLHDERCLCYCSFHFILRAGSEGVRRATAPVPTVGEGYG

SEQ ID NO: 936313 - protein, 81 aa, Homo sapiens
GYRTMGYVSMAKCGSERVWCGVPKLLGLRRHRTDVSVSSLSARVDVMVLVYHLSLWALFPPMPPLAIFLPSPSISSLSILF

SEQ ID NO: 936314 - protein, 126 aa, Homo sapiens
  misc_feature (4)..(4): Xaa can be any naturally occurring amino acid
  misc_feature (18)..(18): Xaa can be any naturally occurring amino acid
  misc_feature (23)..(23): Xaa can be any naturally occurring amino acid
  misc_feature (46)..(46): Xaa can be any naturally occurring amino acid
APRXGGKFFLTEFWLRHXSRRPXRAMDALKSAGRALIRSPSLAKQXWGGGGGTQACLRTGQTRGRRCLEGMLFSLKYLGMTLVEQPKGEGACRPPPSRGSWLQLKASWEEACRKLTLERLSPRGKF

SEQ ID NO: 936315 - protein, 84 aa, Homo sapiens
  misc_feature (25)..(25): Xaa can be any naturally occurring amino acid
  misc_feature (44)..(44): Xaa can be any naturally occurring amino acid
MNHSLRNLHLHKLNAVVNDFWAEIXESVDKIEVLYQKMKVSRSXAVCSLSGIYKYFITLGAFEESLNYALGQEDLFNVNDNSEY

SEQ ID NO: 936316 - protein, 55 aa, Homo sapiens
EHIKQVESQLIMSLWRVSRMPNRNCDSNDRDMRDHRHLVDSLHNLTIKDQASYYE

SEQ ID NO: 936317 - protein, 53 aa, Homo sapiens
ALGLLTADLLSVLLYQWILCQEPAKFSSVRPFDGLVEEQFWLEVEEDTSKLLK

SEQ ID NO: 936318 - protein, 127 aa, Homo sapiens
SFTGGYHGRTLLTMSLTSKVMPYKKGFGPFAPEVYKFPYPYYYRANEQTIDEVDNQLIESLKQFFVAEVAPDHGEQQSKLNQYKEKGDLSVPSAKFMQADSVAFVMNTASSMIADEIQTGFARTGRL

SEQ ID NO: 936319 - protein, 110 aa, Homo sapiens
ELITLGSRPQRRQQCLDCFTYDECECARFIKLQIARHDAAETAPALVIEHTTSACLRIASRSLLRVNNPAVWFASRRRFVFRQINRRLSINESSCGKTRRKSASSRGFHN

SEQ ID NO: 936320 - protein, 38 aa, Homo sapiens
MTRKVVPSADFVRDVSNCFGLLNGMDVTSRMRDHIGTG

SEQ ID NO: 936321 - protein, 66 aa, Homo sapiens
MSRTASMSLIQAPSYGSDPQPLLTRGLSPVHGIVGQQCPEEESNGVFMADEDLALSPDVGVDCVRR

SEQ ID NO: 936322 - protein, 47 aa, Homo sapiens
GGSRISLYIDRFVNRDMFGYTVPTAMFQSINAFAVMLCGVFLAWVVK

SEQ ID NO: 936323 - protein, 50 aa, Homo sapiens
MRTNSLWIGEWIRVSQALHLALVIWRELSMVYTQTRLSTNFLMIPEGNKG

SEQ ID NO: 936324 - protein, 70 aa, Homo sapiens
HFKCGYPPFSKAQWLTIIFPMSSDQARYGVTWSQLGPLLPPPKFHHRQRLQTILCFPGHLVVCTVGDASW

SEQ ID NO: 936325 - protein, 105 aa, Homo sapiens
MLVPRRCQTNGSGFLACKLMCHSDLKDCDTTVTKNGNVTCNGTAEYYSDMTGVCLTKALILIAAYKRGRCKCYMNDGTAAITPEHRNREHVVAGWGSDVDFKVDY

SEQ ID NO: 936326 - protein, 82 aa, Homo sapiens
IKYLLRQNRRQLFVVPEREPRRSRRTPVPLVRCQSNRGQLSDGCIPGNVVDCVDLLSHVLLDRIPYQVRLFDVRCCRLDRLP

SEQ ID NO: 936327 - protein, 131 aa, Homo sapiens
  misc_feature (30)..(30): Xaa can be any naturally occurring amino acid
  misc_feature (39)..(39): Xaa can be any naturally occurring amino acid
  misc_feature (50)..(50): Xaa can be any naturally occurring amino acid
  misc_feature (80)..(80): Xaa can be any naturally occurring amino acid
  misc_feature (115)..(115): Xaa can be any naturally occurring amino acid
RLASSPLLSGFPKAAEAMDLEPGSVPALRXVHPRPQPEXTAPGEARQREXATAPRGAKKSNAHSPRTGFPGGKGAFSSHXPGGENEVEGKGDDTTWSMAYGLSEQRGLGSKKQQXRQTADSKGLFRLYARN

SEQ ID NO: 936328 - protein, 78 aa, Homo sapiens
KPLAPSTGKSSQVRQTTRGYATNWKAQEGSQKEANKAVLSLHYSKNHFEGTSYRFQCVTTKSIEARGLEDCRLDHAFI

SEQ ID NO: 936329 - protein, 66 aa, Homo sapiens
TFMPWLTTCISLVQKKGPGTMYEPIKKFLACGNNNHFGQRLSRGQLIFDLVIDHRQGSRFVTVTDC

SEQ ID NO: 936330 - protein, 62 aa, Homo sapiens
SIGINSRSSADIISHVIYRTVVSLSTGPSSPPIPHAGLSNLVPALELSSGSSEYTVTSGRVL

SEQ ID NO: 936331 - protein, 53 aa, Homo sapiens
YSHNHTRLRTYHALSYSGSSRNVYIAGAYSTRAIELRDASTAKGSLGRFQARD

SEQ ID NO: 936332 - protein, 120 aa, Homo sapiens
  misc_feature (41)..(41): Xaa can be any naturally occurring amino acid
  misc_feature (58)..(58): Xaa can be any naturally occurring amino acid
  misc_feature (66)..(66): Xaa can be any naturally occurring amino acid
  misc_feature (77)..(77): Xaa can be any naturally occurring amino acid
  misc_feature (86)..(86): Xaa can be any naturally occurring amino acid
ADFLLLGRRVLGWRGMTDDVTCVDSAATMGLWWRRVCLAAXFHLHQCHLHTTIAKQLXEKAPATRXDLLLCLTRLVXLAASNLLLXIHACPRRPKQNEEREGLLHPWRPVWEDKHKYEEA

SEQ ID NO: 936333 - protein, 128 aa, Homo sapiens
  misc_feature (69)..(69): Xaa can be any naturally occurring amino acid
  misc_feature (74)..(74): Xaa can be any naturally occurring amino acid
  misc_feature (82)..(82): Xaa can be any naturally occurring amino acid
  misc_feature (85)..(85): Xaa can be any naturally occurring amino acid
  misc_feature (90)..(90): Xaa can be any naturally occurring amino acid
  misc_feature (95)..(95): Xaa can be any naturally occurring amino acid
PQKGGDPGPVRGTSVNHRRRSLPNRKSSVPKPPPVFYNKPPEIDITCWDADPVPEEEEGFEGGDYGGAXLGYPXKAAHLHSXSAXTPAVXISQAXRLAPTPDSGPGWGLGRFPTTGPDFYSFSLFLKS

SEQ ID NO: 936334 - protein, 188 aa, Homo sapiens
  misc_feature (18)..(18): Xaa can be any naturally occurring amino acid
  misc_feature (32)..(32): Xaa can be any naturally occurring amino acid
  misc_feature (52)..(52): Xaa can be any naturally occurring amino acid
  misc_feature (58)..(59): Xaa can be any naturally occurring amino acid
  misc_feature (64)..(64): Xaa can be any naturally occurring amino acid
  misc_feature (80)..(80): Xaa can be any naturally occurring amino acid
  misc_feature (84)..(84): Xaa can be any naturally occurring amino acid
  misc_feature (86)..(86): Xaa can be any naturally occurring amino acid
  misc_feature (98)..(98): Xaa can be any naturally occurring amino acid
  misc_feature (124)..(124): Xaa can be any naturally occurring amino acid
  misc_feature (178)..(178): Xaa can be any naturally occurring amino acid
MRECIIQSTLARHGVQIXNACWELYCLEHGIXPMADTSDKTIGGGDDSFNTXFSETGXXKMCPXVFVDLEPTVIDEVRTXTYRXLXHPEQLYHRPKKXLPITMPGGTYTIGKEIIDLVLDRIRXLADQCTGLQGFLVFHSFGGELVLGFTSLLMDVSQLIMQEVQLESLLPGAQVHSXVSLNSSYTNT

SEQ ID NO: 936335 - protein, 56 aa, Homo sapiens
GHPRHRMQGTDRVERSKRLKAASWMPSWALTRLCHSPAEIGDPVGLDFNQNSLLNF

SEQ ID NO: 936336 - protein, 144 aa, Homo sapiens
DGEQDFGTVLIDLGGGQTTTSIIHDRKLKFNTVDLEGGDNVTKDISTVLGTSYANAERIKRDYGFTDPTQTRDDQTFLIDVVGESQPQTFSEKYLSEIIAARLDQFSHVPLNHYRPLTTEYARWFCLTGVMRLPEWLTFETILG

SEQ ID NO: 936337 - protein, 67 aa, Homo sapiens
LTPRRNKSAIMNKRSSRAGIKASRNASSVIIIIGDVIEASCPPFSGERTAFNMASSLFRTNRHDFRR

SEQ ID NO: 936338 - protein, 132 aa, Homo sapiens
  misc_feature (55)..(56): Xaa can be any naturally occurring amino acid
  misc_feature (80)..(80): Xaa can be any naturally occurring amino acid
  misc_feature (91)..(91): Xaa can be any naturally occurring amino acid
  misc_feature (98)..(99): Xaa can be any naturally occurring amino acid
  misc_feature (112)..(113): Xaa can be any naturally occurring amino acid
  misc_feature (130)..(130): Xaa can be any naturally occurring amino acid
MCEREIEHSFSKSKSSTLLLMVSRYGQWRLLRSSESTRPFFARTSRSGSESSSTXXPASPAQTGQQKPGPRARSPARTPXHAHRAAPGARXSGPAPDXXSLDATGAAPRLRXXFPRVEPRDSRLDRPDIXHY

SEQ ID NO: 936339 - protein, 68 aa, Homo sapiens
  misc_feature (29)..(29): Xaa can be any naturally occurring amino acid
  misc_feature (49)..(49): Xaa can be any naturally occurring amino acid
  misc_feature (51)..(51): Xaa can be any naturally occurring amino acid
  misc_feature (61)..(62): Xaa can be any naturally occurring amino acid
  misc_feature (67)..(68): Xaa can be any naturally occurring amino acid
NIKDITSSIHFEAYRVKRLNEGSSAMANXWRRRSQKPRRCRRRPFLSRXPXPKSFPFLPPXXPITPXX

SEQ ID NO: 936340 - protein, 105 aa, Homo sapiens
  misc_feature (22)..(22): Xaa can be any naturally occurring amino acid
  misc_feature (31)..(31): Xaa can be any naturally occurring amino acid
  misc_feature (81)..(81): Xaa can be any naturally occurring amino acid
MKGTPSTTPPTPAAPAESGRRXHRHAAQEGXEGPAGSSSSVYHPAQVRTTAGMHRLPVRQDPQQTYPAPSTWQMELTPQLXLEFPGQEGSGHAGWGLIPLPSARR

SEQ ID NO: 936341 - protein, 140 aa, Homo sapiens
  misc_feature (6)..(6): Xaa can be any naturally occurring amino acid
  misc_feature (17)..(17): Xaa can be any naturally occurring amino acid
  misc_feature (25)..(25): Xaa can be any naturally occurring amino acid
  misc_feature (45)..(45): Xaa can be any naturally occurring amino acid
  misc_feature (62)..(63): Xaa can be any naturally occurring amino acid
  misc_feature (67)..(67): Xaa can be any naturally occurring amino acid
  misc_feature (114)..(114): Xaa can be any naturally occurring amino acid
MASSDXQVKELEKLPSXKAFEHDSXPRSKESVQNSPFPPKKKDLXWRKFRRNEKPAEERHKXXEAEXLKQLAEKLRAPRKKCFQKAIEENNNFSKMAEEKLDPQNGSYIKRPEXHKWLPNWNRLREKDKHIEEVRKTKES

SEQ ID NO: 936342 - protein, 38 aa, Homo sapiens
  misc_feature (5)..(5): Xaa can be any naturally occurring amino acid
  misc_feature (35)..(35): Xaa can be any naturally occurring amino acid
MSASXIFLRTTACGIVPAGVMVVSTANRRHTAAPXRLY

SEQ ID NO: 936343 - protein, 37 aa, Homo sapiens
  misc_feature (16)..(17): Xaa can be any naturally occurring amino acid
  misc_feature (19)..(19): Xaa can be any naturally occurring amino acid
QLLQEESRLAKKKLRXXAXVVEAEKECNLELSEKLKG

SEQ ID NO: 936344 - protein, 105 aa, Homo sapiens
  misc_feature (19)..(19): Xaa can be any naturally occurring amino acid
  misc_feature (56)..(56): Xaa can be any naturally occurring amino acid
  misc_feature (62)..(62): Xaa can be any naturally occurring amino acid
  misc_feature (93)..(93): Xaa can be any naturally occurring amino acid
  misc_feature (98)..(98): Xaa can be any naturally occurring amino acid
SAQDSQHVRDCSCRSRCRXPARKAPVKKKAAKKAGGTPRKVPGSPVSELITKAVAXLKSVGXFSGCSEKSVGCRGYDVGEKQQPYSNLVSRAXVSKGXSGSKRKG

SEQ ID NO: 936345 - protein, 95 aa, Homo sapiens
  misc_feature (7)..(7): Xaa can be any naturally occurring amino acid
  misc_feature (39)..(39): Xaa can be any naturally occurring amino acid
VAKKFRXNPSSAGHWATGPAGINMEGKEDPFSGVTEYGXIKTGHSRKRQHRALNGTRWRALIGYIPQTFNRMSVFIEKTAQCHHAAVFRTLPFQT

SEQ ID NO: 936346 - protein, 108 aa, Homo sapiens
  misc_feature (12)..(12): Xaa can be any naturally occurring amino acid
  misc_feature (37)..(39): Xaa can be any naturally occurring amino acid
  misc_feature (55)..(56): Xaa can be any naturally occurring amino acid
  misc_feature (59)..(59): Xaa can be any naturally occurring amino acid
LDGIPAGFLLWXWQVAWYYAQGRSAWGKGQPGRGPVXXXLLNFLEGVIGWKEARXXLGXDCCAPHSLTAQSRLCWQEALRLPFLCIEKQCLPIYFAFNSKRSSGKTCG

SEQ ID NO: 936347 - protein, 109 aa, Homo sapiens
  misc_feature (7)..(7): Xaa can be any naturally occurring amino acid
  misc_feature (9)..(9): Xaa can be any naturally occurring amino acid
FLFFIEXEXALSLRLECGGTIAAHCKLRLPGSRHSPASASPSSWDYRRPPPRLANFFVFLVETGFHRGLNLLTPRSACLGLPKLWDYKHEPPHPAHFSFSIFWICVSCR

SEQ ID NO: 936348 - protein, 43 aa, Homo sapiens
KTDLNHENLKGGDDLDPNYVLSSRVRTGRSIKGYTLPPHCSQW

SEQ ID NO: 936349 - protein, 35 aa, Homo sapiens
  misc_feature (24)..(24): Xaa can be any naturally occurring amino acid
  misc_feature (33)..(33): Xaa can be any naturally occurring amino acid
MHRGSPSNVSAYPECPDVTRTTHXNTTETIHIXHF

SEQ ID NO: 936350 - protein, 46 aa, Homo sapiens
  misc_feature (14)..(14): Xaa can be any naturally occurring amino acid
  misc_feature (46)..(46): Xaa can be any naturally occurring amino acid
DLMVDVERSKLLLXHMDKKQRNFDKIMAEWKQKYEESQSEHGVLAX

SEQ ID NO: 936351 - protein, 75 aa, Homo sapiens
MYWVMAKVRPRILHQAVHSPKMPKAEGSPEATPSPSRKHGDFHQVARGVKPKVSMNSKKRIRYPGGGPLEHSGIR

SEQ ID NO: 936352 - protein, 154 aa, Homo sapiens
  misc_feature (7)..(8): Xaa can be any naturally occurring amino acid
  misc_feature (22)..(22): Xaa can be any naturally occurring amino acid
  misc_feature (44)..(44): Xaa can be any naturally occurring amino acid
  misc_feature (46)..(46): Xaa can be any naturally occurring amino acid
  misc_feature (55)..(55): Xaa can be any naturally occurring amino acid
  misc_feature (73)..(73): Xaa can be any naturally occurring amino acid
  misc_feature (75)..(75): Xaa can be any naturally occurring amino acid
  misc_feature (92)..(92): Xaa can be any naturally occurring amino acid
  misc_feature (122)..(122): Xaa can be any naturally occurring amino acid
  misc_feature (142)..(142): Xaa can be any naturally occurring amino acid
  misc_feature (146)..(146): Xaa can be any naturally occurring amino acid
AVPAHAXXPPAEATGPIGEWHXGARTGRAQLELDEDEASCCRWXRXRRGPRAGCXHTRQASAPGVVLCDPVLXLXATTWSSLLLAAGGHTPXSYSVLLQGLSLLTSCLAWYTGVLTHGALWXCPLWGRLSSDPSGSTTLTRXYHTXDFIETTGT

SEQ ID NO: 936353 - protein, 76 aa, Homo sapiens
  misc_feature (10)..(10): Xaa can be any naturally occurring amino acid
  misc_feature (25)..(25): Xaa can be any naturally occurring amino acid
  misc_feature (32)..(32): Xaa can be any naturally occurring amino acid
  misc_feature (56)..(56): Xaa can be any naturally occurring amino acid
  misc_feature (63)..(63): Xaa can be any naturally occurring amino acid
WMDPAEGTPXPRGKSCARPRPTAQXTPLHNGXSLCRPRLECNGAISAHCNLRLRVXGEASWTXLGRVGTWRTFLSS

SEQ ID NO: 936354 - protein, 141 aa, Homo sapiens
  misc_feature (8)..(8): Xaa can be any naturally occurring amino acid
  misc_feature (130)..(130): Xaa can be any naturally occurring amino acid
  misc_feature (134)..(134): Xaa can be any naturally occurring amino acid
  misc_feature (140)..(140): Xaa can be any naturally occurring amino acid
GRALGCEXWGVCREPGPGVPRGASWGGLHSRILPMCPELMCQPCESALTPWAVRRASRGDVEGRRQLCREPLQAVEGPSCDVSCPPCFHLWCLLASCVQGPFACSAMFLHLSFAFCKLLGSFSFDGIGTXIYPXCWARVXT

SEQ ID NO: 936355 - protein, 43 aa, Homo sapiens
  misc_feature (12)..(12): Xaa can be any naturally occurring amino acid
  misc_feature (23)..(23): Xaa can be any naturally occurring amino acid
MTGCSGGARAEXALGLGNAVASXGFGSGIRGRGRALDGAGARR

SEQ ID NO: 936356 - protein, 117 aa, Homo sapiens
  misc_feature (81)..(81): Xaa can be any naturally occurring amino acid
SQCAGAEKESLTFLANLLGASVQEYFVRKSNAKKGMFASDSSYTERTWWLLNMKPAKKWNLPAVTIAWLLELPRTGKESRXKGHFLIENSTKEEPKFGKPEITKWNQSKFRYCRASL

SEQ ID NO: 936357 - protein, 33 aa, Homo sapiens
SYFSRDVARKVTGEVTDPSGKVHFALLGTWDEK

SEQ ID NO: 936358 - protein, 32 aa, Homo sapiens
  misc_feature (28)..(28): Xaa can be any naturally occurring amino acid
LKVAPETKVKSSYHQAGSQGPQTFRQAXGKYI

SEQ ID NO: 936359 - protein, 132 aa, Homo sapiens
  misc_feature (19)..(20): Xaa can be any naturally occurring amino acid
  misc_feature (22)..(23): Xaa can be any naturally occurring amino acid
  misc_feature (101)..(101): Xaa can be any naturally occurring amino acid
  misc_feature (110)..(110): Xaa can be any naturally occurring amino acid
  misc_feature (117)..(117): Xaa can be any naturally occurring amino acid
  misc_feature (132)..(132): Xaa can be any naturally occurring amino acid
RHRTGFIGTALTQLLNARXXKXXWSPESPGPADSRGMSSLHRGCRAAMPPSTWAGENILNPLRRWNETFQKEVLGQPPRRPPNCWVKHSPKAPQPPKGWGXLVHRVLGFXYQAQFLXCGSYWIEGQAQGRGX

SEQ ID NO: 936360 - protein, 137 aa, Homo sapiens
  misc_feature (2)..(2): Xaa can be any naturally occurring amino acid
  misc_feature (28)..(28): Xaa can be any naturally occurring amino acid
  misc_feature (34)..(34): Xaa can be any naturally occurring amino acid
  misc_feature (52)..(52): Xaa can be any naturally occurring amino acid
  misc_feature (60)..(60): Xaa can be any naturally occurring amino acid
  misc_feature (72)..(72): Xaa can be any naturally occurring amino acid
  misc_feature (109)..(109): Xaa can be any naturally occurring amino acid
  misc_feature (116)..(116): Xaa can be any naturally occurring amino acid
  misc_feature (126)..(126): Xaa can be any naturally occurring amino acid
  misc_feature (133)..(133): Xaa can be any naturally occurring amino acid
  misc_feature (136)..(136): Xaa can be any naturally occurring amino acid
AXSGSRVRPRHAASQDRCVVTFRRRGPXPEAREXPPDVQAAEEEKEMDLPEXGFEGLLRXILSMVNTDDVNXIILAQKNMLDRFEKTNEMLLNFNNPVQVPGLQQMSEXFLAPHEXPSVEIKPGPXTRFFGVXGRXK

SEQ ID NO: 936361 - protein, 136 aa, Homo sapiens
  misc_feature (37)..(37): Xaa can be any naturally occurring amino acid
  misc_feature (48)..(48): Xaa can be any naturally occurring amino acid
  misc_feature (52)..(52): Xaa can be any naturally occurring amino acid
  misc_feature (55)..(55): Xaa can be any naturally occurring amino acid
  misc_feature (72)..(72): Xaa can be any naturally occurring amino acid
  misc_feature (110)..(110): Xaa can be any naturally occurring amino acid
PTSKRGADVWAPRTGKDLLARACAHRLRHLPKAGWPXWCRCSLEMVQXSPGXFAXQGESASIIFIDELDASXKRFDSEKAGDREVQRTMLELLNQLDGFQPTPKFKVIAXTNRVDILDPGLLRSGRLDRKIEFPMP

SEQ ID NO: 936362 - protein, 88 aa, Homo sapiens
  misc_feature (84)..(84): Xaa can be any naturally occurring amino acid
  misc_feature (88)..(88): Xaa can be any naturally occurring amino acid
SSTANAKNHFTNPNSQISARYNILILKPAYAYYIEHIKAAAPGPGVQASVMLAGRPAETVQSLASPQIFRGPKDHGNSWGNTVXCGSX

SEQ ID NO: 936363 - protein, 161 aa, Homo sapiens
  misc_feature (22)..(22): Xaa can be any naturally occurring amino acid
  misc_feature (24)..(24): Xaa can be any naturally occurring amino acid
  misc_feature (53)..(53): Xaa can be any naturally occurring amino acid
  misc_feature (57)..(57): Xaa can be any naturally occurring amino acid
  misc_feature (67)..(67): Xaa can be any naturally occurring amino acid
  misc_feature (92)..(92): Xaa can be any naturally occurring amino acid
  misc_feature (110)..(110): Xaa can be any naturally occurring amino acid
  misc_feature (127)..(127): Xaa can be any naturally occurring amino acid
  misc_feature (130)..(130): Xaa can be any naturally occurring amino acid
  misc_feature (159)..(159): Xaa can be any naturally occurring amino acid
QLQDRADAAAGDQPHAHTRRGXAXCTWRPSATTTRCWRRLLSRAFDVNTPPGXEPRXLLRRPAQSCXDFAVVNNNVYATELLLQHGADPNRXVISPLLVAIRHGLPAHNXAAAGPRREHRRYIATHXTAXPHIMFAMKCCRCSSSHGTGLRGEPVLMLXGK

SEQ ID NO: 936364 - protein, 187 aa, Homo sapiens
  misc_feature (1)..(1): Xaa can be any naturally occurring amino acid
  misc_feature (11)..(11): Xaa can be any naturally occurring amino acid
  misc_feature (27)..(27): Xaa can be any naturally occurring amino acid
  misc_feature (43)..(43): Xaa can be any naturally occurring amino acid
  misc_feature (56)..(56): Xaa can be any naturally occurring amino acid
  misc_feature (76)..(76): Xaa can be any naturally occurring amino acid
  misc_feature (126)..(126): Xaa can be any naturally occurring amino acid
  misc_feature (155)..(155): Xaa can be any naturally occurring amino acid
  misc_feature (171)..(171): Xaa can be any naturally occurring amino acid
  misc_feature (180)..(180): Xaa can be any naturally occurring amino acid
  misc_feature (187)..(187): Xaa can be any naturally occurring amino acid
XGHNGAQAEMXWSLKAPLPQGMAAALXATWFNQPARKIRRRKXGKPRRAAIAPRPXVRITIQAQSCACPTVRYHTXGAAPAGLSSMEELRVAGIHKKVARTIGISVDPRRRNKSTESLQANVQRLXEYRSKLILFPRKPSAPKKGDSSAEGLETXPPSLTGPVIARSERSXRMEEASSSXLRERRFX

SEQ ID NO: 936365 - protein, 38 aa, Homo sapiens
  misc_feature (19)..(19): Xaa can be any naturally occurring amino acid
PGQERLAYSLQKLEEAEKXLTESERGMKVIENRAMKDE

SEQ ID NO: 936366 - protein, 166 aa, Homo sapiens
  misc_feature (2)..(2): Xaa can be any naturally occurring amino acid
  misc_feature (26)..(26): Xaa can be any naturally occurring amino acid
  misc_feature (39)..(40): Xaa can be any naturally occurring amino acid
  misc_feature (72)..(72): Xaa can be any naturally occurring amino acid
  misc_feature (156)..(156): Xaa can be any naturally occurring amino acid
TXNPIGVELEVLDGHDPDPGGMLCRXARAHTSSRPGARXXRVGRVRGASFLPPEPGPFPGIVDMSELEVACXEYRASLLAGKGFAVMALAYYNYEDLPKTMETLHLEYFEEAMNYLLSHPRGKRSRSWAAWNFQRGLALPFHGLFPEGHYGCCRHXGSVAMLGDLR

SEQ ID NO: 936367 - protein, 67 aa, Homo sapiens
  misc_feature (3)..(3): Xaa can be any naturally occurring amino acid
VKXPASLFPDSLAPFFFPKQALSILGPLHSSTTYLSPGFQVAAFSIQMAASQGPFSNIIKASIPVTL

SEQ ID NO: 936368 - protein, 111 aa, Homo sapiens
  misc_feature (11)..(11): Xaa can be any naturally occurring amino acid
  misc_feature (18)..(18): Xaa can be any naturally occurring amino acid
  misc_feature (38)..(38): Xaa can be any naturally occurring amino acid
  misc_feature (104)..(104): Xaa can be any naturally occurring amino acid
TISHIQSPGMXKGLNVEXRGGILKSTSKKCCSVWEVGXRLQSQRFGKPRQVDHLRSGVRDQPEQHGETPSLLKIQTLAEHGGGILWSQLLGRLRHLNENRLDPXGGGCSEQ

SEQ ID NO: 936369 - protein, 142 aa, Homo sapiens
  misc_feature (4)..(5): Xaa can be any naturally occurring amino acid
GDGXXSLLPRLECSGEISAHCNLRLLGSSDSPASASPVAGITGACHHAQIFFVFLVETGFCCVIQAVLELLTSGDPPASASQSAGITDVSHHARPHFKIFWQRWGSCYGCPGLISNTWGFKESLPLGAFAKLLGIYRALNSP

SEQ ID NO: 936370 - protein, 115 aa, Homo sapiens
SLRTFCPRSSPVTASESLWVCSAFTLPLCVDVDGTSGRMCSPRGPPGVFPPVILWKERWRVCVPRRVPPGEFSDPVVMVYFSQGPKGFRHIGHWGPRGLDGPPEFEYPLPGDTAG

SEQ ID NO: 936371 - protein, 70 aa, Homo sapiens
  misc_feature (4)..(4): Xaa can be any naturally occurring amino acid
MPWXGRADRSSLSEKPPGPRRDVGPLVWGAWGGHCWCCCFWLGGPWPSSMHEGEEEEEEALEEQEEEPVH

SEQ ID NO: 936372 - protein, 61 aa, Homo sapiens
  misc_feature (26)..(26): Xaa can be any naturally occurring amino acid
  misc_feature (58)..(58): Xaa can be any naturally occurring amino acid
ALTSRAAIRTTKECSSNHLLPPRGHXRADSGARTRFLLCVPCGKDKESGQGGMTLIDXKAS

SEQ ID NO: 936373 - protein, 126 aa, Homo sapiens
MCFSQMWVIYYVDNMVVVSTLFSVSSLSYAPCCRPTISPVLLTCDVSTLVVGFFIREHSLELFLFMTVSRCCCLPSRSLLSLCFSKMYHTLCVMTRRGYLDVWCGGLWGLPPLYCSHEIIDCVYLF

SEQ ID NO: 936374 - protein, 88 aa, Homo sapiens
  misc_feature (1)..(1): Xaa can be any naturally occurring amino acid
  misc_feature (38)..(38): Xaa can be any naturally occurring amino acid
  misc_feature (42)..(42): Xaa can be any naturally occurring amino acid
  misc_feature (65)..(65): Xaa can be any naturally occurring amino acid
  misc_feature (76)..(76): Xaa can be any naturally occurring amino acid
  misc_feature (84)..(84): Xaa can be any naturally occurring amino acid
XLATRTCFCARVVMEALRCIAATTPDHGRHRSMLLLPXLLFXLPAGAVRAGRQRRGPDSRRGVHXYAGGQVYRERXPGIGRDTXVHLS

SEQ ID NO: 936375 - protein, 118 aa, Homo sapiens
  misc_feature (4)..(4): Xaa can be any naturally occurring amino acid
  misc_feature (12)..(12): Xaa can be any naturally occurring amino acid
  misc_feature (15)..(15): Xaa can be any naturally occurring amino acid
PPGXFSLNLSRXTKXSGTRVKARGTSTETLKGHMGTHIPANTHTDAQTGIRVNTQRHGWVHTQKCRHSQGCTNTRATHMQDDANVHAGTWVDLECAWTPLGTGRHRPRPSDTQRTHTC

SEQ ID NO: 936376 - protein, 44 aa, Homo sapiens
  misc_feature (24)..(24): Xaa can be any naturally occurring amino acid
TAGPRSVPRAPATAGPQISAQGRXATAGPQISAQGPPATAGPQI

SEQ ID NO: 936377 - protein, 36 aa, Homo sapiens
  misc_feature (19)..(19): Xaa can be any naturally occurring amino acid
  misc_feature (25)..(25): Xaa can be any naturally occurring amino acid
FSKKDWYDVKAPAMFNIRXIGRRSXQDPRNQIASDV

SEQ ID NO: 936378 - protein, 33 aa, Homo sapiens
  misc_feature (24)..(24): Xaa can be any naturally occurring amino acid
  misc_feature (28)..(28): Xaa can be any naturally occurring amino acid
MNDTVTIRTEKVMTNRLLQRKQMXIDVXTREAT

SEQ ID NO: 936379 - protein, 51 aa, Homo sapiens
  misc_feature (27)..(27): Xaa can be any naturally occurring amino acid
  misc_feature (31)..(31): Xaa can be any naturally occurring amino acid
LLKAKGVKVVACLSVNDAFVTGEWGRXQRRXKVRLLADPTVAFGKETDLLL

SEQ ID NO: 936380 - protein, 105 aa, Homo sapiens
  misc_feature (26)..(26): Xaa can be any naturally occurring amino acid
  misc_feature (30)..(31): Xaa can be any naturally occurring amino acid
  misc_feature (62)..(62): Xaa can be any naturally occurring amino acid
  misc_feature (71)..(71): Xaa can be any naturally occurring amino acid
  misc_feature (96)..(96): Xaa can be any naturally occurring amino acid
AEQCLLHFRPPAAGAAADRERAKRLXQLAXXGGGPLRTPPDSPLPAASHGTHGQTCARQCVXSSYADLGKXARDIFNKGFGFGLVKLDVKTKSCSXVEFSTVRFI

SEQ ID NO: 936381 - protein, 85 aa, Homo sapiens
  misc_feature (9)..(9): Xaa can be any naturally occurring amino acid
  misc_feature (38)..(39): Xaa can be any naturally occurring amino acid
  misc_feature (55)..(56): Xaa can be any naturally occurring amino acid
  misc_feature (71)..(71): Xaa can be any naturally occurring amino acid
  misc_feature (75)..(76): Xaa can be any naturally occurring amino acid
  misc_feature (83)..(83): Xaa can be any naturally occurring amino acid
SGLATKCKXLPRGDSQRKPPLNTRSQAPLLRWVLTLSXXVATVACRALCNVNAGXXASQGHELCPVEGLLXREGXXLAGFLTXGH

SEQ ID NO: 936382 - protein, 70 aa, Homo sapiens
  misc_feature (5)..(5): Xaa can be any naturally occurring amino acid
  misc_feature (21)..(21): Xaa can be any naturally occurring amino acid
  misc_feature (27)..(27): Xaa can be any naturally occurring amino acid
  misc_feature (48)..(48): Xaa can be any naturally occurring amino acid
ATLLXLSSVGSAGSRAYSGLXDNALRXGATAPARYTRTNFPTSPLQKXPVGRRSAEWRSYNPTATIPGST

SEQ ID NO: 936383 - protein, 145 aa, Homo sapiens
  misc_feature (30)..(31): Xaa can be any naturally occurring amino acid
  misc_feature (34)..(34): Xaa can be any naturally occurring amino acid
  misc_feature (55)..(55): Xaa can be any naturally occurring amino acid
  misc_feature (86)..(86): Xaa can be any naturally occurring amino acid
  misc_feature (110)..(110): Xaa can be any naturally occurring amino acid
  misc_feature (124)..(124): Xaa can be any naturally occurring amino acid
  misc_feature (129)..(129): Xaa can be any naturally occurring amino acid
  misc_feature (143)..(143): Xaa can be any naturally occurring amino acid
VDSGGGGEERHEAELVRVLTVLSICLSAVXXRAXGQKEAADRGQEAGGPLSIKSXKGDVLHMHYTGKLEDGTEFDSSLPRTSPLSXPWHRQVIKGWDQGLLGMCEGEKRXWLIPSELGYGERGXPKDSXRSTWCSRWTAQNRXTN

SEQ ID NO: 936384 - protein, 104 aa, Homo sapiens
  misc_feature (30)..(30): Xaa can be any naturally occurring amino acid
  misc_feature (63)..(63): Xaa can be any naturally occurring amino acid
  misc_feature (73)..(73): Xaa can be any naturally occurring amino acid
  misc_feature (96)..(96): Xaa can be any naturally occurring amino acid
  misc_feature (99)..(100): Xaa can be any naturally occurring amino acid
  misc_feature (102)..(102): Xaa can be any naturally occurring amino acid
LQTRTPRHRALSAAPSHSSRASSGQHGKNXSLQRLSGASSPDCCLQKYAGKDGYNYTLSRQSXKLHESELAAXQRTEGPGVCDRMMKKLDTNSDGXLDXXNXLI

SEQ ID NO: 936385 - protein, 52 aa, Homo sapiens
  misc_feature (15)..(16): Xaa can be any naturally occurring amino acid
  misc_feature (45)..(45): Xaa can be any naturally occurring amino acid
KRTTTMQVPPRGALXXSPVRLKTEAPFYPTRHIPAPQITGLIVPXRALRVGL

SEQ ID NO: 936386 - protein, 155 aa, Homo sapiens
SLSQRQKRPSGRPGPSGLFPGFLAGSTSPHAASRRGGTEAAALQGAELALLQSHQGIIADMRPQGWGLAIPGLLIFVVFLSRTTGLRDALVQCVKNNPPPTLRTFQLCTKRHLGRECGICGCPGDVVPPPPRTPAGAHFVASQDEPLSQSDPRSL

SEQ ID NO: 936387 - protein, 93 aa, Homo sapiens
  misc_feature (22)..(22): Xaa can be any naturally occurring amino acid
  misc_feature (24)..(24): Xaa can be any naturally occurring amino acid
  misc_feature (75)..(75): Xaa can be any naturally occurring amino acid
  misc_feature (77)..(77): Xaa can be any naturally occurring amino acid
  misc_feature (88)..(88): Xaa can be any naturally occurring amino acid
ATNVGDEGGFDPTSWRTMRVSXEXLGARPLALHMGRGGCRQGALESQVLSGPPPALELLKTAIQGGLLPRQGCDXHXCWQHLSSIRNXEVRSL

SEQ ID NO: 936388 - protein, 115 aa, Homo sapiens
LARQMGKKICVLFIDWEAQFSCTINYVQSLRELYTDVIEEFYWVRSRLRRKIPFHNTNPNGSAGNLMSNGYVNLPKMRYTDPDFFCFYQPGMTFGTNLYVSFARMGFHKKRSGGE

SEQ ID NO: 936389 - protein, 116 aa, Homo sapiens
  misc_feature (2)..(3): Xaa can be any naturally occurring amino acid
  misc_feature (21)..(21): Xaa can be any naturally occurring amino acid
  misc_feature (47)..(47): Xaa can be any naturally occurring amino acid
  misc_feature (75)..(75): Xaa can be any naturally occurring amino acid
  misc_feature (100)..(100): Xaa can be any naturally occurring amino acid
  misc_feature (107)..(107): Xaa can be any naturally occurring amino acid
PXXRSGLSGGQEDGGLWADEXPGTILGVTKGSITSSVLLAGGATGSXACHAATGLATHRDHPHTAAYLQELGRMXKWFLEAPDETTLKELAETLQQKEHXTTLFWFXANQRLFAIC

SEQ ID NO: 936390 - protein, 52 aa, Homo sapiens
YHGPPDGPGRCLLTGLVASGLRTRSSVLRATMTDTVLQQLLHVAPCRTVSCV

SEQ ID NO: 936391 - protein, 78 aa, Homo sapiens
  misc_feature (35)..(35): Xaa can be any naturally occurring amino acid
QVHPPGPRELRVYSLLLELSPAAFRSCSVPKGSAXEVNAVRRDGGLRQSVIRNTARHAVRLAHQSQSNLRYIYMRYSN

SEQ ID NO: 936392 - protein, 101 aa, Homo sapiens
  misc_feature (11)..(11): Xaa can be any naturally occurring amino acid
  misc_feature (13)..(13): Xaa can be any naturally occurring amino acid
  misc_feature (27)..(27): Xaa can be any naturally occurring amino acid
  misc_feature (97)..(97): Xaa can be any naturally occurring amino acid
ESYLQWLRDQXTXARRSEAPAAPESQXHMHPRPQQQPPVAWRRWTSRSPRQRCQPRHLEHPELHAELGMKPLSPGTVLALAKTFLRPLWARYKASQXLGKG

SEQ ID NO: 936393 - protein, 190 aa, Homo sapiens
  misc_feature (56)..(56): Xaa can be any naturally occurring amino acid
HRRFSEEMYTQVVAQNCLWTHLGPLSGWCSFSKGGGGNKNPWLCNTPFSRELDHTXSHHGLTRLRVPYSPLVHTGPLWGDTPTYLREPLSPRRDSRGPITTSSCGTQRGAQRYPPTFPPAPHGRYPWSQSTAHNGRFALYCFFVHAMMEILHSHTLAHWRATPSTPLRYHAPGVFPRKAELHSGSPAVRL

SEQ ID NO: 936394 - protein, 103 aa, Homo sapiens
  misc_feature (67)..(67): Xaa can be any naturally occurring amino acid
MDIHIDIAIIFIGILICVWCRLRYRHFAARAVSIAACIGAHHASNLSGQSQGRCGKTTLTLVLRQRXGRRRPRVTRESTPNPMRFIAGWGASANEQGKALRFD

SEQ ID NO: 936395 - protein, 146 aa, Homo sapiens
  misc_feature (108)..(108): Xaa can be any naturally occurring amino acid
KETLDWFIRLHQPTRPIVPYWQALAEFRDLGRRHAGTVARATLTGRRPDRYGQRVIASSPGRSGAGGRAARRPSEYVRPRDPAGRAIFPAEIDALRKMPKSSLRPAPXQKRPAENGIIMGIGEQIDAQPVRLDFRLAHQATVFADL

SEQ ID NO: 936396 - protein, 47 aa, Homo sapiens
  misc_feature (47)..(47): Xaa can be any naturally occurring amino acid
KYCQAPRQVGDSMDRSILRPGERPGLQLRNTSRSEEDGTGTWPLPGX

SEQ ID NO: 936397 - protein, 132 aa, Homo sapiens
  misc_feature (46)..(46): Xaa can be any naturally occurring amino acid
  misc_feature (98)..(98): Xaa can be any naturally occurring amino acid
  misc_feature (102)..(102): Xaa can be any naturally occurring amino acid
  misc_feature (112)..(112): Xaa can be any naturally occurring amino acid
  misc_feature (115)..(115): Xaa can be any naturally occurring amino acid
  misc_feature (117)..(117): Xaa can be any naturally occurring amino acid
  misc_feature (120)..(120): Xaa can be any naturally occurring amino acid
  misc_feature (122)..(122): Xaa can be any naturally occurring amino acid
  misc_feature (130)..(130): Xaa can be any naturally occurring amino acid
KCREKMDELQFLSGWRGWCVCVPTGPGATSAEGTLRGRQARGPSGXGGRPRIPRPRRAGSGLSGRACGLGMCGAWTCLRISRPRTNQVALFRAKAPAXKRLXFEVRIPCLGXGVXVXGGXGXPQAQGFGXLS

SEQ ID NO: 936398 - protein, 130 aa, Homo sapiens
  misc_feature (30)..(30): Xaa can be any naturally occurring amino acid
  misc_feature (105)..(105): Xaa can be any naturally occurring amino acid
  misc_feature (120)..(120): Xaa can be any naturally occurring amino acid
  misc_feature (128)..(128): Xaa can be any naturally occurring amino acid
LRNLRGYYNQSEAGSHTLQWMYGCDLGPDXPSSAGYDQSAYDGKDYIALNEDLRSWTAADTAGQITQRKWEAARELDKWRAYLEGTCVEVAPQIPWKNGKETLQXRKHPKTHVPTIPVSXHEATLRCXGP

SEQ ID NO: 936399 - protein, 89 aa, Homo sapiens
  misc_feature (34)..(34): Xaa can be any naturally occurring amino acid
  misc_feature (62)..(62): Xaa can be any naturally occurring amino acid
  misc_feature (82)..(82): Xaa can be any naturally occurring amino acid
VVVLRSAGCCGDQSGSQAGLAGPGGRNTSHGVFXRLRRLFDLFFFPAERDPESPVVRLATRXLRDIWPPLPQLEAPLVEALXPYEIHTV

SEQ ID NO: 936400 - protein, 47 aa, Homo sapiens
CELYGDAALAEEFIGGDRTDNENGRLSRLELAHGGTCFLKRLNIWRW

SEQ ID NO: 936401 - protein, 101 aa, Homo sapiens
  misc_feature (23)..(24): Xaa can be any naturally occurring amino acid
  misc_feature (91)..(91): Xaa can be any naturally occurring amino acid
RKDNTTVTRLLNINPNKTSASGXXAPTCDSGAAQEGTTVLLFQFGMNASSKPGFSLQKEIQFEYKFLSLTARDPLPFKKLANGFPLAKRLXGPQVREISLQ

SEQ ID NO: 936402 - protein, 57 aa, Homo sapiens
  misc_feature (53)..(53): Xaa can be any naturally occurring amino acid
WRYGCTGDIAPVSFTLSDAACNALSGLTFLFDHCFITTRPPFVYALRNQAVVXLRGE

SEQ ID NO: 936403 - protein, 117 aa, Homo sapiens
  misc_feature (56)..(56): Xaa can be any naturally occurring amino acid
  misc_feature (87)..(87): Xaa can be any naturally occurring amino acid
  misc_feature (100)..(100): Xaa can be any naturally occurring amino acid
AAAVAGRAPGPSALRRCSPGGGHGGGRAAARPLLPAGALRGSGHGSDPIFTLAPPXHCHYGAFPPNASGGSSVPMPAGQVASAALAXSAASRVAKNKKPXCSGFARRTSTIAQGLGL

SEQ ID NO: 936404 - protein, 93 aa, Homo sapiens
  misc_feature (24)..(24): Xaa can be any naturally occurring amino acid
LRVYLEPSESSMDQEPGWPMDFQXKAPLWGCFWGETHSWTSLSDPCNVSQQPNYPTNALPHKEIGNNGNFTGRNQYWITYTRLTGGQAPSNYP

SEQ ID NO: 936405 - protein, 66 aa, Homo sapiens
  misc_feature (60)..(60): Xaa can be any naturally occurring amino acid
TERKILGYIQLRKGPNLVGPYGYLQPFADAIKLFTKEPYNPPHLPSPSTSPPDLSFTIVXYYEPPA

SEQ ID NO: 936406 - protein, 134 aa, Homo sapiens
  misc_feature (22)..(22): Xaa can be any naturally occurring amino acid
  misc_feature (42)..(42): Xaa can be any naturally occurring amino acid
  misc_feature (72)..(72): Xaa can be any naturally occurring amino acid
  misc_feature (95)..(95): Xaa can be any naturally occurring amino acid
PRVRQWLRLVKAGFGELTAPRXVFPSIVGRPRHQGVMVGMGXKDSYVGDEAQSKRGILTLKYPIEHGIITNXDDMEKIWHHTFLQLSFRVGSRGXPTLLTEAPLNPKANREKIDQIMFETFNVPAMYVAIQAVL

SEQ ID NO: 936407 - protein, 126 aa, Homo sapiens
  misc_feature (15)..(15): Xaa can be any naturally occurring amino acid
  misc_feature (18)..(19): Xaa can be any naturally occurring amino acid
  misc_feature (57)..(57): Xaa can be any naturally occurring amino acid
  misc_feature (74)..(74): Xaa can be any naturally occurring amino acid
MAALLAAYEPERPAXCGXXSGRGAVRMLVPPGGPAHHPVGPTVVQTSMSRSQVALLXMSLLLMLLLYVGLPGPXEQTSCLWGDPNVTVLAGLTPGNSPIFYRQVLPLNQAHRVEVVLLHGKGFNSH

SEQ ID NO: 936408 - protein, 122 aa, Homo sapiens
  misc_feature (29)..(30): Xaa can be any naturally occurring amino acid
  misc_feature (85)..(85): Xaa can be any naturally occurring amino acid
  misc_feature (118)..(118): Xaa can be any naturally occurring amino acid
  misc_feature (122)..(122): Xaa can be any naturally occurring amino acid
MAVSDAMHPDHFFHVRVMARRKGEDTASXXAPNNRWRMELSHMKRLPPVLPAAPMTWRRRPWPQTMESGGVAGIAAVQPWRPYLXRETEEFNISLDLDFILSNSADPSSGVSGRQRVXVSVX

SEQ ID NO: 936409 - protein, 107 aa, Homo sapiens
  misc_feature (6)..(6): Xaa can be any naturally occurring amino acid
  misc_feature (15)..(15): Xaa can be any naturally occurring amino acid
  misc_feature (74)..(74): Xaa can be any naturally occurring amino acid
  misc_feature (80)..(80): Xaa can be any naturally occurring amino acid
RPSWVXAPELYHQLXSRPSDMEDLAAWSRPQSPPVAAPFLAELREAVGLRSFVNPVPLRPPPRRKLRKPRALSXPRRRRXFRFRLLAPKASKLLCRATLPTVKPQAP

SEQ ID NO: 936410 - protein, 63 aa, Homo sapiens
  misc_feature (54)..(54): Xaa can be any naturally occurring amino acid
MVLTTNYDNLHGGLCDRQNKPMESLDLKDKTKVGLGVREAICDRQNKPMESLDXKDKTKVWAG

SEQ ID NO: 936411 - protein, 49 aa, Homo sapiens
  misc_feature (40)..(40): Xaa can be any naturally occurring amino acid
MATYRQTQLVGEQTFQLAERNVRRLCQGLGRDLATQLLIXADSARSTLA

SEQ ID NO: 936412 - protein, 33 aa, Homo sapiens
PLDKKQRNFDKILAEWKQKCEETHAELEASQKE

SEQ ID NO: 936413 - protein, 55 aa, Homo sapiens
  misc_feature (27)..(27): Xaa can be any naturally occurring amino acid
MCDEDETTALVCDNGSAWGKRLRGNDXPSGPCSVIVGAPTQGVMVGMGQKDSTWR

SEQ ID NO: 936414 - protein, 45 aa, Homo sapiens
  misc_feature (20)..(20): Xaa can be any naturally occurring amino acid
  misc_feature (24)..(24): Xaa can be any naturally occurring amino acid
  misc_feature (45)..(45): Xaa can be any naturally occurring amino acid
APTWCWMARSAAVILTRARXIDDXLGVCWQEVGADLVCSHPRVDX

SEQ ID NO: 936415 - protein, 99 aa, Homo sapiens
  misc_feature (2)..(2): Xaa can be any naturally occurring amino acid
  misc_feature (13)..(14): Xaa can be any naturally occurring amino acid
  misc_feature (64)..(64): Xaa can be any naturally occurring amino acid
  misc_feature (92)..(92): Xaa can be any naturally occurring amino acid
LXLPKIQKTSRAXXRAPKAQPLSSARAGESPKPRRQRPQRAKTMPPHSSPGNRARLHLEKKKKXWLLHRQSSPEDCWFSVFVEVQGRRRAPXFKFSNLP

SEQ ID NO: 936416 - protein, 33 aa, Homo sapiens
PSKGAIPHFTAGETELQSLSALSHQEQMLDQIG

SEQ ID NO: 936417 - protein, 88 aa, Homo sapiens
  misc_feature (40)..(40): Xaa can be any naturally occurring amino acid
  misc_feature (46)..(46): Xaa can be any naturally occurring amino acid
  misc_feature (66)..(66): Xaa can be any naturally occurring amino acid
MDALRPPCHLVGAVGAASSMAVLRPPCHSGLLGLSLCGTXCSTSSXNIQYYMMFEVMEPTWHILGXKPEILPPTFDDVLGHHTGFLDT

SEQ ID NO: 936418 - protein, 131 aa, Homo sapiens
  misc_feature (9)..(9): Xaa can be any naturally occurring amino acid
NGFKVTSRXGTLAAQPEGSRAQWRGRNALHGIWRWCSHDEEQATGLEREIMLAAKKGLDPYNVLAPKGASGTREDPNLVPSIFNKKNVGCICEEDNTKRSSGFGCTKAKAQRMPPLLKPIYKLVPPASLAH

SEQ ID NO: 936419 - protein, 193 aa, Homo sapiens
  misc_feature (122)..(122): Xaa can be any naturally occurring amino acid
  misc_feature (154)..(154): Xaa can be any naturally occurring amino acid
DSPPSAQPSQVSYTATMPFGNTHNKFKLNYKPEEEYPDLSKHNNHMAKVLTLELYKKLRDKETPSGFTVDDVIQTGVDNPGHPFIMTVGCVAGDEESYEVFKELFDPIISDRHGGYKPTDKXKTDLNHENLKGGDEPGPQLRAQQPGPHWAAAXRANTFGPKIAPVASAGAVEETLLWKLLKKADGGSFKREI

SEQ ID NO: 936420 - protein, 54 aa, Homo sapiens
MSRQRSKIRKAFLLIGKDQPLLIRRKKLEDGRTLSDYNIQKESTLHLVLRLRGG

SEQ ID NO: 936421 - protein, 154 aa, Homo sapiens
  misc_feature (13)..(13): Xaa can be any naturally occurring amino acid
  misc_feature (19)..(19): Xaa can be any naturally occurring amino acid
  misc_feature (21)..(21): Xaa can be any naturally occurring amino acid
  misc_feature (33)..(33): Xaa can be any naturally occurring amino acid
  misc_feature (86)..(86): Xaa can be any naturally occurring amino acid
LFPPKKKGEPYEXQKTFPXGXNSFQKILLVNSXGLPDLVLAHLQESQVPHFSPQLSPQACGRPAPMLEKQTPRTEPSPRLQAVSAXCCIVNIKVVQFTLIPCTTLSLLILPTQNRPVHLKLSMMKDPEFVCLFVSFLPNLSWTNIFVDNKTKLP

SEQ ID NO: 936422 - protein, 168 aa, Homo sapiens
  misc_feature (3)..(3): Xaa can be any naturally occurring amino acid
  misc_feature (5)..(5): Xaa can be any naturally occurring amino acid
  misc_feature (11)..(11): Xaa can be any naturally occurring amino acid
  misc_feature (43)..(43): Xaa can be any naturally occurring amino acid
  misc_feature (52)..(52): Xaa can be any naturally occurring amino acid
  misc_feature (136)..(136): Xaa can be any naturally occurring amino acid
  misc_feature (149)..(149): Xaa can be any naturally occurring amino acid
SAXAXCEEHVXAVNAKCASLEKTKQRLQNEVEDLMIDVERTNXACAALDKKXRNFDKILAEWKQKCEETHAELEASQKESRSLSTELFKIKNAYEESLDQLETLKRENKNLQQEISDLTEQIAEGRKRIHELEKIXKQVEQEKSELQAXLEEAEASLEHERERSAHPA

SEQ ID NO: 936423 - protein, 77 aa, Homo sapiens
  misc_feature (23)..(23): Xaa can be any naturally occurring amino acid
  misc_feature (48)..(48): Xaa can be any naturally occurring amino acid
  misc_feature (57)..(57): Xaa can be any naturally occurring amino acid
  misc_feature (63)..(63): Xaa can be any naturally occurring amino acid
  misc_feature (74)..(74): Xaa can be any naturally occurring amino acid
RRFPTVSRHVAARLALGLEAPAXGSAGVVAESVSSLTIADAFIAAGEXQLRPRRAPXSQEVHXLLPDCSAITAXLEA

SEQ ID NO: 936424 - protein, 151 aa, Homo sapiens
  misc_feature (1)..(1): Xaa can be any naturally occurring amino acid
  misc_feature (62)..(62): Xaa can be any naturally occurring amino acid
  misc_feature (103)..(103): Xaa can be any naturally occurring amino acid
XPCGNGQLIFQAIKKNLNYMGFFEKGYFTFYDFSSSTLKSLHVTSLQTFHCGLLNQWDAGRXCPACGLSAFGRLRRADHEVGGSGPSWLAWWNPVSAENTEGXPGVVRTPVVPATREAGAGQWCGPGGWSLSVAIAPLHSSLGDGVRLCLK

SEQ ID NO: 936425 - protein, 74 aa, Homo sapiens
  misc_feature (14)..(14): Xaa can be any naturally occurring amino acid
  misc_feature (20)..(20): Xaa can be any naturally occurring amino acid
  misc_feature (27)..(27): Xaa can be any naturally occurring amino acid
  misc_feature (58)..(58): Xaa can be any naturally occurring amino acid
  misc_feature (66)..(66): Xaa can be any naturally occurring amino acid
  misc_feature (68)..(68): Xaa can be any naturally occurring amino acid
LVGVSWPCVRRDTXEKGVPXYRHIADXAGNPDLILPVPAFNVINGGSMPGNKLAIEEXNDSACGSXSXQGSNGN

SEQ ID NO: 936426 - protein, 110 aa, Homo sapiens
  misc_feature (2)..(2): Xaa can be any naturally occurring amino acid
  misc_feature (10)..(10): Xaa can be any naturally occurring amino acid
AXEDPGVAMXAARPVVTGIVRTSRYPKSRFCRGVPDAKIRIFDLGRKKAKVDEFRLCGHMVSDEYEQLSSEALEGCPKFVANKYMVKKLWQGWLPYPGCGFHPFHVIRIN

SEQ ID NO: 936427 - protein, 38 aa, Homo sapiens
  misc_feature (16)..(16): Xaa can be any naturally occurring amino acid
  misc_feature (32)..(32): Xaa can be any naturally occurring amino acid
TPGRADHCPSSRLNPXHNAALRNPAPNKKRKXSKLIME

SEQ ID NO: 936428 - protein, 186 aa, Homo sapiens
  misc_feature (58)..(58): Xaa can be any naturally occurring amino acid
  misc_feature (89)..(89): Xaa can be any naturally occurring amino acid
  misc_feature (142)..(142): Xaa can be any naturally occurring amino acid
  misc_feature (169)..(169): Xaa can be any naturally occurring amino acid
LILTLTSEEGVSITHTLDGQFDEANNAEKAMNNLKDGLAKLGQTLYYARDVQINLPGXCLYQTVCVNQFRREAADMLDAARLASYQRGXVNRLLILRRFIRKQHLSFLANVYNQKAREFYHRYGVQLIDAAYEAHEEKGEIXLMITKHCLRFALICARNRRKGNIKSWXATQCNWLTAMKFNAKVD

SEQ ID NO: 936429 - protein, 80 aa, Homo sapiens
  misc_feature (71)..(72): Xaa can be any naturally occurring amino acid
  misc_feature (78)..(78): Xaa can be any naturally occurring amino acid
NSHGKHEQPRQTQATANTSHGKHGPRQTRTATANTGHGKHGPWQTRTAMPERARLHLIAEAKQGWAWLVLXXETNWVXQV

SEQ ID NO: 936430 - protein, 114 aa, Homo sapiens
  misc_feature (4)..(4): Xaa can be any naturally occurring amino acid
  misc_feature (9)..(9): Xaa can be any naturally occurring amino acid
  misc_feature (13)..(13): Xaa can be any naturally occurring amino acid
  misc_feature (22)..(22): Xaa can be any naturally occurring amino acid
MPKXLLPPXHLDXPPETVPQQXEIYLKKSFYTKNCDCPPEVRGKEYKNNEYPNSLILFGLLDPFGNPSFLSKVNKKGKPQHRMFLTHKWESNNENTWTQEGEHHTLGPVQGVGG

SEQ ID NO: 936431 - protein, 127 aa, Homo sapiens
  misc_feature (1)..(1): Xaa can be any naturally occurring amino acid
  misc_feature (7)..(7): Xaa can be any naturally occurring amino acid
  misc_feature (36)..(36): Xaa can be any naturally occurring amino acid
  misc_feature (82)..(82): Xaa can be any naturally occurring amino acid
XQRSNPXWLKKLDWQEKLVAWPKFKARFQNPVFFMXQIFGQFFQLNRTSIDFHIHYRQQMLSLVHQHYGLYLCVSAILLFTXATWEQVSLGPTSLGHLMLSDGFFGQVFPHLFQVITSHFLCCHSSK

SEQ ID NO: 936432 - protein, 77 aa, Homo sapiens
HPHHSTQLRDGTCTHSARLPPNTAPAPIAPSSEMAPAPTAPGSHPIRHPHPQHPAPRWNLHPQRPAPTQYGTRTHCI

SEQ ID NO: 936433 - protein, 146 aa, Homo sapiens
NYHLLNEAAFEQMKNGVMIVNTSRGALIDSQAAIEALKNQKIGSLGMDVYENERDLFFEDKSNDVIQDDVFRRPVCLPQRACLPGHQAFLTAEALDQYFSDYAAKLKAIWEKRPKTLPRTELGFKSLAGSPCIPRGADFRLIPNDP

SEQ ID NO: 936434 - protein, 54 aa, Homo sapiens
  misc_feature (28)..(28): Xaa can be any naturally occurring amino acid
  misc_feature (44)..(44): Xaa can be any naturally occurring amino acid
MGKKDLGPSRPFCGIQSEVRKHPLGQCXLQALTHDLREVRRLPXSAFLSFPSVV

SEQ ID NO: 936435 - protein, 101 aa, Homo sapiens
  misc_feature (5)..(5): Xaa can be any naturally occurring amino acid
  misc_feature (9)..(9): Xaa can be any naturally occurring amino acid
  misc_feature (21)..(21): Xaa can be any naturally occurring amino acid
  misc_feature (94)..(94): Xaa can be any naturally occurring amino acid
  misc_feature (101)..(101): Xaa can be any naturally occurring amino acid
PRLEXSGTXSAHCKLHLPGSXHPPASASRVAGTTAPATMPGYFFVFLVEMGFHYVSQDGLDLLTSLPADSGSQSAGITGVRHRAWSPSNDFLNXIRFSPPX

SEQ ID NO: 936436 - protein, 160 aa, Homo sapiens
  misc_feature (1)..(1): Xaa can be any naturally occurring amino acid
  misc_feature (47)..(48): Xaa can be any naturally occurring amino acid
XGPLTALRAWVSIGQGTRSEDRRRSPQPQCPSPPPAWPRASAPPHEXXGRGEGALWIGVPPRYPGCELMDGKRGQAGRQATQGVGSGMALKMSKDSTGRVDRRGAAKTLDTPASVCPLALAGCREQRLKREGSRFVHPLWCGWGDGGVGGGAHNMAGRNS

SEQ ID NO: 936437 - protein, 100 aa, Homo sapiens
  misc_feature (13)..(13): Xaa can be any naturally occurring amino acid
  misc_feature (32)..(32): Xaa can be any naturally occurring amino acid
  misc_feature (81)..(81): Xaa can be any naturally occurring amino acid
  misc_feature (91)..(91): Xaa can be any naturally occurring amino acid
HTVLRDCVQCQWXQAKVAKYGDWFSYDGSPRXQIFRRNQSLVQDMDSMVRLMRYNDFLHDPLSLCKACNPQPNGGGMLFSXRSDLQPGPMXSLPLSRGLR

SEQ ID NO: 936438 - protein, 81 aa, Homo sapiens
  misc_feature (16)..(16): Xaa can be any naturally occurring amino acid
  misc_feature (57)..(57): Xaa can be any naturally occurring amino acid
  misc_feature (63)..(63): Xaa can be any naturally occurring amino acid
  misc_feature (70)..(70): Xaa can be any naturally occurring amino acid
  misc_feature (77)..(77): Xaa can be any naturally occurring amino acid
MYHASKSAKRALELRXFQTEEKIERTQRTIRSIQEALARNAGRHSVAFTSCRRSWQXPSASQXFRAQEAXLQQEQRXADTH

SEQ ID NO: 936439 - protein, 82 aa, Homo sapiens
SQISVQVTTAKDLTSLVFLLESLTCTPTQPPLKSSPWDHLKQEAWGKALPSAVSGLPSAGQEVVDGTAAGWARVGTAGMAGF

SEQ ID NO: 936440 - protein, 73 aa, Homo sapiens
  misc_feature (11)..(11): Xaa can be any naturally occurring amino acid
  misc_feature (17)..(18): Xaa can be any naturally occurring amino acid
  misc_feature (51)..(51): Xaa can be any naturally occurring amino acid
KQEGLLRSLQXEHGLSXXTSASTLRGTHLGAQRPQSVVLSQKQPQETNPAXRPDHQHGREGSKDLSPQDTVNT

SEQ ID NO: 936441 - protein, 56 aa, Homo sapiens
MSRLMLEEDPNCSRGNTRSEHSHLFGGKDSRKVVHRWVGRKTLRESGDNQFTFEYF

SEQ ID NO: 936442 - protein, 40 aa, Homo sapiens
DLAGKYRQILEKAIQFSGAEQLEALKAFLEALVIEIFSFV

SEQ ID NO: 936443 - protein, 37 aa, Homo sapiens
AGFFFQVETFRKQSSPELTGQAKKQPSLYPPYVFIWT

SEQ ID NO: 936444 - protein, 101 aa, Homo sapiens
  misc_feature (34)..(34): Xaa can be any naturally occurring amino acid
  misc_feature (66)..(66): Xaa can be any naturally occurring amino acid
  misc_feature (82)..(82): Xaa can be any naturally occurring amino acid
  misc_feature (85)..(85): Xaa can be any naturally occurring amino acid
LRAIQQAVGSSLQGTCPMIKMALGVMAFDGGAAXVHGQSPVPRESGGTDTATVLGHGPRTASSQGXVSVLGSPGYLGVSQPXGTXRPGGKVRDIVEFVGFK

SEQ ID NO: 936445 - protein, 156 aa, Homo sapiens
  misc_feature (32)..(33): Xaa can be any naturally occurring amino acid
  misc_feature (56)..(57): Xaa can be any naturally occurring amino acid
  misc_feature (66)..(66): Xaa can be any naturally occurring amino acid
  misc_feature (72)..(72): Xaa can be any naturally occurring amino acid
  misc_feature (90)..(90): Xaa can be any naturally occurring amino acid
  misc_feature (154)..(154): Xaa can be any naturally occurring amino acid
SGRLEKMVLRRLLAACVHSPQLVERLSESRPXXRAAHHGRSHCMQAQRAGQDAARXXQDLAAGPWXPVCRRXEDVRDSFTQERYSAASEXSGATTKVARGALAQTFNPGLCGAEALAFPSGLYSGINVEGSFRALRRLRIPTGIVGLQDIPRIXAR

SEQ ID NO: 936446 - protein, 81 aa, Homo sapiens
  misc_feature (1)..(1): Xaa can be any naturally occurring amino acid
XDATGTKRYQYQLTFLSLFGKRTNFLAHYRHPFPFLSTFFYMPTLSKKKSNVQSTGISLDCMTPGQWGKGYRGQGLAFREL

SEQ ID NO: 936447 - protein, 113 aa, Homo sapiens
  misc_feature (1)..(1): Xaa can be any naturally occurring amino acid
  misc_feature (4)..(4): Xaa can be any naturally occurring amino acid
  misc_feature (51)..(51): Xaa can be any naturally occurring amino acid
  misc_feature (62)..(62): Xaa can be any naturally occurring amino acid
  misc_feature (107)..(107): Xaa can be any naturally occurring amino acid
  misc_feature (112)..(112): Xaa can be any naturally occurring amino acid
XLLXEIFTSPLNLLLLGLCIFLLYKIVRGDQRRQRNKERRRAAPSAPPQGXNFTPAELRLSXRPGTRAYSWAINGKVFDVTKGRKFLRARGVIKGSFAGKRCIQGAXPHFCXG

SEQ ID NO: 936448 - protein, 49 aa, Homo sapiens
SSDIYEAVEIGDSYWIRCKDGVVFGEKNRPSKPYEGGSTKGFLMLIGKL

SEQ ID NO: 936449 - protein, 80 aa, Homo sapiens
TGRPGVLVVEFHHFGVVSLTIFGDVTLSQGEVEKRLTWNLIYTQAALPYHFPHKRGHTFWHSYLLASLIPEEASPYPREE

SEQ ID NO: 936450 - protein, 112 aa, Homo sapiens
  misc_feature (8)..(8): Xaa can be any naturally occurring amino acid
  misc_feature (10)..(10): Xaa can be any naturally occurring amino acid
  misc_feature (29)..(29): Xaa can be any naturally occurring amino acid
  misc_feature (48)..(48): Xaa can be any naturally occurring amino acid
  misc_feature (66)..(66): Xaa can be any naturally occurring amino acid
  misc_feature (90)..(90): Xaa can be any naturally occurring amino acid
  misc_feature (96)..(96): Xaa can be any naturally occurring amino acid
EAERSACXVXGRHARMPDVVSWAPRPWLXAAEAQAQRGEAQAHPERAXFREELSRLYSSVRVKDSXPPCQWSRMASEGTNIPSPVVRQIXKAVSDXQYMPGTVQESQGSSLF

SEQ ID NO: 936451 - protein, 32 aa, Homo sapiens
GGGSSGVRGFKSPKGKKKPGPDPYLSVAFLWI

SEQ ID NO: 936452 - protein, 75 aa, Homo sapiens
  misc_feature (15)..(15): Xaa can be any naturally occurring amino acid
  misc_feature (17)..(17): Xaa can be any naturally occurring amino acid
  misc_feature (30)..(30): Xaa can be any naturally occurring amino acid
  misc_feature (48)..(48): Xaa can be any naturally occurring amino acid
  misc_feature (73)..(73): Xaa can be any naturally occurring amino acid
ERTKGKKKSKKQPPXAXEAAGEPVQNGAPXEEQLPPESSYSLLAENSXCENDPVTSGAVCRRTARSLVAIVLXNR

SEQ ID NO: 936453 - protein, 75 aa, Homo sapiens
  misc_feature (1)..(2): Xaa can be any naturally occurring amino acid
  misc_feature (8)..(8): Xaa can be any naturally occurring amino acid
  misc_feature (25)..(25): Xaa can be any naturally occurring amino acid
  misc_feature (64)..(64): Xaa can be any naturally occurring amino acid
  misc_feature (71)..(71): Xaa can be any naturally occurring amino acid
XXRDRLHXDSPNPAAECQRYRSDRXSPESPGPAGFTWDELAASGLPSCDAAVNLGRREHPQPSXKMGMKPXKKSL

SEQ ID NO: 936454 - protein, 31 aa, Homo sapiens
WKNQNSWGTGEDVKVILKNSQGEEVAQRSTV

SEQ ID NO: 936455 - protein, 81 aa, Homo sapiens
  misc_feature (1)..(1): Xaa can be any naturally occurring amino acid
  misc_feature (4)..(4): Xaa can be any naturally occurring amino acid
  misc_feature (69)..(69): Xaa can be any naturally occurring amino acid
XRHXGGVGNGCRTWLFIREFPIYHPLNLELQTPYAQPSNQPAALALTSKGGLAEVIQAFSAPENAVRMXEARDKPANDMGK

SEQ ID NO: 936456 - protein, 31 aa, Homo sapiens
PDLNCDPNLNCSPDRNPYPPPTSMARHVFLT

SEQ ID NO: 936457 - protein, 41 aa, Homo sapiens
SEAAGCFERTRWLCSTQLDPVAQAPPRPTAVSCASQRREFE

SEQ ID NO: 936458 - protein, 67 aa, Homo sapiens
TYSSDESRKSKLKTFWKGFTILDAMKNIPEEEVKISALRGVWQTLIPALKNDFEGFKTSVVKLADVI

SEQ ID NO: 936459 - protein, 75 aa, Homo sapiens
  misc_feature (23)..(23): Xaa can be any naturally occurring amino acid
  misc_feature (36)..(36): Xaa can be any naturally occurring amino acid
  misc_feature (66)..(66): Xaa can be any naturally occurring amino acid
  misc_feature (68)..(68): Xaa can be any naturally occurring amino acid
CLIVPRSSPNPRMEVLPREAAKXSTLRVILHARPLXLPPGGTSPSPPDFKLRIVVSLAGCRTEPRXQXPIHALCL

SEQ ID NO: 936460 - protein, 38 aa, Homo sapiens
  misc_feature (3)..(3): Xaa can be any naturally occurring amino acid
RLXHGYHTLEDQALYNRLRQENMHFEICPWSSYLTGAW

SEQ ID NO: 936461 - protein, 63 aa, Homo sapiens
  misc_feature (54)..(54): Xaa can be any naturally occurring amino acid
MCLEKLQTLNASPMKAARRETVPCKATGAELAKTTGTHLLHQRDPDMRHGVKEXILEALDLTA

SEQ ID NO: 936462 - protein, 36 aa, Homo sapiens
  misc_feature (13)..(13): Xaa can be any naturally occurring amino acid
GTSCGGECSEAPXGQYYKDAMEQCHNYNARLCAERT

SEQ ID NO: 936463 - protein, 93 aa, Homo sapiens
MPLPCPEAQVCGGPPQARMPLLLESLSSTDVALLLPWLQTEGCHSPPCSDQAQENMAPEPPRECVLSKLTQKLCSLSGSVTQTPSSPCISQAV

SEQ ID NO: 936464 - protein, 72 aa, Homo sapiens
  misc_feature (24)..(24): Xaa can be any naturally occurring amino acid
  misc_feature (54)..(54): Xaa can be any naturally occurring amino acid
  misc_feature (72)..(72): Xaa can be any naturally occurring amino acid
RDLGGLGADQGDWATLRSVAAGEXESAGPTRAPLSDHGMMGPKQLSAFGEYVAXILPKYVQQVQVSCFNELX

SEQ ID NO: 936465 - protein, 83 aa, Homo sapiens
  misc_feature (35)..(38): Xaa can be any naturally occurring amino acid
KPVIVTGLQDTTVLQTVLLNLQLRLLENPTNCHLXXXXERPLHKEVNINSPEDKGGFFLEIHKTDTSDSGLYTCTVKIQLDLC

SEQ ID NO: 936466 - protein, 116 aa, Homo sapiens
  misc_feature (49)..(49): Xaa can be any naturally occurring amino acid
  misc_feature (70)..(70): Xaa can be any naturally occurring amino acid
  misc_feature (92)..(92): Xaa can be any naturally occurring amino acid
  misc_feature (100)..(100): Xaa can be any naturally occurring amino acid
  misc_feature (107)..(107): Xaa can be any naturally occurring amino acid
  misc_feature (110)..(110): Xaa can be any naturally occurring amino acid
EIQLNHANRMACGGLRNYRNTQGILKDTRSTWMMLSGPGGPEGIAGHGXAQSNLLQAEIDELRGHSGTDXEEQKIRRTRSSWDASERVQLLXHPEHQGLXNTQEGSXETXYFPKCQ

SEQ ID NO: 936467 - protein, 36 aa, Homo sapiens
  misc_feature (14)..(14): Xaa can be any naturally occurring amino acid
MASNFNDIVKQGYXKDPKQTPGGFISDAGLIFKKAF

SEQ ID NO: 936468 - protein, 52 aa, Homo sapiens
  misc_feature (18)..(18): Xaa can be any naturally occurring amino acid
  misc_feature (21)..(21): Xaa can be any naturally occurring amino acid
GLGSAGDGAAACMLLALXTRXKGLYFHIGETEKRCFIEEIPDETMVIGNYRY

SEQ ID NO: 936469 - protein, 52 aa, Homo sapiens
  misc_feature (3)..(3): Xaa can be any naturally occurring amino acid
  misc_feature (18)..(18): Xaa can be any naturally occurring amino acid
  misc_feature (37)..(37): Xaa can be any naturally occurring amino acid
ALXEGTPGGSDLRAGAGXLGDVGCCELESACGGRGQXFCVAIVFNASLNSLY

SEQ ID NO: 936470 - protein, 60 aa, Homo sapiens
  misc_feature (19)..(19): Xaa can be any naturally occurring amino acid
  misc_feature (40)..(40): Xaa can be any naturally occurring amino acid
  misc_feature (46)..(46): Xaa can be any naturally occurring amino acid
RTKKIMAHERREKVKRSVXLVLSTHVLGKEKIASMLPGAXVRSCRXPRRGARIPPRRLKP

SEQ ID NO: 936471 - protein, 117 aa, Homo sapiens
  misc_feature (57)..(57): Xaa can be any naturally occurring amino acid
  misc_feature (84)..(84): Xaa can be any naturally occurring amino acid
  misc_feature (112)..(112): Xaa can be any naturally occurring amino acid
ATQPRVSLDVFGNRAMSTVLSVPAETSSASSTTLTSQSRDLQGRLPSRPHAPERHLXKRVAQLPLKACLLEDFLDKVPAHPLGXPGGGVHRSTRAALVVSHCQRWQNNSHRXRARAC

SEQ ID NO: 936472 - protein, 39 aa, Homo sapiens
  misc_feature (10)..(10): Xaa can be any naturally occurring amino acid
PPELRRACSXRPPVLPVSRFSAPQPPVPAFRGPESQPTK

SEQ ID NO: 936473 - protein, 135 aa, Homo sapiens
  misc_feature (16)..(16): Xaa can be any naturally occurring amino acid
  misc_feature (33)..(33): Xaa can be any naturally occurring amino acid
  misc_feature (39)..(39): Xaa can be any naturally occurring amino acid
  misc_feature (44)..(44): Xaa can be any naturally occurring amino acid
  misc_feature (61)..(61): Xaa can be any naturally occurring amino acid
  misc_feature (113)..(113): Xaa can be any naturally occurring amino acid
  misc_feature (121)..(121): Xaa can be any naturally occurring amino acid
  misc_feature (131)..(131): Xaa can be any naturally occurring amino acid
GRKLTLGASQAPGVTXQQKCIRKASGRPGFGAXGVSTKXASTPXPETRSSPGRLLPPSLCXTALFPFSLQAGLLLSSDGLRAVLFSCVTSSCSSSCSDGFTFPYSPLLSPLQXGGFEVASXSSRRRPKHRXYGVA

SEQ ID NO: 936474 - protein, 76 aa, Homo sapiens
  misc_feature (30)..(30): Xaa can be any naturally occurring amino acid
  misc_feature (62)..(62): Xaa can be any naturally occurring amino acid
  misc_feature (76)..(76): Xaa can be any naturally occurring amino acid
MSTGLRYKSKLATPEDKQDIDKQYVGFAHXPNQVHRKSVKKGFDFTLMVAGESGPGESPHWXTAFFLDRLCTKNGX

SEQ ID NO: 936475 - protein, 30 aa, Homo sapiens
  misc_feature (4)..(4): Xaa can be any naturally occurring amino acid
  misc_feature (27)..(27): Xaa can be any naturally occurring amino acid
PRKXGLGPVEPQCPFGLAVIADNKEPXVAL

SEQ ID NO: 936476 - protein, 133 aa, Homo sapiens
RISENNVIFSSYKGKLETGIPSTGTTTTKTLLGTSRLFEDTVLLCCSGWSAMAPISAHCSLPPPQVQAILLPHLPSSWNCRWPLPHLANFCIFSRGRVSPCGQTGLKLLISSDLPALASQSAGIIGVSHHTWP

SEQ ID NO: 936477 - protein, 119 aa, Homo sapiens
  misc_feature (25)..(25): Xaa can be any naturally occurring amino acid
  misc_feature (79)..(79): Xaa can be any naturally occurring amino acid
HEDCIGLRGIVHHFALEQSVQFPRXSRNVVFDVQIPKGAFISNCSMTVDGKTFRSSIKEKTVGRALYAQARAKGKTAGXVRSSVFDMENFRTEVNVLPGAKVQFELHYQGGEVGGSLGS

SEQ ID NO: 936478 - protein, 79 aa, Homo sapiens
  misc_feature (11)..(12): Xaa can be any naturally occurring amino acid
  misc_feature (16)..(16): Xaa can be any naturally occurring amino acid
  misc_feature (77)..(77): Xaa can be any naturally occurring amino acid
GTRGGHRGEQXXRLGXAKSEPRCSGLRASRRSWTGEMKRKMREDVISSIRNFLIYRGPPASHSIYLKEIGQHMKTGXHI

SEQ ID NO: 936479 - protein, 72 aa, Homo sapiens
MSDNEDNFDGDGFYDVEEDEGLDDFVRMSAERRHRECRDLSLSGSERKGTPRKRITHTIYSAQCARARVLCT

SEQ ID NO: 936480 - protein, 103 aa, Homo sapiens
SCIEVLVDSAEEGSSLRRRLAAQKAEQRLRKFRELHLMRNEARKLNHQEVLEEDKRLKLPANWEGQKSSFGVWDLRRGEGKGLRQEEKTIESEGSGISAEDAE

SEQ ID NO: 936481 - protein, 37 aa, Homo sapiens
MLINPTLRNALNISYIPFQHRARPITGTLLSETVTQG

SEQ ID NO: 936482 - protein, 91 aa, Homo sapiens
MEGFLRQKAKGGVFGWSRAVCCVVRMDHIVGVIAFYTSLKKPLGPFVPDERCRFCASMHTRGQAQWPTLRFSESFHEANTFSLTSHVFPRG

SEQ ID NO: 936483 - protein, 100 aa, Homo sapiens
  misc_feature (9)..(9): Xaa can be any naturally occurring amino acid
  misc_feature (23)..(23): Xaa can be any naturally occurring amino acid
  misc_feature (34)..(34): Xaa can be any naturally occurring amino acid
  misc_feature (49)..(49): Xaa can be any naturally occurring amino acid
  misc_feature (59)..(59): Xaa can be any naturally occurring amino acid
  misc_feature (64)..(64): Xaa can be any naturally occurring amino acid
  misc_feature (83)..(83): Xaa can be any naturally occurring amino acid
  misc_feature (98)..(98): Xaa can be any naturally occurring amino acid
HEVPEGKVXEGNVGDRNALPGAXKVPGACADLQXPGNASPCILDDTGCXFIGTSSPLCXRLGIXKAIFSLVKESAEHTSLSAXFILLGRSGALMCWGXGW

SEQ ID NO: 936484 - protein, 145 aa, Homo sapiens
  misc_feature (5)..(6): Xaa can be any naturally occurring amino acid
  misc_feature (9)..(9): Xaa can be any naturally occurring amino acid
  misc_feature (111)..(111): Xaa can be any naturally occurring amino acid
  misc_feature (124)..(124): Xaa can be any naturally occurring amino acid
  misc_feature (139)..(139): Xaa can be any naturally occurring amino acid
  misc_feature (142)..(142): Xaa can be any naturally occurring amino acid
SWETXXGKXAFQELLSKRRIASTRKVWLSPEPQKPAGSSKGGPARGYTPTLPPAHGILQPDSVAQAAWLLSPLASSPGHTGDGPKHGLCCCHGAKGPGKHGVFLAGRRHRXQNLSFALQLSLGXSLDLMDPFNGWLIPXPQXSWD

SEQ ID NO: 936485 - protein, 77 aa, Homo sapiens
  misc_feature (41)..(41): Xaa can be any naturally occurring amino acid
  misc_feature (56)..(56): Xaa can be any naturally occurring amino acid
  misc_feature (68)..(68): Xaa can be any naturally occurring amino acid
MAGRNAVAGCGGGNHHAGGKDSQYHTGCFLFTPGKTPHIEXALLPGELIVAVTLPXTLGGKHIYRKVXIAPPTPLPW

SEQ ID NO: 936486 - protein, 53 aa, Homo sapiens
  misc_feature (47)..(47): Xaa can be any naturally occurring amino acid
MKHQWGDSSSLEILKVFEEQGLWGFLQFLSWQVFHTEGAQEPGLKIXIDAQTP

SEQ ID NO: 936487 - protein, 91 aa, Homo sapiens
  misc_feature (6)..(6): Xaa can be any naturally occurring amino acid
  misc_feature (9)..(9): Xaa can be any naturally occurring amino acid
  misc_feature (21)..(21): Xaa can be any naturally occurring amino acid
  misc_feature (43)..(44): Xaa can be any naturally occurring amino acid
KKWLEXKGXEIQKRGKKSSGXITCLLCSDDVRRLENLLPLGSXXAPSSGVLFQPGALDALEETCSIRGAACRLHTAQDGFDCGPTQIHKLS

SEQ ID NO: 936488 - protein, 92 aa, Homo sapiens
GGHSELKRCLNQKASRTNLFKNKEGGVPAGRKLDKGGSLPAGYLQGNNRVLGFQAHPREGYLRGTYNSQGNAPSLGNVFHSRADPLLAVVTK

SEQ ID NO: 936489 - protein, 129 aa, Homo sapiens
  misc_feature (14)..(14): Xaa can be any naturally occurring amino acid
  misc_feature (24)..(24): Xaa can be any naturally occurring amino acid
SSKFHTQATLDPYXAPSCLAPSLXPWGLGSPCLSFLFPLSFPSLPLPLSTLQPHDLASLCHRIKGSIMEGGFPKHPHVLTYKWDLDDKKTWTHRGEQHTLGPVGRWRVGGGRGSEKMTNGYWASYLWMK

SEQ ID NO: 936490 - protein, 91 aa, Homo sapiens
MGLSDGEWQLVLNVWGKVEADIPGHGQEVLIRLFKGHPETLEKFDKFKHLKSERRDEGILELKEAYVPHFLTPPWCAYLKRERGIYESTDL

SEQ ID NO: 936491 - protein, 76 aa, Homo sapiens
LSELQVEQTSLEPLQESPRHTGVWKLREVATEGIRGHRKMVLYNLRATKKPQDGQESCSFGGRLNRSTSSIVLASK

SEQ ID NO: 936492 - protein, 57 aa, Homo sapiens
HTAHLDISRTTMRWFRREFMQRRGQKWYSDPVHVLRADDLGGRGELAEEEASTSARA

SEQ ID NO: 936493 - protein, 135 aa, Homo sapiens
SRRGFDPLKLEIYLTDEDFEFALDMTRDEYNALPAWKQVNLKKSKRPVLSWETAKEPTGHVQEHHFTREIGNIFWGSGFSQRIFQSEVSGPYIVKGTPFSRGGDFVNVKGPLLELLSPFRGCRINKGPFMALSGR

SEQ ID NO: 936494 - protein, 43 aa, Homo sapiens
LLFLYEDSCLAVGVPGGCVSIKGQRQYFDKIRVRIYYYIVQGM

SEQ ID NO: 936495 - protein, 70 aa, Homo sapiens
SQPFPEVPPWTGEVSQAKRDGGALGGGPWTSSNRSSLLKRKLRALLTPLEASRPACLGEDEKVEPERLAI

SEQ ID NO: 936496 - protein, 35 aa, Homo sapiens
MSSFSTTTVELPPYTGNSRLLVKTRANPMYNGVSN

SEQ ID NO: 936497 - protein, 49 aa, Homo sapiens
KFGANAILGVSLAVCKAGAAEKEGPLYPTMRFGWDPYLYSSARFNLITG

SEQ ID NO: 936498 - protein, 48 aa, Homo sapiens
MLLQPAGSLGSYSYRSPHWASTYSVYVGGDRYAQYRVVVQARQQGPLG

SEQ ID NO: 936499 - protein, 52 aa, Homo sapiens
YLHANGLNYSLSASSYTSGEAILRIILYSEPEPSALSSCFALIATSLNRLCP

SEQ ID NO: 936500 - protein, 63 aa, Homo sapiens
PSQGTHDFCPSPSEPRYTQGGEHHGQPGTGKSWAKLRWNLQQEREVGWFFHHFQALNAGLISG

SEQ ID NO: 936501 - protein, 59 aa, Homo sapiens
SSESTSLESDLFPTSTSLSPFSFGHLLLRHQLFDTGFQNALEKDSFFNLDVSIFPETQV

SEQ ID NO: 936502 - protein, 72 aa, Homo sapiens
TDNTLRLSRCQEKLELAEKKATDAEADVASLNRRIQLVEEELDRAQKPPGNSFSELEEAKKAADKIKKALKS

SEQ ID NO: 936503 - protein, 87 aa, Homo sapiens
QAEGRWEANPDGSQQQQQQQKQQQQPPQSLQRHGSPDSTFPGVLLLFFLHWVSWGGVPPLGSPVQLGFELPVTGNFRTAVDSILGPQ

SEQ ID NO: 936504 - protein, 51 aa, Homo sapiens
KKEELLKQLDDLKVELSSCASPKWTGGAASKLSKIRVVRNPLPVFSQFLPR

SEQ ID NO: 936505 - protein, 38 aa, Homo sapiens
  misc_feature (2)..(2): Xaa can be any naturally occurring amino acid
  misc_feature (10)..(10): Xaa can be any naturally occurring amino acid
  misc_feature (35)..(35): Xaa can be any naturally occurring amino acid
  misc_feature (38)..(38): Xaa can be any naturally occurring amino acid
MXPLLLYCAXAGLATLRVELESPAKSSVLVVESSXCLX

SEQ ID NO: 936506 - protein, 146 aa, Homo sapiens
  misc_feature (123)..(123): Xaa can be any naturally occurring amino acid
SSWGTVQRGTQGLPSWGQACHHPYLPYLHSQCGNALGPPPTSCPQCPSTSPAYWGVALKPEGPQGALRSRRPLPRGATQQKHLRRLGQPPSGPGGPWPRLGCSPGAAVRSEDRGRSSLPLPPXLVDREQGRRLSATQQLENQAELV

SEQ ID NO: 936507 - protein, 88 aa, Homo sapiens
  misc_feature (8)..(9): Xaa can be any naturally occurring amino acid
  misc_feature (51)..(51): Xaa can be any naturally occurring amino acid
TTTRPHGXXLSPARRFCPRAAREGNPDRERRVPEPGAVGPEASISREPQVXACKDVKVKKKTLKIAKMLLSQNAFIFRSLNLVLMVYI

SEQ ID NO: 936508 - protein, 126 aa, Homo sapiens
HRDMRDRPLSAISSLGGTCVIGDPCMSRARSLPSGMGSVEGYHRESAWCHPTSSPRRVSLVPGEGALEPGSLPPAQRLQICCRFRCSSSCCGLMTTVVGLASHGTGLRHLVADWVLRSEGQGGAED

SEQ ID NO: 936509 - protein, 65 aa, Homo sapiens
  misc_feature (9)..(9): Xaa can be any naturally occurring amino acid
  misc_feature (55)..(55): Xaa can be any naturally occurring amino acid
  misc_feature (58)..(58): Xaa can be any naturally occurring amino acid
  misc_feature (64)..(64): Xaa can be any naturally occurring amino acid
FGTAGSGPXIDGVRGRRQMTAFGSEYPPFWYAAQRSPASFSSPHSKLSRSCSNAXDKXVSTCQXH

SEQ ID NO: 936510 - protein, 92 aa, Homo sapiens
EFGTSEIFRSLHTLVGQLDLRDDVGGKFTIRLGTRLPEPLWHSALHCSLSALEHTHFYINRPFFEQNFSLQLREEITTAVEEIGRNRHGAHK

SEQ ID NO: 936511 - protein, 41 aa, Homo sapiens
FHFTSHQIRRSPAMALLTAAARLLGTKNAILVLFLQAPACQ

SEQ ID NO: 936512 - protein, 33 aa, Homo sapiens
KLDELHFQFLVRSRAARTASAATYGSRQQYGIL

SEQ ID NO: 936513 - protein, 83 aa, Homo sapiens
MKSVLSVFPGEDSRSSCLGPSGQPRHLFAWLISLLVPFAECSLALRVALCWTQLTLPGGIIKPGGPQSSRSHSFHILFRQAFP

SEQ ID NO: 936514 - protein, 71 aa, Homo sapiens
  misc_feature (31)..(31): Xaa can be any naturally occurring amino acid
HCPRFISYFLSQPKECDRPHTYTPMEYYAGXKKDEFMSFVGTWMKLETIILSKLSQGQKTKRRVFSLIGGN

SEQ ID NO: 936515 - protein, 83 aa, Homo sapiens
PTVSVKVDLLFQALGRTYTDEEFDEPIFEFGLELDEITSEREYYGKDQGIVRQQEPLMLFFTKLTSLPIDMISVSGGLVRGLR

SEQ ID NO: 936516 - protein, 42 aa, Homo sapiens
MVNPTVFFDIAVDGEPLAGSSLSCLQARSKQAKFSGSSTEKK

SEQ ID NO: 936517 - protein, 51 aa, Homo sapiens
NPRDVEYGTIEGLITTNVGDSTLADLFGSIRWYNKEGGLWPPFSGSKTSAP

SEQ ID NO: 936518 - protein, 74 aa, Homo sapiens
RVQEEYWEDLEEREVEAYNLGNFFASRKGYSRKGFDRLSTQGSDHDKEDDGVIQRRSIQHSASLELPLLQTSFD

SEQ ID NO: 936519 - protein, 44 aa, Homo sapiens
  misc_feature (10)..(10): Xaa can be any naturally occurring amino acid
  misc_feature (14)..(14): Xaa can be any naturally occurring amino acid
  misc_feature (37)..(37): Xaa can be any naturally occurring amino acid
ETEAADGAGXSSYXSAQVIGLKNALSSALAQNTDLKXHLRRNPC

SEQ ID NO: 936520 - protein, 67 aa, Homo sapiens
IIRLLELPHSAGSVTQCTSLPSSGGGPPRSSFPGTSTFKRSRAVRARRGPSNKELPGSWGPRLDLAV

SEQ ID NO: 936521 - protein, 51 aa, Homo sapiens
TQKYIGMSSVLPRKIAEGRMPGWTSLAAPFADHCPRLGLQAGHPSGLTPAT

SEQ ID NO: 936522 - protein, 63 aa, Homo sapiens
KILGVAMGRRPTRCYRYCKSKPYPKSRFCRGVHYAKIRIFDLGRKKAKVGISFRFVAMVSDEY

SEQ ID NO: 936523 - protein, 42 aa, Homo sapiens
MCDFTEDQTASLPPSLSTLDLSQALEFREAFHCFDRQVMAGS

SEQ ID NO: 936524 - protein, 55 aa, Homo sapiens
RAAQAEGRWEANPDASQQQQQQQKQQQQPPQFLPETLVPKQEPSRGGSCSFFSSQ

SEQ ID NO: 936525 - protein, 129 aa, Homo sapiens
RRLSALALCMERTEPDEVVMSQAIQAAHATARGELSAEHLLKWIDTTGCLAAEKHAGDSCDTASADDIQLEETGRVGQVITIKAQDTRALSTSMEISIKVMAQDMLTGIEKLARVAFMTFVAPAGEEVR

SEQ ID NO: 936526 - protein, 69 aa, Homo sapiens
LKCSTVVCVICLEKAKYLLSSLPRALNSATLKLVLLRKNKISSSTKPVKPVENTDDDDSIAEFFNSDEE

SEQ ID NO: 936527 - protein, 99 aa, Homo sapiens
MEKKLEKGQSIDDMIPAQKEALPTCHRLLDPASGRAWPPESCPSLSPAPVQSPPGAFHLSESSSPESTNGSISDLAINISMAGPFFSRLTQPGVYLMET

SEQ ID NO: 936528 - protein, 53 aa, Homo sapiens
VNELAFTAQQDDGLTEGPRAVGLGQPGAFPGQRRLMLDAALASGRPEIFQQEP

SEQ ID NO: 936529 - protein, 80 aa, Homo sapiens
RKATSILKDVTLQSTVCTIPTLHWWEFGKVLRRPKQWGWTQGSVGPQRVLNFRLHMLKNRREYIAELKGLDVDSLVIEHI

SEQ ID NO: 936530 - protein, 136 aa, Homo sapiens
  misc_feature (79)..(79): Xaa can be any naturally occurring amino acid
  misc_feature (122)..(123): Xaa can be any naturally occurring amino acid
KVVTKLMPLGPPGRRRREEESGADHRAQAEPDLDGQEFPGNCGVREMALSPALRGPALDPAHICTGSHSTWEGHTQMPXVLLPKQTHGETTDLDPPGRHCTAGMDSNCPHKNHVIPCAEPEXXPLPSSPSFILGLR

SEQ ID NO: 936531 - protein, 31 aa, Homo sapiens
MAPLGVDPSADGEEMESPRGGGLFKSPRKRV

SEQ ID NO: 936532 - protein, 67 aa, Homo sapiens
TMQFYSIKSELYEIPVIGSDPAHHGGFYLLMNIITQDVCIRGVVYPNHKIALPSTVNGSSCTFRKIL

SEQ ID NO: 936533 - protein, 125 aa, Homo sapiens
ARLITIEINPDLCRPFTQRIGWISLGVKDTGHPLLVWRRSRDIHSPQLEGRKVLIVGHTWTLVFSRTHLEGTGYLAGTRFLFGRECWPSLRKGGQFYLADNGDLPRCARLPSTRAPGAAAFECTH

SEQ ID NO: 936534 - protein, 162 aa, Homo sapiens
  misc_feature (34)..(34): Xaa can be any naturally occurring amino acid
  misc_feature (38)..(38): Xaa can be any naturally occurring amino acid
  misc_feature (49)..(49): Xaa can be any naturally occurring amino acid
  misc_feature (53)..(54): Xaa can be any naturally occurring amino acid
  misc_feature (57)..(57): Xaa can be any naturally occurring amino acid
  misc_feature (128)..(128): Xaa can be any naturally occurring amino acid
  misc_feature (158)..(158): Xaa can be any naturally occurring amino acid
MTYAYLFKYIIIGDTGVGKSCLLLQFTDKRFQPXHDVXIGVEFGARMVXSRGXXVQXANLGYGVGKNPSVLSPVPTTWEQLEQLLVYDITVRETFSHLTSWLGDARQHCSSNRVIMLIGNKSDRECRXIGEEEKKGRPLLGSHGRIFRGTSAKTACNXEKPH

SEQ ID NO: 936535 - protein, 31 aa, Homo sapiens
  misc_feature (25)..(25): Xaa can be any naturally occurring amino acid
RTHESPEQPHRRRRLVTITPREEPXLPQPAP

SEQ ID NO: 936536 - protein, 86 aa, Homo sapiens
SRLTHLSPEEKAPQGGKPEKPEEPAFRTFPRGSGKEGLLNLVVALGTNQEWVGILGRRRNPKKLFFSLEKNQRFFLGEEKPFMPLL

SEQ ID NO: 936537 - protein, 95 aa, Homo sapiens
RSPLVTMNHICANLLFLSTAASSPNYEMLKEEQEVAILGVPHNPSSPMFNVIHNSQRDTSLPYTSVAWSLFQTHLFNETHSLALGFHMPYCGVSR

SEQ ID NO: 936538 - protein, 84 aa, Homo sapiens
GNASIQGNWKDKFMKEATTNAPFRLNKKDRKTVKMMYAEEKFAYGYIEDLKCRVLELPYQGEELSMVILLPDDIEDGSTGLKEI

SEQ ID NO: 936539 - protein, 117 aa, Homo sapiens
  misc_feature (40)..(40): Xaa can be any naturally occurring amino acid
  misc_feature (65)..(65): Xaa can be any naturally occurring amino acid
  misc_feature (70)..(70): Xaa can be any naturally occurring amino acid
  misc_feature (73)..(73): Xaa can be any naturally occurring amino acid
  misc_feature (84)..(84): Xaa can be any naturally occurring amino acid
  misc_feature (90)..(90): Xaa can be any naturally occurring amino acid
  misc_feature (115)..(115): Xaa can be any naturally occurring amino acid
MKAHSQTDRANLGTLRGYYNQSEDGSHTIQIMYGCDVGPXGRFLRGYRQDAYDGKDYIALNEDLXLLDLXRTXAAQITKRKWEXGPCGGXRKKSTWEGPGAFDGLRKITLEEPGXET

SEQ ID NO: 936540 - protein, 63 aa, Homo sapiens
  misc_feature (38)..(38): Xaa can be any naturally occurring amino acid
  misc_feature (42)..(42): Xaa can be any naturally occurring amino acid
  misc_feature (53)..(53): Xaa can be any naturally occurring amino acid
  misc_feature (57)..(57): Xaa can be any naturally occurring amino acid
MRALFPGWGLLRPGGWRPLQIAVENGFGGVHSQKKAKXLGGXVEDYFMRNADXELDXVEDFLG

SEQ ID NO: 936541 - protein, 153 aa, Homo sapiens
  misc_feature (13)..(13): Xaa can be any naturally occurring amino acid
  misc_feature (24)..(24): Xaa can be any naturally occurring amino acid
  misc_feature (33)..(33): Xaa can be any naturally occurring amino acid
  misc_feature (59)..(59): Xaa can be any naturally occurring amino acid
  misc_feature (77)..(77): Xaa can be any naturally occurring amino acid
  misc_feature (151)..(151): Xaa can be any naturally occurring amino acid
PEKLIQVPASRVXASLPCSSLAPXPRVCAARGXLKIGQATAQENLLFPYLSMEKDSFAXRSGTCLKSQHFGRLRQVXHLRSGVRNQPGQHGKTLSLLKIHTYKKISWTWWCTSVIPATQEPRQENLLNLGGGGCNGLTLHHCTPAWMTEQXCL

SEQ ID NO: 936542 - protein, 116 aa, Homo sapiens
MATPAPGNLVVLGSLQPSGCLGSLHSSLLGTQGPGGIGLTRDKGPRWLDLETACKFGRLPTLKGKLVSESLHQQLESIQVLFTWDLTKVVPTTHGEQRKSTVVLTAYLGSHIGGKR

SEQ ID NO: 936543 - protein, 47 aa, Homo sapiens
  misc_feature (19)..(19): Xaa can be any naturally occurring amino acid
  misc_feature (43)..(43): Xaa can be any naturally occurring amino acid
DDEEMDPQTIDSLIELSAXLHLPADDVVSIIEEVEEKLEVEKXFLPS

SEQ ID NO: 936544 - protein, 87 aa, Homo sapiens
  misc_feature (14)..(14): Xaa can be any naturally occurring amino acid
  misc_feature (30)..(30): Xaa can be any naturally occurring amino acid
  misc_feature (40)..(40): Xaa can be any naturally occurring amino acid
  misc_feature (57)..(57): Xaa can be any naturally occurring amino acid
  misc_feature (76)..(76): Xaa can be any naturally occurring amino acid
  misc_feature (84)..(84): Xaa can be any naturally occurring amino acid
YGNSTDPAAAPAGXAAEQALQQQFQQQQQXSLQQQQQQQXQQQFQAQQSAMQQQFQXVVQQQQQLPAAAAAAAAFXIEIGIHSXFRQ

SEQ ID NO: 936545 - protein, 40 aa, Homo sapiens
  misc_feature (9)..(9): Xaa can be any naturally occurring amino acid
LMIKAFLPXMLAQKSGNIINMSSVASSVKGTVDTPSLQER

SEQ ID NO: 936546 - protein, 110 aa, Homo sapiens
  misc_feature (1)..(1): Xaa can be any naturally occurring amino acid
  misc_feature (3)..(3): Xaa can be any naturally occurring amino acid
  misc_feature (39)..(39): Xaa can be any naturally occurring amino acid
  misc_feature (56)..(56): Xaa can be any naturally occurring amino acid
  misc_feature (58)..(58): Xaa can be any naturally occurring amino acid
XFXEMEFHSCHPGWSAMARFSAHCNLHLLDSSDSPASAXRAAGITGTHHHTWLILXIXSRDRASSCWPGWSRNSRPQVIHPPQPPKVLGLQALSHHAHPYSGVFEKENAT

SEQ ID NO: 936547 - protein, 120 aa, Homo sapiens
  misc_feature (4)..(4): Xaa can be any naturally occurring amino acid
  misc_feature (7)..(7): Xaa can be any naturally occurring amino acid
  misc_feature (13)..(13): Xaa can be any naturally occurring amino acid
PNLXTGXGPLYPXVLSLKTSPTLRALEWVNCFYLPTSLVNSRNFFMMKCPIYWAQVCWLKPVIPALWEAKVGRSPDPRSSRPAWATWQNAVSTKNTKISWSWWYMPVVPVTQETKVRGSL

SEQ ID NO: 936548 - protein, 72 aa, Homo sapiens
  misc_feature (1)..(1): Xaa can be any naturally occurring amino acid
  misc_feature (32)..(32): Xaa can be any naturally occurring amino acid
  misc_feature (40)..(40): Xaa can be any naturally occurring amino acid
XTGRIRQGGCSEPRWQQYSPASARHQRETVEXEREEDRGXREKRGRGRGLFLKFFKIAEQGYLWAVCQNTTF

SEQ ID NO: 936549 - protein, 105 aa, Homo sapiens
  misc_feature (59)..(59): Xaa can be any naturally occurring amino acid
  misc_feature (67)..(67): Xaa can be any naturally occurring amino acid
  misc_feature (81)..(81): Xaa can be any naturally occurring amino acid
  misc_feature (83)..(83): Xaa can be any naturally occurring amino acid
MKSLILLAILAALGKVTLCYESHESMESYELNPFINRRNANTFISPQQDGELKSKRGSXNALSRVHXRNREACDDYRLCEXYXMVYGYNAAYINRYFRKPPKGPN

SEQ ID NO: 936550 - protein, 69 aa, Homo sapiens
SFVPRAPFTMSPRRRFPRAGRELVWGPASARVPPPLWEEGAPSQPGLERRRPQARGHHGTNSLTDPAAA

SEQ ID NO: 936551 - protein, 72 aa, Homo sapiens
APQPLPPSLHLALPGLMYRALYRSARRAIRAGVRPGETFLVLSDDARTGGWPRGRSGETGYVPPAYLRRLQV

SEQ ID NO: 936552 - protein, 95 aa, Homo sapiens
MTDVALMMRRGVYDSSVGSMTGCGVDDGVWGLMTGHGVYDSLCQTKPHQLILSTPFLKTKDEHDQNLKTFFQVLKTDELLQVSSRLINRGKECWH

SEQ ID NO: 936553 - protein, 32 aa, Homo sapiens
QTPSYAERDSLSSSFRLVPIPNTSEQIPRLTD

SEQ ID NO: 936554 - protein, 40 aa, Homo sapiens
SPLREEHVTCVQSILDEFLQTYGSLITLSTDEVVEKLEDI

SEQ ID NO: 936555 - protein, 116 aa, Homo sapiens
  misc_feature (2)..(2): Xaa can be any naturally occurring amino acid
  misc_feature (33)..(33): Xaa can be any naturally occurring amino acid
  misc_feature (43)..(43): Xaa can be any naturally occurring amino acid
  misc_feature (76)..(76): Xaa can be any naturally occurring amino acid
  misc_feature (102)..(102): Xaa can be any naturally occurring amino acid
  misc_feature (112)..(112): Xaa can be any naturally occurring amino acid
WXWRKGACPLEGASLPPWNLGCPLQWPSSLLSXLTQAGKWRIXCVPKEPHSFQSRLPLPEPWRGLRDEALDQVSGXPGCIFVHASGFIGVNPPRGCLEHGPXTLAQRLIPPXNLLV

SEQ ID NO: 936556 - protein, 91 aa, Homo sapiens
QLVGAAYHPTPVEKAWALANDSNSSADEVLMGRLVLDWQRPVVRRNGGLDAHLVQAKVKLYCQDMAGWWTQEAYPTRWYLANTEDVVHGGA

SEQ ID NO: 936557 - protein, 30 aa, Homo sapiens
EAIPPPLGHVLRAVTRYLCSPGAVTGTKVY

SEQ ID NO: 936558 - protein, 55 aa, Homo sapiens
KLYFTPLSTLLDLYSGGEQDRIDSIPPWQGPSPPGASIDLTIFLHLQVSSIYGTY

SEQ ID NO: 936559 - protein, 37 aa, Homo sapiens
DPVRVKSFSCIAKSCGIIAGSLEEPLQLEVVQGAGDS

SEQ ID NO: 936560 - protein, 113 aa, Homo sapiens
  misc_feature (1)..(1): Xaa can be any naturally occurring amino acid
  misc_feature (39)..(39): Xaa can be any naturally occurring amino acid
  misc_feature (87)..(87): Xaa can be any naturally occurring amino acid
  misc_feature (90)..(90): Xaa can be any naturally occurring amino acid
XVLRRDLERKKPGRGPALASLLTGQNRAATPTPLRTACXLQKSLLVSSSPRSPRGTPERKNELQNRKGARFSRDPSPLEQDGALYLXRCXPLPPGGAQVGAGSGAGTGRVRLL

SEQ ID NO: 936561 - protein, 88 aa, Homo sapiens
AERREALRVCAEVHAQTALPVVALRRRRSPKRAEIRLQATICSRPLRKTTSGEVATLMERFPRMARFPLLHKPYHLRDHRAVYVYLRT

SEQ ID NO: 936562 - protein, 114 aa, Homo sapiens
MADTNSVATVEIERTDAELFSADVNNYCCCLDAEAELETLQEPDKCCGGQSTICGRDRKRAWRQEHLLLVSYNVMCDIHTSNPGCSSDKNTSSESYETQTFNSMGVAATPAQRA

SEQ ID NO: 936563 - protein, 82 aa, Homo sapiens
SHVVSRFHVDSQSESRAQLYRQIVMHHLQADRGDYSSWEVVSRESWTHVAEARPITHVSYVLGELIGQPQEHLSFDVAQRKG

SEQ ID NO: 936564 - protein, 55 aa, Homo sapiens
MNLLESAGFSRAILIILLTRKDQPDGTAPDSQRLSYYEKELVLECITTEGGKHLL

SEQ ID NO: 936565 - protein, 54 aa, Homo sapiens
LHDDDEDEDMLETADGDSMNTEESHQGSTPSDHQPNTLRVHRRDLFNHSIVLLD

SEQ ID NO: 936566 - protein, 98 aa, Homo sapiens
MPLLLLVLNLDRSQTMGLEDEQKMLTESGDPEEEEEEEEEISDRTEAFSAYLATLEGRNVNFSYYLASELNGRRILHFCRQLALQLASARIPNNSREH

SEQ ID NO: 936567 - protein, 83 aa, Homo sapiens
KKEVPAVPDTLKTKRRNFAELKIKRLTQKFAQKMLRKARRKLIYHKAKHYHKDYRQMYSTQIASGEDGKDKLATSMYLQTQVG

SEQ ID NO: 936568 - protein, 73 aa, Homo sapiens
PKEGCEKKRAVLAINRRVNPEDYTIQPFTGAFHWSWAFKEGVPPWATSKEIPGNFPLREIGNLQMFRIDTRLN

SEQ ID NO: 936569 - protein, 95 aa, Homo sapiens
DNLTIVAGIFIGIAFLQIFVDMPGPEFGERYRSCQGELVRPPPTAAARHLTDPAFGTLPGAELIFELHGPNTDAACKSRLMELPLGECKPGKCCY

SEQ ID NO: 936570 - protein, 72 aa, Homo sapiens
  misc_feature (17)..(17): Xaa can be any naturally occurring amino acid
  misc_feature (21)..(21): Xaa can be any naturally occurring amino acid
  misc_feature (48)..(48): Xaa can be any naturally occurring amino acid
  misc_feature (53)..(53): Xaa can be any naturally occurring amino acid
  misc_feature (64)..(64): Xaa can be any naturally occurring amino acid
  misc_feature (70)..(70): Xaa can be any naturally occurring amino acid
MTSEWSVCAEGCSCSCXRAVXVAQTCMYLENWEDLVLRKLAGLETIGXGGVQXLGNLGELGDKXRGELPXMG

SEQ ID NO: 936571 - protein, 74 aa, Homo sapiens
KSKKYTSSSCQVDSKHVEDILGNHKSPSPVNKERCISQLKSMTFWMSKKRSALNDKGGQQKHSEEVPDPVIRLF

SEQ ID NO: 936572 - protein, 230 aa, Homo sapiens
ASCRNYRGGFNRSGGGGYSQNRWGNNNRDNNNSQQQRQLQPGSPATAATTAASADHSHHPSSHRHHPATALLGTPQGQHLQVRTATSLAQAPIPAPPPSAATALHSPSYSQPPYNQGGYSQGYTAPPAPPPPAPCGYNYGSYGGYNPCPYSGWKPAPHGPNSSSQLQTSISSMLQQWNACTISNQGQLAAILRGTTTYGSYSGNTQGWHKIHSSQCDPEAPGGPCAGSSN

SEQ ID NO: 936573 - protein, 57 aa, Homo sapiens
EDWRDEHRSNFAEDLVYQIDGGDIATGYFGSLVEHLAQVFRYLACFKKGDAMIMEDT

SEQ ID NO: 936574 - protein, 60 aa, Homo sapiens
VEEKKKEVPAVPETLKKSEEFPELKIKRLRKRFAQKMLRKARKEAYLMKSKALIHKDFGQ

SEQ ID NO: 936575 - protein, 72 aa, Homo sapiens
EVRDRRCVFSPTDSRSSRASAFEVAFPRGQPRKGPKRDNWILGTRPSWVAVCSSPRLGLSRGVQTSLCSVLV

SEQ ID NO: 936576 - protein, 61 aa, Homo sapiens
RILAGIKEGLTHSYYWYTDQRKYGTCPHGGYCLAFDRFLTWILNRYHIPDVSLYPPICPRV

SEQ ID NO: 936577 - protein, 54 aa, Homo sapiens
QTSDLATNLKPSWEHRTSKEMIFLGPHRNFHQLHEGLLLRIADNMRKDGPPQPP

SEQ ID NO: 936578 - protein, 87 aa, Homo sapiens
STRSGMEWNAIEWSGEECTGVEKYDIQWNAGKWNGMEWNGLEWNAVEWNAVEWNGVEWNGVDWRGMEMSGKERNGMEWKGVKWNGVD

SEQ ID NO: 936579 - protein, 49 aa, Homo sapiens
MAPPVRYLHPRRNVLCNFGGGAGRGSGTYTRHGVHLFVGCRLSDEEQQN

SEQ ID NO: 936580 - protein, 34 aa, Homo sapiens
VDQNQNCTSTRQRSQRLCENVMKKVSGRELCLFL

SEQ ID NO: 936581 - protein, 59 aa, Homo sapiens
LAHGRFPYVKKWIFLEATTIKSVLAWHVTGARHTGFFKRTLVKGRTYGGPQGYLEDIFG

SEQ ID NO: 936582 - protein, 40 aa, Homo sapiens
IGGSILVSLSTSADVISKQEYDESGPFIVHSKFFLTDLAD

SEQ ID NO: 936583 - protein, 96 aa, Homo sapiens
VDCPGHDILMATMLNGAAVMDAALLLIAGNESCPQPQTSGHLAAIEIMNLGIFWILQIKLDLVKEGQLKDHYEQILAFCPGYSSRGSSYYSNFSSA

SEQ ID NO: 936584 - protein, 74 aa, Homo sapiens
KKVQKAAAQDRVRNFLKGTLSGSCFNLLSLEVVRGGWRSIHYLLTMDKEKPVCCVSHCLEVPDFCFHYCSLPAK

SEQ ID NO: 936585 - protein, 67 aa, Homo sapiens
EKERSREPQGGLQEGGPGRREGASHLAPRFQELERYKNLILANLQQEGLLFPYKQQPPFYNSSLPYW

SEQ ID NO: 936586 - protein, 145 aa, Homo sapiens
MLFIISSSATKESDGLVRHPHVVEHGSWTHRYFCYAPKREQDNVIVGDPIAQRLVAYRDENGGHVIYNIDDVERDAHITCLLVVEVRLVYDIYAAFRVAIRVARKWFFSPHTLSRVHNGEHIHSLGGLYALDVDALFLARHGRSS

SEQ ID NO: 936587 - protein, 149 aa, Homo sapiens
LAVGLRTGLGVPESLSVEPAPVLPSFFCCSRATLFGRYFFRARVPAPRLGPYGRPFVGKNGSLYSGQHGFSPTARGSWRQCSPPRGFKTTFRLDSAESSWGFPDSWWVSRWCPSPPQCCVALPPRPPFKAPAGHPLGEGKTQFSCSFRL

SEQ ID NO: 936588 - protein, 70 aa, Homo sapiens
ADSDKERYQQLEEASPSLRDADSAHLDAHGRIPQQKESQAEWSKEIDSLKEKVPNRQQPLNYCSFLRKRY

SEQ ID NO: 936589 - protein, 45 aa, Homo sapiens
  misc_feature (33)..(33): Xaa can be any naturally occurring amino acid
MCDFTGGQTARVQGGLPAVWTEQVDGKILYSQXGDVMEGLGRNPT

SEQ ID NO: 936590 - protein, 70 aa, Homo sapiens
VEPQVAIQRIRITLTSRIVKSLEKVVFLTLVRGGKMERISKLEYQFECLPRLLRITTRITPCGEGSKTLG

SEQ ID NO: 936591 - protein, 43 aa, Homo sapiens
SCCGGFGYCGGSSVLAGPCTARFGASIVAFRGCCSCSQNETME

SEQ ID NO: 936592 - protein, 138 aa, Homo sapiens
  misc_feature (12)..(13): Xaa can be any naturally occurring amino acid
RKWRPGLAAVPXXWREPELEPDLTTNSSGGPPSTSPSTTLTPRTSSPPSSYRSALARRMDGGSGGLVSGDNSPTTEALFVALGPGLTTLTHPLLYVKLLIQVGHEPMPPTLGTNVLWRKVLYLPSFFTYPKYILQLAS

SEQ ID NO: 936593 - protein, 56 aa, Homo sapiens
NRSAIRIPGLLAGEEGYFEDRRPLPTATLFGDRGLIRRVFLMKPAMSLPVQKLSRL

SEQ ID NO: 936594 - protein, 37 aa, Homo sapiens
CSQHHCDTKIWQTHNTTTTKLHANIVINIGAKNPTKY

SEQ ID NO: 936595 - protein, 84 aa, Homo sapiens
RECVEGKKEGGDPGKGGSNQEGHNVVFSNVFSMFDQAQLQELKEAFSCIDQIRDCIICKEDLRRTYSKLGASTNLQPCELGSLL

SEQ ID NO: 936596 - protein, 70 aa, Homo sapiens
KSILIFYKGATTYEVAARLAQQEKQDQVKLSLCKPDSFLGIWVISQWLLFLTISTGWSSITSVVLCAAVF

SEQ ID NO: 936597 - protein, 33 aa, Homo sapiens
VQPDLGHDKDKDKWKEVQKKVVESPYEVIKIKG

SEQ ID NO: 936598 - protein, 101 aa, Homo sapiens
MITVHCSLELPGSGDPLISAFRVARTTGAHHHQLIFFIFVEMRFHYVVQAGLELLASGDPPASASQSARISQCTWPLPFRLLLVVIPEQGLYCTNLYYPGA

SEQ ID NO: 936599 - protein, 75 aa, Homo sapiens
ERGGAAQSQEMMEVDRRFESQSPPMKRGEHSSRIVATSVTEPQDGEERGRRPPRGHKLPLDMKTITWTEMQQDVD

SEQ ID NO: 936600 - protein, 216 aa, Homo sapiens
GKGQPPRGNNSSRPGHIMHPPRSACHRPHKIPAAPNSPGADTRFYKQTGWGKTPCGPHMSDTTAVCREATPCGTRTHVPRQRPTLLERRAWLRQEMVSRTAPGGQHHDEGHPTRSPYSPGHKQLSPANRMSVRYNTYTTHVYHTHGRSAVKYSHARRPTTQAECLARALTRAHTHGRSGSVLLPTVRAHTQCLAPPHSTLSMGDKTPRHLNDHAGS

SEQ ID NO: 936601 - protein, 69 aa, Homo sapiens
MAALSDSSLHRCPEAALQRSRFWAGGHVATTAGDWLPTPSGYGAPYRAAQTGHMRMAALLLQGKASFEE

SEQ ID NO: 936602 - protein, 117 aa, Homo sapiens
RRLFFLLESHSFAQTTVQWHDHGSLQPPHPRLKRSSHLSLPCSWDYRCAPPHPANFCVFCRDRFRHVAQAGLKLLGSGDPPAPASQSAGITGISYCARPQFPTLISELQAHFSLLST

SEQ ID NO: 936603 - protein, 62 aa, Homo sapiens
VESELYFLIARYLSAGPCRRAAQVLVQELEQYQLLPKRLDLGGQRAQQGASGGSWSCPLGIW

SEQ ID NO: 936604 - protein, 36 aa, Homo sapiens
LWFWYIHDRIEDISHYYRLSCYDYNIYDDDDDDDDD

SEQ ID NO: 936605 - protein, 40 aa, Homo sapiens
TLQLDFLMPIFQITTTCKKTMTGKLNSSKELRQVYTMKVP

SEQ ID NO: 936606 - protein, 37 aa, Homo sapiens
MAAEGEPLGEDQLGSALLLLTMALPRFGNPSAEAFTG

SEQ ID NO: 936607 - protein, 53 aa, Homo sapiens
KTLVPGPGPKLIYWSTGRVFKVGLLISEYEVIRKIKLITEDVRVNLPPTSMAW

SEQ ID NO: 936608 - protein, 53 aa, Homo sapiens
DKPHMQTYEVDLNKCGPMVIGMLYIKIKNEVDSTLTFRGSCREGICGSCAMNI

SEQ ID NO: 936609 - protein, 52 aa, Homo sapiens
SVSFYTRRMGSYLYTPFTERYRDYGPESPAPQFLNAAINDQCHCCHGYPPGG

SEQ ID NO: 936610 - protein, 31 aa, Homo sapiens
WSEPKEKLEGDLKLTQESIMDLENYKQQLDE

SEQ ID NO: 936611 - protein, 53 aa, Homo sapiens
VRIHTYACACTHFAHVYVHNERHMQHAHLVWWQGSRLKAVTAFTVTVLYTYVH

SEQ ID NO: 936612 - protein, 84 aa, Homo sapiens
VRTLVDTKAFPTTVYSSQPEHSEVKELNTFQGKMTMGYELTVNVWVFQVAMCEVRFEHVRVPKENMVLGPGDGFEIAQGDLGPG

SEQ ID NO: 936613 - protein, 48 aa, Homo sapiens
  misc_feature (29)..(30): Xaa can be any naturally occurring amino acid
KKEKNRKRRNRKKKKKPQRFRRGVLLELXXTGRKTQPVSRGSDSPAAD

SEQ ID NO: 936614 - protein, 68 aa, Homo sapiens
QCRKPKDFTLKLRPLVPVSQDDECKGKVLEEIKRATPMNTNNEKQKKLIVDGRGFIGLYRGSTHHTIP

SEQ ID NO: 936615 - protein, 56 aa, Homo sapiens
LIQLIVRSLLSLSSIHHASSDIQVKTERVLRPAFELISASVKDLSRFPFPFKRDLP

SEQ ID NO: 936616 - protein, 90 aa, Homo sapiens
ALGADLTGYLKSPPGQVTEAVKVSKLVGYRHIDCAHVYQNENRWGWHSETRDRCNVEPHRQQTVVTTMKGLVKGPAKTLSDLKLDYLDLY

SEQ ID NO: 936617 - protein, 71 aa, Homo sapiens
MLVIQITEKAQCIPWVIFVGNGNFSMAHTLQFFVILTHPSILMFFFFGNFYNGKLAEGPRYFFKGYRWLTI

SEQ ID NO: 936618 - protein, 55 aa, Homo sapiens
AGATVGSWSDRGCTRAGEHDCRRVQARALAKEPRVLFEPSSDPIITCVALLWSCP

SEQ ID NO: 936619 - protein, 32 aa, Homo sapiens
MTIDDIECSCEQHVLSRCSRSHVLAELCLMQT

SEQ ID NO: 936620 - protein, 62 aa, Homo sapiens
VKTPHMPPVWETVCYGVPTLPGINKHTLGERPYSCLKFEKTFGRGITSSGTRNPLHDRPAGA

SEQ ID NO: 936621 - protein, 96 aa, Homo sapiens
  misc_feature (16)..(16): Xaa can be any naturally occurring amino acid
  misc_feature (40)..(40): Xaa can be any naturally occurring amino acid
  misc_feature (43)..(43): Xaa can be any naturally occurring amino acid
  misc_feature (50)..(50): Xaa can be any naturally occurring amino acid
  misc_feature (54)..(54): Xaa can be any naturally occurring amino acid
  misc_feature (89)..(89): Xaa can be any naturally occurring amino acid
MSKNGDQHPSAILFVXISLQDKAGGSQVGSPLKWLGPLSXCGXRAGVLLXASCXELGPQIAFSPEDSVCCCLPGAQELAQSLELSFIPXGITLQPS

SEQ ID NO: 936622 - protein, 115 aa, Homo sapiens
RPRPVCADALARSSYDAHLACLAATLAWGVGPGSVGLRGSSLAEVQRLALSVCRDLAVYGLPQESSNGCFPSISWGWAPFRITPEDGLGFPLCPDSRSWYQSCFPEGSTARAGCL

SEQ ID NO: 936623 - protein, 91 aa, Homo sapiens
TGIAGLSPSLSYYHTLLKDLSDSLQDIAKSTLTLQSQIDSLAAVTLQNHRGLDLLTVEKGGLCTFLGEDCFSTNQSGLVRDAASRLNEKGS

SEQ ID NO: 936624 - protein, 30 aa, Homo sapiens
AVVPRRPEENIASWSGEQPFLQLKLEELRP

SEQ ID NO: 936625 - protein, 44 aa, Homo sapiens
QQRVRRHRGHGSLGGGEHSRMNPLRAVWLTLTAAFLLTLLLQLL

SEQ ID NO: 936626 - protein, 72 aa, Homo sapiens
EREEDDDDSDYPERMEDDDDDASYCTEAASGAIVPTAALQVGETKSTSASFSYIGEKTSALEFPSPLGFNGA

SEQ ID NO: 936627 - protein, 56 aa, Homo sapiens
  misc_feature (17)..(17): Xaa can be any naturally occurring amino acid
  misc_feature (53)..(53): Xaa can be any naturally occurring amino acid
MAEGEGYKDFLHIVGRXERGSGKYFLNKQIFVRSHSLKTALVGMGAKPSRKLXPGV

SEQ ID NO: 936628 - protein, 114 aa, Homo sapiens
YFSRKKMGVSLNVGPRLGLKNPGLKVIPSQSRPPQNAGINKTWSHPCPGFLFIIIIFIFYFFIFFETESRSVAQAGVQWRDLGSLQALPPGFVPFSYLSLLSSWDYRCPPPRQD

SEQ ID NO: 936629 - protein, 71 aa, Homo sapiens
TQQMRYSMLMDRRINIRKWHTAKQFKIQWHPIKLHDFLQKIGKATLSHGPKSPNSKQSYGKTSWGITLLLN

SEQ ID NO: 936630 - protein, 43 aa, Homo sapiens
QVDITQKQLEEEISRLPKEIDQFEKIQNNSKLFRIKLFNFKMS

SEQ ID NO: 936631 - protein, 53 aa, Homo sapiens
MARTSAVTKGGKKGAKKQRWVSPVGVSKRLLVSVKDTVVVVKYVSHVGAKHRW

SEQ ID NO: 936632 - protein, 53 aa, Homo sapiens
RLVPAALQSNQFVLALLALLFSLQGKRDDHRIILFMFDMYKEFQGNKIGGFID

SEQ ID NO: 936633 - protein, 59 aa, Homo sapiens
LVESANHREQRASLLWAFSDVVLHPATVFEMIQDGMTIAKEGDLRANYADPRGSRPLEE

SEQ ID NO: 936634 - protein, 69 aa, Homo sapiens
CGLQEAFWEQPLYTWKTGEPYCEKDYINLFSTKCHCCHLPPEAGDKVIEALATLGTTPLLFAQSCHVNL

SEQ ID NO: 936635 - protein, 41 aa, Homo sapiens
MAGTLSAEDKAAVERRSMIAPHLWEDGEKAAKEVKLLLLAP

SEQ ID NO: 936636 - protein, 56 aa, Homo sapiens
MSDVMYLPPIRNSGHIIIDISQKIVIAFMLWSPCLFRGPNVEAYCLRCECKYEGRS

SEQ ID NO: 936637 - protein, 105 aa, Homo sapiens
KNEKGLKQCLLDRTGHRTRNATWLKGKQSAAWSKKMMSHSVTQDGVQWQISAHCNLCLPGSSNYPASATRVAEITGLCHHAQLFFVFLVERGSPCRQASLGLLTS

SEQ ID NO: 936638 - protein, 53 aa, Homo sapiens
RQGGAIMGSWTSAITRDRKFRRKEPRARISYSGCWSSIQVLAEDHSHHQVVLK

SEQ ID NO: 936639 - protein, 58 aa, Homo sapiens
RDGQQEGGDRGKVAATKAGPTWVLPTGFSMFEQAQIQEFKGGLQLVSTRIGDGIICKA

SEQ ID NO: 936640 - protein, 69 aa, Homo sapiens
EPIMATPLSGGRLEATGEKVLRYETSIQLRSCSRDLSKGCLDHGDKVYSSLAKLPSNCEMSFERFQEAK

SEQ ID NO: 936641 - protein, 56 aa, Homo sapiens
DHCLAPSTMKINIIAPPERKYVRRRVGGVQSVAVAWSTVSSTSGRVSNARTVVTEV

SEQ ID NO: 936642 - protein, 67 aa, Homo sapiens
FRHEARSKRTPRAGSPLSPPVAAFASSAARTGRGERAPRQPSPAQPYSLPKPGQQRFLTKKMLEEES

SEQ ID NO: 936643 - protein, 47 aa, Homo sapiens
VKFSKEKYILDSSPEKLPCLQHCNPCPCRPCSPFCHSIACLPCRPPF

SEQ ID NO: 936644 - protein, 131 aa, Homo sapiens
RNKGLMVKMTYDYIKKLNGPLLTNSNPHSIATVACPLLCTDLMEQRTSFRHLTHPLRSYVSSQHGKILERRPNSFTGCHFLNFGKEYAPNPLISRGKVWRRRVFGVSSWFPAEVVKVNNRALDTHRNVTHS

SEQ ID NO: 936645 - protein, 128 aa, Homo sapiens
FGTGPKEHLGGDQAEAEVSHPFCPVCCQREEGEPMPASPGGPGDITRSLAGDRQTRRDNGHLRGMSHAAQGTAGWNAPAGPWAGPEATWMPLPTQPPGLPSPPPHGILPVPRSGCPHHMGAQRRRGPP

SEQ ID NO: 936646 - protein, 76 aa, Homo sapiens
  misc_feature (74)..(74): Xaa can be any naturally occurring amino acid
MPVKGGTKCIKYLLFGFNFIFWLAGIAVLAIGLWLRFDSQTKSIFGQETSINNSSFFDEESIFLIGSRAPVSDXLV

SEQ ID NO: 936647 - protein, 113 aa, Homo sapiens
APPSLCLAWLQMSKNVATPGQVVAVAPEELSAGSPGSPKGRAVVQQDVCAAQAGASFPLGSRVRTHTQWLKAAAGDLTPRPGLPSSHHTSGLGAPPLPQLGSPARTQLGVCSG

SEQ ID NO: 936648 - protein, 30 aa, Homo sapiens
ICACRRDGQGGALMQVEVYVAISLIFLVRR

SEQ ID NO: 936649 - protein, 52 aa, Homo sapiens
MPPRFDPTEIKVGIPRCTEVGRCHFCPGPQIGPLGLSPKKFDDIPGTGDWRA

SEQ ID NO: 936650 - protein, 36 aa, Homo sapiens
ASSFASPAEPHRSDTMGKVKVGVNRNLVSMGRLVTR

SEQ ID NO: 936651 - protein, 73 aa, Homo sapiens
GERTVERGSGAALLEIRGGRQDSLAAVPLLYIGLKTTTNISHERIQGRSSTSPSIINEGVIINGHSHEVDNPF

SEQ ID NO: 936652 - protein, 123 aa, Homo sapiens
PLGSFQAWPKLGKWDGGCPASPTPLPECVFVMSAGIIQRAGEANTQNSFAGQRFPHPERPHKPPPEPNSQDLRPRDRNGEGGPGERCPWDCSPSLGPNGVLFFGEVGGWRQLDLVSSSINSHL

SEQ ID NO: 936653 - protein, 104 aa, Homo sapiens
PNTHQLGALKKRRLERAIRFATQKALLKSQGGDEDVEFPRKHLTGNFAEEMICERAPAEYLACSSHPLRAPLPGVLDFLTRPDCAGFRLPAGGQYPRALELLLR

SEQ ID NO: 936654 - protein, 58 aa, Homo sapiens
QTLAGQAPPVRGLRPTLPSHSPLRVLQICQCTYKVTSRPVDSPSLTSSRGLACGFLEI

SEQ ID NO: 936655 - protein, 42 aa, Homo sapiens
LVPNPSLPILTTSLVCLIARFYDGERAIGKDNNLLAKFDLTR

SEQ ID NO: 936656 - protein, 73 aa, Homo sapiens
  misc_feature (72)..(72): Xaa can be any naturally occurring amino acid
GKGVSPRWSGWSRTPDLMMRSTHTSAFQSDAIYRHEPLHPADTWGKFVAIQRHHKQCGKKIELPDVDVLSYXK

SEQ ID NO: 936657 - protein, 34 aa, Homo sapiens
DSARRSPLEFMDDTSRSIIRNVKGPCAGDVLTFG

SEQ ID NO: 936658 - protein, 45 aa, Homo sapiens
VNQDDLYQALPSGSDCQPPGLDVTSPEPLPTNHPLLTLKDLCDSC

SEQ ID NO: 936659 - protein, 75 aa, Homo sapiens
MEHEDEPDVDEPLETSLDIFLDGSPLSQSKAAFEGSCSSCRRRQTRFELKRKDRNRLRGCLAGAQKQQELEEREE

SEQ ID NO: 936660 - protein, 47 aa, Homo sapiens
YTIAFISKDTSLRTPLYDSLKALLSKAPYRLGQKYLAAYSLKLGRSM

SEQ ID NO: 936661 - protein, 40 aa, Homo sapiens
MRPLVASYSLPPTRPRPFLFVPQFFDLNNIEAILLLPCFN

SEQ ID NO: 936662 - protein, 42 aa, Homo sapiens
GETYDAGEQLAVTPKKMAVFAPLIALCIRCRDFHDGSPNLTT

SEQ ID NO: 936663 - protein, 48 aa, Homo sapiens
MALGRGNPLSPPAVHLELRRDDEGVLRTCRDASLCKRFAVGIGYWHDP

SEQ ID NO: 936664 - protein, 41 aa, Homo sapiens
  misc_feature (5)..(5): Xaa can be any naturally occurring amino acid
HPLPXNADNMYYFSQLALTLNAWHSGTAPQTAGSRPGPETD

SEQ ID NO: 936665 - protein, 69 aa, Homo sapiens
  misc_feature (17)..(17): Xaa can be any naturally occurring amino acid
DYRLLAQEQRANEQRKXSEEEETSIDVAGQPNEVTKAAESPDQRDTHGGPQEEEIQSESMGLHGKLSSS

SEQ ID NO: 936666 - protein, 66 aa, Homo sapiens
MTLPTDLGSAVRGRDDVLGEPRAHQGHNFPEAHSTIFLGGSDGMDCGQESFQDTKVVMDDLARGPK

SEQ ID NO: 936667 - protein, 49 aa, Homo sapiens
PNGSLQKATASKGESPGFSTEKFKDNLTLTKGDKIKRHKVLEQTAEFLQ

SEQ ID NO: 936668 - protein, 30 aa, Homo sapiens
VCARFTVSCKARVHTADTCETCGCRGGPKG

SEQ ID NO: 936669 - protein, 64 aa, Homo sapiens
VEEKASRKERKKEVVEEEENGAEEEEEETPEDGEEEDEGEEEDEEEEEEEMKARREESSAEEDE

SEQ ID NO: 936670 - protein, 49 aa, Homo sapiens
TLVCPIPSQGFFMSDAPKSLAQLCHLSGVSLSACVCPRPQEWDVSYFMP

SEQ ID NO: 936671 - protein, 89 aa, Homo sapiens
PGSTMGDDSEWLKLPVDQKCEHKLWKARLSGYEEALKIFQKIKDEKSPEWSKFLGLIKKFVTDSNAVVQLKGLEAALVYVENAHVAGKP

SEQ ID NO: 936672 - protein, 137 aa, Homo sapiens
  misc_feature (17)..(17): Xaa can be any naturally occurring amino acid
  misc_feature (31)..(31): Xaa can be any naturally occurring amino acid
  misc_feature (44)..(44): Xaa can be any naturally occurring amino acid
  misc_feature (54)..(54): Xaa can be any naturally occurring amino acid
  misc_feature (62)..(62): Xaa can be any naturally occurring amino acid
  misc_feature (69)..(69): Xaa can be any naturally occurring amino acid
  misc_feature (75)..(75): Xaa can be any naturally occurring amino acid
  misc_feature (80)..(80): Xaa can be any naturally occurring amino acid
  misc_feature (125)..(125): Xaa can be any naturally occurring amino acid
  misc_feature (132)..(132): Xaa can be any naturally occurring amino acid
  misc_feature (137)..(137): Xaa can be any naturally occurring amino acid
TNNILKIVADFFASFKXPHTLLQRVKACTTXEVQEMLMQITSLXSLIAFLLPIXTVGLQGDXRSYSYVXGISSKXEPDWXSLIFLARLIPRMCHNVNRVVYIFGPPVKGTSYRCYSHFSGQQGCXVLYAKLXFEGPX

SEQ ID NO: 936673 - protein, 84 aa, Homo sapiens
GVGASSQGPLGEPSLCSHLWVLAHQVNCIGELKYTGTYMCGSELKGSFIQAAKPGFDLKFCKNFRAPRVLILTQQGAKGAYGRF

SEQ ID NO: 936674 - protein, 56 aa, Homo sapiens
RAGLMWWPASQAFPGRHKTSSEPGQGFGGPQSLAFRPRELILGKGALTQGLARPKT

SEQ ID NO: 936675 - protein, 52 aa, Homo sapiens
GQVDYSKIMNGKLSARNRKVQCHVPGKEAGSTDCILRVISSQHWRFKERKLM

SEQ ID NO: 936676 - protein, 54 aa, Homo sapiens
RLQAALARPAPGGCSQEAFRFQDPGKGCFFVYQSRRGSLHPPAVESIQGSPLPK

SEQ ID NO: 936677 - protein, 142 aa, Homo sapiens
  misc_feature (1)..(1): Xaa can be any naturally occurring amino acid
  misc_feature (28)..(28): Xaa can be any naturally occurring amino acid
  misc_feature (34)..(34): Xaa can be any naturally occurring amino acid
  misc_feature (39)..(39): Xaa can be any naturally occurring amino acid
  misc_feature (46)..(46): Xaa can be any naturally occurring amino acid
  misc_feature (60)..(60): Xaa can be any naturally occurring amino acid
  misc_feature (79)..(79): Xaa can be any naturally occurring amino acid
  misc_feature (85)..(85): Xaa can be any naturally occurring amino acid
XLMPYKPKHLGRLKWEGSLEPPGIQRSXLGNRAXSVSPXKHFLKIXCGSPGTVAHGCNLXTLGGWGTFGGLWITRSRDXDHPGQXGETLSLLKIQKNSWMWWHVPVVPATREAEAGESLEPGSQRLQWAEIAPLNSTLVAEG

SEQ ID NO: 936678 - protein, 61 aa, Homo sapiens
  misc_feature (22)..(22): Xaa can be any naturally occurring amino acid
APSHQGCAPPSSSDSSSDSSSXSDSSTDDSEEELTQRLAELQEQLKAVHEHLQPSLSPSRT

SEQ ID NO: 936679 - protein, 35 aa, Homo sapiens
KIKNRYFPAFEKVLKSHGTRTTLLVNKLSRVCTFI

SEQ ID NO: 936680 - protein, 48 aa, Homo sapiens
DRPLLQEARTHHQLVGGQGPCCLTRPGASSCCLQQRIREAYVLLRGIG

SEQ ID NO: 936681 - protein, 38 aa, Homo sapiens
IGSHGGLAQLVSCARVLATVFFGDFALSGFSFWANFTS

SEQ ID NO: 936682 - protein, 73 aa, Homo sapiens
AALTERLLELVFGRDVSSELTFCFGKLAVGSRWYHGGSRPSRSGETNDGGFPGDSQYTTDTGLCGKAIESPPV

SEQ ID NO: 936683 - protein, 43 aa, Homo sapiens
AVDSLDDDSIALLTTTVSFSFTAFSSRSDRANPCTCRVTETDR

SEQ ID NO: 936684 - protein, 119 aa, Homo sapiens
AAGLRQLRERTGAAALDAPLSHRPQLKPSRSPARPPIAAVALWRHVQNGSAGMQEESLRVLGRTALTNNGNGGSVQPRFLFIMETWKKYCWTHSMSLDGVAPRALTVTAELARRHCKIR

SEQ ID NO: 936685 - protein, 78 aa, Homo sapiens
NPLVDFAAIIWLILCLSSHSAAAQQRHHHHHHHLLFLQVEEIEASNIDNVVLDEDRSGARACKTSGGTSEKKNLGEYY

SEQ ID NO: 936686 - protein, 62 aa, Homo sapiens
MVSGFWVNLVHLGNGALPLSRTVGLLKHISIDCGPHVLRTHALVGPLPGAMAAGRCPEALVV

SEQ ID NO: 936687 - protein, 164 aa, Homo sapiens
ESPFMGGARGHAVYVEPHGHGPALSVQGLSRATPVRLLSLAFALSAHSVFEGLAWAAGGGGESGEPVRGGGRPRDTGGRGLGISMARSATHRRSAKLAVTVSAMIPWHRLGWALRAPGLPGSVASVLLQGLAGGTFLFITFLEILAKELEEKSERLLQVLLLVL

SEQ ID NO: 936688 - protein, 35 aa, Homo sapiens
FRSVRHMIYDLIDWLITNLSWTSAYDDLKTLEDGY

SEQ ID NO: 936689 - protein, 47 aa, Homo sapiens
FQLPWLPEIVYSGGDDGLLRGWDTGYRHISLHQQRHTMGVAASEQPS

SEQ ID NO: 936690 - protein, 119 aa, Homo sapiens
  misc_feature (11)..(11): Xaa can be any naturally occurring amino acid
  misc_feature (28)..(28): Xaa can be any naturally occurring amino acid
  misc_feature (34)..(34): Xaa can be any naturally occurring amino acid
  misc_feature (45)..(46): Xaa can be any naturally occurring amino acid
  misc_feature (53)..(53): Xaa can be any naturally occurring amino acid
  misc_feature (104)..(104): Xaa can be any naturally occurring amino acid
  misc_feature (116)..(116): Xaa can be any naturally occurring amino acid
FGTERSEFLLXKRGLTLLPSLECNGKVXAQCSLXLLGLKRSSHVXXPRLQVHXIIHGTGSRYIAQTGKFSIFKSGLGTPDSVFHRVTIYPDNAPFHAVFPHLQXCSPIPPPLGCGXLPG

SEQ ID NO: 936691 - protein, 37 aa, Homo sapiens
NSSNLRKDFLALNGNLQQRVTGHGNNTDSTKHLDYYS

SEQ ID NO: 936692 - protein, 80 aa, Homo sapiens
KQAILDDMTTKRAVPVGFLALPSVIEICPAWLSLWRRFARLGFALEHNNHLWGRVRSTTHSSFSKQKHPTMSEPQEHPPV

SEQ ID NO: 936693 - protein, 43 aa, Homo sapiens
KRCGPPSLALALPNDQGGSLDECRNVKRGNSGRTLGVELGLGI

SEQ ID NO: 936694 - protein, 64 aa, Homo sapiens
MGCGGDTPPPTVLRRQAAENDCLFCLGGNVPELGSSKAALLELLPSQLAWLFGYYCSMIFGSLQ

SEQ ID NO: 936695 - protein, 41 aa, Homo sapiens
KYGFEPKKLLDQLNGYLLTAGLCSVRESNVLNDQEDSNSTG

SEQ ID NO: 936696 - protein, 31 aa, Homo sapiens
VDPYHGGDHQRSPPHPAVFLDHCHSLRSSLT

SEQ ID NO: 936697 - protein, 110 aa, Homo sapiens
MLVQSAIRVATRGFIRYGWRLGLENCSVFLTIFNTVNTSLNVYRHKDALSHFVIAGAVTGSLFRINEASVLVAGGIIEPCWALLRSPADGISKYSGETVQERNRGIEGPP

SEQ ID NO: 936698 - protein, 74 aa, Homo sapiens
RRDYYDYYYSYYDYDDYYIPYYYDYYYYYDDSTRNEEYDSYDSAANTTTYDYYSGPPRTKEATAYYEAELDYDQ

SEQ ID NO: 936699 - protein, 46 aa, Homo sapiens
MDIDRDFTEELTFGTRLREADLGQLLGETVGYDDHTTLNLFTRLLP

SEQ ID NO: 936700 - protein, 40 aa, Homo sapiens
HLRELDFGQAWLKPLVNDVTVMILEIGNLSSTLESYLIPI

SEQ ID NO: 936701 - protein, 35 aa, Homo sapiens
NAQEEAEATFWGILDALPLRTRDFFLAGGTKPPLA

SEQ ID NO: 936702 - protein, 55 aa, Homo sapiens
YLGRKEHDILSQLQKTSSVSITEIISPGRTELEIEGARADLIEVVMTIEDMLCKV

SEQ ID NO: 936703 - protein, 91 aa, Homo sapiens
  misc_feature (12)..(12): Xaa can be any naturally occurring amino acid
  misc_feature (47)..(47): Xaa can be any naturally occurring amino acid
  misc_feature (65)..(65): Xaa can be any naturally occurring amino acid
TYNGPRPLPQAXCPPRLTITCTPQNPDYVLDTDGDFDLEDTMDVARXVEELPGPANGQSVDPARXIVPRDLSIFSFFIFTRGITLVDVLIP

SEQ ID NO: 936704 - protein, 42 aa, Homo sapiens
ARCECRPGGASASVTRLAPGMAGTTGCQPVPEPEEVGTLPTV

SEQ ID NO: 936705 - protein, 37 aa, Homo sapiens
LTIVFKTLRGQILDENAVIAKGRQGRPLQFHYFPKII

SEQ ID NO: 936706 - protein, 41 aa, Homo sapiens
MSLRAHWEPEYLMKGYHRTQIPAYQSRLDTGNSMTKYTRRL

SEQ ID NO: 936707 - protein, 67 aa, Homo sapiens
  misc_feature (16)..(16): Xaa can be any naturally occurring amino acid
  misc_feature (22)..(22): Xaa can be any naturally occurring amino acid
  misc_feature (49)..(49): Xaa can be any naturally occurring amino acid
  misc_feature (61)..(61): Xaa can be any naturally occurring amino acid
GPTFKAAWGKVGAHVXSYGLRXPWERMFLSFPTTKTYFPHFDLEATALXRVKGHGKKVAHXLTNAVA

SEQ ID NO: 936708 - protein, 57 aa, Homo sapiens
GPAGPLVFLTAQSWLGNRVTDRYFRIQEVLKQARHFLGKAKSLLTGWAVRPVIRAFV

SEQ ID NO: 936709 - protein, 109 aa, Homo sapiens
  misc_feature (13)..(13): Xaa can be any naturally occurring amino acid
  misc_feature (17)..(17): Xaa can be any naturally occurring amino acid
  misc_feature (22)..(22): Xaa can be any naturally occurring amino acid
  misc_feature (61)..(61): Xaa can be any naturally occurring amino acid
  misc_feature (82)..(82): Xaa can be any naturally occurring amino acid
  misc_feature (90)..(90): Xaa can be any naturally occurring amino acid
  misc_feature (96)..(96): Xaa can be any naturally occurring amino acid
  misc_feature (100)..(100): Xaa can be any naturally occurring amino acid
  misc_feature (109)..(109): Xaa can be any naturally occurring amino acid
QPRTGHDRQGARXLSAXLAPSXFVGSISQCLYLNSATSMAGKEFYSACVGQALPFITYFGXTKDTVDPWLFQHINMWGGYNXEHVQEVPXFSYNRXTAVXSCLAGTALX

SEQ ID NO: 936710 - protein, 41 aa, Homo sapiens
DVVHWNSDIQSLDNYSTASSHSGGPPQPTALLSHSQSVADI

SEQ ID NO: 936711 - protein, 49 aa, Homo sapiens
TAPYEGGKRSQEKWLSFLEDCICEALYVHIRILEDVRHRTKDQIASDGS

SEQ ID NO: 936712 - protein, 93 aa, Homo sapiens
  misc_feature (9)..(9): Xaa can be any naturally occurring amino acid
  misc_feature (20)..(20): Xaa can be any naturally occurring amino acid
  misc_feature (30)..(30): Xaa can be any naturally occurring amino acid
  misc_feature (33)..(33): Xaa can be any naturally occurring amino acid
  misc_feature (47)..(47): Xaa can be any naturally occurring amino acid
  misc_feature (79)..(79): Xaa can be any naturally occurring amino acid
CSFLGGPGXFLWQQQGGKKXSVQKEKERAXVEXNGMEHNEARTKHKXEAPGGTQMEKIQYASRGERHSAYNEWKKALFXPGEEMLQMRLHFVK

SEQ ID NO: 936713 - protein, 100 aa, Homo sapiens
  misc_feature (37)..(38): Xaa can be any naturally occurring amino acid
AEGGISCRGGRGHSRSSGSVELPQRTAESGQRRRVSXXGHECGRHITPSTLSVPFPTPLEAEIAMGPWAPDAEPHQRVVWGRISQLSGQDPGSSAGKLKD

SEQ ID NO: 936714 - protein, 84 aa, Homo sapiens
HGPLRRRRRAHGLRNFLFLLPGTKAVAEKAFKFRDQFQPQLSIGDLELSLMLGLEAVQHPCRLGSDQSRLPTGRSLVQVHALCR

SEQ ID NO: 936715 - protein, 47 aa, Homo sapiens
EAIRIAAKNCELQARLQARKNSIRKSEGKRADIEKLNQAVLRYQMKG

SEQ ID NO: 936716 - protein, 73 aa, Homo sapiens
LVQRDPDSTVRVWHLYPPEGIIVGSIITKCSIPVLALQSGHAENCWDGIQRCNSIFLRLLLDRVCTAYRELDA

SEQ ID NO: 936717 - protein, 42 aa, Homo sapiens
NTTAIAEGLGFAWEPQSFDPDVLQACLCSLVRWLRGLRQARF

SEQ ID NO: 936718 - protein, 50 aa, Homo sapiens
PVAKKQQQLSAITGSLQRNLCRVPVNYGTGNGGQAYKGKAGFTKDLPEGR

SEQ ID NO: 936719 - protein, 54 aa, Homo sapiens
QVNPPEGKECTPEVEEGVPPTSDEERRQFRSENFQDCSNLSNQIIKKLNMSQAD

SEQ ID NO: 936720 - protein, 56 aa, Homo sapiens
SSETSQPWPCRECFDQDELGQLGPPSCSGVNIQSCGAMSLTVTNPQEGCPGRLVEA

SEQ ID NO: 936721 - protein, 106 aa, Homo sapiens
QTQRDQRRLKKVGETEAQKEGSEDVGNLPEAQEKNEEEGETATEETEEIAMEVRKGKRGVGRTPEGEEPREDEIPRLFMLHFFHFPENGAISTFNSSQPTHRSCLS

SEQ ID NO: 936722 - protein, 41 aa, Homo sapiens
MQGEDMSCKGAQCSYRALLCRCVPRQALEFVIRTCGGRSSQ

SEQ ID NO: 936723 - protein, 76 aa, Homo sapiens
PHQSEVLASVGGSMIIGGIDHSLYQAVSGLHPSGGSGIKVIIVRVESCTGSEMTQEITIQSIVTVHTTFVCQEVLS

SEQ ID NO: 936724 - protein, 63 aa, Homo sapiens
KGRARVAKGQGGGGPSYASLMKERSLALLGCSEYVVHRSEDEGRAKEQRHLHNKEHFRAKQKE

SEQ ID NO: 936725 - protein, 71 aa, Homo sapiens
  misc_feature (39)..(39): Xaa can be any naturally occurring amino acid
  misc_feature (54)..(54): Xaa can be any naturally occurring amino acid
  misc_feature (71)..(71): Xaa can be any naturally occurring amino acid
KLQNSYNGKKRVLSHSQQATRLLTSSSPWIFAKMKDSAXLHFSCYCLWPLDKAXTTNPPGTQALSMDYGNX

SEQ ID NO: 936726 - protein, 65 aa, Homo sapiens
  misc_feature (14)..(14): Xaa can be any naturally occurring amino acid
  misc_feature (28)..(28): Xaa can be any naturally occurring amino acid
  misc_feature (51)..(51): Xaa can be any naturally occurring amino acid
PPSTTSGPVVPLTXKLSAGDKLAEFLQXPDRYYDPNGFNGPLPPKPGSSSXLGYDNILGPQQPAV

SEQ ID NO: 936727 - protein, 90 aa, Homo sapiens
KKKPQRVRGGFSKSSGHRGERLNPVRWLCFPASYVEIHVCHSRTLNLRAQLYLFKRIFEAFKLTDDVRGEERRQKTDNWGLCSPRGGFKG

SEQ ID NO: 936728 - protein, 66 aa, Homo sapiens
NVYISDGPTWTSGDFLVTTAESSAHVKSDINVTPGVKSNVNPADNLDLFLLDSSKTMLCLGRYLTG

SEQ ID NO: 936729 - protein, 56 aa, Homo sapiens
ENEDSSVHISPRQKRDANFSIYKGRRCRMGLFDYFAENVQVSIPSKGGKLRSYQIL

SEQ ID NO: 936730 - protein, 75 aa, Homo sapiens
  misc_feature (28)..(28): Xaa can be any naturally occurring amino acid
  misc_feature (35)..(35): Xaa can be any naturally occurring amino acid
  misc_feature (53)..(53): Xaa can be any naturally occurring amino acid
FWQFLQKQVEVPGFPRNDEHTLPRPYTXGPQRIFXRTVRGMLPHKTSEGRFSXTSYGVFTGFHRLTDKKKRMVVS

SEQ ID NO: 936731 - protein, 36 aa, Homo sapiens
ERLMAIPTVSIAFTVSFNIFILRPHHATAMTYIELH

SEQ ID NO: 936732 - protein, 68 aa, Homo sapiens
KDACGLGDTVSGNGIPEPQSYAPPRPTDRLAVRRFAQRSVFHRFQPNVSCTCNCKRSLFQSMEITELE

SEQ ID NO: 936733 - protein, 35 aa, Homo sapiens
IVTPLDIGYNLVSLHVPNMTLDGTFLDTPRGHVVS

SEQ ID NO: 936734 - protein, 42 aa, Homo sapiens
MISDRIELRIDLYAEEKYTSIFAGLPCTLHRILNTCRDKLDP

SEQ ID NO: 936735 - protein, 46 aa, Homo sapiens
PLHYLPDTLANHLPNKFGDEIEDLALIVRKKRCKFTSIFARLPIPL

SEQ ID NO: 936736 - protein, 101 aa, Homo sapiens
NFLRDPPAGVQFNFDFDQMYHVALVMLQEDELLSKMRFALVPKLVKERCSRGLLLPRLLISSQPAHGLLPTAGRRKEERTLQKQISAAEQYAQTHRCINLA

SEQ ID NO: 936737 - protein, 37 aa, Homo sapiens
AISALPKIASKSEAMRTFLGLCPLMNYGVPAAKVYGA

SEQ ID NO: 936738 - protein, 53 aa, Homo sapiens
SRRPGMAAWSPAAAALFLRGIRGIPLNHRMFATRTEGELRVTQFSKKVPRLSY

SEQ ID NO: 936739 - protein, 48 aa, Homo sapiens
DSAEFTTVRATDTKAGKWSRWDELQEGSGESSSKAVILREEPIEFPSE

SEQ ID NO: 936740 - protein, 81 aa, Homo sapiens
  misc_feature (33)..(33): Xaa can be any naturally occurring amino acid
  misc_feature (50)..(50): Xaa can be any naturally occurring amino acid
  misc_feature (53)..(53): Xaa can be any naturally occurring amino acid
  misc_feature (79)..(79): Xaa can be any naturally occurring amino acid
RVNLKFLTRTRSTVAESVSQQILRQNRGRTVDXPVQGAKKKKAEGTVFTXEDXQKFQQELLRQLAPWEGTVQEAFQALXAF

SEQ ID NO: 936741 - protein, 37 aa, Homo sapiens
LHRRLGINQAVRLKRSFSLLIGLCGQSERTYKPQVAE

SEQ ID NO: 936742 - protein, 34 aa, Homo sapiens
PPEAFLLGKVESVVRSRSEKTPELDGFIHFEFYV

SEQ ID NO: 936743 - protein, 41 aa, Homo sapiens
VSHQNPSKNREATVELGREQSTVQSIIHAEQLEIDREVEDS

SEQ ID NO: 936744 - protein, 39 aa, Homo sapiens
CVLATEGFISGRHYWEVEVGDKTHWASGVCRDSVSRKGR

SEQ ID NO: 936745 - protein, 119 aa, Homo sapiens
DVEYYVDSSQDPDFEENEFLYDDLDLEDIPQALVAPPPPATAIMEDEIFNQSSSTPTSTTSSSPIPPSPANCTTENSEDDKKRGRSTDSEVSQSPAKNGSKPVHSNQHPQSPAVPPTYP

SEQ ID NO: 936746 - protein, 30 aa, Homo sapiens
LKFVFDAVAGVRGGEFELLGKVRGARMPAL

SEQ ID NO: 936747 - protein, 112 aa, Homo sapiens
  misc_feature (80)..(80): Xaa can be any naturally occurring amino acid
  misc_feature (91)..(91): Xaa can be any naturally occurring amino acid
  misc_feature (95)..(95): Xaa can be any naturally occurring amino acid
  misc_feature (107)..(107): Xaa can be any naturally occurring amino acid
  misc_feature (110)..(110): Xaa can be any naturally occurring amino acid
SVTLCSTLTLAELPFPHRTKNSHHAALPPLVPGASQPSGGLPSPPPPPGDEEESRGPPCRCHGGPQQQKGISPFDLLQGXWVSVGPQPGTXFFSXVEAFSMEAGGIXFSXGG

SEQ ID NO: 936748 - protein, 142 aa, Homo sapiens
  misc_feature (87)..(87): Xaa can be any naturally occurring amino acid
  misc_feature (111)..(111): Xaa can be any naturally occurring amino acid
  misc_feature (113)..(113): Xaa can be any naturally occurring amino acid
  misc_feature (120)..(120): Xaa can be any naturally occurring amino acid
  misc_feature (125)..(125): Xaa can be any naturally occurring amino acid
  misc_feature (129)..(129): Xaa can be any naturally occurring amino acid
  misc_feature (134)..(134): Xaa can be any naturally occurring amino acid
  misc_feature (138)..(138): Xaa can be any naturally occurring amino acid
APVPLPLCYPQCLPQLLTTAKPLPHFPVPENLLSPAPQPTFCLANPFVKPQLSLYLLSSGGPSWDAPPPPYISMWPVAAFLVFWHSXTRGPLGRAGDRFFRVVIPRRHGGXSXSFHFKGXSKVSXVVFXGELGXRGGXQGEW

SEQ ID NO: 936749 - protein, 46 aa, Homo sapiens
SRHCTLRTAAPPPPRGLAVPRDAPEQLAVGAPSSPGLFLRPPASGT

SEQ ID NO: 936750 - protein, 92 aa, Homo sapiens
EIPEVGADVTPEDSSSAERGLGMSPSGRGPAGSGKHHRQAPGSVWDASTQQEQPTSSSHHGGAGAVEIRSRHSSYPAGLEDDEGMGEEPAPF

SEQ ID NO: 936751 - protein, 56 aa, Homo sapiens
  misc_feature (26)..(26): Xaa can be any naturally occurring amino acid
VRGKVRAVLKLLPQSRQWWLLACVCXVVRDEVGTLLEALPHSGTDRLDPSVGRWWV

SEQ ID NO: 936752 - protein, 33 aa, Homo sapiens
TSFSGGDRKLSGGGGGGAPDQCASMAGSEELGL

SEQ ID NO: 936753 - protein, 35 aa, Homo sapiens
  misc_feature (28)..(28): Xaa can be any naturally occurring amino acid
  misc_feature (33)..(33): Xaa can be any naturally occurring amino acid
RQSKKVMFLAKKAKDKDVECEEQCIEGXSGLIXTG

SEQ ID NO: 936754 - protein, 52 aa, Homo sapiens
  misc_feature (12)..(12): Xaa can be any naturally occurring amino acid
  misc_feature (37)..(37): Xaa can be any naturally occurring amino acid
VNQGLIRMYKAXCLEKFPVIQHFKFGGLLPIHPVTSXYGGAKPKSHPGPQFL

SEQ ID NO: 936755 - protein, 136 aa, Homo sapiens
HSICRMHCPDPSTTTLANGSGSRKKSFFTRFFAQSTVRRSLTGPFIRRPGLDMSPAAGAAGAAGGTGATARRGGVTTAAGLGPEQPAPRATAGGSRMCRESSAMSRGGSGTPSSPAPPDFSYHVPRAAQAETAAAD

SEQ ID NO: 936756 - protein, 113 aa, Homo sapiens
RFLSFSFSTCLAFLPKVQIQTLNIQKEELNTDLYHMKRSLRYFEGGNLGTLSSFNLATLTGLQGESFGPHLNSLITEKSKDLAVRLQHSLQRKGELESVLSNVMATQKRRQTR

SEQ ID NO: 936757 - protein, 51 aa, Homo sapiens
  misc_feature (9)..(9): Xaa can be any naturally occurring amino acid
ILHKKHHVXKAVIQSVPWTRIDDGVGGGKRQLGEKNVLSGEAAAPLCPSSS

SEQ ID NO: 936758 - protein, 38 aa, Homo sapiens
GPARYLGPLTGRLCSSVFPPPGAIMRTGQSVLLGSVHH

SEQ ID NO: 936759 - protein, 36 aa, Homo sapiens
SAVCAGMRIVLRILRIESVRRTAESNYTNTAMTKID

SEQ ID NO: 936760 - protein, 120 aa, Homo sapiens
LCCTRDISIGNIGTIGTICPLITRIPVNLWERDLLYQWGAQISFPEGNDSQQSKDVMTKMGFVQGMGLGKLAQGITEPIIPTDESDYRTWLFFLAAVTIKPADPFDLERTQKPVWVDRGR

SEQ ID NO: 936761 - protein, 63 aa, Homo sapiens
EDLRKRRKGGEADNLDEFLKEFENPEVPRRRTSNNRHSAGVDVYRIEAPLLKEPRRASESSGY

SEQ ID NO: 936762 - protein, 98 aa, Homo sapiens
  misc_feature (53)..(53): Xaa can be any naturally occurring amino acid
MLLHRPGGDLVITHHLDWWSPLSASSKGYWTCTRSRHSSSMLIVCSFCCSTCXRTGGGYNRVSTGPTLPILLLRLPMSLPLGSSKADAEQSPQAEGSD

SEQ ID NO: 936763 - protein, 101 aa, Homo sapiens
VTTAASGTSSSAPVEHGNFQAPLGRLPLLPRLGLLALAFSDGKVLLFSLPHPEALLAQQPPDAVKPAIYKVQCVATLQGGDYFKLQSPLSVGECLCLGSDV

SEQ ID NO: 936764 - protein, 39 aa, Homo sapiens
KKVKCCTAQQPGLDVLEPPYDRAAHYLCCGTSAGREAFP

SEQ ID NO: 936765 - protein, 96 aa, Homo sapiens
GEGVSDPKVNGLCRTGQACPGHWAVGHEWASPGGVAGREKLARTWVHEAAAGPQGTCVWGLLENGIYVGRGDEIIAPSPTIFSCARRPEAVLAGGD

SEQ ID NO: 936766 - protein, 69 aa, Homo sapiens
GRWKEDGRRNAEGGRWKVEGQRWKKVEGGRWKKVEGGRWKVEGKWKVEGGRLEGRKEDWKEGRKEEGRK

SEQ ID NO: 936767 - protein, 113 aa, Homo sapiens
FLPLLPVVHQCQGPWRCRPPELALAAQHSPAPGPLECRPPERALAARRFTSARALECRPPELALAARGCVLPSRPTWFLFLGGFLSCFDNNILPVLYPTKGQTGLVFYASSYY

SEQ ID NO: 936768 - protein, 41 aa, Homo sapiens
LGSNRVTLGVLLTDSRTPGVLGPSSRGLHLGGSRGSNFPTP

SEQ ID NO: 936769 - protein, 87 aa, Homo sapiens
  misc_feature (12)..(12): Xaa can be any naturally occurring amino acid
AKPSSVWTSAGXYGGLGNARYLHGPGKRVRVCEVRDQADGPRVKPCRSTDREGPGIGPCEDVAFVFPSPEKMHTIEKRFQLKARERK

SEQ ID NO: 936770 - protein, 74 aa, Homo sapiens
LRRRRLPRLFTALTKYQHLGHGGVEVALSADGIGAAALWDPPGKWQQTRGAELRAVPMMLLTFGIRWCCRPGGR

SEQ ID NO: 936771 - protein, 50 aa, Homo sapiens
GLNCSSVSGTRYFLSRDYRPPRPPPEELRYAAKEGSHEERLSTLAETVGL

SEQ ID NO: 936772 - protein, 138 aa, Homo sapiens
FPGQFPPKFRESLYPEIVPRGSHPNGGPGGPESVKGCLGHFTFGLESTDLFFFLNQKSLVTYGPLHPGRFPVTGQFPGPLGPRWAGDAPGAFVAPSPFFLSPPWDSICFCKFLPTVIFRNFRRNSASFSKLGFKSYSN

SEQ ID NO: 936773 - protein, 52 aa, Homo sapiens
QREASPFVLQEVQDPRETVLGRAAPRQRPSPAGGSIRRGPSIYDRGARVVVA

SEQ ID NO: 936774 - protein, 67 aa, Homo sapiens
SRGLGRSKVRGLPGPRCFYELYTLTAKICSFTPEPSETTSPPGGNKQLQTRCLKSCNTCREGLQLHS

SEQ ID NO: 936775 - protein, 87 aa, Homo sapiens
SEGTEMLLKSAFGIFGKRMSGVLERESELSAVTGLKPKCSAQDVSISDWLARNCLHTSTSDLSSGESGDPQAENPRTREIATTDTPL

SEQ ID NO: 936776 - protein, 30 aa, Homo sapiens
TQGAERSPACYTHAPGVAAVTETINPDGHG

SEQ ID NO: 936777 - protein, 55 aa, Homo sapiens
MLAEKRRSRKAGGLVPGQQREAHNKATQRRQPGPPYVLCLPLCQSYHYAPRAQPP

SEQ ID NO: 936778 - protein, 72 aa, Homo sapiens
  misc_feature (54)..(54): Xaa can be any naturally occurring amino acid
  misc_feature (70)..(70): Xaa can be any naturally occurring amino acid
SCRIQHELVPNSARANPRGEIVIGGQNISMGYFKNEEKTAEDYCVDENGQRWFXTGDIGEFHPDGCLQIXGS

SEQ ID NO: 936779 - protein, 126 aa, Homo sapiens
  misc_feature (10)..(11): Xaa can be any naturally occurring amino acid
  misc_feature (81)..(81): Xaa can be any naturally occurring amino acid
  misc_feature (107)..(107): Xaa can be any naturally occurring amino acid
  misc_feature (109)..(109): Xaa can be any naturally occurring amino acid
  misc_feature (119)..(120): Xaa can be any naturally occurring amino acid
VPNSARGFFXXVSFCVARCPGTCYAPLAQYACLCFPSAGIKGVCFQACLRYWFKLLDAYCLLHYKSIGVNWKSLLHYKHTXHIGSFSGGHACVDKGLALELGVDLPXPXFRVLKLWVLXXSYYWEK

SEQ ID NO: 936780 - protein, 101 aa, Homo sapiens
GHRSVGGIRASLYNAVTTEDVEKLAAFMKNFLEMHQLVNMTSHALPVSSTQRRLEELGIDYRNLTDMDFFFPNTCLLQIPFSKNNDLNIKGTAELEGNSPG

SEQ ID NO: 936781 - protein, 70 aa, Homo sapiens
GLGHRSPPVPVWILGEVFLGAYVNLFDRGDIKDRRTSGTGARSPSGADLGSARPAGAVPGCRPGDRMRTG

SEQ ID NO: 936782 - protein, 84 aa, Homo sapiens
PNSARGHVGKQQSPVKCTVACRSHQFCLTTDVPEALELCSLYSLQSSSPRAAPCPHHWYKTLEAENRKQQETVFLVDCVGETKG

SEQ ID NO: 936783 - protein, 278 aa, Homo sapiens
VTSCGLARAGQRGGGRRGPGPGMAMFLQPGGLVLSSGSRRPGLAGGDCWLDVQEYTCPICLEVYHLCPWPSVQLACTLFCGECLQPCLQVPSPAVPTVPPALLPKKVDKATHVEEAALILQSALSRLHKKVTLCKDEECTFLSCLKVQGADWAMPQVRPRGAHITADPQNIPKWSTFACPYCGARNLDKQEGLVKALLLKSPPDGPQTRCGVAPSCSACPGCDPVTRSANFLQHLFTTQVSFDTFVTHRLRGALPVAAWLLGTKEAHAGLGRSPPVTA

SEQ ID NO: 936784 - protein, 79 aa, Homo sapiens
MRVVGSSPGLLLGRGMRAFLLLLWLAARGSALYFHIGETEKNGFIEEIPDETMVIGNYRTQLYDKQREEYQPATPGLGM

SEQ ID NO: 936785 - protein, 41 aa, Homo sapiens
WLTYVVVCKCRNLQVPESYFSERSKLLILGMSNLDVTVRVS

SEQ ID NO: 936786 - protein, 387 aa, Homo sapiens
GVQPPATGSARTTPPSTQQTRLTVVHHRTQTPPRTARTSCVSAAPGAENTSPGVSCSGVLLPVKTPALIGQNKLAWVHSALVAENNSTPTLAGRTYTLRISTPARQYMKAPRSQSQSRPSHQFGSLTKSALHKPFARRATAQAGFINTQESLFYVVEPHTLLLYMNDDNNCVLISRENDTHDRRTAHSTHRAVRAELVTADPMQVQRVRATLAGRQRPLTEQSHFAAGHSGGGSISCGRRLSSHRGTPPPTLDLFSEGRTPQEGFITPLSLFLDGDHRAEKISPLRPPAAPHSASLGLELHSHTIAGGRPQQRRALPSHDKYRLPSARRPTPSKRGLAPPTGGEANATPHGGAENLGGPAKRALLWGAGDTARLFFVFGGEKMGFFF

SEQ ID NO: 936787 - protein, 34 aa, Homo sapiens
MEGLLSGQKGPLIAPAQDRHVGNKVLEQGDGHWG

SEQ ID NO: 936788 - protein, 46 aa, Homo sapiens
RHPCAPLVRRGTFPALWIGAWARPILLGVGGDDLAASCRCSKTNEV

SEQ ID NO: 936789 - protein, 31 aa, Homo sapiens
GGSRAPGSGVNTSHHRGGAATRHRVGSRTRL

SEQ ID NO: 936790 - protein, 103 aa, Homo sapiens
RAAGWLGSVPWARTSCLISIRTHEAATGPRGQRASRPWLITRATEPTAQSTGPGQPRIPLPSSMTPTVGNPSKPGEYPATGADVAFSVNHLLGDPMANVAMAY

SEQ ID NO: 936791 - protein, 62 aa, Homo sapiens
QWASLLSTRFSVQVATEGGSDSTMPMCKGAGPGQAHTESDCAMQVYFRMPGTARTLGLSGIN

SEQ ID NO: 936792 - protein, 192 aa, Homo sapiens
  misc_feature (62)..(62): Xaa can be any naturally occurring amino acid
  misc_feature (102)..(102): Xaa can be any naturally occurring amino acid
  misc_feature (182)..(182): Xaa can be any naturally occurring amino acid
  misc_feature (188)..(188): Xaa can be any naturally occurring amino acid
MCFGKKAAWTETEGWSGDVRVLLEVGQASVPARCPRSHEVLSSASSALAISSASELLPSYSXLDSLLDSLAASSSFSFLFGLWTPDPAALLSLDAGAPSVRXLRVPGFRGWGSSSCSSGLLFSLSLSSLLFSKDVVHLKEEGSWRMGRELEGAGGPRAPVLMSFPVLESEIRTSGPGWALGXTGIGWXKAVG

SEQ ID NO: 936793 - protein, 34 aa, Homo sapiens
MARHSQGSTPLHEALETHLAIDTTTRQGYSCRYL

SEQ ID NO: 936794 - protein, 36 aa, Homo sapiens
ETAATITRKRIPPSLGGFIQTSEKLTGSDGGNSKIG

SEQ ID NO: 936795 - protein, 48 aa, Homo sapiens
NPAEARFSALCPPPCRRRKTGSVHRATGLSTSPRGGNFYGYYRSTSCV

SEQ ID NO: 936796 - protein, 74 aa, Homo sapiens
CFPAQEPQAVQPWPQGMDGLEAPLPQDWQRRVATSFNQPARKIRRRRPGKPRRAHRPDPARPIVPIVRCPTVRY

SEQ ID NO: 936797 - protein, 37 aa, Homo sapiens
DFDNQTLAVLRGPWCYLMRSREITLEQTTKDNQIDVD

SEQ ID NO: 936798 - protein, 139 aa, Homo sapiens
RNSVQSAHYVEACQKNSSRLWNSQAQIDQKLANQINDLCQSVTWLGDRVMNLQHRMQLHCDWNTSDYCITPYAYNQDQHSWENVSRHLKAWDDNLTLDISQLKEQIFEASQAHLSTVPWLTHFWKGITKNTKMILIPSN

SEQ ID NO: 936799 - protein, 32 aa, Homo sapiens
MAEPLKKYRLRVTAKMLSVRVAAAVRSALPRR

SEQ ID NO: 936800 - protein, 149 aa, Homo sapiens
  misc_feature (89)..(89): Xaa can be any naturally occurring amino acid
LHDLTEQRLHGVDEVLGVVAHRRSGLRGRVLDQPVFAQIDRHQQNNGRYFALEPNASGLRLANTLAGLPTTSAGHVLDHERLRRTTALXIRAGTPWPGSRSRRILDHGRDRDRQEVRVVDVVPTAEQVDVAGDGHVVADPQAGARVEQA

SEQ ID NO: 936801 - protein, 36 aa, Homo sapiens
KTESRSVVQMVQWPISAQCNLRLGDSSKSPPSSTSV

SEQ ID NO: 936802 - protein, 158 aa, Homo sapiens
LQRLYPSFIFKGPAPQSQYKNTKSPVSLITIKNPKSGKLRAREMTPRQGHGDPCSWHQAWLQGPPVLLLLRGWGAAIVLWEPRPSESGPSFLLGCAQLLHAPDLVQQARDEGLSGFVTVNYQLLDPSSPGIITLHVYKFIHIYLELRDLLLLAVVESR

SEQ ID NO: 936803 - protein, 78 aa, Homo sapiens
PLYARQGELKGLGSSLGTHKSARRCQRPPGALYFQLQHSQVFTAQGDGARVTRNPGEGRSFPGEGQRVSRIGLTQEGA

SEQ ID NO: 936804 - protein, 68 aa, Homo sapiens
MSKLKKIETQEKNPLPSKKRLNRRSKQANRNEACAPICTVLHSIASYYSLAVELCKMQEVGSVNDCAA

SEQ ID NO: 936805 - protein, 48 aa, Homo sapiens
MSKLKKTETQEKDPLPSKKRLNRRSKQANRNEAPQYPVLHSLPSYYSF

SEQ ID NO: 936806 - protein, 35 aa, Homo sapiens
LLAVIANNIITINKDQNVFDSKKKVKLTNAEGVEF

SEQ ID NO: 936807 - protein, 38 aa, Homo sapiens
WRPGLEMNPGYEVAPRSDSEESGSEEEEEEEEEEEPAR

SEQ ID NO: 936808 - protein, 72 aa, Homo sapiens
KIRAAVTCIIILTILFILLFIFIITSIVIITEALPILVISFLDSSSLPVLLTLSKSSFRASLSNILLSVEFS

SEQ ID NO: 936809 - protein, 46 aa, Homo sapiens
  misc_feature (28)..(28): Xaa can be any naturally occurring amino acid
VVQLESKRKTMQAHLLTKEVTQVERDPXLDRQAGQLRIQIQQVRGE

SEQ ID NO: 936810 - protein, 61 aa, Homo sapiens
AYCRINPKSGGIVMLFRSDFPSTPTVRFVCSEIYNIDTLNGKKVEVSVKQIIAGKAVEQGG

SEQ ID NO: 936811 - protein, 69 aa, Homo sapiens
GGAPATDRADWGEEIQAPYHPSTRPPFYGTPRAHAPVEFAKPCGYGRSPVTKPSLWSRLGAPLAELSSL

SEQ ID NO: 936812 - protein, 119 aa, Homo sapiens
IRNLDAVRMRAPTPAAECTALIAECAQPAEERPTFEFLQSVLRTLHATERSTSQQPPALRPCPLCADDPDFRAIPDGREGGVSPVPFSQTRNPVGRGTFAGGPRTDSFTDCTPGRVTRP

SEQ ID NO: 936813 - protein, 35 aa, Homo sapiens
DAYNSYLEDYALILKYFASNKGFDSSEDAKQYNLD

SEQ ID NO: 936814 - protein, 105 aa, Homo sapiens
GDCGVSVLNVDRLSSHEERWCQQGTSVRVGYKKEKNMEADIITNLLSLHRRFVIISAQYGLQLVESQNELQNQLDKCRNEMMTMTESYEQEKYTLQREVELKSRM

SEQ ID NO: 936815 - protein, 75 aa, Homo sapiens
  misc_feature (11)..(12): Xaa can be any naturally occurring amino acid
  misc_feature (45)..(46): Xaa can be any naturally occurring amino acid
  misc_feature (68)..(68): Xaa can be any naturally occurring amino acid
  misc_feature (72)..(72): Xaa can be any naturally occurring amino acid
METSGVVERVXXSRGPKPVRWRCSSDCGSRVLQTGDRSLLSPTAXXTLHEKEDSSVCGSIPDGDLLQXHWLXEDM

SEQ ID NO: 936816 - protein, 66 aa, Homo sapiens
  misc_feature (28)..(28): Xaa can be any naturally occurring amino acid
  misc_feature (66)..(66): Xaa can be any naturally occurring amino acid
GGGGTLGQGGRTEKNHGYAGPEPSSSFXSCPSSSSSIPLLLESVPPLTLKPFRFLLTSQSSTCLTX

SEQ ID NO: 936817 - protein, 35 aa, Homo sapiens
MASGTEVGHVLSCWPFHVSDPENMSTALQMGFSGI

SEQ ID NO: 936818 - protein, 60 aa, Homo sapiens
MLTVTPNKRSRYWSCHMRLRLKCKKSHYNNDRYLSEKNEGFFGRNYRQLVLLYLTVRFYH

SEQ ID NO: 936819 - protein, 33 aa, Homo sapiens
GSHDIVDGNHRLTLGLIWTIILRFQIQDISVET

SEQ ID NO: 936820 - protein, 45 aa, Homo sapiens
VRHGGERAATNSPPPPFSDWGRLDSHVRRLEDLLAVSEQGEGGAY

SEQ ID NO: 936821 - protein, 45 aa, Homo sapiens
LLIWSWQAQCIENFSDYPPLNALPSEETDGQVISEERGADSREAK

SEQ ID NO: 936822 - protein, 51 aa, Homo sapiens
MVGRAIRLNKITKEVNKNKQSEKWALGIPNLRDSEEEEQSAEGNEKEQPVE

SEQ ID NO: 936823 - protein, 140 aa, Homo sapiens
  misc_feature (115)..(115): Xaa can be any naturally occurring amino acid
ETAEVGLGSGETAAVALRLNVPFGGGGGWAEGHQSCSCVWYLPLSPSRGIGDKGLTLFKPRDLEADPRVVLPTPPLPITISAHLVTITYRSFRNEQAPLGPIPMSSVDIRDFARXSVTLGFFTTPDTTTTTTSAGRGSVR

SEQ ID NO: 936824 - protein, 104 aa, Homo sapiens
GDLPWEINPPSSCSLLREKDPPTTSGPEIDQPKKHLTNFKSATPRGPGTLAQGSLTDSFPDLLGLVAEDWHCPIASVEAPKTITDAELRVTLTVEGSHGAPNPA

SEQ ID NO: 936825 - protein, 115 aa, Homo sapiens
  misc_feature (5)..(5): Xaa can be any naturally occurring amino acid
  misc_feature (8)..(9): Xaa can be any naturally occurring amino acid
  misc_feature (13)..(13): Xaa can be any naturally occurring amino acid
  misc_feature (111)..(111): Xaa can be any naturally occurring amino acid
FGTGXQYXXPAKXAQMLSHTFFKTACELGTILPFPVHKNPGPSLVEAPLSDTYLCWQRAFFSCFLNFHSNLTFVFTLLNLLRGRTKNSGCYLRLRETVTSWCTAEDYGHLXFFEF

SEQ ID NO: 936826 - protein, 43 aa, Homo sapiens
NGTRGPFGAVGVPVTHYDRTEAALLQGAYLIVVLYSTLIVNVV

SEQ ID NO: 936827 - protein, 117 aa, Homo sapiens
GDLPWEINPLSSCSLLHEKDATYDLRSSDHQPKKHHTNFKSGPHWKSDCPTHLAATPRAPGTLAQGSLSPSPIFLAQRLKIDTARSPRKPPETITDAELWVTLTVEEDRNVRPLSPS

SEQ ID NO: 936828 - protein, 42 aa, Homo sapiens
  misc_feature (30)..(30): Xaa can be any naturally occurring amino acid
NLCNKTYSTFSGLAKHKQLHCDDQSGKSVXCKFCDKEYVSLG

SEQ ID NO: 936829 - protein, 94 aa, Homo sapiens
VGAAQGGQAKAAQDIASPGKRKDLGDFPFLAKGSHDRLYQENWDTATQILCFPNSLSKQHTRRLYPALGSAGPTPTEPCSLLAHSPRSNCKETA

SEQ ID NO: 936830 - protein, 39 aa, Homo sapiens
PVKAFNAFKVKTKSHPVFGKIAFSERIWTPHAYTVVCTW

SEQ ID NO: 936831 - protein, 122 aa, Homo sapiens
QVGGGGVGGDQAVLRIRNLLFIFCWFINCFAAVCISCAEINFMVIYSRRLYLIVGDSGLAHFCANYSSEKLAMCLAGRSELSESVCGANGASIVLALDASGVEGSESGHSVRRYLINLVFAN

SEQ ID NO: 936832 - protein, 69 aa, Homo sapiens
EFLLCQLRGAQYPGLSHKHLSVRALRTQSSRVLLLLLLLLLLLLLLLLLLLLLLQHCHLGRTQHALGPL

SEQ ID NO: 936833 - protein, 177 aa, Homo sapiens
APTPLMGEVDADCMDVNVRGPDGFTPLMIASCSGGGLETGNSEEEEDAPAVISDFIYQGASLHNQTDRTGETALHLAARYSRSDAAKRLLEASADANIQDNMGRTPLHAAVSADAQGVFQILLRNRATDLDARMHDGTTPLILCRLAVEGMLEDLINSHADVNAVDDLGKSALHWAA

SEQ ID NO: 936834 - protein, 76 aa, Homo sapiens
  misc_feature (21)..(23): Xaa can be any naturally occurring amino acid
  misc_feature (67)..(67): Xaa can be any naturally occurring amino acid
EKAKTHYDAKKQQNQELQELXXXGSSSGRKTKSCELKLNGWDELQQAGLKTKEAEQTCRHLTAQVRXWEAQVRIWL

SEQ ID NO: 936835 - protein, 151 aa, Homo sapiens
  misc_feature (2)..(2): Xaa can be any naturally occurring amino acid
  misc_feature (10)..(10): Xaa can be any naturally occurring amino acid
  misc_feature (28)..(28): Xaa can be any naturally occurring amino acid
  misc_feature (46)..(46): Xaa can be any naturally occurring amino acid
  misc_feature (49)..(49): Xaa can be any naturally occurring amino acid
  misc_feature (51)..(52): Xaa can be any naturally occurring amino acid
  misc_feature (147)..(147): Xaa can be any naturally occurring amino acid
SXGSGTAGGXRPGVGETRTGCLRVRASXVTMGDHAWSFLKDFLAGXSRXRXXRPRSPPSRGSNCCCRSSMPAKQISAENSTKGSLIVWGESLRSKGFLSFWRGNLANVIPVTSPPKALNFAFKDKYKQLFLGGVDRHKQFWRYFAGXLASG

SEQ ID NO: 936836 - protein, 76 aa, Homo sapiens
HEGDTHIHFPLINDIEVVSFIPCNKRRKSTDTKYIQTYKLQFLLQTTFSNTVAETLEATSWVLPILFNDKIIQTLR

SEQ ID NO: 936837 - protein, 129 aa, Homo sapiens
  misc_feature (34)..(34): Xaa can be any naturally occurring amino acid
  misc_feature (66)..(66): Xaa can be any naturally occurring amino acid
  misc_feature (73)..(74): Xaa can be any naturally occurring amino acid
  misc_feature (80)..(80): Xaa can be any naturally occurring amino acid
  misc_feature (100)..(100): Xaa can be any naturally occurring amino acid
  misc_feature (118)..(118): Xaa can be any naturally occurring amino acid
  misc_feature (129)..(129): Xaa can be any naturally occurring amino acid
MSLKPQQQQQQQQQQQQQQQQQQQQQQQPPPAAXNVRKPGGSGLLASAAAAPSPSSSSVSSSSGTXPSSVVGXXSGGGRXGLGRGRNRNKGLPQSTISFXGILCKYEDGSYSYIKLVXPNVKVQMKKWX

SEQ ID NO: 936838 - protein, 85 aa, Homo sapiens
MSGRGKIWRQWPRLRPSRARRAGLQSQWPCTRLLRNGHYAERVGGCHVYLAAVLEYLTLRFCIWLAYAACTIIIRYSFPAICSWP

SEQ ID NO: 936839 - protein, 39 aa, Homo sapiens
ITTTTITTTSTTTTTITTTTTTTTTTINTHTITTTSTTT

SEQ ID NO: 936840 - protein, 140 aa, Homo sapiens
QHHESNVVSEVPMPVWVGAAFGVTSALPLLFLVTSASRVCGVSFQLTYSTFLDSFANGKLWGADCEGVYARHKGLHSVVHAGCPAGFTHGFTIRPWCVSVCLSACQCATTFPDVYNFHALPRAPHVQIAAHSVTFNKGSN

SEQ ID NO: 936841 - protein, 496 aa, Homo sapiens
MPRRSLVNWAAAVLTADASSSAMEAGLLRGVGTGESPSSPGVKEGLSNKWLPGAKIPPVTISWLLRLEGHFPESTAWQTRSIRFIRTRSLALQNVGTGEARCEAAFKLKEIARREKQQRWTRREQTDFYRVVSTFGVEYDPDTMQFHWDRFRTFARLDKKTDESLTKYFHGFVAMCRQVCRLPPAAGDEPPDPNLFIEPITEERASRTLYRIELLRRLREQVLCHPLLEDRLALCQPPGPELPKWWEPVRHDGELLRGAARHGAARHGVSQTDCNIMQDPDFSFSGCPYELYAEPSSRSTSSILVTLLYSTAAPAVYLTHCLTTAPGPDAPVEKSPEETATQVPSLESLTLKLEHEVVARSRPTPQDYEMRVSPSDTTPLVSRSVPPVKLEDQDDSGSELDLSKLSPSSSSSSSSSSSSSSTDESEDEKEEKLTDQSRSKLYDEESLLSLTMSQDGFPNEDGEQMTPELLLLQLQPLSSFVLSCSCADTLLLDAEA

SEQ ID NO: 936842 - protein, 43 aa, Homo sapiens
GVPPPGTRTPGIRTSTLTDGQRLTAARAAGGACEPGLRFMTRP

SEQ ID NO: 936843 - protein, 49 aa, Homo sapiens
AAPGPPVPAPPSGKRAKVLQQPPKTPGRLRRRLMGYRPEPHRVGAHTTA

SEQ ID NO: 936844 - protein, 112 aa, Homo sapiens
ASIGKEYDFIVSTVVLMFLQADRIPAIIKNMQEKTSIGGYNLIVCAMDTEDYPCSINFSFTFKEGELADYYKNWELVKYNENPGHLHRRDENGNRIQLRFATMLAKKSNKHE

SEQ ID NO: 936845 - protein, 137 aa, Homo sapiens
  misc_feature (50)..(50): Xaa can be any naturally occurring amino acid
  misc_feature (64)..(64): Xaa can be any naturally occurring amino acid
HASAASLPQHGDRGFPSAAAGASVSAASPAPPRPRPAAAMQFMLLFSARXKLRLQKWYVPLSDXEKKKITRELVQTVLARKPKMCSFLEWRDLKIVYKRYASLYFCCAIEDQDNELITLEIIHRYVELLDKYFGSVC

SEQ ID NO: 936846 - protein, 72 aa, Homo sapiens
NSRPGSIHHKLKVEPLGLFGASSAAVERALARFLRFLTVEPGSLMASLDLTGAAGNFQTEWKDTNLAGSANF

SEQ ID NO: 936847 - protein, 96 aa, Homo sapiens
MQELRPEKIDVRAPREFPNNVLLSKEGTLAFPGIFNEPSRYIDGGLCSPPNLSNRASICSCVNLIICLIFHTISGMAGSAAERGRGRGAGSGSMSP

SEQ ID NO: 936848 - protein, 72 aa, Homo sapiens
MEHSTFLSGLVLATLLSQVSPFKIPIEGLEDRVFVELQYQHHMGRGNRWDKFLDNTRLGPGKTQSWTHRDYI

SEQ ID NO: 936849 - protein, 53 aa, Homo sapiens
MHAAPPMASSSESEDDSRGETKGGPGRLELPAFGVESVISRQISNRLLTKNGK

SEQ ID NO: 936850 - protein, 35 aa, Homo sapiens
  misc_feature (9)..(9): Xaa can be any naturally occurring amino acid
IIGSHGAFXQVLIAVHSPTLFLIHLSSKLSTEGNS

SEQ ID NO: 936851 - protein, 97 aa, Homo sapiens
  misc_feature (13)..(13): Xaa can be any naturally occurring amino acid
  misc_feature (58)..(58): Xaa can be any naturally occurring amino acid
VQGPSGPCTVADXIQQFRYDNYRLHQLGNNSVFTLTLQAGLSAIKTPQCYKEDGSSKXLTALLCSRSLNKLAHPGPVATVPTPRLVCKISGDVNERE

SEQ ID NO: 936852 - protein, 119 aa, Homo sapiens
  misc_feature (26)..(26): Xaa can be any naturally occurring amino acid
GARPALMRMRGSRDEAVLAGGAETRXDAGRGSTLPGRRTLRRASWMALTTSRLLCFRPSTGPGGCLSLSKGWDYRRATGARPFLLLLLLLAAKFGLRCLRIPELFLLLGANSFWHMGQL

SEQ ID NO: 936853 - protein, 69 aa, Homo sapiens
MSVAPGAFPGPAAKLAPQPKFLGLPWATISPRRPRVALLLDSPTSARRAALLLFGLVLLLLRLLLFARS

SEQ ID NO: 936854 - protein, 97 aa, Homo sapiens
QGDQGPGSVRPLCVSATESDLADGTLDSCPHCFLSTSDGWKTRPLHMCVRIKPAQCPSLIPANYENYYIHDCPNPLGVGLEGEASQLDVETQAHAGP

SEQ ID NO: 936855 - protein, 115 aa, Homo sapiens
  misc_feature (1)..(2): Xaa can be any naturally occurring amino acid
  misc_feature (34)..(34): Xaa can be any naturally occurring amino acid
  misc_feature (50)..(50): Xaa can be any naturally occurring amino acid
  misc_feature (56)..(57): Xaa can be any naturally occurring amino acid
  misc_feature (61)..(61): Xaa can be any naturally occurring amino acid
  misc_feature (75)..(76): Xaa can be any naturally occurring amino acid
XXECIRPGTCDRRRAGSSFLEPSGKGCAEGLGGXTCRVRSLAPFQTAVSXSSGAHXXPSPXQPPPAPDIRPRPEXXPRQSPVPSRPLTLEISPPLPTFPSQGQAQGPESPTHSRL

SEQ ID NO: 936856 - protein, 51 aa, Homo sapiens
DDTDLRFMHLRVQTRQLADRSILSSRSPAILRGNPFITAVTFKPQRILRGL

SEQ ID NO: 936857 - protein, 33 aa, Homo sapiens
MNLRNNMYPGKVKILPALFARLTPIPAKGLREY

SEQ ID NO: 936858 - protein, 52 aa, Homo sapiens
EELSKAYEDDGDRYSSIMVKGAGGTGLAEAFCRRSSMKEFAENLWALLWQEA

SEQ ID NO: 936859 - protein, 139 aa, Homo sapiens
  misc_feature (11)..(11): Xaa can be any naturally occurring amino acid
  misc_feature (42)..(42): Xaa can be any naturally occurring amino acid
  misc_feature (65)..(66): Xaa can be any naturally occurring amino acid
  misc_feature (136)..(136): Xaa can be any naturally occurring amino acid
RGVLATLRKYXKYSKNILDRQDPPSVVVTSHQPQEKKKKLKXLAYDFYPGKIDVHWTRAGEVQEXXLRGDVLHNGNGTYQSWVVVAVPRKTQAPYSCHVQHSSPGPALRGALGGQLGSKGWRQCGISDPVAALPAXCGS

SEQ ID NO: 936860 - protein, 65 aa, Homo sapiens
GQKLLTRKADSSSSEEESSSSEEEKTKKMVATTKPKATSKGAFTFPSKEASYGSRDNSSLFQAHS

SEQ ID NO: 936861 - protein, 65 aa, Homo sapiens
DVEGNVQLETGDKINFVIDNHEPYWCCMCSQHFDVEKETSPLSGEEFCAMKEAFGFIERGDVVKE

SEQ ID NO: 936862 - protein, 70 aa, Homo sapiens
MSALRPHPPELPRTFLAWTAVPLESGHTYVVPWATGLPPIEERESPAAQPLLEHQYLSYLAPTGPPPRIQ

SEQ ID NO: 936863 - protein, 63 aa, Homo sapiens
  misc_feature (5)..(5): Xaa can be any naturally occurring amino acid
  misc_feature (8)..(8): Xaa can be any naturally occurring amino acid
RSSRXPKXIFHNFMERLWAYLTIQQLRGKTVSASDADQQALRNQALNLSLAYSFVTPLTSMGS

SEQ ID NO: 936864 - protein, 93 aa, Homo sapiens
TYPMDLSRGPSEQLDYAFQSPGDSRLNTKTFPKNNKNEFVISYQLLLFSHLLISHGIGKDVESCPDMAALNILKVLSELGPQSTEMPRTGNGP

SEQ ID NO: 936865 - protein, 74 aa, Homo sapiens
SGPCTNKRAKVCSCISESWAKTFLCSGEHPAHFSPASVEGCVQKPLKDAPTRIPALGQAAPKKGGVRVGHSCSM

SEQ ID NO: 936866 - protein, 42 aa, Homo sapiens
  misc_feature (8)..(8): Xaa can be any naturally occurring amino acid
  misc_feature (28)..(28): Xaa can be any naturally occurring amino acid
QREVKSVXMHHEALNETLPEDNVGYNVXNVSVKDVRRGNVAG

SEQ ID NO: 936867 - protein, 102 aa, Homo sapiens
  misc_feature (16)..(16): Xaa can be any naturally occurring amino acid
  misc_feature (27)..(28): Xaa can be any naturally occurring amino acid
  misc_feature (35)..(35): Xaa can be any naturally occurring amino acid
LQWMMMMMMQLKMIYXFCFCVCFAFLXXSFTLVTXTGVQWRDLGSPQPPPPRFKQFSCLSLPSRWDYRCPPPHPANFCIFSNDRVSPCWPGWSPTPDLRRST

SEQ ID NO: 936868 - protein, 52 aa, Homo sapiens
  misc_feature (1)..(1): Xaa can be any naturally occurring amino acid
  misc_feature (47)..(47): Xaa can be any naturally occurring amino acid
XKRHGQGTCFYEPFSMALHASPNHFLQLSLVPEEPKQPRPRPPPAQXDKAES

SEQ ID NO: 936869 - protein, 128 aa, Homo sapiens
YCSLFYFAGHPWGISYRTSLVVMNSLSFCLFGNVIFSITFEGQFFQIQDSCLIFFFSFNILNMLAHCLWSPKFLMRNLLIISLRIPCSWMHWLTPEIRALWKAKAGGLLETWSSRSAWATKEDLMSLI

SEQ ID NO: 936870 - protein, 94 aa, Homo sapiens
  misc_feature (14)..(14): Xaa can be any naturally occurring amino acid
  misc_feature (18)..(18): Xaa can be any naturally occurring amino acid
  misc_feature (45)..(45): Xaa can be any naturally occurring amino acid
  misc_feature (57)..(57): Xaa can be any naturally occurring amino acid
  misc_feature (69)..(69): Xaa can be any naturally occurring amino acid
  misc_feature (80)..(80): Xaa can be any naturally occurring amino acid
  misc_feature (87)..(87): Xaa can be any naturally occurring amino acid
  misc_feature (89)..(89): Xaa can be any naturally occurring amino acid
CRQFHRWNAQDWEXHRAXCAGPLFEGSAPAIVFLQMMPVLWMHSXLYREHMGLSVGXNSQGHYDFYPNXGSFQLAALPRXLQTYFQXGXMAITQ

SEQ ID NO: 936871 - protein, 89 aa, Homo sapiens
PRWNASPEQRVAVPCGGLTQWLNTGKELALESGHLKLVDWELYMDGSSFTNPCKVTLKKDDKPCSSHTRKLTGPRTVKHEETHRGTNFP

SEQ ID NO: 936872 - protein, 199 aa, Homo sapiens
MRFPPVVFPPQGGGTILCWAGRACWGDHTGRSPSLLVFVGKTPPLAFQLLWRCLYMEGNTSLGPAPRGAVPPSLFPRPLSGRGLCRRCLVLLPPAPPRVFRPLPVPPHLGYPPPSLFSQALPPGFPRGCGGATEPSLDIPAALSVLTLGRPRRLPVEHPGAGRFSLRAARILPAALPSRALGAPEGGGPLSVLTNNKNS

SEQ ID NO: 936873 - protein, 137 aa, Homo sapiens
  misc_feature (1)..(2): Xaa can be any naturally occurring amino acid
  misc_feature (4)..(4): Xaa can be any naturally occurring amino acid
  misc_feature (66)..(66): Xaa can be any naturally occurring amino acid
  misc_feature (72)..(72): Xaa can be any naturally occurring amino acid
  misc_feature (89)..(89): Xaa can be any naturally occurring amino acid
  misc_feature (107)..(108): Xaa can be any naturally occurring amino acid
  misc_feature (117)..(117): Xaa can be any naturally occurring amino acid
  misc_feature (132)..(132): Xaa can be any naturally occurring amino acid
  misc_feature (135)..(135): Xaa can be any naturally occurring amino acid
XXCXLNEISLRDTGIIMDTVCEMSDPSSSLGTLYMAGALLTVHHHFCLQLTKTGVRHVPPWCYISXEGLVPXGSGCYSHLSPGWVLNPXGGKLFPGWGTDTGSWGPXXHQGCGCVPXSCPFLKLSKLGGWVXLGXNC

SEQ ID NO: 936874 - protein, 59 aa, Homo sapiens
  misc_feature (16)..(16): Xaa can be any naturally occurring amino acid
  misc_feature (27)..(27): Xaa can be any naturally occurring amino acid
ENLIHVGATDNVVICXSNGVDAATRRXQDVDAVKGSDVPDLDCLVGAAVQVALGQPPGP

SEQ ID NO: 936875 - protein, 104 aa, Homo sapiens
  misc_feature (3)..(3): Xaa can be any naturally occurring amino acid
  misc_feature (7)..(7): Xaa can be any naturally occurring amino acid
NAXKLLXITQIKQASGWKAVCSAGNFLGMSGSPSVVSLPWDCRQPAASRRPQVSKLSHLFSPGAEGSGFGEAEGPRVDAKDPTPSKVKLEAGEAHGRLKAGGLE

SEQ ID NO: 936876 - protein, 134 aa, Homo sapiens
  misc_feature (60)..(60): Xaa can be any naturally occurring amino acid
  misc_feature (85)..(85): Xaa can be any naturally occurring amino acid
  misc_feature (122)..(122): Xaa can be any naturally occurring amino acid
KRGQLYSVDVTLDPDTAYPSLILSDNLRQVRYSYLQQDLPDNPERFNLFPCVLGSPCFIXGRHYWEVEVGDKAKWTIGVCEDSVXRKGGVTSAPQNGFWAVSLWYGKEYWALTSPMTALPLXTRSRGVGIFLGL

SEQ ID NO: 936877 - protein, 159 aa, Homo sapiens
  misc_feature (36)..(37): Xaa can be any naturally occurring amino acid
  misc_feature (67)..(67): Xaa can be any naturally occurring amino acid
  misc_feature (73)..(73): Xaa can be any naturally occurring amino acid
  misc_feature (99)..(99): Xaa can be any naturally occurring amino acid
  misc_feature (103)..(103): Xaa can be any naturally occurring amino acid
  misc_feature (107)..(107): Xaa can be any naturally occurring amino acid
  misc_feature (122)..(122): Xaa can be any naturally occurring amino acid
  misc_feature (129)..(130): Xaa can be any naturally occurring amino acid
  misc_feature (145)..(145): Xaa can be any naturally occurring amino acid
  misc_feature (157)..(157): Xaa can be any naturally occurring amino acid
AAAVGFRNHHFKALRFILFTDVVHFRFEANQNIAQXXLGKSGGRATTASIEHFNVFQELGHKLFGFXFVTTVXFIRCAPCRQIGITRVTRRFRVRENQXHVGXHQVXPIVDILRVTLTHQEXHGGEERXXFIREGGTASRAGIKXGFYRGRILVRRXNL

SEQ ID NO: 936878 - protein, 69 aa, Homo sapiens
  misc_feature (1)..(1): Xaa can be any naturally occurring amino acid
  misc_feature (50)..(50): Xaa can be any naturally occurring amino acid
  misc_feature (52)..(52): Xaa can be any naturally occurring amino acid
  misc_feature (66)..(66): Xaa can be any naturally occurring amino acid
XLRQQYIILKNILCCYYDILLTTGFCLILLDFLICKEVILISQERKGICXLXWFGFSRLKEIIITXGLA

SEQ ID NO: 936879 - protein, 140 aa, Homo sapiens
  misc_feature (4)..(4): Xaa can be any naturally occurring amino acid
  misc_feature (40)..(40): Xaa can be any naturally occurring amino acid
  misc_feature (50)..(50): Xaa can be any naturally occurring amino acid
  misc_feature (69)..(69): Xaa can be any naturally occurring amino acid
  misc_feature (111)..(111): Xaa can be any naturally occurring amino acid
DVTXGERQVMNRCLVLVLNIKVFDYQLDIPDVQAQTHTLXTGPVNDLELXLFPDVHGDLSIEILANKQXYDEPTLIQHAERLKMLIGQFAADPALLCGDVDIMLPGEYCAXGAGQRHSGWRFQKPRLARLVGRQSGKNNL

SEQ ID NO: 936880 - protein, 150 aa, Homo sapiens
  misc_feature (53)..(53): Xaa can be any naturally occurring amino acid
  misc_feature (57)..(57): Xaa can be any naturally occurring amino acid
  misc_feature (64)..(64): Xaa can be any naturally occurring amino acid
  misc_feature (74)..(74): Xaa can be any naturally occurring amino acid
  misc_feature (121)..(121): Xaa can be any naturally occurring amino acid
  misc_feature (150)..(150): Xaa can be any naturally occurring amino acid
MGSGLNLCEPNNKEGYYGYTGAFRCLVEKGDVALVKHQTVPQNTGGKTPDPWXKNLXEKDYELXCLDGTRKPVXEYANCHLARAPNHAVVTRKDKEACVHKILRQQQHLFGSNVTDCSGNXGFGPVGKPRTFLFRDEQFVWANFMTRNTX

SEQ ID NO: 936881 - protein, 150 aa, Homo sapiens
  misc_feature (22)..(22): Xaa can be any naturally occurring amino acid
  misc_feature (47)..(47): Xaa can be any naturally occurring amino acid
  misc_feature (62)..(62): Xaa can be any naturally occurring amino acid
  misc_feature (66)..(66): Xaa can be any naturally occurring amino acid
  misc_feature (86)..(86): Xaa can be any naturally occurring amino acid
  misc_feature (100)..(100): Xaa can be any naturally occurring amino acid
  misc_feature (133)..(134): Xaa can be any naturally occurring amino acid
  misc_feature (141)..(141): Xaa can be any naturally occurring amino acid
MGVSAEEKHNSECKGMDHVGFXSGNGSGSPESPGNRSWIPTPEVQRXCAHFGLRILSQKMAXSSQXIEDLKEVLLGHLQRGVEEVXNVVGVLDAVLGCLXWGGEPIVPGFTEVLVTERPSSNPFDLTRNDGWXXGDTDIQXLPKHEVVVE

SEQ ID NO: 936882 - protein, 45 aa, Homo sapiens
  misc_feature (34)..(34): Xaa can be any naturally occurring amino acid
MLAVLTALTRFGHSRQLLLPGGPTFGSILGAPSXLYLGYSDGVPW

SEQ ID NO: 936883 - protein, 103 aa, Homo sapiens
  misc_feature (1)..(1): Xaa can be any naturally occurring amino acid
  misc_feature (9)..(9): Xaa can be any naturally occurring amino acid
  misc_feature (13)..(13): Xaa can be any naturally occurring amino acid
  misc_feature (24)..(25): Xaa can be any naturally occurring amino acid
  misc_feature (27)..(27): Xaa can be any naturally occurring amino acid
  misc_feature (35)..(35): Xaa can be any naturally occurring amino acid
  misc_feature (39)..(39): Xaa can be any naturally occurring amino acid
XVLVVKPWXDSLXTKLSSASWTVXXLXDWISNCNXKNGXKVEDSLELCWYTTDLMCPPKMPVIGVLNKIRWRGDGSLGSRGPLVPIHPRFLNWSSCLLQSTSG

SEQ ID NO: 936884 - protein, 72 aa, Homo sapiens
  misc_feature (1)..(2): Xaa can be any naturally occurring amino acid
  misc_feature (7)..(7): Xaa can be any naturally occurring amino acid
  misc_feature (30)..(30): Xaa can be any naturally occurring amino acid
XXRRTLXSATALIIRESEDSTDFNDKILNXPLKHSDFFNVKELFSVRSLFDARFHLGHKAGCRHRFMEPYIF

SEQ ID NO: 936885 - protein, 71 aa, Homo sapiens
  misc_feature (15)..(15): Xaa can be any naturally occurring amino acid
  misc_feature (26)..(26): Xaa can be any naturally occurring amino acid
  misc_feature (63)..(63): Xaa can be any naturally occurring amino acid
RARSWRQAQVRSAIXPAVPADTEGFXSFLVITKCLDVPDPFVPEPYWLKSFDQFTCNLLYVSXRKDLTEHL

SEQ ID NO: 936886 - protein, 157 aa, Homo sapiens
  misc_feature (8)..(8): Xaa can be any naturally occurring amino acid
  misc_feature (11)..(11): Xaa can be any naturally occurring amino acid
  misc_feature (41)..(41): Xaa can be any naturally occurring amino acid
  misc_feature (57)..(57): Xaa can be any naturally occurring amino acid
  misc_feature (76)..(76): Xaa can be any naturally occurring amino acid
  misc_feature (78)..(78): Xaa can be any naturally occurring amino acid
  misc_feature (91)..(91): Xaa can be any naturally occurring amino acid
  misc_feature (113)..(113): Xaa can be any naturally occurring amino acid
  misc_feature (124)..(124): Xaa can be any naturally occurring amino acid
  misc_feature (134)..(134): Xaa can be any naturally occurring amino acid
MKYPELCXSLXPEAVRVHHWKLATLVSSLVGYKYGRVVMFXNIENWKSQEITLDEIXKAYCFILEKLLENEETQIXGXCIIENSKGFTMQXAVSLRTPVLRKMVDMLQDSFPXRFKAIHFIHQXMVFTTTYNVXKAFLEEEKLFERVLGHGDDLLGS

SEQ ID NO: 936887 - protein, 117 aa, Homo sapiens
  misc_feature (6)..(7): Xaa can be any naturally occurring amino acid
  misc_feature (10)..(11): Xaa can be any naturally occurring amino acid
  misc_feature (22)..(22): Xaa can be any naturally occurring amino acid
  misc_feature (91)..(91): Xaa can be any naturally occurring amino acid
  misc_feature (108)..(108): Xaa can be any naturally occurring amino acid
  misc_feature (117)..(117): Xaa can be any naturally occurring amino acid
CFKGMXXYRXXSSLELPLEHQXRRPVISAFPTEVTSSSRWDWLDNGYSPQRVSRIREGCPLIQEAQGVGELHPLAKGSPEGLCHKGQCTLXQILHFSHGLCNLQTGRXPRVPTSPGX

SEQ ID NO: 936888 - protein, 54 aa, Homo sapiens
  misc_feature (40)..(40): Xaa can be any naturally occurring amino acid
  misc_feature (45)..(45): Xaa can be any naturally occurring amino acid
  misc_feature (48)..(48): Xaa can be any naturally occurring amino acid
MLISLDNTFTDTPRDKYFASFNPIWLTLNITIRGWSWCCXPELVXVGXCHFLGH

SEQ ID NO: 936889 - protein, 137 aa, Homo sapiens
  misc_feature (4)..(4): Xaa can be any naturally occurring amino acid
  misc_feature (7)..(8): Xaa can be any naturally occurring amino acid
  misc_feature (25)..(25): Xaa can be any naturally occurring amino acid
  misc_feature (46)..(46): Xaa can be any naturally occurring amino acid
  misc_feature (63)..(63): Xaa can be any naturally occurring amino acid
  misc_feature (74)..(74): Xaa can be any naturally occurring amino acid
  misc_feature (81)..(81): Xaa can be any naturally occurring amino acid
  misc_feature (92)..(92): Xaa can be any naturally occurring amino acid
MPIXGLXXPLWESTVQETGISRVKXVRRRVQYANRKNSWAVVGPGXPLTPRYGTGEEVVQHSXCRFQVTVDYVXWPRFGFXHPSILHELKGXGDIQDLLFKVVRGQEEVVQGNKVALQEPHEQHQVTPSCKLGFQFL

SEQ ID NO: 936890 - protein, 100 aa, Homo sapiens
  misc_feature (1)..(2): Xaa can be any naturally occurring amino acid
  misc_feature (4)..(4): Xaa can be any naturally occurring amino acid
  misc_feature (72)..(72): Xaa can be any naturally occurring amino acid
XXLXNEASDVITQDNRVKCLQVMSEVFTAAPPITGPEASGGKSSFMGWAQGPHAVCSLGTWCPEAQLLQPWXKGANTELRPWLQRVQASSFGSFHVVLSL

SEQ ID NO: 936891 - protein, 144 aa, Homo sapiens
  misc_feature (4)..(4): Xaa can be any naturally occurring amino acid
  misc_feature (44)..(44): Xaa can be any naturally occurring amino acid
  misc_feature (56)..(56): Xaa can be any naturally occurring amino acid
  misc_feature (75)..(75): Xaa can be any naturally occurring amino acid
  misc_feature (97)..(97): Xaa can be any naturally occurring amino acid
  misc_feature (105)..(105): Xaa can be any naturally occurring amino acid
  misc_feature (127)..(127): Xaa can be any naturally occurring amino acid
  misc_feature (134)..(134): Xaa can be any naturally occurring amino acid
VPSXIGTDEKCLIEILASRTNEQMHQLVKRIIKDAYERDLGVEXIGETSGHFQKMXVVLLQGTREEDDVVSEDLXQKDVQDLYEEGELKWGTDEAQXIYILGNRXKQHLRLVFDEFLEDTGKPIEAXIRGSVNXNEGVWEREKG

SEQ ID NO: 936892 - protein, 53 aa, Homo sapiens
  misc_feature (15)..(16): Xaa can be any naturally occurring amino acid
  misc_feature (50)..(50): Xaa can be any naturally occurring amino acid
AGSGDRPDGKLLSKXXALLRKGSLCITKWQDFHNICMYEFHILASYPSFXSLS

SEQ ID NO: 936893 - protein, 34 aa, Homo sapiens
  misc_feature (18)..(18): Xaa can be any naturally occurring amino acid
  misc_feature (27)..(27): Xaa can be any naturally occurring amino acid
GRTVCHNGVLGLTRLLFXLLGFLRIRXRGQQASR

SEQ ID NO: 936894 - protein, 63 aa, Homo sapiens
  misc_feature (4)..(4): Xaa can be any naturally occurring amino acid
  misc_feature (17)..(17): Xaa can be any naturally occurring amino acid
QVRXPPPIPRGRLPRGXTRLLTTYKGRQVFSMKPGRTPERTAWSHPTRAALEVVPAAPPHRHE

SEQ ID NO: 936895 - protein, 74 aa, Homo sapiens
MTAAQRSPAQKQRRCKKSRGFLGDEDPRGPGHSELHNCIIDKEVSLMAEMDKVKEEAMEILTARQKKAEELKKT

SEQ ID NO: 936896 - protein, 81 aa, Homo sapiens
  misc_feature (4)..(5): Xaa can be any naturally occurring amino acid
RHEXXTAPGKKTAIIIVEHNSSPCLLHMPPKILKCPLGGSQCRLTLASWTAGSSCSNRPLPGVPSLPSFLLPPLDGSMSPA

SEQ ID NO: 936897 - protein, 78 aa, Homo sapiens
  misc_feature (11)..(11): Xaa can be any naturally occurring amino acid
  misc_feature (19)..(19): Xaa can be any naturally occurring amino acid
  misc_feature (39)..(39): Xaa can be any naturally occurring amino acid
GTSLACAWPSXSPTGLKFXDPPPRPRASDLRTLPSHAFXNPKYLRPVSVYFAKVKDAPVTASGGPDNRCLRWLGIQFA

SEQ ID NO: 936898 - protein, 312 aa, Homo sapiens
  misc_feature (1)..(1): Xaa can be any naturally occurring amino acid
  misc_feature (189)..(189): Xaa can be any naturally occurring amino acid
  misc_feature (201)..(201): Xaa can be any naturally occurring amino acid
XVLWFPRYTPWFVYTPVSLSSGGLPHLVGVALLARRPVGCLAFVGLPPPCARSWRGFIAPTSAHILFLVVAPSGCFSQRRVSPPGGPFCVRTYKRSAFLARQEMWRPPRDCLRRGAPLKSGPERAILARVDPHPSRAVGFSPFGDEYPVLFFLPAARGPSPRGLVTPLLPRFGCSPADIGLFSCRGHTXVSQLVLSRVANXAEHSETTEMSPPRRGRLWAHAPREPLSLPGIMSASSLIGSLFLPPTADVVYNLTAEKSHQGSLLSAHMSPVTRDVVAPPHTLGGQGSPTGWNSFEFAQSCPSSRARPVRQL

SEQ ID NO: 936899 - protein, 175 aa, Homo sapiens
  misc_feature (10)..(10): Xaa can be any naturally occurring amino acid
  misc_feature (14)..(14): Xaa can be any naturally occurring amino acid
  misc_feature (16)..(16): Xaa can be any naturally occurring amino acid
  misc_feature (93)..(93): Xaa can be any naturally occurring amino acid
  misc_feature (134)..(134): Xaa can be any naturally occurring amino acid
  misc_feature (141)..(141): Xaa can be any naturally occurring amino acid
RSVPGPRISXEWTXLXPPIALQVLNTCWVPAVFGRLIPSSLAPASARFKSFWCRLIRKPGSKVPLIIRSPCTSRIFEEAKPPISASRTLAGSXPFFEANSSASATAWMFRATMIWFATLAVWPSHWRPQGDVLXPWLEQRXGTFEVCGSPPIMMSGCRPWTDSPPETGVKVGARS

SEQ ID NO: 936900 - protein, 101 aa, Homo sapiens
  misc_feature (1)..(1): Xaa can be any naturally occurring amino acid
  misc_feature (4)..(4): Xaa can be any naturally occurring amino acid
  misc_feature (13)..(14): Xaa can be any naturally occurring amino acid
  misc_feature (45)..(45): Xaa can be any naturally occurring amino acid
XSPXCSEILLLLXXKLQTDKERWLLSHRSELLHHPVWWGLWLAYXGCRCCCTSWVRELGPLSAISSPSHTQPTLQFSVNERASLNHQPSTFLGLAHIKIPS

SEQ ID NO: 936901 - protein, 105 aa, Homo sapiens
  misc_feature (10)..(10): Xaa can be any naturally occurring amino acid
  misc_feature (12)..(12): Xaa can be any naturally occurring amino acid
  misc_feature (102)..(102): Xaa can be any naturally occurring amino acid
MNGISAVTTXMXKTPGVDFVRDQVGYPSLLRSDLSPSKRNWKELVNKPCFTRNGSTKILHFMLPHTWTKPYCCYLWMLIDSVTALLGHVPERLSEVKYMTPXDVT

SEQ ID NO: 936902 - protein, 91 aa, Homo sapiens
  misc_feature (80)..(80): Xaa can be any naturally occurring amino acid
MLDGVLEGKLNAAFIDGPINHTAIDGIPVYREELMIVTPQGYAPVTRASQVNGSNIYAFRANCSYRRHFESLVFMLTVPXRELSMRWSLIH

SEQ ID NO: 936903 - protein, 146 aa, Homo sapiens
  misc_feature (6)..(7): Xaa can be any naturally occurring amino acid
  misc_feature (13)..(13): Xaa can be any naturally occurring amino acid
  misc_feature (19)..(19): Xaa can be any naturally occurring amino acid
  misc_feature (51)..(51): Xaa can be any naturally occurring amino acid
  misc_feature (100)..(100): Xaa can be any naturally occurring amino acid
  misc_feature (103)..(103): Xaa can be any naturally occurring amino acid
  misc_feature (139)..(140): Xaa can be any naturally occurring amino acid
LLVPTXXARHVIXNDGRMXLIKTTPTLKIKDNVRRDTFSRRICCPKLIGRXINNEISTRCGYGQAIFNKRKNRESSAINKNTERKSSPLLLIIIEMNGSXIVXILPEHAISITPPVSPATRHNKSVKLAVIHRIACGSXXRGDNDS

SEQ ID NO: 936904 - protein, 114 aa, Homo sapiens
  misc_feature (3)..(3): Xaa can be any naturally occurring amino acid
  misc_feature (30)..(32): Xaa can be any naturally occurring amino acid
  misc_feature (78)..(78): Xaa can be any naturally occurring amino acid
MAXRAYSFSLTTFSPSGKLVQIEYALAAVXXXPLSVGIKAANGVVLATEKKQKSILYDKLLVKLSRTNYQAYRFGVQXHGPDYRVLVHRSSKTELNNTILCTKNPFLQLSWYRE

SEQ ID NO: 936905 - protein, 71 aa, Homo sapiens
  misc_feature (37)..(37): Xaa can be any naturally occurring amino acid
IRHSGDRSFSQKSNLITHRKSHILGDEVGLLLKAFAXVGADVGLLAGVDAPVPRQWVCGGSACVSRDTRRA

SEQ ID NO: 936906 - protein, 74 aa, Homo sapiens
  misc_feature (9)..(9): Xaa can be any naturally occurring amino acid
  misc_feature (26)..(26): Xaa can be any naturally occurring amino acid
  misc_feature (56)..(56): Xaa can be any naturally occurring amino acid
  misc_feature (69)..(69): Xaa can be any naturally occurring amino acid
  misc_feature (71)..(71): Xaa can be any naturally occurring amino acid
QVNAGHQQXLDLVRLRFCLSPRECFXTQLRWAFGVTSQRPGIPLTCWAASEGREEXRRRALEEGGHNSXAXHLV

SEQ ID NO: 936907 - protein, 47 aa, Homo sapiens
  misc_feature (9)..(9): Xaa can be any naturally occurring amino acid
  misc_feature (12)..(12): Xaa can be any naturally occurring amino acid
  misc_feature (39)..(39): Xaa can be any naturally occurring amino acid
QLVSQVGKXLLXLAYSEPCVLRGALLDVCLEQGKTCHSXGQLALDPS

SEQ ID NO: 936908 - protein, 68 aa, Homo sapiens
  misc_feature (2)..(2): Xaa can be any naturally occurring amino acid
  misc_feature (11)..(11): Xaa can be any naturally occurring amino acid
  misc_feature (59)..(59): Xaa can be any naturally occurring amino acid
RXEPLGTSSNXDSASPDLGPRGPGLAVLQAEREVDILNHVFDDVESFVSRLQKSAEAAXGLEHRETRS

SEQ ID NO: 936909 - protein, 73 aa, Homo sapiens
VNLTDSEETNMNISVHRPPAMTVKKNPERNDKGPKKGTAALGKATDRCPLLASSRGNKLPSLVDQRLGVVKGE

SEQ ID NO: 936910 - protein, 108 aa, Homo sapiens
  misc_feature (3)..(3): Xaa can be any naturally occurring amino acid
  misc_feature (16)..(16): Xaa can be any naturally occurring amino acid
  misc_feature (56)..(56): Xaa can be any naturally occurring amino acid
KDXKHIPTFSKRQLWXSSSHRRTRSFQRKSVDIKRGSSQTFFYSRQRVTPIVDKIXKFAHGIKPLNRRFLRGPVIKDSSFSDTGFVVGRGFMERHCVFIFIGFVDIKA

SEQ ID NO: 936911 - protein, 114 aa, Homo sapiens
  misc_feature (61)..(61): Xaa can be any naturally occurring amino acid
  misc_feature (96)..(96): Xaa can be any naturally occurring amino acid
MGKKTLLLRHGLIVQDRHDEVITCVNAQFFWAGRSVTGHLKDAFHALFVELVVMTEGDQVXQQFFSVNLASTILNLERTPIWLMGDQAVGFQQVAXKRLFHYFFTTGGILQIVS

SEQ ID NO: 936912 - protein, 103 aa, Homo sapiens
  misc_feature (72)..(72): Xaa can be any naturally occurring amino acid
  misc_feature (81)..(81): Xaa can be any naturally occurring amino acid
  misc_feature (97)..(97): Xaa can be any naturally occurring amino acid
MRNMRFVEYRFDVTTNDFPHFMKWRAAAHGGENIAFKLANLPFFGDIRKSHYQVLQMREHVINRADRGFNPXFFTGARQQXKFVLIAGEFSIATVVXECGYRQ

SEQ ID NO: 936913 - protein, 74 aa, Homo sapiens
  misc_feature (2)..(2): Xaa can be any naturally occurring amino acid
  misc_feature (4)..(4): Xaa can be any naturally occurring amino acid
  misc_feature (17)..(17): Xaa can be any naturally occurring amino acid
  misc_feature (50)..(50): Xaa can be any naturally occurring amino acid
  misc_feature (67)..(67): Xaa can be any naturally occurring amino acid
PXVXRPSRPYEGSGLQXSHLAPAPKPFQVFEDLSPGLGLPPARKSWPAGXSREPHDSEKQCLQQPLXRLGSPKA

SEQ ID NO: 936914 - protein, 45 aa, Homo sapiens
  misc_feature (1)..(1): Xaa can be any naturally occurring amino acid
  misc_feature (8)..(8): Xaa can be any naturally occurring amino acid
  misc_feature (14)..(14): Xaa can be any naturally occurring amino acid
  misc_feature (34)..(34): Xaa can be any naturally occurring amino acid
XLLPMNPXEARNDXLKRQKTGKIRQTCRKEIRQXFLRCFWVPDDS

SEQ ID NO: 936915 - protein, 70 aa, Homo sapiens
  misc_feature (46)..(46): Xaa can be any naturally occurring amino acid
MAHSTLAAGGAADPSFPDFPTPGVVFRDISPVLKDPPPSAPHRHPXRHLKATHGGRIYYIAGLDSRGFLF

SEQ ID NO: 936916 - protein, 67 aa, Homo sapiens
  misc_feature (5)..(5): Xaa can be any naturally occurring amino acid
  misc_feature (14)..(14): Xaa can be any naturally occurring amino acid
  misc_feature (17)..(17): Xaa can be any naturally occurring amino acid
  misc_feature (63)..(63): Xaa can be any naturally occurring amino acid
PSTSXTATPGRAGXRAXNFGAQHPLLTFGSTSAQFDMPASLQMSGPTALLTRVSQLVCGLAGXKLQL

SEQ ID NO: 936917 - protein, 144 aa, Homo sapiens
  misc_feature (1)..(2): Xaa can be any naturally occurring amino acid
  misc_feature (9)..(9): Xaa can be any naturally occurring amino acid
  misc_feature (98)..(98): Xaa can be any naturally occurring amino acid
  misc_feature (100)..(100): Xaa can be any naturally occurring amino acid
  misc_feature (102)..(102): Xaa can be any naturally occurring amino acid
  misc_feature (110)..(110): Xaa can be any naturally occurring amino acid
  misc_feature (133)..(133): Xaa can be any naturally occurring amino acid
XXIDSQTTXSHKSSTHIKKQMSSYFVNSFCGRYPNGPDYQLHNYGDHSSVSEQFRDSASMHSGKYGYGYNGMDLSVGRSGSGHFGSGERARATLQAPXGXTXKPQGTASXGTSTHSPQPDPLPCSAVAPSPGXTATTAGKKSLR

SEQ ID NO: 936918 - protein, 105 aa, Homo sapiens
  misc_feature (71)..(71): Xaa can be any naturally occurring amino acid
  misc_feature (87)..(87): Xaa can be any naturally occurring amino acid
  misc_feature (103)..(103): Xaa can be any naturally occurring amino acid
SPTAGTTFKSNRPLMSGYRMATAVDKLTAEQRERYLQASADCQSPAPASGVVYELFVAGKGKTFTAKPKPXAEIASLLAKRSSCGKXTLYFSLRYLPVAHGIXEY

SEQ ID NO: 936919 - protein, 65 aa, Homo sapiens
  misc_feature (18)..(18): Xaa can be any naturally occurring amino acid
LFDPIIEDRHAAYKPAIXDKTDLNPDNLQGGDDWDPNYVLSSRRATGPQHPWLLPPPALQPRGAL

SEQ ID NO: 936920 - protein, 153 aa, Homo sapiens
SAPGEQKPGKAARAEALGAPAEEEPGKGVALHVAHFECGGDGAPVQHTQPLEVAQLRHREEVMLRSPGTWVVHCGPVVQQEADNFCRPGDVTQLPMPRQTDSSPHVSTKGLTPAWVTERDSIIKKEKQHNMDGAWLKVRADGCQPPMVVSAIS

SEQ ID NO: 936921 - protein, 140 aa, Homo sapiens
  misc_feature (5)..(5): Xaa can be any naturally occurring amino acid
  misc_feature (19)..(19): Xaa can be any naturally occurring amino acid
  misc_feature (25)..(25): Xaa can be any naturally occurring amino acid
  misc_feature (27)..(27): Xaa can be any naturally occurring amino acid
  misc_feature (86)..(86): Xaa can be any naturally occurring amino acid
  misc_feature (98)..(98): Xaa can be any naturally occurring amino acid
  misc_feature (123)..(123): Xaa can be any naturally occurring amino acid
  misc_feature (126)..(126): Xaa can be any naturally occurring amino acid
  misc_feature (137)..(138): Xaa can be any naturally occurring amino acid
PFPHXINEKEMKIKMTAPXTSYVEXGXGPFSESTITISLYIPSEQQFDPPRPLESDVFIEDRAEMTVFVRSFDGFSSAQKNQEQLXTLASILGERWKXFRMRRVYYNCRLQQPCQIALIRNTXVVXGIPKKLNPTQXXTN

SEQ ID NO: 936922 - protein, 153 aa, Homo sapiens
PHAGQGVLLTDGSEKDKMGKGGTKTLMNTIMQLRIIYNHPNMFQNFKKSFVEHMGLTGGLISWLDLYRASGKFELLDRILPKLRATNHKVLLFCQMTSLMTIMEDYFAYSGFEYLRLDGTTKAEDRGMLLKTFNEPGSEYFIFLLSTRAGGLG

SEQ ID NO: 936923 - protein, 109 aa, Homo sapiens
  misc_feature (18)..(18): Xaa can be any naturally occurring amino acid
VFVFITCMKLTSSQILFXRLLMCPSSSAAMDTTRMPGPPPQSSLILGYAHAVGKNREASQMYANCPHSVGAPGNDPGGDGAWRSRKTQPYLTGERRIWSPSCPGLEPRF

SEQ ID NO: 936924 - protein, 58 aa, Homo sapiens
IRHTGGLSTVMVEYSTSRGSEEVDMFVAQAVLQFLCLKNKSSASVVFTTYTQKHPSIE

SEQ ID NO: 936925 - protein, 133 aa, Homo sapiens
  misc_feature (7)..(7): Xaa can be any naturally occurring amino acid
  misc_feature (54)..(54): Xaa can be any naturally occurring amino acid
  misc_feature (133)..(133): Xaa can be any naturally occurring amino acid
SLSTINXDEFPTMVFPSGQISQASASPGPPQVLPQVQPCPCSSMVSALARPSQXSSPSPGLLRLWPTCPQATRLGKERCQRPAAVQFDDEDLGAVGTDRPICVTDLESVDNSEFRAVNQGYLWPQKLSHADDX

SEQ ID NO: 936926 - protein, 89 aa, Homo sapiens
  misc_feature (1)..(1): Xaa can be any naturally occurring amino acid
  misc_feature (14)..(14): Xaa can be any naturally occurring amino acid
  misc_feature (28)..(28): Xaa can be any naturally occurring amino acid
  misc_feature (68)..(68): Xaa can be any naturally occurring amino acid
  misc_feature (73)..(73): Xaa can be any naturally occurring amino acid
XATYVLIDMVLNKXAKGAKEIDIAATLXHLRDQRPGMVQTKEQFEFALTAVVSEVNAILKALPQGAAXLSEAXGHKARLAFLFERVYHW

SEQ ID NO: 936927 - protein, 97 aa, Homo sapiens
QETPGRASQLPRNKGHQATNGLTNGTSNEFNSSFYRGPQDQPTGLLTGLESSLWRTIQQQGPIVAPNQQEVARAVIAQFPTAVGVSCLEGGLRGDAS

SEQ ID NO: 936928 - protein, 69 aa, Homo sapiens
FGTAGHWWASFFFGKSTLPFLATVLESSRHSEPPQASSSMTACALARDARYTQPGGQSSTAKRWLSVLT

SEQ ID NO: 936929 - protein, 48 aa, Homo sapiens
  misc_feature (34)..(34): Xaa can be any naturally occurring amino acid
SVVPVCFLVQTVILILTNRSELISTRFTGATGRXFLLNKVVNLQYSEV

SEQ ID NO: 936930 - protein, 84 aa, Homo sapiens
QLSGDFIVEQAMGMSAAVCTAYGRILLQIAQVRQKLILTLLQQNTLLWCIHNYRSYCSFCKTGTDTLARYVDNPHQAHGISSPS

SEQ ID NO: 936931 - protein, 69 aa, Homo sapiens
  misc_feature (25)..(25): Xaa can be any naturally occurring amino acid
  misc_feature (41)..(41): Xaa can be any naturally occurring amino acid
ETSVKSTLFRNASGVLYSGDVKRQXGLTRSWLWGDNIGYPXGAVDLGYDFIPAQCHKDVSPIWLWSCSS

SEQ ID NO: 936932 - protein, 99 aa, Homo sapiens
  misc_feature (17)..(17): Xaa can be any naturally occurring amino acid
  misc_feature (35)..(35): Xaa can be any naturally occurring amino acid
  misc_feature (37)..(37): Xaa can be any naturally occurring amino acid
ELSPCLPVSQGVCELRXQATPLWRRDRTGHYLCNXAXLSQDEWAEQALIRPKKRLIVSKRAGTQCTNCQTTTTTLWRRNASGDPVCNALRLYYKLHQVN

SEQ ID NO: 936933 - protein, 115 aa, Homo sapiens
  misc_feature (40)..(40): Xaa can be any naturally occurring amino acid
  misc_feature (50)..(51): Xaa can be any naturally occurring amino acid
  misc_feature (59)..(59): Xaa can be any naturally occurring amino acid
VVCSHTVTLGHQDHRGWSLGSSEEITAPSPLPPLPLPRRXVPPDRSLGPXXDEARSAGXASPSREDRHRFPAGGGRSPRILMLPGSLFSPWPRMHFSEVETGSCMWNVCFPRQDG

SEQ ID NO: 936934 - protein, 166 aa, Homo sapiens
  misc_feature (1)..(2): Xaa can be any naturally occurring amino acid
  misc_feature (55)..(55): Xaa can be any naturally occurring amino acid
  misc_feature (67)..(67): Xaa can be any naturally occurring amino acid
  misc_feature (89)..(89): Xaa can be any naturally occurring amino acid
  misc_feature (98)..(98): Xaa can be any naturally occurring amino acid
  misc_feature (131)..(131): Xaa can be any naturally occurring amino acid
  misc_feature (146)..(146): Xaa can be any naturally occurring amino acid
XXLKLYQRQQHRQGLRPVPRPVPPVEGSVAPDLYCMCGRIYKDMFFSSGFQDAGXREQAYHWYRKAXDVEPSLHSGINAAVLLIAAGKXFEDSKELRXIGMKLGCLLARKGCVEEDAVLLGIVGFLPWGAXGSSPNDPTPGWVLGXKEQGLLLSSNAPQYWVPWVV

SEQ ID NO: 936935 - protein, 107 aa, Homo sapiens
  misc_feature (21)..(21): Xaa can be any naturally occurring amino acid
MHKHLSAAEDQEELRGRRMTXLRGSHYQNHEAKDTLWACLRDGEEGPPSAEHIVHVRWDYSRHCKDTKRWLCGSETAAIPMTPDYKHGWQIDVTDEGAMVSMRMKLG

SEQ ID NO: 936936 - protein, 125 aa, Homo sapiens
  misc_feature (13)..(13): Xaa can be any naturally occurring amino acid
  misc_feature (33)..(33): Xaa can be any naturally occurring amino acid
  misc_feature (84)..(84): Xaa can be any naturally occurring amino acid
  misc_feature (99)..(99): Xaa can be any naturally occurring amino acid
LSARLECNGAILXHRNLRLPGSSDSPASASWGXGITGMCHHTWLILYFEKGRGFYMLVRQVLNPRPQVICLPRPPNVSSFFNLXYETFTLSSSIGTALXKVTNDFDFPKCNSGFPSPHLTCSISS

SEQ ID NO: 936937 - protein, 54 aa, Homo sapiens
  misc_feature (8)..(8): Xaa can be any naturally occurring amino acid
  misc_feature (11)..(11): Xaa can be any naturally occurring amino acid
MKRRAVLXLHXMAPLVSAGADDSSIPTDMTQLKRAETAESEAVINGQQDDRHMV

SEQ ID NO: 936938 - protein, 102 aa, Homo sapiens
  misc_feature (23)..(23): Xaa can be any naturally occurring amino acid
  misc_feature (49)..(49): Xaa can be any naturally occurring amino acid
  misc_feature (51)..(51): Xaa can be any naturally occurring amino acid
  misc_feature (60)..(60): Xaa can be any naturally occurring amino acid
ACCGFCSGSSGIGAWLWRVVSHXGRRAGERGHPESGESTAAACVRSVQXAXTRAAAGLSXRSHVWKRGSFRRFVFTSSTMPREFSKISLVLFSSVKRPYPYN

SEQ ID NO: 936939 - protein, 130 aa, Homo sapiens
  misc_feature (5)..(6): Xaa can be any naturally occurring amino acid
  misc_feature (39)..(39): Xaa can be any naturally occurring amino acid
  misc_feature (43)..(43): Xaa can be any naturally occurring amino acid
  misc_feature (102)..(102): Xaa can be any naturally occurring amino acid
  misc_feature (125)..(125): Xaa can be any naturally occurring amino acid
GSPAXXLGRGCGLALPRLLARARGEGWKMSMDVTFLGTXAAYXSPTRGASAVVLLCEGECWLFDCGEGTTDTAYEKANFKSRIPSIWGFQSVEKKRPGKTQXHRNFKDLWCSTRYLPNGKAEKMXFPGCF

SEQ ID NO: 936940 - protein, 214 aa, Homo sapiens
  misc_feature (36)..(36): Xaa can be any naturally occurring amino acid
  misc_feature (51)..(51): Xaa can be any naturally occurring amino acid
  misc_feature (97)..(97): Xaa can be any naturally occurring amino acid
  misc_feature (101)..(101): Xaa can be any naturally occurring amino acid
  misc_feature (103)..(103): Xaa can be any naturally occurring amino acid
  misc_feature (106)..(106): Xaa can be any naturally occurring amino acid
  misc_feature (112)..(112): Xaa can be any naturally occurring amino acid
  misc_feature (118)..(118): Xaa can be any naturally occurring amino acid
  misc_feature (120)..(120): Xaa can be any naturally occurring amino acid
  misc_feature (191)..(191): Xaa can be any naturally occurring amino acid
  misc_feature (212)..(212): Xaa can be any naturally occurring amino acid
SSSPERTDGPWASKVTRAAPSLTLQTPLSSPCLLPXLGLSLSMAEWEQRWXREPRPAPAPIRRRSSNYRAYATEPHAKKKSKISASRKLQLKTLLLXTCKXRXWKXEAEDRXVEKGRXLXTRCQPLELAGLGSRTVRTCCRQLHARVDKVDEERYDIEAKVTKNITEIANFDFRRFLTFEASLSGPTCEEXRSLQMHDAGAFGARVKSPGLXAT

SEQ ID NO: 936941 - protein, 50 aa, Homo sapiens
MVSDGKHDGPCLESEEMQVLQNNMVSLLYDFKIVWVNVHASHKCVGGWFT

SEQ ID NO: 936942 - protein, 93 aa, Homo sapiens
SCTSCEEMLGGELIHGLGPSGNVWLSYERKPRVQDGKPVISFSHSNSLCLTPSCGLSGEQEPPQLITSILLHKGACSVWAGHRPNCHIPLYFV

SEQ ID NO: 936943 - protein, 75 aa, Homo sapiens
  misc_feature (33)..(33): Xaa can be any naturally occurring amino acid
  misc_feature (52)..(52): Xaa can be any naturally occurring amino acid
  misc_feature (63)..(63): Xaa can be any naturally occurring amino acid
QQLVHALRPFAGERKRHWRAELQKQTQCTVDIXPFWGPATVLPENSGEADSXVRLMRRLHPPXLSTPAQMEEQVL

SEQ ID NO: 936944 - protein, 34 aa, Homo sapiens
  misc_feature (12)..(12): Xaa can be any naturally occurring amino acid
PDAVDGQLDESXGIGAGHEWVSSLVVADVDYAAS

SEQ ID NO: 936945 - protein, 101 aa, Homo sapiens
  misc_feature (5)..(6): Xaa can be any naturally occurring amino acid
  misc_feature (48)..(48): Xaa can be any naturally occurring amino acid
  misc_feature (57)..(57): Xaa can be any naturally occurring amino acid
  misc_feature (61)..(61): Xaa can be any naturally occurring amino acid
  misc_feature (68)..(68): Xaa can be any naturally occurring amino acid
  misc_feature (77)..(77): Xaa can be any naturally occurring amino acid
  misc_feature (99)..(99): Xaa can be any naturally occurring amino acid
FGTGXXLTRVRGSRGSGKMAAVRAGCWVARADAVAHTGVRGGQVRGAXGVTDGNEVXKASXNFLGEQXTIFSRILDXKLQADILYEDNSVLCSVMWPPXFL

SEQ ID NO: 936946 - protein, 124 aa, Homo sapiens
  misc_feature (85)..(85): Xaa can be any naturally occurring amino acid
EIWSGSVAQARVRWHDFGSLQPPPPGLKPSSYLSLLSSWNQRHMPSCPANFCIFCRHRISPCCQAGLELLNSSNLPTSASQSAGXICIHHCAWPTFFFLTIILFPGSSESLTGPFQFLGLSYFL

SEQ ID NO: 936947 - protein, 32 aa, Homo sapiens
YKPVFVTEITDDLHFYVQDVETGTQLEKLMEN

SEQ ID NO: 936948 - protein, 62 aa, Homo sapiens
  misc_feature (16)..(16): Xaa can be any naturally occurring amino acid
  misc_feature (31)..(31): Xaa can be any naturally occurring amino acid
HTCAPCPAPGPLAAGXFLAMGRSRRTGRTEXISSPADEGDGGGRTLDEIHRELRLRDPHDPS

SEQ ID NO: 936949 - protein, 106 aa, Homo sapiens
  misc_feature (13)..(13): Xaa can be any naturally occurring amino acid
  misc_feature (87)..(87): Xaa can be any naturally occurring amino acid
  misc_feature (100)..(100): Xaa can be any naturally occurring amino acid
  misc_feature (102)..(102): Xaa can be any naturally occurring amino acid
PANTAKPRLHQKXTKTSQAWWRAPAIAGTRQAEAGESGREAAVSRDGSSTVQLRLGISGRPWKERERETVGRGRPWGEGEGEGEGFXTIFKQGYFVFLLXKXSSFL

SEQ ID NO: 936950 - protein, 55 aa, Homo sapiens
  misc_feature (25)..(25): Xaa can be any naturally occurring amino acid
  misc_feature (31)..(31): Xaa can be any naturally occurring amino acid
  misc_feature (37)..(37): Xaa can be any naturally occurring amino acid
  misc_feature (52)..(52): Xaa can be any naturally occurring amino acid
ITQARCQSPGGGSGRKDRLRSLRLXGSKSPXPYLGTXLVRLVKGGQQAGKGXGAV

SEQ ID NO: 936951 - protein, 36 aa, Homo sapiens
DSILHEGTALSCQFCVLEVTTSPLPALGLCAPSPGP

SEQ ID NO: 936952 - protein, 36 aa, Homo sapiens
  misc_feature (20)..(20): Xaa can be any naturally occurring amino acid
  misc_feature (35)..(35): Xaa can be any naturally occurring amino acid
GSPHQTGRPPLLNALEVQGXGRPDWFGEVAQHLGXR

SEQ ID NO: 936953 - protein, 77 aa, Homo sapiens
  misc_feature (1)..(1): Xaa can be any naturally occurring amino acid
  misc_feature (5)..(5): Xaa can be any naturally occurring amino acid
  misc_feature (39)..(39): Xaa can be any naturally occurring amino acid
  misc_feature (67)..(67): Xaa can be any naturally occurring amino acid
XQGSXQLILAGVLGMHYRHEYQVPRPGTVVHALIPALWXGQGRWISRSEVRDQPGHNGETLSLLKIXKISRSSGGHL

SEQ ID NO: 936954 - protein, 98 aa, Homo sapiens
  misc_feature (6)..(7): Xaa can be any naturally occurring amino acid
  misc_feature (92)..(92): Xaa can be any naturally occurring amino acid
  misc_feature (95)..(95): Xaa can be any naturally occurring amino acid
  misc_feature (98)..(98): Xaa can be any naturally occurring amino acid
QGVPKXXLNKGMISVGIALRLMPSAPIRAHGSCQPLEVPLGPTNVSRPQEESAWLHVPGAWGRKVDGAIRVVTIGEYTLHSTRVSRDISHWXLSXAFX

SEQ ID NO: 936955 - protein, 185 aa, Homo sapiens
  misc_feature (1)..(1): Xaa can be any naturally occurring amino acid
  misc_feature (11)..(11): Xaa can be any naturally occurring amino acid
  misc_feature (24)..(24): Xaa can be any naturally occurring amino acid
  misc_feature (48)..(49): Xaa can be any naturally occurring amino acid
  misc_feature (63)..(63): Xaa can be any naturally occurring amino acid
  misc_feature (65)..(67): Xaa can be any naturally occurring amino acid
  misc_feature (135)..(135): Xaa can be any naturally occurring amino acid
XEITLTKGQKXQKLGGATARPLVXPPDLQGFGTEPGFRRGALIVLEGXXFNGKSTQSRKLVDXLXXXATGTELLRFPERSTEIGKLLSSYLQKKSDVEDHSVHLLFSANRWEQVPLIKEKLSQGVTLVVDRYAFXGVAFTGAKENFSLDWCKQPDVGLPKPDLGPVPPVTAGGCCQAGERLAMSA

SEQ ID NO: 936956 - protein, 81 aa, Homo sapiens
  misc_feature (8)..(9): Xaa can be any naturally occurring amino acid
  misc_feature (11)..(11): Xaa can be any naturally occurring amino acid
  misc_feature (24)..(24): Xaa can be any naturally occurring amino acid
  misc_feature (27)..(27): Xaa can be any naturally occurring amino acid
  misc_feature (78)..(78): Xaa can be any naturally occurring amino acid
  misc_feature (80)..(80): Xaa can be any naturally occurring amino acid
RIKVERTXXGXRLAATKCRKRNWXRIXMQKDKVKTLKAENAGLSSTAGLLREQVASSKEGHDHVSNGCQLLLGVKGHXFXK

SEQ ID NO: 936957 - protein, 184 aa, Homo sapiens
  misc_feature (11)..(12): Xaa can be any naturally occurring amino acid
  misc_feature (45)..(45): Xaa can be any naturally occurring amino acid
  misc_feature (52)..(52): Xaa can be any naturally occurring amino acid
  misc_feature (64)..(64): Xaa can be any naturally occurring amino acid
  misc_feature (73)..(73): Xaa can be any naturally occurring amino acid
  misc_feature (86)..(86): Xaa can be any naturally occurring amino acid
  misc_feature (89)..(89): Xaa can be any naturally occurring amino acid
  misc_feature (104)..(104): Xaa can be any naturally occurring amino acid
  misc_feature (117)..(117): Xaa can be any naturally occurring amino acid
  misc_feature (167)..(167): Xaa can be any naturally occurring amino acid
  misc_feature (180)..(180): Xaa can be any naturally occurring amino acid
GAKVGGRVAQXXHPPNPKSPAPWSPPPAHAVGPAAESGSPGGGAXGLTQTPXEMQRVSLLSQVXMTRSYRSTXLTWSSPEDKDNPXGRXMMPWPDADRLAGPSXCRALGRHGVHRLXAGPAIKRGRMGSSEEGVVINAGKDSTSRELPSATPNTAGSSSTRFIANSXEPEIRLDFKPAGXPRRS

SEQ ID NO: 936958 - protein, 75 aa, Homo sapiens
  misc_feature (31)..(31): Xaa can be any naturally occurring amino acid
  misc_feature (50)..(51): Xaa can be any naturally occurring amino acid
LGASAQSVFSGEFGVDFSQATEDVVRGLPRXLEILSHGSPPSAPPWSLPXXVYHKVVPQIPVKSGGPHGQGVLGL

SEQ ID NO: 936959 - protein, 52 aa, Homo sapiens
MEGELKQSGGIASPRKCKGSGDFPFLAKGSRDRLYQENRGTSAQIFVLFQRS

SEQ ID NO: 936960 - protein, 82 aa, Homo sapiens
  misc_feature (2)..(2): Xaa can be any naturally occurring amino acid
  misc_feature (11)..(12): Xaa can be any naturally occurring amino acid
  misc_feature (70)..(70): Xaa can be any naturally occurring amino acid
  misc_feature (82)..(82): Xaa can be any naturally occurring amino acid
AXGNLHRSITXXSQTSRPEPSQRPMDDKKKKRIPSPAWPSTQAPGHYGGSLCLPATAAPWPRTSSSAIPXVAGQVQDSRQRX

SEQ ID NO: 936961 - protein, 59 aa, Homo sapiens
  misc_feature (43)..(43): Xaa can be any naturally occurring amino acid
  misc_feature (49)..(49): Xaa can be any naturally occurring amino acid
MAQQRALPQSKETLLQSYNKRLKDDIKSIMDNFTEIIKTAKIXGRDAGXTGHSRVEQGQ

SEQ ID NO: 936962 - protein, 135 aa, Homo sapiens
  misc_feature (116)..(116): Xaa can be any naturally occurring amino acid
SIAFHSIAIELIPFHSIPYHSIPFHSFHSITDDSIPLHSIPFHSPVLGLIIFHSIPLHSVPLHSILLHSILFGLIPCRSIPFHSIPFHCNGVDSIPFHSIPDYSIPLHSIPFHSPXLVLIPFRSIPFHSIPLQSS

SEQ ID NO: 936963 - protein, 55 aa, Homo sapiens
  misc_feature (8)..(8): Xaa can be any naturally occurring amino acid
  misc_feature (23)..(23): Xaa can be any naturally occurring amino acid
QVLLPPWXPGLPGMYTESLGGLXQGGNMCAMVPTSHSSDSARPALTTKVDGRLTI

SEQ ID NO: 936964 - protein, 83 aa, Homo sapiens
  misc_feature (13)..(13): Xaa can be any naturally occurring amino acid
  misc_feature (15)..(15): Xaa can be any naturally occurring amino acid
  misc_feature (31)..(31): Xaa can be any naturally occurring amino acid
  misc_feature (36)..(36): Xaa can be any naturally occurring amino acid
  misc_feature (60)..(60): Xaa can be any naturally occurring amino acid
MWHPGGTQNTPVXIXALSLYGYYIPCPVLSXKAQSXVWGSTSSCIHTSDLLPRTHAHPKXMGAVPSTVSPNDFFFKIKENICL

SEQ ID NO: 936965 - protein, 51 aa, Homo sapiens
  misc_feature (13)..(13): Xaa can be any naturally occurring amino acid
  misc_feature (20)..(20): Xaa can be any naturally occurring amino acid
EKVTPGRDRSDPXEQEAATXPGPETGSCVGRGLREPDLPLRSEWSRKEGRG

SEQ ID NO: 936966 - protein, 33 aa, Homo sapiens
  misc_feature (16)..(16): Xaa can be any naturally occurring amino acid
DSLAQLPRLECSEPRXYHCTPAYAAERDSVPPP

SEQ ID NO: 936967 - protein, 38 aa, Homo sapiens
  misc_feature (25)..(25): Xaa can be any naturally occurring amino acid
  misc_feature (36)..(36): Xaa can be any naturally occurring amino acid
DSYKAGGNQKDIKEYVKWIDVLDYXCTFSPQARKTXTD

SEQ ID NO: 936968 - protein, 76 aa, Homo sapiens
  misc_feature (2)..(2): Xaa can be any naturally occurring amino acid
  misc_feature (18)..(19): Xaa can be any naturally occurring amino acid
  misc_feature (21)..(22): Xaa can be any naturally occurring amino acid
FXNGGSGGSQRLALPLRXXGXXPRRGLAGVGEGGPQCSWVNYRCTLEFLVSLLGTDLARGRGNSANGPQPLLTQNN

SEQ ID NO: 936969 - protein, 120 aa, Homo sapiens
EIGFHSHHPGWNAVAGSWLTTTSASSNPHTSASRVAGTTGTSHHTWLIFVFLLETESHHVGQAGLELLTSSDPPASASQRLGLQARATVLSLRILSLYSPFLKNPQKVSFSHDSKPLFGR

SEQ ID NO: 936970 - protein, 44 aa, Homo sapiens
  misc_feature (1)..(1): Xaa can be any naturally occurring amino acid
  misc_feature (37)..(37): Xaa can be any naturally occurring amino acid
  misc_feature (41)..(41): Xaa can be any naturally occurring amino acid
XITHFERSKMEKEWEDFAVKDGYHQGKRSSICVTLLXLISXVPV

SEQ ID NO: 936971 - protein, 82 aa, Homo sapiens
  misc_feature (21)..(21): Xaa can be any naturally occurring amino acid
  misc_feature (50)..(50): Xaa can be any naturally occurring amino acid
  misc_feature (61)..(61): Xaa can be any naturally occurring amino acid
  misc_feature (78)..(78): Xaa can be any naturally occurring amino acid
MRVTAPRTVLLLLSGALALTXTWAGEVRGRQGNGLFGEERGDRSGGAGPXEPRREEGRAGXSPSSPPGSHSMRYFYTXMSRS

SEQ ID NO: 936972 - protein, 44 aa, Homo sapiens
  misc_feature (13)..(13): Xaa can be any naturally occurring amino acid
  misc_feature (33)..(33): Xaa can be any naturally occurring amino acid
VCSQIPNHSRSIXRHCCKPRQVLIEGLNDHHRXLRPQPWIPGER

SEQ ID NO: 936973 - protein, 56 aa, Homo sapiens
  misc_feature (1)..(1): Xaa can be any naturally occurring amino acid
  misc_feature (24)..(24): Xaa can be any naturally occurring amino acid
XRHSEFLNLSSSPSMAVRIAALQXSHALTRLPTPVLLPYKPQVIRALANPWMTRRD

SEQ ID NO: 936974 - protein, 136 aa, Homo sapiens
  misc_feature (11)..(12): Xaa can be any naturally occurring amino acid
  misc_feature (19)..(19): Xaa can be any naturally occurring amino acid
  misc_feature (97)..(97): Xaa can be any naturally occurring amino acid
  misc_feature (101)..(101): Xaa can be any naturally occurring amino acid
  misc_feature (111)..(111): Xaa can be any naturally occurring amino acid
FSCAGAAGLYXXMAPSGMXGLEAPLPQGLAAARRPRGSTSRPGRSADVRPGKPRRRRIRSRPRVWFPIRPIVRCPTVRYHTKVRAGRASALEGAQGXAGNXQKRLARDQSXISCWIPRKAEQSPRNSLARPNVATA

SEQ ID NO: 936975 - protein, 36 aa, Homo sapiens
  misc_feature (17)..(17): Xaa can be any naturally occurring amino acid
  misc_feature (25)..(25): Xaa can be any naturally occurring amino acid
  misc_feature (29)..(29): Xaa can be any naturally occurring amino acid
NFVILHARADEHIALRXREKLEALXALTXTFCEDFQ

SEQ ID NO: 936976 - protein, 140 aa, Homo sapiens
  misc_feature (63)..(63): Xaa can be any naturally occurring amino acid
DRLTVPADVAQELDTIDVPDQGLAVAIHSRVWYIADFRHHQLVADVAGTAIEEEAFLPFVDGXDRNTNPPVVAWECGRDGDVGQVGHDARATSVIVVEDSGLQRCLGGRSKQKGRPRGKRVVTALFSSSPGESTPKHPPG

SEQ ID NO: 936977 - protein, 57 aa, Homo sapiens
  misc_feature (4)..(4): Xaa can be any naturally occurring amino acid
  misc_feature (39)..(39): Xaa can be any naturally occurring amino acid
  misc_feature (42)..(42): Xaa can be any naturally occurring amino acid
  misc_feature (51)..(51): Xaa can be any naturally occurring amino acid
GIYXLSLEIGKTLMEDVENSFFLNVNFQVTTVCQALAKXPKXQQGYNAMGXSQGGQF

SEQ ID NO: 936978 - protein, 148 aa, Homo sapiens
PLPTRPHLPFRGAARAARLTTACGAVLSPPHRLRPPRAHLDLSSSPSRSTHPNDDASRRSSLSYGLECAHAQRSSVSPLSLRRAHAPRFFSDLLARATLRASHTPHARARCWRLQLAYTRAPPLLRRTHTRAARSSRASTFSFPPLTY

SEQ ID NO: 936979 - protein, 86 aa, Homo sapiens
  misc_feature (9)..(9): Xaa can be any naturally occurring amino acid
  misc_feature (15)..(15): Xaa can be any naturally occurring amino acid
  misc_feature (35)..(35): Xaa can be any naturally occurring amino acid
  misc_feature (38)..(38): Xaa can be any naturally occurring amino acid
  misc_feature (60)..(60): Xaa can be any naturally occurring amino acid
  misc_feature (73)..(73): Xaa can be any naturally occurring amino acid
GLQACFLGXFALILXGKCSYSPEPDQRRTLPPGWXSLXRADPEEELSFTFALRQQNVERXSELVQAVSDPSSXQYGKYLTLENVAD

SEQ ID NO: 936980 - protein, 77 aa, Homo sapiens
  misc_feature (13)..(13): Xaa can be any naturally occurring amino acid
  misc_feature (71)..(71): Xaa can be any naturally occurring amino acid
  misc_feature (73)..(73): Xaa can be any naturally occurring amino acid
WSCPHNGWLSHNXGHHEDAGVICSASQSQPTPSPDTWPTSHASTAGSESSLALRLVNGGDRCQGRVEVLYXGXWGTV

SEQ ID NO: 936981 - protein, 46 aa, Homo sapiens
MVSLISVISTIGIALGVAVLIVGLSAMNGFERELNNRILAVVPHGE

SEQ ID NO: 936982 - protein, 168 aa, Homo sapiens
  misc_feature (119)..(119): Xaa can be any naturally occurring amino acid
RKKYCWTHSMSLGRSSSKSSHCDSPPRSQTPQDTNRASETDTHSIGEKNSSQSEEDDIERRKEVESILKKNSDWIWDVVKSATLSMRNTSVMKKGGIFSAEFLKVFLPSLLLSHFAGHXDWGSILGRRLDNLPPSTFLDEELGSLDLGSVQLDYFLSLGNIASLEELV

SEQ ID NO: 936983 - protein, 59 aa, Homo sapiens
  misc_feature (14)..(14): Xaa can be any naturally occurring amino acid
  misc_feature (25)..(25): Xaa can be any naturally occurring amino acid
  misc_feature (29)..(29): Xaa can be any naturally occurring amino acid
AVDEIFPEGAGPYXDLDEAGGSTGXLMDXAANKKAVNADFFNDFKDLFNDDDIQENALW

SEQ ID NO: 936984 - protein, 45 aa, Homo sapiens
  misc_feature (11)..(11): Xaa can be any naturally occurring amino acid
  misc_feature (15)..(15): Xaa can be any naturally occurring amino acid
  misc_feature (32)..(32): Xaa can be any naturally occurring amino acid
  misc_feature (37)..(37): Xaa can be any naturally occurring amino acid
NITVTYRDGRXAQLXQVYIRGSKIRFLIFPDXLKNAXMLKSMKNK

SEQ ID NO: 936985 - protein, 67 aa, Homo sapiens
  misc_feature (28)..(28): Xaa can be any naturally occurring amino acid
ILVGVGLEATPSPGVSSAIFFVPGFLLXVPGVYHVILIYCAVKGHRGFQFFYLPYFEKLIAAHVGPL

SEQ ID NO: 936986 - protein, 75 aa, Homo sapiens
RIVGQEKKGYFEDRRPSANCDPYAVTEAIVRTCLLNETGDEPFQYKNYADSTSSDLEPFLVHPTPNCSLSHWSPL

SEQ ID NO: 936987 - protein, 148 aa, Homo sapiens
  misc_feature (13)..(13): Xaa can be any naturally occurring amino acid
  misc_feature (33)..(33): Xaa can be any naturally occurring amino acid
  misc_feature (64)..(64): Xaa can be any naturally occurring amino acid
  misc_feature (68)..(68): Xaa can be any naturally occurring amino acid
  misc_feature (72)..(72): Xaa can be any naturally occurring amino acid
ALPCHWVREGLRXDDFGGQQVLARQRRAANTTXGRRDAVSKVPDGDFALHVVQPGHWQLSPCLXLGQXGTLXITGSSIIGGGVKAPRIKTKNLVSIIFCEAVAIYGIIMAIVIKQHGLSLSVATDPKGHRHPELTMQGYSMFLGAGLN

SEQ ID NO: 936988 - protein, 108 aa, Homo sapiens
  misc_feature (18)..(18): Xaa can be any naturally occurring amino acid
  misc_feature (22)..(22): Xaa can be any naturally occurring amino acid
FDYGDRFWDIKSKYFTCXCGSXKCKHSAEAIALEQSRLARLDPHPELLPDLSSLPPINNLRTVKIQAGHCPSDIPPSEDPSKAWKVYSPSPRAGFSLGVSDFRAGLPH

SEQ ID NO: 936989 - protein, 139 aa, Homo sapiens
  misc_feature (34)..(34): Xaa can be any naturally occurring amino acid
  misc_feature (57)..(57): Xaa can be any naturally occurring amino acid
  misc_feature (61)..(62): Xaa can be any naturally occurring amino acid
  misc_feature (69)..(69): Xaa can be any naturally occurring amino acid
TFIRDKYSKRFPELESLVPNALDYIRTVKELGNXWDKCKNNENLQQILTNATIMVVXVNGXXQPRGNKXFGRRSWERLEEGLRHGAGAERPPSTASTSMWSPGMSFNRTQTCPIIIGASHGPAKIMGCGPALDQPLQDA

SEQ ID NO: 936990 - protein, 146 aa, Homo sapiens
  misc_feature (25)..(25): Xaa can be any naturally occurring amino acid
  misc_feature (36)..(36): Xaa can be any naturally occurring amino acid
  misc_feature (75)..(75): Xaa can be any naturally occurring amino acid
  misc_feature (140)..(140): Xaa can be any naturally occurring amino acid
  misc_feature (142)..(142): Xaa can be any naturally occurring amino acid
TAPNAASSSTSASWAKRINFPGEAXGVAIEERCLRXACQVWARPEEEEQQGIPGHKEEAPHSTSPADCFFSILCXTGEGRPGDGSRLPWACPAPLPAVLGMPPLDYGIRRQPCTRSSRRPGPELGLLRGAGSEPGAQARXSXCRGR

SEQ ID NO: 936991 - protein, 47 aa, Homo sapiens
  misc_feature (18)..(18): Xaa can be any naturally occurring amino acid
EHQRGRTLTMVSLGCGFXGPVVGGWYKVLVRFIPGTTKVDALKKMLL

SEQ ID NO: 936992 - protein, 65 aa, Homo sapiens
  misc_feature (5)..(5): Xaa can be any naturally occurring amino acid
  misc_feature (42)..(42): Xaa can be any naturally occurring amino acid
  misc_feature (60)..(60): Xaa can be any naturally occurring amino acid
TNQRXPARKPQRARGSEGAKDLVQVKLKELSFLPGDVGSQLXSCLLGVLKYPSVPLAADXPRFMT

SEQ ID NO: 936993 - protein, 75 aa, Homo sapiens
  misc_feature (13)..(14): Xaa can be any naturally occurring amino acid
  misc_feature (45)..(45): Xaa can be any naturally occurring amino acid
  misc_feature (73)..(73): Xaa can be any naturally occurring amino acid
RQVVQTLHLQLQXXCLLLERHVHFGAGGDSLDGEVVGVGGQDERXQHGSGVCALPLPVGQGTRSCPVSISRSXPS

SEQ ID NO: 936994 - protein, 61 aa, Homo sapiens
  misc_feature (26)..(26): Xaa can be any naturally occurring amino acid
  misc_feature (60)..(60): Xaa can be any naturally occurring amino acid
REAPVVPEASPQSGPPPASRPERGRXQLLKGAAHAPSVGSARGPLATSWTLFRTFHRPLXP

SEQ ID NO: 936995 - protein, 63 aa, Homo sapiens
  misc_feature (17)..(17): Xaa can be any naturally occurring amino acid
  misc_feature (41)..(41): Xaa can be any naturally occurring amino acid
  misc_feature (50)..(50): Xaa can be any naturally occurring amino acid
  misc_feature (52)..(52): Xaa can be any naturally occurring amino acid
MKFHSMKMEEINKIIRXLWRSTYRGQDIDYIEIRSDADENXSPSDKRRNXNXRVVMLKGDTAL

SEQ ID NO: 936996 - protein, 89 aa, Homo sapiens
  misc_feature (15)..(15): Xaa can be any naturally occurring amino acid
  misc_feature (84)..(84): Xaa can be any naturally occurring amino acid
NNKGTNDPVYAKNAXVSPTVQGNANQNRNERDHLIPVRIAVIKKHKIKNVGNNVEKGNPSELLVRMEISTAFMENSMAVPQKIXNRTTI

SEQ ID NO: 936997 - protein, 75 aa, Homo sapiens
  misc_feature (31)..(31): Xaa can be any naturally occurring amino acid
  misc_feature (72)..(72): Xaa can be any naturally occurring amino acid
SRVTLMAQHGSDQHQVLVCTKLVEPSTPRWXPLYIVLGELQHQQGQRLRGEEARVLDLVLEGMNLALVGNKXSRE

SEQ ID NO: 936998 - protein, 103 aa, Homo sapiens
  misc_feature (11)..(12): Xaa can be any naturally occurring amino acid
  misc_feature (15)..(15): Xaa can be any naturally occurring amino acid
  misc_feature (25)..(25): Xaa can be any naturally occurring amino acid
  misc_feature (60)..(60): Xaa can be any naturally occurring amino acid
  misc_feature (67)..(67): Xaa can be any naturally occurring amino acid
  misc_feature (89)..(89): Xaa can be any naturally occurring amino acid
  misc_feature (98)..(98): Xaa can be any naturally occurring amino acid
GVGETLGALNXXLGXGGPVWIKETXTRHLRSRDFLAPHRELQAVSDDGQVPEHLLHALDXLQGPGVXPVLRCARPPRVCLSKLQRSAVXERVLSAVAXYATSG

SEQ ID NO: 936999 - protein, 38 aa, Homo sapiens
LRWKPSSQPTIPNLGIVSGPAVLAVLAVLAVLAVLGAL

SEQ ID NO: 937000 - protein, 38 aa, Homo sapiens
  misc_feature (15)..(15): Xaa can be any naturally occurring amino acid
  misc_feature (28)..(28): Xaa can be any naturally occurring amino acid
KRVIGQDHDFSESSXEEAPAEASSGALXSKHGEKAPMK

SEQ ID NO: 937001 - protein, 53 aa, Homo sapiens
FGMREMPHGGQADDEVLADLQAGKARLPQPRRVPLPKLYRLMQACWALKPKER

SEQ ID NO: 937002 - protein, 109 aa, Homo sapiens
  misc_feature (7)..(7): Xaa can be any naturally occurring amino acid
  misc_feature (14)..(14): Xaa can be any naturally occurring amino acid
  misc_feature (22)..(22): Xaa can be any naturally occurring amino acid
  misc_feature (32)..(32): Xaa can be any naturally occurring amino acid
PPDLPRXIMHVHEXAHGQTCAXPSSSGQNEIXHTGPTLQVDLYPMYNFDPTEEQDELEQELLEHGRDAPLYRLLLLLQAMQGKTTLPSQGPLQRPSRLVFTDVANAIHA

SEQ ID NO: 937003 - protein, 37 aa, Homo sapiens
  misc_feature (5)..(5): Xaa can be any naturally occurring amino acid
LVDPXVHGRISTEEAIRKGYRWPRAQRLQDTSSYAKK

SEQ ID NO: 937004 - protein, 67 aa, Homo sapiens
  misc_feature (8)..(8): Xaa can be any naturally occurring amino acid
  misc_feature (14)..(14): Xaa can be any naturally occurring amino acid
  misc_feature (28)..(28): Xaa can be any naturally occurring amino acid
  misc_feature (33)..(33): Xaa can be any naturally occurring amino acid
DGRERSKXLGPPKXKVLRKLKGPEEAPXNGRSXDRPCCYEKRMAVAVGVRAAPVLGIRTENARTRRL

SEQ ID NO: 937005 - protein, 51 aa, Homo sapiens
NGVIYDWSHIAFYDAFCQPVASRSTDLCHVADIANIRDRALVNTTNADQHG

SEQ ID NO: 937006 - protein, 108 aa, Homo sapiens
  misc_feature (26)..(26): Xaa can be any naturally occurring amino acid
  misc_feature (52)..(52): Xaa can be any naturally occurring amino acid
  misc_feature (67)..(67): Xaa can be any naturally occurring amino acid
  misc_feature (81)..(81): Xaa can be any naturally occurring amino acid
  misc_feature (85)..(85): Xaa can be any naturally occurring amino acid
  misc_feature (99)..(99): Xaa can be any naturally occurring amino acid
RHEASRELDAKTKTRAEVRRRWRKAXPQKGTGRAGMAASALRSGEEEVLPMXPGPTSYYYMLPMKVXALGLKVALTVKLAXDDLXIMDSLELPTGDPQXLDKSWRTAR

SEQ ID NO: 937007 - protein, 131 aa, Homo sapiens
ITVSSLNAAFFDNFRQTVLFLTDDRRASYILHRQRFNGAGNILMIGCHDDALGTCFTRAFKNMNNHGFAVNINQWFTGQTRGREAAGIMTTKLMIYFISSQHAGFRFQQHWNAITQRESEVVQFANKLLFF

SEQ ID NO: 937008 - protein, 123 aa, Homo sapiens
  misc_feature (13)..(13): Xaa can be any naturally occurring amino acid
  misc_feature (45)..(45): Xaa can be any naturally occurring amino acid
  misc_feature (48)..(48): Xaa can be any naturally occurring amino acid
  misc_feature (62)..(62): Xaa can be any naturally occurring amino acid
  misc_feature (73)..(73): Xaa can be any naturally occurring amino acid
  misc_feature (75)..(75): Xaa can be any naturally occurring amino acid
  misc_feature (98)..(98): Xaa can be any naturally occurring amino acid
YITQLDEMQRHWXAVEDEKKTLNSLLRMAIQQKLALTQRLELLEXGPXCRPGVAVPKPPPKXKPATPSLYSSXQXDFGHPALVTLQPLPLPSRGPTMXGRKGKPKKAHFRNFLEYATCKFFSK

SEQ ID NO: 937009 - protein, 106 aa, Homo sapiens
  misc_feature (92)..(92): Xaa can be any naturally occurring amino acid
MCCVTEGKSLYLSELQGPHLKEDNNTAGLMGLRRGPKLPLTWALPLERVRIPLGRQQQQQQQTLSVYLSIYLSIYLSIYLSIYLSNLSISQXLSSTQPALASCQLT

SEQ ID NO: 937010 - protein, 96 aa, Homo sapiens
  misc_feature (63)..(63): Xaa can be any naturally occurring amino acid
  misc_feature (95)..(95): Xaa can be any naturally occurring amino acid
AATSVTPLIARVDSADLGWLRRVSPSSLTRSMCVPPRSCALGRRGRPSPDREGPVFGQGCPPXQVIAGFNLLRRNSEALASKAAELEMELNEAQXK

SEQ ID NO: 937011 - protein, 70 aa, Homo sapiens
  misc_feature (11)..(11): Xaa can be any naturally occurring amino acid
  misc_feature (24)..(24): Xaa can be any naturally occurring amino acid
  misc_feature (61)..(61): Xaa can be any naturally occurring amino acid
QEGWFHHLARXAVACFLTRGDLWXSWESGVRVFNELLLDADLSVNAGSWMWLSCSAFFQQXFHCYCPVGF

SEQ ID NO: 937012 - protein, 59 aa, Homo sapiens
  misc_feature (2)..(2): Xaa can be any naturally occurring amino acid
  misc_feature (6)..(6): Xaa can be any naturally occurring amino acid
  misc_feature (19)..(19): Xaa can be any naturally occurring amino acid
  misc_feature (51)..(51): Xaa can be any naturally occurring amino acid
  misc_feature (55)..(55): Xaa can be any naturally occurring amino acid
AXPMAXGGTQNGRAGRLRXQGIAVLPRLILKLLDSSNPDLSLLKIAGNYRXATMXQLVI

SEQ ID NO: 937013 - protein, 103 aa, Homo sapiens
  misc_feature (14)..(14): Xaa can be any naturally occurring amino acid
  misc_feature (28)..(28): Xaa can be any naturally occurring amino acid
  misc_feature (31)..(31): Xaa can be any naturally occurring amino acid
  misc_feature (38)..(38): Xaa can be any naturally occurring amino acid
  misc_feature (49)..(49): Xaa can be any naturally occurring amino acid
SVSEYQQYQDATAXEEGEMYEDDEEESXAQXQSEAARXGSERQVAAGAXPAVSKPPEPSCCRHPAFPSPWVPCRPPAVFMASSSPPRPRVSCSCLCLIASSKA

SEQ ID NO: 937014 - protein, 82 aa, Homo sapiens
  misc_feature (37)..(37): Xaa can be any naturally occurring amino acid
MGPPNTDRRKPQIRLQEDFESQVLKGFESGPKCGDHXLAEEYRAKSWDSEMKKLYSHADFPSSVAGVFKLAGISCFAGIWRR

SEQ ID NO: 937015 - protein, 66 aa, Homo sapiens
  misc_feature (20)..(20): Xaa can be any naturally occurring amino acid
  misc_feature (25)..(25): Xaa can be any naturally occurring amino acid
  misc_feature (41)..(41): Xaa can be any naturally occurring amino acid
  misc_feature (52)..(52): Xaa can be any naturally occurring amino acid
ALPPCVTGEEDVVTDKEPGXPAPDXCIMTMRHNWTPDLSPXWVLLLCAHVVXLLVRATTVLQTHQK

SEQ ID NO: 937016 - protein, 31 aa, Homo sapiens
  misc_feature (2)..(2): Xaa can be any naturally occurring amino acid
  misc_feature (17)..(17): Xaa can be any naturally occurring amino acid
SXGNQELKSASGIDFLXIGVSRVTGRTAMGV

SEQ ID NO: 937017 - protein, 96 aa, Homo sapiens
  misc_feature (15)..(15): Xaa can be any naturally occurring amino acid
  misc_feature (87)..(87): Xaa can be any naturally occurring amino acid
  misc_feature (92)..(92): Xaa can be any naturally occurring amino acid
SEVGLSSETGRRIRXPDVASEGQRQAAVDQRRVAELDVVVGPPGDAEAVERHLDVGPAARRLVQSEKESVEEAVGDGAAANRGKAGXSALVXGRTR

SEQ ID NO: 937018 - protein, 94 aa, Homo sapiens
  misc_feature (69)..(69): Xaa can be any naturally occurring amino acid
  misc_feature (71)..(71): Xaa can be any naturally occurring amino acid
LLKLSFCPIVTLVLLSAQLTHRAPFGHPQVSFDDASSTSTCSSYWGLHSPTLGTRNVGVIRPNIQAMGXTXPSRIKGMRKDKLRVYKVGPGAQR

SEQ ID NO: 937019 - protein, 113 aa, Homo sapiens
  misc_feature (11)..(11): Xaa can be any naturally occurring amino acid
  misc_feature (43)..(44): Xaa can be any naturally occurring amino acid
  misc_feature (63)..(63): Xaa can be any naturally occurring amino acid
SEEAATVKQPXQVVPDQGPERGRSARAEKVKLIRRTTNPWTGXXAGGEYKEMDKPCGCPPGVXDHGTGDRRVPWYSTVGLLPPVRAMSQRNLNAKTEQGPTGVHNDIQPHKHG

SEQ ID NO: 937020 - protein, 147 aa, Homo sapiens
  misc_feature (1)..(1): Xaa can be any naturally occurring amino acid
  misc_feature (91)..(91): Xaa can be any naturally occurring amino acid
  misc_feature (123)..(123): Xaa can be any naturally occurring amino acid
  misc_feature (133)..(133): Xaa can be any naturally occurring amino acid
  misc_feature (144)..(144): Xaa can be any naturally occurring amino acid
XQHATIAKRVKETPNATWPVHAVITNSTYDGLLYNTDFIKKTLDVKSIHFDSAWVPYTNFSPIYEGKCGMSGGRVEGKVIYETQSTHKLLXGFSQASMIHVKGDVNEETFNEAYMMHTTTSPXYGIVGSTETXGGMMKGNAGKXLIK

SEQ ID NO: 937021 - protein, 149 aa, Homo sapiens
  misc_feature (3)..(4): Xaa can be any naturally occurring amino acid
  misc_feature (6)..(7): Xaa can be any naturally occurring amino acid
  misc_feature (117)..(118): Xaa can be any naturally occurring amino acid
  misc_feature (129)..(129): Xaa can be any naturally occurring amino acid
  misc_feature (141)..(141): Xaa can be any naturally occurring amino acid
  misc_feature (145)..(145): Xaa can be any naturally occurring amino acid
FSXXHXXAYDLGADVRQKVDLSTFSDEEVMRLAENLRKGMPIATPVFDGAKEAEIKELLKLGDLPTSGQIRLYDGRTGEQFERPVTVGYMYMLKLNHLVDDKMHARSTGSYSLVTQXXLGGEGTSSGSXFRGDGSVGAWKXTGQXTTLQ

SEQ ID NO: 937022 - protein, 41 aa, Homo sapiens
IADQVRSSLKRKKQEVPVFKAVYSEPGGRGANYFIKVHVGA

SEQ ID NO: 937023 - protein, 128 aa, Homo sapiens
  misc_feature (16)..(17): Xaa can be any naturally occurring amino acid
  misc_feature (40)..(40): Xaa can be any naturally occurring amino acid
  misc_feature (104)..(104): Xaa can be any naturally occurring amino acid
  misc_feature (112)..(112): Xaa can be any naturally occurring amino acid
  misc_feature (117)..(117): Xaa can be any naturally occurring amino acid
NGGADESCIWKCCGDXXVAQCDQTQGKHQAPPAEPCVSPXLPKCQTWELTDSTACAGFKSPGQLSGNRRISAAIIFHGLSRSHDLQVGDQGKEELSLHANSKAXQDQNVVRXCPEMXSLLKAPCKEQK

SEQ ID NO: 937024 - protein, 90 aa, Homo sapiens
  misc_feature (75)..(75): Xaa can be any naturally occurring amino acid
  misc_feature (82)..(82): Xaa can be any naturally occurring amino acid
MTIVDDDICFEIQCQTERIEITGPYCRPVIVHQCHFAVERAAAVLKNLNAAFNQIVIQQARTDSDNRHIRFALNXQFDPHPXPCRFTQGV

SEQ ID NO: 937025 - protein, 141 aa, Homo sapiens
  misc_feature (18)..(18): Xaa can be any naturally occurring amino acid
  misc_feature (92)..(92): Xaa can be any naturally occurring amino acid
  misc_feature (110)..(110): Xaa can be any naturally occurring amino acid
  misc_feature (140)..(140): Xaa can be any naturally occurring amino acid
TGHPSLSTASHKCQRAAXAKNSNPGHIGTLCSDCSDHSKHKQPMSSSSKSFQAHASDTAASLYPYASQAQGPISKVSVDSLWLTQQINPHPXPQTQPQSRPHPTVVTTTXGQARGQHPGAKGDSDCKPRTRASPGPKGQXM

SEQ ID NO: 937026 - protein, 110 aa, Homo sapiens
  misc_feature (28)..(28): Xaa can be any naturally occurring amino acid
  misc_feature (77)..(77): Xaa can be any naturally occurring amino acid
  misc_feature (91)..(91): Xaa can be any naturally occurring amino acid
GDAFRSHLSPRLECNGAISAHCNLCLPXSSNSPASASQVAGITGTCHHARLIFVFLIETGFCVGLVSNSRPQVIHPXRPPKVLEYRCEPPXPAVNFNLYKLYLNIFKRAT

SEQ ID NO: 937027 - protein, 79 aa, Homo sapiens
  misc_feature (11)..(11): Xaa can be any naturally occurring amino acid
  misc_feature (52)..(52): Xaa can be any naturally occurring amino acid
  misc_feature (57)..(57): Xaa can be any naturally occurring amino acid
  misc_feature (61)..(62): Xaa can be any naturally occurring amino acid
ESCSITRCCLXPAALKIAALLGSGLMEEQGREPIWAHPGSLLGCRGPELELXPCAQXLVMXXAGFGGPSCGVCVRGGQG

SEQ ID NO: 937028 - protein, 107 aa, Homo sapiens
  misc_feature (6)..(6): Xaa can be any naturally occurring amino acid
  misc_feature (99)..(99): Xaa can be any naturally occurring amino acid
MSGSPXCPANKGGGMSLRFLAAGNPLRWAPILTSRWNSTSIKGKGYGHLYHKSQEGPGEKLLLGSSVAIFAIGKPWLDVRFYILQGILGQEGLVLEVCXAGRLWRPL

SEQ ID NO: 937029 - protein, 80 aa, Homo sapiens
  misc_feature (1)..(2): Xaa can be any naturally occurring amino acid
  misc_feature (4)..(4): Xaa can be any naturally occurring amino acid
  misc_feature (7)..(7): Xaa can be any naturally occurring amino acid
XXWXFNXICLKNMISIPANLGKAINIADYIDPAIMKKKKWQKKKKHLCKQVRSKRGKKKHIKEEPLSKEEPCTSTAIASP

SEQ ID NO: 937030 - protein, 86 aa, Homo sapiens
  misc_feature (32)..(32): Xaa can be any naturally occurring amino acid
  misc_feature (54)..(54): Xaa can be any naturally occurring amino acid
  misc_feature (75)..(75): Xaa can be any naturally occurring amino acid
LRPGPPRSQIQAPGRTMSGSYWSCQAHTAAQXELLFDLSVNVGKRNARAAELKXTQPREICRMDFLVLFLFYLAXVLMGLVLICVC

SEQ ID NO: 937031 - protein, 67 aa, Homo sapiens
  misc_feature (14)..(14): Xaa can be any naturally occurring amino acid
  misc_feature (37)..(37): Xaa can be any naturally occurring amino acid
  misc_feature (48)..(48): Xaa can be any naturally occurring amino acid
  misc_feature (58)..(58): Xaa can be any naturally occurring amino acid
  misc_feature (64)..(64): Xaa can be any naturally occurring amino acid
DVPDWKVGESCSTXTAGAPLIGELYGCAPQRRLSMPXRLHVVHVGPFXPATWIPAPSXWDGITXLQT

SEQ ID NO: 937032 - protein, 149 aa, Homo sapiens
  misc_feature (45)..(45): Xaa can be any naturally occurring amino acid
  misc_feature (54)..(54): Xaa can be any naturally occurring amino acid
  misc_feature (63)..(63): Xaa can be any naturally occurring amino acid
  misc_feature (67)..(67): Xaa can be any naturally occurring amino acid
  misc_feature (72)..(72): Xaa can be any naturally occurring amino acid
  misc_feature (76)..(76): Xaa can be any naturally occurring amino acid
  misc_feature (83)..(83): Xaa can be any naturally occurring amino acid
  misc_feature (112)..(112): Xaa can be any naturally occurring amino acid
  misc_feature (116)..(116): Xaa can be any naturally occurring amino acid
  misc_feature (127)..(128): Xaa can be any naturally occurring amino acid
  misc_feature (137)..(137): Xaa can be any naturally occurring amino acid
YSRKSEAEIDMELFHQNHLIVKVPPYHDQHITWPVSVGIYVVKNXGRSHDVHPXTYTPDPAAXGAWXVNVKXEISXPARPGSXEEAMKAMKTTGCNLDKVNIIPNALMTPLXPSSXIKSEDGYSNGXXGRKRSSTIXKIQGFGAQLRKH

SEQ ID NO: 937033 - protein, 59 aa, Homo sapiens
  misc_feature (14)..(14): Xaa can be any naturally occurring amino acid
  misc_feature (28)..(29): Xaa can be any naturally occurring amino acid
  misc_feature (40)..(40): Xaa can be any naturally occurring amino acid
VGSPSSLQHERPQXHPIFAPGRTAAPRXXAAAALRRSGHXLRILGKPVMERWETPYMHA

SEQ ID NO: 937034 - protein, 105 aa, Homo sapiens
  misc_feature (5)..(5): Xaa can be any naturally occurring amino acid
  misc_feature (93)..(93): Xaa can be any naturally occurring amino acid
MSVRXAEVGGSAEVRGSRPDWPTWRNPISTKNTNFRWVWWHTPVIPVGVTQGAYLLVRSTGASHSLDTSQPEMFTVNPGNLVEADFPFLRKLXGGFGKKPPQDKE

SEQ ID NO: 937035 - protein, 49 aa, Homo sapiens
  misc_feature (4)..(4): Xaa can be any naturally occurring amino acid
  misc_feature (10)..(10): Xaa can be any naturally occurring amino acid
  misc_feature (39)..(39): Xaa can be any naturally occurring amino acid
REGXTMLVDXGGFKNAQARTSSPDKAGSAGFKSRVFPGXGNGINKKGHL

SEQ ID NO: 937036 - protein, 159 aa, Homo sapiens
  misc_feature (1)..(1): Xaa can be any naturally occurring amino acid
  misc_feature (81)..(81): Xaa can be any naturally occurring amino acid
  misc_feature (91)..(91): Xaa can be any naturally occurring amino acid
  misc_feature (103)..(103): Xaa can be any naturally occurring amino acid
  misc_feature (116)..(116): Xaa can be any naturally occurring amino acid
  misc_feature (137)..(137): Xaa can be any naturally occurring amino acid
  misc_feature (146)..(146): Xaa can be any naturally occurring amino acid
XRVGLTWRLRSGENALNHVNGSLTRTTETSHVTAGQALQISPENLCKVLRLITQCEGLQMVFFVKAQGFGAVCLNTAIGRXALTPMDAKTXDVETVLRDFREXLNTFDDWAASFWXFSALDCRAGVQGRRRGWRWSXPPTAAIFPXDLLLPARPTDVPR

SEQ ID NO: 937037 - protein, 131 aa, Homo sapiens
  misc_feature (10)..(10): Xaa can be any naturally occurring amino acid
  misc_feature (16)..(16): Xaa can be any naturally occurring amino acid
  misc_feature (51)..(51): Xaa can be any naturally occurring amino acid
  misc_feature (55)..(55): Xaa can be any naturally occurring amino acid
  misc_feature (62)..(62): Xaa can be any naturally occurring amino acid
  misc_feature (73)..(73): Xaa can be any naturally occurring amino acid
  misc_feature (93)..(93): Xaa can be any naturally occurring amino acid
  misc_feature (101)..(101): Xaa can be any naturally occurring amino acid
GLPEEHHKEXIHIRLXGQLLEGCPSHRASINDTGALAPQIREVGLQPSSEXLVYXLGLLGCXSLASTNGPHRXIGQDDLVPVLHVICDDLGLXENNFSVMXVSLSSSFSPMKGITPSPSAREWALLPNQVI

SEQ ID NO: 937038 - protein, 155 aa, Homo sapiens
  misc_feature (31)..(31): Xaa can be any naturally occurring amino acid
  misc_feature (103)..(103): Xaa can be any naturally occurring amino acid
  misc_feature (137)..(137): Xaa can be any naturally occurring amino acid
TTGHFSLPIFFQYHSHASGLIGSPTEPRMRXSGTVGAFDRFIAFRHQRAVRRGCGIENIDLMLVHHLRHTGRRRPVGYAFKHQRGRTAGQRAVTASNCVRSPXPHRRCTSRYHPDDNQRHIERSAPRTPDNRRQYAXHLLAYRVEPECRRINSGI

SEQ ID NO: 937039 - protein, 39 aa, Homo sapiens
  misc_feature (2)..(2): Xaa can be any naturally occurring amino acid
  misc_feature (7)..(7): Xaa can be any naturally occurring amino acid
  misc_feature (27)..(28): Xaa can be any naturally occurring amino acid
SXNEEIXFLKKVHEEEIRELQAQLQEXXVQVEMDMSKPD

SEQ ID NO: 937040 - protein, 53 aa, Homo sapiens
  misc_feature (7)..(7): Xaa can be any naturally occurring amino acid
  misc_feature (30)..(30): Xaa can be any naturally occurring amino acid
  misc_feature (44)..(44): Xaa can be any naturally occurring amino acid
VSAPGPXSGACARLGQVLLQGRCVHLCFRXGQATSKSQRVRGHXVPLVPSGAE

SEQ ID NO: 937041 - protein, 35 aa, Homo sapiens
  misc_feature (8)..(8): Xaa can be any naturally occurring amino acid
DPKQSSDXWGALASTTVMSPCGGEDIGGYHVASYA

SEQ ID NO: 937042 - protein, 106 aa, Homo sapiens
RTAYHLVFQHQLNVIDNHEEAPIVVQAVGDVITYSFVMEDAYDGCATGFGFANQFHHRGAVFGVQRGGRFVKQQNGVVDDKAAGDVDALLFATGKCRWCQVPQAFR

SEQ ID NO: 937043 - protein, 38 aa, Homo sapiens
  misc_feature (23)..(23): Xaa can be any naturally occurring amino acid
NIAWQDGCWNNYFPPQSIILISXIIVAVHGKHAKSSRR

SEQ ID NO: 937044 - protein, 53 aa, Homo sapiens
  misc_feature (23)..(24): Xaa can be any naturally occurring amino acid
  misc_feature (35)..(35): Xaa can be any naturally occurring amino acid
  misc_feature (38)..(38): Xaa can be any naturally occurring amino acid
  misc_feature (53)..(53): Xaa can be any naturally occurring amino acid
GNMALNGAEVDDFSWEPPTEAEXXRRCRRDGSGKXRIXIHYLFVFTFYNLQGX

SEQ ID NO: 937045 - protein, 34 aa, Homo sapiens
  misc_feature (17)..(17): Xaa can be any naturally occurring amino acid
NFGYNIPLKHLADRVAXYVHAYTLYSAVRPFGCS

SEQ ID NO: 937046 - protein, 85 aa, Homo sapiens
  misc_feature (10)..(10): Xaa can be any naturally occurring amino acid
  misc_feature (38)..(38): Xaa can be any naturally occurring amino acid
  misc_feature (57)..(57): Xaa can be any naturally occurring amino acid
  misc_feature (72)..(72): Xaa can be any naturally occurring amino acid
  misc_feature (75)..(75): Xaa can be any naturally occurring amino acid
FQARKHRPKXHLDSKMLAAWNGLMVSGYAVTGAVLGQXRLINYATNGAKFLKRAHVXCGQWRLDADLLHRPXGDXGAQQPTLLGL

SEQ ID NO: 937047 - protein, 30 aa, Homo sapiens
NEGVFIMGKTIEFHMGGNMELKAENSIILN

SEQ ID NO: 937048 - protein, 40 aa, Homo sapiens
  misc_feature (6)..(6): Xaa can be any naturally occurring amino acid
MAELCXFQEYKKLAGRGGSCRWPQLLGRLRWEVPLGLGGK

SEQ ID NO: 937049 - protein, 51 aa, Homo sapiens
  misc_feature (8)..(8): Xaa can be any naturally occurring amino acid
  misc_feature (13)..(13): Xaa can be any naturally occurring amino acid
  misc_feature (26)..(26): Xaa can be any naturally occurring amino acid
KERLGCRXQTGFXDIKSHAFFRSIDXDLLEKKQALPPVQPQITDDYGLDNF

SEQ ID NO: 937050 - protein, 83 aa, Homo sapiens
  misc_feature (18)..(18): Xaa can be any naturally occurring amino acid
  misc_feature (37)..(37): Xaa can be any naturally occurring amino acid
  misc_feature (46)..(46): Xaa can be any naturally occurring amino acid
  misc_feature (59)..(59): Xaa can be any naturally occurring amino acid
  misc_feature (83)..(83): Xaa can be any naturally occurring amino acid
GRAIMDLFHEERDTDLSXERCRLCCRRKMATRSPVGXLMGLRAAIXRGHREVWTSPGEXLIDGTLCSHLSVATVKYGPAQVSX

SEQ ID NO: 937051 - protein, 155 aa, Homo sapiens
RGNRLRLRHPGLEQALEKTKANLIQAVTRRFSTEYELQQWFTENSKYPQPLKSPGPHARCPHVSIPAAGAGPPFLEPEAPVSSPQGQSLQAHVLSACEPSLVPDDPGCLSTSQPLPLNANPALGLAWHLSPSALGLDLREAQLQGQMSRSSRWTM

SEQ ID NO: 937052 - protein, 36 aa, Homo sapiens
  misc_feature (24)..(24): Xaa can be any naturally occurring amino acid
MTLVDLGDMEVWPAPGAWGRTCGXGGPPGTCIQPGI

SEQ ID NO: 937053 - protein, 60 aa, Homo sapiens
  misc_feature (26)..(26): Xaa can be any naturally occurring amino acid
  misc_feature (47)..(47): Xaa can be any naturally occurring amino acid
TSAFPYALLSNDNAFLSYHPHPFAQXLLTARFQVNNTRPPHVQLLRXRCFTAMGVLGCWM

SEQ ID NO: 937054 - protein, 49 aa, Homo sapiens
  misc_feature (30)..(30): Xaa can be any naturally occurring amino acid
  misc_feature (44)..(44): Xaa can be any naturally occurring amino acid
NGITPRRWLLLCNPGLADTIVEKIGEEFLXDLSQLKKLLPLVSXEVFHQ

SEQ ID NO: 937055 - protein, 44 aa, Homo sapiens
  misc_feature (13)..(13): Xaa can be any naturally occurring amino acid
VNSRSPSRRPGFXERQSNGSTYRRTESSREVWPVGWGRREDSPA

SEQ ID NO: 937056 - protein, 35 aa, Homo sapiens
  misc_feature (10)..(10): Xaa can be any naturally occurring amino acid
  misc_feature (25)..(25): Xaa can be any naturally occurring amino acid
EAHQNRVMTXVWCNKKGLLATSGNXGTIRVWNVTK

SEQ ID NO: 937057 - protein, 51 aa, Homo sapiens
  misc_feature (6)..(6): Xaa can be any naturally occurring amino acid
  misc_feature (22)..(22): Xaa can be any naturally occurring amino acid
  misc_feature (48)..(48): Xaa can be any naturally occurring amino acid
GYLARXTSGSVVIWTVPTEPLXEISTLAKMSSVQVTTALHQATKGAAXTGD

SEQ ID NO: 937058 - protein, 49 aa, Homo sapiens
  misc_feature (17)..(17): Xaa can be any naturally occurring amino acid
  misc_feature (30)..(30): Xaa can be any naturally occurring amino acid
  misc_feature (34)..(34): Xaa can be any naturally occurring amino acid
VPDEDEGWLSDGTGAFXSPGLQAKKDLESXIQRXSQLEAQLPKNGLEEK

SEQ ID NO: 937059 - protein, 85 aa, Homo sapiens
  misc_feature (2)..(2): Xaa can be any naturally occurring amino acid
  misc_feature (7)..(7): Xaa can be any naturally occurring amino acid
  misc_feature (18)..(18): Xaa can be any naturally occurring amino acid
  misc_feature (26)..(26): Xaa can be any naturally occurring amino acid
  misc_feature (50)..(50): Xaa can be any naturally occurring amino acid
  misc_feature (65)..(65): Xaa can be any naturally occurring amino acid
LXENGPXPIQLQSQRASXLTQSQLNXDQRRKTEHQKPAVVVVTGRRIGRXGGPNLGLLQQGKLCXVALRYIFKELFFGRAQCSCL

SEQ ID NO: 937060 - protein, 162 aa, Homo sapiens
  misc_feature (5)..(5): Xaa can be any naturally occurring amino acid
  misc_feature (75)..(75): Xaa can be any naturally occurring amino acid
  misc_feature (111)..(111): Xaa can be any naturally occurring amino acid
  misc_feature (117)..(117): Xaa can be any naturally occurring amino acid
  misc_feature (125)..(125): Xaa can be any naturally occurring amino acid
  misc_feature (127)..(127): Xaa can be any naturally occurring amino acid
  misc_feature (141)..(141): Xaa can be any naturally occurring amino acid
  misc_feature (155)..(155): Xaa can be any naturally occurring amino acid
LERLXDRYPKKLVQTYSVFPYQDEMSDVVVQPYNSLLTLKRLTQNADCLVVLDNTALNRIATDRLHIQNPSFSQXNQLVSTIHVGQHHHPALTPAYMEQWTSSGLHRPRFXSHPQGXQFPSWNRXTXRFNYRPVKWASVRXDQGSWDVHEGGCCXPRNVIGC

SEQ ID NO: 937061 - protein, 63 aa, Homo sapiens
  misc_feature (2)..(2): Xaa can be any naturally occurring amino acid
  misc_feature (15)..(15): Xaa can be any naturally occurring amino acid
  misc_feature (53)..(53): Xaa can be any naturally occurring amino acid
MXSEVTLLLSALAGXAQEADTGRAEPRPGPSPTARWDEAITAIWETPAKGQPXLFDAPKFRRF

SEQ ID NO: 937062 - protein, 77 aa, Homo sapiens
  misc_feature (12)..(12): Xaa can be any naturally occurring amino acid
  misc_feature (22)..(22): Xaa can be any naturally occurring amino acid
  misc_feature (38)..(38): Xaa can be any naturally occurring amino acid
  misc_feature (42)..(42): Xaa can be any naturally occurring amino acid
  misc_feature (58)..(58): Xaa can be any naturally occurring amino acid
RDAKGISQEQMXDFRASFNHFXRDHSGTLGPEEFKACXISLXYDIGNDPQGEAEFARXMSIVDPNRLGVVTFQAFID

SEQ ID NO: 937063 - protein, 183 aa, Homo sapiens
  misc_feature (17)..(18): Xaa can be any naturally occurring amino acid
  misc_feature (45)..(45): Xaa can be any naturally occurring amino acid
  misc_feature (60)..(60): Xaa can be any naturally occurring amino acid
  misc_feature (64)..(64): Xaa can be any naturally occurring amino acid
  misc_feature (92)..(92): Xaa can be any naturally occurring amino acid
  misc_feature (141)..(141): Xaa can be any naturally occurring amino acid
  misc_feature (158)..(158): Xaa can be any naturally occurring amino acid
  misc_feature (166)..(166): Xaa can be any naturally occurring amino acid
RLHRRTRTHLPGREAGXXQRRLVGEIVLAFERKGFKLVALKLVQXSEELLRDTYAELREXLFYXRLVKYMASGRLVAMVWKGLDVVRTIAGXIGTTNPADAPPGTIRGDFCIEVGKNLIHGSDSGGECPPRDRSLVSAQTXSSAGKKTLGTGCMSSRXMRVKKALXSSSSKGQVAGLFAQPKG

SEQ ID NO: 937064 - protein, 69 aa, Homo sapiens
  misc_feature (1)..(1): Xaa can be any naturally occurring amino acid
  misc_feature (6)..(7): Xaa can be any naturally occurring amino acid
  misc_feature (15)..(15): Xaa can be any naturally occurring amino acid
  misc_feature (17)..(17): Xaa can be any naturally occurring amino acid
  misc_feature (57)..(58): Xaa can be any naturally occurring amino acid
  misc_feature (68)..(68): Xaa can be any naturally occurring amino acid
XKSETXXTTGLALLXWXSHSCVVLGACVYPGQPRTVYYSLVHKYYLVHNIQSLEDDXXPSVAAPFDVXF

SEQ ID NO: 937065 - protein, 48 aa, Homo sapiens
  misc_feature (18)..(18): Xaa can be any naturally occurring amino acid
CEPPCLAVIIEALAERSXVKPVVPATWEAEVVGLLEASLGNMMRPHRY

SEQ ID NO: 937066 - protein, 148 aa, Homo sapiens
  misc_feature (14)..(15): Xaa can be any naturally occurring amino acid
  misc_feature (117)..(117): Xaa can be any naturally occurring amino acid
  misc_feature (120)..(120): Xaa can be any naturally occurring amino acid
SSERGCVPWRTALXXVQIGADDSYQLCEEKKSETLPACSHLSRALSLFCSLPPFANIGFKPAQNSAQRKAAAVEQAEAVASPAAESTAASRCTILPTGSSSRRQLPCSSSHGVPRAXGRXATFPKAMDNVTVRQGGERHPQVYHKMTG

SEQ ID NO: 937067 - protein, 86 aa, Homo sapiens
  misc_feature (46)..(46): Xaa can be any naturally occurring amino acid
  misc_feature (78)..(78): Xaa can be any naturally occurring amino acid
LSMGNALFMNVESILKTSESLTCRWTTEKQKAEEAMKRLSYIKPEXFQMPVTRPSNARKSPGERCCCCTEGKRTGAGXHEKTLQSR

SEQ ID NO: 937068 - protein, 119 aa, Homo sapiens
  misc_feature (34)..(34): Xaa can be any naturally occurring amino acid
  misc_feature (40)..(40): Xaa can be any naturally occurring amino acid
  misc_feature (47)..(48): Xaa can be any naturally occurring amino acid
  misc_feature (84)..(84): Xaa can be any naturally occurring amino acid
  misc_feature (91)..(91): Xaa can be any naturally occurring amino acid
  misc_feature (94)..(94): Xaa can be any naturally occurring amino acid
FPLPISLTSPFKPKLEPTAHRPSIALANGSSAMXTVQKQXKPYDRLXXNKKPDEKAEEIDAKAEEEFNIEKGRLVPTQKPKRLXQYYEKKXRNXIEQQKKIQMSNLMNQARLKVLRARD

SEQ ID NO: 937069 - protein, 38 aa, Homo sapiens
  misc_feature (28)..(28): Xaa can be any naturally occurring amino acid
KAYVMESMTYLQHPCCEVGHTLHEYTFXEPISDAWTNL

SEQ ID NO: 937070 - protein, 143 aa, Homo sapiens
  misc_feature (43)..(43): Xaa can be any naturally occurring amino acid
  misc_feature (71)..(71): Xaa can be any naturally occurring amino acid
  misc_feature (98)..(99): Xaa can be any naturally occurring amino acid
  misc_feature (105)..(105): Xaa can be any naturally occurring amino acid
FGTRQWSLKSSAQFLGSPQLRQVGQIIRVPARMAATCILEPAXRCCWDEPVRIAVPALAPEQPVTLRRPCXREGRLFPGPRALPPDTLGELDLERAPXXRGNFRXGSEPMGLPPGPLEPEETFWLRLVKRDVANALGRGAGGA

SEQ ID NO: 937071 - protein, 56 aa, Homo sapiens
  misc_feature (33)..(33): Xaa can be any naturally occurring amino acid
  misc_feature (37)..(37): Xaa can be any naturally occurring amino acid
MGNSQERRQRLSTASDNPRVETLQADIGTAVGXTAGXAVLTGPEYEALDALPDAER

SEQ ID NO: 937072 - protein, 50 aa, Homo sapiens
  misc_feature (4)..(4): Xaa can be any naturally occurring amino acid
  misc_feature (26)..(26): Xaa can be any naturally occurring amino acid
KPSXTGSGTMVTRVFPCSLALAICQXEKKPQLPHRHPHRPSSGVTSTGGP

SEQ ID NO: 937073 - protein, 144 aa, Homo sapiens
  misc_feature (15)..(15): Xaa can be any naturally occurring amino acid
  misc_feature (26)..(26): Xaa can be any naturally occurring amino acid
GSREGSLLNKTEVSXSHKGVTSLYFXICQITSIDSLFPVIHSSMEYYNSCHKSKCASPACSTGSLVTTCWGFATWPTNQQSLGLIMLTKIPSEPDCKTNICNPVNLTTLEPNWLVWTTGLKAPLRVQASSQEIDSRVYVYIIYI

SEQ ID NO: 937074 - protein, 127 aa, Homo sapiens
  misc_feature (70)..(70): Xaa can be any naturally occurring amino acid
  misc_feature (75)..(75): Xaa can be any naturally occurring amino acid
  misc_feature (84)..(84): Xaa can be any naturally occurring amino acid
  misc_feature (98)..(99): Xaa can be any naturally occurring amino acid
  misc_feature (120)..(120): Xaa can be any naturally occurring amino acid
  misc_feature (122)..(122): Xaa can be any naturally occurring amino acid
SNVSYVHTHMSAHARIHIHINTHIHPYETQDLDPTLLEPGFLPCFSPISLHLPPPVLFSWALGQDKFPAXRGLKXKWGLEPGIXKVLESKDVGDKPEXXLKTSLPIPKEGLGPLRVLKEXLXAKQLG

SEQ ID NO: 937075 - protein, 71 aa, Homo sapiens
  misc_feature (25)..(25): Xaa can be any naturally occurring amino acid
  misc_feature (31)..(31): Xaa can be any naturally occurring amino acid
  misc_feature (35)..(35): Xaa can be any naturally occurring amino acid
  misc_feature (54)..(55): Xaa can be any naturally occurring amino acid
  misc_feature (68)..(68): Xaa can be any naturally occurring amino acid
MGLEDEQKMLTESGDPEEEEEEEEXLVIGLXLSVXTGNLGRQECETFPYYLASXXNGRPHSAIFGGSXALS

SEQ ID NO: 937076 - protein, 138 aa, Homo sapiens
  misc_feature (108)..(108): Xaa can be any naturally occurring amino acid
MRIEPASGFSWPVKGLEQRRLAGAVRTDDAGRNRPRQPERQVLDQKLVAEALVEALDLDDDIAEALARRDDDLCVGRLAVLRLLDQFLIGLDTRLGLGLAPLGDDWIXLASRQIDFWRAFVSRPSWIRRLALASRYLV

SEQ ID NO: 937077 - protein, 80 aa, Homo sapiens
  misc_feature (22)..(22): Xaa can be any naturally occurring amino acid
  misc_feature (28)..(29): Xaa can be any naturally occurring amino acid
  misc_feature (69)..(69): Xaa can be any naturally occurring amino acid
  misc_feature (75)..(75): Xaa can be any naturally occurring amino acid
MAARPGLNLGVLEFPGAGCGVXLAGPAXXAAGRGRAVSRSAVGGTRLDASRELPAAVALPGSQLSALDXGFCDEXLVAFD

SEQ ID NO: 937078 - protein, 115 aa, Homo sapiens
  misc_feature (1)..(1): Xaa can be any naturally occurring amino acid
  misc_feature (27)..(27): Xaa can be any naturally occurring amino acid
  misc_feature (42)..(42): Xaa can be any naturally occurring amino acid
  misc_feature (101)..(101): Xaa can be any naturally occurring amino acid
XALSPRLECSGAISTHCKLCLPGSRNXPTSASQVAGTTGVCXHARLIFAILVETRFHHVGQAGLKLLTSSDLPVSASQSAGITGEPPCPARGNCLLEGTCXPTALSVGIKGVQFF

SEQ ID NO: 937079 - protein, 97 aa, Homo sapiens
  misc_feature (45)..(45): Xaa can be any naturally occurring amino acid
  misc_feature (58)..(58): Xaa can be any naturally occurring amino acid
  misc_feature (61)..(61): Xaa can be any naturally occurring amino acid
  misc_feature (80)..(80): Xaa can be any naturally occurring amino acid
  misc_feature (82)..(82): Xaa can be any naturally occurring amino acid
  misc_feature (97)..(97): Xaa can be any naturally occurring amino acid
MHLNFMDEKDRIITAFYNEARARQRTNRGILQQERQRLGQRQRHXSEPTQGPEIVPRXAGXEGSTWMGPAVRSRFASFPXRXGSPKRAAIKVISAEX

SEQ ID NO: 937080 - protein, 84 aa, Homo sapiens
  misc_feature (6)..(6): Xaa can be any naturally occurring amino acid
  misc_feature (16)..(16): Xaa can be any naturally occurring amino acid
  misc_feature (29)..(29): Xaa can be any naturally occurring amino acid
EAWGIXVLNPNKTKVXGSCEGAHPHLLLXFPYGHLSFGFMQDLQQKVVYLKLHGGGVQCVLPPRSTVDILGSECIPFEISKHPL

SEQ ID NO: 937081 - protein, 33 aa, Homo sapiens
KFMMTNKLDTALGGFSAVVSAMGAHTSVCDQAT

SEQ ID NO: 937082 - protein, 30 aa, Homo sapiens
FGTGRFRLSLQSSRAALLLTLCIDGLHLGD

SEQ ID NO: 937083 - protein, 109 aa, Homo sapiens
  misc_feature (76)..(76): Xaa can be any naturally occurring amino acid
MSGRGKQGGKVRAKAKSRSSRAALQFPVAECTDCCERELRGSRAPGGSYLAAVLEYLTAEILELAGNSLLINKKTXDNSPPPCKLAIRNDEGSETKLLGQKLTIRSGRR

SEQ ID NO: 937084 - protein, 82 aa, Homo sapiens
  misc_feature (63)..(63): Xaa can be any naturally occurring amino acid
KSPWKHTEVFCSIPSRSLLSPSYYHSFGVTENYVIFLEQPFRLDILKMATAYIRSMSWASCLXFHREEKTYIHIIDQRTRQP

SEQ ID NO: 937085 - protein, 48 aa, Homo sapiens
  misc_feature (28)..(28): Xaa can be any naturally occurring amino acid
  misc_feature (36)..(36): Xaa can be any naturally occurring amino acid
RFGGPVHHQAQRFRFSPMGVDHMSGLSXVNVPGNAXFGWCIFIYNLGQ

SEQ ID NO: 937086 - protein, 114 aa, Homo sapiens
  misc_feature (34)..(34): Xaa can be any naturally occurring amino acid
  misc_feature (48)..(48): Xaa can be any naturally occurring amino acid
  misc_feature (52)..(53): Xaa can be any naturally occurring amino acid
  misc_feature (76)..(76): Xaa can be any naturally occurring amino acid
  misc_feature (85)..(85): Xaa can be any naturally occurring amino acid
  misc_feature (99)..(99): Xaa can be any naturally occurring amino acid
FGTRRLALSHHHLRPRTVVTEIRGLLAKGLRPEXPPPAGPLLNGAPAXTSPXXKAAPEASSPPASPLQHLLVWKGXVPWAPQAQXPGDWRAGVQPQARXPALHTTTEDKCRGAD

SEQ ID NO: 937087 - protein, 71 aa, Homo sapiens
  misc_feature (38)..(38): Xaa can be any naturally occurring amino acid
  misc_feature (63)..(63): Xaa can be any naturally occurring amino acid
  misc_feature (66)..(66): Xaa can be any naturally occurring amino acid
RRNLIPKTWAARHRARFRSIHILKVAEIEKTADVKRQXVKQFLTKDLKFPLPHRVQKSTKTFXYKXPSTFY

SEQ ID NO: 937088 - protein, 127 aa, Homo sapiens
  misc_feature (60)..(60): Xaa can be any naturally occurring amino acid
LGSIKWCSDSDTFPSGHKAPDESQCRTPSSQYSRVTLLRRTPRLLASGTRQRRNPAPVSXWTWLDMVFANPQSHPALTAEQEAKTHTNNHYSPSVSRKQLKKTDLRPFSQDNWGLGLLRGGNVGAGS

SEQ ID NO: 937089 - protein, 76 aa, Homo sapiens
  misc_feature (70)..(70): Xaa can be any naturally occurring amino acid
PCKAHQSHPTEKPEVNEDEKTKKTVEDSFKCSTGPGTAAPAWNPSIQETEWGGSLEEIKTSLDNMVKPIXTKKLRN

SEQ ID NO: 937090 - protein, 231 aa, Homo sapiens
HGKGNQEMEVKGAHPRSRKGCVTAARKTVVNRVISGSRGIQSVKEEKKRCRMDCQMSFQVGLRESLRKSKNETEKHPEQLSEKIRKRCMDLSSTDRYTEKVLVVARKKELLNGRLRRTWRTYTERTVPKRVELLAQPAGHKDTVNPCNGLRTNYSTQLHDTTTTLLSYPEVVGHAYSSAAQYRNARALSRKLTTRSGHEPSATLGTRGIHTRQPQELTHPMTARTIPIAHT

SEQ ID NO: 937091 - protein, 62 aa, Homo sapiens
MPNVPRKSGSSVNTGTRYGASLRKMVKKIEISQHAKYIALSVGKTQDEETSLLGIWHCGFLH

SEQ ID NO: 937092 - protein, 134 aa, Homo sapiens
MVKLKYTKNYSGVVAHTYSRIVSVIGRFLVYTDFKKKLQTLAVNVTVLKGSVSGICSLGCSDVLGVFSFWWVRDLTGSGMKLPDLAVSVTVLKAAYPELFVPPRGFVVSLASKVKLETFTASITAHKSNVEPNS

SEQ ID NO: 937093 - protein, 59 aa, Homo sapiens
  misc_feature (11)..(11): Xaa can be any naturally occurring amino acid
  misc_feature (15)..(15): Xaa can be any naturally occurring amino acid
  misc_feature (35)..(35): Xaa can be any naturally occurring amino acid
  misc_feature (59)..(59): Xaa can be any naturally occurring amino acid
MVRLLRSRDAXLVGXLWFVSVTTGPWGAVATSAGXASRFKCEDLKVGQYICKDPKINDX

SEQ ID NO: 937094 - protein, 128 aa, Homo sapiens
  misc_feature (19)..(19): Xaa can be any naturally occurring amino acid
  misc_feature (36)..(36): Xaa can be any naturally occurring amino acid
  misc_feature (77)..(77): Xaa can be any naturally occurring amino acid
  misc_feature (125)..(125): Xaa can be any naturally occurring amino acid
MFGSLLLFALLAAGVAALXACSSRSPEAEPARSRLXSRGNLWATGHFMGKKSLEPSSPSPLGTAPHTSLRDQALQAXVMICSDILLLKKALGRDFKPAPHPKIQYRRLLVQILAEMDTNNGGRHXSVA

SEQ ID NO: 937095 - protein, 32 aa, Homo sapiens
  misc_feature (21)..(21): Xaa can be any naturally occurring amino acid
SLSLELVGSGYRMSLVKRRFXTGMYLVELLNP

SEQ ID NO: 937096 - protein, 154 aa, Homo sapiens
  misc_feature (16)..(17): Xaa can be any naturally occurring amino acid
  misc_feature (25)..(25): Xaa can be any naturally occurring amino acid
  misc_feature (27)..(27): Xaa can be any naturally occurring amino acid
  misc_feature (63)..(63): Xaa can be any naturally occurring amino acid
  misc_feature (71)..(71): Xaa can be any naturally occurring amino acid
  misc_feature (86)..(86): Xaa can be any naturally occurring amino acid
  misc_feature (128)..(128): Xaa can be any naturally occurring amino acid
  misc_feature (132)..(132): Xaa can be any naturally occurring amino acid
  misc_feature (144)..(144): Xaa can be any naturally occurring amino acid
  misc_feature (150)..(150): Xaa can be any naturally occurring amino acid
  misc_feature (154)..(154): Xaa can be any naturally occurring amino acid
MSLSSSVVVTRPEPSXXVPRMPRGXRXRTSRMAPPAAGPSDESCTRPAQVAQHQQRDPILQLXLLLLRPAXGLMARWQPLQLAWLXALLWGNIGSRITGGFSGGSNAEPARPDITYKEASGNPSQHSXRSLXLLLRSNSFLECXQNKGDXNSVX

SEQ ID NO: 937097 - protein, 90 aa, Homo sapiens
  misc_feature (9)..(9): Xaa can be any naturally occurring amino acid
  misc_feature (35)..(35): Xaa can be any naturally occurring amino acid
  misc_feature (73)..(73): Xaa can be any naturally occurring amino acid
LKVRLHDAXYCREKSVKAQETPYFTPLILIPANIXLSTVACNTIFHCPEWNAVREAFQLRTNTPVIIKIIPAXQARAGFMLMIENAFSVL

SEQ ID NO: 937098 - protein, 101 aa, Homo sapiens
  misc_feature (63)..(63): Xaa can be any naturally occurring amino acid
  misc_feature (75)..(75): Xaa can be any naturally occurring amino acid
  misc_feature (85)..(85): Xaa can be any naturally occurring amino acid
  misc_feature (88)..(88): Xaa can be any naturally occurring amino acid
  misc_feature (92)..(92): Xaa can be any naturally occurring amino acid
  misc_feature (95)..(95): Xaa can be any naturally occurring amino acid
MLTAVPVSPPKTADKLETVLVSTTGNIDIGSILDRSSVGFSSYMFVLHRSPPDILSVVFLCVXGLLGSWACPGKXLQVGGHTETXCVXLSVXLLXGNWRTA

SEQ ID NO: 937099 - protein, 109 aa, Homo sapiens
  misc_feature (1)..(1): Xaa can be any naturally occurring amino acid
  misc_feature (28)..(28): Xaa can be any naturally occurring amino acid
  misc_feature (51)..(51): Xaa can be any naturally occurring amino acid
  misc_feature (56)..(56): Xaa can be any naturally occurring amino acid
  misc_feature (79)..(79): Xaa can be any naturally occurring amino acid
  misc_feature (85)..(85): Xaa can be any naturally occurring amino acid
  misc_feature (92)..(92): Xaa can be any naturally occurring amino acid
  misc_feature (105)..(105): Xaa can be any naturally occurring amino acid
XRHEDSAGAVEGSRAATPGLFIPSRADXALPTEGRVGRLCCNEGEDYVLEXRGHLXLGGNDENCGICRMAFNGCCPDCXVPATTXRWCGASXPTASTCIDPQSGXTHNK

SEQ ID NO: 937100 - protein, 33 aa, Homo sapiens
QQEAEEEEREEEEEAQIIQRRLAQALQEDDFGV

SEQ ID NO: 937101 - protein, 104 aa, Homo sapiens
  misc_feature (20)..(20): Xaa can be any naturally occurring amino acid
ALCVLVITGFISTKLGSEFXPQLSEGDFAVQQLRSPSTGLEESLRIQKNTEKLLLKSFPEIKAVFARTGTAEVATDVMPPNISDGYIMLKPRSEWPNPKESLEG

SEQ ID NO: 937102 - protein, 116 aa, Homo sapiens
  misc_feature (92)..(92): Xaa can be any naturally occurring amino acid
  misc_feature (107)..(107): Xaa can be any naturally occurring amino acid
KEKVEEQEQQQQQIIKIRITLTSTKVKQLENVSSNIVKNAEQHNLVKKGPVRLPTKVLKISTRKTPNGEGSKTWETYEMRIHKRYIDLGSSXFKSLRESLKSPLEPXVGCRSCLFG

SEQ ID NO: 937103 - protein, 140 aa, Homo sapiens
  misc_feature (4)..(4): Xaa can be any naturally occurring amino acid
  misc_feature (18)..(18): Xaa can be any naturally occurring amino acid
IRHXGSWGHCAVGPWPRXSRCDVHLYSAGQHRGHQVLGDGVSPCWPGWSEAPDLVICPPQPPKVLGLQTVTATPRLECNGVISAHCNLRFPGSTDSPASASRVAGTTGGKRDEELVLPINSSLSVTLHQDQLRNHHNSRH

SEQ ID NO: 937104 - protein, 119 aa, Homo sapiens
  misc_feature (9)..(9): Xaa can be any naturally occurring amino acid
  misc_feature (34)..(34): Xaa can be any naturally occurring amino acid
YCLGQMQDXRAIPMLVDVLQDTRQEPMVRHEEGXPGGHRGPGSSGDPEAVFLGPRHRGGRDLQLAVRRLEWLQQHGGDRRRDPTSPWTLPRRLRSVTCGPAGGAAGPIDSTMVVPEWVR

SEQ ID NO: 937105 - protein, 36 aa, Homo sapiens
  misc_feature (22)..(22): Xaa can be any naturally occurring amino acid
MEQSWTENDFDELREEGFRRSXYELQEEIQTKGKEV

SEQ ID NO: 937106 - protein, 61 aa, Homo sapiens
  misc_feature (23)..(23): Xaa can be any naturally occurring amino acid
  misc_feature (35)..(35): Xaa can be any naturally occurring amino acid
  misc_feature (44)..(44): Xaa can be any naturally occurring amino acid
  misc_feature (55)..(55): Xaa can be any naturally occurring amino acid
FKPAVIADSGSYFCTAKGQVGSXQHSDILKFVVKXSSKLLKTKXEAPTTMTYPLXATSTVK

SEQ ID NO: 937107 - protein, 73 aa, Homo sapiens
  misc_feature (17)..(17): Xaa can be any naturally occurring amino acid
  misc_feature (38)..(38): Xaa can be any naturally occurring amino acid
  misc_feature (48)..(48): Xaa can be any naturally occurring amino acid
  misc_feature (62)..(62): Xaa can be any naturally occurring amino acid
  misc_feature (68)..(68): Xaa can be any naturally occurring amino acid
  misc_feature (71)..(71): Xaa can be any naturally occurring amino acid
VSDLRFHASIPRRSGAXSPAPTPRPGRIPRGKSLSPRXDRRGLDASRXTEALARPGPRVLGXRGKAGXSSXLP

SEQ ID NO: 937108 - protein, 155 aa, Homo sapiens
  misc_feature (15)..(15): Xaa can be any naturally occurring amino acid
  misc_feature (20)..(20): Xaa can be any naturally occurring amino acid
  misc_feature (47)..(47): Xaa can be any naturally occurring amino acid
  misc_feature (92)..(92): Xaa can be any naturally occurring amino acid
  misc_feature (100)..(100): Xaa can be any naturally occurring amino acid
  misc_feature (150)..(150): Xaa can be any naturally occurring amino acid
RPGPIDSTMVTEQLXGCHRXTLVDPKQPLQARFRACSRCVGSAAQAXLAWISQAFDDDSALLKHRARPTAWARCRMPSAIPMLVDVLQDTLXTPMVRHEXGEALGQIRGPGKFWRSLKQYSSGPRQSKVAETCQLAVRRLGSGLQASNGXEPAAG

SEQ ID NO: 937109 - protein, 183 aa, Homo sapiens
  misc_feature (17)..(18): Xaa can be any naturally occurring amino acid
  misc_feature (23)..(23): Xaa can be any naturally occurring amino acid
  misc_feature (35)..(35): Xaa can be any naturally occurring amino acid
  misc_feature (37)..(37): Xaa can be any naturally occurring amino acid
  misc_feature (40)..(40): Xaa can be any naturally occurring amino acid
  misc_feature (161)..(161): Xaa can be any naturally occurring amino acid
  misc_feature (168)..(168): Xaa can be any naturally occurring amino acid
MAENSGSDGKSSGTQPXXGAVSXEQVIAGFNRLRXAXWRXASKAAELEMELNEHSLVIDTLKEVDETRKCYRMVGGVLVERTVKEGAARFGEQQGSKIQKIIETLTQQLQAKGKELNEFPGKAQHSVSWEEDEKPAAKENSEGAGAKASSAGVVWSPRDQXPLHFFSXPDFPILISPLLLIIN

SEQ ID NO: 937110 - protein, 53 aa, Homo sapiens
  misc_feature (32)..(32): Xaa can be any naturally occurring amino acid
ETDVYQDLCWEHLSDEYVCSRPLVGKQTTYTXCCCLYGEAWGMQCALCPLKDS

SEQ ID NO: 937111 - protein, 69 aa, Homo sapiens
  misc_feature (31)..(31): Xaa can be any naturally occurring amino acid
  misc_feature (40)..(40): Xaa can be any naturally occurring amino acid
VCKLRHKEARGGSVRVPKPQKSGSRQHSRQXVAKGREPLXNCWCKPKSPKAEELESDVRGQEAPSMGER

SEQ ID NO: 937112 - protein, 129 aa, Homo sapiens
  misc_feature (94)..(94): Xaa can be any naturally occurring amino acid
  misc_feature (110)..(110): Xaa can be any naturally occurring amino acid
PWSSPQQLMSLGTPRSQAERSKVLSVGPWTQLLPGSGHPGDNRAPACAVSPQWARCALPMPPLPAGCQEYHKEARAGCLTAVIPALWEAEAGNXLRSGAQQQLVNMVNPXFIKSTKILLGIIVHALIPV

SEQ ID NO: 937113 - protein, 59 aa, Homo sapiens
  misc_feature (3)..(3): Xaa can be any naturally occurring amino acid
  misc_feature (31)..(31): Xaa can be any naturally occurring amino acid
MFXTCGPNEAMVVSGFCRSPPVMVAGGRVFXLPCIQQIEMAKAQRDYGLKKAAYDIEVN

SEQ ID NO: 937114 - protein, 115 aa, Homo sapiens
  misc_feature (22)..(22): Xaa can be any naturally occurring amino acid
  misc_feature (81)..(81): Xaa can be any naturally occurring amino acid
SFINPQGERCAGYAVITLGHCXEAELIALIQALELSEDPSQSANTGSSGQETSQQDTDLPTRLIRRRDQAVAEDDSPALVXSGGCPVYTRLKLEETTSPALVTHWQLNSLRMAEA

SEQ ID NO: 937115 - protein, 103 aa, Homo sapiens
  misc_feature (50)..(50): Xaa can be any naturally occurring amino acid
  misc_feature (53)..(53): Xaa can be any naturally occurring amino acid
  misc_feature (70)..(70): Xaa can be any naturally occurring amino acid
  misc_feature (89)..(91): Xaa can be any naturally occurring amino acid
  misc_feature (98)..(98): Xaa can be any naturally occurring amino acid
VTNLKTPSAAYLWVGTGASEERRRGPRSCSGCCGPNLCRWQKAASRWFWXAWXEGCLPHIPTAEGQEDGXPSSSPLCLLQQDKLAKGSXXXLVELMQXRPGNG

SEQ ID NO: 937116 - protein, 93 aa, Homo sapiens
  misc_feature (73)..(73): Xaa can be any naturally occurring amino acid
  misc_feature (76)..(76): Xaa can be any naturally occurring amino acid
PGDRLAAPELGFQWGHHWNRRPFPPRCLPLGVYYFLNLLSAGRNIYIVEERAVVLGFYLGLAEKGGEIRCLRXACXPGLDFGAPSGRGRWVGG

SEQ ID NO: 937117 - protein, 172 aa, Homo sapiens
  misc_feature (47)..(47): Xaa can be any naturally occurring amino acid
  misc_feature (134)..(134): Xaa can be any naturally occurring amino acid
  misc_feature (142)..(142): Xaa can be any naturally occurring amino acid
  misc_feature (152)..(152): Xaa can be any naturally occurring amino acid
  misc_feature (157)..(157): Xaa can be any naturally occurring amino acid
  misc_feature (162)..(162): Xaa can be any naturally occurring amino acid
DLEERFQWVSLCVTELKNNVAAYLDNLQAFLYFRPHEYNLDIPRGAXQCSIAIWQETFTYEAFLKFKQRLEGLVWQPLCSLAKKPAWPQNLIKKRLDKLLDFERVEEKLLEVGSVTYQEEAAPAHIPGTQLRCXWLSSHSLXSWSCSGWADXVHIRXPPEGXLQNKLLQRAE

SEQ ID NO: 937118 - protein, 59 aa, Homo sapiens
  misc_feature (18)..(18): Xaa can be any naturally occurring amino acid
  misc_feature (38)..(38): Xaa can be any naturally occurring amino acid
EIRMLKKVVSVHPGDVLXTSCTYNTEDRELATVGGFGXLEEMCVNYVHYYPQTQLELCK

SEQ ID NO: 937119 - protein, 92 aa, Homo sapiens
  misc_feature (18)..(18): Xaa can be any naturally occurring amino acid
  misc_feature (25)..(25): Xaa can be any naturally occurring amino acid
  misc_feature (33)..(33): Xaa can be any naturally occurring amino acid
EPQVLHLGEPDRRLQKRXKAIKLQXILQMEPQXSSAHGFYRGPLVQPAGPSITLENSPLEDTKLQGPFFTPNQQEVARTDLPHGSQQQLGVS

SEQ ID NO: 937120 - protein, 66 aa, Homo sapiens
  misc_feature (7)..(7): Xaa can be any naturally occurring amino acid
  misc_feature (22)..(22): Xaa can be any naturally occurring amino acid
  misc_feature (31)..(31): Xaa can be any naturally occurring amino acid
IRELILXACRNMIKLLTQDDTXNLSKFISRXQLSPTAAYHLVHEQVISPLHSHLTRLIAAWTGCDA

SEQ ID NO: 937121 - protein, 301 aa, Homo sapiens
HLSFTHPFRRWPYPGYGLLPGPSCSPVWTLSPRSQRPLKFGSTTRFNKRRPPPRRGDGTLFGNAGPTAKVPYVLGNKTRRVVALGDIHPPGVRPKTRPALRRCHEDNVPPGNFPGGFALSPGVLKPLGGPSPRKGGRPVLPAGPRGGAPYAQVSRRLPGGRSAPIGALPLSVARRGLAVFFKRGLLVANFGLLEVRGVLSPLAKGSANTHHRGVQSPNHTRPGTLQESTYARAYREWAKAKSAIHPLVTTPQGTGSTWVIPPAIPRTHGGGRKPENNTEHTRSNRPPGPKSGKPAFSKQTR

SEQ ID NO: 937122 - protein, 56 aa, Homo sapiens
  misc_feature (7)..(7): Xaa can be any naturally occurring amino acid
  misc_feature (39)..(39): Xaa can be any naturally occurring amino acid
  misc_feature (43)..(43): Xaa can be any naturally occurring amino acid
VQLSVTXDSFCCCKLSAGGAVPPPSPGIFPPSVNMVIKXRPSXGLGVPSSSSGMAS

SEQ ID NO: 937123 - protein, 38 aa, Homo sapiens
MIQQGDLMPQSALFTGIIPPVSTIFTADGQLDKPGTAA

SEQ ID NO: 937124 - protein, 295 aa, Homo sapiens
LGVPLGARPLLVAEFMCAAVLARAWRIAGAFNLGPPYLRRGPHGPRVCIAAPPAPVRALLVPPGTYWSVHEVRSLRGLVLVMKATRWCACGASQVPVALSPVGRESCPCSHLSWSGHRRHFIAPRGGVYRHHSGPRDLVVLDRRCVLDCIPRCVWKHMVIEGVVPPSLVPHPPVYSPPASLLGECVSIGHALLIPPPCGAPPSFRINPPRPQTVCKPPFFLTRVAPHTAAPLLSRRPLCAPHLACGAPTVQRGHRLIHPTGAQQVSLEFADSVHHSAPPGLPPLAGFILPDKQTK

SEQ ID NO: 937125 - protein, 129 aa, Homo sapiens
  misc_feature (35)..(35): Xaa can be any naturally occurring amino acid
  misc_feature (45)..(45): Xaa can be any naturally occurring amino acid
MSGRGRLAARPAKAKSRSSRTGLQFPVAVYTGCCXRATTPSALAXSQSYLAAVLEYLTAEILELAGNAAGTTRRRESSPATCKLAIRNDEELNKLLGGVDDRQGGVLPNIQAVLLPKKTSATVGPNALR

SEQ ID NO: 937126 - protein, 161 aa, Homo sapiens
  misc_feature (5)..(5): Xaa can be any naturally occurring amino acid
  misc_feature (29)..(29): Xaa can be any naturally occurring amino acid
  misc_feature (52)..(52): Xaa can be any naturally occurring amino acid
  misc_feature (68)..(68): Xaa can be any naturally occurring amino acid
  misc_feature (74)..(74): Xaa can be any naturally occurring amino acid
  misc_feature (98)..(98): Xaa can be any naturally occurring amino acid
  misc_feature (112)..(112): Xaa can be any naturally occurring amino acid
ISPSXSSDSGEGTSLDAGTRSTKAGGPGXQQGWGGGPAIRARYRSAVPHPPXPPCQPGWGQPYFKVRXWKLDPXSGQPSLDTRGSPKRHHFQAARRSXVRARSKEGRGNAPXSTLKTPNKTQTGQGPKLSQALFICQILGGFAATGTLRVPAASAPSRDGV

SEQ ID NO: 937127 - protein, 148 aa, Homo sapiens
  misc_feature (1)..(1): Xaa can be any naturally occurring amino acid
  misc_feature (11)..(11): Xaa can be any naturally occurring amino acid
  misc_feature (48)..(48): Xaa can be any naturally occurring amino acid
  misc_feature (124)..(124): Xaa can be any naturally occurring amino acid
XGRKKQRRNRXTFNSSQLQALERRSSARTYPDAFVREELARRVNLSDXRVQVWFQNRRAKFRRIERAMLAARSASLLKSYSQEAPSSSPWSPAHRPESRLSLLDSLVPLQHSCNPTGLGASGPXNPRGSNMGQQASASLPSSRAKGSL

SEQ ID NO: 937128 - protein, 89 aa, Homo sapiens
  misc_feature (31)..(32): Xaa can be any naturally occurring amino acid
  misc_feature (36)..(38): Xaa can be any naturally occurring amino acid
AQKAVCKLRSQEASPNPNNSKVGKPIVQSSXXGQRXXXPLAKHWGKSKSPTAEELESLMFPALEHRTPSSSVLYVSIYHISSVPLENSY

SEQ ID NO: 937129 - protein, 64 aa, Homo sapiens
  misc_feature (9)..(9): Xaa can be any naturally occurring amino acid
  misc_feature (28)..(28): Xaa can be any naturally occurring amino acid
  misc_feature (41)..(41): Xaa can be any naturally occurring amino acid
ALLAASIAXTLSSLASPSPSLFVAERQXPSAMTVVSVPQRXQLVLGGRLARLVFLPRLLWGPPD

SEQ ID NO: 937130 - protein, 104 aa, Homo sapiens
  misc_feature (99)..(99): Xaa can be any naturally occurring amino acid
NNPIKKWAKDMNRHFSKEDIYAAKKHMKKCSPSLAIREMQIKTTMRYHLTPVRMAIIKKSGNNRYWRGCGEIGMLLHCWWEGKLVQPLWKTVVCTQRIXKSFYF

SEQ ID NO: 937131 - protein, 90 aa, Homo sapiens
FRFQAAEQDEMRLELQRSANSNPAMAPRERKAGFELADLCSQTPAMAPPRTQSWLQEFLLEDFHILLAFLTSIVHIKTSDPSPPHPISLS

SEQ ID NO: 937132 - protein, 34 aa, Homo sapiens
  misc_feature (3)..(3): Xaa can be any naturally occurring amino acid
  misc_feature (23)..(23): Xaa can be any naturally occurring amino acid
KHXIWVGVVPRGPDGAQLSSAFXRRFSEECLSSL

SEQ ID NO: 937133 - protein, 96 aa, Homo sapiens
  misc_feature (10)..(10): Xaa can be any naturally occurring amino acid
  misc_feature (50)..(50): Xaa can be any naturally occurring amino acid
WESQAPSPIXLHEDEEGTAADDLAETLRQAPPHRHPDLALPGLENAPARXGLSQAASPGAGADTARETIPDPDPTVPNNCGPVTQGGGESQEEVEA

SEQ ID NO: 937134 - protein, 90 aa, Homo sapiens
  misc_feature (4)..(4): Xaa can be any naturally occurring amino acid
  misc_feature (21)..(21): Xaa can be any naturally occurring amino acid
  misc_feature (42)..(42): Xaa can be any naturally occurring amino acid
  misc_feature (80)..(80): Xaa can be any naturally occurring amino acid
RIKXFAVMKDYIQCGQVNSVXRTQLLSAPSTGRKCGLRGAAXEAPFTGLQVESPGPVVSPSSSILISSSPHASRGHTKSXILLLSYWASS

SEQ ID NO: 937135 - protein, 82 aa, Homo sapiens
  misc_feature (2)..(2): Xaa can be any naturally occurring amino acid
  misc_feature (25)..(25): Xaa can be any naturally occurring amino acid
VXMTSPAEVAHCLFSQTVSPCAASXTTTSPRDTVCHHRLGKTKYNANKTPDKLQRSPALLSNAECKKSWGRRITDVMICAGA

SEQ ID NO: 937136 - protein, 69 aa, Homo sapiens
  misc_feature (18)..(18): Xaa can be any naturally occurring amino acid
  misc_feature (20)..(20): Xaa can be any naturally occurring amino acid
  misc_feature (33)..(33): Xaa can be any naturally occurring amino acid
  misc_feature (53)..(53): Xaa can be any naturally occurring amino acid
  misc_feature (55)..(55): Xaa can be any naturally occurring amino acid
DFKKSLDYPRLGDSVHGXSXNAFQSCSWRSPEXYQKDQFLQLPFSVSGDASAXGXINELIRFDHIYTKP

SEQ ID NO: 937137 - protein, 74 aa, Homo sapiens
  misc_feature (48)..(48): Xaa can be any naturally occurring amino acid
FGTGDAAIAQDYGVLKADEGISSQGAFFTHSMTKAYSSGPITVNDLPXVAALWIETLRLVQAFQFTDKHAGSVA

SEQ ID NO: 937138 - protein, 45 aa, Homo sapiens
  misc_feature (19)..(19): Xaa can be any naturally occurring amino acid
  misc_feature (31)..(31): Xaa can be any naturally occurring amino acid
SCRVAAVSGRVPKRSGPRXGAAEGLREQAAXRRDPGIAVRRCYPA

SEQ ID NO: 937139 - protein, 104 aa, Homo sapiens
  misc_feature (16)..(16): Xaa can be any naturally occurring amino acid
  misc_feature (18)..(18): Xaa can be any naturally occurring amino acid
  misc_feature (23)..(23): Xaa can be any naturally occurring amino acid
  misc_feature (33)..(33): Xaa can be any naturally occurring amino acid
  misc_feature (92)..(93): Xaa can be any naturally occurring amino acid
RQNPAGHAQHSSHRKXEXDANEXNSGSDSSEMXCAYENPAPQRPDSKSKSRSQGSTPSLEFGFLPSPTPRVRLRGEDQLTPSVVKPSPATRXXETQHGLFPKAQ

SEQ ID NO: 937140 - protein, 90 aa, Homo sapiens
  misc_feature (4)..(5): Xaa can be any naturally occurring amino acid
WYLXXIITRYQETFNVIERCPKPVIAAVHGGCIGGGVDLVTACNIRYCAQDAFFQVKEVDVGFGCHVGTLQRLPKVIGNQSLVNGAGLHR

SEQ ID NO: 937141 - protein, 95 aa, Homo sapiens
  misc_feature (28)..(29): Xaa can be any naturally occurring amino acid
  misc_feature (84)..(84): Xaa can be any naturally occurring amino acid
  misc_feature (89)..(89): Xaa can be any naturally occurring amino acid
PTYSRAASNQNPGDNRTIQGVEESSLSXXLDKTKFTWYLTMVNMSELIKIIRRRLQLNANQAFFLLVKDTRMVSVSTPISEVVXRVRKXEDGFLY

SEQ ID NO: 937142 - protein, 161 aa, Homo sapiens
  misc_feature (5)..(6): Xaa can be any naturally occurring amino acid
  misc_feature (26)..(26): Xaa can be any naturally occurring amino acid
  misc_feature (98)..(98): Xaa can be any naturally occurring amino acid
  misc_feature (102)..(102): Xaa can be any naturally occurring amino acid
  misc_feature (115)..(115): Xaa can be any naturally occurring amino acid
  misc_feature (121)..(121): Xaa can be any naturally occurring amino acid
  misc_feature (159)..(159): Xaa can be any naturally occurring amino acid
  misc_feature (161)..(161): Xaa can be any naturally occurring amino acid
FRHRXXHRWGLDLQLSWEQKEQPVRXSPSCGGLGVPVVARPTVTLSLFPQTIKCLLIHPNPESALNEEAGRSLLENYEEYAARAVLLTEIHGGAGESXGTGXTPVRALASGPEAXSTDPGXPGRAKLALKGPMAKKHAGERDKKLAAKKKTDKKRALRXWX

SEQ ID NO: 937143 - protein, 80 aa, Homo sapiens
  misc_feature (22)..(22): Xaa can be any naturally occurring amino acid
  misc_feature (31)..(33): Xaa can be any naturally occurring amino acid
  misc_feature (60)..(60): Xaa can be any naturally occurring amino acid
PSASWVREKPVVAQPDFKNLKXGEADSAASXXXVAKGQEPLATNPLVQVLDSKELKNLEXDVQEQEEWKKARRLSKQGRQ

SEQ ID NO: 937144 - protein, 78 aa, Homo sapiens
  misc_feature (47)..(47): Xaa can be any naturally occurring amino acid
  misc_feature (64)..(64): Xaa can be any naturally occurring amino acid
KIVEIDRHIGCAMSGLTADARSMIEHARTAAVTHNLYYDEDINVESXTQSVCDLALRFGEGASXEERLMSRPFGGCLV

SEQ ID NO: 937145 - protein, 94 aa, Homo sapiens
  misc_feature (23)..(23): Xaa can be any naturally occurring amino acid
  misc_feature (74)..(74): Xaa can be any naturally occurring amino acid
HQRETCRHRRQPRTSCRCCDTNXRKPTKSHDTEQVDQDRPGERPPLEQRHVEHRRLGTQLAPHEQETHREAEKXPRTGLSDSDHPRASDFDRVD

SEQ ID NO: 937146 - protein, 99 aa, Homo sapiens
  misc_feature (17)..(17): Xaa can be any naturally occurring amino acid
  misc_feature (50)..(50): Xaa can be any naturally occurring amino acid
  misc_feature (88)..(89): Xaa can be any naturally occurring amino acid
  misc_feature (94)..(94): Xaa can be any naturally occurring amino acid
  misc_feature (98)..(98): Xaa can be any naturally occurring amino acid
SEVGAARLIGEDRSQQXAAEAGGRSRPANLEAACPRKGVEVQRRTQGQTXYGKYYIRIEKVWKLQEDVEKTVKGTRHTLAHGVTRLVXXEGLGXLPPXH

SEQ ID NO: 937147 - protein, 141 aa, Homo sapiens
  misc_feature (4)..(4): Xaa can be any naturally occurring amino acid
  misc_feature (60)..(60): Xaa can be any naturally occurring amino acid
  misc_feature (97)..(97): Xaa can be any naturally occurring amino acid
PIEXLKEGKSKIVSGEPRFPLSFQTGVNNNSCEPQDEMCNPSYLAPDASSDFFLGPAPRXCHCQGNESPLHMTGPIRPPPSCVSYFSASAPTSAFAXVGPSVQITCPPRGPSLRLPRSSQSQGWVSGHLWKKPWPTDHVCN

SEQ ID NO: 937148 - protein, 39 aa, Homo sapiens
  misc_feature (20)..(20): Xaa can be any naturally occurring amino acid
PIGDKPSSIADRFYLGGPTXVRGFSMHSIGPQSEGDYLG

SEQ ID NO: 937149 - protein, 69 aa, Homo sapiens
  misc_feature (23)..(25): Xaa can be any naturally occurring amino acid
  misc_feature (33)..(33): Xaa can be any naturally occurring amino acid
  misc_feature (44)..(44): Xaa can be any naturally occurring amino acid
  misc_feature (54)..(54): Xaa can be any naturally occurring amino acid
HRTSHPSQTVDGRMESMAVATDXXXQAGGPSGXRSVGFPASGGXRRRKLLMNSXYRINRIMGFHRPGSG

SEQ ID NO: 937150 - protein, 44 aa, Homo sapiens
  misc_feature (30)..(30): Xaa can be any naturally occurring amino acid
QTELTSPGVCPAEAPSMLGSSDRCGDQQNXPYGVTPASPSGHSQ

SEQ ID NO: 937151 - protein, 67 aa, Homo sapiens
  misc_feature (50)..(52): Xaa can be any naturally occurring amino acid
QTGADQASITARDHIQLVKLQVEEVHQLSRKAETKLAEAQIEELRQKTQXXXEERAESEQEAYLRED

SEQ ID NO: 937152 - protein, 94 aa, Homo sapiens
  misc_feature (64)..(64): Xaa can be any naturally occurring amino acid
KRPLEKFDYRKLFLQGWQTEKVVLLALCGFPTRTLKVTTRKNAVRNGTNTWDTYELKIYKRLVXSARRTELVKKITSFPIDAGVDVAITIPHDQ

SEQ ID NO: 937153 - protein, 156 aa, Homo sapiens
  misc_feature (73)..(73): Xaa can be any naturally occurring amino acid
  misc_feature (77)..(77): Xaa can be any naturally occurring amino acid
  misc_feature (136)..(136): Xaa can be any naturally occurring amino acid
IRHQGDHEQMAYVKKDQAPAQETQRVLVKMTSRNAKAVENVMTELLLHARNEKVVLRGPVRLPDPARCKSPPXKTPXVNGTNTWDTYELKIYKRLVELRAADGACEEDYILSPIDAGVDVRHHNPTRPVSLPRMWXKVGGRAATVSCHLGGKSLFS

SEQ ID NO: 937154 - protein, 48 aa, Homo sapiens
  misc_feature (30)..(30): Xaa can be any naturally occurring amino acid
VETLSVPPALTNCTKHSNFRNARPVHGRPXLEGVLRGQVGVGCLLQHE

SEQ ID NO: 937155 - protein, 87 aa, Homo sapiens
  misc_feature (25)..(25): Xaa can be any naturally occurring amino acid
  misc_feature (43)..(43): Xaa can be any naturally occurring amino acid
  misc_feature (79)..(79): Xaa can be any naturally occurring amino acid
NFHYGSAEGKFGLYSPHTGGHDPPXSRLIGPPTARTLSVEELXALNTNPAHEISHGGYTLQSHRCTLLVEVSHEPLPLXQVNSHLPT

SEQ ID NO: 937156 - protein, 233 aa, Homo sapiens
  misc_feature (15)..(15): Xaa can be any naturally occurring amino acid
PPPLLPLLPLLLLQXGASSGGGGARAEVLYRSPRCTPERLAACRPPPVAPPAAEAAEAGGPHAKRGDVREQGCGCSTVCARLEGEECSVYTPLLRQGLRCNAHPGTEQPQQAQVMGEATSEKRRDAEYGAKEQVADNGEDHTEGGLEENHVDSTMNMLGGGGSSGRKPLKYGMKELAVFREKVTEQHRQKGKGGKHQLGLEEPKKLRPPPARTSCQQELDQVLERIFTMRLPD

SEQ ID NO: 937157 - protein, 71 aa, Homo sapiens
  misc_feature (9)..(9): Xaa can be any naturally occurring amino acid
  misc_feature (17)..(17): Xaa can be any naturally occurring amino acid
HLMPTRYSXDIPLDKTXVNKDVFRDPALKRKAPTGGQGQVLKGRYKTGKNKWVLPETAGFRCFVLIIKNYK

SEQ ID NO: 937158 - protein, 113 aa, Homo sapiens
  misc_feature (33)..(33): Xaa can be any naturally occurring amino acid
  misc_feature (80)..(80): Xaa can be any naturally occurring amino acid
  misc_feature (92)..(92): Xaa can be any naturally occurring amino acid
DALEGKHPAVPVDVVHRALREIHERADAVRRQXFQAMAAEGVKYLEENAKKEGVNSTESGLQFRVINQGEGAIPARTDRXRVHYTGKLIDGXVFDSFLARGEPVEFPVNGVIP

SEQ ID NO: 937159 - protein, 124 aa, Homo sapiens
  misc_feature (3)..(3): Xaa can be any naturally occurring amino acid
AWXNRNTLFTQCNINLVGIEQFGGKTPQLVDGLLHLLPCYVSTIAQSLQPATTKTQVIARFFNCFGRNRRQLRITAFHQTGKERHMPCIDEILACNGVGKIAVWLFQPTIKFAGTGAIALLSPL

SEQ ID NO: 937160 - protein, 80 aa, Homo sapiens
  misc_feature (1)..(1): Xaa can be any naturally occurring amino acid
XGMKARNKDALPCFCANRSASIPFTASIVIPCGGANIASSDIAINILINEKSFSRNFSGHQIDGRFLHNFIQQMNELNAT

SEQ ID NO: 937161 - protein, 88 aa, Homo sapiens
  misc_feature (16)..(16): Xaa can be any naturally occurring amino acid
  misc_feature (19)..(19): Xaa can be any naturally occurring amino acid
  misc_feature (32)..(32): Xaa can be any naturally occurring amino acid
  misc_feature (60)..(60): Xaa can be any naturally occurring amino acid
  misc_feature (76)..(76): Xaa can be any naturally occurring amino acid
VGYLEDIIMDDEFQLXQRXFMDKYYLEFEDTXENKLIYTPIFDEYISLVENTLKKLLQRXPEFNMAAFTTTLQHHXGEVAGDIFRHAA

SEQ ID NO: 937162 - protein, 112 aa, Homo sapiens
AQTIGLEDALTASLMLNALLIVGALLGLVLTHLLAHRKFLLGSFLLLAATLVVMACLPSGSSLTLLLFVLFSTTISAVSNLVGILPAESFPTDIRSLGVGFATAMSRLGAAV

SEQ ID NO: 937163 - protein, 88 aa, Homo sapiens
  misc_feature (10)..(10): Xaa can be any naturally occurring amino acid
  misc_feature (45)..(45): Xaa can be any naturally occurring amino acid
MTRPTIGETXSEEKILVTSRRFNASITDEPVNSALVKPMPIIAPXKVCELEAGKPKNHVPRFQIIAASSMEKTIARPWVDPIFSNKFG

SEQ ID NO: 937164 - protein, 137 aa, Homo sapiens
  misc_feature (4)..(4): Xaa can be any naturally occurring amino acid
  misc_feature (7)..(7): Xaa can be any naturally occurring amino acid
  misc_feature (30)..(31): Xaa can be any naturally occurring amino acid
  misc_feature (34)..(34): Xaa can be any naturally occurring amino acid
  misc_feature (48)..(48): Xaa can be any naturally occurring amino acid
  misc_feature (50)..(50): Xaa can be any naturally occurring amino acid
IRHXGRXGNCSARAGSEEPSVPLGSGPAAXXYHXPEPASHCLLLLPMXPXAAAAAAGPGAGPSQAGTDENDWVRLPSKCEVCKYVAVELKSAFEETGKTKEVIGTGYGILDQKASGVKYTKSISDPPDQDDLSSFQL

SEQ ID NO: 937165 - protein, 53 aa, Homo sapiens
  misc_feature (22)..(22): Xaa can be any naturally occurring amino acid
  misc_feature (36)..(36): Xaa can be any naturally occurring amino acid
  misc_feature (51)..(51): Xaa can be any naturally occurring amino acid
HRNTCKLEENSVVLMGQGNGDXDTTEFSSSLQVFLXPWTPSFCTWGLGLGXFE

SEQ ID NO: 937166 - protein, 45 aa, Homo sapiens
  misc_feature (17)..(17): Xaa can be any naturally occurring amino acid
  misc_feature (38)..(38): Xaa can be any naturally occurring amino acid
MPGQTGPKGDRGFDGLXGLPGEKGHRGDPGPSGPPGPXGDDGERG

SEQ ID NO: 937167 - protein, 112 aa, Homo sapiens
  misc_feature (95)..(95): Xaa can be any naturally occurring amino acid
  misc_feature (105)..(106): Xaa can be any naturally occurring amino acid
SLAQAGVQWHVLSSLQPPPLGFKQFCCISLPSTWDYRHVPPRPANFVFLVETGFCHVGQAGLELLTSDDPSALDSHSAGITGVSHPCPGSFSTLXLSFLILTSGXXTFIPGL

SEQ ID NO: 937168 - protein, 42 aa, Homo sapiens
  misc_feature (4)..(4): Xaa can be any naturally occurring amino acid
CLDXLLGIVGSSLHSTLTASQFQGSRLQQGVVDAVGEYSGSN

SEQ ID NO: 937169 - protein, 35 aa, Homo sapiens
  misc_feature (19)..(19): Xaa can be any naturally occurring amino acid
FLESLLKKACQVTQSRNEXTMTTSHLKQCIELGAA

SEQ ID NO: 937170 - protein, 67 aa, Homo sapiens
  misc_feature (59)..(59): Xaa can be any naturally occurring amino acid
RFTGKFHAGTDIMTDRTGIELEVRLVWLVRILLLTSLVFAVRDQVQLFTSLVGCVIFDXPPIIAVIR

SEQ ID NO: 937171 - protein, 33 aa, Homo sapiens
SPLKVLCTPPLKMLGEAAGMGASPMPVCNPTVG

SEQ ID NO: 937172 - protein, 40 aa, Homo sapiens
VLEGDNLETPITLISMWPEHYDPSQSPQLFHDDTHSRIEQ

SEQ ID NO: 937173 - protein, 92 aa, Homo sapiens
  misc_feature (19)..(19): Xaa can be any naturally occurring amino acid
  misc_feature (57)..(57): Xaa can be any naturally occurring amino acid
KGGCGSYGCSQSSCCKPCXCSSGCGSSCCQSSCCKPYCCQSSCCKPYCCQSSCCKPXSCFSGCGSSCCQSSCYKPCCCQSSCCVPVCCQCKI

SEQ ID NO: 937174 - protein, 48 aa, Homo sapiens
  misc_feature (14)..(14): Xaa can be any naturally occurring amino acid
  misc_feature (39)..(39): Xaa can be any naturally occurring amino acid
  misc_feature (41)..(41): Xaa can be any naturally occurring amino acid
CNPPNLALYLLGFXLKKPVSTTNLQDPGVLGCPRTCLHXIXNILEKGT

SEQ ID NO: 937175 - protein, 114 aa, Homo sapiens
  misc_feature (27)..(27): Xaa can be any naturally occurring amino acid
  misc_feature (51)..(51): Xaa can be any naturally occurring amino acid
  misc_feature (88)..(88): Xaa can be any naturally occurring amino acid
HINTEHLLAFKVLTTMMSTLKGEGVPXKPLRTIENHINIIPPSWPARPRLXSPPPDSVTQIKPHSTVDFRVKAEDTVTVENVLKQNEXQYKVLISNLEKCGGGSVLISRVRGTG

SEQ ID NO: 937176 - protein, 74 aa, Homo sapiens
  misc_feature (20)..(20): Xaa can be any naturally occurring amino acid
  misc_feature (29)..(29): Xaa can be any naturally occurring amino acid
  misc_feature (54)..(54): Xaa can be any naturally occurring amino acid
  misc_feature (69)..(69): Xaa can be any naturally occurring amino acid
LTLAVARFVWAGEGGEAWLXGCLTGEAGXAEVQPPSPTAESKTGLPVSSYFYWXFPCSTMLRAKNQLFXLSPHY

SEQ ID NO: 937177 - protein, 102 aa, Homo sapiens
  misc_feature (3)..(4): Xaa can be any naturally occurring amino acid
  misc_feature (44)..(44): Xaa can be any naturally occurring amino acid
LVXXHTGDVMIFPVLSCFTRFMAGLIFVLHSCFRFITFVCPTSXDPLRTCAVLLCVGYQDLPNPVFRYLQSVNELLSTLLNSDSPQQVLQFVPNGRYSLRGP

SEQ ID NO: 937178 - protein, 71 aa, Homo sapiens
  misc_feature (4)..(4): Xaa can be any naturally occurring amino acid
  misc_feature (40)..(40): Xaa can be any naturally occurring amino acid
  misc_feature (58)..(58): Xaa can be any naturally occurring amino acid
LVRXRAAGVVFTALCLLLLEAQLLWPRYLQVLGDATAKTXGPTGSLEMVRVPGPTSRXRGRGWLELVGSKL

SEQ ID NO: 937179 - protein, 100 aa, Homo sapiens
  misc_feature (43)..(43): Xaa can be any naturally occurring amino acid
MPIISALWEAEVGGSLEPSSSRPAQSNMAKPQLYKKYKKISLXCWCMLVVPATREAEVGGSCEPGEVEATVSHDLTTALQPAGQQSETLLQKKKKKSCYE

SEQ ID NO: 937180 - protein, 113 aa, Homo sapiens
APDRFFRTPRWSPRCLAQLWKAPSVGLWFRPAARRPFFYPGLPTRGASGTVLNYVLGYTQESSLECGLLSPIYGGPFSSAVSYWFRHKARGVPTAEGGHSGGDEPRVLCRRLF

SEQ ID NO: 937181 - protein, 60 aa, Homo sapiens
  misc_feature (6)..(6): Xaa can be any naturally occurring amino acid
  misc_feature (8)..(8): Xaa can be any naturally occurring amino acid
  misc_feature (23)..(23): Xaa can be any naturally occurring amino acid
YNSINXAXTQFSCNISHLSSLIXQLEEKQQQTTRELLKDIGDTLSRAERFRIPEPWFTPP

SEQ ID NO: 937182 - protein, 34 aa, Homo sapiens
  misc_feature (23)..(23): Xaa can be any naturally occurring amino acid
LVPSGKMAIKSIASRLRGSRRFXSGFVAGAVVGA

SEQ ID NO: 937183 - protein, 133 aa, Homo sapiens
  misc_feature (41)..(41): Xaa can be any naturally occurring amino acid
  misc_feature (72)..(72): Xaa can be any naturally occurring amino acid
  misc_feature (117)..(117): Xaa can be any naturally occurring amino acid
AQVLAARGIRLGTVLRIRGLVPPNASRFHVNLLCGEEQGSXAALHFNPRLDTSEVVFNSKEQGSGRPREPAXAVPFQLRAAFEVLIIASDDGFKAVVWGRPVPPLSATACRWAPCLXWKVGGDVAAGLREILL

SEQ ID NO: 937184 - protein, 57 aa, Homo sapiens
  misc_feature (18)..(18): Xaa can be any naturally occurring amino acid
  misc_feature (28)..(28): Xaa can be any naturally occurring amino acid
  misc_feature (33)..(33): Xaa can be any naturally occurring amino acid
  misc_feature (51)..(51): Xaa can be any naturally occurring amino acid
REPTMVLFPADKTNVKVXWGKVGAHAGXYGAEXLERMFLSFPTTKTYFPHXDLSHGS

SEQ ID NO: 937185 - protein, 85 aa, Homo sapiens
  misc_feature (15)..(15): Xaa can be any naturally occurring amino acid
  misc_feature (18)..(18): Xaa can be any naturally occurring amino acid
  misc_feature (26)..(26): Xaa can be any naturally occurring amino acid
  misc_feature (37)..(37): Xaa can be any naturally occurring amino acid
  misc_feature (61)..(61): Xaa can be any naturally occurring amino acid
QEALLLPVQAQDVQXHVXPFQDPCGXEVKKAEHVARXAEEKAREAESKARYIEVRLGGDLXRDSRVMLRQVQNRAITLRRDADVK

SEQ ID NO: 937186 - protein, 101 aa, Homo sapiens
NRVSICHQAGVQWRDLGSPQPLPLGFKRFSCLLNACNIFRTVPFSLLKLMIFAPSLFLSLLSSWARWLTPIIPAVWEAEVGGSGGQEIETILANMVKIRLY

SEQ ID NO: 937187 - protein, 34 aa, Homo sapiens
MVRVLQEAAKLSSQVAAPFCVPTSNEWAFLWLHV

SEQ ID NO: 937188 - protein, 43 aa, Homo sapiens
  misc_feature (5)..(5): Xaa can be any naturally occurring amino acid
  misc_feature (21)..(21): Xaa can be any naturally occurring amino acid
  misc_feature (23)..(23): Xaa can be any naturally occurring amino acid
MFLEXGPLYENHFPQPVELPXEXLASHGSQESAVPIPTDTICF

SEQ ID NO: 937189 - protein, 42 aa, Homo sapiens
  misc_feature (34)..(34): Xaa can be any naturally occurring amino acid
  misc_feature (40)..(40): Xaa can be any naturally occurring amino acid
GIAMKVLGALALFWIIFILGYLTGYYVTSEINAXRMHAGXGR

SEQ ID NO: 937190 - protein, 50 aa, Homo sapiens
  misc_feature (27)..(27): Xaa can be any naturally occurring amino acid
  misc_feature (30)..(30): Xaa can be any naturally occurring amino acid
SFKVYCNFTAGGSTCVFPDKKSEGDKXARXTKEQPSTWYSQYKWGSLLSY

SEQ ID NO: 937191 - protein, 62 aa, Homo sapiens
  misc_feature (13)..(13): Xaa can be any naturally occurring amino acid
  misc_feature (29)..(29): Xaa can be any naturally occurring amino acid
  misc_feature (46)..(47): Xaa can be any naturally occurring amino acid
MVLSPADKTNVKXAWGKVGAHAGEYGAEXLERMFLSFPTTKTYFPXXDLSHGSSQVKGHGKK

SEQ ID NO: 937192 - protein, 58 aa, Homo sapiens
  misc_feature (11)..(11): Xaa can be any naturally occurring amino acid
  misc_feature (55)..(55): Xaa can be any naturally occurring amino acid
GNGSGGQGGCXRRALREEKARGTQLPGALQVLVSSGRAIRASCTGSFSPDTFQVXLDK

SEQ ID NO: 937193 - protein, 102 aa, Homo sapiens
  misc_feature (12)..(12): Xaa can be any naturally occurring amino acid
  misc_feature (18)..(18): Xaa can be any naturally occurring amino acid
  misc_feature (25)..(25): Xaa can be any naturally occurring amino acid
  misc_feature (31)..(31): Xaa can be any naturally occurring amino acid
  misc_feature (58)..(58): Xaa can be any naturally occurring amino acid
  misc_feature (85)..(85): Xaa can be any naturally occurring amino acid
SLKYNPVVIDFXMQPIHXVLRQQAXAILEAXRQNLRRALDQYLMEFNACRCGPCFNNXVPILEGQLQVQSRLGSLGAACEQTQTXRSQSRWELELLELLVCM

SEQ ID NO: 937194 - protein, 268 aa, Homo sapiens
MAPEDPCLLPALYISWPQIALEPLCPCLAALQVPDPEPVPQLDICSRVHIRKSLDSPGHPHRGARRPTEAQWHAPKETPESPQVRASPPQDPQPQAPRTSPQAQAPQDPAGPETAPLGLELGPPMKHPEGPPGHPRFLAFHGHLTTPLWGVFRDLMGNPHFSRRHGGAPPFPQCTRLTRHPPPGGPPPATSPSPQVGPKVTPGPSFASRPSGWSSCGPRCLRGPDLYGGQCPDPESRLRRFPGADRRGLGAPSLPDPSPRLCFAPPFP

SEQ ID NO: 937195 - protein, 112 aa, Homo sapiens
  misc_feature (50)..(50): Xaa can be any naturally occurring amino acid
LVPCFTYFYFIFFVEMRSLYVPQADLELLASSDPSCRWPSQSVGITGISXPCLDCFTFYIYFYFIFFSVALAGVQWHDHGSQHPQPTVLKPSSCLSLLSSWDVRMYQHAQLI

SEQ ID NO: 937196 - protein, 54 aa, Homo sapiens
  misc_feature (23)..(23): Xaa can be any naturally occurring amino acid
VDASLDKFLASVSTVLTSKYREXGASVAMLLAPWASPPAPPPLPAPVPPWSLNK

SEQ ID NO: 937197 - protein, 68 aa, Homo sapiens
  misc_feature (60)..(60): Xaa can be any naturally occurring amino acid
QGEVTSGFYSLLRRPRNCIGQAFASATMKVVLALMLLHFRFLPDHTEPLQKLELIMRAEXALRLRVEP

SEQ ID NO: 937198 - protein, 80 aa, Homo sapiens
  misc_feature (18)..(18): Xaa can be any naturally occurring amino acid
  misc_feature (34)..(34): Xaa can be any naturally occurring amino acid
  misc_feature (48)..(49): Xaa can be any naturally occurring amino acid
  misc_feature (57)..(57): Xaa can be any naturally occurring amino acid
  misc_feature (76)..(76): Xaa can be any naturally occurring amino acid
TIQGLGAASAQFVSRLLXVLLSTAQEADPEVENXIFGMGVLAEHGGHXXQEHFPKLXGLLFPLYRREHNDRVRDKXLLGQ

SEQ ID NO: 937199 - protein, 105 aa, Homo sapiens
  misc_feature (32)..(32): Xaa can be any naturally occurring amino acid
  misc_feature (99)..(99): Xaa can be any naturally occurring amino acid
YSFLLLSSSPWYGWTTVCLIPSEDLFKILVPXMQWLTPVIPALGEVKAGGLLDPRNSRPYWATWQNPVSTQNTKISWAWWCTPVVPATWETEIRGWFEXGRQRLQ

SEQ ID NO: 937200 - protein, 94 aa, Homo sapiens
  misc_feature (1)..(1): Xaa can be any naturally occurring amino acid
  misc_feature (7)..(7): Xaa can be any naturally occurring amino acid
XSLPFAXLQCYRKEVTTILCQAIFLASLPEIRFMKEPVKQAKVSLNKQVELNIIIDGEETSKHKRTAGGAVGWTVGCGGFVYDEKPCTVFSRNT

SEQ ID NO: 937201 - protein, 41 aa, Homo sapiens
  misc_feature (13)..(13): Xaa can be any naturally occurring amino acid
  misc_feature (29)..(29): Xaa can be any naturally occurring amino acid
  misc_feature (35)..(35): Xaa can be any naturally occurring amino acid
STTSPLTRSSSKXSSLRQRKTQSCLKSSXQKTLLXGETVDL

SEQ ID NO: 937202 - protein, 47 aa, Homo sapiens
  misc_feature (14)..(14): Xaa can be any naturally occurring amino acid
  misc_feature (38)..(39): Xaa can be any naturally occurring amino acid
VRRVKTNVPVKLFXRSTDVTTSSAKIKLKSSELQAIKXXLTQIKSNI

SEQ ID NO: 937203 - protein, 59 aa, Homo sapiens
  misc_feature (16)..(16): Xaa can be any naturally occurring amino acid
  misc_feature (21)..(21): Xaa can be any naturally occurring amino acid
  misc_feature (39)..(40): Xaa can be any naturally occurring amino acid
  misc_feature (53)..(53): Xaa can be any naturally occurring amino acid
MPDAQVIGPTKAINVXCDANXSYQTYSRCQMVLDKVFTXXLAIRRDDIIYSSXSVLNRL

SEQ ID NO: 937204 - protein, 55 aa, Homo sapiens
  misc_feature (28)..(28): Xaa can be any naturally occurring amino acid
  misc_feature (30)..(30): Xaa can be any naturally occurring amino acid
  misc_feature (44)..(44): Xaa can be any naturally occurring amino acid
YIHPTAKVAPSAVLGPNVSIGKGVTVGXGXRLRESIVLHGATLXEHTCVLHSIVG

SEQ ID NO: 937205 - protein, 40 aa, Homo sapiens
  misc_feature (15)..(15): Xaa can be any naturally occurring amino acid
  misc_feature (39)..(39): Xaa can be any naturally occurring amino acid
PVLATVVTLRTIWMXYMFADVYLLTTKVDIFGVYLYKTXF

SEQ ID NO: 937206 - protein, 64 aa, Homo sapiens
  misc_feature (27)..(27): Xaa can be any naturally occurring amino acid
MGIRRGFTVVYLGDNWYKINDYLAAKXLLQVKGSSPTAVPFENVGTGGDTRWHISDPGGQRLGG

SEQ ID NO: 937207 - protein, 73 aa, Homo sapiens
  misc_feature (11)..(11): Xaa can be any naturally occurring amino acid
  misc_feature (19)..(19): Xaa can be any naturally occurring amino acid
  misc_feature (28)..(28): Xaa can be any naturally occurring amino acid
  misc_feature (34)..(34): Xaa can be any naturally occurring amino acid
KHVLLLEEEIXEPLFNACXAGMADPAGXILLAHXRRTMSEYRQVEAEIRNLNTLQKGEVIIATVTGLATGIRL

SEQ ID NO: 937208 - protein, 104 aa, Homo sapiens
GRIHGLVVSDDAAAHVRIDLSQAMAHLVAVVPDRDEVRLRAGQNVATAPRSIDTPLNSPVDHVTLAVRIALHDRDALSVTPATSGTTLPSRNGTHTSWKNFSWP

SEQ ID NO: 937209 - protein, 53 aa, Homo sapiens
  misc_feature (34)..(34): Xaa can be any naturally occurring amino acid
AETGISVMAARSNGTVSPSAFLEPYSPAVWVMMXVMCLTGVAITGLHVRVLQP

SEQ ID NO: 937210 - protein, 114 aa, Homo sapiens
  misc_feature (22)..(22): Xaa can be any naturally occurring amino acid
  misc_feature (25)..(25): Xaa can be any naturally occurring amino acid
  misc_feature (59)..(59): Xaa can be any naturally occurring amino acid
  misc_feature (61)..(61): Xaa can be any naturally occurring amino acid
  misc_feature (68)..(68): Xaa can be any naturally occurring amino acid
  misc_feature (79)..(79): Xaa can be any naturally occurring amino acid
KYHVMANHNSLPILKAGDEIDXPSXRERLRTVSLELFGAFPSHLLRNSSKETGKAQVLXEXCSSSFTXLMGYLYHVRKXGKGAAELEKMTLKCHHCGKPYRSKAWTCISPEVRA

SEQ ID NO: 937211 - protein, 69 aa, Homo sapiens
LLPGPAGSLLFARCPKQPARSCTCSPTRSSQEELEHGGPSEQGTPIASLMKGWRKTPASKSHYICNLNS

SEQ ID NO: 937212 - protein, 35 aa, Homo sapiens
  misc_feature (12)..(12): Xaa can be any naturally occurring amino acid
HTYLNMLEEAEXRDHRRLAKQLDLFHMQEEAAGMV

SEQ ID NO: 937213 - protein, 116 aa, Homo sapiens
  misc_feature (113)..(114): Xaa can be any naturally occurring amino acid
FIIQSSLAKLPPSLISFNIHSFILQRPLVIDCLVLSPTIEVSFSFCLIAKNRNSLKLVCIKGGELKRCPRMSCHQATFPKSSSEWDPSSYHSPWTCLVQERVGGTVPSKGACXXLM

SEQ ID NO: 937214 - protein, 100 aa, Homo sapiens
  misc_feature (10)..(10): Xaa can be any naturally occurring amino acid
  misc_feature (12)..(12): Xaa can be any naturally occurring amino acid
  misc_feature (64)..(64): Xaa can be any naturally occurring amino acid
  misc_feature (69)..(69): Xaa can be any naturally occurring amino acid
  misc_feature (91)..(91): Xaa can be any naturally occurring amino acid
KPVPWQSLTXRXDAQGRQGDRGSPTTSLRSSNYWMIIPKCFIVGARQCGLKQMQQIPMPFAGKXVVLMXRHHDAQGIRGHLENNPALENFXLISGGMWAL

SEQ ID NO: 937215 - protein, 105 aa, Homo sapiens
  misc_feature (99)..(99): Xaa can be any naturally occurring amino acid
IVSPCFVCCAYKGNLKSVSFYYKDTCTRMFIAALFTIAKTWNQPKYPQMIDRIKENVTHIHHGILCSHRKDEFIFLTGTMDEAGNHHPQQLTQGTGNQXPACSHS

SEQ ID NO: 937216 - protein, 40 aa, Homo sapiens
  misc_feature (22)..(22): Xaa can be any naturally occurring amino acid
MSQPCHMCILVSYGDDEAPSAXRTIQRVNTELMKAAVRGS

SEQ ID NO: 937217 - protein, 77 aa, Homo sapiens
  misc_feature (17)..(17): Xaa can be any naturally occurring amino acid
  misc_feature (44)..(44): Xaa can be any naturally occurring amino acid
  misc_feature (53)..(53): Xaa can be any naturally occurring amino acid
  misc_feature (61)..(61): Xaa can be any naturally occurring amino acid
MSDNEDNFDGDDFDDVXEDEGLDDLENAEEEGQENVEILPLFEXTAANQKRIXSPYMTKYXRARVAGTPSAPDCDVC

SEQ ID NO: 937218 - protein, 30 aa, Homo sapiens
MGQKKISAFCNNECQPFEHYHQSHSTPLDA

SEQ ID NO: 937219 - protein, 63 aa, Homo sapiens
  misc_feature (8)..(8): Xaa can be any naturally occurring amino acid
  misc_feature (43)..(43): Xaa can be any naturally occurring amino acid
  misc_feature (59)..(59): Xaa can be any naturally occurring amino acid
PLRQRQPXRCAQAGLQALGCSAGLVCSGATTAHGSLSHPDVSXSGSHLSLPSSGSRIRXPTCG

SEQ ID NO: 937220 - protein, 85 aa, Homo sapiens
  misc_feature (56)..(56): Xaa can be any naturally occurring amino acid
  misc_feature (61)..(61): Xaa can be any naturally occurring amino acid
  misc_feature (81)..(81): Xaa can be any naturally occurring amino acid
YVHKHRYSGRTALQMSRDLSIQLPRPDQNVTRSRSKTYPKRIAQTQPAESNSISRXTANMXNGENDGTIKIIAPSPVKSFXKAKG

SEQ ID NO: 937221 - protein, 39 aa, Homo sapiens
  misc_feature (24)..(24): Xaa can be any naturally occurring amino acid
RRLRFELAAPGFALSLPKVMKRGXDRTPMLLKRRLSACH

SEQ ID NO: 937222 - protein, 56 aa, Homo sapiens
MPNKTVLHHVYDSDNLSSSDDLVRYLIVTIQRIERELYGYLALSTVVETLRRDIGR

SEQ ID NO: 937223 - protein, 37 aa, Homo sapiens
MYPNDGHWYTKLWTPLLQSLIGLFEVTQKMITIPDED

SEQ ID NO: 937224 - protein, 91 aa, Homo sapiens
  misc_feature (11)..(11): Xaa can be any naturally occurring amino acid
  misc_feature (14)..(14): Xaa can be any naturally occurring amino acid
  misc_feature (51)..(51): Xaa can be any naturally occurring amino acid
  misc_feature (54)..(54): Xaa can be any naturally occurring amino acid
TDQEQPGRQQXAGXSPTLTPGKLAQNRPSVITCASAGARNCNLSHCPIAHXACXTQGLPATGATEAATTCDPVVEEHFRRAWEELQGARAG

SEQ ID NO: 937225 - protein, 60 aa, Homo sapiens
  misc_feature (12)..(12): Xaa can be any naturally occurring amino acid
  misc_feature (46)..(46): Xaa can be any naturally occurring amino acid
  misc_feature (49)..(49): Xaa can be any naturally occurring amino acid
PPLSLLEEEAGXGGQDMPEAELLLMVAGEVKSALGLELSNSSLGPXWPXRRGPRWREQLA

SEQ ID NO: 937226 - protein, 58 aa, Homo sapiens
  misc_feature (30)..(30): Xaa can be any naturally occurring amino acid
  misc_feature (38)..(38): Xaa can be any naturally occurring amino acid
MDDTLFQLKFTAEELEKLAKKAEKDSKAEXAKVKKALXQKNVECARVYAENAIRKKNE

SEQ ID NO: 937227 - protein, 110 aa, Homo sapiens
  misc_feature (7)..(7): Xaa can be any naturally occurring amino acid
  misc_feature (27)..(27): Xaa can be any naturally occurring amino acid
  misc_feature (31)..(31): Xaa can be any naturally occurring amino acid
  misc_feature (40)..(40): Xaa can be any naturally occurring amino acid
  misc_feature (48)..(48): Xaa can be any naturally occurring amino acid
  misc_feature (54)..(54): Xaa can be any naturally occurring amino acid
  misc_feature (72)..(72): Xaa can be any naturally occurring amino acid
  misc_feature (109)..(109): Xaa can be any naturally occurring amino acid
KTEFYSXPPGWSASGAILSSLQCLPGXSPAXVSQVAGIIXMHHHAWLXFVFLVXMGFRRVGQAGLELLTLSXPLASASQSLSLLQCWDYRHETLWPGMIFSHSFLLRVXN

SEQ ID NO: 937228 - protein, 71 aa, Homo sapiens
  misc_feature (11)..(11): Xaa can be any naturally occurring amino acid
  misc_feature (25)..(25): Xaa can be any naturally occurring amino acid
  misc_feature (28)..(28): Xaa can be any naturally occurring amino acid
  misc_feature (52)..(52): Xaa can be any naturally occurring amino acid
  misc_feature (58)..(58): Xaa can be any naturally occurring amino acid
LHNSQNWKGSXGPWLATAASAMEKXKGXKGLGAVAHACKPRCEFETSLANMXKPRPYXKYRTLAKCGGACL

SEQ ID NO: 937229 - protein, 36 aa, Homo sapiens
FSGTQIQVTHIDITVDYCRNYGVAYDIGDLELTVLP

SEQ ID NO: 937230 - protein, 38 aa, Homo sapiens
  misc_feature (11)..(11): Xaa can be any naturally occurring amino acid
  misc_feature (34)..(34): Xaa can be any naturally occurring amino acid
RWEVEEDWCLXVLRSYQAEHGPDFPWSVGEDMSXDGRR

SEQ ID NO: 937231 - protein, 80 aa, Homo sapiens
  misc_feature (37)..(37): Xaa can be any naturally occurring amino acid
  misc_feature (58)..(58): Xaa can be any naturally occurring amino acid
  misc_feature (67)..(67): Xaa can be any naturally occurring amino acid
  misc_feature (78)..(78): Xaa can be any naturally occurring amino acid
  misc_feature (80)..(80): Xaa can be any naturally occurring amino acid
VDKIKNKTHASKLLGNPAECVEVFGIPFLHLKVNWIXQQFRCMLVPLVPNSAGAALIXAVGVRLRKXAKQLRVRDPQXTX

SEQ ID NO: 937232 - protein, 58 aa, Homo sapiens
  misc_feature (17)..(17): Xaa can be any naturally occurring amino acid
  misc_feature (48)..(48): Xaa can be any naturally occurring amino acid
  misc_feature (50)..(50): Xaa can be any naturally occurring amino acid
RWSRVGPQNPRVALPPXTLAMFLTRSEYDRGVNTFSPEEDYFKWNMPXRXSSLVLQPL

SEQ ID NO: 937233 - protein, 84 aa, Homo sapiens
  misc_feature (5)..(5): Xaa can be any naturally occurring amino acid
  misc_feature (30)..(30): Xaa can be any naturally occurring amino acid
  misc_feature (57)..(59): Xaa can be any naturally occurring amino acid
SPTSXAAPDQIDRFVQIVDEPTHGERLWEXTVPGFGLTGTMLACYLVKERGLAAGHXXXEIRRLRPGSIETYEQEKAVFQFYQR

SEQ ID NO: 937234 - protein, 88 aa, Homo sapiens
IHTRLFFFLFLSWMYWLLPTWPDPVKRVACHGCELRRAGDADQAVMENDVSWTQGVSTCTLKLHSETVVHAAANCEPLNVITQLPSIS

SEQ ID NO: 937235 - protein, 57 aa, Homo sapiens
  misc_feature (1)..(1): Xaa can be any naturally occurring amino acid
  misc_feature (13)..(13): Xaa can be any naturally occurring amino acid
  misc_feature (34)..(34): Xaa can be any naturally occurring amino acid
XQGTGLPMASWLXPSGLIAALPGHTPWRSLRRDXEASEACTVASASGVPLLGGPLRP

SEQ ID NO: 937236 - protein, 49 aa, Homo sapiens
  misc_feature (3)..(3): Xaa can be any naturally occurring amino acid
  misc_feature (6)..(6): Xaa can be any naturally occurring amino acid
  misc_feature (20)..(20): Xaa can be any naturally occurring amino acid
PKXPGXGGACAGIPGVGPFXGPQPGVPLGYPIKAPKLPGGYGLPYTTGK

SEQ ID NO: 937237 - protein, 69 aa, Homo sapiens
  misc_feature (29)..(29): Xaa can be any naturally occurring amino acid
  misc_feature (45)..(45): Xaa can be any naturally occurring amino acid
  misc_feature (65)..(65): Xaa can be any naturally occurring amino acid
EVLKSCVSNKFSGDAHAAGLQDNNSEDFXFQESLMKYQNLKNQPXKEDVTEEVLSPENCPFGAAXEHPV

SEQ ID NO: 937238 - protein, 102 aa, Homo sapiens
  misc_feature (5)..(5): Xaa can be any naturally occurring amino acid
  misc_feature (23)..(23): Xaa can be any naturally occurring amino acid
  misc_feature (42)..(42): Xaa can be any naturally occurring amino acid
  misc_feature (69)..(69): Xaa can be any naturally occurring amino acid
RFYEXKRKLASMAGEPLSRQPDXLGGVGQARAVAQESARLPXLASPLLSRVYIASGIEAADVFAGILNXLGNNSFRLELQALGEELVDIAVGLMGDEHLDVV

SEQ ID NO: 937239 - protein, 51 aa, Homo sapiens
  misc_feature (7)..(7): Xaa can be any naturally occurring amino acid
  misc_feature (44)..(44): Xaa can be any naturally occurring amino acid
  misc_feature (47)..(47): Xaa can be any naturally occurring amino acid
  misc_feature (50)..(50): Xaa can be any naturally occurring amino acid
VLGVHGXTWYVFLAQLGQSRGSLSRMTQLQALHPDPGFQGPWRXLHXRFXL

SEQ ID NO: 937240 - protein, 115 aa, Homo sapiens
  misc_feature (91)..(91): Xaa can be any naturally occurring amino acid
  misc_feature (106)..(106): Xaa can be any naturally occurring amino acid
  misc_feature (108)..(108): Xaa can be any naturally occurring amino acid
FVVVVTDRVRFRLPGWSAVAPSRLTATCGLLDSSGSPASAFRVAGMTGTHQYAWVIFVFLSTYRISPCWPGWFQTPGLRWSACLSLPRCWXYRCEPLGPACTFYQXQXQQQAEGF

SEQ ID NO: 937241 - protein, 74 aa, Homo sapiens
  misc_feature (4)..(4): Xaa can be any naturally occurring amino acid
  misc_feature (32)..(32): Xaa can be any naturally occurring amino acid
  misc_feature (34)..(34): Xaa can be any naturally occurring amino acid
  misc_feature (67)..(67): Xaa can be any naturally occurring amino acid
GRSXTLSPGLESSDAISVRFTATSASRIQAIXPXQPPEYAGNTGARHYARLIFVSLVDTGFHYVGQXGLELLTS

SEQ ID NO: 937242 - protein, 37 aa, Homo sapiens
NCGGPQRDNLEAEAVAPCTLAARTEKKKYIGGFRSPS

SEQ ID NO: 937243 - protein, 54 aa, Homo sapiens
  misc_feature (5)..(5): Xaa can be any naturally occurring amino acid
  misc_feature (7)..(7): Xaa can be any naturally occurring amino acid
  misc_feature (23)..(23): Xaa can be any naturally occurring amino acid
  misc_feature (26)..(26): Xaa can be any naturally occurring amino acid
MGIIXWXVLDRPLLSQATREAEXGEXAVNPGGGGCSEPRSRHCTPALGDTVRLY

SEQ ID NO: 937244 - protein, 114 aa, Homo sapiens
  misc_feature (58)..(58): Xaa can be any naturally occurring amino acid
  misc_feature (65)..(65): Xaa can be any naturally occurring amino acid
  misc_feature (84)..(84): Xaa can be any naturally occurring amino acid
  misc_feature (110)..(110): Xaa can be any naturally occurring amino acid
ALRESHDQVADVVDRAALIFLGANEHVDLAVAEAVARRHRTLDLVDDLVGHLLRGQAXAGGAILXETDLDFRITALDGRLHVGXNRRSVHQARQLLAGLFERREIVAAQXDLER

SEQ ID NO: 937245 - protein, 125 aa, Homo sapiens
  misc_feature (54)..(54): Xaa can be any naturally occurring amino acid
  misc_feature (63)..(63): Xaa can be any naturally occurring amino acid
  misc_feature (72)..(72): Xaa can be any naturally occurring amino acid
  misc_feature (103)..(103): Xaa can be any naturally occurring amino acid
  misc_feature (120)..(120): Xaa can be any naturally occurring amino acid
QAKERFGAVSFPESAAVTRSPATRRSRSAEGGIGALRDGEALLRTPASVGRGDXGAKAMGSAXVLTTAGAWXFLAFLLSRVNGGDDGADLFGTVDESEVEREXERQLTVFFWVMFVMKPXAFQLL

SEQ ID NO: 937246 - protein, 46 aa, Homo sapiens
  misc_feature (41)..(41): Xaa can be any naturally occurring amino acid
RSSAGLDKVIVLWTANTERFCEVIPGLNDTAENLLRTIGAXSGGFA

SEQ ID NO: 937247 - protein, 108 aa, Homo sapiens
  misc_feature (12)..(12): Xaa can be any naturally occurring amino acid
  misc_feature (42)..(42): Xaa can be any naturally occurring amino acid
  misc_feature (61)..(61): Xaa can be any naturally occurring amino acid
  misc_feature (70)..(70): Xaa can be any naturally occurring amino acid
  misc_feature (75)..(75): Xaa can be any naturally occurring amino acid
  misc_feature (87)..(87): Xaa can be any naturally occurring amino acid
PVESFTVSPRLXFSGAISAHCKLCLLGSSDSRASASRIAGIXGMHHHTWLIFVFLIEMGFXILARLISNXWPQVXYLPPSASQSLGXQTSHRTRPSFLPFKVRDVGLY

SEQ ID NO: 937248 - protein, 88 aa, Homo sapiens
  misc_feature (59)..(59): Xaa can be any naturally occurring amino acid
ATAAIVGKNGQGEPCPGSVARTLLGEAQPVTAALRSWRAGEDHPDQGGGPWSLINGYIXEDQVWERRTLSLWPHSSAEPPRVPPGAGG

SEQ ID NO: 937249 - protein, 37 aa, Homo sapiens
MTYIPHQQSNPPRLTSYNAMHAISGRGMIDRLKRTHS

SEQ ID NO: 937250 - protein, 38 aa, Homo sapiens
  misc_feature (20)..(20): Xaa can be any naturally occurring amino acid
  misc_feature (26)..(26): Xaa can be any naturally occurring amino acid
GTSGTSQDTLSRYAGRLPQXTTAISXIRGGHQENSAPH

SEQ ID NO: 937251 - protein, 43 aa, Homo sapiens
PPLSSLTTHTPFTSFARSQWISRRVVSECHRVDEWKLCGGEMV

SEQ ID NO: 937252 - protein, 39 aa, Homo sapiens
  misc_feature (5)..(5): Xaa can be any naturally occurring amino acid
LRLAXKFGDYGSIDYGRTTCSIHIGAWTDVCQNSLLLPW

SEQ ID NO: 937253 - protein, 56 aa, Homo sapiens
  misc_feature (31)..(31): Xaa can be any naturally occurring amino acid
  misc_feature (46)..(46): Xaa can be any naturally occurring amino acid
DEEQKPQQRPDLAVDVLERTADKATVNGLPXKDRETDNSALAAGSXQEVTYAQLDH

SEQ ID NO: 937254 - protein, 46 aa, Homo sapiens
  misc_feature (13)..(13): Xaa can be any naturally occurring amino acid
  misc_feature (23)..(23): Xaa can be any naturally occurring amino acid
  misc_feature (37)..(37): Xaa can be any naturally occurring amino acid
  misc_feature (42)..(42): Xaa can be any naturally occurring amino acid
DKSSGKHYGQFTXEGCKSFFKRXVRRNLTYTCRANRXCPIDXHHRN

SEQ ID NO: 937255 - protein, 38 aa, Homo sapiens
  misc_feature (4)..(4): Xaa can be any naturally occurring amino acid
  misc_feature (11)..(11): Xaa can be any naturally occurring amino acid
  misc_feature (23)..(23): Xaa can be any naturally occurring amino acid
MAFXPPYSSSXFRKRDNASGASXVAIDNKIEQAMDLVK

SEQ ID NO: 937256 - protein, 135 aa, Homo sapiens
IPGGGFTKHASVFWGKLFHDMGRWHLSVSSTLWCWNLSTRMGEASQELGNVSFALFVGKQKSCVRLAFYEGIQFSNHEKAVQFSAHWAIRVNETWLWSLVSSHQILFAHLFIVHFTSISDTLSLCQVYALKVITA

SEQ ID NO: 937257 - protein, 102 aa, Homo sapiens
  misc_feature (54)..(54): Xaa can be any naturally occurring amino acid
FLNIHRNQTATSAEHFTGKKNSPHEGKLIWWKDNKNKTWEIGKVITWGRGFACXSPGENQLPVWIPTRHLKFYNEPIRDANENASAETENPQSSIIDFCRVN

SEQ ID NO: 937258 - protein, 31 aa, Homo sapiens
NAMEDQSPRPGHPRWLYLCQEDDEGSSSHNL

SEQ ID NO: 937259 - protein, 112 aa, Homo sapiens
  misc_feature (20)..(20): Xaa can be any naturally occurring amino acid
  misc_feature (37)..(37): Xaa can be any naturally occurring amino acid
  misc_feature (54)..(54): Xaa can be any naturally occurring amino acid
  misc_feature (100)..(100): Xaa can be any naturally occurring amino acid
LLKDLATQHLKCWLNLHPKXETYNQRPCSHHSQGAHXHQLPRSLHLPHPKSPHXPPSSLHPPPPRSLHPPPPSLHPPLPRSLHPPLPRSLHPPPPSLHPXTPKEPAPTEPYA

SEQ ID NO: 937260 - protein, 34 aa, Homo sapiens
  misc_feature (20)..(20): Xaa can be any naturally occurring amino acid
RDELTEIFKKIRRKREFRAXARAVISLMEMGFDE

SEQ ID NO: 937261 - protein, 87 aa, Homo sapiens
  misc_feature (13)..(13): Xaa can be any naturally occurring amino acid
  misc_feature (49)..(49): Xaa can be any naturally occurring amino acid
TPQHQQQLFLKQXQQQQQPPPAQQQPAGQFYQQQQAQSLSKYSRHYSPXDEPSPEAQPIAAYKIVSQTNKQSIAGSVSITSLFLQGL

SEQ ID NO: 937262 - protein, 59 aa, Homo sapiens
  misc_feature (13)..(13): Xaa can be any naturally occurring amino acid
  misc_feature (40)..(40): Xaa can be any naturally occurring amino acid
VFVKVQRSKASEXKVEPGTEESRGPCHRVWLVLRAKHRLXGAISSPGQAQAAFCSCQRI

SEQ ID NO: 937263 - protein, 50 aa, Homo sapiens
  misc_feature (11)..(11): Xaa can be any naturally occurring amino acid
  misc_feature (15)..(15): Xaa can be any naturally occurring amino acid
  misc_feature (33)..(33): Xaa can be any naturally occurring amino acid
EALKKANITFXYMFXEVPIVIKISHLINVLMWXLEKKSAVAAKHDLLSLA

SEQ ID NO: 937264 - protein, 87 aa, Homo sapiens
  misc_feature (3)..(3): Xaa can be any naturally occurring amino acid
  misc_feature (5)..(5): Xaa can be any naturally occurring amino acid
  misc_feature (11)..(11): Xaa can be any naturally occurring amino acid
  misc_feature (18)..(18): Xaa can be any naturally occurring amino acid
  misc_feature (25)..(25): Xaa can be any naturally occurring amino acid
NSXTXRRGHTXPFNRSHXGANSEDXLVRTEPSRPQQCCVGDQVSDGELGDTSTPQHVPIVFLVAGVFEDGACMRFPAFFVEEVTCGY

SEQ ID NO: 937265 - protein, 41 aa, Homo sapiens
  misc_feature (13)..(13): Xaa can be any naturally occurring amino acid
NEANTGQVCMLAXRGPRFRFTTPDPCFPSFRGPPEAGLTRR

SEQ ID NO: 937266 - protein, 39 aa, Homo sapiens
ALGLRHLVVVDNRNQVVGLVTWKSSYFGYIRLNKISRLG

SEQ ID NO: 937267 - protein, 50 aa, Homo sapiens
SGPPRSGRLRAPPRGRILGGREAEAQRRPYMASVQHVLLPVLDRATCNRR

SEQ ID NO: 937268 - protein, 50 aa, Homo sapiens
  misc_feature (14)..(14): Xaa can be any naturally occurring amino acid
  misc_feature (26)..(26): Xaa can be any naturally occurring amino acid
  misc_feature (28)..(28): Xaa can be any naturally occurring amino acid
  misc_feature (46)..(46): Xaa can be any naturally occurring amino acid
LCRRLSETRTRGSXLNIIIVAEGAIXKXGKPITSEDIKNLVVKRLXYDTR

SEQ ID NO: 937269 - protein, 77 aa, Homo sapiens
MIVATLSNVNRPEDSPSNHLLDRLYPIVDILDDMTLTCHTKVLIALFTYHVDLPIPADNLNLRTSPKLPHYSSLDTR

SEQ ID NO: 937270 - protein, 72 aa, Homo sapiens
ARVQTSTSLWPVRNRAAQDEVREHDCPSSTHFQISLGIRFPEEREPYCELRTWIWIALCFCEVGWQSLKTPA

SEQ ID NO: 937271 - protein, 51 aa, Homo sapiens
  misc_feature (25)..(25): Xaa can be any naturally occurring amino acid
  misc_feature (36)..(36): Xaa can be any naturally occurring amino acid
  misc_feature (42)..(42): Xaa can be any naturally occurring amino acid
GTGSRETMENLGLAQNCTISIQDYXVFRCEDSLVEXKIKGVXELRKSLLSA

SEQ ID NO: 937272 - protein, 45 aa, Homo sapiens
  misc_feature (10)..(10): Xaa can be any naturally occurring amino acid
  misc_feature (23)..(23): Xaa can be any naturally occurring amino acid
  misc_feature (38)..(38): Xaa can be any naturally occurring amino acid
  misc_feature (41)..(41): Xaa can be any naturally occurring amino acid
VSSGRGSIAXHPSLRYNRMWTLXQKQLAAWCSLVLSFXRLXKQSS

SEQ ID NO: 937273 - protein, 55 aa, Homo sapiens
LLLIARKKLLHNSEDEQRLKSEIEEEELKDENPHHYQCPVLTLPRAMLMIVKQRL

SEQ ID NO: 937274 - protein, 97 aa, Homo sapiens
  misc_feature (14)..(14): Xaa can be any naturally occurring amino acid
PESCVHQLLLNTSXKLCFYLRGPTSLGNLNTWNKNLLDGPFGIMNWTNCRFQDYRASNASMNNLTQLLCSGNEVTDGQPRQPLRRLRPPLWSIPEAD

SEQ ID NO: 937275 - protein, 56 aa, Homo sapiens
MNLFPHRQPNCYYGNRGRPDSSHRGITSNPRNKDRTRDEERRGPVPVSLRRRLRST

SEQ ID NO: 937276 - protein, 310 aa, Homo sapiens
VLYLVVLLSLLFLLFSVACRAFSGLVCVGVFCLFCCSVVCRVRWFLFVSVVFFALSGVGSCVVSVLSPLCVSASLLFFFFLRVLFFVFSPFLFSLSSLVFFLFSVYFRFFLVCVVVLLVVSLLHVCCPLVVVSSHMCHVLMALLLVFVIILCCISLGVDLAVAFCLSLLSVVSLLLVFRCSFLALSRSVLSIFYAMLVVCVIAILCLLDLVCVCYNSFYRPWSVSSVSELSDHLWVSSSWVLVIPRLPLNALFACIVYLLVTSQPWLSCSQLRGQLHKGTMVSWVITLWSQSSVLSPSSFSHLSPPAKVH

SEQ ID NO: 937277 - protein, 48 aa, Homo sapiens
  misc_feature (15)..(16): Xaa can be any naturally occurring amino acid
SDADLDMSFDYRPSXXHYTHRASLVRNPLDAEPTMSTPLAKAFPDSLH

SEQ ID NO: 937278 - protein, 76 aa, Homo sapiens
  misc_feature (22)..(22): Xaa can be any naturally occurring amino acid
FSLQSRNTLAYSGDWKCLEALXGDKGLAGIMDEATLSGPAPRCSTFLSRSLSSIPSPCDFSRKISRIVFKPQGQAE

SEQ ID NO: 937279 - protein, 36 aa, Homo sapiens
IRAESGKGENQLRIGEDSREALLSFWGELGEEAANE

SEQ ID NO: 937280 - protein, 99 aa, Homo sapiens
  misc_feature (32)..(32): Xaa can be any naturally occurring amino acid
  misc_feature (46)..(46): Xaa can be any naturally occurring amino acid
  misc_feature (81)..(81): Xaa can be any naturally occurring amino acid
SPHVCVQQLATALILLEALKIANYAQLTLYIXPNFQNLFFSSYLTXILSAPGSFSYTHSLLSPTITVVPGPDFNLASHIIXDTTTDPHDCISLIHLIFN

SEQ ID NO: 937281 - protein, 81 aa, Homo sapiens
FFFEKTITFRSLGNATEVSANRIGFYLHASIPAKGVHLDRALQGEFVYQPNLGGSIVLTGEGMHELAGLDSMVIAALMHES

SEQ ID NO: 937282 - protein, 129 aa, Homo sapiens
  misc_feature (109)..(109): Xaa can be any naturally occurring amino acid
TESTLDTQPSPASSVSPARYPATSSVTLVDVSALRPNTTPQPSNSSMTTRGFNYPWTSSGTDTKKSVSRIPSETYSSSPSGAGSTLHDNVFTSTARAFSEVPTTANGSXENLIHVHITGIVVNKAKGGI

SEQ ID NO: 937283 - protein, 55 aa, Homo sapiens
  misc_feature (10)..(10): Xaa can be any naturally occurring amino acid
  misc_feature (24)..(24): Xaa can be any naturally occurring amino acid
  misc_feature (40)..(40): Xaa can be any naturally occurring amino acid
AAVKLESENXEYERARRLLAKALXSAPTARVFMKSVKLEXVQDNIRAAQDLCEEA

SEQ ID NO: 937284 - protein, 44 aa, Homo sapiens
  misc_feature (3)..(3): Xaa can be any naturally occurring amino acid
  misc_feature (25)..(25): Xaa can be any naturally occurring amino acid
HIXSQLHDELLVLQIMLAGFNQSQXWLESLEHSHVVEEDLWTGK

SEQ ID NO: 937285 - protein, 31 aa, Homo sapiens
PDQEQDAITRNEKAGDIALLYIQAIERTILR

SEQ ID NO: 937286 - protein, 105 aa, Homo sapiens
RQGLTLSPRLERSGGITAHCSLNFPGSSSPPILASLVAGSTGVHHHAWLIFLFFVEDEVLPLLPRLVSQGDPPILASQSAAIIGMSHHAQPTMDINSSLVILISL

SEQ ID NO: 937287 - protein, 53 aa, Homo sapiens
  misc_feature (22)..(22): Xaa can be any naturally occurring amino acid
  misc_feature (46)..(46): Xaa can be any naturally occurring amino acid
SNQTSIQDEQPSNSFQGQAAQXGVWNDDSMLGPSQNFKAESIQDNXHMAEGTG

SEQ ID NO: 937288 - protein, 30 aa, Homo sapiens
MLGDVLLIVLVDIFGVTVTLIAEAVTFLTL

SEQ ID NO: 937289 - protein, 32 aa, Homo sapiens
  misc_feature (6)..(6): Xaa can be any naturally occurring amino acid
  misc_feature (11)..(11): Xaa can be any naturally occurring amino acid
RTIWEXPCIKXQLKIDWQAQAQRQVISAEAEA

SEQ ID NO: 937290 - protein, 49 aa, Homo sapiens
  misc_feature (5)..(5): Xaa can be any naturally occurring amino acid
  misc_feature (43)..(43): Xaa can be any naturally occurring amino acid
ASVRXDRITPGRPCTLVLVRQETAPWWVLSESVAAANSADIDXLQESSP

SEQ ID NO: 937291 - protein, 36 aa, Homo sapiens
  misc_feature (8)..(8): Xaa can be any naturally occurring amino acid
  misc_feature (34)..(34): Xaa can be any naturally occurring amino acid
MFRDQTLXAVNPSSLCFGMEAAWFPRAQATPYHXCH

SEQ ID NO: 937292 - protein, 94 aa, Homo sapiens
GFLIMVYTPPHWVSVLEARVRGGGGWFTQISTRGRQCTIGKEEYRLFRSLSEDELAQIAIEQSSEDKKKGPTTTDANPSFIFQPDNPPNSYPRS

SEQ ID NO: 937293 - protein, 55 aa, Homo sapiens
  misc_feature (55)..(55): Xaa can be any naturally occurring amino acid
EVVDGCVQYTLRVYGDAAKGAPGEGPVEAGGPGTEWLRFGYARDGARDRPGDRGX

SEQ ID NO: 937294 - protein, 80 aa, Homo sapiens
  misc_feature (31)..(31): Xaa can be any naturally occurring amino acid
  misc_feature (36)..(36): Xaa can be any naturally occurring amino acid
MIPKKVKTYSKKLCPREMSFASPISPALVSXKRNQXVYFNSFPELEFIYHKIHPFKVYLVFFSIHGIVKPPQSILEHFYH

SEQ ID NO: 937295 - protein, 72 aa, Homo sapiens
GLILGLRLRGQRNCDQFLYNQYAGHEDKKALSSQYQIIQRDDKTIFMQNVQPLNQTFINIQWLTLGDFQNKV

SEQ ID NO: 937296 - protein, 135 aa, Homo sapiens
WLSEAEACVSRALGLVSGQEAGPDRVAGLQMTLAELRDFLGQMNNLPCAMHQIGDVKGILEQVEAYQTEAREALVSQPSSPGLLQSLLERGQQLGVGGDLKPSSSKGRLEQAPVAAEVKRTLGPSAQGVPLAING

SEQ ID NO: 937297 - protein, 81 aa, Homo sapiens
SNCTVMKNTMTVGTDWDYRPCFLLRCQQLYPPMIWTINTNGHRRDMGQNASDIVYGDGQDLLEILTRPRTSPSGSPASHID

SEQ ID NO: 937298 - protein, 74 aa, Homo sapiens
PTQHMYQIVPGKTTKHSYIVAEIKFYYQIRIEENQGLHSNLEDIPVVGVDEHDDLDERLLHSHADCVHSHGSLL

SEQ ID NO: 937299 - protein, 96 aa, Homo sapiens
KDTQDHVDSPPPPVDNARPVFPCYQGQDVTVSGYTCCVHSMVLLDALFRVRRVVLAQGVTGRNWSQVLAVSAPLSDSLGRCVDVTRRGTLVREVSP

SEQ ID NO: 937300 - protein, 81 aa, Homo sapiens
  misc_feature (13)..(13): Xaa can be any naturally occurring amino acid
MADGTILLTTTSXGPSWPGGTSEESREADLTGACFGVPIPVLLLNEVFFFPLLGLIPKLSIKLGRLPFRLIPPKRLANLTI

SEQ ID NO: 937301 - protein, 70 aa, Homo sapiens
  misc_feature (11)..(11): Xaa can be any naturally occurring amino acid
  misc_feature (20)..(20): Xaa can be any naturally occurring amino acid
  misc_feature (28)..(28): Xaa can be any naturally occurring amino acid
  misc_feature (30)..(30): Xaa can be any naturally occurring amino acid
MVIDVLHPGKXTVPKAEIRXKLAKMYKXTXDVIFVFGFRTHFGGGKATGFGMIYDSLGYAKKNDPKHRLA

SEQ ID NO: 937302 - protein, 50 aa, Homo sapiens
  misc_feature (11)..(11): Xaa can be any naturally occurring amino acid
  misc_feature (45)..(45): Xaa can be any naturally occurring amino acid
KDYLLNMENQXKFLSTKAKVSDLLSLNLELWLKLPKPNLDDTPMXGRQLR

SEQ ID NO: 937303 - protein, 71 aa, Homo sapiens
  misc_feature (11)..(11): Xaa can be any naturally occurring amino acid
  misc_feature (33)..(33): Xaa can be any naturally occurring amino acid
  misc_feature (57)..(57): Xaa can be any naturally occurring amino acid
MILAHCNLHLXGSSDSCVSVSRVAGTTDMHHHXQLTLPFLVEAGLRHVGQAGLKLLXCRIRQEFMDTSRVQ

SEQ ID NO: 937304 - protein, 30 aa, Homo sapiens
  misc_feature (22)..(22): Xaa can be any naturally occurring amino acid
KASSKPATSGPSSAVVPNTSSXKKNITSKT

SEQ ID NO: 937305 - protein, 126 aa, Homo sapiens
PRQPKHLTRSRLVSSQHQIPGGHFIQANITESSQQEIQHIVTRHGPAADRHLLRCLFSACGFQRRWYTQRQRFPSDSASDPASVPLLIYKAKLSISTAVPTAIDYSHCNYPAEFYSPAPPTLFCPR

SEQ ID NO: 937306 - protein, 44 aa, Homo sapiens
  misc_feature (4)..(4): Xaa can be any naturally occurring amino acid
  misc_feature (36)..(36): Xaa can be any naturally occurring amino acid
  misc_feature (42)..(42): Xaa can be any naturally occurring amino acid
LWSXVNRYGQNGDFTRALKTVNKILQINKDDVTALXCKVVCXIQ

SEQ ID NO: 937307 - protein, 86 aa, Homo sapiens
VSTKRLNTQRSMCFQATRSSGAMITMHRGIETGYEWYTRASLQSLGRVEVTVRVDSMMSHSGLLPAARRSGRSLSLMLTLDQRIGF

SEQ ID NO: 937308 - protein, 109 aa, Homo sapiens
FIWVNGLSKAVSSHSMHRPGFGSHFEYGTLYCPSHLHNITPPPQPFRWPHSWTGWGGLASLLKRDVKAVEVGWNNLCLQSPLVGENRLRLPSSQLFVSRRGPTLVGFLV

SEQ ID NO: 937309 - protein, 52 aa, Homo sapiens
  misc_feature (1)..(1): Xaa can be any naturally occurring amino acid
XWDTMVSNEDELNLLVIVVNANPIWWGKQALKESKFTLSKCIDAVMVLGNCI

SEQ ID NO: 937310 - protein, 132 aa, Homo sapiens
RCAQTPGISQNIKRKQQDTPGCPDHRDASSIGSVGLGGFCTDSESSASLDPCLVSPEVTEPRKDPQGDRGAEGSLVPDHHPSQEERNPPSSIPFVELSPEVLVGKVQQRYLKIGPQDQVFPVGEPAPFSPGE

SEQ ID NO: 937311 - protein, 86 aa, Homo sapiens
QASSHDVLSTETYQALAAFRLEHRTPILRVLATVFTVSLPHEWTPPLKSLRRRHGDRSVFPPQAYTAAKERDDPGFYVTFAPLFGR

SEQ ID NO: 937312 - protein, 106 aa, Homo sapiens
  misc_feature (7)..(7): Xaa can be any naturally occurring amino acid
  misc_feature (24)..(24): Xaa can be any naturally occurring amino acid
  misc_feature (62)..(62): Xaa can be any naturally occurring amino acid
  misc_feature (78)..(78): Xaa can be any naturally occurring amino acid
KSHLACXQDVEKENIGLRNVFLNXMKLDSHCREMERGASPRPRNKVGHSRFSHLFLRVFRDXNPHSKYHHFRKSAIYXNTATIPCHSRQRCSRFMFCSNDFFNPWE

SEQ ID NO: 937313 - protein, 81 aa, Homo sapiens
  misc_feature (9)..(9): Xaa can be any naturally occurring amino acid
  misc_feature (20)..(20): Xaa can be any naturally occurring amino acid
  misc_feature (30)..(30): Xaa can be any naturally occurring amino acid
  misc_feature (63)..(63): Xaa can be any naturally occurring amino acid
  misc_feature (73)..(73): Xaa can be any naturally occurring amino acid
  misc_feature (75)..(75): Xaa can be any naturally occurring amino acid
SESKIQGAXTFDENQAQNFXPATLDEAQEXEGQVEAVMDAALRPKRSLWRKMVMGGLALFGAXLSGRVYSGTXNXWANPGL

SEQ ID NO: 937314 - protein, 69 aa, Homo sapiens
ETRSLADTGGGEESAELIRNAEMRFSLVTLLSEEAPPRLGRSINNGSPTILGKRIRAAQRGRRLMKSAS

SEQ ID NO: 937315 - protein, 59 aa, Homo sapiens
HLTKKATRPEELLDQLAGSNDFASNQASMVLIRFSNFLSVKPLVKGFPYSISSLINFSV

SEQ ID NO: 937316 - protein, 86 aa, Homo sapiens
  misc_feature (24)..(24): Xaa can be any naturally occurring amino acid
  misc_feature (37)..(37): Xaa can be any naturally occurring amino acid
  misc_feature (39)..(39): Xaa can be any naturally occurring amino acid
  misc_feature (45)..(45): Xaa can be any naturally occurring amino acid
  misc_feature (66)..(66): Xaa can be any naturally occurring amino acid
  misc_feature (75)..(75): Xaa can be any naturally occurring amino acid
SERRNPPSYAMAGKKVLIVYAHQXPKSFNGSLKNVAXDXLSRQGXTVTVSDLYAMNFEPRATDKDXTGTLSIPEXFNYGVETHEAY

SEQ ID NO: 937317 - protein, 69 aa, Homo sapiens
GSPTPSKVRLDSWVPAPVKRRRMNWIDAPEYVFYMATEETRIDCKLLSSSETQGVLPPGEDFPLSRTLA

SEQ ID NO: 937318 - protein, 85 aa, Homo sapiens
QQEDHLERFRGQEVNFKTIIKKFLTREVERARLGITIVGPASGSGEAPGPTKGGTCVQDACEIYPQLSLQGSQLLMWYHCISVAH

SEQ ID NO: 937319 - protein, 51 aa, Homo sapiens
MDPASWPNSRSAPWLLTLHCGKSEASGPHPQRSNPAICPCSLLRCPHLRGL

SEQ ID NO: 937320 - protein, 62 aa, Homo sapiens
  misc_feature (6)..(6): Xaa can be any naturally occurring amino acid
  misc_feature (10)..(10): Xaa can be any naturally occurring amino acid
  misc_feature (42)..(42): Xaa can be any naturally occurring amino acid
  misc_feature (60)..(60): Xaa can be any naturally occurring amino acid
SPGARXPYSXPRPFPLVSSVHPGCTAVMAREAPALWPVSSNXGSEGIAREEHLNPMGLDXLG

SEQ ID NO: 937321 - protein, 490 aa, Homo sapiens
  misc_feature (275)..(275): Xaa can be any naturally occurring amino acid
  misc_feature (277)..(277): Xaa can be any naturally occurring amino acid
PTFVSLFCACTSRSDCRRTLHSIRFLALCFVVLFLPPRPSCFSCVVAASVVLPLVSSLWGVLLIVKVRSLPTIIVCGDGICVAPHHPREGVRARLHIYDIPPLFVDPHLCGAVTTLLWGVVVTQTLSWVTVSPAPPLTWGGRTFAWTPFFVVCSPGGCSSLRSPLPFIWCSPPSDIPPGGGANTTFAASPYVQTPRLVSGEFEYFGELLDSGSSPRGCCSAVVVFVVTSGLSPLTVSVLPRGMDSPRPRRAIVFEMPFLRGKPPPQPCLVFGTPXSXGLSFYLLGRVAMLGAPCASPLSASPRAPFFCSSFAGPPLWRNTSVAGPLFSSGLESAPICDYIREETLGGSRAPHTLSVLCSLSSLAVCALVATPLAPLSPQPRHRPPRPLHALEVSPTLSRPYTPRHRGDNAASPLAETHCGEEKKERHRRRRIHLFLRGNCPQRRVCLVFIRLSPRLHFFGWEHRQTDRGPTPRRPPGRRRGLFAREGPAL

SEQ ID NO: 937322 - protein, 36 aa, Homo sapiens
  misc_feature (7)..(7): Xaa can be any naturally occurring amino acid
  misc_feature (22)..(22): Xaa can be any naturally occurring amino acid
WGWSGNXGDPPPQPWTRDSASXPRKPSVPWQRQMDQ

SEQ ID NO: 937323 - protein, 59 aa, Homo sapiens
  misc_feature (5)..(5): Xaa can be any naturally occurring amino acid
  misc_feature (35)..(35): Xaa can be any naturally occurring amino acid
PDPPXQLAVWAALGQSFGPLLCIAGAGNFPSPSGXAAFAQRTSMTLMGLFVQDKVIFCL

SEQ ID NO: 937324 - protein, 76 aa, Homo sapiens
  misc_feature (23)..(23): Xaa can be any naturally occurring amino acid
  misc_feature (37)..(37): Xaa can be any naturally occurring amino acid
  misc_feature (58)..(58): Xaa can be any naturally occurring amino acid
KTCDRFPKFLIVGPQKTGTTAIXFFLSLHPAVTSSFXSPSTFKEIHFFNSPNYHKGIXWYMDFFPVPSNASTDFLF

SEQ ID NO: 937325 - protein, 73 aa, Homo sapiens
LYRAKVAYCLASQIVLHADTIRFPYHGSTLMGPATPERKHSDSHYTVTFSTSPAPQLTYVADEMYEFLAVRPV

SEQ ID NO: 937326 - protein, 94 aa, Homo sapiens
  misc_feature (3)..(3): Xaa can be any naturally occurring amino acid
  misc_feature (28)..(28): Xaa can be any naturally occurring amino acid
  misc_feature (30)..(30): Xaa can be any naturally occurring amino acid
  misc_feature (72)..(72): Xaa can be any naturally occurring amino acid
EWXTDGDGALSEAEAQALLSGDTQTDAXSXYDRFWAAIRDKYRSEALPTDLPTPSAPDLTEPKEEQPPVPSXPTEEEEEEEEEEEEVEEEEEEG

SEQ ID NO: 937327 - protein, 119 aa, Homo sapiens
MTRMLSVATVFNIVLEVLARAIRQEKEIKGLHIGKEEVKLSLFADDMILYVEKPERLHKKMIRADKFSTVAVYEINIQKSVAFLCANSKQYEKNEKTNPIYSSHTWKFKYLGKLTKEGY

SEQ ID NO: 937328 - protein, 45 aa, Homo sapiens
  misc_feature (20)..(21): Xaa can be any naturally occurring amino acid
AVFGAIISYFEQFFETFGIXXANQQYVSGDGSEASLHGVVDELVR

SEQ ID NO: 937329 - protein, 173 aa, Homo sapiens
LCGNLPPSLIRSSPLGGAFVSFPQLFLLRRQVQDPGSPAAPEVSACRFSSPPPSRSLAAPFAPLRAPVLFGPTPGASLYFRSSRGSFSTLCGFSLDRLRSWVLVFFVTSAPELLSALLCLLTLASMRAHVVFVLAPPPPRRLFSCFACVRQQRRRRPSPLFFFPDACSPYSQK

SEQ ID NO: 937330 - protein, 306 aa, Homo sapiens
LLCASGGPESGTWPCATLRRQLCWAGGGLLSHPRPCQQPCPPAPAPSRPRSLGSLGQRVPAALATAAQELPATLGGDGGKPALTAGEAALPGLHRLESLLLLRGADRVLQAHIEYIESYTSCMVVQAFQKAAKRRSEYWRGQRKALRQLLSGVSSEGSVGASLGQALHQPLAHHVQQYVLLLLSLGDTIGEHHPTRELVVNAVTLFGNLQSFMKQELDQAVATQALWHTLRGRLRDVLCTPAHRLLQDSQDVPVTVAPLRAERVLLFDDALVLLQGHNVHTFDLKLVWVDLGRTGARSPLTPEKSL

SEQ ID NO: 937331 - protein, 61 aa, Homo sapiens
  misc_feature (17)..(17): Xaa can be any naturally occurring amino acid
  misc_feature (57)..(57): Xaa can be any naturally occurring amino acid
KDCQGIIEDVILLGAPXEGEAKHWEPFRKVVSGRIINGYCRGDWLLSFVYRTSSVQXHVAG

SEQ ID NO: 937332 - protein, 109 aa, Homo sapiens
  misc_feature (10)..(10): Xaa can be any naturally occurring amino acid
  misc_feature (40)..(40): Xaa can be any naturally occurring amino acid
  misc_feature (46)..(46): Xaa can be any naturally occurring amino acid
  misc_feature (57)..(57): Xaa can be any naturally occurring amino acid
  misc_feature (92)..(92): Xaa can be any naturally occurring amino acid
  misc_feature (102)..(102): Xaa can be any naturally occurring amino acid
ARALDGASPXLCGVELPCGVEPAGAQKSRFEVLEPPPRFXKMYGNXWLPRQKFAARXGLSWRTSARAVQKGNLGSVPPHRVPTGALSSRPRXVDPLTACTVXLEKATDN

SEQ ID NO: 937333 - protein, 75 aa, Homo sapiens
  misc_feature (22)..(22): Xaa can be any naturally occurring amino acid
  misc_feature (66)..(66): Xaa can be any naturally occurring amino acid
GVKAAGFGNVYTPLLRPQAARXAAAGSLCRHAGAGVSLSLMVPSASHGQLTALSKGAASGLGSGWXRGGPGRRRL

SEQ ID NO: 937334 - protein, 117 aa, Homo sapiens
MLLQYVNDLLLGHPTAIGCAKGTDALLCHLEDCEYKVSKKKAQICRQQVRYLGFTIRQGERSLGSERKQVICNLPEPKTRRQVREFLGAVLRVLQVMDPKFAVLATLYSYRGDMTSM

SEQ ID NO: 937335 - protein, 66 aa, Homo sapiens
  misc_feature (4)..(4): Xaa can be any naturally occurring amino acid
  misc_feature (18)..(18): Xaa can be any naturally occurring amino acid
  misc_feature (45)..(45): Xaa can be any naturally occurring amino acid
LIYXLDSYAPRAEAEKTXIYPLDLLLKLHDERFLVAFGQRDGIQXGHAVLAINGMDVNGRYTADGK

SEQ ID NO: 937336 - protein, 64 aa, Homo sapiens
  misc_feature (21)..(21): Xaa can be any naturally occurring amino acid
  misc_feature (26)..(26): Xaa can be any naturally occurring amino acid
  misc_feature (38)..(38): Xaa can be any naturally occurring amino acid
QSLREVGNAILFCLLIEQALXQEEVXDLLHAAPFQNIXPRVYIKKGERLEVRMKRLEAKYAPVP

SEQ ID NO: 937337 - protein, 104 aa, Homo sapiens
SSHHDSWTSHYNSLPNQPTFQNPTPGPLLQDSQIYSPCSDILQFPTNHGTPKPLRAMHTAAEKDPVQCPQPLASVNMAKLRLRRVGSWPKVLKPETARAWGLKP

SEQ ID NO: 937338 - protein, 99 aa, Homo sapiens
  misc_feature (5)..(5): Xaa can be any naturally occurring amino acid
ERGMXLACGQDPELVRNICRWVRQAVQIPFFAKLTPNVTDIVSIARAAKEGGANGVTATNTVSGLMGLKSDGTPWPAVGIAKRTTYGGVSGDSNQTYCF

SEQ ID NO: 937339 - protein, 37 aa, Homo sapiens
  misc_feature (31)..(31): Xaa can be any naturally occurring amino acid
GERFPYPSFHWDPIRDPLRDPYQELDIHQRXPVGRDF

SEQ ID NO: 937340 - protein, 46 aa, Homo sapiens
  misc_feature (3)..(3): Xaa can be any naturally occurring amino acid
  misc_feature (27)..(27): Xaa can be any naturally occurring amino acid
  misc_feature (31)..(31): Xaa can be any naturally occurring amino acid
  misc_feature (39)..(39): Xaa can be any naturally occurring amino acid
EVXTVGNFFNEGLNQPTVDSCFDPYTXSHYXVGDEWERXFDSGFKL

SEQ ID NO: 937341 - protein, 71 aa, Homo sapiens
  misc_feature (17)..(17): Xaa can be any naturally occurring amino acid
  misc_feature (26)..(26): Xaa can be any naturally occurring amino acid
  misc_feature (28)..(28): Xaa can be any naturally occurring amino acid
  misc_feature (70)..(70): Xaa can be any naturally occurring amino acid
QESEVMSRAGGWKAGGXQRMDAKRDXQXLRTSQWSHSVSPAPRFSESDDCREDADGTTGQNGLHWSWGVXI

SEQ ID NO: 937342 - protein, 70 aa, Homo sapiens
  misc_feature (4)..(4): Xaa can be any naturally occurring amino acid
  misc_feature (7)..(7): Xaa can be any naturally occurring amino acid
  misc_feature (10)..(10): Xaa can be any naturally occurring amino acid
  misc_feature (62)..(62): Xaa can be any naturally occurring amino acid
LTLXWEXSSXPTIPIVGIIAGLVLFGAVITGAVVAAVNVEEEELRYKEVGRPPHPHVHHDPXPTLTCAPS

SEQ ID NO: 937343 - protein, 58 aa, Homo sapiens
  misc_feature (7)..(7): Xaa can be any naturally occurring amino acid
  misc_feature (19)..(20): Xaa can be any naturally occurring amino acid
CILRASXAEATENTASPEXXKNACCGQARWLTPVIPALWEAEAGGSPGQEIETILANT

SEQ ID NO: 937344 - protein, 102 aa, Homo sapiens
MLADELGHLEIGAVDQRSPTWGARCQPLFLEDPRIGGPLDQCEAEPVAIGDLEEERRAAALELPMGDDGNAVPKQVRLIHVVGGQKDLCGLAVYFRMKVPAC

SEQ ID NO: 937345 - protein, 117 aa, Homo sapiens
  misc_feature (12)..(12): Xaa can be any naturally occurring amino acid
  misc_feature (35)..(35): Xaa can be any naturally occurring amino acid
  misc_feature (39)..(39): Xaa can be any naturally occurring amino acid
  misc_feature (74)..(74): Xaa can be any naturally occurring amino acid
  misc_feature (95)..(95): Xaa can be any naturally occurring amino acid
GFHFCGGSLISXDWVVTAAHCGVRTSDVVVAGEFXQGSXEENIQVLKIAKVFKNPKFSILTVNNDITLLKLATXARFSQTVSAVCLPSADDDFPXGTLCATTGLGKTKYNGNKTPDK

SEQ ID NO: 937346 - protein, 87 aa, Homo sapiens
LPCSCYRIAALSVWKIKSSNSVTSSIDNYHLSKPVDLLGLVLGDIISIPKYVVPPCFMQQLITRRRIDQNQACFIDAQNNLCSGLRY

SEQ ID NO: 937347 - protein, 49 aa, Homo sapiens
  misc_feature (23)..(23): Xaa can be any naturally occurring amino acid
  misc_feature (44)..(44): Xaa can be any naturally occurring amino acid
PINSKELFVHPLWNRSFVACGNXIALIKLSRSAQLEEMPSSSPXSLPLV

SEQ ID NO: 937348 - protein, 263 aa, Homo sapiens
TAAVVGGGRRSVAAPPCPAMGLLSAPVRRPTHARLVLRLNPPLCVLNYVAGIAWIYALVFPPLTQRTYMLENAMDSIMVEEQYAARDRTRTFTRDFTAHRKKWGALPVAWFERTKRSVGLEVYTQSFSRKLPFPEETHEHQMVSGTNVYGILLAPPAASPSRLYLTVPCGSDSTNSQAVGLLLALAAHFRGQIYWAKEIVFLVTKQELLGTEAWIEAYHDVNVTGMQIVSLQGRAGAIKAAVALELSSDVVPASDVAVEGLNG

SEQ ID NO: 937349 - protein, 205 aa, Homo sapiens
  misc_feature (54)..(54): Xaa can be any naturally occurring amino acid
  misc_feature (58)..(58): Xaa can be any naturally occurring amino acid
MGSTMVEEQFAGGDRARAFARALRRPTARGRGLCQWRWLERAMRSVGLGVFTLXFFRXLPFPDETHERYMSVGQQRVRHPAGSACCQPESLVLTVPCGSDSSNSQAVGLLLALAAHFRGQIYWAKDIVFLVTEHDLLGTEAWLEAYHDVNVTGMQSSPLQGRAGAIQAAVALELSSDVVNSLDVAVEGLNGQLPNFDCSISSRPS

SEQ ID NO: 937350 - protein, 79 aa, Homo sapiens
VAEAEEKEERAVEASPPRYCYNQNLVEKGFTCWGPLDKKRCGGILDLLTELDLFGKFSNLNIEIASILIINVYIFAYYK

SEQ ID NO: 937351 - protein, 264 aa, Homo sapiens
FQPGQADFTSRRAHSRKAASWGRGPGTAVGRAGRRMFGAPAHPGLELPGSAASPRPVTVAPPAAPATGTGCQGAWLPGWSAPAGQHRGSGAHEAWQAQSGHHGGGQQEAQGEVGEGDAAQLQCQVDQGYQLQCHPAPVWGLCAYHPVGIVGQGQASCINRQLCEHHSLSICHWEVLGGNVLAQHWQDIEGTVPWPVRAAEVPRARPAPHPVMGEGVHWGQGHPGLLKAHSSLMQLHPQFQSLETKDQEQEADSGHVEADGEEAG

SEQ ID NO: 937352 - protein, 288 aa, Homo sapiens
MRLVRFCVSGVRCVVKVSVELGGNSSFHGALGNWASLEGRSGGFHLGPPCGVHPLFRATINQGVWAMCPRFWWATSCWICSPGPMGNWAPLIVLLQQCLGPKQTVANLQQLSHGVHRGLEAWWGPEHLLAEFNATLGLAPGPTKISPPRVVEKATHRGPTTTGAWIGHTEDWVAPWILTSRAPGNAGGWHYAPSHPNFLHLGLSLPGATPHTQGGPTHGWRAWQKASNGGPGDPRYMAGPRRGAETTPRTEHNGSTWHSLVPRGGRAAQEGATCAHWPRGWQAFPGTR

SEQ ID NO: 937353 - protein, 35 aa, Homo sapiens
  misc_feature (10)..(10): Xaa can be any naturally occurring amino acid
  misc_feature (25)..(25): Xaa can be any naturally occurring amino acid
  misc_feature (29)..(29): Xaa can be any naturally occurring amino acid
ILTFLAAALXAPFNDDDKIVGGYNXKENXFPYQVS

SEQ ID NO: 937354 - protein, 35 aa, Homo sapiens
  misc_feature (10)..(10): Xaa can be any naturally occurring amino acid
  misc_feature (30)..(30): Xaa can be any naturally occurring amino acid
  misc_feature (35)..(35): Xaa can be any naturally occurring amino acid
VTVALASPHXGGEHFKGEKVFRVNVEDENXINIIX

SEQ ID NO: 937355 - protein, 82 aa, Homo sapiens
  misc_feature (13)..(13): Xaa can be any naturally occurring amino acid
  misc_feature (23)..(23): Xaa can be any naturally occurring amino acid
  misc_feature (60)..(60): Xaa can be any naturally occurring amino acid
  misc_feature (68)..(68): Xaa can be any naturally occurring amino acid
ASVTQVTGTTGMXHHTRLVFVFXVETKFHHVGQAGLELLSSGSTPTFASQHVGITGMSHXTWSSVQIXTPKLNFGLGAMAHT

SEQ ID NO: 937356 - protein, 41 aa, Homo sapiens
  misc_feature (27)..(28): Xaa can be any naturally occurring amino acid
MLLLLTLALLGGPTWAGKMYGPGGGKXXSTTEDYDHEITGL

SEQ ID NO: 937357 - protein, 97 aa, Homo sapiens
  misc_feature (23)..(23): Xaa can be any naturally occurring amino acid
  misc_feature (28)..(28): Xaa can be any naturally occurring amino acid
  misc_feature (36)..(36): Xaa can be any naturally occurring amino acid
  misc_feature (54)..(54): Xaa can be any naturally occurring amino acid
  misc_feature (73)..(73): Xaa can be any naturally occurring amino acid
EPREVWVPRGVSLAGAHPGREGXPDRLXLKAVRSLXGLLERFPSPAVRHSLPGXPDFKTSSVCSGSGSDSHFXNAFGVGFCVISFRALPEEVVLLME

SEQ ID NO: 937358 - protein, 108 aa, Homo sapiens
GDEVSLLSPRLECNSVISAHCSLRLLLGSSDFPASASQVAGITGIHNNAQLIFVFLVETGFHHVGQAGLELLISGDLPALASQSVGIIGVRHHAGQKFTFLECCLSLG

SEQ ID NO: 937359 - protein, 53 aa, Homo sapiens
  misc_feature (36)..(36): Xaa can be any naturally occurring amino acid
  misc_feature (46)..(46): Xaa can be any naturally occurring amino acid
MMVWVGVWVGARAVGVSLSFLTAFIFACLVTHLTLXAQGSNFLSTXKETPASV

SEQ ID NO: 937360 - protein, 42 aa, Homo sapiens
  misc_feature (4)..(4): Xaa can be any naturally occurring amino acid
  misc_feature (34)..(34): Xaa can be any naturally occurring amino acid
GNKXFHEVMLALTVLETCVKNCGHRFHVLVASQXFVESVLVR

SEQ ID NO: 937361 - protein, 70 aa, Homo sapiens
  misc_feature (29)..(29): Xaa can be any naturally occurring amino acid
  misc_feature (35)..(35): Xaa can be any naturally occurring amino acid
  misc_feature (61)..(62): Xaa can be any naturally occurring amino acid
ELPEQVFGVAQIAGAPGSIGGHLILGGPXLLQPLXAAAVPIGIIGIHFQDGFLGLLGNSGXXVLKDEPLD

SEQ ID NO: 937362 - protein, 80 aa, Homo sapiens
  misc_feature (5)..(5): Xaa can be any naturally occurring amino acid
  misc_feature (15)..(15): Xaa can be any naturally occurring amino acid
  misc_feature (46)..(46): Xaa can be any naturally occurring amino acid
  misc_feature (52)..(52): Xaa can be any naturally occurring amino acid
  misc_feature (57)..(57): Xaa can be any naturally occurring amino acid
PKKGXGGGVSAPIRXSRLERSEVGVLKIGGVEGGSRLSWYPSLMWXEQDERXNRDFXRGAISYLMVWCSRDLFLMRQDPR

SEQ ID NO: 937363 - protein, 63 aa, Homo sapiens
  misc_feature (3)..(3): Xaa can be any naturally occurring amino acid
  misc_feature (5)..(5): Xaa can be any naturally occurring amino acid
MAXWXKLLKEQKYDRQLRRSLALSPRLECSGAISAHFKLRLLGFTPFFCLSLRVGCGVIMGKR

SEQ ID NO: 937364 - protein, 34 aa, Homo sapiens
  misc_feature (19)..(19): Xaa can be any naturally occurring amino acid
  misc_feature (29)..(29): Xaa can be any naturally occurring amino acid
  misc_feature (31)..(31): Xaa can be any naturally occurring amino acid
ADLYCQNMNSGNLVSVLTXAEGAFVASLXKXSST

SEQ ID NO: 937365 - protein, 201 aa, Homo sapiens
  misc_feature (128)..(129): Xaa can be any naturally occurring amino acid
  misc_feature (132)..(132): Xaa can be any naturally occurring amino acid
FQKGAEWGPWGVSVPARTGRSQFKKSTISRKSSQTGVEGPGTAVGRAGRCSVSDPSTPWASASQERAASPRPLTVAPPAAPAAGPGCQGAWLPGWSAPAGQHRGSGAHEAGKRRAGDTMVDGQPAAQXXVGXGECRPAAVLVAQGYQLQCHPAPVWGLCAYHPVSHRPVGIVGQGQARCLSRLQCPPPSLSLCHWDVLGGH

SEQ ID NO: 937366 - protein, 145 aa, Homo sapiens
TCCWAPCCDWWLGGPAGILQPPAELHLSLCLTPSSSHCGRGQLDGAAPSSSLHRQRGGPQSLFLSACCRPAPCWWAPHDCRAAVFFSAVSVCGGSTPPCGAFFGDVFFCGARVASLFCTRGAENSPHAPLLPPLLGGKKEFFLPH

SEQ ID NO: 937367 - protein, 50 aa, Homo sapiens
  misc_feature (27)..(27): Xaa can be any naturally occurring amino acid
  misc_feature (30)..(30): Xaa can be any naturally occurring amino acid
VNLRKLRGYYNQSEAGSHIIQRMYGCXLGXDGRLLRGHDQLAYDGKDYIA

SEQ ID NO: 937368 - protein, 37 aa, Homo sapiens
EGQLSQMARPLSTPSSSQMQARKKRRGIIEKRRRDRI

SEQ ID NO: 937369 - protein, 55 aa, Homo sapiens
HSSGGGSSGDEEEWYQGLPAVPGGTSGIDGGQVGRAWDPEKLAQELSASLTRTLD

SEQ ID NO: 937370 - protein, 76 aa, Homo sapiens
  misc_feature (3)..(4): Xaa can be any naturally occurring amino acid
  misc_feature (9)..(9): Xaa can be any naturally occurring amino acid
  misc_feature (29)..(29): Xaa can be any naturally occurring amino acid
  misc_feature (42)..(42): Xaa can be any naturally occurring amino acid
  misc_feature (61)..(61): Xaa can be any naturally occurring amino acid
  misc_feature (64)..(64): Xaa can be any naturally occurring amino acid
MPXXSADNXSSLGCDRKQWPFSSQFGCPXCGFDFGATSSCSXRQEMATVLCEFFTCGIRQXQQXAYMKSLNDSKIT

SEQ ID NO: 937371 - protein, 56 aa, Homo sapiens
  misc_feature (27)..(27): Xaa can be any naturally occurring amino acid
  misc_feature (37)..(37): Xaa can be any naturally occurring amino acid
  misc_feature (50)..(50): Xaa can be any naturally occurring amino acid
VLLQANRDPDAGIDEAQVEQDAQALFXAGELKWGTDXEKFITIFGTRSVXHLRKVF

SEQ ID NO: 937372 - protein, 70 aa, Homo sapiens
  misc_feature (13)..(13): Xaa can be any naturally occurring amino acid
  misc_feature (33)..(33): Xaa can be any naturally occurring amino acid
  misc_feature (36)..(36): Xaa can be any naturally occurring amino acid
  misc_feature (57)..(57): Xaa can be any naturally occurring amino acid
  misc_feature (60)..(60): Xaa can be any naturally occurring amino acid
LDVCPLTLGIETXGGVMTKLIPRNTVGATKKSXIFXTASNNQPTVTIKVYEGERPLXKGXHLLGTFDLTG

SEQ ID NO: 937373 - protein, 74 aa, Homo sapiens
  misc_feature (24)..(24): Xaa can be any naturally occurring amino acid
  misc_feature (42)..(42): Xaa can be any naturally occurring amino acid
  misc_feature (48)..(48): Xaa can be any naturally occurring amino acid
FNCLVADPRKGSKMYGLKSYIEYXLTPTNTNRSVNHRYKHFXWLYERXLVKFGSAIPIPSFPDKQVTGRFEEEF

SEQ ID NO: 937374 - protein, 77 aa, Homo sapiens
  misc_feature (26)..(26): Xaa can be any naturally occurring amino acid
  misc_feature (33)..(33): Xaa can be any naturally occurring amino acid
  misc_feature (55)..(55): Xaa can be any naturally occurring amino acid
  misc_feature (65)..(65): Xaa can be any naturally occurring amino acid
WNPWHSRVPLQFLGKLAFCSSLRAAXFHTTTDXPSPLKWGACLSQVFPTWQLCLXYFILCTQLVXPTALPACRFGSL

SEQ ID NO: 937375 - protein, 58 aa, Homo sapiens
  misc_feature (20)..(20): Xaa can be any naturally occurring amino acid
  misc_feature (35)..(35): Xaa can be any naturally occurring amino acid
  misc_feature (39)..(39): Xaa can be any naturally occurring amino acid
  misc_feature (50)..(50): Xaa can be any naturally occurring amino acid
LNTTKLSEELFYQILIYDFXNFGVLRLSEPAPLFXLAMXALDSPESGWTXEDGPKEGL

SEQ ID NO: 937376 - protein, 34 aa, Homo sapiens
  misc_feature (31)..(31): Xaa can be any naturally occurring amino acid
FNHVLLQKYQPDDEFPASEQSLAGLTDDDFXHLL

SEQ ID NO: 937377 - protein, 51 aa, Homo sapiens
  misc_feature (8)..(8): Xaa can be any naturally occurring amino acid
  misc_feature (21)..(21): Xaa can be any naturally occurring amino acid
  misc_feature (24)..(24): Xaa can be any naturally occurring amino acid
MRLVQWAXCSRPHAFWTQTSXQSXNWNTPLLVKVLASCRGYRNLCRQVAPE

SEQ ID NO: 937378 - protein, 31 aa, Homo sapiens
  misc_feature (31)..(31): Xaa can be any naturally occurring amino acid
MNIKGSPWKGSLLLLLVSNLLLCQSVAPLPX

SEQ ID NO: 937379 - protein, 102 aa, Homo sapiens
SRRRGFSSLPLLGPRFPTFRSPLPAFSRHRRRRLPQAVSTAEKESPPNVAIQNLHSFDPFADASQGDDLLPAGTEDYIHIRIQQRNGRKTLTTVQGIADDYR

SEQ ID NO: 937380 - protein, 220 aa, Homo sapiens
SSLPLEPPRFPTFRIPPDRLSPATAADAFRRPFPPARENGNRISHVPRIHRTAPLHILTLAFACIADRSNWLSDTCKSRASATVTRYIIRVYTNFRTRRKRGNVTRRTIHTMSSIRELSMTDVTDVDTAHNEDERRLVKAHNTGLPCETAIRVDYASHYPERNCAETLQYHDIRQGLNPKRQRKALNATVSHRLREFGPELKARLTLERFNEVLHVLSSI

SEQ ID NO: 937381 - protein, 59 aa, Homo sapiens
  misc_feature (16)..(16): Xaa can be any naturally occurring amino acid
  misc_feature (51)..(51): Xaa can be any naturally occurring amino acid
MGLLLLLLLSMGGAWXSREPLRPWCHPIIAILAVEKEGCPVCITVNTTIFXGYCPTMMR

SEQ ID NO: 937382 - protein, 102 aa, Homo sapiens
  misc_feature (84)..(84): Xaa can be any naturally occurring amino acid
MKWGGLPPRLGVVIYLSPVCVCSVSLVSFLDARRPVTCVVHTSSLRNRRVVVPPHHRPSYRREKIGGNTPPPLWRTPQVALLLXGGRDFFGAEKRERERFGG

SEQ ID NO: 937383 - protein, 141 aa, Homo sapiens
  misc_feature (16)..(16): Xaa can be any naturally occurring amino acid
  misc_feature (50)..(50): Xaa can be any naturally occurring amino acid
  misc_feature (123)..(123): Xaa can be any naturally occurring amino acid
  misc_feature (130)..(130): Xaa can be any naturally occurring amino acid
MWESLELPRGLLNGFXKDIDNDKDNENQAEVVSDGDEELDGSWSKDDSCXVLAKRLMAFCPCLRDFWNFELERDDFGCLMENISKQQSIQEVTWVLLKAFSFKREAEHKSFGKICSLTYYDRXGKTPFFXGGEFKLGCQKF

SEQ ID NO: 937384 - protein, 81 aa, Homo sapiens
  misc_feature (7)..(8): Xaa can be any naturally occurring amino acid
  misc_feature (23)..(23): Xaa can be any naturally occurring amino acid
  misc_feature (35)..(35): Xaa can be any naturally occurring amino acid
  misc_feature (55)..(55): Xaa can be any naturally occurring amino acid
SCNFGRXXYTHQDRPYPGVSNFXASLGHVGRRIMXLDHTQNTLTLMIACEVKKKXHKKISECFKKVYESVLGRIQSHPGLH

SEQ ID NO: 937385 - protein, 101 aa, Homo sapiens
  misc_feature (28)..(28): Xaa can be any naturally occurring amino acid
  misc_feature (46)..(46): Xaa can be any naturally occurring amino acid
  misc_feature (52)..(52): Xaa can be any naturally occurring amino acid
  misc_feature (62)..(62): Xaa can be any naturally occurring amino acid
  misc_feature (75)..(75): Xaa can be any naturally occurring amino acid
LTWQRDGEDQTQDTELLETRPAGNGTFXKWAAVVVPSGEEQRYTCXVQHEGXPKPLTLKWEXSSQPTVHIVGIIXGLVLLGAVITGAVVAAFNVGGGTSSN

SEQ ID NO: 937386 - protein, 74 aa, Homo sapiens
  misc_feature (11)..(11): Xaa can be any naturally occurring amino acid
TEEQLLKDKRXQQKIKRFKLRQAQRAHFFADMEEEPFNPDYVEVDRVLEVSFCEDKDTGEPVIYYLVKWCSLPY

SEQ ID NO: 937387 - protein, 67 aa, Homo sapiens
  misc_feature (6)..(6): Xaa can be any naturally occurring amino acid
  misc_feature (31)..(31): Xaa can be any naturally occurring amino acid
MPYEIXKVFASLPQLERGVSKIIGGDPKGNXFLYTNGKCVILRNIDNPALADIYTEHGHQVVVGQVM

SEQ ID NO: 937388 - protein, 84 aa, Homo sapiens
  misc_feature (10)..(10): Xaa can be any naturally occurring amino acid
  misc_feature (12)..(12): Xaa can be any naturally occurring amino acid
  misc_feature (22)..(22): Xaa can be any naturally occurring amino acid
  misc_feature (28)..(28): Xaa can be any naturally occurring amino acid
WPSSSPTGLXFXDPPPRPRASXLRTLPXHAFLNPKYLRPVSVYFAKVKDAPVTASGGPDNRCLRWLGIQFAFIHLRETQDQYVY

SEQ ID NO: 937389 - protein, 66 aa, Homo sapiens
  misc_feature (32)..(32): Xaa can be any naturally occurring amino acid
  misc_feature (39)..(39): Xaa can be any naturally occurring amino acid
  misc_feature (43)..(43): Xaa can be any naturally occurring amino acid
  misc_feature (54)..(54): Xaa can be any naturally occurring amino acid
ANMAAERAREQQQSQEMMEEEHELPVDMETIXLDRDAEXVDLXHYRIGKIEGFXVLKKVKTLCLRQ

SEQ ID NO: 937390 - protein, 57 aa, Homo sapiens
  misc_feature (20)..(20): Xaa can be any naturally occurring amino acid
  misc_feature (45)..(45): Xaa can be any naturally occurring amino acid
  misc_feature (51)..(51): Xaa can be any naturally occurring amino acid
QQRKTPVQIQDSDPRTMNLXISIALLLTVLQVSRGQKVTSLTACXVDQSLXLDCRHE

SEQ ID NO: 937391 - protein, 137 aa, Homo sapiens
  misc_feature (110)..(110): Xaa can be any naturally occurring amino acid
HPLPVALERGKGIYLWDVEGRKYFDFLSSYSAVNQGHCHPKIVNALKSQVDKLTLTSRAFYNNVLGEYEEYITKLFNYHKVLPMNTGVEAGETACKLARKWGYTVKGIQXYKAKIVFAVGDFWGRTLSAISSSTDPT

SEQ ID NO: 937392 - protein, 54 aa, Homo sapiens
  misc_feature (16)..(16): Xaa can be any naturally occurring amino acid
  misc_feature (34)..(34): Xaa can be any naturally occurring amino acid
  misc_feature (45)..(45): Xaa can be any naturally occurring amino acid
GSQQHWLMLPQLGAEXEGTGEGTIGSTLRTRKEXPEGDGVEVEEXGTCDLVCSK

SEQ ID NO: 937393 - protein, 37 aa, Homo sapiens
ETRSARDTAQIFRVNLRTLRGYYNQSEAGSHTLQWMH

SEQ ID NO: 937394 - protein, 35 aa, Homo sapiens
  misc_feature (23)..(23): Xaa can be any naturally occurring amino acid
QIRATIERDGYAQILRDLGGIVXANACGPYIGQWD

SEQ ID NO: 937395 - protein, 64 aa, Homo sapiens
  misc_feature (17)..(17): Xaa can be any naturally occurring amino acid
  misc_feature (49)..(49): Xaa can be any naturally occurring amino acid
  misc_feature (58)..(58): Xaa can be any naturally occurring amino acid
NEAYVTHRQAGKVSVIXAKSYKVVKTFDTPTHPNSLALSADGKTLYVSXKQKSTKQQXATQPDV

SEQ ID NO: 937396 - protein, 42 aa, Homo sapiens
  misc_feature (1)..(1): Xaa can be any naturally occurring amino acid
  misc_feature (14)..(14): Xaa can be any naturally occurring amino acid
XKLREAPSPTEGVXSFDIAGLLNNPVFMSMASNLMNNPQIQQ

SEQ ID NO: 937397 - protein, 117 aa, Homo sapiens
NQARSGLKRPRFLENCKSAAPQRKLSTPPSINLLRSVRGAKVVRLVPVRPEHFFVASTRVLINFGLSGGTASNLFFGVNINARLSSHIWNIFENSTHNDTGKNGVFAPHGIKGVPLV

SEQ ID NO: 937398 - protein, 111 aa, Homo sapiens
  misc_feature (27)..(27): Xaa can be any naturally occurring amino acid
  misc_feature (44)..(44): Xaa can be any naturally occurring amino acid
  misc_feature (99)..(99): Xaa can be any naturally occurring amino acid
QRAVSLITAIGKHFLARCQTILLACTXQLASRQPDENQCWIASXYRSGDGVCQLCFFRRLVVQHAVRFDMTHYAALRTGNRCQRANLIQRLGVNGFWRXCMALRPKFSLSG

SEQ ID NO: 937399 - protein, 105 aa, Homo sapiens
  misc_feature (32)..(32): Xaa can be any naturally occurring amino acid
  misc_feature (63)..(64): Xaa can be any naturally occurring amino acid
  misc_feature (78)..(78): Xaa can be any naturally occurring amino acid
  misc_feature (95)..(95): Xaa can be any naturally occurring amino acid
VTWRALESCSVWSFVSNTFPRLWSPAVCSPLXVTWRAVESCSVWSFVSNMDGCGVVQCVVLCXXHGGLWSCAVCSSLXVTWRALESCSLWSFVSXTFPRLLESCS

SEQ ID NO: 937400 - protein, 43 aa, Homo sapiens
DDCKLELHTRTRSHYTHATLTHSHTRTLSRMLLSKPNITKGKE

SEQ ID NO: 937401 - protein, 61 aa, Homo sapiens
  misc_feature (33)..(33): Xaa can be any naturally occurring amino acid
TAHVKEAHARCPINGDDVNGQTPLHSGGSLAHXKVDIPSDGGVLNLIVIHQVVLDLIQQGI

SEQ ID NO: 937402 - protein, 87 aa, Homo sapiens
GFAARAIKAGDGDLLIAGGVESMSRAPFVMGKAASAFSRQAEMFDTTIGWRFVNPLMAQQFGTDSMPETQENVAELLKISREDQDSF

SEQ ID NO: 937403 - protein, 39 aa, Homo sapiens
LRVEVAGRVECAELVRVGEQSALRVEHLLDPAEASQEGS

SEQ ID NO: 937404 - protein, 113 aa, Homo sapiens
DHSKRARTDATLTANTTGRIGLHHLLAHRQRPHGASANTRGVFTLMAITGALMLSSRCTFSRGKKTSAFNSCSEEVSDHTGYFHKYGQPIQSAGLTIINGFITMPSYQTEFNI

SEQ ID NO: 937405 - protein, 52 aa, Homo sapiens
LWTQWQHGEVGPLRGDWIMKALFPLMNGFIMGELAALEERKRDLRKTLSTVS

SEQ ID NO: 937406 - protein, 96 aa, Homo sapiens
  misc_feature (1)..(1): Xaa can be any naturally occurring amino acid
  misc_feature (4)..(4): Xaa can be any naturally occurring amino acid
  misc_feature (36)..(36): Xaa can be any naturally occurring amino acid
  misc_feature (55)..(55): Xaa can be any naturally occurring amino acid
  misc_feature (70)..(70): Xaa can be any naturally occurring amino acid
XGLXWGFHHMAELRDDKRKAIQLQGPDKKLVDPVDXSRTLKVTSPKRKTSVSATXSVSATNLISMVQGQXEFLGKRGICCCIGQPIQYARSTCEAG

SEQ ID NO: 937407 - protein, 45 aa, Homo sapiens
MSFDELLQTNETSAVIIHNHDVFHLKNCTRSKMQLSEEKSGQRLT

SEQ ID NO: 937408 - protein, 60 aa, Homo sapiens
SQRRNNQGHDRNRKEPEGIGSKEGHIKRLLLRKVSSETNTHTDHTQTTTSIMGPSRPGNT

SEQ ID NO: 937409 - protein, 48 aa, Homo sapiens
QQPALTWNPSVPSSKATENHQALAKLKAIFDCAATSLKTVFNIPKEDK

SEQ ID NO: 937410 - protein, 78 aa, Homo sapiens
  misc_feature (36)..(36): Xaa can be any naturally occurring amino acid
  misc_feature (41)..(41): Xaa can be any naturally occurring amino acid
MRLRFWLLIWLLLGFISHQPTPVINSLAVYRHRETXFGVGXRDHPGQHGKTPSSQKLGNLIIIIIGVSSDGTTFNILF

SEQ ID NO: 937411 - protein, 72 aa, Homo sapiens
  misc_feature (7)..(7): Xaa can be any naturally occurring amino acid
  misc_feature (28)..(28): Xaa can be any naturally occurring amino acid
  misc_feature (31)..(31): Xaa can be any naturally occurring amino acid
KYATGEXTVFLDTKKLPIIKKKVRKLEXQNXYDSRSLWKVVTFNLKFRDIDAATEAKHRLEERQRAEARERK

SEQ ID NO: 937412 - protein, 46 aa, Homo sapiens
KYDDIKESIRQRDLNTPPPTTRKPDEEKSRIRNNGDTRLTILNQLE

SEQ ID NO: 937413 - protein, 102 aa, Homo sapiens
  misc_feature (50)..(50): Xaa can be any naturally occurring amino acid
  misc_feature (87)..(87): Xaa can be any naturally occurring amino acid
PIVIVSKVQSQGQEQWLMPVIPTVWKTEVGGSLEARCSRPAWETWQYPIXTEHLKVSQAWWHGPVVPANWEAEVGRSLEPRSSRLQXAVMAPLHFQPEQQRQ

SEQ ID NO: 937414 - protein, 56 aa, Homo sapiens
GSLSPPLSSGCVRLRFRDVRNSGVGDGSNSRCHLPGWYTPPPFPQPHSTARVEADV

SEQ ID NO: 937415 - protein, 70 aa, Homo sapiens
KTDLEAISNHKETEEKTASEALLMEPTDDGNTTPRNNGVDDDGNDDGDDDGTDDPRHSASDDYSTRARSF

SEQ ID NO: 937416 - protein, 69 aa, Homo sapiens
  misc_feature (32)..(32): Xaa can be any naturally occurring amino acid
QREEKYRGRTAVEHLQEILCGWTTAQGKRGTXGGRHEVGKEMARRSQGFVGYSGVNGRRQATFSLLISF

SEQ ID NO: 937417 - protein, 35 aa, Homo sapiens
HTTHDTHANTPDATERARERSSGSAAAHTRDKGGR

SEQ ID NO: 937418 - protein, 56 aa, Homo sapiens
MVVSYRSHNLNCHRINCFSSYSSGQAAFNFGESIQYLHVPCVFSRDILGLFHSPWV

SEQ ID NO: 937419 - protein, 49 aa, Homo sapiens
  misc_feature (3)..(3): Xaa can be any naturally occurring amino acid
  misc_feature (14)..(14): Xaa can be any naturally occurring amino acid
  misc_feature (25)..(25): Xaa can be any naturally occurring amino acid
TTXGLLKTRERLCXSGADKDLTKVXLTDTRGENLAIASTDNYVRNTAPK

SEQ ID NO: 937420 - protein, 127 aa, Homo sapiens
  misc_feature (39)..(39): Xaa can be any naturally occurring amino acid
PGIGFGLCRYFFFETESLRHLGWSAVVGSLFTAALTSQXSSDPPTSASQVAETTGVCPCTANFLFFLWRWGFTMLPKLVSNSWAQAILPPQLLKVLGTTGMKYCAWPGDQLHFKVPWCSKTTVFSLD

SEQ ID NO: 937421 - protein, 73 aa, Homo sapiens
  misc_feature (39)..(39): Xaa can be any naturally occurring amino acid
  misc_feature (52)..(52): Xaa can be any naturally occurring amino acid
  misc_feature (57)..(57): Xaa can be any naturally occurring amino acid
  misc_feature (63)..(63): Xaa can be any naturally occurring amino acid
CRKGVVSVTPSLLVIKPIVPELIKELNFLTPDICHARRXDTTQDYEILFKVXFTMIXPGLKFXLPSGADDIEK

SEQ ID NO: 937422 - protein, 121 aa, Homo sapiens
  misc_feature (54)..(54): Xaa can be any naturally occurring amino acid
  misc_feature (66)..(66): Xaa can be any naturally occurring amino acid
  misc_feature (82)..(82): Xaa can be any naturally occurring amino acid
  misc_feature (85)..(85): Xaa can be any naturally occurring amino acid
  misc_feature (106)..(106): Xaa can be any naturally occurring amino acid
  misc_feature (115)..(115): Xaa can be any naturally occurring amino acid
  misc_feature (118)..(118): Xaa can be any naturally occurring amino acid
NNLLGRFELSGIPPAPRGVPQIEVTFDIDANGSVNVTATDKSTGKANKITITNXKGRLSKEEIERXVQEAEKYKAEDEVQRXRVXAKNALGVLRLSTLRAPFEGFXGFKGKFSEXTNXKFF

SEQ ID NO: 937423 - protein, 41 aa, Homo sapiens
  misc_feature (17)..(17): Xaa can be any naturally occurring amino acid
  misc_feature (24)..(24): Xaa can be any naturally occurring amino acid
  misc_feature (33)..(33): Xaa can be any naturally occurring amino acid
GPQDIHVSVCPAALILXCKSRFVXITDGRVKPXRDAQDLQA

SEQ ID NO: 937424 - protein, 62 aa, Homo sapiens
  misc_feature (3)..(3): Xaa can be any naturally occurring amino acid
  misc_feature (5)..(5): Xaa can be any naturally occurring amino acid
  misc_feature (34)..(34): Xaa can be any naturally occurring amino acid
LKXTXRTAGHYANQEMDSKEEEEVPQPMPSIPEXLESQKAMVAFLNSAVASAEEEQARLFGQ

SEQ ID NO: 937425 - protein, 37 aa, Homo sapiens
KTSLDILQGHMVALLVILGSTLSSQEKPPSGLMYQER

SEQ ID NO: 937426 - protein, 37 aa, Homo sapiens
SQEKKVVTSCECAGGVESSSESNKVHIGQCSEDKDFP

SEQ ID NO: 937427 - protein, 76 aa, Homo sapiens
  misc_feature (70)..(70): Xaa can be any naturally occurring amino acid
MTPWTEGSSVVKDVMQVNTCRTWTTKPATSRMHGDFWEGVDRILICDWNAGEEAEKRVKDNYRGGSICFXLKEAEN

SEQ ID NO: 937428 - protein, 107 aa, Homo sapiens
  misc_feature (5)..(5): Xaa can be any naturally occurring amino acid
  misc_feature (20)..(20): Xaa can be any naturally occurring amino acid
  misc_feature (31)..(31): Xaa can be any naturally occurring amino acid
  misc_feature (35)..(35): Xaa can be any naturally occurring amino acid
  misc_feature (52)..(53): Xaa can be any naturally occurring amino acid
  misc_feature (60)..(60): Xaa can be any naturally occurring amino acid
CLRCXYKHGTPTSGRNCICXVPQKQAGKWAXIIEXHTLWLSVVWLWSEGGRXXHPGLWTXQVTCLSRHPLTWEQRAVPQARVGARSLWGKLRCLSAVICKNKIFKSL

SEQ ID NO: 937429 - protein, 41 aa, Homo sapiens
  misc_feature (9)..(9): Xaa can be any naturally occurring amino acid
  misc_feature (29)..(29): Xaa can be any naturally occurring amino acid
  misc_feature (32)..(32): Xaa can be any naturally occurring amino acid
GAPQLLNAXTAGPTAGRVIKLYTMALLKXLKXNHVILILKH

SEQ ID NO: 937430 - protein, 66 aa, Homo sapiens
TYRAVVAVLELEGEIADAAEAVDRITVALTNARFSSSDAINSSLIGRMTDSPCERRLGGRSPAGAG

SEQ ID NO: 937431 - protein, 30 aa, Homo sapiens
NIEVVNPIVDMDLYEWIALLSLGNLTVGKL

SEQ ID NO: 937432 - protein, 98 aa, Homo sapiens
KVACVLVTTIRIRRRDDDYPKSKVCEQPVMGRELRYEKNQEWKRSSIVVENHTNTADATMKNAAAYRAFFMVRICRVCNDSQHTLESRGLRKSMKVFL

SEQ ID NO: 937433 - protein, 94 aa, Homo sapiens
FWESEHEEGTQSCQVPESQALTSLGAPFCHNFLPLHGLELCPAPKKKIGLQHRRVSSPKSCCSFLAPSAAIFASQPSQFGIIRVSARGSVSFLP

SEQ ID NO: 937434 - protein, 50 aa, Homo sapiens
  misc_feature (6)..(6): Xaa can be any naturally occurring amino acid
  misc_feature (18)..(18): Xaa can be any naturally occurring amino acid
  misc_feature (32)..(32): Xaa can be any naturally occurring amino acid
LEYLQXPPVSRAYTTACXLTTAAVQLELITPXQLYFNPELIFKHFQIWRL

SEQ ID NO: 937435 - protein, 67 aa, Homo sapiens
MGPRSPDAHHPGLFMFEPILEEKCENACSEHGGQAGSIRCQGAKHNGKGGADAAEGEGRAWPAEGDR

SEQ ID NO: 937436 - protein, 42 aa, Homo sapiens
  misc_feature (1)..(1): Xaa can be any naturally occurring amino acid
  misc_feature (30)..(30): Xaa can be any naturally occurring amino acid
XEGDIYAVEIVGGATRILLVKEEIRKFFGXELSTTLNADEAV

SEQ ID NO: 937437 - protein, 93 aa, Homo sapiens
  misc_feature (11)..(11): Xaa can be any naturally occurring amino acid
  misc_feature (56)..(57): Xaa can be any naturally occurring amino acid
  misc_feature (71)..(71): Xaa can be any naturally occurring amino acid
  misc_feature (84)..(84): Xaa can be any naturally occurring amino acid
MAFSPFSIASXLTQVLLGAGENTKTNLESILFYPKDFTCFHQALKGFRTKGVTSFXXIFHSPDLAIRDTFXNASGTLYSSSPRXLSNNSDGNL

SEQ ID NO: 937438 - protein, 90 aa, Homo sapiens
  misc_feature (11)..(11): Xaa can be any naturally occurring amino acid
  misc_feature (40)..(40): Xaa can be any naturally occurring amino acid
  misc_feature (47)..(47): Xaa can be any naturally occurring amino acid
  misc_feature (55)..(56): Xaa can be any naturally occurring amino acid
  misc_feature (66)..(66): Xaa can be any naturally occurring amino acid
LTLNKVDEEFXEEETDNEENFIDLNVLKAQTYHLDMNETXKQEDILXSTTDAAEXXQKWNVYYRNXKSRLGLTIRIGESMLTKCTSTEVE

SEQ ID NO: 937439 - protein, 96 aa, Homo sapiens
  misc_feature (24)..(24): Xaa can be any naturally occurring amino acid
  misc_feature (63)..(63): Xaa can be any naturally occurring amino acid
  misc_feature (82)..(82): Xaa can be any naturally occurring amino acid
  misc_feature (85)..(85): Xaa can be any naturally occurring amino acid
  misc_feature (90)..(90): Xaa can be any naturally occurring amino acid
PSGRKKLDQARGKEELLPPLTPHXGSLRDKFVDLAISNGLHCGGCGDRSTSFPSITRLHQKTXGSDFRSSRQDFEGIVIIFXFVXSLKLXPFYLLR

SEQ ID NO: 937440 - protein, 51 aa, Homo sapiens
TASIYNACIAKTIENLEGALDGKAPQDAWLWVTEAKVNRGYIGSPLGIEAR

SEQ ID NO: 937441 - protein, 51 aa, Homo sapiens
QLVLMNGEKVSESYVITLERLEDDLQIKGERADQSYGYDLALIEAFSEVNL

SEQ ID NO: 937442 - protein, 39 aa, Homo sapiens
  misc_feature (10)..(10): Xaa can be any naturally occurring amino acid
  misc_feature (22)..(22): Xaa can be any naturally occurring amino acid
  misc_feature (34)..(34): Xaa can be any naturally occurring amino acid
KRAPAPELLXEKNGLSKRPRGXKKRALLTISFLXPAGIS

SEQ ID NO: 937443 - protein, 51 aa, Homo sapiens
MLGRAFVQVGLHYIMVDLTTVEDPSGVAEILTTKICSVLGQSVNHGLRSYG

SEQ ID NO: 937444 - protein, 68 aa, Homo sapiens
SYITLGLDLHWLRGSAGTHTCWVPVGSTQEDSSSLMPPAPGSRVTWAGGLAWQGSRVPLEAPMDLCLW

SEQ ID NO: 937445 - protein, 50 aa, Homo sapiens
MLFKRVPPPRMAVTKNDDPGDYVDMYTAIRNLRRRHMPRSPTQMTCKPCE

SEQ ID NO: 937446 - protein, 35 aa, Homo sapiens
  misc_feature (34)..(34): Xaa can be any naturally occurring amino acid
QYHLCQLYIRKYIHFSTSILHFPEEMITSPPNKXF

SEQ ID NO: 937447 - protein, 78 aa, Homo sapiens
  misc_feature (43)..(43): Xaa can be any naturally occurring amino acid
RMRQNSTANSATDANSDQRESDLDLVLDAGQLIPEKSSVDPNXRNRKKNIVINLKNSSGDKQSSYDSRGIHRTNQSFP

SEQ ID NO: 937448 - protein, 61 aa, Homo sapiens
  misc_feature (9)..(9): Xaa can be any naturally occurring amino acid
  misc_feature (31)..(31): Xaa can be any naturally occurring amino acid
  misc_feature (48)..(48): Xaa can be any naturally occurring amino acid
MTGLALLYXGVFVAFWACALAVGFLTETSPXMWSNLGIGLAISLSVVXGSLGHLYYRLLPS

SEQ ID NO: 937449 - protein, 41 aa, Homo sapiens
HSIHTLETKKTLCVCMCARLTRLYALYGGRFGYFGVTPPVF

SEQ ID NO: 937450 - protein, 116 aa, Homo sapiens
  misc_feature (88)..(88): Xaa can be any naturally occurring amino acid
  misc_feature (91)..(91): Xaa can be any naturally occurring amino acid
  misc_feature (104)..(104): Xaa can be any naturally occurring amino acid
KDQFPSERCPLYPGKEKPPYHPSKFFVKFKKPTSSETDVNDSIYEDNFLGAPFRRVEDISSGQPDIWFFPYPDSMEDLQIRYYRKAKXFMXKRVNGDDCFLTRXKSMPHFWTSSNG

SEQ ID NO: 937451 - protein, 46 aa, Homo sapiens
MQALVVNSTYSISSEGRGVRPTRLERREMRPAKTSERRSESEPEIR

SEQ ID NO: 937452 - protein, 52 aa, Homo sapiens
LATYSLKSLSLYIYLVRTPFTVIAEGVDISLLISDDTPADAQAAIQHLYTVS

SEQ ID NO: 937453 - protein, 49 aa, Homo sapiens
APVLTGAYQQSHSQGYGYMTPAQCEIHEIITAFNQSYGAYRGIVRLTGD

SEQ ID NO: 937454 - protein, 35 aa, Homo sapiens
TVCALSAPQIGSHYVCAPCNLVIFTATSDEVFIMA

SEQ ID NO: 937455 - protein, 59 aa, Homo sapiens
TACGTRQFLSSNRVHFHGRAVRSDSTFLPESTSLQRRGEYRRTSLAPDASTGQPEDSGE

SEQ ID NO: 937456 - protein, 49 aa, Homo sapiens
MQANWKKTVHIGLSSDAVGQQGEWILSNYVLNFWTYEILQGVSYVVPSC

SEQ ID NO: 937457 - protein, 59 aa, Homo sapiens
LAWLPVRCVGPLASEMLFTLNKAFLERFMFKNYSENSKKASISARLQGKPPQRSKSSSE

SEQ ID NO: 937458 - protein, 50 aa, Homo sapiens
SRSSGTVRCVELLQVVLPRKFHHITQFSGVASLVLIAPGPILGAWRWVVG

SEQ ID NO: 937459 - protein, 36 aa, Homo sapiens
  misc_feature (5)..(5): Xaa can be any naturally occurring amino acid
  misc_feature (21)..(21): Xaa can be any naturally occurring amino acid
EHNHXQAQQHTFIRVRPLCSXTETSYLFFLILEYCP

SEQ ID NO: 937460 - protein, 50 aa, Homo sapiens
LAGGPVISERGLAWLNNLKNLRSWTYRTSHAVSILDLSKLLGGGDVPNWK

SEQ ID NO: 937461 - protein, 83 aa, Homo sapiens
PSLNILIPVLDRIRYTESSGNRINVPEQSAVTLDNVTLQIDGVLYLAIMDPYKASYDARTLICRHPASSNNHEIRAQQTLSGQ

SEQ ID NO: 937462 - protein, 54 aa, Homo sapiens
TQQRLYYAKLSFIQAEIMIKRHEEEQQNIREELNKKRTPEGDGRMPCYIRHGES

SEQ ID NO: 937463 - protein, 75 aa, Homo sapiens
  misc_feature (5)..(5): Xaa can be any naturally occurring amino acid
  misc_feature (10)..(10): Xaa can be any naturally occurring amino acid
  misc_feature (13)..(13): Xaa can be any naturally occurring amino acid
  misc_feature (35)..(35): Xaa can be any naturally occurring amino acid
  misc_feature (63)..(63): Xaa can be any naturally occurring amino acid
KLFMXGIYPXNNXNEASGITSAPFHQSLCATKASXFANFNCLGFKHSLPAVMPLLQTTTPGLXDGPILNGNPGKE

SEQ ID NO: 937464 - protein, 50 aa, Homo sapiens
LKLLDTSVRKCSTKDIDVHCVAGKVEDKGTLFRRRLLMHILLCFLALQQT

SEQ ID NO: 937465 - protein, 51 aa, Homo sapiens
LEDCRPDCNFRVTDVIGGTEVQFQVRAENEAGVGHPVTHRIAIPLEDSNRS

SEQ ID NO: 937466 - protein, 53 aa, Homo sapiens
  misc_feature (16)..(16): Xaa can be any naturally occurring amino acid
  misc_feature (18)..(18): Xaa can be any naturally occurring amino acid
  misc_feature (35)..(35): Xaa can be any naturally occurring amino acid
  misc_feature (38)..(38): Xaa can be any naturally occurring amino acid
  misc_feature (44)..(44): Xaa can be any naturally occurring amino acid
GSNYLYNEDCSQKREXMXDDTDLSDKRACPPGHLXRCXCNVRSXTLREPVDCL

SEQ ID NO: 937467 - protein, 50 aa, Homo sapiens
CLSAPTWELWLPVCRQLSGEADRVGPHVEERSSKMNHNWRVWLRAFADAV

SEQ ID NO: 937468 - protein, 40 aa, Homo sapiens
  misc_feature (15)..(15): Xaa can be any naturally occurring amino acid
  misc_feature (29)..(29): Xaa can be any naturally occurring amino acid
GKDGNMFLSFENSQXGVKNKAMLKANIHXACNSRRKSKGI

SEQ ID NO: 937469 - protein, 90 aa, Homo sapiens
EFGSEGCEAAQCQDRAAGAAGESPCTMSLGRPVRKAQRVLPSICPGASAAKKRRPDTKLEESAGPGLYEHVKEKQLRPQRRFGAPRESGP

SEQ ID NO: 937470 - protein, 30 aa, Homo sapiens
ARLEEKGEEEGASSEVADRLQPPSGATGGS

SEQ ID NO: 937471 - protein, 87 aa, Homo sapiens
REPTMELSPADKTNVKAAWGKVGAHNGEYGRRGPGKDAPVLSPPCETYSTHFDLSHASARFKGHGKKVPDALTNAVRTWTTCPTRCP

SEQ ID NO: 937472 - protein, 123 aa, Homo sapiens
ALRVRQRAGLLGGRRGRRVLVARGTGWAGRQWSLSVAFPGSQFVVPRIHLFLPHAILFFLLYTLVLPELFPKAWRNGGGRECPVCRPGTLPCAFAVEWRRDPGYVVYDSRGTGHSVWENISFR

SEQ ID NO: 937473 - protein, 34 aa, Homo sapiens
MGSTKLLCFKEHGVAMALPHRVSRVWRSIQMRSG

SEQ ID NO: 937474 - protein, 58 aa, Homo sapiens
LSESNENYNGVPRRRAENSITKWNNVLTVRIKKNNTTNQVYQAIIAKAAMNNTTLNYS

SEQ ID NO: 937475 - protein, 104 aa, Homo sapiens
KEEVSMTVTNHLTNCISQALIDAWRSAMHEAPPMGEPLAANEKRHRTGPIATYSQLFTSQAHYTMTSFKTPNRTLEVNTEQDEGLTKRKLKLNSKEQEHDDKMN

SEQ ID NO: 937476 - protein, 115 aa, Homo sapiens
SAHRVGVRLVNLRPTASVHGTNAYVAIGHSRFSAALIRAYPPFACWSTSQFRRAPSSLFIYVAVSVRPAYIGAISIARGVPAFTHMKVGQHASAIIQQFSTEGLEVYYKGTNIRG

SEQ ID NO: 937477 - protein, 52 aa, Homo sapiens
CISLFAPSVPRKSYFIVVNIQFISIVQFGGFMRKPIAPISVLVVSFIIFRIC

SEQ ID NO: 937478 - protein, 71 aa, Homo sapiens
TQMSSSSPLSISTALIFLSLEAHNTTTTEILKGLKSNLTETSETKIYQSFQHLPCTLNKYNGELELSLEND

SEQ ID NO: 937479 - protein, 36 aa, Homo sapiens
SDPRSLGFRYFFSFLFSTSQGTGFHFATRTGERRKN

SEQ ID NO: 937480 - protein, 34 aa, Homo sapiens
MTIRSAFIDNEKMESRTHLSLFGPYRFATRVRRL

SEQ ID NO: 937481 - protein, 69 aa, Homo sapiens
  misc_feature (34)..(34): Xaa can be any naturally occurring amino acid
RHDGSREENGEPPRMAGRARDRQDRGDGGPGLSXGSPGVGSISNSGDFCFALSRASLGGGLVGGRVEGS

SEQ ID NO: 937482 - protein, 53 aa, Homo sapiens
VRHLTYAHNWRALDYAIPKVNRTTFGHAPRSGHHVILFTPVCALGPFSMTSQR

SEQ ID NO: 937483 - protein, 70 aa, Homo sapiens
DDIGNSCPLEACNHAVLPAGVGIPEEHYIKRGCWQMLPATEGNRDACTITACVHRTDLPEVEIISLLEEQ

SEQ ID NO: 937484 - protein, 50 aa, Homo sapiens
RIAALHGNDVTKVFTKVTELSNLRRHQRVADNKRLDGIQSQLIDASQRAT

SEQ ID NO: 937485 - protein, 63 aa, Homo sapiens
  misc_feature (27)..(27): Xaa can be any naturally occurring amino acid
  misc_feature (47)..(47): Xaa can be any naturally occurring amino acid
  misc_feature (49)..(49): Xaa can be any naturally occurring amino acid
PLLINLRARLSLETFSNSMARHRTGQXHTSRIMSRTNLAVFGQTPAXGXCWACSRSCHFVALV

SEQ ID NO: 937486 - protein, 59 aa, Homo sapiens
SQEKEVFRGPEDMAALEKDLRRLVEFVEGEGEEEGEDTKVKTSQGVLLRELSCFKHESV

SEQ ID NO: 937487 - protein, 104 aa, Homo sapiens
  misc_feature (87)..(87): Xaa can be any naturally occurring amino acid
  misc_feature (93)..(93): Xaa can be any naturally occurring amino acid
IHNHTKTNPNIYLPLAQQNFELGNEKIHLISTQSAIPHALRAELKDWNGRTSTADYNMPKTGPEADKYRLTRAYSTAGTAENTFTGXDPVHKXSHGQIQLTKTY

SEQ ID NO: 937488 - protein, 60 aa, Homo sapiens
MQQSYNTFKYYSHFLFKVVTKLVNRAPAPPGGLSLRINFNNYYQDPEAALRGTCTIKEFS

SEQ ID NO: 937489 - protein, 38 aa, Homo sapiens
  misc_feature (35)..(35): Xaa can be any naturally occurring amino acid
SSLESEITKEIIEGVREMITDNDFGRLTFDPGYAXEAD

SEQ ID NO: 937490 - protein, 101 aa, Homo sapiens
ITSFMGLEIVENSFPPTPTPSDLILVSKTSGQLIVNGFFFKKLNSGFYCSCVQWIHLVTGSRLCPSPIPHQADLQIHTIVPKERKLMTQYKPITTPRKYNS

SEQ ID NO: 937491 - protein, 69 aa, Homo sapiens
RKEGEEDQNPPCPRLNGALMEVEEAKSYRTHWIDVIRLRKCTLNYLTYSSTTEVCFTYPRHSTKGSTFT

SEQ ID NO: 937492 - protein, 70 aa, Homo sapiens
VPEAEEKFLEDVKKSYHSEAFTVNLKDTEEAKKQINDYVEKGTKGKIVDLVKELNRDTDFALANHTCSAD

SEQ ID NO: 937493 - protein, 71 aa, Homo sapiens
  misc_feature (68)..(68): Xaa can be any naturally occurring amino acid
KSSPVEAQTPTKHFYGQYSFENEANSSRLLDPNSPQLIIQVLDEDTTVSELKLSKNRKNHRESNQNNXHSL

SEQ ID NO: 937494 - protein, 37 aa, Homo sapiens
MGGPKPGGDEGLALSPCLAGGASPLCDGGPKSQWGNQ

SEQ ID NO: 937495 - protein, 137 aa, Homo sapiens
HIYCGRGSEGLQTTRAGASARTGARGRHLAQCSRERPGLQHPPPSPAARTSVRPVTGCSFRCVSAELPHAHEPSPDAETCFTLSAPGPAPSPSACSHPEGRSGAGGNSGHTGLYQGNSGTPRKMLLFSLSQDHNVGC

SEQ ID NO: 937496 - protein, 81 aa, Homo sapiens
KSQLFSSPHEKDLLFKDSAHEFSKVPPRINAKTHLSYEYTTAIRNLREGTCTEAPTNEMKAYEVECVDPPRATNESWTKCQ

SEQ ID NO: 937497 - protein, 79 aa, Homo sapiens
TGGFIWDWLIRVVENETPGESFYAYGGDSGDHPMIGNLVWMVCFSQTAPQSQPYWERHFVSSTLAFAVRTRLSPERTSY

SEQ ID NO: 937498 - protein, 39 aa, Homo sapiens
  misc_feature (1)..(1): Xaa can be any naturally occurring amino acid
XYKDNVAIFLDLNQRHSSTRFQNGIFQKFLSHLITTTVF

SEQ ID NO: 937499 - protein, 32 aa, Homo sapiens
  misc_feature (5)..(5): Xaa can be any naturally occurring amino acid
  misc_feature (18)..(18): Xaa can be any naturally occurring amino acid
  misc_feature (25)..(25): Xaa can be any naturally occurring amino acid
MRQRXRDDSARDARDAQXKCMPTRXYVHTNAN

SEQ ID NO: 937500 - protein, 67 aa, Homo sapiens
  misc_feature (26)..(26): Xaa can be any naturally occurring amino acid
  misc_feature (55)..(55): Xaa can be any naturally occurring amino acid
EDPNTMGVKHASIATDLQELPTVCFXEIDMQICLRILTFRTENKFFNESIQQVLXFIRLMRSIDNGT

SEQ ID NO: 937501 - protein, 82 aa, Homo sapiens
  misc_feature (10)..(10): Xaa can be any naturally occurring amino acid
  misc_feature (82)..(82): Xaa can be any naturally occurring amino acid
RLRSLIVDVXLKPTSDQSPHRASSSPEDVRNRKARIHLPQRRDLHANPKDVPYDDENVIIESNLILIWASMPHLIHLASINX

SEQ ID NO: 937502 - protein, 67 aa, Homo sapiens
GDTGRHSSLAGIGSVRASQQRPTLPLGPGYLSGVQEELGHMNGLKSSVCGDLIEWWLLVGWELESRR

SEQ ID NO: 937503 - protein, 35 aa, Homo sapiens
MWFSGQLGNFRDVVTISLWFISRFNYCIQSLCSAF

SEQ ID NO: 937504 - protein, 58 aa, Homo sapiens
  misc_feature (36)..(36): Xaa can be any naturally occurring amino acid
GSNNHRAHKNRPTDLTNIQRLTGPFKSSPRLNACRXQVHGEDYYFLVANHPSGCPCVD

SEQ ID NO: 937505 - protein, 47 aa, Homo sapiens
MGEKKTAEMNERLQKTGESHEPGRQRLQGAEIVPLHSSLGNKSKTVS

SEQ ID NO: 937506 - protein, 97 aa, Homo sapiens
  misc_feature (82)..(82): Xaa can be any naturally occurring amino acid
NKSSQFLLPGHEEDVQGASSTRWKQKHLPHFKRGAREQTVAELAFGVSVQHADSLENIDESRGREQRGADGRPGGEGSDDDXRSTYCAHRFRDGDRI

SEQ ID NO: 937507 - protein, 31 aa, Homo sapiens
MYLRPPGCCSYSNSSPAVDVGESVTPDLDRV

SEQ ID NO: 937508 - protein, 49 aa, Homo sapiens
  misc_feature (35)..(36): Xaa can be any naturally occurring amino acid
GPLINSLDAFQISQDPDVVIHSEHDPFFFQRSTTXXDGRVSLIPINLHT

SEQ ID NO: 937509 - protein, 37 aa, Homo sapiens
MMSKRFNNSQPWGHSGYCYRPESFAKMRRETPFERGF

SEQ ID NO: 937510 - protein, 32 aa, Homo sapiens
  misc_feature (18)..(18): Xaa can be any naturally occurring amino acid
  misc_feature (25)..(25): Xaa can be any naturally occurring amino acid
KQSTHVRPFHAHPNTLNXLGDGAVXLAVQDKT

SEQ ID NO: 937511 - protein, 50 aa, Homo sapiens
MIITRNDRPGNPPGYDSFLSSAKRSVHSLVLMTVPDTYEQPLVRLHFNHG

SEQ ID NO: 937512 - protein, 57 aa, Homo sapiens
  misc_feature (1)..(1): Xaa can be any naturally occurring amino acid
  misc_feature (19)..(19): Xaa can be any naturally occurring amino acid
  misc_feature (47)..(47): Xaa can be any naturally occurring amino acid
  misc_feature (53)..(53): Xaa can be any naturally occurring amino acid
XNQYQSSPEIDEDRIPNPXLSPLCNVSTATKKMTRITPTMKELQMMXNITWQXHRKG

SEQ ID NO: 937513 - protein, 65 aa, Homo sapiens
LLIAILEQGKGGLTSLRCSCHARQNQRRHTLTSLDACLDAFETAQRSPVLLNKHLLANCDDHNHR

SEQ ID NO: 937514 - protein, 36 aa, Homo sapiens
PQQVRDLGVQPAYNHSREKKKTCCFNTTREDLAINI

SEQ ID NO: 937515 - protein, 52 aa, Homo sapiens
LHWGKRIAPSNSVTDVARANSYPYQILDSNLQDIILADSDIRGQRSKIAWYS

SEQ ID NO: 937516 - protein, 59 aa, Homo sapiens
  misc_feature (2)..(2): Xaa can be any naturally occurring amino acid
  misc_feature (26)..(26): Xaa can be any naturally occurring amino acid
TXPTASISRTKSQTILPEIVKLNTGXGNHLTPENVPSQSSVKIKPHNNNNAYEILNSEG

SEQ ID NO: 937517 - protein, 52 aa, Homo sapiens
NRQIPHGQFGNKADVYTSMLTVPETKPLILTYCDTAKKKKTVITKSGIFRKT

SEQ ID NO: 937518 - protein, 71 aa, Homo sapiens
MTGGTAARLTLRSGSTGPLKTVPRHGGRHAHEIHIYELLELENEEERSPKIQGLLKSCGKPVEDFIQELLA

SEQ ID NO: 937519 - protein, 53 aa, Homo sapiens
  misc_feature (3)..(3): Xaa can be any naturally occurring amino acid
GSXCWREESLTQNCKTPVDFQALPHGDVNLSSRHGRLPKIPATKHGLASETFL

SEQ ID NO: 937520 - protein, 69 aa, Homo sapiens
TGNFYVPAEPKLTFVIRIRGINEMSPKVRKLSNFFTFIKSSTTFATQQASYSEDCRAYIADTPICIIND

SEQ ID NO: 937521 - protein, 42 aa, Homo sapiens
  misc_feature (28)..(28): Xaa can be any naturally occurring amino acid
ARAQSLAFADPPPIHTCRQLTVYDDITXLATNNGSNLCKAAF

SEQ ID NO: 937522 - protein, 64 aa, Homo sapiens
KPRSVRFRQQLQHLIFCDSRCPLLPISGNMASDVAVSDDVIKVFNDMKAHKSSTPEEVKRRKQI

SEQ ID NO: 937523 - protein, 49 aa, Homo sapiens
HSYRHYDAASYHIVDQSQTLIGYMVIHIATLMFTTVSSEWYNQINSLVP

SEQ ID NO: 937524 - protein, 37 aa, Homo sapiens
MVKAKRRCFGILFAAQRSLHEVEEILAVVKTDMASGR

SEQ ID NO: 937525 - protein, 54 aa, Homo sapiens
  misc_feature (12)..(12): Xaa can be any naturally occurring amino acid
  misc_feature (17)..(17): Xaa can be any naturally occurring amino acid
  misc_feature (35)..(35): Xaa can be any naturally occurring amino acid
  misc_feature (54)..(54): Xaa can be any naturally occurring amino acid
CFTILASTSLVXLGTVXRLPQQMRDLPTCTTPHPXKKKNLLLHTTRGGPVINIX

SEQ ID NO: 937526 - protein, 69 aa, Homo sapiens
  misc_feature (15)..(15): Xaa can be any naturally occurring amino acid
  misc_feature (48)..(48): Xaa can be any naturally occurring amino acid
  misc_feature (69)..(69): Xaa can be any naturally occurring amino acid
RATFHPSNQGMLALXSSMLSPFQPEIAQMLLRELQPIFSKQTDFLTTXYIWLAAGDSMKSIFNTTIIVX

SEQ ID NO: 937527 - protein, 49 aa, Homo sapiens
  misc_feature (10)..(10): Xaa can be any naturally occurring amino acid
  misc_feature (19)..(19): Xaa can be any naturally occurring amino acid
IHYAWPPQLXLSSWILNLXSCTNEFNGSALGPGVSCSNAPAATEGASNA

SEQ ID NO: 937528 - protein, 53 aa, Homo sapiens
MQCFLTVSKSSSVILLVEGNASFTKKGWNIIRRLIEYKMKLCVSLIHFVTLKY

SEQ ID NO: 937529 - protein, 67 aa, Homo sapiens
AERDESVVPQVLRARNILEPSLFVSSQGVSRKFRENRSVLVRVHCRVGPLNVCVLQTLSEVKVFLAL

SEQ ID NO: 937530 - protein, 133 aa, Homo sapiens
  misc_feature (18)..(18): Xaa can be any naturally occurring amino acid
ELPQHLQSQLGSWSGKIXRPVMYQNPGCPGEDVPRGLKSPPPLQLGNPAVKRLGPSVNGERHLSENRGASSQQQRNRRGEEPFTCMECGKSFRLKINLIIHQRNHIKEGPYECAECEISFREKQQLQVHQRIH

SEQ ID NO: 937531 - protein, 80 aa, Homo sapiens
LQEAGPTLAEDPGLAGSWTGIQESHGWAPQTCALRGSRSVGCRPQSAVSEPSTAQLGGTSGSGRSVWISFSAEERLAPGG

SEQ ID NO: 937532 - protein, 103 aa, Homo sapiens
GPGPWPVSCLRGGPLRHSICPFCSSLLQVPPPAPALHSQPWLPFPRQAGTYCECSLGSARRSSPSCGAGGISALFCARIVELVLGARVNMPEQVETGWWRILG

SEQ ID NO: 937533 - protein, 49 aa, Homo sapiens
  misc_feature (15)..(15): Xaa can be any naturally occurring amino acid
QGLADNTLIAKVNNXARGLDHPLEEDCTLELLKSEDEEAQAVFGALVSH

SEQ ID NO: 937534 - protein, 48 aa, Homo sapiens
MVLTSVRWNQWINPQVCLSFKWDNLRNALAEDSDDRAPTTHNRNLLIT

SEQ ID NO: 937535 - protein, 163 aa, Homo sapiens
  misc_feature (139)..(139): Xaa can be any naturally occurring amino acid
QHRNVMLQFSGEDGMQTVRRVFQCAGNRKDVDFVAQATQGACQFITIQICAADFRHKKGGDQTDFHGCCRQYYVRSIASFRPWKRGDAERGFSVTPNEEGGRPMFMASRSAQVPHTSYGIRPGWGIPRTNAIKPRPRNXRDSARISTLSRSTHAAGLRELRGR

SEQ ID NO: 937536 - protein, 41 aa, Homo sapiens
  misc_feature (2)..(2): Xaa can be any naturally occurring amino acid
MXNVVICVAIPLPAHTCTTAMGRSLLGAESLAEVINKPLEH

SEQ ID NO: 937537 - protein, 38 aa, Homo sapiens
  misc_feature (12)..(12): Xaa can be any naturally occurring amino acid
  misc_feature (14)..(14): Xaa can be any naturally occurring amino acid
KSTKASMHQFIXPXRSAIYDTYIYSRPLLTRQTSRNDQ

SEQ ID NO: 937538 - protein, 65 aa, Homo sapiens
IRHAERTNAATSHPLTTSHLQTTTFEIRTTWKMQSWYAFSIDLAANPEGRQLVSFYYSSVPLPHR

SEQ ID NO: 937539 - protein, 78 aa, Homo sapiens
APQPITQNSSPYPPQQAGEASPSNHEEQPPESSPSSSPMAGRNTYIDNLMTDETCQDAAIAGCKASPFVWAAVPGETL

SEQ ID NO: 937540 - protein, 59 aa, Homo sapiens
  misc_feature (11)..(11): Xaa can be any naturally occurring amino acid
SWALADVHINXKKGLKNIGHIIHTSQISHLYFKPLNEFHDLEGYKIVLRARAFGLFLEQ

SEQ ID NO: 937541 - protein, 88 aa, Homo sapiens
  misc_feature (26)..(26): Xaa can be any naturally occurring amino acid
  misc_feature (63)..(63): Xaa can be any naturally occurring amino acid
  misc_feature (72)..(72): Xaa can be any naturally occurring amino acid
EDPRNHRTHNPAIYLRHNGMGGGRGXQTLSNVGHFRTGAVLTFDKVDVIAINDLLTDFNCKIXMIYVLSTNXEQYAVAKIEHEPFGLN

SEQ ID NO: 937542 - protein, 73 aa, Homo sapiens
MTSKQQRSTSIEETMRPQEKQVTITETLWDQVLTVFKDIQKELQEDARIRGMSNCSMTPMTSAPRTGSIRPPD

SEQ ID NO: 937543 - protein, 104 aa, Homo sapiens
AFHLFYHVKTQYSRCLLEAEIPDTEPAVTLILDFPASRTFSTTGETSENLTIMVEGEANTSFITGQQEGEVQTKRWGFAMFLRLFLNSWTQKIHLPWPPKVLGL

SEQ ID NO: 937544 - protein, 76 aa, Homo sapiens
VFQKVTDHATIALLHYQLPQMPDVVVRSFMTWLRSYIKLFQAPCQRCGKFLQDGLPPTWIDFRTHRSLPSDLAALV

SEQ ID NO: 937545 - protein, 30 aa, Homo sapiens
QGDPRPRLRPDQLKILCSYSFAEVLGVECR

SEQ ID NO: 937546 - protein, 75 aa, Homo sapiens
NQPHSPRSNSHSHPNPLKLHRRSLSHRLPGASILIPFLPSKRKLRTHSQSHHNPLSRTSNSTPTNSFLMTSSKPR

SEQ ID NO: 937547 - protein, 141 aa, Homo sapiens
SVRGGPGGGHDLTAICDASELVPVCQCELQPWMRSLQQKPNINAATLEKVIEIRVNTGAVCRSRAGWAVPARGQAGETEEAETVSAMALLSVGAEHMVCGTPGTQPQAGRGAHGAGACPCDAPAPIPLGFTIVILFIFSIK

SEQ ID NO: 937548 - protein, 82 aa, Homo sapiens
MNAFMVWAKDERKLLAQQNPDLHNAELSKMLGKSGMRLTLAEKRPFVEEAERAVQHMQDHPNYKYRPRRRKQVKRLKRVEGG

SEQ ID NO: 937549 - protein, 55 aa, Homo sapiens
PLSAACQSYQPLGHLPPPSNGFSMQSLLGDSREEHPGQGWCHRAAQLLQAGLCHQ

SEQ ID NO: 937550 - protein, 58 aa, Homo sapiens
TWDVNDETGTLADMKELAYGTLAVKLQTIRQHETQFCYCNDDIVSDHKKKGDDQSRKA

SEQ ID NO: 937551 - protein, 161 aa, Homo sapiens
EFRSSPAPSSETDEAPLIFTARGETEERARGAPKQAWNSSFLEQLVKKPNWAHSVNPVHLEAQGIHISRHTRPKGQPLSSPKKNSGSAARPSTAIGSAGGARRPALCRHRPEYHRARAGERMAVPAGAQAHPDDIQSRLLGASGNPVGKGAVAMAPEMLPK

SEQ ID NO: 937552 - protein, 176 aa, Homo sapiens
KVCFSCCSDGNIAVWDLTTRPCQSSGNRWGTDRIPGWTTVDRGLKHILWDSEADTTQHDFFPDSPGYATWEWLAVGMESSNVEVLHHTKPDKYQLHLHESCVLSLKFAYCGKWFVSTGKDKLLNAWRTPYGASIFQSKESSSCLSCTFQRMTNTFYRLWWQEGHVYEGHYLTGLPQ

SEQ ID NO: 937553 - protein, 38 aa, Homo sapiens
VLDRCCWTDNQPCWSGTGSRPETIVNSGLISPEGLAID

SEQ ID NO: 937554 - protein, 126 aa, Homo sapiens
MAFIEFEEINLTELWGDMDNQKHIYEGFDKVLLEMNTLLSANHASKTQSKLLESPDQPKLNEQRTSTPSPNPPEQQRGVTAEQGPQRISIEEQQQGKKPTAEQELYIESVIEPGTHTESTLEQGSS

SEQ ID NO: 937555 - protein, 298 aa, Homo sapiens
GGPGRGAERQGRERAKRRSGRDTLQLAAAATEPPLCSLIRLLGHRLVDPRWEEEVKQDVAGSAKAGSYAFPWVRILWYMKKGYLQLQDLSGGTSVHGLPSWDPDSGDSGAFWQCIDDTHKKGRVHTLADMPGWLCANDEVVESGWLKGVTIASGGVLPLHAARVASEEGGIQRKVGSFQSHHPQAEKAKFSSLKKHVSKKAGGKKGARKYKKKQGEVSEAASAESTTEGTPGDGFTVLSTKSLFLGHKLQVVQADIASMDSDAVVHPTNTDFYIGGEVGNTLEKKGGKEFVEAVLELR

SEQ ID NO: 937556 - protein, 56 aa, Homo sapiens
MLAFDLQRGVAAQLTLIKRLLCAWYCASIRMPQRTRQTRSLCWGELTVQLRRRSKM

SEQ ID NO: 937557 - protein, 61 aa, Homo sapiens
  misc_feature (25)..(25): Xaa can be any naturally occurring amino acid
MAPILRALTPHDEETPNPLTAPRGXTWEKADCPGSMKSPISIMYLLAAIIYIKGTSPKIKH

SEQ ID NO: 937558 - protein, 139 aa, Homo sapiens
GSTPPEAVQNEDLTLLVKEMEQGHSDLEKMQDLYSESLIMDWWYNAEKDGDSKHQKEICSMISTPEKCAKPQSDVDSTQTSSLNMLKGPWGLSDQKVQKKKVLHAESTKTSLLRSQMSSLRSSACSERKDGLSNASSRR

SEQ ID NO: 937559 - protein, 77 aa, Homo sapiens
DQGGGLINLDPLRPAAEEVHSGQPLGQNAASPESSGSTTIILLLSRFDLLISLKRQTLLDTESIGGLRYFSVDRWCL

SEQ ID NO: 937560 - protein, 97 aa, Homo sapiens
TGSPPEPSLETSSLAILYIWIHDTEKLENDDNSSPVCMDADMDAVCHSYHWMGRNDRCNPAIVFSTLSSIFSTDIVFQSPCHTTAWNISQSGILMQW

SEQ ID NO: 937561 - protein, 40 aa, Homo sapiens
EDPKTMAFITPSRCPSHDFTIAKHNHTLTCIAKLTDDDVL

SEQ ID NO: 937562 - protein, 58 aa, Homo sapiens
  misc_feature (56)..(56): Xaa can be any naturally occurring amino acid
IDLDLAARNIQLVTELVKNKTADHRVKLQESESLIANLETEDEMVTDKAFQDGFKXAE

SEQ ID NO: 937563 - protein, 59 aa, Homo sapiens
  misc_feature (16)..(16): Xaa can be any naturally occurring amino acid
IIIDIPINVYLLAEDXPFGAEMCKLVPLIQKASVGITVLSLVSSIDRYSFVLGVELRNC

SEQ ID NO: 937564 - protein, 108 aa, Homo sapiens
MDTRRQEDRRSWTERDQDLTGYAVDHGSIVTEDKALKRNETILIKGLMAHTIQEISSATNSQQLIQRSFMNNRQLNKKMSLYCSKERRMPLFSLEQGRWGLTKDSLLE

SEQ ID NO: 937565 - protein, 98 aa, Homo sapiens
EDPQTMEHSRGCHSPMTTLQALTPAPHVIVQPQIAAALRSPPQTLSRSPQRPLPGTPASSQAPKAQFQNLYPRVIRRQLPVKGPNLARRLLFGLIAIY

SEQ ID NO: 937566 - protein, 117 aa, Homo sapiens
ILHLPFYGDLVCLEWTTLPTGSSIKLSPQTTAIGNLRPGGEHNGCMFGFWGIDPRRKPMYAPEGDFLLLNRESQFLSSWTMSTKMEGLGQHVPLGAGFLAFGERCKPRKIQGRNPGA

SEQ ID NO: 937567 - protein, 30 aa, Homo sapiens
PLYCSVRSYRFESNKKAFANEDEIAELRTP

SEQ ID NO: 937568 - protein, 36 aa, Homo sapiens
  misc_feature (1)..(1): Xaa can be any naturally occurring amino acid
  misc_feature (15)..(16): Xaa can be any naturally occurring amino acid
XVKNNRKIDPEKIKXXQSKHFRGTKTLGSKTRSTTP

SEQ ID NO: 937569 - protein, 113 aa, Homo sapiens
HHINTKAIFWLGLFFTTVLKEHVHSLQLTSLHLLHQILFHALEVYAITLPGSTLYRLTAFTISNLKVPQSQKCTHLGTQNCTYLMKPSMSMERARLSLNPVLVRTASYFYLLC

SEQ ID NO: 937570 - protein, 143 aa, Homo sapiens
WDLIAGHEAQFGAELLLRLFTVYPSTKVYFPYLSACQDATELLSHGQRTLAAVGAAVQHVDYPWRAEPLADLQRSLRVDPANFPLLIQCFHVVLASHLHDEFTVQIQAACDKFLTGVPVVLTEKYLLSPPAQALVPACQYTEA

SEQ ID NO: 937571 - protein, 30 aa, Homo sapiens
  misc_feature (20)..(20): Xaa can be any naturally occurring amino acid
EDPPTIARKCGKGPSSITNXGKKAPSPMGH

SEQ ID NO: 937572 - protein, 72 aa, Homo sapiens
YAVDKRKWPCYLTSFRFDIALNVILYLHQIPILPDNLAFGNSFSFKIPICKTPKFHTYSPNGLSSPSLMVYS

SEQ ID NO: 937573 - protein, 119 aa, Homo sapiens
VFHICEWFHPLSCTFSRHFFEWMIFREVYCILTFSLPYHRHNKKIQETGPTRSFPFTYCCPCGPILFSHSRYHNYIIIPMLSFLSGGDTDFLSFVLKLTLNHPYRIPYTYHTVPYVPLH

SEQ ID NO: 937574 - protein, 49 aa, Homo sapiens
YYANQFGTSDETSGYYSHSQCQITICLEILSLGHVQSAGCNWVQGMWLR

SEQ ID NO: 937575 - protein, 49 aa, Homo sapiens
MDLSQSYAKGSFCLKANKYRSVASHFISTKMNHPFSHFEPKGDILTVTP

SEQ ID NO: 937576 - protein, 73 aa, Homo sapiens
  misc_feature (48)..(48): Xaa can be any naturally occurring amino acid
SAPCDPHGPRRGDTRGSSMSSRSERRNVPHSNFPSQCHDGDDNPRSGXTETTQNGTGNWPQTLKVRLHPNYIY

SEQ ID NO: 937577 - protein, 84 aa, Homo sapiens
MYKQILSSKCKVNPIDRPKKCFNWKTPYEVYFDEDVAVGLIIQGIKAISQSPHFPQPATKQLVYFEVSYGVQSLRDDLPRVIVG

SEQ ID NO: 937578 - protein, 49 aa, Homo sapiens
RTKYETSTLVIAAARQQQIDTANIASAPTYPCVLTDELAHWLDRLATLV

SEQ ID NO: 937579 - protein, 51 aa, Homo sapiens
VHLIHLLYPVTASEDLILSNSTIMRHLSGGTSALDLASPSYKPPDTTVCQS

SEQ ID NO: 937580 - protein, 42 aa, Homo sapiens
MLTCCDRERIIYQYRYAVRLSTFMPFSFIRHDEEESFELLTS

SEQ ID NO: 937581 - protein, 123 aa, Homo sapiens
IRHEDSVSWGWAAPAEPTKVDAAEGRPAHGARVLSGPYEHPERLRQLQQELEAFRGQLGDVGALDTVWRECKMRRNMMPEAVSIGIARCYSLKNRHQDVMPYDSNRVVLRSGKDDYINASCVE

SEQ ID NO: 937582 - protein, 80 aa, Homo sapiens
NNMAVNTFDVCLALIIRDGVRLSQLECSGNLAMYLTLGQAIPSSASEELGLQVCATTPANFYFLFETDSRFVTRLECSGL

SEQ ID NO: 937583 - protein, 38 aa, Homo sapiens
MVAWTPALESGQELDTIHSPTVARGFTDLFDLLEARPY

SEQ ID NO: 937584 - protein, 49 aa, Homo sapiens
TVCHSHIRSRVRCRLYAYTCYQTVSSFDITLVIAVSGVIWHISWRCTHS

SEQ ID NO: 937585 - protein, 78 aa, Homo sapiens
KKYGKANPEIKSYYVPENTLFYSFSVMAMGAGALLLSTIVALWMNRRKSQLSRHNVDSRDLWGSQLSRHSRSTQPVGQ

SEQ ID NO: 937586 - protein, 85 aa, Homo sapiens
RPIPQWWTKDGSGTRPGPFLEGAHHRSKTSPRTQSSTCAAEWSDSETHSVKKHLLFELLEDERRMSGVPPHSFSVSRGSTSDRTR

SEQ ID NO: 937587 - protein, 74 aa, Homo sapiens
SAQEEQLQLVTEAVAGQLVGDATLRGARDERDLGTMSDVAIVKEGWLHKRGEYIKTWRPPYFLLKNDGTFIGYK

SEQ ID NO: 937588 - protein, 95 aa, Homo sapiens
IRHQEEVESILKKNSDWIWDWSSRPENIPPKEFLFKHPKRTATLSMRNTSVMKKGGIFSAEFLKVFLPSLLLSHLLAIGLGIYIGRRLTTSTSTF

SEQ ID NO: 937589 - protein, 49 aa, Homo sapiens
DSCRLWSVANGAAGVLQTLHRLVLKATLNQLAFQELFSKVCVVRFGAWF

SEQ ID NO: 937590 - protein, 50 aa, Homo sapiens
CTCNLRRTCDRIQICTDACAMCLSIALDQAQTFHYVHELSSHQGMSASFS

SEQ ID NO: 937591 - protein, 122 aa, Homo sapiens
MSGRGKQGGKVRAEAKSRSSRRGAAVPVWPECTELLRKGNYADEWAPGGCYLAAVLEYFTAEIVELAGNAQRDEQEDQDNSRHLQLAISNDEELNKLLGKVTIDQGGVLANIQAVLVPKKKE

SEQ ID NO: 937592 - protein, 56 aa, Homo sapiens
VQKRFGDAKKKPYGRVIPLTLGHDTTKLQYTRTKASMKKQNIERRTLEIYQAKPEP

SEQ ID NO: 937593 - protein, 50 aa, Homo sapiens
TALTALIIATSLGRKLWWASVPPRNGLNIFISPSYKRGGLYTVIFYYEPN

SEQ ID NO: 937594 - protein, 50 aa, Homo sapiens
IIDSMLLYTGRYTAVQQGNHGSDSASGGDHGQRRRFVVDCRTPLGLSRFM

SEQ ID NO: 937595 - protein, 86 aa, Homo sapiens
QIATSWRKIENGQVDTSRGSRLNNGECELPQNQYPKLLEGNHIWFKRGVEEPHDTLTESMKLVAIQEQFRDTLRLTKNLRDASSIR

SEQ ID NO: 937596 - protein, 84 aa, Homo sapiens
TEQRKVLTDTYKLDESEIKLVLFEAAQQFQNMLQDRRLTDKALKYMTDNNVDLRLGAMVTGVDENGVIFKDDSTSPTRFLIRTT

SEQ ID NO: 937597 - protein, 81 aa, Homo sapiens
  misc_feature (77)..(77): Xaa can be any naturally occurring amino acid
DRVTVREKERKEKGKGVGKDEEIGKHLQEAESFLKVMRSFTLRNFQAEITISVIPTNALSYLYKHFKKAEITPILTXFKRN

SEQ ID NO: 937598 - protein, 76 aa, Homo sapiens
NIDDAKDAMDAMNGKSADGRQIRVDQAGKSSDNRSRGYRGDSAGGRGFFRGDRGHGRGLSRGGGDQNYRNNKLEYR

SEQ ID NO: 937599 - protein, 97 aa, Homo sapiens
  misc_feature (85)..(85): Xaa can be any naturally occurring amino acid
DVGVGPGGRCSGRGSRSLMNGLGHPLGDEGTLTLSVHKIWWFKRVWHLSPPPLFLVPAFAMGLSMIPLPSARTKSSLEPPQKLSXVGAMLLVQPAEP

SEQ ID NO: 937600 - protein, 37 aa, Homo sapiens
GQSTAAMPCLSGQQPPALRGKGLAGVSEHRGRRTGVQ

SEQ ID NO: 937601 - protein, 49 aa, Homo sapiens
STCGTWLACAARPPLLRVPLDSPDPPGSDVESQAQAGFRGWGTPGKDTK

SEQ ID NO: 937602 - protein, 115 aa, Homo sapiens
  misc_feature (16)..(16): Xaa can be any naturally occurring amino acid
  misc_feature (48)..(48): Xaa can be any naturally occurring amino acid
  misc_feature (76)..(76): Xaa can be any naturally occurring amino acid
  misc_feature (81)..(82): Xaa can be any naturally occurring amino acid
DVEVWKSEVCESAGLXAALGPNWPDRSASPPALSPLLLGRDPFGATTXNPVVLRQVYLESARSPLFLCQSLPSLVXSPLVXXPRLPLLLQFPLMTLGLCPLALSHSLLATLLAIT

SEQ ID NO: 937603 - protein, 137 aa, Homo sapiens
QKLSSSCELLALEEFRWHVEAGVGRQGAEGRQERARAFLLSRLGLGNTRFLPVGVGRACGEMDTPPLSDSESESDESLVTDRELQDAFSRGLLKPGLNVVLEGPKKAERREWLKQCLAEFKRDLEWVERLDVTLGPV

SEQ ID NO: 937604 - protein, 50 aa, Homo sapiens
SLAISTKSITVIIPSSTVIESTICIRPYLMGKISNSHASRALSQSGTPYA

SEQ ID NO: 937605 - protein, 43 aa, Homo sapiens
  misc_feature (15)..(15): Xaa can be any naturally occurring amino acid
  misc_feature (37)..(37): Xaa can be any naturally occurring amino acid
SKNNHSSEDDDVVMXIAIPFLLQHLTTAMGRLLLGQXLWQRLL

SEQ ID NO: 937606 - protein, 94 aa, Homo sapiens
FFFSNENKSFLSGRLQTLKAFHNTPQFSNRLQGPKDPLTEIEQQENKLKDTRGPGPHHTNPHFQTGNLHRRGDFFAKATGQHTDQHIAQEPEVF

SEQ ID NO: 937607 - protein, 56 aa, Homo sapiens
MFSVQMASLDPTTVKTPTVHVGPRSAEHLSIKSRLHSQVSVISDEKDGKIGDSSPG

SEQ ID NO: 937608 - protein, 63 aa, Homo sapiens
FRLPGEAQKIDQMMEAFTQQYCLCNPGAFQSTDTRYALSFAIITLNTNFYNQKARDKPDLKRS

SEQ ID NO: 937609 - protein, 97 aa, Homo sapiens
DVGVGPGGRCSGRGSRSLMNGLGHPLGDEGTLTLSVHKIWWFKRVWHLSPPPLFLVPAFAMGLSMIPLPSARTKSSLEPPQKLSSVGAMLLVQPAEP

SEQ ID NO: 937610 - protein, 35 aa, Homo sapiens
MVQATAVTLEYKYAPDSLMQRHPKGHPNTINNRID

SEQ ID NO: 937611 - protein, 180 aa, Homo sapiens
DIIPEGLLNCLGEWKYRQYLTVPPGYCTDFLLCASSSGAVLPVRTQYPFLPYPPRFPPQGQAASSVHYIETLPRGLCWCCGKSWHFFRDGRVLLGSRALRERHLGLMGYQLLPLPFEELESQRVLPQLKSYLRQKLQPWACAGGLKGAEGLMWGSGMRRWGKDDLHFGSLCFDFSLKFLS

SEQ ID NO: 937612 - protein, 75 aa, Homo sapiens
TAITVASPIASSTRHIHREVEPALYFTLNRLTPTTTPPQWDKPTPPPHTLLPANVPYNHHDPLNICKTTLQPTGR

SEQ ID NO: 937613 - protein, 113 aa, Homo sapiens
FGTEVEPNIPQKSITYYSRSNSAYNSSIKSRIHETLSCFPIQQQNEDSTTIQRLSEIRQDSACSEFPYGLSHQPTSTFTSTPVSATRGGCILGLNLTSHNYINNHTIKKIPFA

SEQ ID NO: 937614 - protein, 164 aa, Homo sapiens
MGSGTGGISLSENKRRLSIIDFKQQSVKHRARFSSRTFLCSENWKNKKVYDVCVTPPELETKMNINKGGLVSSSANSTSIMYWSYQRQLAERLGVDDRCKAPAHPTNLTKRQQEYTSNDIRRRDTRRYIIHTARHDGKQQTSQWKLLIWAIPCTNLMSPRSIMG

SEQ ID NO: 937615 - protein, 113 aa, Homo sapiens
PPPLFFFGGTPWGQRGPPLFGVGGDFFPPRGGVFPPRGPPFSMAPPPPGGGKLGGGPGGGGFFPRGPEGGLGAPRGGPSGVSPFFPPFGPRGGAPFFFFGGVFFFFRGLLPPP

SEQ ID NO: 937616 - protein, 36 aa, Homo sapiens
MSEFQTPGTFENVITGTLFTYRAVSPSHWVRNYADT

SEQ ID NO: 937617 - protein, 80 aa, Homo sapiens
FGTEGKLRLQLQFLTRGSVNLQDLAGFQDRWVNLPGEVLVDKSCSPAVGVGEASVLRPSTSPNTSEVSALQCGKRGAERF

SEQ ID NO: 937618 - protein, 40 aa, Homo sapiens
LRRTNIQNATSPSEGPTRIRITWPETTYLAMMNAEDPDAV

SEQ ID NO: 937619 - protein, 101 aa, Homo sapiens
  misc_feature (32)..(32): Xaa can be any naturally occurring amino acid
SVDQFTSIFPNLKNGESLWYSVGKTVSVGPGXGRRAPPGLPAPRTKRGLECVVSKALNFSLFSIHQWICEMQCRGAGLSLVMSEDMSKAVSTAWNSSYSGG

SEQ ID NO: 937620 - protein, 76 aa, Homo sapiens
RAAQAAAQTNSNAAGKQLRKESRRPQDPFAPQALGLVTRKGGRKPPLAFEERGIRTGLEEALFTTLRVGGNYLLEA

SEQ ID NO: 937621 - protein, 32 aa, Homo sapiens
LNTGIFETVSVGDLTEVKGQTSGSVWSSYRKS

SEQ ID NO: 937622 - protein, 55 aa, Homo sapiens
QHRDDELSAATHKQRDSEITQQKQKKANKKKEEPKQLCGFTPNPLPFTCEPGASP

SEQ ID NO: 937623 - protein, 52 aa, Homo sapiens
HRRGFSSLPLEPPHFPTFRFPLPAFFRHHRRRLLQAVSTEEKESYCIPATQN

SEQ ID NO: 937624 - protein, 39 aa, Homo sapiens
SFCPRSSSERGGQGGGEKRRKERNKSRGGQGSRGLHPLP

SEQ ID NO: 937625 - protein, 62 aa, Homo sapiens
DRSGPSKSITTGACTGGDHDSRTSQAVFPQEGARQLSLIGERPSRGNNTGPGILEGDSSFNL

SEQ ID NO: 937626 - protein, 36 aa, Homo sapiens
EKLQLVTWRLRCGGGGHTLNRCSCSFRVLVVSAKFS

SEQ ID NO: 937627 - protein, 71 aa, Homo sapiens
RSQAVPAQSVLQQFASFHMTDAAVSFGQGTFLGRVELARAIFQDGRVAPIGAGKGFFSRVQAIPTRQIHSG

SEQ ID NO: 937628 - protein, 110 aa, Homo sapiens
LIEIISNAAEYENISIPHRDISEAVGSEGPPQAEITLKFNDPHVKTNLLLQAHIVSHAASPELQSDTRGIPGKAIRLSTAPWSSLTTEGAHPPLQLLDLPHGTTHVVKTI

SEQ ID NO: 937629 - protein, 60 aa, Homo sapiens
TTRFVTKKALCIRVFQETQKPKKRRRALKAAAARKTSKGGTQTALQSIQDTQDSNESVII

SEQ ID NO: 937630 - protein, 78 aa, Homo sapiens
IDGRSHSDVMRPVDYDPKTSDPCKEAGLKFATGDIIQIINKGDSNWWQGRVEGLLQGVSRIIPFPLAAGWRVASMAHS

SEQ ID NO: 937631 - protein, 39 aa, Homo sapiens
VVVNWSPSQLLGVNPTVQGLQSVVRGHPCIKLLAPMGPF

SEQ ID NO: 937632 - protein, 32 aa, Homo sapiens
ASAEILAAYQLLSAPPLHPTPHLSPNKGIFAG

SEQ ID NO: 937633 - protein, 101 aa, Homo sapiens
EPKSRSYASPLLYSQTCRTLVTPRNDGDRRLQNPLKRGLNGNPGLDIDFSTCNQSGFNWSPKPLPMEGLWHLSQPYHHQHFHELQAGPPAVLLTKCNKSLH

SEQ ID NO: 937634 - protein, 51 aa, Homo sapiens
SHSMGQQPLAAQSVYFRAIPICARTYRVSREWARLCPGQGSSLVTAQGGKG

SEQ ID NO: 937635 - protein, 83 aa, Homo sapiens
TIILNNVLLSLLMSYRNSRHQLLTVASQNHTPYPTTQDFIIDIASPLSLSNDSATHPPYRKARHPRKSNLILTMSRLIYIGLS

SEQ ID NO: 937636 - protein, 30 aa, Homo sapiens
MRCYPVEIRECDIFRTKFKKGLKFLNFKQK

SEQ ID NO: 937637 - protein, 67 aa, Homo sapiens
MLVQEQLLAILPEGLRAGGSARTDVIHWLSGGLRAARAALCADWGHDRARGAVVLGPHPVLMKNEFW

SEQ ID NO: 937638 - protein, 79 aa, Homo sapiens
LLLPMGPDVPQANQDVHYFLTYIYTGLSKHVEDAPAFKVLAHLTTSDSLISSKDKRYQPIGLYGHRDGYVASCVSSSAR

SEQ ID NO: 937639 - protein, 55 aa, Homo sapiens
  misc_feature (35)..(35): Xaa can be any naturally occurring amino acid
LRRFVTKKALCIQAFQETQKLKKQRRALKLQQQSXKQAEQRNPDSPAKAMPKTLK

SEQ ID NO: 937640 - protein, 110 aa, Homo sapiens
TSVYGDFSCKGGAKIDSPGGDIGLSLQRVFTDLRNMDATWLDNLSEPSSVALHPGHFLFTVAGPLGPFYFFRQAGPGIMVDMVQRGWIFLGPLTAKCYPIPRWGGASFLG

SEQ ID NO: 937641 - protein, 40 aa, Homo sapiens
  misc_feature (39)..(39): Xaa can be any naturally occurring amino acid
ASAEDTKKVLDSVGIEADNNQLNKAISELNEKNIEDVIXQ

SEQ ID NO: 937642 - protein, 99 aa, Homo sapiens
AGFHSMRYFSTSVSRPGSGEPRFIAVGYVDDTQFVRFDNHAASQKMEPRAPLDRDRRGPLVFGTTETRECVRAHSQSCSPEKPWGALSRLTIKQRRGPL

SEQ ID NO: 937643 - protein, 58 aa, Homo sapiens
LLGKISNIVIKDRRGIRGVQGCSCPSQEGRQEEFGVLGNLGILPFGRPAKEVLPSLRL

SEQ ID NO: 937644 - protein, 86 aa, Homo sapiens
GRDTEKTKLNNLSWLALIQLLLPCSSWLLRIGCFNPSVALTGSIKMGNFFASGFYAFNPILGPLVLIPFPQLRSREEGPKGPLCSC

SEQ ID NO: 937645 - protein, 80 aa, Homo sapiens
HRRLKLHRPPLEDLLLGSEANLTCTLTDLRDASGATFTWTPSSGKSTVQGPPKHDLYGCYSVSSALPGCAEPWNHGKTFT

SEQ ID NO: 937646 - protein, 111 aa, Homo sapiens
GHPRQQGRWAQPKSASSANQSHQVHTLARGTALRNQHLVELTEWVKAEIKLLREKCNTVHMYGAPLILKVEDGNNFRVSIQEDTVDQLWTVDSTAASSLMRLSNYYNTQGP

SEQ ID NO: 937647 - protein, 89 aa, Homo sapiens
PPSDTKALVDFDSPVGAREAGHSRVYLPVQSFSAFSVGQGRKQAGPGSQFSKAAGPTRGHSPSPLDTANQKLTRDLLGADAIKTNVGAR

SEQ ID NO: 937648 - protein, 67 aa, Homo sapiens
VALLLANINTQLSGIANAFRTVRQLNDLASYFKGIQAHVIYQMPSTAISWSTYELFKHFLTRPQLEN

SEQ ID NO: 937649 - protein, 35 aa, Homo sapiens
MGTTARAALDLTYLTVAPAVSEGDLPTTDSGSCGP

SEQ ID NO: 937650 - protein, 116 aa, Homo sapiens
MKALGQNPTNPEVLKVLGNPKSDEMNVKVLDFEHFLPILQTVAKNKDQTTYEDYVKDFGYLTKKEITPIISAEIRHILVTLGEKMTEEEVKMLVTEHEDSNGCINYEAFVRHILSG

SEQ ID NO: 937651 - protein, 74 aa, Homo sapiens
SNQRSMESQSASYWVTSSSGQGIPDGHHHMNGYGSHIIKLINANGEAVYCKFHQRTDQGIKNFYVEDATRLPKE

SEQ ID NO: 937652 - protein, 155 aa, Homo sapiens
TNTNSRAGASAQVVLLTAALSAVTGQISAKIIIVISRLTLILFSFSVTAAHDERPLQTTSPTQIGTARLVEFQSHFAGFIATVAKIDSGVFLIHVHDKLAVFIGSGSADMVVNPCVSQQCAVFRTDTTGDGNHLLHLWLNDSDIAWIESQTTFAA

SEQ ID NO: 937653 - protein, 68 aa, Homo sapiens
NTTDSKRRRKPKIATGTETYNTSNAGKKSRRSFDGRRTSGVRKTRNNAVQIHKNGETRGKALETKCKE

SEQ ID NO: 937654 - protein, 33 aa, Homo sapiens
AWRWLQTPEAYMQQRVFRSLAYMRPLSIWAMQL

SEQ ID NO: 937655 - protein, 113 aa, Homo sapiens
GAGCNRLLSWQFCVARLLPAAAAHKPRGGALRLPGLRRRAARARLCARALREPAGTCREGERSTVRRSSNGTQLQPGATRSLSWEIWIGKVDIINYYSHRFVFSRVSRSFSEN

SEQ ID NO: 937656 - protein, 100 aa, Homo sapiens
RPEGRRSPAAWRCQRSEGPPEGLKLPAQNLTMEPALHYPRSQGLGRSRSDIPAHVYLTSSHQALLDSTSDLDYGLSPVGLLVLETNLMQACKWVKDGTRC

SEQ ID NO: 937657 - protein, 93 aa, Homo sapiens
KIKNGLKTPNRKQQEDFDNRLVNHFVEEFKRKHKKDISQNKRAMRRLHTICKRAKGTLEYSTQDNLKIDYPLEGIDFYTSITKVRAKELCPIY

SEQ ID NO: 937658 - protein, 74 aa, Homo sapiens
IGSYSWSSLKKTEGIPGVLSLPNWTCNRDRIYCQGLSKLSPSTSGPHSHDYLPQEREGEGGLSLQVEPEWRNEL

SEQ ID NO: 937659 - protein, 93 aa, Homo sapiens
MDASVEEEGVRRALDFAVGEYNKASNDMYHSRALQVVRARKADRSLGGTTSLDVELGRTTCTKTQPNLDNCPFHDQPHLKRKAFCSFQIYAVP

SEQ ID NO: 937660 - protein, 84 aa, Homo sapiens
ETIINNETPKFQVDLSLVEEMFLAFRERVNASQEVEPVEPENCHLIEELESGSEDIDILPSELSFISSELKYPGMPNFAPDEPG

SEQ ID NO: 937661 - protein, 97 aa, Homo sapiens
RRSAVRSERSRHLLHTDAINGYRREKRCLPRNLPVWLSLARCHEGSRPCELDTDHESLGGVIPGIVCMLHFCQAQGGWVPWVPPSTTWGPKALQAKQ

SEQ ID NO: 937662 - protein, 87 aa, Homo sapiens
TLNGIPKFPLASIYLCCDFNAEMTWLSKASSLEVCWLKADIFKFVGNNTKLTSFVNDVVLICFEEDSLLQYIDLFIKRFPFGRIDAV

SEQ ID NO: 937663 - protein, 32 aa, Homo sapiens
RFFSILHPPKGEGLFPREKERGEKGKKPNPKP

SEQ ID NO: 937664 - protein, 37 aa, Homo sapiens
  misc_feature (2)..(2): Xaa can be any naturally occurring amino acid
IXQLLQADSLQTWTEFITPGAEKTEHKGVHKSRALER

SEQ ID NO: 937665 - protein, 68 aa, Homo sapiens
RHRGTWFLAAAHFGDACKARSGGLHGSLPMRTGSQFGLAGYFARNRAEVSWKLLEHKYVARGSCQTLP

SEQ ID NO: 937666 - protein, 140 aa, Homo sapiens
PGRGAPHFSDGAAGQRRSSHPGQGGRAEVLPTSQTMGSRGRDAPHFPDGMAAGKRRSSFLDGMAARPEMLLTFQTGQPGRGAPHIPHDGRPGRDAPHSPDGVVARQSLQSRHFGRPRQALGGEFVARRDTPLTQPWHIDT

SEQ ID NO: 937667 - protein, 66 aa, Homo sapiens
  misc_feature (44)..(44): Xaa can be any naturally occurring amino acid
ATAELTPAVHAFLGQVFGFCEPFTDLQTLLSRSLGSRSSCPLDXPTGPPPLLEPALPGLGIKFKRV

SEQ ID NO: 937668 - protein, 94 aa, Homo sapiens
  misc_feature (39)..(39): Xaa can be any naturally occurring amino acid
GYSITSTKCTVVEVTPCQTSTTTLFPPVTSLSVTVRRMXRVESSISIRAKSFPYAEITELPSFIVYDTVAFVGGRYQAVGISSFLVLKGSQQIS

SEQ ID NO: 937669 - protein, 85 aa, Homo sapiens
QPRVQEDEPLWPPALPGAQRPGFQATALFLSTPIPKPVPGLTNLKREPELEQDQNFARMAPAPEGPIVAVPTPGWGLSTVRLTPI

SEQ ID NO: 937670 - protein, 35 aa, Homo sapiens
AFARPLLEDRGDSTQTCAGKGDRGGGGFRGNRGLQ

SEQ ID NO: 937671 - protein, 122 aa, Homo sapiens
FGMRCSPPAGQAGARHLESYDIIANQPVVIDNVRPGSQGEGGRPPRGRRRQAQSERPPPASGVLRSLRGRRPRRPLVSSGGSAYLVFVRRPWGEPLAGVAEPLPRPLPESGGEVQESLSDSR

SEQ ID NO: 937672 - protein, 69 aa, Homo sapiens
  misc_feature (21)..(21): Xaa can be any naturally occurring amino acid
  misc_feature (29)..(29): Xaa can be any naturally occurring amino acid
  misc_feature (57)..(57): Xaa can be any naturally occurring amino acid
  misc_feature (66)..(66): Xaa can be any naturally occurring amino acid
MTLGRNSARGVAAQGSQFREXVGAPGPQXPARASPQHPARAFPAATMPKRKVSSAEXAKEEPKRRXARL

SEQ ID NO: 937673 - protein, 60 aa, Homo sapiens
AAQSLGKKFVPVVRRVKAHTRKPSEVKLRFVVVETTTFSAFLGDGGVRKPYGPKNPGKLA

SEQ ID NO: 937674 - protein, 69 aa, Homo sapiens
GHCWDQWCHGASEELFGLKAGSVPKSLHHHVGSHLAPQHSGQDRSLLSAHQTSCAALQTPCSPAIPTHF

SEQ ID NO: 937675 - protein, 94 aa, Homo sapiens
SAAARKQRDSEIMQGKQKKANKKKEEPKQLCGFASNPLPFTYAPRASPTTLAFPPVALTGPSTDGIPFDLSLQQAPFVLPSPQAASFPLGHSRG

SEQ ID NO: 937676 - protein, 102 aa, Homo sapiens
KETVSGWRDCYTVNRYPRPSSCFLGDMASPERLHLTCVETIPRRKGAPMTHTSTVKGERSGVCFLPVLLFLPHAPPRDSIPIPADIRAPVKSKLWVDPDINL

SEQ ID NO: 937677 - protein, 85 aa, Homo sapiens
GFDPVKATVAVDPDTGTKGGTKGMSSLSWVHWVSDAGNIYSAVLKRLQICNRQLVEELGISIEELRHFIDQELEKMALYSHARSS

SEQ ID NO: 937678 - protein, 30 aa, Homo sapiens
ACTDNAQNSRTSPITYPQQHRRRKQNKLKP

SEQ ID NO: 937679 - protein, 95 aa, Homo sapiens
MHLLPPLLLLPFGAGHAQGIEAPLGPRTLGSQPLELKEAFKVFQIQLTGVTLAQKSILTALDIFAHNLAQAQRLRRRTWHNYFGVTPFSYLTKEE

SEQ ID NO: 937680 - protein, 74 aa, Homo sapiens
MGKKQNRKTGNSKTQSASPPPKERNSSPATEQSWMENDFAGLERGSGNRSPGAAPHTGRRGTLQTQEATEVENF

SEQ ID NO: 937681 - protein, 151 aa, Homo sapiens
RHWARSDSRLQARGTVALPVPEGQRDTCSTAIPYTCEAPYSPQAPYTCNLPSPTRSLHLQGPLHLQLPYTCNLPTPATSVRLQPPFTYEIPKPATSLHLRDVTPAEALAEGGAGGAFANVLGPLSAACQSYQPLGHLPPPSNGFSMQSLLG

SEQ ID NO: 937682 - protein, 45 aa, Homo sapiens
ERKVPDVTEKKNKKLQKASAEATAGPEAAPSDEEPAPSIRHSTNL

SEQ ID NO: 937683 - protein, 95 aa, Homo sapiens
MKFNKGIPTWAPFNPATQITKQKWKAEPVYAQRAKAYLKEGRPSTLLKYLKYSKNIPNQQAPSYAAETNHQASGAKKKLQCKLATYIQNKLTYTG

SEQ ID NO: 937684 - protein, 45 aa, Homo sapiens
FVAAGFTTFDLISRMSIDDIRRIGVILIGHQRRIVSSIQTLRLHM

SEQ ID NO: 937685 - protein, 34 aa, Homo sapiens
MLGQCRSALHALSSVVEKECDLSPMSASLFPDIT

SEQ ID NO: 937686 - protein, 70 aa, Homo sapiens
SNRRSMEFLFTKNPDVLFRKAHTHILQTRKINSEVNAITNQLLTITSQEVTWTNWLSGPSYRLSVGRKNR

SEQ ID NO: 937687 - protein, 37 aa, Homo sapiens
MDYLETWTPKADQLEICTVHSTPRSHTEWKAALSSPQ

SEQ ID NO: 937688 - protein, 64 aa, Homo sapiens
TSVQLEASPAFLAVPVKKKQAPHCIYATKRQTVGLGSSLKVITKCESHRKHKNVRVLRTVFGKQ

SEQ ID NO: 937689 - protein, 58 aa, Homo sapiens
  misc_feature (33)..(33): Xaa can be any naturally occurring amino acid
  misc_feature (53)..(53): Xaa can be any naturally occurring amino acid
KTILIILTDATGKRVVFLKQLAVAYTRELDLWXQLSSSTKTTPEIVIATSTEXILQCK

SEQ ID NO: 937690 - protein, 39 aa, Homo sapiens
RLAHKCTELEEHPLNPQTKPINELNRPVRSKQGQVIPLR

SEQ ID NO: 937691 - protein, 30 aa, Homo sapiens
MSLLAATTCWLAERGADASELKLQQTVEME

SEQ ID NO: 937692 - protein, 103 aa, Homo sapiens
QRDRYRLDDGRRVRDLDRVLMGYQTYAALTLFDDVQGHTHGQCHPGHFGEVQWRLDTAGIHAGVSSAESREKLIPLARSGGLCGVTAVELTASPGTASLSCPA

SEQ ID NO: 937693 - protein, 62 aa, Homo sapiens
  misc_feature (45)..(45): Xaa can be any naturally occurring amino acid
SLERNGFHVRYSCFTPPSVTVTRLSPYTDWPGTMLADQRVLRPAXDEEALVPVRSTDTTMAP

SEQ ID NO: 937694 - protein, 71 aa, Homo sapiens
VTKTEAKLGTFPRALKKLLHTINAPCSLASLLPRGHSKPATEPPFCFEPKTTLLDAVKGLSSDTLITVTRG

SEQ ID NO: 937695 - protein, 49 aa, Homo sapiens
MHATRGVTVAEMTDPRPRRLSLLGYCYYRLQEFALAAECYEQLGQLTRN

SEQ ID NO: 937696 - protein, 107 aa, Homo sapiens
GAFDASSLSQQKEKQVIQEMNGEGDEDIVSRRPARPQPLVRRKMTGSRDLNRTFTPIPCSEFPWHRPTETGPLSVNAERSVVGLCYGGFDPFPQGPSTDGFFLHVGR

SEQ ID NO: 937697 - protein, 81 aa, Homo sapiens
RPTLNGIPLTIRSSEVNKTAEDKLPECEAVCGKPKNPANPVQQIMGEHLNVKASFPWQARLVYHHNFASGVTLINEPWLLL

SEQ ID NO: 937698 - protein, 47 aa, Homo sapiens
  misc_feature (9)..(9): Xaa can be any naturally occurring amino acid
  misc_feature (11)..(11): Xaa can be any naturally occurring amino acid
TPHAQMSTXLXYASLQRTSGDRYLVCQRNQTMPAGSPDLDSQAKFAS

SEQ ID NO: 937699 - protein, 44 aa, Homo sapiens
  misc_feature (35)..(35): Xaa can be any naturally occurring amino acid
IRFHYVVQAGFDIPISMIFLLRLPSVEIASANISXSSQGGLHVT

SEQ ID NO: 937700 - protein, 58 aa, Homo sapiens
KPLMLEAVFTLTQTWGCRVLQDANRKRLLYNRKGRSEIMLMSQKHSEAVFQTSYEKKK

SEQ ID NO: 937701 - protein, 121 aa, Homo sapiens
FLSPLLFNIVLEVLVKAIRQEKEIKGIQLGKEDVKLSLFADDMIVYLENPIISAQNLLKLISNFSKVSGYKVNVQKSQAFLYTNNRQTESQIMSELPFTPLVSCISKNFIVFVAIVKLSSE

SEQ ID NO: 937702 - protein, 109 aa, Homo sapiens
EFHPSQLHSGTIKQSCVGLYAQTPTELVCLIGDTDIELSSCRKTFPPGTRVTRAFITHAASHGVYGSMCNVLTMMMMPLLFDQMGDVNRMKTKRAEVALNDLKMALGLW

SEQ ID NO: 937703 - protein, 90 aa, Homo sapiens
SEVVLKTPDKNVIFSPLSIFTSLAFLSLRAHNTIMTEILKDLKFNLTETFEAETNKNLWHLLCTLNQCSCELYLSMGNGQPRSSALKVCR

SEQ ID NO: 937704 - protein, 48 aa, Homo sapiens
TLLLLYEPRQAQRVAHADVFAPVKPMCRLERVSRCRAMGQCADSRTLT

SEQ ID NO: 937705 - protein, 73 aa, Homo sapiens
PSQTIIALLLRGQLFAVNSGNDATDIADDDCPKPPEIEHDYVELSTRYYVQELLQTAYRRRQSTILTVGVVNK

SEQ ID NO: 937706 - protein, 101 aa, Homo sapiens
FTGIFFLGFCEPNSFPTIRRFRLFQLKEFLNFYTQKTSPGLPHPFSRPNNQIPPHSDSSKPRVQTTLKTSDFHFAFQIFSKDFPYSPPNFRFVRPRNFHSQ

SEQ ID NO: 937707 - protein, 40 aa, Homo sapiens
CHTYWAVSEDCSQQRDWLMGGPKDKEGGVFGLGAFIVDLI

SEQ ID NO: 937708 - protein, 93 aa, Homo sapiens
  misc_feature (53)..(53): Xaa can be any naturally occurring amino acid
  misc_feature (67)..(67): Xaa can be any naturally occurring amino acid
TVCIRGTTPSHYALIQLSVIQLPQNSITLLVLIIHLHKMCILSRERSTYRFSXSSDLHYVLGHLSYXEQITLDNIWNRLCSSFRRAMSRNIRY

SEQ ID NO: 937709 - protein, 127 aa, Homo sapiens
  misc_feature (110)..(110): Xaa can be any naturally occurring amino acid
VAQVPTDPGHFSVLLDVKHFSPEEIAVKVVGEHVEVHAATRSARMSTDIVAREFHQSVTACRLAWNPAAVTIRADPPRRSCPYQAAHSDRPGPTRQPQLKKGGGLAAPEXNAPPQAPSIKADLTPPK

SEQ ID NO: 937710 - protein, 89 aa, Homo sapiens
  misc_feature (74)..(74): Xaa can be any naturally occurring amino acid
DADGNDTIDFPEFLTMMVRKMKDTDNEEEIREAFRAFDKDDNDYINAAELNHTMTNPEEKLINEEVDEMIKNVXIDDDGKVNYPALAQM

SEQ ID NO: 937711 - protein, 91 aa, Homo sapiens
  misc_feature (49)..(49): Xaa can be any naturally occurring amino acid
  misc_feature (51)..(51): Xaa can be any naturally occurring amino acid
  misc_feature (74)..(74): Xaa can be any naturally occurring amino acid
  misc_feature (83)..(83): Xaa can be any naturally occurring amino acid
EKLAPGTINVLSFLFTQQHVGDPAADGEHTSDSGHCRVLYHFTSAAGGXSXTPILLISSTGPFGTVDQTQVIGXSRNADHSTXVSYGTSGV

SEQ ID NO: 937712 - protein, 83 aa, Homo sapiens
  misc_feature (6)..(6): Xaa can be any naturally occurring amino acid
ATNLMXFRRTLTDRYHPTDHCTLIGHFPLTGHYHLTGSPLIDQFHLTGRTCAPHLTCALLPTCVPHRTRVPHNPKTHTYSDGW

SEQ ID NO: 937713 - protein, 184 aa, Homo sapiens
  misc_feature (4)..(4): Xaa can be any naturally occurring amino acid
  misc_feature (96)..(96): Xaa can be any naturally occurring amino acid
  misc_feature (105)..(105): Xaa can be any naturally occurring amino acid
LPFXQPQQLLPASASSGGPGCVGTGTRTRRPHHYSTRAAFAVAPGSCIGRALHLKENATVRASRTHARCPIKWKTKTHKVDHAWERLAHQVRNGTXRIRLEDKVXRSRREPGLSSTAGFSGSRWPTQTEGHDPRINGCSRAAWGQGTRVLNVPCPLRTHLAWTAGTRFPLGLGASVGSTLELGR

SEQ ID NO: 937714 - protein, 79 aa, Homo sapiens
SQPCFARWALRYILVNYRESTGFGQDSILTLPGNVGHQDEKDVQFAVDKEHQEEHIDASHVDLMGGSHGGINTSHMIGQ

SEQ ID NO: 937715 - protein, 85 aa, Homo sapiens
  misc_feature (73)..(73): Xaa can be any naturally occurring amino acid
DSVLLLHLSLDPVHVVEHFDVEAIAPAAPDAPGHNARDTQRSVLKSLTAKTPPLSPWQASCFRDGCPAQNTPXKHTFTKPKQSGQ

SEQ ID NO: 937716 - protein, 157 aa, Homo sapiens
MQTGLTQHSGWVRAGTQIRAACPGPQLPHIVGSEFHTHMQRSHKVSQTEHSAAWRWQARVWHCTRQEVRAGSWQEVGQAPHLIRPVLAEAEHRPDPGAGLPAPSCWLADGITQVVTQRLLGVGEGEMLSVLEFAEMAASAVILCFSPDPEEDEGAGL

SEQ ID NO: 937717 - protein, 46 aa, Homo sapiens
MLKKTELKKKCSPQPVPTKGEKKQVAEELCGDGEWFLPGPKGCTGH

SEQ ID NO: 937718 - protein, 73 aa, Homo sapiens
DDESLKELFSQFGKTLSVKVMRDPNGNPKALALSVTKTRGCNKAVEEMNGKEIVVNHICRRAQRSRRSRVKRI

SEQ ID NO: 937719 - protein, 93 aa, Homo sapiens
STTSSIAEIYETELMDIEKAIAHYEQSADYYKDQESNNSANKCLLKTAAYVALPEQYHKTIDTYERAEPTPCTVLSLSTMSAANSGSCIHATL

SEQ ID NO: 937720 - protein, 118 aa, Homo sapiens
SRGVSSAPQQIPALPGAATHTGFQRHGVLCLLQRRRQQRERRLQPGRVSQLRARDRSEKQRRETPARRTARTLHSAHVASAPHTAAPGPLLPHDVVFIICGVENITQLPQELPQMMAA

SEQ ID NO: 937721 - protein, 64 aa, Homo sapiens
EFVSTLTEATQLLILYHESDELTIGQKKTTGIHGRQSDKVTNSQMMVISLRTSFLDSLRRREVS

SEQ ID NO: 937722 - protein, 98 aa, Homo sapiens
  misc_feature (34)..(34): Xaa can be any naturally occurring amino acid
PSPSTSFPRGVQGAPPSPTALSFHGGHQGPWNGXRGQSSRPSFNDELQSTVPSYLPAKSQGLGRLGHQIARSRMSDRLGPWDGQRTSNLGGFHSLTRS

SEQ ID NO: 937723 - protein, 40 aa, Homo sapiens
ELRVRHVVEQVEQIQKEQNYQRWREERFRQTSESNNQPVL

SEQ ID NO: 937724 - protein, 41 aa, Homo sapiens
NYSPRFLFLDFTFLVKLTDGSETLSDVLFEEHHFQDSAGLP

SEQ ID NO: 937725 - protein, 85 aa, Homo sapiens
GHGRVPVDVAAQFRRVRRGVSVKVSRPAAAANSAPGSSLAGDGRAVYGFGVGLVASKIHTSSFASEVRGNFRSLLAFATPSSRTE

SEQ ID NO: 937726 - protein, 71 aa, Homo sapiens
GRFTDAASQLAVLPRKITENYSQTSKQGIYFRKINPTEIYPNLLIQIWIKVSSDTFSSDFRIFIKICSRWI

SEQ ID NO: 937727 - protein, 105 aa, Homo sapiens
DSKAINSVLKRICSDVEVVSLIKQLTKYVFSMFAQTAQLRDDSRKSTMGTLQGRGNPLKARSPNSGLNCLLTKLGHIMYRNLVQEDPLSSITTLAQLSVVVNSNQ

SEQ ID NO: 937728 - protein, 55 aa, Homo sapiens
VGSSPTSALFEKCEANGAGAPLLSTFLREALQALSDDATIFCPTSGYYPNLQCHR

SEQ ID NO: 937729 - protein, 123 aa, Homo sapiens
  misc_feature (25)..(25): Xaa can be any naturally occurring amino acid
MATAAQFAKARSGVGVVGATPPGRXSANGGLRTAERGNGDVKPVVSSTPLVDFLMQLEDYTPTIPDAVTGYYLNRAGFEASDARMIRLISLAGQKFISDIANDALQKCKMRGKAPEAAGARAR

SEQ ID NO: 937730 - protein, 47 aa, Homo sapiens
GQAQDPDGQSLAQGPFPAVKHRLLPQLLGTGSRPEGDGVLVLQRCFD

SEQ ID NO: 937731 - protein, 58 aa, Homo sapiens
SHQCVGYAITYVHEKNGENGSMRMSVHTHTHTYTTSLHMYRGSEIPPILTNYKRNSSR

SEQ ID NO: 937732 - protein, 62 aa, Homo sapiens
MQPALNKIQPANSTSNNHKTSHTKSSHHYSIKITRIFHRTTNSNCRLLQRHPYTKNATYNTT

SEQ ID NO: 937733 - protein, 52 aa, Homo sapiens
QAPNDLFCSIKRRQASPKYHHWDILGPALKPNPHNLKLNQAKGNTVTQQQGS

SEQ ID NO: 937734 - protein, 134 aa, Homo sapiens
SCMLCVPFCSPALRACGPPIRVCSWGGSYLHVPGGGLVSLLIYLYRLLWGCPTPLWVRLAGRLFSLLLQHVFLLTSSVWLSCVCPPYLVARTRAVLGGRPAQHFPASYHVVSPSPSPVCVASSGGVLAELLCRP

SEQ ID NO: 937735 - protein, 102 aa, Homo sapiens
  misc_feature (32)..(32): Xaa can be any naturally occurring amino acid
QIQVFEELLTKCKKKILWPQQLHVRHVAIEQXLKNCSKIPCLQVGRTGMKSHLPINNCPKQTYFDALPFIGLPDMQTLKKLKKVVAFYGIKFANIGSITLLQ

SEQ ID NO: 937736 - protein, 172 aa, Homo sapiens
SGFVTTKVPFPRTLRFKPMLQQGIELLTSDPSWVSSASWYFLNVFGLRSICCLLLRNGPAGGRPRMMQEQMTGASYAMPARQRTTLSIQRREAQELAGHQWALDAAGEDAAMTNALHFEGAFKMDGRSCTVGRPARDGVCQELGLAPNLETTDRAGSALEYQWLMLELAGMQ

SEQ ID NO: 937737 - protein, 150 aa, Homo sapiens
LGWGGAVSSEVICWSVLVASTRAGSVPHPPPVPVLPMSLRPPLQRPGSPGPSTRPPPRRESLGTGKFWALSGLGRIVGLLHLQLQDPQAAPGAHPQLRERHGFNARSGWSRAASVLPKRGPGRGVGIGPQQARAPPRRYCALRARMPGGR

SEQ ID NO: 937738 - protein, 120 aa, Homo sapiens
VSLTSHPTLRFLASASRRAPGCGCGRKWGSRSGRPSSRQAGQCRETDPLRGSAERGPGGAECQPLRFHLVPPVLPQPQTPPHLGCHQGTLQAAGTARAPGSLPFPANLDQVDLVLQGLTR

SEQ ID NO: 937739 - protein, 52 aa, Homo sapiens
APGAKLLTGAERNHGGKRGLEAALAHYTAPSRVPALRLNRRPARQLLGSTAA

SEQ ID NO: 937740 - protein, 149 aa, Homo sapiens
PVPAGPLSVPPLPPLPSPRWPLAPPLSLCSSPPGLPPLPPPVALPVLCAAPGAAGAWWRAPVVASSAAPPAVTLRSVASGGSPRVPVAVLRPLRSAFVPLPFPGAAVLLARVLPLSAAAPFSPAAAAALRALPGPPALLAPVPRSRPPG

SEQ ID NO: 937741 - protein, 82 aa, Homo sapiens
PISGGRSGSHTSEDYHRGLCSLRPAERMTNIIQASPVLTLQGSEDSGRPHLNPGLQQHPPLLAPESREGAKGKQKQALVFLQ

SEQ ID NO: 937742 - protein, 101 aa, Homo sapiens
SRTDLTTRTAMTREMEKNSFKMPEILDKLKAEREHSITIDISRRKSETNNDYMTIIDAPRHKDFIKNIITGTSQADCAALIAVADVDEYEAGIYKHVQTRE

SEQ ID NO: 937743 - protein, 102 aa, Homo sapiens
TGYVMEPPVICLCHKAEFCLCVQFHHLRLLNSRAENQVMHLQWEVYPKITDLVGEWKRVRTERLNDREQMVLTGGAGPGECTAKDDVTHCQVSMTGTTVTKP

SEQ ID NO: 937744 - protein, 99 aa, Homo sapiens
CIGTATVHRCLTSSLSTSVFLVSSEPGATYTLESPRLGPGPAAYTLESPTLDPGLAVSGGSHVGSGYSPGGVSRAVLAPPLEPLTCLLSHPVLLMQKYR

SEQ ID NO: 937745 - protein, 66 aa, Homo sapiens
PHTLKGCHLSSKNSSTKAFLRRSGEKPLKQFTRNPGTLLFGLGTLTNGPKLSAGDRHPKRRIGKRG

SEQ ID NO: 937746 - protein, 151 aa, Homo sapiens
EAFQKGPQKVGLYRIKVPSGKKTRGHGPLQSGGGATSTQLGGGRKQDQSGKAEKRETEWGCAAEENDLRAVGKTSFHNGRILSPPVLTGEGAPRRPPQAGDQTPPLLWRRAQKTIMLSRPPPRQNILDNEATQQGNPLHQPGESPPRAHHS

SEQ ID NO: 937747 - protein, 101 aa, Homo sapiens
EIQAELVSDGDEELVGNYKSCSYYALTKRLAAFCPCPRDSETLNLREIIVGCLVEDISKQQSIREETEHESLENLQPDNVIEKEKPIFWGEIQASCRNLHK

SEQ ID NO: 937748 - protein, 83 aa, Homo sapiens
FQNPSKPKNRSPSPLPPPILFYPLPPSPPPHLFRNPKHPLYTGFATNLPPNYNTISPKSKPETNTSNHTPPGPRDHSFHHSVV

SEQ ID NO: 937749 - protein, 90 aa, Homo sapiens
VEAIQWDGSVSEVWIGKLHCNDQSFYCSTNPTLAYLCHPLDTKRYLPQGGKNECGWFLQGRSTLQLTGNIQEEQRTPYPDKELIVYHASR

SEQ ID NO: 937750 - protein, 86 aa, Homo sapiens
  misc_feature (51)..(51): Xaa can be any naturally occurring amino acid
TIERLVVQGQSTGYKEPRCDTYPRELSPQLGFDVGGSVFHECMFEKVSTIXADLFHLLKVHNSNFFWALDSVNPGLLKHSVCALFA

SEQ ID NO: 937751 - protein, 110 aa, Homo sapiens
  misc_feature (82)..(82): Xaa can be any naturally occurring amino acid
VTTNAPWTHANTNRPSGVLNINTLSVHHLQKSFSAESRLWEASETSNRRAALQTKLLQKNFSDSSGLGYHKKIHTEEKPYKXLSPRKVSSKDPTTADITGLALKRNFMQV

SEQ ID NO: 937752 - protein, 66 aa, Homo sapiens
MTSTQILLLNGAKALHGGGADCRKTEKLKPHEVLSKRGYEPPRATFQAYQTTQDPNNKAANEGRTI

SEQ ID NO: 937753 - protein, 72 aa, Homo sapiens
  misc_feature (9)..(9): Xaa can be any naturally occurring amino acid
MSAKCAFQXDSVRGREDVASTEMIGMRKKSSETNTCLVCYKAGPVVRYDNGCNAGAWREQTTYFNQCGDAVI

SEQ ID NO: 937754 - protein, 93 aa, Homo sapiens
  misc_feature (35)..(35): Xaa can be any naturally occurring amino acid
  misc_feature (57)..(57): Xaa can be any naturally occurring amino acid
  misc_feature (69)..(69): Xaa can be any naturally occurring amino acid
  misc_feature (74)..(74): Xaa can be any naturally occurring amino acid
  misc_feature (79)..(79): Xaa can be any naturally occurring amino acid
  misc_feature (86)..(86): Xaa can be any naturally occurring amino acid
  misc_feature (88)..(88): Xaa can be any naturally occurring amino acid
MKGGKLREAGHLLFQTWSLCFEEKARTPESKHPRXPKKAKKDVHQPPLNASLPRIPXDQREKTNSRGKXLWGLXPQDNXARRYLNXPXRKNLF

SEQ ID NO: 937755 - protein, 94 aa, Homo sapiens
AAIDRCVPTIDADKHTGKVEAGWAQCNAATRYKGWMYWKCRKAWSAHNHENALKLSANIGTPAGSLRAVDLRRLHDDLRDVLMDGAAGLKRLGE

SEQ ID NO: 937756 - protein, 178 aa, Homo sapiens
AEGCTLRNTDAVVGIVIYAGHETKALLNNSGPRYKRSKLERQMNCDVLWCVLLLVCMSLFSAVGHGLWIWRYQEKKSLFYVPKSDGSSLSPVTAAVYSFLTMIIVLQVLIPISLYVSIEIVKACQVYFINQDMQLYDEETDSQLQCRALNITEDLGQIQYIFSDKTGTLTENKMVFRR

SEQ ID NO: 937757 - protein, 55 aa, Homo sapiens
MFHTVQSPINHSDNIATTAKYANPLSTRALSRRRTDVAHVENIAIMGIPRESLTA

SEQ ID NO: 937758 - protein, 54 aa, Homo sapiens
GVSESHISVQGCEVLSESRREQVGVGGNTSRGQDSKTSLFVSTDSNLKTTATQS

SEQ ID NO: 937759 - protein, 42 aa, Homo sapiens
AAHHLVHDHAQPPPVHCTAVVIVFKHLGGQVLQVCRKKVLGG

SEQ ID NO: 937760 - protein, 113 aa, Homo sapiens
  misc_feature (30)..(30): Xaa can be any naturally occurring amino acid
  misc_feature (51)..(51): Xaa can be any naturally occurring amino acid
  misc_feature (60)..(60): Xaa can be any naturally occurring amino acid
  misc_feature (96)..(96): Xaa can be any naturally occurring amino acid
  misc_feature (104)..(104): Xaa can be any naturally occurring amino acid
  misc_feature (107)..(107): Xaa can be any naturally occurring amino acid
MGMVGSGGFPPRNSLPLACPKDSFCAGNLXSSSCKQESVGLCLCLPQRGLXGVPRPASWXRTDEGTRAFLLSCNDPALCCRDKQLLGLPDCLMLVXKRDSAVSXANXKKVKIS

SEQ ID NO: 937761 - protein, 105 aa, Homo sapiens
MALGVHRAQVGSNPRVCTFVWILNTDLKGRLPGYLIHQSLRAHRCFEFAVSPCRRRESSEAWEARGVNCGPLPPLRARVLSPPLPEPERVPVGLRAAHMGPGPRL

SEQ ID NO: 937762 - protein, 141 aa, Homo sapiens
  misc_feature (4)..(4): Xaa can be any naturally occurring amino acid
  misc_feature (8)..(8): Xaa can be any naturally occurring amino acid
  misc_feature (12)..(12): Xaa can be any naturally occurring amino acid
  misc_feature (33)..(33): Xaa can be any naturally occurring amino acid
PWAXPGCXQELXERKEPPEGAFWKVPSATDPIXQLRPLPKVPPHQLGLDPIPSILAWLDPEDDRPIKEQPRKTENVSRTRSPGRPTHRCAPSISGCKTKGLAGGDRASRPLSARSEPSEKGGRAPLSRKSSTPKTATRGPS

SEQ ID NO: 937763 - protein, 106 aa, Homo sapiens
YPPGLLIAFSACTTVLVAVHCLRHVSTASANIERGQRDNLNSVKESPMTHDRYMSCLGFSTVIGTLLFLAEVVLLCWVKFLPLKKQPGQPRPPASPPPVGTANVST

SEQ ID NO: 937764 - protein, 110 aa, Homo sapiens
  misc_feature (24)..(24): Xaa can be any naturally occurring amino acid
  misc_feature (60)..(60): Xaa can be any naturally occurring amino acid
  misc_feature (70)..(70): Xaa can be any naturally occurring amino acid
  misc_feature (81)..(83): Xaa can be any naturally occurring amino acid
  misc_feature (89)..(89): Xaa can be any naturally occurring amino acid
VVPGRVRLGVIGLLLGRPRGEHRXHEGYTGKRTERPARAPVPVDPESAELSGQGARERLXGKHGPVPLKXNVSQGAETTRXXXDGEQAXEAKGEALGETDSERTDENRPL

SEQ ID NO: 937765 - protein, 142 aa, Homo sapiens
  misc_feature (60)..(60): Xaa can be any naturally occurring amino acid
QELETQHRQLAPKSLRGTGRWHMLEAARFRLGASWRMGPHFPVDPSAKQGMPLGRIQGKXSSSRTHHPPPAHCPCTAAGTYCPAARVAAAYGFSPEGKLEAHGCGRPAAGGPGATPAAEVTVGKVERRHELLHPLQRGAPVL

SEQ ID NO: 937766 - protein, 105 aa, Homo sapiens
  misc_feature (88)..(88): Xaa can be any naturally occurring amino acid
RGLAGVVLLELTAPGSAELWGPGISGWTGVVLRRGAAGWTGLLSPDRSRVAAPPQGSWDGGIRLSDEGFGGRAPLCRSAEGGPNVRRXVALRRRYPGDEPKKKNS

SEQ ID NO: 937767 - protein, 75 aa, Homo sapiens
LGGSSRPSGAQDVPAQIEGRQIEQFAFDEVEEVEDAARSAVAIREGMNGFEFDNAEMAMRISGSDRVVLASDRPI

SEQ ID NO: 937768 - protein, 113 aa, Homo sapiens
ISEPEGTIQTYFLLGRVQPNPLHLAPQEDCLGTTPWPRLSWDLSSPSIGKGRSSYSMTTTTHESSRVITTGGPCCPPAAQSLEPRLNGTDKSDLAITAFSFCFLFSSFLLYIN

SEQ ID NO: 937769 - protein, 80 aa, Homo sapiens
MITSIVAAMEADHLGVPRLDTITFLSNFSAWSPSWHSPEVLLTQFNENLTYLASQGRLIFSPHPVISDTFDKLLTTTKSS

SEQ ID NO: 937770 - protein, 69 aa, Homo sapiens
AAVTNVCRQQGYSVFPARAKTTAFTMEVPPLWCSGFSDRFYFSIRNAFFSICIVYNSSFLTSNPYLLIY

SEQ ID NO: 937771 - protein, 74 aa, Homo sapiens
SQATGRRLLCASLLQRLGVSGSYGDTGDERTCQAGGPLKSVYSDAGSPSPSTCTDIFSVVVSECPYNKPLRFVL

SEQ ID NO: 937772 - protein, 56 aa, Homo sapiens
RDNSRVPQSVLEMSLSPHTWAAPALQMTKRRPLSTRAGGVKRQYSSFRSCCFNLND

SEQ ID NO: 937773 - protein, 116 aa, Homo sapiens
AVDPVQDAEPAGRLVKRSSRLTDSVAAPNTYSICPLTPTSKSLRHCRMGSPGRFSPIASTRFRSGAFLHVVMRPVDARDEGRACDRRAVVGVLSRPAPPSRSARCFSPSGVSATCS

SEQ ID NO: 937774 - protein, 80 aa, Homo sapiens
CAADMPPCDLGAGGTGQGSSQVDLLKDILLPPGPGVSTKPALSRTPRRRRPTEPVRLPESPAPRLDEALACDTCDGGCAC

SEQ ID NO: 937775 - protein, 73 aa, Homo sapiens
RILGQAAFDLTLVMPVADSLARIFSAACRGARVLVLDLDNTLLGGVVGDEASSLVVGEGGAAARLTGRQRVLD

SEQ ID NO: 937776 - protein, 46 aa, Homo sapiens
MAQSLSQEKMLADWLEWEAWWSQELPGKLWHSRESKDYSIPESRER

SEQ ID NO: 937777 - protein, 67 aa, Homo sapiens
  misc_feature (7)..(7): Xaa can be any naturally occurring amino acid
  misc_feature (34)..(34): Xaa can be any naturally occurring amino acid
AVRAGSXDVLLAVQVGLRTSFVALETERSLDFEXTCTGRRQRWHSIPSTVRRADAATPAVRAGRASS

SEQ ID NO: 937778 - protein, 211 aa, Homo sapiens
  misc_feature (22)..(22): Xaa can be any naturally occurring amino acid
  misc_feature (27)..(27): Xaa can be any naturally occurring amino acid
HRMSALVQVQDRDRGQPASVQXWSPGXVPTTGAASPPLHMLAKGTELPYRLPRVWLNAAALVLYGPGVLRTDSNLTPGPLSFLDFLRERLLQLWEAWSSVSLMMTTSNRPGSLLLSMSAWAAAAGFTRLSSVSVLRCRAAAPARAVKAADERCEMERRSVALMFRTPCRSTSSTQMRFMACTAFSGTLLVPYRFPETRHARLSRPLLCHAA

SEQ ID NO: 937779 - protein, 120 aa, Homo sapiens
NTTRPYHSLPSEAVFANSTGMLVSAFGVLVLYILLASSWKRPEPGILTDRQLLLQLRPGSGFPCDLVSVTEQPTNPGAVSKNRACPMSHSDEYTEVAVDFLYFSLLDQGLLLPLAGLACS

SEQ ID NO: 937780 - protein, 172 aa, Homo sapiens
SALSPVPGSGSGSRATAAQDVGPPAFLPGPHVAGRLLRVARMLLPWPPLPPPWPALVVLGLFGLLAASSPRVCSSSASENQTCRDQEKEYYEPQRRSVARCPQTYVSAKCSRIRDTVCATCAENSYNEHWNYLTICQLCRPCDPVMGLDEIAPCTSKRKTQCRWQPGMFCAA

SEQ ID NO: 937781 - protein, 151 aa, Homo sapiens
SGKKQPFCDGSHFFQTRLALVSTIKFEGPSRPSMVGSSCTVQSTRREAPRSCVWQPTGSETLCRKAESGLPSSEGAAAVQPQVLGPGLCQAPPSVGKETGAEPKRLWYPLLAHEGRIIPYNLKVSSLGQAGVGPGSMFADGEDGKNKPAQP

SEQ ID NO: 937782 - protein, 91 aa, Homo sapiens
AAGIRHEAHSTYALQIPEFWMGVTGHQKRIVECVGTINLTKVWVQLRTPSTLRVCNKASIRDKFAPWACTRVRVGHVNGIPVNGQTLAHWY

SEQ ID NO: 937783 - protein, 98 aa, Homo sapiens
  misc_feature (25)..(25): Xaa can be any naturally occurring amino acid
GHMRIVVGCVTHFIRSVRLSFAHLXCAHAHRVQRIQHHRRSGCTARLEAALGVAVGVVEAIVSYERVLSSRPACGRYLGVMRALSSRHLEVSVEQSTA

SEQ ID NO: 937784 - protein, 85 aa, Homo sapiens
  misc_feature (38)..(39): Xaa can be any naturally occurring amino acid
  misc_feature (41)..(41): Xaa can be any naturally occurring amino acid
  misc_feature (46)..(46): Xaa can be any naturally occurring amino acid
  misc_feature (70)..(70): Xaa can be any naturally occurring amino acid
  misc_feature (84)..(84): Xaa can be any naturally occurring amino acid
AGIRHEKKLSKDRMKKYMAKEGKIVAKEKPAANCLVGXXAXLGRTXPFIAIDLGLQCQGNLNRVTNQPAXCETRSVEDVSKLLXA

SEQ ID NO: 937785 - protein, 123 aa, Homo sapiens
RAGLLEVTARSRCREEDAAAALVPLAARCAQLGLIRPLCDEGATLTQLVRSLRERLLHNQWPSEWPTIDERFLSAVLPRPNRPSRQSIEVNLDSGERMGRAVPPTEHGTSQLMAAVDRGGERP

SEQ ID NO: 937786 - protein, 77 aa, Homo sapiens
  misc_feature (3)..(3): Xaa can be any naturally occurring amino acid
CRXFGTSCRSPITRSVVSLTAENTAITRPSSSGSGVRIGEVRLLQIAVASSYSDSFDQVACRAQHLQLGADECQMAH

SEQ ID NO: 937787 - protein, 62 aa, Homo sapiens
AGIRPTEETHSYYSHSREGINPPLELQPMSLIKEKPTENQIISSHPAYYTIFIVGFITLSTR

SEQ ID NO: 937788 - protein, 82 aa, Homo sapiens
PRAARIRHEHEYHNQIGTFASGWSSSGGFIATWYVPGTLDRPPVTSISSKKELNPCWEGMEWLNENCWSSDYRCEACSVLET

SEQ ID NO: 937789 - protein, 76 aa, Homo sapiens
AIPTPGGIQSETGADTIANDQDSTRRCFWAMHIKARQQLKNHTRIGFSMGASILTAKNLSKVFQREVTDYLHDSAD

SEQ ID NO: 937790 - protein, 113 aa, Homo sapiens
PELSTYACFCRQYYDGGCITPRSLLTRKHSVFSPLTGAFNNWARGHFSQNGNGGLPVQLGPGTVEDQCGAFPPKGKSCSEFHNTQGAQYRTGENAPCYAEIIVARINLGATSN

SEQ ID NO: 937791 - protein, 119 aa, Homo sapiens
MLAFHEKSCWWHLSAQLFAVTQHNEHTLANDVRTKRLHQCRVWTHCNGFCATVQHVHSLVIRRRHVTFYDGADLAGTCDPMAPAMAPCTELAEASSSFTDQASTFVSALSQAGTKGVDC

SEQ ID NO: 937792 - protein, 113 aa, Homo sapiens
VDKRHWLALDDDNGYGVSQPCRKNRLGTVAHACNPTTLGWSKPVDHLSPAVRDQTRQHSESPLSTKNLKISQGMVVCTSGTSYQEAGVGGSLDLGRLSLHAVSHDCATGLQPG

SEQ ID NO: 937793 - protein, 103 aa, Homo sapiens
MLLYSSLGDKSSLGDKSKTPSPKIYIYTHREKRYSEKRGPLQRLIPIIPAFGWLRPADHLSSGVQDQPGRHSKTLSLQKIQKLAGHGGTLVVPATGEVEVGGW

SEQ ID NO: 937794 - protein, 85 aa, Homo sapiens
AGLVKDFSDIGLRLPRPHGKKFSTLDVDEVGRGFISNCFGQQSYPTARRCIEQYSLARYHAKLQEFVWVLHRILDQLLELTYDIL

SEQ ID NO: 937795 - protein, 102 aa, Homo sapiens
MLLYSSLGDKSSLGDKSKTPSPKIYIYTHREKRYSEKRGPLQRLIPIIPAFGWLRPADHLSSGVQDQPGRHSKTLSLQKIQKLAGHGGTLVVPATGEVEVGG

SEQ ID NO: 937796 - protein, 84 aa, Homo sapiens
MKAQSIRSSGKRRSELFTDVVEKEVMSSNQSISSPVLDAAPSITSRSRKKKVCIFFRNERWFTQYLNQGVSRSVSPPAICDMTG

SEQ ID NO: 937797 - protein, 56 aa, Homo sapiens
MLRWGETRLDDWQALGQRGQLAGSQAVTSRVARATGHADVALRRCDDDRGSGTALA

SEQ ID NO: 937798 - protein, 31 aa, Homo sapiens
GRRLGTAGAAQVMEGGQVEYKPLSGIRYMWS

SEQ ID NO: 937799 - protein, 46 aa, Homo sapiens
PWGLDATAAEHERPYSLRGRSCLFEGEKEDQPLTRDNKGTQLPFYS

SEQ ID NO: 937800 - protein, 36 aa, Homo sapiens
MAEVEQKKKRTFRKVNYRGVDLDQLLDNFYGQLDAA

SEQ ID NO: 937801 - protein, 46 aa, Homo sapiens
RACTFEDVAVEFTRRSGRCWTLSQRDTVTRDVYAWRTSGTLGLTRG

SEQ ID NO: 937802 - protein, 41 aa, Homo sapiens
MLAAGPLAKLARCKGPSWLAEAFTSRFRWQRTYKYVEQARS

SEQ ID NO: 937803 - protein, 54 aa, Homo sapiens
MALVLLLSNSSSNSNSSSSSSRHRRLHSHSSSHRQALWFPHGNPRLALQQSQMR

SEQ ID NO: 937804 - protein, 117 aa, Homo sapiens
SSWLILGRDLSGGKAGAIQGRRGLNLPRGPPVCHPANFLLLALPSALLPVLGRWSKGRQLIPHGRSLRIYRVEPRGALGGWASSSDFSSPMPLPRTQTLQQGCWFRALLTSQMYERV

SEQ ID NO: 937805 - protein, 70 aa, Homo sapiens
CVENVREARWRRAGVRWRRRFEILAADEVRIRCRRKSGRMTTIGRRMFFSSGDIPQGWSRREHEQAVDAR

SEQ ID NO: 937806 - protein, 81 aa, Homo sapiens
GLLFLTVLDGQIGDSLSASTALDFLSLATLGTNFLANFVFWDRQHRFWVGSSCQPTIASRSVRNISPTVREPITAWLIVTF

SEQ ID NO: 937807 - protein, 117 aa, Homo sapiens
KQRQVGGARPQNTQEAWTHVSGEERLPARVGEGASVLEEPKAPGASQCSLGLQPAVCGFHFLPCPGLRDVLSDRPSPCQTWVSTDCFLPSFRSVAVAPSRQVSAVRQTTGLQTVASQ

SEQ ID NO: 937808 - protein, 47 aa, Homo sapiens
HLSPLRGQVQGPKKIREEALSQCQDNPGLLPRWVPQPINLFEANGRA

SEQ ID NO: 937809 - protein, 34 aa, Homo sapiens
MPVIKVNGKLLGGSYYSCVLCKVPWESPRSENFT

SEQ ID NO: 937810 - protein, 34 aa, Homo sapiens
SSEAVRRLPPFTRVPRDPAASCGENMLLEVLLIR

SEQ ID NO: 937811 - protein, 37 aa, Homo sapiens
MREAFRREKSKSALERKKRLEEIMKRTQENRRYKIRK

SEQ ID NO: 937812 - protein, 60 aa, Homo sapiens
WRPQQREVLRRCVEGIQSAGLLFLRRISLDFGARVQLKEHFFTDSAMFRRGIFTLFTRET

SEQ ID NO: 937813 - protein, 32 aa, Homo sapiens
AILDPRDKKIQCEGDVVGGPSCDNDPGSDKFY

SEQ ID NO: 937814 - protein, 75 aa, Homo sapiens
DTPPGWPAAEPADTAFLLERVFISAPFSYKPLIKDLSLKIFEGQSLLITGNTGHLQDLSCFRVLGGPLGRVHGAQ

SEQ ID NO: 937815 - protein, 67 aa, Homo sapiens
WCILALVCISVPLRYCAYFGFKKNAIEHPVRTNQSSTSEFLNSRSTRRPFLGIIMGGVLPFGCIFIQ

SEQ ID NO: 937816 - protein, 73 aa, Homo sapiens
RARRRRYNARFPAGRESQEDHADGRRDLEGRARAVPVQSIFPGALSSSLESLLKKAAKVTQSRERKDHDHIPT

SEQ ID NO: 937817 - protein, 58 aa, Homo sapiens
EGLGGSQQGEGILLPQLPKQSPHPWGFSFSLHPFGRVLGLSKLAFDLFGFLLGLEGRP

SEQ ID NO: 937818 - protein, 45 aa, Homo sapiens
LACCKCRFFFRGLICILLELVEGSGWGVLLEHWYSLGGMEVVPFC

SEQ ID NO: 937819 - protein, 57 aa, Homo sapiens
LAGSAEAARCLELLKKDVNPAGVRQSSWAAFLKKSRGSLKGPRMGWIPSKLAKQQKS

SEQ ID NO: 937820 - protein, 69 aa, Homo sapiens
ADGEEPEKKRRRIEELLAEKIAVDGWGVWDTLRLWKVAWNHVKKFLGDLGPLHKTLNFEPRHLISSSSF

SEQ ID NO: 937821 - protein, 51 aa, Homo sapiens
LVTVWSSATRFVFQFALADRVPAREEGFDSGFRLPSSNGCPYPEEELCICL

SEQ ID NO: 937822 - protein, 68 aa, Homo sapiens
AAAPAPEEEMDECEQALAAEPKAKGPLSAHLPPRVTLCVWMNFKRQSTPLRDTTSLVGTSIFSWGALL

SEQ ID NO: 937823 - protein, 42 aa, Homo sapiens
MAASSVLLHTGQKMPLIGLGTPEEEPRSGKTTFKYALSVGYP

SEQ ID NO: 937824 - protein, 55 aa, Homo sapiens
  misc_feature (20)..(20): Xaa can be any naturally occurring amino acid
RRGEHANKALGTPRENKEVXLPPTPKIHTPPPYPASRKLFRPYKSAKSPFLCILY

SEQ ID NO: 937825 - protein, 42 aa, Homo sapiens
VKIKKCCLATGSLLQLQPGVIPAALTRSPKIHYGEIAFNTPT

SEQ ID NO: 937826 - protein, 38 aa, Homo sapiens
EDCRAEGDLSQWSWVISGWILELLAAMCFPKVLFYDMK

SEQ ID NO: 937827 - protein, 34 aa, Homo sapiens
RRRRPQLVAQEDTELRDLSVQTLENSGVLNRNQG

SEQ ID NO: 937828 - protein, 33 aa, Homo sapiens
MNDIVWLTKKSRSLIVLYSVSLTRRNFKFPFCQ

SEQ ID NO: 937829 - protein, 53 aa, Homo sapiens
MRLLLLLLVAASSNWSRAEGLGQILGGGSPAKGLKVPDTATGAPSSKFQIFVF

SEQ ID NO: 937830 - protein, 48 aa, Homo sapiens
SRANSTTEELHKYQKMLGTPPSDQGPSPLDVDKRFRRRGHKEYMGSCR

SEQ ID NO: 937831 - protein, 59 aa, Homo sapiens
MHEDWCWKNKSLEVEVLEDDASSVAFRQTGYMSDMFPDLTPSLWNFISNGNGPESVEIY

SEQ ID NO: 937832 - protein, 67 aa, Homo sapiens
RRSAAEESAGRDEFSAGERNGTDARSSLGQSASENLGDTVSVSKKEKNRKRRDRKRKKKPQRVPRGV

SEQ ID NO: 937833 - protein, 80 aa, Homo sapiens
EKSRRQPEIEDVGSDEERKKDGDKKKKKKIKEKYIDQEELNKTKPIWTRNPDDITIEEYGEFYKSFTTDWETLCSEAIFS

SEQ ID NO: 937834 - protein, 67 aa, Homo sapiens
  misc_feature (22)..(22): Xaa can be any naturally occurring amino acid
MRSGARTVLLLLLGAVALTETXAGLPLHEVISYTAMSRPGRGGGPAFIAVGYVDDTQLREVRQTRRE

SEQ ID NO: 937835 - protein, 43 aa, Homo sapiens
PLTDGETEAQAKKYLTRGSRISWKNLGLGLNGRSFSSSAELPK

SEQ ID NO: 937836 - protein, 72 aa, Homo sapiens
ETPESRVLRFTRWGLLRVKPGRGDRTRSMSCSDKMARLDLSWDAKGHCDALSWRAIYLSSCCHLEFHTAKEA

SEQ ID NO: 937837 - protein, 350 aa, Homo sapiens
VGGKRIEKRCRFWFPGAGGPPAVDPARRRRRRGAREESKKRGWRREGGAAARGRGEGWAEGPGGAGEEEQGAVTERGGRVVGEEGARDGEETGWAVRGEEGGRRQRGEKRGLWDETEKEETRERSRGEERSTWRVPPEETRPVSGGVGRVPVTYGRQTSDALERSPVAPPRERTGDVRRTTQGVPAKTAKKDSVERRGRGEGGVMGGRKAWGAKAQGAGGVAALGEGWPPWGPPGPRGIASEPPVVAQQKGPKSPGGPPPGDYRCSSGAPCPNGTFLGALRSTKPPVGDKGPVWGLGTRECKFFSLGSQDPRKEKGKWKAGPSYARGYNQKPGPRGRPRPVGKGGAPWPG

SEQ ID NO: 937838 - protein, 46 aa, Homo sapiens
SAQASLHPKHVYRVLQWCRLLLALTETCDLGDRVVLLFHPVFDDAD

SEQ ID NO: 937839 - protein, 33 aa, Homo sapiens
REKALQESSGNTPLCKGFVCDREEVSIKQQQAK

SEQ ID NO: 937840 - protein, 125 aa, Homo sapiens
AALRIASRDQEHTFLTNQQPQYMMPKMSQKGQVRWLPPVIPALWEATVGGLLEARSSRPAWATQTLSRQKSRKKLATRGGAHLWSQLLWKLRWEDCLSPEVQGCASCDGATALQTGQQNEILSLK

SEQ ID NO: 937841 - protein, 91 aa, Homo sapiens
  misc_feature (20)..(20): Xaa can be any naturally occurring amino acid
YIDPLQLRLLNVVQRGGQAXHQPPVSSSTGLHHLHVNCRLQAPMRPGWLRQVPRARMLRSTTCQGLSCGPGLRTRPPAHIMKWLEGAPTVR

SEQ ID NO: 937842 - protein, 88 aa, Homo sapiens
QLLPGDKERSVVLTQVLSHPLLCPVAPGVEATGKENEVGGFRHVTSFHVSAVAEVLTEAPWRRWAFVLSSAVRAMSRKPSTCLIGSVC

SEQ ID NO: 937843 - protein, 72 aa, Homo sapiens
WKNRYVVLKGDQLYISEKEVGASVPLTLRFLITPTPGTPQGGARTGHPRKVPKARTVVASLNPTHLQRKATL

SEQ ID NO: 937844 - protein, 81 aa, Homo sapiens
IRTEEQVVFAAQTDHPQRIFSDVIVRLSPAIICIVRQRRPLVQGRMQNAFASSECRDRVFIFSRSQLSRDLAAVSFSTELR

SEQ ID NO: 937845 - protein, 95 aa, Homo sapiens
RPTTTTTPPPAASTLDLLCGKTRATSGSIQFDGQELTKMREYNIVRAGVGRKFQNPSIYENLTVFENLEMSYPAGRKVWGALFFKRNAQVVARVE

SEQ ID NO: 937846 - protein, 67 aa, Homo sapiens
RRRTEWNGMEWNGMEWNAMEWDQPECRGMEWNGMQSNGINQPECNRMQWNGMEWNGKYPNGMECNGV

SEQ ID NO: 937847 - protein, 77 aa, Homo sapiens
MRRERFIWPAKNSNTVIRHNLQIQKTPPEAFLQLIQQLSANEVDVLQLRFVRATLYVLSFNFDFFTVHAWSELRCRI

SEQ ID NO: 937848 - protein, 103 aa, Homo sapiens
ESLERELDRHSRNVSDIFNRIFGNTEARNAENPTISSQNSPDPQHPYVFQQSGSTDYGIESLRAISPRLAEAVSTHPELGKILSDLPLRPQKRDFHSILSEAV

SEQ ID NO: 937849 - protein, 95 aa, Homo sapiens
RPLAKRALKYTDEKETEGSKPTKTPTTTPPETQQSPHLSLKDITNVSLYPVVKIRRLSLSPKKNKAKPSSGSAKRRCTASVNYKEPTLASKLRRG

SEQ ID NO: 937850 - protein, 40 aa, Homo sapiens
GRPQHLLEDLAFFFLALTQGRGGQFQAEEPAALKVSEALG

SEQ ID NO: 937851 - protein, 120 aa, Homo sapiens
HSGMVLRLHMPATNGGHATMLPRTGDTRQCLPCIVATQQCLPRVGATQQCLPRMGDTRRCLPCMGTRDTHIHTRASQDMNVCNPSTHPAHSGTGSLGGSQLHTLSYSVCQALHPRSRPRC

SEQ ID NO: 937852 - protein, 54 aa, Homo sapiens
SERLCHIIFFIFIFIIIFFLFFLKYSLFSTSLAARRAALAAGGGPGLSPRGREA

SEQ ID NO: 937853 - protein, 30 aa, Homo sapiens
CQSLSRSQSSGQAEEEKEEAEALKEKEKPK

SEQ ID NO: 937854 - protein, 163 aa, Homo sapiens
MSWDLGKMSSELLLSVVAEELEGNVNNGKEVKSFEKKLDEWITIITKAEKSLKDLMELKTKARELCDKRTSLSSQCDQLEERVSVMEDKMNEMKQEEKFREKRIKRNEQSLQEIWDYVKRQIYVLIDVPEGDGENGTKLENTLQDIIQENFSNLARKANIQIQ

SEQ ID NO: 937855 - protein, 52 aa, Homo sapiens
PAGPWRVLFHSPGVVRSGPPRSREGGLDNARGPLQALYFLFLQSLNPKALLH

SEQ ID NO: 937856 - protein, 120 aa, Homo sapiens
  misc_feature (99)..(99): Xaa can be any naturally occurring amino acid
IDPEYPSVSGWISCVTDTPCSPSFTSARTVIAISRLRRHSTGSSSSYAHLCTSDNGTTVAAGVEVDVLQRVEAQAFSRHGAGDDVDQVLVLAQLRQGRXIHHGLGGQRYVSRRESQRAGL

SEQ ID NO: 937857 - protein, 66 aa, Homo sapiens
GNPAMLCLCAVPLLRAPPHDQAWQGVLLGLCLRPLLCGSWLPLVGNSVRDRDLDTRCARCHGVPEL

SEQ ID NO: 937858 - protein, 57 aa, Homo sapiens
TLRLWAVVPVGNVCGTLLVAYVMLHLPIFDTKTDLAFLEIGRKVMENDAYQMFAKGI

SEQ ID NO: 937859 - protein, 116 aa, Homo sapiens
YSFYFKFIFLRWSFALSPRLECNGTISAHCNLHLLGSRDSPASASRVAETTGMHHHTWPNVFVFLIDMGFPMLARLLLNSWPQVIHLPQPSKVLGYRCEPPPQLLTDFNVGIWSTR

SEQ ID NO: 937860 - protein, 122 aa, Homo sapiens
RQKIRVFKAGPSRLEWHGMEWNGMEWNGMEWNGMKWNQPDWNAMQWNAMEWNGMEGMELNGTEWNGMELDGMKKNGMEWNGMDGINPSGTEWNGMEWNGTERNGMDRNGVQWNGMESTRVST

SEQ ID NO: 937861 - protein, 256 aa, Homo sapiens
MASTSRDVIAGRGIHSKVKSAKLLEVLNAMEEEESNNNREEIFIAPPDNAAGEFTDEDSGDEDSQRGAHLPGSVLHASVLCEDSGTGEDNHDLELQPAKKRQKAVVKPQRIWTKRDIRPDFGSWTASDPHIEDLKSQELSPVGLFELFFDEGTINFIVNETNRYAWQKNVNLSLTAQELKCVLGILILSGYISYPRRRMFWETSPDSHHHLVADAIRRDRFELIFSYLHFADNNELDASDRFARSDLLIIRMNCNF

SEQ ID NO: 937862 - protein, 89 aa, Homo sapiens
DGKDSNGNHWNRMQFNKIGTNVMEWNGKESEMKGMEWNGMEWNRMEWNGMVRNRMEWKELNGMELNGMEWNGMESTRVQGNVMERNAMS

SEQ ID NO: 937863 - protein, 106 aa, Homo sapiens
MLRCITGWLHPQGHIGEVIDASVEVGHFHAHTVVCEHRSSLSTLNPTSHAVTSRASSGVGQDRFRTTAMGPAADEGFGDRRRRQPLPYVANSCSQSTPGLIDRPKS

SEQ ID NO: 937864 - protein, 49 aa, Homo sapiens
MAALAAGAPASEDRCFLAGLNSLLNSTNRIDQRNINAAANRCTVGARRV

SEQ ID NO: 937865 - protein, 107 aa, Homo sapiens
LDGISFYIFESNSYIIDVYRGDTPATRNLIDFAAFVAIFPHLIAGPVLLLSDLADQFNNRTHTLDKFSEGCTRFMQGFIKKVFIADTLAVVADIASPCKTLRRVTPG

SEQ ID NO: 937866 - protein, 89 aa, Homo sapiens
VTFFTGIGTVDSKFIWEFQGPRLGQAFLKREFNPKPHGILLSTCQGGYNKETINNVLVKVEKLEPSYTADGNVKWNSCFETQSASFSKG

SEQ ID NO: 937867 - protein, 103 aa, Homo sapiens
  misc_feature (15)..(15): Xaa can be any naturally occurring amino acid
MAATTPWHAVMIIRXEFRGLSVIQGSSQIEGDKNQAGDNRIRGLFQCHGTLPWVGSVQVGVVTHNPGQGAQQQARQQCTPHVGKSMPASSPPSVVAIIWMSIV

SEQ ID NO: 937868 - protein, 52 aa, Homo sapiens
LDGERQLFDSRCPEFTGVTRESCTLMPASSSDRLRHRITGWQKTLQLRSQDS

SEQ ID NO: 937869 - protein, 105 aa, Homo sapiens
STLVRETRINRMLISRTGPDSGTSVASPPFFHIRQPGMTNAGSVTVSITLVNHHNPAAIGATRRLQLNGTYPDATDPDAAKLRFIANTQNATLDYFDAEHCDGQT

SEQ ID NO: 937870 - protein, 122 aa, Homo sapiens
LDNPNTKRLALGKHYQSRLKRRLVKIKDSTGTFIGYYSTRGPFQMFRITRVFIVLRGTPEKCSAFSLGLPQPFLVDGVVHFLFVLRRDVKAIFCSNNKAATYYSGLKRNIRIQGKWNGQVHR

SEQ ID NO: 937871 - protein, 85 aa, Homo sapiens
LDAAARIRRSFIAGECPKASKILTSGLATDRSTFSGVCATDSDLPVDVGCKIITETNASQLLLCRWKDTAQDGENILGDSATGSR

SEQ ID NO: 937872 - protein, 199 aa, Homo sapiens
  misc_feature (79)..(80): Xaa can be any naturally occurring amino acid
ARPFRRIRALLLWITQHTTQRTDRQIRLLRQEQITLGRQTNVAMAVWHKLPMALSKVDLPLPERPLSIQALTFGNRQLXXFEQMTTIRQIQAEVVHLQTAALAWQLDAHVAAFVFFHRLAEAQQTITGRTPAGQHGVRVDKPTEAALHTAISLGHLHQYAQFDLAGKVTRRCHHKREDDRDLRVTAGKEIQGFLSCMML

SEQ ID NO: 937873 - protein, 178 aa, Homo sapiens
MAAGSREHDPWLYWRCKAVGKVIPERSGKLSGMAFRVPTANVSVVDLRGGLEKRARYDDIKKVVKQASEGRLKGILGYSERQVGSSDFNSETHSSTCDGAGGIGLNDQVLKLISRYDNEFWLPKQGGGTHGPHGLQGVRRLDNEPKQEHKRKRENLTAGESCNSHSGPHWISLLRVFM

SEQ ID NO: 937874 - protein, 76 aa, Homo sapiens
ARRGRQGERTASSTSDSLETDTKALALHQLGPGILEALTGGVGGGTRAVALVHVREGEIRKKMKSVGAGTGPFETG

SEQ ID NO: 937875 - protein, 76 aa, Homo sapiens
LDGLASAYRILALSWVLLVSWVHILSTTRPDFFLSKGKQLGCIEQKLEPGHWRDEADRKQCRLHAVALVLKGKSSG

SEQ ID NO: 937876 - protein, 114 aa, Homo sapiens
MLKNFVNIFLVVKFASDSQTQSAYTTSRLRSWICIPMECEHIGADWNMIYSLFGMAFVGGPVITPPSRPPVAPQMEKGRCDEAHRVQPVEHATMAFDQYGPQSLTQRSPLIADM

SEQ ID NO: 937877 - protein, 73 aa, Homo sapiens
RRRFRAPSVWSVHAHPRGEGFKECIICAFAEGLRSRPLTTFGNVKTDVLKDKDATFKPMNFVEVIRRSLGLNK

SEQ ID NO: 937878 - protein, 95 aa, Homo sapiens
GSGTETGRGAQPHREREADLGKEWDRSRDDRNRERAGPERDRTVRAESGRDKARDRERATQDRSKTKKLGPEPEARGSTLAPLAGLDAPAGRDPF

SEQ ID NO: 937879 - protein, 116 aa, Homo sapiens
PSQEWDMSPEKTSTRSLHYTESELVTSTGQSFKEARTERSPAGLTEKLLRLRSRLRLRRDPETGGRAPQLKSDSHGPKEDGGFRHSEAFEHSSKEQGLDSAHSEMGPHQVLSRNRT

SEQ ID NO: 937880 - protein, 146 aa, Homo sapiens
GSVTFNGKVIAPACTLVAATKDSVVTLPDVSATKLQTNGQVSGVQIDVPIELKDCDTTVTKNATFTFNGTADTTQITAFANQASSDAATNVALQMYMNDGTTAITPDTETGNILLQDGDQTLTFKVDYIATGKATSGNVNAVTNFH

SEQ ID NO: 937881 - protein, 89 aa, Homo sapiens
STLVVIPPHTNITTLGALPTTAGVNFLMHVGVGTPPAPASKVQKLMAVIVLFEVIQPQAATVISFEAPKADATYPYLSERFSQRHVAKT

SEQ ID NO: 937882 - protein, 115 aa, Homo sapiens
STVGINLMLIAGGAVGAVACARGYWLFEKPAMIMVATAYLVHLVWVLFDLDGDGIVEQGKFVRILIVLVFLYTRFERIRGSLVDPQKGKVTGMSEQDILSIIVALFGTGGVGFTA

SEQ ID NO: 937883 - protein, 118 aa, Homo sapiens
  misc_feature (89)..(89): Xaa can be any naturally occurring amino acid
VDVRSSRSRTENSQGKRAVKQPCGYWVIFRLVVTGGVESVGKRSNMRAQACRIFSSGGKTVRRMHEFPPRKWVKPEDLNPNGTLFGGTXCAWIDEEAAIYAIVQLGNQRVVTKYISEI

SEQ ID NO: 937884 - protein, 94 aa, Homo sapiens
LDHGSSKAFGSARVGSQDFETCRLECFHGSSLVATGRFQQCTIDLMALQHSTILEKSLMSLGKTAPIPCGSSSICRVSLETSMPAQVNMAKSSY

SEQ ID NO: 937885 - protein, 30 aa, Homo sapiens
AKDVYKEHFQDDVFNEKGWNYILEKYDGHL

SEQ ID NO: 937886 - protein, 128 aa, Homo sapiens
PNRAVKIDSNADLPGGGTIPAPEFPDLFNGTTVGPNELKEYPNVGPGRYNPIRVLLPQGLANVGLNDTIEVTFKGFRNVDGSDGASPVELPLADICFATTLDNTEDLDLEYYEVFVPERNHYAICTRG

SEQ ID NO: 937887 - protein, 97 aa, Homo sapiens
ARPPSDYRYTCHLNLTCHGNLVPICAGSFKKRGLTPISHQYLSSRERGTDAPQVTREPDAGHFADHILIGHLSHEAAVIAHIAVVAQEVHMAWLDAQ

SEQ ID NO: 937888 - protein, 128 aa, Homo sapiens
GSTRSWHRPAYGLGHSRSTQGCCRMDADRPVIVGPQRQIGVTALQVRQRESALCAVDKFAHEQLFELVSVELQLQLLQVEPIAPAGDRIQDRDDLAPLAIRASGTGCNLLRARPRILGAFMLAVSELL

SEQ ID NO: 937889 - protein, 144 aa, Homo sapiens
  misc_feature (100)..(100): Xaa can be any naturally occurring amino acid
ARLGGIDVADYVSGLVHRGTHVRIVIGRYAKLAAKRISANKLIKPDRLVESDMLISHFLHGPVSAYPRDYVDGAHQELHVHQEAQLLYAVCGVMRLVTAXRWYHPANPRRVDSALGEHEIFMSGEVRMRSLFIAAEYSPANLHG

SEQ ID NO: 937890 - protein, 172 aa, Homo sapiens
  misc_feature (141)..(141): Xaa can be any naturally occurring amino acid
RPTTTKFTAARPGSSFVACQAIAIRKHSDGQTPRRDERPAAIAVRNADTSLITSNECPPREKKFCSMLSRSTPNNCAMPSANKVCNAVLGATQTCAASSDSGAGSKTVQLAIGQTGQMLQGKEMRRYHGARKARIELLTHXVEPTFGRRPLRLDIRHQLHIGLITFARTPGS

SEQ ID NO: 937891 - protein, 144 aa, Homo sapiens
MSVLSRSPVTCSFFPFILGLKSNCTKGSGHQILPHFLRMVTLITTLGQIAGGCLEVPDLLHRPEFHRSDDALEYLVCDLLPEARAQEHVKGPEKTSGKRNSFHGCLIQSFSSLFNYRTLFCGFRSLFLAQYSDVGKALTESQRF

SEQ ID NO: 937892 - protein, 143 aa, Homo sapiens
RSGVGAHHQLQLAPPATPPTSGPRQGSARPDSDPAACSHPRVPGAATPTAKQRGPYHTSLQPRPAASARGSSAARVQGLSRAQVRVVPKAQNAGGRSQVAARAKATCGHPTSRIEAAGTRGGRQHHPPYHQQHHQGPRRRPRR

SEQ ID NO: 937893 - protein, 49 aa, Homo sapiens
RAAAWEESGAAGARFSLSLPGGKRLVQPGPGCTRPRSNAPSHPGKAPEP

SEQ ID NO: 937894 - protein, 110 aa, Homo sapiens
RVPGGTRPGLSPGSRGATASARPRAPCHGWSAGARARPGMLPGPSVNRRKFTFECSDGTSFAEDVEQPTKCGCASAHHVGVDRPVTAGKGPTRCSSADSRQQLRWGPGHH

SEQ ID NO: 937895 - protein, 167 aa, Homo sapiens
GRLRPLEIIGVVPLISQYLSVVILAQPDQRAVIPRGDNKWPFINQASPPNMAFSDNPSTMESWSRISSSSPGSRAMSRTFLCPRASCRNEMMLRAESGKWLLPSSLSLDRKFRYGAGFCRGRAFAIQEMINSTKSSSEPGLINGLIMEPLVPEIRACSSNRSTTCCG

SEQ ID NO: 937896 - protein, 82 aa, Homo sapiens
MSQEIETILANMVKPVSTKNIKISRAWWRVPVVPATQEAEAGEWREPGRRTLQGVEIAPLHSSLGDRAKLRLKKKIGEKKST

SEQ ID NO: 937897 - protein, 84 aa, Homo sapiens
  misc_feature (63)..(63): Xaa can be any naturally occurring amino acid
  misc_feature (65)..(65): Xaa can be any naturally occurring amino acid
  misc_feature (80)..(80): Xaa can be any naturally occurring amino acid
  misc_feature (84)..(84): Xaa can be any naturally occurring amino acid
GRKSMEREGYESSGNDDYRGSYNTVLSQPLFEKQDREGPALPRESKLHPFQDIWYPRAFITLXKXQLAWVPKTPIGIGIXWSAX

SEQ ID NO: 937898 - protein, 107 aa, Homo sapiens
CPLQTPPGLVVGAQETVLVGIEGGGFVEIQVAHVIDRQLVVETQAVGVSNFMGLGSVRGFAINSGILRKYQQKSRTHRHPPATQETQGTAHCRQPAQYIEHRGGRST

SEQ ID NO: 937899 - protein, 32 aa, Homo sapiens
ETLYLEYSCKTCEQAFILIKLIFRFITKMKVD

SEQ ID NO: 937900 - protein, 221 aa, Homo sapiens
MPLPAFPELAACTLPASPEPMNALASRAAPAMQSSGSINYARPKQFIAAQNLGPASGKARRPPSQLVQPPIAPGAVAEAVREKKRVALRAPFGAEPRPRGLLLALPPPKKKRRSAQGPSRAHVFRCRATTTLRARTGVHCSSLPPLPPRPDARCLLSALLPSHRRRGVQPPGPAQYFDPADFKEGNKILNSSDEELRQKDDVIKTGRNSLKRTSDMAASYI

SEQ ID NO: 937901 - protein, 131 aa, Homo sapiens
DRVWFCHPGWSAVVRSQLTALQPLPPGLKQSSHLSLLSSRCMPPYQATLCIFCRDRVSPCCPGWSRTPELKQSACLGLPKCWDYRNEPPCLASFYLILNCGDPTQPKKNSIDSTFKCSSRFPVPLDLDSEF

SEQ ID NO: 937902 - protein, 30 aa, Homo sapiens
DARDHVEAAGRACRSWVPLSDSWALLPASA

SEQ ID NO: 937903 - protein, 59 aa, Homo sapiens
VDMEEKKEEERVKRKEGQKEKRRRREEEEKDRGKEEDKRKRRRRKKLEKMEEEEEGENE

SEQ ID NO: 937904 - protein, 142 aa, Homo sapiens
  misc_feature (46)..(46): Xaa can be any naturally occurring amino acid
ESITMKNQVQVHGEHAQLAVDALLIASGRQTATASIIPENAGIAVXERGANIVDKRLHTTADNIGAMGDVTGGMQITYISLDEYRIVRDEILGEGKRSTDDRKNVPYSVFMTPPLYRVGMTEEQARESGADIQVVTLPVAAI

SEQ ID NO: 937905 - protein, 160 aa, Homo sapiens
KTLVHDAQQHTDFVRAIQRKNEVVNFLRNKNFHNLADMPNIDVIDGQAEFINNHSLRVHRPEGNLEIHGEKIFINTGAQTVVPPIPGITTTPGVYDSTGLLNLKELPGHLGILGGGYIGVEFASMFANFGSKVTILEAASLFLPREDRDIADNIATILRD

SEQ ID NO: 937906 - protein, 138 aa, Homo sapiens
KWPGCSGGAPPSTDTGFGGDSPCRCSGQEPPPCPTTGHQNASRVGHQARGVRSGLMSCSFCVTLNSTSLSDNWMQLQNQAFASTPILQAASHLSGAAASGSLSLTPNRLGACRGGKSRDHPSEQSGCYAQVGQAGPGS

SEQ ID NO: 937907 - protein, 59 aa, Homo sapiens
STRVLLCSPRLYHCGTTLARCNLQLPGSGDSLASASRVAGTIGALEFEASLGNMVKPVS

SEQ ID NO: 937908 - protein, 102 aa, Homo sapiens
QAAFNKCSPSPGRAWGLATDIFHFPSFNNEHLSKDPGLQLNELLGVVGKLETCPAQKESVQMSSHTVTPQRRRPAQRPRNRSDREVENWDLNPRHPSPEPHA

SEQ ID NO: 937909 - protein, 142 aa, Homo sapiens
IQLPNSPLHLIPFGLFHSIPFHSTAFHCTRVDSIPFHSIPEDSIPLHSITFHSPALALIPFHSIPFHSIPFCSVPFHSIPFHSIPFRSVPFHSIPFHSIRVNSIPFHSIAIELIPFHSIPFHSIPFPCTRVDSIPFHSNPCH

SEQ ID NO: 937910 - protein, 122 aa, Homo sapiens
LDGAAANDPSINLLDVVNPGAGYRWALKACCPRGKSRIQRRNPKRAIAFKGAAESLVILRLMTILVRSGSGRKRGGKDSQVRRPMMTGLPMVTVLKCARSSGGTQGHGAVAPNNTRIGLRPN

SEQ ID NO: 937911 - protein, 86 aa, Homo sapiens
DGTEVIGEALVNVLLVYGNNDVPGNMLAGAVSTYVRRYGVAPGKKLVLSTNNDHAYRVALDWFDAGLACVAEADARHNPRGALVEE

SEQ ID NO: 937912 - protein, 82 aa, Homo sapiens
  misc_feature (42)..(42): Xaa can be any naturally occurring amino acid
  misc_feature (50)..(50): Xaa can be any naturally occurring amino acid
  misc_feature (77)..(77): Xaa can be any naturally occurring amino acid
PFGSQKQSGDNLNDTLRKAKEVLQCHESLQNPLLSTSKSTRXYAKASRNXEESEKGSLKIEFQVHALEDESDGETSXTGKHG

SEQ ID NO: 937913 - protein, 91 aa, Homo sapiens
GSAASQTSDLIMHPHAAACRGYVLDSGLSYMLLPKAVLRLACAVLVLSYRRMPGAWFACDFARSGAAAALAANPRLTAAERDIGIAAGLRI

SEQ ID NO: 937914 - protein, 71 aa, Homo sapiens
VFSHLVLRLRDTGPVQRGCLPCPASSEAETHWACAEGDTCPAQPWPPRAQGCKARPEVEAAQSPLRALAEV

SEQ ID NO: 937915 - protein, 70 aa, Homo sapiens
LQFVHGALHRLSCIHYLALPSEMNPGTSDGMQKSPVFCVLTLGAVDGSCSYSAILAPPILMFLRGEHIQT

SEQ ID NO: 937916 - protein, 32 aa, Homo sapiens
YLYGPWDKPGEVMRAIEVIGFISCVLLGAYPN

SEQ ID NO: 937917 - protein, 110 aa, Homo sapiens
VHLLVGQGGMDFELVFRVTDPTYVLCGKGFNDKPNKGGPPSGAPRLSHRAPPPVGGGWGGGGVVGGGGRGGVRSPPPNGWESYIIYWYFLKIETKVMVVLAKLILKLNKS

SEQ ID NO: 937918 - protein, 113 aa, Homo sapiens
  misc_feature (48)..(48): Xaa can be any naturally occurring amino acid
RRQSPIDWSLINRLSIEQDPRRKRDKALLSEMTVLTSGHRRSTLASQXSDGYQQHRQQHEYQHHQPGIDKHPGITQLPHIDEVIRVGTNQVSAHQKVNAVDQQIDQPRQRIPP

SEQ ID NO: 937919 - protein, 130 aa, Homo sapiens
  misc_feature (69)..(69): Xaa can be any naturally occurring amino acid
  misc_feature (124)..(124): Xaa can be any naturally occurring amino acid
MVGRPTACVRVGFAAGVLRDAGIAFEKGSRGTVIGMGIVMVEGVDWGAVFIQWVGGVVVYFPACSASRXGIMGDVALGCGLQRFKGIARCQVVANSRVIEKVTTVIFSQLSDANGGIVLLSLGXGGTEHL

SEQ ID NO: 937920 - protein, 137 aa, Homo sapiens
  misc_feature (45)..(46): Xaa can be any naturally occurring amino acid
  misc_feature (53)..(53): Xaa can be any naturally occurring amino acid
  misc_feature (60)..(60): Xaa can be any naturally occurring amino acid
SGGRGASYQLKSDNLLEPRISPPLRVFRTSAIKMGRIFRGWGVAXXGVVAKAXAGAGARXCCRGGGGGGGGGGGGGGGGGGGGGGGGGGGGFACANCDTILTNRSELISTRFTGATGRAFLFNKVVNLQYSEVQDRV

SEQ ID NO: 937921 - protein, 67 aa, Homo sapiens
VVYNHLITIIRVDVVAHACNPSTLGGRGGRIMRQEIVTILANTVKPISSKNTKISRAQRHTPVIPGR

SEQ ID NO: 937922 - protein, 42 aa, Homo sapiens
VKKCVIMLEFPPTTYTELIAVCGRFSIESKTDLLRNVIPSSG

SEQ ID NO: 937923 - protein, 103 aa, Homo sapiens
NFQEHFIYEDIVFMRTWYPVSIPAFYNPVTSLLKPVGEKDTWSGMWTTGHLGLAHGVRLKTNKDSLYKVLVVCVLVEMKPVPYRQGVTQTLFYNFLRTLNVQV

SEQ ID NO: 937924 - protein, 68 aa, Homo sapiens
NLISGFDVPEGSDKVAEDEFDPIPVLITKNPQGGHSRNSSGSSESSLPNLSQVFTAGGSAHRPVAVTQ

SEQ ID NO: 937925 - protein, 80 aa, Homo sapiens
NPQLVESTDEEPKDTQGQLYVEILKIFFWLGTVAHARNSRTLGGKGEQITPGQEFKTSLVNMMKPRPYEKYKNQLGVVVY

SEQ ID NO: 937926 - protein, 109 aa, Homo sapiens
VDMILNKEKLKVLSLRSGTRPGCPLSPLLFNIVLEVLARAIKQEKERKGIRVRKESVTLSLFAKDIILYIENSKSSTKKLLELINEFSKVAEYKINIQKSVVFLYIISR

SEQ ID NO: 937927 - protein, 115 aa, Homo sapiens
PRAYRGPGFWPSPRGLYSSSQQVPHLHLRPPQPGLCCPYCYQHLGGTGQQSVALPPFFPREPPEPSKLFQPLPVTQFQSHFHILGISSAGPNYWYQFTVLVRFHAADKDIPETGK

SEQ ID NO: 937928 - protein, 118 aa, Homo sapiens
PLIPACLLHPGSSTGRHVGWSPNVSPRWAQNGEEAGKPSWPNGGLEKIPWTVLPVPCSGGTYEPEQAAGYLLEVAWEVMGPWAVTGDLQPCSAPSLRPPCRGGREGARTHARCLTHPP

SEQ ID NO: 937929 - protein, 152 aa, Homo sapiens
MQKVSDNGRQMNYSPQSRSSIWWFVTLVQPVHRKDEFSTGEIFSRTFVGNFLLMRRFEPWFLQQHIWGKAQRPFFRKLGSPNDPLIAADCFCTPYRVLALNVLTAKGVHPSGCLGNGETFPVVVMNFPRAPICEAAILLVPLQPLLGKCSHE

SEQ ID NO: 937930 - protein, 73 aa, Homo sapiens
LPPGQARDCLSPGQGRTPLPDPYPTLPWNPEGVDGLANHRQTALAPAITSPNFSGPLTRPLAARGQGLVPRIY

SEQ ID NO: 937931 - protein, 105 aa, Homo sapiens
MSFLLVDDTHEAVRVDHRDIAGLEPALGIQHLFRGLDLLPVALHDLRPLDTQLATLAQRLLDPVVVNDLQGRTGHWQTHRAQLALVAIGVGAGDRRRLGQPVAFG

SEQ ID NO: 937932 - protein, 100 aa, Homo sapiens
  misc_feature (12)..(13): Xaa can be any naturally occurring amino acid
GLYEPDWCNCTXXSGERGAQKGDGSQAQNLESRTIIRGKRTRKWIQAEPVVDEERGEASGPMGGVFLAWVGDQTPAWKTVKDKPRTQGDQWLVGQAVTTD

SEQ ID NO: 937933 - protein, 73 aa, Homo sapiens
VDLGKDICTRTPEDQLSPSGCGYTAHNTENSCGYLSESEDEVEDVRAQKWEEPESLLTSLSCFINQPWSSPFL

SEQ ID NO: 937934 - protein, 76 aa, Homo sapiens
ATGSNDILELVARAYLAPGLNAVFSEHAFAIYPIVTQAVNAEARVAPAKDFGHDLAAMLAAIDENTRVVFVANPNN

SEQ ID NO: 937935 - protein, 119 aa, Homo sapiens
EATLEKNLTGVKSVGKAFGRSLNLRHHQRVHRGERPDICEECGKAFSVASNLRVDVGVHRREKVCRCEECGKGFSQSARLEAHQRVHTGEKPYECDICDKDFRHRSRLTYHQKVHTGKK

SEQ ID NO: 937936 - protein, 130 aa, Homo sapiens
FHKDWQRAWPRGSTSRPVRSADRKAAAEPKAQPHSASRATASRSHPAHRALPHGSVPHEGARRPGFQLEELRVAGIHKKVARTIGISVDPRRRNKSTESLQANVQRLKEYRSKLILFPRKPSAPKKGDSS

SEQ ID NO: 937937 - protein, 292 aa, Homo sapiens
VFPPFLLSFLPSFLSFFSVSALRPAPPSRPSVSVVVFCNYQLCGGSSSSWVLGLFCLLLSCWVRWRCSGGATPLSIRDVFFVVAPTPRTDFSLAVRACCFYFGVLVLSVGFVCCEYYSLLLSPPGAHTFWHQWVCLCSVSPHAPCGLSILCSLCWSCVTSPCSFWFFFSHPRRARVVLPRLGSSTTTPPLLVSLSLVFLLGDFIVLFRWRRLLDTVSCRYLGPPPCCPPPHPPPLPRWRPPLRALARKSVALSLSHPTGGFSPREFPPPPPPPFSPFFPPPIWEPQKIFFPT

SEQ ID NO: 937938 - protein, 115 aa, Homo sapiens
  misc_feature (23)..(23): Xaa can be any naturally occurring amino acid
LDHISTVPAWLFMCFDPLQCGTXDANPQEVRRHQQPQAQGQAIGVREIDHQQQAAQQPDSGHCDIERHEALDPERCRNFIGVTVNSARTITVSKVIQAIRLDDVDAQRDHVPGGV

SEQ ID NO: 937939 - protein, 72 aa, Homo sapiens
LTWAAGRTRKDAESPSPSGSEIYDVLPYVFTLLFLSTLKGGFPQMPASLEAGFQGCKRKVILIQEDSKKQRQ

SEQ ID NO: 937940 - protein, 113 aa, Homo sapiens
ARLTLQELDFNGNAFVTGATGLLGNNLVHALLKRNIKVKALVRSVEKAKKQFGNLPVEFVQGDMLNVDAFSHALRGCDALFHTAAYFRDSYKGGKHWQKLHDTNVTGTERLLQ

SEQ ID NO: 937941 - protein, 150 aa, Homo sapiens
LDVQAEPKSVCSDAMVGRPKKPAAAKKTTRKSSTALPDQLTPQLATLVDRAPDGDWVYEIKFDGYRILTRIRDGEVRLFTRNGHDWTDRLPRQVKALEALKLKDSWLDGEVVSLNADGLPDFQALQNAFDIGRSLDIVYYLFDAPFLEGR

SEQ ID NO: 937942 - protein, 104 aa, Homo sapiens
  misc_feature (5)..(5): Xaa can be any naturally occurring amino acid
  misc_feature (15)..(15): Xaa can be any naturally occurring amino acid
  misc_feature (34)..(34): Xaa can be any naturally occurring amino acid
  misc_feature (97)..(97): Xaa can be any naturally occurring amino acid
MGEPXQIISEKGKAXPELPASCLACLTNALCRFXSPDSSEVSLGKDELHMGSSHLSLASAQHLTPEPPLPWPLFPAVPPPLLFLSSWSKQGEVGWGXPAVGQPT

SEQ ID NO: 937943 - protein, 51 aa, Homo sapiens
KVSGMVIADRAWHGWIAPAARRHEVNAPRVLNCSERMIPLPNNTSITSQKV

SEQ ID NO: 937944 - protein, 96 aa, Homo sapiens
NLGVVCCSCTRAVAETLSPSNAPATHTLNNPLEIITRLHSQIKNTVTRDSFANTSVKTVNTGNNLAAADGYSDMPGMSPGCYRQNFYISRFMISAA

SEQ ID NO: 937945 - protein, 228 aa, Homo sapiens
MAVLTTNMAVGYPFSLGNLSPLYGPAHYWGVRTTHRAFFSLAYPTAPLFFWVAPPYTPVCAIYGLSASHPGPPHQLRPYLLVNWNPSLQSPHAGRFQNRCYVTIAGDNHGVCISPLWGVSSYTHQCYTHTQSKIQAPVAEKRFPALFRPQFATLCTRLFKQSLRVAPLPVMLFPPQVLPRHSCAPPRGINLERFFTKGAASSMLRFPLEAQSNQAIRAARNGVMSIII

SEQ ID NO: 937946 - protein, 105 aa, Homo sapiens
LDPLRWQAGSYRSVVSAKPVSERRVLNQIGQVTPCRESRKAFGVLRQVLLVIGLGIEEGRRFVDFRGDSAMAGLAQFGLVQLLALQCRFQLIRAGGVDHRAVLAA

SEQ ID NO: 937947 - protein, 39 aa, Homo sapiens
CPYYYYIRGRVDVYKGQGLRSKGNSPVWTRTYWEFLVHG

SEQ ID NO: 937948 - protein, 44 aa, Homo sapiens
ARPGWVRWLPCLACVPALWEAGGSPKVHGRSSTRPGPYMGSNPG

SEQ ID NO: 937949 - protein, 39 aa, Homo sapiens
GRPASTQASKALCQCRICMRNFSRSELTCTTQHSGTPRQ

SEQ ID NO: 937950 - protein, 76 aa, Homo sapiens
ASTFKLHSEFDWIKHTQLTLDDLKGKLNLKADELPAWETWSSGVLADAKEQLKKDNGEGEKDAAAPKALVDQTTPE

SEQ ID NO: 937951 - protein, 69 aa, Homo sapiens
YQAKHDTSLTLGTVTHTCNPNTSGGQGKRIETSLGKIDPISGKTTTKLSAWWLMPIINRTLGGRGGRIA

SEQ ID NO: 937952 - protein, 55 aa, Homo sapiens
PLVGVRVVHLYDARDVVETPVVAPDDVDLPLQQAGPASDWPARMGVTLVHCPSPA

SEQ ID NO: 937953 - protein, 33 aa, Homo sapiens
FVEVLACAGGCLNGRAKPRLQTDMRIRPAAADG

SEQ ID NO: 937954 - protein, 145 aa, Homo sapiens
  misc_feature (18)..(19): Xaa can be any naturally occurring amino acid
STVVTQVATVFDLQADAXXVPRPCTGGGGRSPCRLPGSRRTCRSGTGNGTGGLARVLALVERLQGHEHDTGVRAVGETLIDRPGKAPRFPRQAVSGPGRTCAGSRLRYGPGSRIRQLGEGTRYCLSWAGTKPVGVLAKPNQVRTS

SEQ ID NO: 937955 - protein, 101 aa, Homo sapiens
KETHRITTLVAQAGVQWRDLGSLQPPPPRFNRFFCLSLLSSWDYRHAPPRPSNFVFLVETGFLHVGQAGLELLTSGDPPPRPLCFLCFLALSTEKASVWWT

SEQ ID NO: 937956 - protein, 42 aa, Homo sapiens
VDLQRGTDAQALFVVDFIRTEAWACDSVMVTAFGSKPKITSA

SEQ ID NO: 937957 - protein, 34 aa, Homo sapiens
KLFGEQGTDLFYIESPIRADGGSGDRLQDGDQRE

SEQ ID NO: 937958 - protein, 174 aa, Homo sapiens
DLLLLNSLPVDHYHFPKLDALMNILILLPFAVRLVVSSVGLLQLYGSGPFAMVGTPWILIGCYFTVALQFMYRAITNNLQAINLRDLMDAAHLLGASTWQAAFLVVLPNLRKGLMVALLLSFSFLFGEFVFANILVGTRYETLQVYLNNMRNSSGHFTSALVISYFLFVLVLTG

SEQ ID NO: 937959 - protein, 110 aa, Homo sapiens
  misc_feature (63)..(63): Xaa can be any naturally occurring amino acid
RLQITDLSTSHLILYTLLFTSNITLLFLYMFPNLFLLVTFGPQENRESQCWFATKKPGAGWAXIVTPIIPALWEAEAGGSLESPGVRDQPGQHGETQSLQKLARCGGMCL

SEQ ID NO: 937960 - protein, 121 aa, Homo sapiens
LDRLLQGINRRNINAVRRQTRDLAGLDITRQQIGLAQRWERSGDVLRSGTVPFFGAGKPRFCATRWPVRGDVGEDLVHLPSPDEFTLHLAQLEAVSRDDVLLLVLAHAAEKQARLGEVITE

SEQ ID NO: 937961 - protein, 117 aa, Homo sapiens
ARPGGFETTDFLHFAIPFFHKLPDAFVFVARVDFEAALLPDHLVAPAIVVCSQLTTCKKGIVRVCRRRMVGAAAGRSTSESAKIVALSRSRRFLLVCSARASALNREGLAGFGADTV

SEQ ID NO: 937962 - protein, 51 aa, Homo sapiens
LDPPHSLHPQRISTAEADITPPLSLTVTPFHSFPAATKISNTVSLMSASVC

SEQ ID NO: 937963 - protein, 70 aa, Homo sapiens
IAILLSVRGDYGKPLHFFKALLDNQWEGDHREVITDIAGKYQLRKLMEYLLPVRGLFDKLEAVVKVKSAY

SEQ ID NO: 937964 - protein, 72 aa, Homo sapiens
PGLVANFRRCSTTVGNHQGLFTSLQKMFPKGGGTTLCEARPLFEGEVGTPRWWYTHARGEMDAGDPPPDVCL

SEQ ID NO: 937965 - protein, 57 aa, Homo sapiens
MFALEGVYSRSSALLALTVVTPTTTACEKPSTQETLYTTHNRRAFSNRPTSAAKTKK

SEQ ID NO: 937966 - protein, 107 aa, Homo sapiens
  misc_feature (23)..(23): Xaa can be any naturally occurring amino acid
LVQMKQTGKITESRPTPVPTATXTVPSSLQATDGPSYARTVIPPVSTSGHPNAVGTFTEIPGSNIRRVIATRLTESKSTVPHAYATADCDLGAVLKVRQDLVKDVIK

SEQ ID NO: 937967 - protein, 144 aa, Homo sapiens
LDLEIDNCTRLGYDAVIVARTIPPCLTVPITTLSMQKTRRWPGQRLRFRTVHSRPGSAAYAARPTRQALHLTQLKDKDLWTYFSAVIQMFGFNFAPNGWALCNGQLLNIQQYNALFALLGTTYGGNGQQSFGLPNLQSRLPIAQ

SEQ ID NO: 937968 - protein, 153 aa, Homo sapiens
  misc_feature (24)..(24): Xaa can be any naturally occurring amino acid
LDLKVKLSDYRVIGRCRVGHGPTXSLRTGYCWFGRSAKKHSRVRPTVLNASSDQGICVLRTAVLPGFLRRRKFQVHQFGTVEHMYLVDMRHVDQRIDAQVAHLGASLFQGFPASGLFHGLAVFHKTGGQGPVTPARLDGTAAEQDLGAPDRQQ

SEQ ID NO: 937969 - protein, 146 aa, Homo sapiens
  misc_feature (104)..(104): Xaa can be any naturally occurring amino acid
DGQQSQGALAWREPMRTHSLSPLAMAALEQARSQLGLAPVHKHHVWSEAEERSLIARYPNEPTQVLAAELGLSVYQVYAKAKRLGLSKSAEFLRSSLCGRLDEXLGAEFRFPKGSVPWNKGLKGLPSSGRMTQTQFKAGNKPGNWL

SEQ ID NO: 937970 - protein, 121 aa, Homo sapiens
GRPEFRRLYPDMQLELNSNDLIIDLLEQSTDIAIRIGNLAEFDPARAFPGQQPLNILASPAYLEKHGLQASVRGLSGHTLLGFTQTESLNHWPLRHAQGDRWQIQPGICASRARHCASWPW

SEQ ID NO: 937971 - protein, 51 aa, Homo sapiens
MLDAVVIPDIGQRRTQAAEVDQAHHLLRTQGFDDRKTRLPAQPGGQPEHGR

SEQ ID NO: 937972 - protein, 81 aa, Homo sapiens
MEVMQTAAGEEAFAGVGRVLPAEGRVEHFRQGAVAVLRQVVHRPEGDRVLGVIRHFFQFGGGLVAITVVQFGNDLQVAGQH

SEQ ID NO: 937973 - protein, 74 aa, Homo sapiens
MSPVMITSFGYMLLVVGRERRTANRHTRLDVVGDDLNLAALVSEEVGDRHAGELADGVVDRHVLARCDLAIEHV

SEQ ID NO: 937974 - protein, 101 aa, Homo sapiens
TQQERMKFSIGSKALVPDVSLIDPETTASMDPFLSACTGIDALVHAIEAFVSTGHALLTDPHALEDMRLINGNLVQMIANPGDIALGRKIMLGSMQAGLAF

SEQ ID NO: 937975 - protein, 135 aa, Homo sapiens
LDNKKLSVASTCIAAIFVLSSNVVLQATTMVEFPAPISLCAITSLIGVTITAAIQLIQDHKIETGWPLVSVGNLVGYSLLAGAVSGSCLSFNNWAMKKRGPVLVSTFSPVSTVCTIIFSVVTLGETVNIGSIAGM

SEQ ID NO: 937976 - protein, 73 aa, Homo sapiens
VDRAQGVFAAGGVGHLHVDVHRVRRPGKNTTASLRRRIHRREHGRFTGFHQLELAQAELVLGDHFLDLGVGAR

SEQ ID NO: 937977 - protein, 120 aa, Homo sapiens
PAVGSTVAAGWANVALTAIATGAASNATISFINNGGNLGAVLKDVTAKGALRDYVVSGVTAGLTAGLFDKMTGTTTAVEGALPNAGKVLAEGGLSSLEGIGRFGANQLLQNGTSTLLDRA

SEQ ID NO: 937978 - protein, 78 aa, Homo sapiens
RLQYTTTNTIHYRPFTTTNTIHHHTFTTTNTILHHTFTTTNTIHHNKYMGSVCSHSNTNTWDQYVPNAIQTHEISMFP

SEQ ID NO: 937979 - protein, 122 aa, Homo sapiens
  misc_feature (58)..(58): Xaa can be any naturally occurring amino acid
VDLGGKPLPSIPGGLSSDPWLYRASEVLLQTLDCPIDPLQEQDAMFDLAQALNNASGXTVNRKTFDYRAAERARNFIHSALGRPITLDEMAEYANRDRWALSRNFRLLFGTSPYRYLTMRRL

SEQ ID NO: 937980 - protein, 101 aa, Homo sapiens
  misc_feature (18)..(19): Xaa can be any naturally occurring amino acid
ARHKIVGLLNYCGSWLPXXGQQKHRTSVMNATCLRHDVVSYAIQKPVGLECPLFCPRSLRTAMFSRDLTIAKYDADLFAAMEQEAQRQEEHIELIASENCR

SEQ ID NO: 937981 - protein, 111 aa, Homo sapiens
STVNLCNTAAAAGASGAGVQMWRCAQWREELEVMIALHACDIATDYAIHTGIRSGAAIIMCSPCCHKQIRLQIQSPVLLKPMLQYGLHLGQQAEMVTDSLRALFLEACAYG

SEQ ID NO: 937982 - protein, 76 aa, Homo sapiens
VDPGAIEFCPAVRSKSLITLKPRCSNSPSVRPFNGLPLDNDNGFCEEFIVRKLTQLVLLATVLVATPAFAEMKIAV

SEQ ID NO: 937983 - protein, 120 aa, Homo sapiens
LDKQHRSAAVFLREITAEDVLEVTDKIAAEGAEMEPSFVLAQSLGENFAHAATSGPLVLGMLAAAAADLVSFASPCVVPLVPGYISYLASIVGGEVTHDVKRGAVVGKRPSGLWWVPRCC

SEQ ID NO: 937984 - protein, 54 aa, Homo sapiens
MRPRVAWALLVPRPWGLGPRGARRGGPCRLLPVAAELRDAVTPKQDDGGSGLRA

SEQ ID NO: 937985 - protein, 104 aa, Homo sapiens
LDVSATGGHATGGLELWKQAGLGHVRLLNTYGPTETTITASYLECDAYVQRRIAQAVVDADRSAAGWRRMYILDSDFTPAVQGATGELLIGGACWPGVITAVDA

SEQ ID NO: 937986 - protein, 113 aa, Homo sapiens
GYRVLGVLLCHPGWSAVADLGSLQPPLPRFKQFSCLSLPSSWDYRRTQPCLANFCIFSRDGVSPCWPGWSGTPDHNDPPTLASQSTGITGVTTALSWFSKLLDFSSSSNATGV

SEQ ID NO: 937987 - protein, 137 aa, Homo sapiens
RPDKLCILPSEHQSGWVINGSIRLAHLYFSPEQFALGCVTLLDREPRELQLQEHTFLDDPQQALRISQLISLDWDEPGERLLSSSLAHELLGHTLLNQVGMRQGLRLKGGLAAISTAVGGGIDSRLDQPLSLGELAG

SEQ ID NO: 937988 - protein, 124 aa, Homo sapiens
SREFSSLLSRGCLSTSRIDMDALEDYVCRGQTSELILLPVTGLECVGDRLLAGEAWLEARLVERGKETAPPRAVPQGQKGCPEEKDGQQVEADRRWEGSPGDGGDEGQPEERGPRDKADVARGA

SEQ ID NO: 937989 - protein, 172 aa, Homo sapiens
  misc_feature (49)..(49): Xaa can be any naturally occurring amino acid
  misc_feature (60)..(60): Xaa can be any naturally occurring amino acid
PRLAKNAGAEFSDKGYSTIVARAEGDDELVEILGLRIDIPAKLLRDLLXARQGYRYAPAXVALASPRAREEISQVLNDIAQDEARSRAATQRIAEELVKLMKQLNELDDAAVYKFAESGKFDEVTVSAVLNDMPIAMIERLMLGLRSDLLLIPCRSARLNWPTVETIHGKRP

SEQ ID NO: 937990 - protein, 102 aa, Homo sapiens
MDEENESRHRLGFSLEGRKFHSQVTSLFPTLSTVWDKVPADIRILAIKSTTLRVDQSILTGLLAWVGRCMGVGRGEEEANKGEVSGKTENPHCLSNIKRPCL

SEQ ID NO: 937991 - protein, 91 aa, Homo sapiens
STPRAFKSWKHPVHDFYGFRGCYLHSQQFSVAVVVDTCSHQHTGFDHTPPFANFHRQCVTRQVVIGPESSGRVRKSSTMASSSLAMSDTST

SEQ ID NO: 937992 - protein, 122 aa, Homo sapiens
FFEMEFCSSLLRMECSGAISAHRNLRLPGSSDSPASASLVAGITGMHHHARLIFFVFLVDTGFLHIGQAGLELPTSGDPPTSASQSAGITGVTTTAWLDLVSCKRVPKTAQRGHPRKLLVCA

SEQ ID NO: 937993 - protein, 39 aa, Homo sapiens
TSWSVCDLTRLEISSLNCWTELFSGTANSSLFFGVFTVT

SEQ ID NO: 937994 - protein, 79 aa, Homo sapiens
LRHGPVLAVLEHGSDEESSDVCDRRVRVRVRVRAEKDSERTLPAGVIMAQASLDVSALRLTAQKMQLIFTAFALVIWGR

SEQ ID NO: 937995 - protein, 83 aa, Homo sapiens
STPEPLAGGKWMWHLMSAEMPPERPESPRMHVPGSTKQHEGKIMFLTEEKTSALQRVDRFLFPPPRSPRDLKECGFLSTAFRC

SEQ ID NO: 937996 - protein, 99 aa, Homo sapiens
ARPSSLTVKSGEHTTTAALCTRGAGAPVRVELESPGKSSVLVVGIVIGVLLLSGSGCRMSSVVEKMRNGPASPWNFRPGKDNRGPPRTPGEGQIPILRD

SEQ ID NO: 937997 - protein, 84 aa, Homo sapiens
QGQQTDLCCLLSAASEENSPHPTRQSCLLWVCCSQVQCWAGEERMKLNYNQCGGCPSICLIPYKRDIIHLFYKRGGIENAALCF

SEQ ID NO: 937998 - protein, 54 aa, Homo sapiens
EDIRAVAQVSINRNSGNQIVDYPYIGVSYSTESNGSTLLVHGTPQIRSWETSSV

SEQ ID NO: 937999 - protein, 55 aa, Homo sapiens
MVKPYLYELKTQPGAVVHTCSPSCSGGRSRIEAPMNRDRATALQPKEQTRRRRGR

SEQ ID NO: 938000 - protein, 159 aa, Homo sapiens
QLHGQELNGGFPSASSFSSAPGATYRGVSSHTSPVSGPDSFLGSRGTTAGSSGDPSAKHWLRSTPRITQAITSRPALLPPWAPPRAWQERHSGLEQEPPVPYLPSYDGGLHGLQSKIEDHLDEAIQRSAARRGTAGDMHTLLPGHGALASVSPVPCRWV

SEQ ID NO: 938001 - protein, 278 aa, Homo sapiens
STNETINNHSEDKVIILISDGITTSDRVLRNQYWDRYMTKWLSHSKLATGRTHSVLSEEIQSSESQRSVKNLHPVLQTASQLSSWRTHQSLGTGLQQLRVAPSFPPEFFLLHITAATTAPMTQLARTARPATMPTMGRWTVKTAPISWVRLRSPYMLYMACVSLLFSRRHHHSCPLLEGSISCWSGLHKLSVLSLVLAIPLPGQCDLRRVETQGPAPQGGLMVRDGVVGHVCLWGVSALQLVLPVLQVSAEPLHALALQVGSPSVRSRAASHLRWVIL

SEQ ID NO: 938002 - protein, 120 aa, Homo sapiens
MGQTGATGPDSTAPQSTCPGACGGSPCSSITAASPPGPPKKQARAVPGLGTLGQDVQHQPRLTPPGPALHPKAAHSSRDKLTDEDLVMALSKGFLEGSSPDSALHSDDESCDSKEVGDIR

SEQ ID NO: 938003 - protein, 53 aa, Homo sapiens
  misc_feature (20)..(20): Xaa can be any naturally occurring amino acid
  misc_feature (37)..(37): Xaa can be any naturally occurring amino acid
ASNTAPAHAVNGAGLVYGRXPGTPRQTPPPRPRPPSXMEQHAAARGASTGSMD

SEQ ID NO: 938004 - protein, 200 aa, Homo sapiens
RATEKQPAVYGIITPPVGILILPLPPASPPPRAPARFPPRPPAPPAASRPRPPPPARPPPPVPPRPPAPPRPRPPPPPAAPPPRRPPPRPPPAPTPAPPPPPPPRPPPPPPAPPPRPPPPPPPPPPPPPPRRPAPRRPPPRPPPPPRPPPPPPSPPRPPPPPSPPPRRPPLSPPPAAPPPPPHTRAPPRLRPRPRPPPLF

SEQ ID NO: 938005 - protein, 235 aa, Homo sapiens
PPLWVVAPARLGVSLVGSSQFRPLLTAVFCAFVRVSSHDPVGFPPVLSLSPSRRVPCAASVPGEVIRVHALYVSYLPTSLPLSHAGFLPSSGAPNSSLRVGPPCVDVLNEVVVGAPCRFLQKDCSPVSSAAGDFGIISLSYMGIMCVSMIATTVRQRSCHRGGDSSNRPKRRHATPPRAPRLMRAHTRHHRRGDDVVAHDPPQGTTIAARRRGGPSPAAHLKNNCVGFAPQMNRE

SEQ ID NO: 938006 - protein, 166 aa, Homo sapiens
FFFVVRSFLRFFRPFAPPFVRLPSLRPRPPRSPVALALRPRFAFWSPLCVPRFLLPLALLRPLLFLFFCVAALPFLVLGFRRFFFLPSASVRCFGLFPLLLSLLVAVALPPFWCVLRRGPRLRPRVTVPRSPTLARCFRATSPRPPFRRRSRPGLTGRPRRVPLPY

SEQ ID NO: 938007 - protein, 75 aa, Homo sapiens
LNRLQDLAYEEVCAKHQGKEASALPMSNVSTQLPINDRGFPNLNLGLVAALGLRFKPNLFLLPLGLGNGFKGPQG

SEQ ID NO: 938008 - protein, 193 aa, Homo sapiens
  misc_feature (184)..(184): Xaa can be any naturally occurring amino acid
MLCTHLLKFKLLSKLALTAAERLTSRTFLPLLSSGSESMLVLPLWSFNLAMTQQRHVLLTPLSHDSGKGGSGRLSDLSRVTELDPSPESDSKVGALNRFASGEWEPESRSLRGAARTGVTHFSPMGAQGVRVRPVCSSSGHRLRSRLVAPGEPQPADFGLLSPTLATRPLPVAGLARPPGPSHXRSAAAASHA

SEQ ID NO: 938009 - protein, 80 aa, Homo sapiens
TPGAVNIPRGILEFRLSSTPELAIRDLKIILYCKTSGRAALSALALGEMGYVNVSSIAGGFDAWVAEAKAVATPSLPAFE

SEQ ID NO: 938010 - protein, 157 aa, Homo sapiens
RRGGGGRNRGARGDPGGRAGGQGERKERGNREGRGAREAKGAAAQGNGGDRQTPPGPTKGEKGGGDRGGRGGPGEGGTPGRKGAGSRKPHSAHRPGAGEHRQKRPHPADKTQRGGGRGGEAKRRAGKAERGRESEAADGEGEEKKGGKRRRRREKGD

SEQ ID NO: 938011 - protein, 113 aa, Homo sapiens
FFFQGKSGNLIRIHKTLYFRKQLSKHGLQQAHSIRETFRATNLVVKPRITGLLSSKLKVKKTKNQPTKNPLNPTKPQNQPTYSWLSSPIFKPQFFLKSMLGGNTGNWSKRAAN

SEQ ID NO: 938012 - protein, 112 aa, Homo sapiens
PALNAALLSIIALPIFPAWAIYATIRGKGCATYLTEYHISTTPNLKADKVCARRSYVAIILVRYGRINLEQQRKRAKELLLRLKCADAADTPTLSEAQWLIAKELGFPSWPK

SEQ ID NO: 938013 - protein, 119 aa, Homo sapiens
FFLDSVGVLPRLECSGTISAHCNVCLLGSSDCRAPAPQVAGITGAHHHAWLTVFLVEMGFHHVGQPAPKLLASSNPPASASHSAGITGLSHCTKPQLQIVSFRDRLDRIQTQNCEISAA

SEQ ID NO: 938014 - protein, 70 aa, Homo sapiens
DTDEASCVEVCSKPDDLWVPGRDGLLHGCSWDLRHWVDLNRVRAGPILEFPTQELLMKQIPVGDKCQKIE

SEQ ID NO: 938015 - protein, 105 aa, Homo sapiens
VDVKPKEVIPGSKGVSRTDDLLHCHPTWNVLVPYCQGLSCAPKQGKARQGKDKQGQLHPAQSTQLQRTRPYKASSDTLHMRTEDCATPPRPGYHLHGWGLCAIVK

SEQ ID NO: 938016 - protein, 112 aa, Homo sapiens
LVYKLSCTDKAYRLISSWTHPRCGHGEPVVLGVLASDTKAPEVTQPSMGLNLLQSLQVFTELVVQTLARTWLYFHPLHLLSVQEQSGILYWRGFCIMVITRSRHLSGRRGLT

SEQ ID NO: 938017 - protein, 120 aa, Homo sapiens
ARRNQVELNRKERKRMDEMKWNGIEWKVMQWNRMERNFTEWNQTEWNGMEWNGMEGNAMDSTRLQWNGIEWNGMEWNGMVRNRMEWNELKWNGIEWNGMEWNGMNASAGECNGTECNGST

SEQ ID NO: 938018 - protein, 83 aa, Homo sapiens
STPKTSSERSTYPLADSTKREFQHCSIHRRVQLGELNAIITEKFLRRLLSRFYAKMYPFRTKATECPNIHLETLQTECFQTAE

SEQ ID NO: 938019 - protein, 115 aa, Homo sapiens
  misc_feature (88)..(88): Xaa can be any naturally occurring amino acid
STTPISFLACTALASAVGQTAGHWVKPKNTIGIMRGELDSVLTLPAVSFSLKVRPRISSLRSLPYLYDKRLELSQPVSAPRPSRQGRXNDLAAVSNSFMFCSPSYGAMSRPGVAG

SEQ ID NO: 938020 - protein, 92 aa, Homo sapiens
MCRGQGQRLRKVAHAYDVQAGLVVLELGRRAQALDDLQACIAHSCACTSDKWVRTRALRYRDGRACYVVDRAQFQAACLVVDLAQAVTKITG

SEQ ID NO: 938021 - protein, 101 aa, Homo sapiens
GRLLKIQKLAGHGGVRLWYQLLRRLRQENRSGGGCCSEARLHHCTPAWVTELDSVSKSYFFMLTKSDKQSVIHLLVHMWVSLGYIPIRKLLEYGMCVSRHL

SEQ ID NO: 938022 - protein, 74 aa, Homo sapiens
  misc_feature (13)..(13): Xaa can be any naturally occurring amino acid
LDGREKKENGAWXFDAFSKGSDFSDTSFTFLTRHLITTSIHILVHSRMENSDSSIDSSGAAQLEMLTPEDLSSG

SEQ ID NO: 938023 - protein, 101 aa, Homo sapiens
STWSGMECNTMERNGMEQSVVEWIRVEKSGTECSWSGVECNGVEWSGLEWSAIKWNGMGWHRMEWKRKNVTERNGMEWRGDKLSGEDQDAVEWNGMEWSEV

SEQ ID NO: 938024 - protein, 137 aa, Homo sapiens
RPLDIGIGEHEESIVGRSFEGHVKAFSDVAAGTVRTRHPATGKGFIAALCMMKCHPHGSWLVFYIDQFGIPLDLYPQRVQSFKQDLLCLRLWQAEEQGIGRIQVGEVVVQHPFAVRLHRKLVDREPVTDDLIGNTQV

SEQ ID NO: 938025 - protein, 78 aa, Homo sapiens
VDVLRRARAEVCEPPLPVRELAGGIGPNIRTVGFLSSRHEHLHRCLIGLNNLLPENHVAQHQPAAGTEPQSRPSGSRR

SEQ ID NO: 938026 - protein, 40 aa, Homo sapiens
VDAKEKEKTKEKVRIPSSVPFEPNLREDRSLSQPQKVNVD

SEQ ID NO: 938027 - protein, 59 aa, Homo sapiens
VDAEKQIRPLTKKVVATCVLTPIVPALWEAEAGGSRGQEIETILAEYGETPSLLNIQKK

SEQ ID NO: 938028 - protein, 42 aa, Homo sapiens
MSDLVVWLQSHTLNDNAVLTLANASMPFVMENCQVHYWLFVD

SEQ ID NO: 938029 - protein, 101 aa, Homo sapiens
STGTISTGTLTRVEGTRPTTTTDIVERLERDGLVARQRDPHDARSRLVEITDAGREYCRNCEPVGGGVRRAGAKHVERSGSKSSDENFARLSPGCPSSFRE

SEQ ID NO: 938030 - protein, 107 aa, Homo sapiens
VDPEDLRGTYVGHAHPSDDRHLKRLGITTVELLPVQASASEPYVVQRGMTNYWGYNTLDSSPLTFHMQLRPTRSRRGEFKGMVKLLHAEGIEVVLDVVYNHTCEQST

SEQ ID NO: 938031 - protein, 100 aa, Homo sapiens
STPGAALCNQGLRYGFDQKGDRTFAWHNAVSVLAERLHPGPGGKGGQLREPQEQRRWSTVFNAMTIDVIRLSTVDQGLSISIAYGNELQAVSTDSAGPPS

SEQ ID NO: 938032 - protein, 111 aa, Homo sapiens
KLLLLNDTSMGWSILTAVAIIWLLISFGLAQPRYLSSLVLSLPENRQTDEWTSQLLSIHGIEEVVVMPEQQVAYVKVDKQQINDTARQQLTHLLGKEEPFKHNSYKVKCRR

SEQ ID NO: 938033 - protein, 180 aa, Homo sapiens
ASTKVSRSRIARQIAVTYVAGEDVASAVDKAADQVSKGLDVSLHPLDPDPADLAQARRAMVRLCGVIERLGADPSFNGHAEVSISLAALGLKISDDLARDHARQVCQVARDDHVSCDRDDESPDIHDRSHRIVVDLLSRYENVDAQEILLKFNENSERELRRTVSRNGAGEDGGKREEVL

SEQ ID NO: 938034 - protein, 97 aa, Homo sapiens
GRRAFDLKFEAAFARWQRTGQSFVLALIDIDHFKSFNDSYGHAAGDEALSQVAALFQRHSRNYDFFARYGGEEFVLILPGTDTASANKTLEKLRLVV

SEQ ID NO: 938035 - protein, 162 aa, Homo sapiens
ASTGGAHIILIETIFDTLNAKAASLRLRGAFRGQGIRLPVMISGTITDLSGRTLSGQTPSAFWNSVRHANPFTIGLNCALGGSAMRPHLQELSDVADTFVCAYPNAGLPNEFGQYYETPEIMARQVHRVCPPRAFLKIFGGFVSARTRESSSGGFSKAVIRI

SEQ ID NO: 938036 - protein, 132 aa, Homo sapiens
VDVQVHEHHPQGLLLPLGRADGLLKMMAHDVAVDQAGERVGLAWNSSSASERFIEVMSESAATKCVTTLLSSRTGAMVEIVPQLGAILVIVAQYNIVFALFAMGSRQSRTFRMLSGPPGNECSCHRFTLCSH

SEQ ID NO: 938037 - protein, 176 aa, Homo sapiens
  misc_feature (94)..(94): Xaa can be any naturally occurring amino acid
GRPWDRTGNTGAAPSANRADEHEAAIMLGIDQFVRRRRRFHQHAEPAEGIDALVILALALRNGRTRDAMEAVATGNEIRLQRVLLALVHEAHRXLVGLDAFDGGAADTEQQLPLRGQTRATRSLITSCWAETVMALAVSSVRSMRWRRHRRPARSRDAGGLAVSRRGAILKSSIIA

SEQ ID NO: 938038 - protein, 141 aa, Homo sapiens
MRGGYGAGVEQLLHHLVAGRGARVVGGAGGAHDLVNLVPIHIRLLPETLGHGDKRAGDGGTGGGVLAEQAELGDRLLALHIPGKRLRIRLNSGEAHELGTATLIEPLPRLPIDEVSAKRFVVKLNLAQIIPMVWEIFPEET

SEQ ID NO: 938039 - protein, 153 aa, Homo sapiens
MGHFGEVLDQRYERAANTFCLIGHAFGIPGQPFKSIRVQHLSAFQDLKVDLTDTRFGADTRPIDGYRLQLLFDDLQCLCFFEYKLFPCGKANGESTLVIVAQYQHGLCGLGSRTHLWADIVGRRQLISFSIKNAAMIYAMIVGMLHRMFKTVV

SEQ ID NO: 938040 - protein, 204 aa, Homo sapiens
AQAERFQPPQPVLPPEDLRSASTLSKIPCQLPSRLERVMGKPSVDMPQSEDCLLLDITLPAGNVENRAVMVWFHGGGYFSGGGGMPWYGAEKLAQEGNVIVVNVSYRLGVFGYLMLDGVCQGNLGLLDQIEAVRWVNRHIAKLGGNQTTSHYSGSLRALILIAYMMAMGKDRPLFAHAFCKSTMDPTDQNCQASYVSSIWQDAR

SEQ ID NO: 938041 - protein, 152 aa, Homo sapiens
PGQFDIEARGTQASVPHWPRTSAAADGRIAHTALQDQTDPQLVVLVEPLALLAGQDNPLPMGSRRRAGNQGKTQTADNPQAAKPYHSTLTHRQMLTNSLGFQDDSCLGKFRCFFSTALAIGRGGAWPLVTNLVPGPGNWAANVRIGPQILGS

SEQ ID NO: 938042 - protein, 164 aa, Homo sapiens
NFFAVNFSLFNFRFKLKNIILESCSFKIFTVSKIIIADTPRAMLTLFWHDVCGTGNKPEVRLPITVSSSNSAALPSGNTSSKPLIIHIVQQTADIFGCDVYFQCPRCIDIANNQRHIRNITHHHAAIQHMFGGIMGLHQIEAASTQNLNINPVLIGIWHQRLPI

SEQ ID NO: 938043 - protein, 280 aa, Homo sapiens
MFLILGNVTLLGEYSSPCLNHTVLKALNNVWFLSFYPRFFLWSGKKFFTNTTIVCIWGAPPVVPRLGVSRGVPGSWHLQALIVTLVYPPWNCGETLTAPHEKEFLPLRFRDFPRATCSTLERVVGETPPIWQIFVCLQYAPRPTPSCGECGLYEGLPYRISTIPSGRSPTAPLTVAPTTTTPFPLNALTTFEGTHTCGHSFPGGPRSHDPVPAPRARTGTSTEENHGWNTRGTLVSGEGLAYTRHPTLKPSRPQLRAGVGHSATEPRRVPRGKPAPGAHS

SEQ ID NO: 938044 - protein, 84 aa, Homo sapiens
EKNSGSQAWNPGIASGGMGGGLGVITFINSGSGTTERDCFIEWEVTKEKVQFSIVWRQVDTLYLRFRIGGLLPLQSPAVSCVRK

SEQ ID NO: 938045 - protein, 66 aa, Homo sapiens
LDCMRHGPSHEANLTASAEDTLNEQDGPGTVAHACNPSTLGGRGRWITLRSGVGASLANMVKPHLH

SEQ ID NO: 938046 - protein, 165 aa, Homo sapiens
RRLCFACQVVVLPSKVKRHSRGYVERIPHIEVGRVLALGVVRGVGGRAYVLLVRLLRIDKHLPLLARGLVAHLGPPQGIGRRTQGVGKIHVIAGRRPGIDLRVETAALAILQLRLVDLTRQAGNWLLPEHTIIAVVEVVEGVSLAQRTGVAIGAVQSCDSSGLDA

SEQ ID NO: 938047 - protein, 83 aa, Homo sapiens
HEAHFRSGHLSPLAKDCVLRKSFIDLTGQADGWFALFLADENQGSPAAPGSRLVTMREPKRRTKMWSRTLDQTSPESRLWASQ

SEQ ID NO: 938048 - protein, 95 aa, Homo sapiens
GALSGVLLCPFSSSAGRLGSLGALQVQTPPPRGCSSDGETGWVTKAPGGSPCCLASSLGKAFRSLMEEDRGKRPVFPDATGQPLPGEEEAEIHSN

SEQ ID NO: 938049 - protein, 175 aa, Homo sapiens
GLNPIQMVVLELDPSGHPSSKHTPYMFGPESTWEGLCQRGRLASRPYVSSRPLKRASRAHLCTSSCHSLNRRRQQLAGRPAHGKILRRLRQGLQAATLAPRPATATRALPRSVRAAESTAGLRRGALGLRPGCTNPGSSSPRPPGREIEGTAGPAATGTGRQGESLRGSLTGHPH

SEQ ID NO: 938050 - protein, 121 aa, Homo sapiens
STTAIGVGDVAIDCLRRTHVVIGVQSAGRCATVNHDIDLLKTLGVQVLAQQRLQVLPVCADHKAQLAMRNSGGGMALTGLAGLPAVNARISTVFQPKSRSPRVKSGSPSAHPKDGPGNSDV

SEQ ID NO: 938051 - protein, 49 aa, Homo sapiens
MGLETGGADERRTDSDGCQYAGALNPNRLWVRKLLKGKAVKAGKSALAV

SEQ ID NO: 938052 - protein, 150 aa, Homo sapiens
  misc_feature (46)..(46): Xaa can be any naturally occurring amino acid
  misc_feature (86)..(86): Xaa can be any naturally occurring amino acid
  misc_feature (104)..(104): Xaa can be any naturally occurring amino acid
FFQLLILVGIGLSFFVPFAPKSWPAAIDWHTIITLSGLMLLTKGVXLSGYFDVLGRKMVRRFATERRLAMFMVLAAALLSTFLTNXVSLFIVVPLTITLKRLCXIPVNRLIIFEALAVNAGSLLTQLATAKYSYLGTSGLSLPDYCPNAP

SEQ ID NO: 938053 - protein, 72 aa, Homo sapiens
  misc_feature (11)..(11): Xaa can be any naturally occurring amino acid
MDARLTAPVNXTLSALTLSSDGNACVNEQLSSCFSRLRHKFDCGKLTPVPVRETPVCRCPVNQQLTSCPAED

SEQ ID NO: 938054 - protein, 124 aa, Homo sapiens
VRLHLQFLRTGSHAHVALAGHLQQLLLLVAEPCDGLEGHVSFAALAIVVQGPQQQCRRQRVVALLVEALAKFIQQACRHIVEHFREVTGEQMQVLCVVHQRVVIQAVAVPFIRQESHGTLRNSV

SEQ ID NO: 938055 - protein, 68 aa, Homo sapiens
MGVLCPVGLMTLPERCQPLKGANAFDRLRGQQPENSRLNHRPMLNRRPKQPAVQPNCPMTTRSNGGSS

SEQ ID NO: 938056 - protein, 85 aa, Homo sapiens
MPPTTTKLKAGTTPDLRSYRRDLHRALRQCQPAGRAGSQDYITLILLLTFLAGVFQWLLGMLRFGALVNFVSHSVVLGFTLGAAS

SEQ ID NO: 938057 - protein, 83 aa, Homo sapiens
LDNMLTQYPELYGAIVSQVPLLDMQRYHLLLAGASWMGEYGNPDEPEEWAYIQTFSPYHLFDSGEGYPPVFFLTSTRDDRVQS

SEQ ID NO: 938058 - protein, 83 aa, Homo sapiens
RRRRGFKPQPVDKQHQPGDADGQGVVGDHADCAALFLGNHVAQGMHDRGGQDCQHPEELGMVQVQALALDDHVQAAETDGDVD

SEQ ID NO: 938059 - protein, 56 aa, Homo sapiens
  misc_feature (6)..(6): Xaa can be any naturally occurring amino acid
AYEGRXQEERCIPALQEASGLVWKEDFTVGYSPERINPGDRTHTLCTIVKVVSGDG

SEQ ID NO: 938060 - protein, 73 aa, Homo sapiens
GRLPLVWFVRNSGGLDGMGRPLARGGRLEYRGEASTRRGLSGAQVPDFSSSAPLQVVLGAQIGEFSGQSLLST

SEQ ID NO: 938061 - protein, 129 aa, Homo sapiens
VDRGLLFKLYELWVSIAAIDVDLLEQRETDTEVQFAKFRNGALVAGLLLAELVAGKAQHHQPLVLVMLPEFLKPFVLRGEAALAGSVDHKNRLAGEIGQGHLLTLDGGAWDAQQVVAHGSARKRGEELN

SEQ ID NO: 938062 - protein, 117 aa, Homo sapiens
LDVGLSLDGLYVPGRLLPVVLPGDCGESASGQGRAGDGQWRYLGWLLLFSVISEVPYRMFIDDADTLNVLPTLALGLLVARGWQQKAVIDRGLALIALVLAGLFSAQLMFGFFGVLV

SEQ ID NO: 938063 - protein, 46 aa, Homo sapiens
MVVPTVVVAAVGMTVRPGLQAADVLVGFRVPVDPDRGVFDAELLVD

SEQ ID NO: 938064 - protein, 104 aa, Homo sapiens
MPALIAFAQVAHEGLFVGLGVVNQTAQLTQFTLLQAMEHHIQCRALFAHEQHPQAATGIVSDQVGDGLGLAEYPRPLNDEIAARYRQADGGILRRIAGHHVPLF

SEQ ID NO: 938065 - protein, 92 aa, Homo sapiens
GRHRTDSCLLTFATLTGNGAVTNVRAVEAAFPVDLRRQLVSLLLGGIYATAHGGCAQYATTGGDDLAILERGARVEHLAFQRTSRIQTFNQS

SEQ ID NO: 938066 - protein, 73 aa, Homo sapiens
MTEAMELLGISKEAENFERYPVRKSPPWFRPMPVPVRGKCRRPPQRDVRQDDVPDHFPGSAAQRVGRLFEWRG

SEQ ID NO: 938067 - protein, 93 aa, Homo sapiens
CSFIPQLFLFKILASSKYCEFNPSRLRIRDKPLKSWDLNTKRFDGFGGVRTASRKDRPNCRSCPYSKIVVIRLIFDSECGHCFSPDVKKPPLG

SEQ ID NO: 938068 - protein, 115 aa, Homo sapiens
VDWTVSPENAPDKPQYLELTYRNGDIVALDGVEMTPATVLATLNRIGGEHGIGRLDIVENRYVGMKSRGCYETPGGTIMLRAHRAIESITLDREVAHLKDELMPKYASLIYTGST

SEQ ID NO: 938069 - protein, 74 aa, Homo sapiens
GRYYYYIGGRQTDYAKAIADELGVKLQLQPTNPANRVPLLVANKVDLVLANFTITPERAEQVNFSIPYFSSGST

SEQ ID NO: 938070 - protein, 91 aa, Homo sapiens
RVRVKPLLEQPKQAKTKLLFDLVQLRGQPCTVKLDCSAAADNEPVCTMRIRLRKILLSMADASKVSWRLSRTLRSIGRHLKQRLTAHLPEK

SEQ ID NO: 938071 - protein, 170 aa, Homo sapiens
  misc_feature (138)..(138): Xaa can be any naturally occurring amino acid
KLGGPSTSAPRAKKFRKQSKKIQVAMGDVTTSPRKTIQGYRVVRIFGGEVYEQKRFLKASLSNTNKQLRMTRTGAIYTPALQLVIYSAMLVLMFLVLYLRGDASAGDMVAYITLAGLLPKPIRQLSEVSSTIQKGVRXAESIFEQLDEDVEIDRGTIERDKVSGRLEVRT

SEQ ID NO: 938072 - protein, 88 aa, Homo sapiens
STRTIIPLENHGFGDRPFLPFEVGQCTRKCHDNFNLLEINHMIRMRVTVNEPIFAVLNQLANLNGLKGQLINLASILRRTYPSTIGCR

SEQ ID NO: 938073 - protein, 68 aa, Homo sapiens
APGLYKHEKRITVPLLVSSILLFYTGMAFAYFLVFPLIFKFFAAATPAGVVDDDQSSRSRGELVMSGR

SEQ ID NO: 938074 - protein, 129 aa, Homo sapiens
VDAFHLEHFQVTTVADQQLALAITHIDRVRRCVDQDSHELNLIAQRLLGLLALAVNIRRYAIQPRAVTSNTAAIPKPWIIALRLRTSSCRLPPLRCATDWSTRPFPGGDAEQRIVQDREQFQRAAAVAK

SEQ ID NO: 938075 - protein, 129 aa, Homo sapiens
MQGTVRPMNCLARLLFKGAERRVGRLALIARPSTADRLGIDRVFQGHAHRLMVLIQVVACHRRLTLAALDHRLFEVDLVQVFLLLSSGFARSIAGRPGGRGVGDHFPGRRLFERVFKGIGGRAGGSTGV

SEQ ID NO: 938076 - protein, 94 aa, Homo sapiens
CTGSIALLVACCHRLVMRRLESLVEPDDDNLSEETGHGFAKQQQQPDSGDSSLPAEIGLRDYRAQGREVPITEEMIQDACRELEQRLVKPAEQD

SEQ ID NO: 938077 - protein, 66 aa, Homo sapiens
ARRLHRPVLALLFQSGDRGMVKQLPAQPDCGIAKPAGVGHRVQGTGTSVEQGGTNLFGTDGLLAGR

SEQ ID NO: 938078 - protein, 116 aa, Homo sapiens
MTRKPVPGIDLATNSASSLETTARIAFPSPDSAQRISTGVLAGVSLNPTMQNQSIKTQGGFQAAGVKRGIELQAQGIGTSMGEERIKFYGPCKFASRRMPQAEAGLNNLYSVLAGI

SEQ ID NO: 938079 - protein, 81 aa, Homo sapiens
RLKAMLAKHGIRHDTTVILYGRDVYAAARVAEIMLYAGVKDVRLLDGGWQTWSDAGLPVERRNPPKVKAEPDFGVKIPGRR

SEQ ID NO: 938080 - protein, 78 aa, Homo sapiens
DLLFENVLMLLLKPVLPAALPPASLWSWLWALGTMTVISLLVGLRPYRLLLARSLYAYYVMMWYERLAAEVLSADCQC

SEQ ID NO: 938081 - protein, 99 aa, Homo sapiens
VDVADACNTSRWRGRGVGDRLVREFETSLVSTVKTVSIKDDKDEPDVVARACNPSYWGGWGMRIAGTWEAEVAVSQDHVTALQPGQQNETVSQKKKKSR

SEQ ID NO: 938082 - protein, 132 aa, Homo sapiens
  misc_feature (45)..(45): Xaa can be any naturally occurring amino acid
MSANDEMYELSEHPKENRVSMAGMEKRNDARKLMTGENQRAPKLXDRTAYYASSSPRTGSSSQYSGGVREFANSVLVKPFSDGSSTPFTIAQYGMVTELRPAGLMTVVYGSIVRKKPFETISGVNGSESNGT

SEQ ID NO: 938083 - protein, 83 aa, Homo sapiens
RRHAGRFLGIPDEIEDAAYIDGAGEVRRFFTIFLPQVKGSLVVGLTAFIFAWQDYLWPLLITQSSSNYTMMIGNAQCQPHSER

SEQ ID NO: 938084 - protein, 133 aa, Homo sapiens
AAATTTKFTPRRRFGLQVHHAGWTVTAAGTPGAGLAVRGDETAGLQVLGAVETPALVLEVLQQLIQTFAPILLAQHQQEIIAADMPDEIPARVDAVVQALRQAQQHLIPTPIAVDIVERLEAVDIHIASTRPE

SEQ ID NO: 938085 - protein, 108 aa, Homo sapiens
SHIDCAHLRLRCLVGFLRHPVLPPTPAEVTKRQHHQGKAGVLLAQRFVRAVLFRLILQQVFELQALDGHLVVQHEGQLVLPGQGQLGHDFAGGQVQLDLFAGQVLALA

SEQ ID NO: 938086 - protein, 107 aa, Homo sapiens
RSRRIDMSARLVVGEEQIIENARGLAVAVMLIKHAQSGTAHLADKTQFCGVWFGRVRVTARYAAASQNQYKSHGAQCTARKKTTHDGVSSLTLKVRNASIIMGESHF

SEQ ID NO: 938087 - protein, 98 aa, Homo sapiens
MQQLTTGVLEGIGHQGQVVVGGLHHPILVIKQVAYLEQGLAVTPQRTQFAALVIDAIGPYAQRRIAFNNAGLVAEPTDHPKVNLATRNLAVVAVIKVL

SEQ ID NO: 938088 - protein, 85 aa, Homo sapiens
STARENPNGRFLFPGSRCINWRDVVRTPWGSPPCGARRLSSGHWAFELAFSVGYPNPITDFHSSQVLPQRRYLFNTVQLLKLSLS

SEQ ID NO: 938089 - protein, 61 aa, Homo sapiens
KPKRLAIDVISLLAYGAPAVTVSLSGRPRSSTDKRSDEDLGCDRQRLIFLSANAVVAAGRS

SEQ ID NO: 938090 - protein, 99 aa, Homo sapiens
ASTWTVSNLQAQSITGLFTSNGIQFFTTSTNAVTYPTQKGWYLPLIYNNVAAGERVIYPAQITLGRIIFTTAAVDTTDPCVSFGTGKVVELDAFTGKST

SEQ ID NO: 938091 - protein, 110 aa, Homo sapiens
PDSRVTRIEGYWKSDFPTDPSLRPAPSSNLMPGALVSTSDMNETVQPMVMTTHAGDVSGDNRAARDQRNDLWFKRSMFGAAMLVIAVIGQRCCLNALGRRLAFKTFGFGV

SEQ ID NO: 938092 - protein, 124 aa, Homo sapiens
ASTPGDQQALLLARGQLHAHGSEQGIEAIAQFQDAFQQPGLLDTALQTRAVQRVAVHQDVLDHRPGDDLVVGRDIGHALAVRAQTEMPHRLAVDPEAPGVQGIEPGEHFQEGALAAARRGDIGD

SEQ ID NO: 938093 - protein, 86 aa, Homo sapiens
MTDAMELLGISNEAENCCALPSTKVTAMVSPGRAEAKKDPADHGRAGVGQHDVPHHFPGSTTECVGRLLQLSRNTAENLMHHRRDE

SEQ ID NO: 938094 - protein, 114 aa, Homo sapiens
  misc_feature (84)..(84): Xaa can be any naturally occurring amino acid
MYGVWVFIGDTGAEALATTLFQQARGWAEEDGARFKSTLAQQRAGNDRDLIAFMEDLERMERGARQLSRIHDRVSAGLLAKRSXETLKSFAGKPCSYRLGGIFEIPFPELTGTG

SEQ ID NO: 938095 - protein, 68 aa, Homo sapiens
RRRERPAKSNSSFEPESNQRPKDVCLFNYSPPLYQLSYQKVVTLVGPRDEVKSGRMDVYEKQGKDTSE

SEQ ID NO: 938096 - protein, 68 aa, Homo sapiens
MDSPLLSFRVDEVLVEQLDQLSAATDHDRQDHLNRALIRYLEPESRHLNAIAEGIADAEAGNLTDLQS

SEQ ID NO: 938097 - protein, 102 aa, Homo sapiens
RAPSTLAKGLLTDSFPDLLSLAAEDCCCLIALEAPWTITDAELWITLTVEDSQLYEDTLAGRSVLIKNLTPQTLQPRWTGPYLVIYSTPTAVRLQDPPHWVH

SEQ ID NO: 938098 - protein, 115 aa, Homo sapiens
MTGLGQPPIAVDAGIVGGHQHMGGITRTVVNARHLQHDQADTALGGPGDRRSTVQLTRLSVGMEVSCPLDMMRFFRRLHAAARVRTNDERRAATSTWQGFQAARDRTRAVVIIVP

SEQ ID NO: 938099 - protein, 105 aa, Homo sapiens
MQSVLSCCDGRVRMTPLSRMKYWKLAVLDNGITATESKKQPLEHHRQMMISLVPAFFQGQAQCRSRQCIISFETQIKAHFEPSFVTYNAHSPNEMVSYSTTTSDR

SEQ ID NO: 938100 - protein, 104 aa, Homo sapiens
  misc_feature (74)..(74): Xaa can be any naturally occurring amino acid
  misc_feature (82)..(82): Xaa can be any naturally occurring amino acid
RRASDHFGHPLPTPYAQLSSPGAPGDHPGLQGVDGVDTFWPFSTSSLSSCSAATPRNAAKITTLMIDVGLARAXSANWVRAXRTTAATAVDIQVGDLAGRNHVD

SEQ ID NO: 938101 - protein, 65 aa, Homo sapiens
HRLAADHVVLVGDHVDVLPVDQRRLVGVAAGVGVFFQDGFSVKADKYISNSDMFKRPYLVVGQST

SEQ ID NO: 938102 - protein, 150 aa, Homo sapiens
GRYYYYAYYYKFAAARRYVTHSPLRSVLIPGLYVAVMNLPGVRTAHEFTTSCPCRTTRGTVRAPTPRYPLPFSRMDLALYRELMSAYYGFYQPLEQPWRRGVKSSLTWNGGGVLKTPYLQADLRALGLENSQIDALPLCSELPAITNVAQ

SEQ ID NO: 938103 - protein, 133 aa, Homo sapiens
PEGEENGQAYVVLYKAIDQVRQCVDTIIKDPGSRGFCSMAGTVRTWMKWRCAVSFAVSVPSNVETKEISLTLYIRSNDLGLGTPFNLTEARQLLSLIGRLTGYTPRWFTYFIGDAMCDENHLDMLNEQLTREP

SEQ ID NO: 938104 - protein, 100 aa, Homo sapiens
LKYYDVLCTAHVFFALVQMGPYFDRPNFMLHHSMLLYTRSHLANPIVPGNTVVSPIFGVITSHECPAVPPNVSPRVKSKSSARAWELTPALFHRRLGSII

SEQ ID NO: 938105 - protein, 108 aa, Homo sapiens
MSADIAGNPMALLRVPKLSCGDKPNCSSPSTVAGRKPGKFPVISQRISQRFGRFCGIQRTVSTVVNAINQQDATRSHPVSPKHLTDHRLHCAIPVINGEYAAQAVQFD

SEQ ID NO: 938106 - protein, 120 aa, Homo sapiens
VARTYLQTVMADAYPHLHVTAEKLFVSGLCVKLAAPDLPDYCMLLYPELRTIEGVLKSKMSGLGMPVQQPAGFGTYFDKPAAHYILKPQFAATLRPEQINIISTAYTFFNVERHSLFHME

SEQ ID NO: 938107 - protein, 163 aa, Homo sapiens
NGERIVVPVTADFYRQIHGSSVKKNNILAYSATTVCGVDNIFVIVNKFNLRLPFCDSQQKIHASGIFPTSIYHDSDIDNLNDLSDLPYSRWYHTRREADDFLEVFMADFTLSKSLFSGKYRNASSTPGNIAYALFVLFCFWAGAQLLNLLVHAPGVYERLMQV

SEQ ID NO: 938108 - protein, 130 aa, Homo sapiens
RPLLLLNSRPVDVDRVDFFFLETDLAVAQAGVQWCDLGSQQPLSPGFKRFSCLSLLSRWDYRHTPPRPANFLYFSRDGVSPCRPGWSELLSSGNPPVSASQSARTTGMSTAAGQEFTFGMSTRRNIGRRG

SEQ ID NO: 938109 - protein, 54 aa, Homo sapiens
RRDNRQARQLIGLYVHLGDEVVTAIRRRGLLIYIVSAFDADLVALQVLEVVRVA

SEQ ID NO: 938110 - protein, 98 aa, Homo sapiens
LDMVLLQGGVSLSDNQHTCIHRSEEGLSCMNKDHGCSHICKEAPRRAVACECRPGFELAKNQRDCILYLRMAAALWAIASIVTGVLAPTVPMVTGQVD

SEQ ID NO: 938111 - protein, 36 aa, Homo sapiens
  misc_feature (14)..(14): Xaa can be any naturally occurring amino acid
RGRPGAPHRRSDNXTAVPARKVGQRLLRSGRAYGGR

SEQ ID NO: 938112 - protein, 115 aa, Homo sapiens
SSDLLYGQKYANCCNQQPQNFSALTQHTLTVCLYNSVWVSWGWLSAGLKDPDSLPLVIPASLKTLESFLFLKEIRKRKCSTNTFLMGQSWEWHTSSGPETRVSLISRKVSKYGLI

SEQ ID NO: 938113 - protein, 53 aa, Homo sapiens
NIFHSGKIYNTWLGVVLTLVIPAIWQIDARALLEIRTSRPAWVTPQDLIFNHH

SEQ ID NO: 938114 - protein, 145 aa, Homo sapiens
DILAVLRISTTWYCSMVIFGVFTIYAILSYSTNYLTEMYGMSLVAASYMGIVINRIFLRLCGRLGGIITTYSKVKSRTRVIQILSVRGLLTLTALLVTKANAQSVAMAIGLIRLVRFTCCSVTRAVLGLPWRSENAVLHYVHRVR

SEQ ID NO: 938115 - protein, 115 aa, Homo sapiens
MNRRMDGMAAKGLEWKGMMECSRMNEWTRMESMEWNGLEWNGMEWTRMECNGMEWNGKEKNGMEWNGMSLEWTAMEWNGMGPTGMEWNGMEKKEMEENRLECNEFGMECNGMEWS

SEQ ID NO: 938116 - protein, 114 aa, Homo sapiens
  misc_feature (101)..(101): Xaa can be any naturally occurring amino acid
RPSPTIKLLKYAVIIVPWRMHGVFVRFLAADKDIPETGSKKRFNWTFRTSSEIYGGGPKLQFLTSVHPQAQHHMEASKAWGFHTLKPQPKLYAGLFQPWLXSSWDGRHQVSSRR

SEQ ID NO: 938117 - protein, 186 aa, Homo sapiens
AAVVDNVVKLLGDQYYKNAMEQCHNYNPLLFAERIRLLPFLDSETGVAQSNCYIWMEKPDRGPGLASGQLYSYPARRWRKKRRTHPPEDPRLSFPSIKPNKNQTLKKEGLISQDGSSLKALLRTDPLEKRSAPDPRVDDDNLGNFPVTKNLNAKAILKPHDFLDDLDDEKYEKHTPKRRGKGKSKG

SEQ ID NO: 938118 - protein, 132 aa, Homo sapiens
FKHSSTLTNTEKSALLAGNLVVKQWRLALSPKLECSGTISADCNLYLLGSSDSPVSASRVSGITCVCLHAWPIFVFLVETGFRHVAQAGVELLNSSDLPASASQSAGITGVWPHRLPFNNFPNNRIIFLASE

SEQ ID NO: 938119 - protein, 85 aa, Homo sapiens
MRRSRLPATGCFHFSVRSRLPATGCFHFSEQVSIFCAAPSPPQAQGLWKEGPPQTPGLSSSLLQTPGPGGGHPPPPVPTHTRFFQ

SEQ ID NO: 938120 - protein, 100 aa, Homo sapiens
LPPTTTKFATARLMLYRALGGCTRPHVILREGLHGREITCVKRVGTITLGPEYGVPSFMQPDDLEPGSEGPDLTDIVITCSEDTTVCVLALPTNSCECVG

SEQ ID NO: 938121 - protein, 102 aa, Homo sapiens
VDRRSPRVEPSGMELRILRASLAGVGHTALGTAHRDLTDLNAVLGGSSSGSAIRSSKTLTTSTSSSVLARPAVPAIPGRSKGRRKVFQKVSVVPYPFEILGV

SEQ ID NO: 938122 - protein, 117 aa, Homo sapiens
FETEFRSIAQLECSGAVLAYCNLCLLGSRDSPALASQVAGITGTCHRARLIFVFLVETGFHHVGQAGLELLTSGDPPASASQSAGITGLSHRAQPEILIKPQIPRDFFVFHNVAQST

SEQ ID NO: 938123 - protein, 134 aa, Homo sapiens
MQPVDTDRIDAVESIRERSWNDRSEVRGPFDIIGDVHGCASVIATLLSKLGWQIQYDGADAIDATHPEGRQAVFVGDLVDRGPDTPGVLRLVMGMVASGNAAVCVRQPRSETRPRSQGLQGDRLPRSGRIPCSA

SEQ ID NO: 938124 - protein, 127 aa, Homo sapiens
  misc_feature (102)..(102): Xaa can be any naturally occurring amino acid
GRTARCWTRKSVGGVWMARTPSVFWATKEVTTTIAYPPAATIDLVSAAVPAPPDGSVPAIDRTRGIVPRSASASLVVISDIPSPVRTRSGSTGVISAPPRRXPVSKDQYVTPPQLALPPLKTDRTPA

SEQ ID NO: 938125 - protein, 84 aa, Homo sapiens
RRQRRIQILCTTRNCRSRACRDRGPEARRYAPGLALMLLLQVLDLVLQGGDIARDLPTESIELRRVASRLSTRGLTVVLLALGR

SEQ ID NO: 938126 - protein, 72 aa, Homo sapiens
DRPPVERVLSLHWPAWNRPFAMCSRRWLNTAHVGAGFSKVGQLIHQVTDTPRSSNAQACSHIGFAPLVTLRL

SEQ ID NO: 938127 - protein, 89 aa, Homo sapiens
RRRGRARTHWKRTRHHWHPSWLLTMTTFRDNGYCCKCAFHVPDTFPFCQLQPETTQGGGFWKTANVDMKTFYRKTSWALKIKRFPCRAQ

SEQ ID NO: 938128 - protein, 50 aa, Homo sapiens
DRPDLPRFHGRGFLYFLLTGQSRAGRRRLAIADRAFKGYSDRSGLQWNHR

SEQ ID NO: 938129 - protein, 82 aa, Homo sapiens
VDGRSRSNDMTRPLAWLLLCIVPLLATAEEAPLLLAWKTADGYELVQLNTTQVLNREPLPADLQTPLGSLWKLFVYAWLVDT

SEQ ID NO: 938130 - protein, 37 aa, Homo sapiens
STQGRGLGGIVAAKGIPERDALAHGQPPHDKDMFRGP

SEQ ID NO: 938131 - protein, 128 aa, Homo sapiens
VDQLGGTSTSSERLQGDPEFAVVVEHIRVLADVLHRGFMPGPGFGQGVIPGFGKGAFGYAKEHMGEGQLSDHERRQAKGVLNGPGSRSNSDSSTRTRSKLALRCRSGAANVVPVIVQGDAAASAGDGG

SEQ ID NO: 938132 - protein, 119 aa, Homo sapiens
STWHAEPSAPEWWGKDLLVTFGAFAKVTRCKSHPFQGLGLKSPNQSSQDDETMWEKVLERFEKQAPASVMTKLILEQAVDAAWVDKVFDDHRQRQYSRELLFSTVVELMSLVSLGLRVD

SEQ ID NO: 938133 - protein, 107 aa, Homo sapiens
TSLLHTREVISQLLRQYAITGASPCQSHSILAHGPTRSHCHVVRYLHTKSADSNDAASSQGPAYLLIATLGAHLHFEGTAPDVLTTPRDGDDIRFQGTMGVILESHT

SEQ ID NO: 938134 - protein, 97 aa, Homo sapiens
WVNSAADLPDHLLRNPRIIRASRNDLVTGFGDCDEGLNERSTDTDVPRHGDLRGKKVQVMTALRYCSVESCTKRNTIIRPSSVCCFNPKTACSALST

SEQ ID NO: 938135 - protein, 101 aa, Homo sapiens
YIPPLQRLFQTENLGALDLLFKTDIPHTRLHFERAPNYVKNTVCSPKRVQIHPEDMLVDRIRGTFPNHLELVLNFAPLPCLFVRENFKRAEAFHHRISFSS

SEQ ID NO: 938136 - protein, 116 aa, Homo sapiens
MEVAATVGGGGGAKAPDEVIAKHCNACHGTGLLGSPKIGTPQPRKDRADHQGGLSGLLAMAITGLNAMPPKGTCADCSDDELKGAIDEMSGLKYRPIVSEKTAYERFWFDAAGNFS

SEQ ID NO: 938137 - protein, 39 aa, Homo sapiens
FGHCFSLTVVVGLYQTQVGLLDRNHKIFTASREDRADIA

SEQ ID NO: 938138 - protein, 83 aa, Homo sapiens
GRPKGDELARDQGYVLEAGVEATTFLGRHLAEVSGGGAVFAPDRQPLQEAGEYQQDRRTDTNGFITRAQGNQQRAEAVDAAST

SEQ ID NO: 938139 - protein, 52 aa, Homo sapiens
IAGVSVSQYEEQFVTLFTLTMKFCSSSFPFEYASRILVFKGSICFSCIIGRR

SEQ ID NO: 938140 - protein, 120 aa, Homo sapiens
STNGMEWNGTECNVMNGMEKTRVQGNGMEWNAMEWNHPEWNGMECNGMEWNGINPSAMEWSEMEWNGMETTRMDWNIMECKGIEENQSECNEMEWNGMEWNGMEWNGMQWNGINPSAIVD

SEQ ID NO: 938141 - protein, 101 aa, Homo sapiens
VDVVAGGVYAHQGPVATKHSTPSLLLKSTSTPKFHKGQCKFPGVENVANCLQPHGLHLDLTSYTWVLALTLKPSSGFAEDGGIYAEQEVVRLIGVYRLQST

SEQ ID NO: 938142 - protein, 127 aa, Homo sapiens
QVRRGALLLGWWDRPPGHRGCVRGRAGGRGVCCGLTAPPSCSPLSAPLPWQQQELTAHPEGVPETPCHLVAAYPQHTGLTGSREPRGDRHQERRWQESSWPATPPSTPGKLLHIPSRAMRAGQPLWQ

SEQ ID NO: 938143 - protein, 89 aa, Homo sapiens
GRSLILCGSRSSSPTRRTGTGRTATRAESAGSSPRPAVRAPVLQAVVGEEPRLEQGATGNHDPGDTSLHGAVGISNDKMSHFRTGAWGW

SEQ ID NO: 938144 - protein, 40 aa, Homo sapiens
STASKKIVRKRDYHQIGSGKCEIKVAQPKEVYRQQQQQQK

SEQ ID NO: 938145 - protein, 123 aa, Homo sapiens
RLSKGLSIKAILVDYSKRLTCIGFYARCAVSTDTTRRPTGHSAIAAILKFAMPTGMPMIEIHCAMPVAMCIRHNHQPKKISQKIFNTVTASIQQHIFASRVQFIDMNSFIAIRHQRQFSDLPA

SEQ ID NO: 938146 - protein, 102 aa, Homo sapiens
MQIPVKTCPHQCQVKSARAGQVPLILEAEGGEDEREELREEEKREEEEKRVQVLVVQEVDDLEEERREKRECRSCTTVKLTWHFVNLSGSPRDKKSFSDAEY

SEQ ID NO: 938147 - protein, 110 aa, Homo sapiens
  misc_feature (13)..(13): Xaa can be any naturally occurring amino acid
VVRSAGGLQAGWXLAEDRRNAATDRRSSIFPRPTRDQGQGFTGIDAQAQAVDSKTIRARRIGETQILDFQAAADPLRQLDDVCLGRLDLVARLQQLADPLCCTGRSLQVD

SEQ ID NO: 938148 - protein, 104 aa, Homo sapiens
SDHSDCISVWVRWQLSRKLASSVKTNDFSPLVAMEGEKARCARAIRTTTVRTAQRRCDYTVRPPHGNDYRHCVVHWSVICFRNLSHACAQSFPRCPERPRLPVD

SEQ ID NO: 938149 - protein, 52 aa, Homo sapiens
GRRSQMEGNAVEWNETEWVGMESSEMEWSRMEWKGMERNETDGTEWSGVEVD

SEQ ID NO: 938150 - protein, 92 aa, Homo sapiens
STALHRDESQEDLAAHTSACAARSSICRASTEAALTHINNCLPEERHNNGTLPKLFPPYQGRPTMRAWLSNISLKYKFWAVNAVACVTTLLS

SEQ ID NO: 938151 - protein, 35 aa, Homo sapiens
NAMELNQPEYNGMEWNGMEWNGMESNGMEWNDTEK

SEQ ID NO: 938152 - protein, 72 aa, Homo sapiens
MSLSQGCKVLFQTRGLGIDDIGYPTRQRQTVPGDGFGGQQRYTDTTQSHRHHQDHRQLQRMGPGSTDCPIRQ

SEQ ID NO: 938153 - protein, 72 aa, Homo sapiens
AARSKAVEDAGGSGCMTVSAGHAALLLAQGRGRLIRRADDRGVVAVLDPRLVTARYGNFLRASMPPFWTTTD

SEQ ID NO: 938154 - protein, 34 aa, Homo sapiens
MAKRPLPGHLLWTAPARLGTYFAAGPPPPNNPQR

SEQ ID NO: 938155 - protein, 133 aa, Homo sapiens
MAQFTQFDEELYKVIGKGSEKSDDSTYDQEPSKKQKKQHEGSKKKAKEVTLENQLQNMEVTEAWTLPPPSLPDLLAACWDPRSALEQRGRVPLLTLSHLTAQHLGPSAGYCAGVPIISNGPRVSSLMTGEATQ

SEQ ID NO: 938156 - protein, 38 aa, Homo sapiens
STKVKLLRSLPQRFKMDVHITPGTHASEHAVNKQLADK

SEQ ID NO: 938157 - protein, 35 aa, Homo sapiens
MTRFYSKGLRETYVITTAQTSARDPQKPSHQYLDY

SEQ ID NO: 938158 - protein, 148 aa, Homo sapiens
MYSSARPYTREYLSGPLVASCTSLRPPQLVHLGDSLLELDVLAFLVAMSLILFNPSSVSMVFYGYWHRYLGNDRLFVGLKLGWAELGVAADLGFLGLKLWKKVIDLPSTSKGRTKYPSALVERNQEVSAAVSVGQREFGIAHAPSRVA

SEQ ID NO: 938159 - protein, 199 aa, Homo sapiens
WEWCFRRSPVTILLNAIAAPLPLSQWPVYLKGWGAADHSQGPQIPSAGPPGSSPVYTSSVLYLGRAINNELCLMELSPEDGPAHEPPSQGHLLTDAVATHAAFSPVTLVTVELVLRGLGQQADAEADSMVVGVGISPDLRRPLHLLHATQEYPCPQGAFQTTGRLSEALSLPILQRAPLRTPPSSLVPSTLEHLLACTT

SEQ ID NO: 938160 - protein, 92 aa, Homo sapiens
GPLNSEKPCLCGCQPPSGCGLLCHPRTVTPLAVFLSVALIYSLSSSFLMGFPCRKYTYCYVTRCKRMLMLCPLAPFGIFLGPQGLEMRPGGL

SEQ ID NO: 938161 - protein, 89 aa, Homo sapiens
MVSTKPQPAAATEDFLTDCTVHFPRIPFGMLFGKSNADLHRPTGAHRIERTKQRLPHWHHVDQIVKNLRSIAFLYAPNLTVRYNFCRLA

SEQ ID NO: 938162 - protein, 50 aa, Homo sapiens
MVVLFDRARSYGRDAHGAVREEGDTRLASQISRINPGDQWGDRCRSQIGR

SEQ ID NO: 938163 - protein, 71 aa, Homo sapiens
AAAYYYYLLLLNSRPLDVDTVTLCKNSLQINGEKNKYSSINMDEYGFSLRTGDLQKELQIADKPMKKPQVL

SEQ ID NO: 938164 - protein, 80 aa, Homo sapiens
STFNSVIFDGARFDQSIYTWMEIGGLKMEVGFLIDSITAMMMCVVTFVSLMVHIYTIGYMQEDDGYNRFFSYISLFTFSM

SEQ ID NO: 938165 - protein, 126 aa, Homo sapiens
RRLDQQQLQPQVLVDRLMQLQQVAALQWLVKALHQQLRAVAVDRQAASAFLAAVEQAIHIGTLCMQLSEQVLAMIEGGATGFKEDIVRALEVIGAREFNSYGSSRPIRLWARCTEPLRMAQRNNGA

SEQ ID NO: 938166 - protein, 31 aa, Homo sapiens
VDLKTDGWYGWGSMAHACNPSTLGGVDAAVD

SEQ ID NO: 938167 - protein, 121 aa, Homo sapiens
PTTTKFAAGRHSSLFQDLDSLESCLPSEVVIISESPNNSSAAPLISLTQARPGPGLRTKDSATFISRARVRPTYRRRLFSANASACMAWPVTLASALSAAWGWDRLPQLFNQQWTKRLASR

SEQ ID NO: 938168 - protein, 70 aa, Homo sapiens
GRPKRSKCPLPGYYKKTVSNLIMKGNIQLCDLNANITEMFLRMILSTFYMKIFPFPTKSSKLSKYALADS

SEQ ID NO: 938169 - protein, 37 aa, Homo sapiens
RRQILLHVLCEVDITALPITTQEMTCDSKRVTAIPHL

SEQ ID NO: 938170 - protein, 58 aa, Homo sapiens
GLPEGLLSPPVWIRSWEKPYACGDCGKAFSQNMHLIVHQRTHTGEKPYVVPRVRASLQ

SEQ ID NO: 938171 - protein, 102 aa, Homo sapiens
ETLPHFVDGIAAGKRRSSLPRWDGGRAETLLTFQTGQPGRGAPHIPDDGRSGRDAPHFPDGVAAGQRLQSRHFEEAKAGGWEVEVVAAEITPLHSSLGTIEH

SEQ ID NO: 938172 - protein, 37 aa, Homo sapiens
  misc_feature (7)..(7): Xaa can be any naturally occurring amino acid
  misc_feature (10)..(10): Xaa can be any naturally occurring amino acid
  misc_feature (22)..(23): Xaa can be any naturally occurring amino acid
MTAGPPXTWXLKDMAHTAEAPXXTCRTWGGPSSHHCW

SEQ ID NO: 938173 - protein, 109 aa, Homo sapiens
DSSGAFASIKEEDALRMQQLLQRKLQPRLSITEERIVFVNQMWLSKYFLIAIGIRNQVTPCKFRNGQKLMFFSLLSKPRLYVTGTTAHVESTDNTPGMGVKAHRMEILF

SEQ ID NO: 938174 - protein, 69 aa, Homo sapiens
VTSLSPAPGVKDLPCLISSQQWPWRRVAGGGVVREWSLPMEARLVVTVNLLLYIPKALVLNASVPLTRL

SEQ ID NO: 938175 - protein, 71 aa, Homo sapiens
LDNVLDKCQQVISWLDANTQAEKDEFEHVRKALDQVCNPIISGLYHSAGGHWPPGFGAQASKGGSGSGPTI

SEQ ID NO: 938176 - protein, 121 aa, Homo sapiens
GGDLTLPLPAPFCLSPQAPPAAVGAAAVPLLEVVSWHPRGRRKEEEEQPDLWRLSETDRPFGIWRRATGPAAPRRQHHRLPGGVEGETREDARQAEPPGPATGGGSTTPLGPGGALGTPRS

SEQ ID NO: 938177 - protein, 123 aa, Homo sapiens
STKANGSRGQEIKTILANMVKPISTEYTKIGWTWWRMSVIPATVISATWEAEAGELPQPGGGGCSEPRSHHCTPAWQQSETLSQKKKTKTSLGWVWWLTSTYGRLRQVDLLEVGSLRPAWPTW

SEQ ID NO: 938178 - protein, 106 aa, Homo sapiens
FLVVVVWIGLFVFLRQGLTLSPRLECSGEILAHCNLHLLGSSDFPALAPQVAGTTDVRHHSRLFFVFLVEIGFHHIAQAGLELLDSSDPPASASQSAGIAGRSHCN

SEQ ID NO: 938179 - protein, 125 aa, Homo sapiens
GRLEYSGAVSTHFNLCLLGSSDSPASASRVAGITGAHHHAQLISVFLVEMGFHHVGQAGLKLLTYGDLPASASQSVGITGMNHPSELFLCLCFVFSFETSSRPEAGVQWRNHSSLRPPIPGLRDR

SEQ ID NO: 938180 - protein, 145 aa, Homo sapiens
LDVGVLWLRPLSGCAIPFCLLVFLLTVRPLCCRSAGVCWRSTPDPVSLGITSGGCKTAKNAACSFLWKLRPSRAPARCLQKLSHTRCLSAPTGRCLPVRIHGGQGPLEEAVLPLAELECCARRSACLFRVVRLGRLSLLNCTHSC

SEQ ID NO: 938181 - protein, 220 aa, Homo sapiens
  misc_feature (156)..(156): Xaa can be any naturally occurring amino acid
MADTNPFGDNKPIDCCIPCDDDKLCQELPGDLDWLPPYHISLTTSIAGSVMERERFVVPFHNVGKKNCVACIAPLVHRLGGSRVVEQRHLRWHCRALPCRGCHRGRMLGHSLSPRLSPEWPPSSDCGAGVPRILVVAGEPHVRPLVRGASTPDVVXCRPGVWHFRIDFSPVKIIPEGVRPRSLPWIGHTTLASIDHLRGLFPKGPPPQELSEAFRALGRS

SEQ ID NO: 938182 - protein, 67 aa, Homo sapiens
GRRMCLESWKLCYPTFSYKWTLRACLEVLAGERSTSYTLDRRPVFLYRGWSSSSTERAVLGGTHMER

SEQ ID NO: 938183 - protein, 64 aa, Homo sapiens
SPMTVVESVGGGFQTSWEGRDRIGRKFQGVWASKLPGKDGTELDESFKEFGKNREVMGLCREGA

SEQ ID NO: 938184 - protein, 67 aa, Homo sapiens
SFCTTLNQTFSRQTKQVGDQHTDQRRNQRGKQKRTDGQKTDFAYTEMRYADGQPLLRIEAKTNGITI

SEQ ID NO: 938185 - protein, 42 aa, Homo sapiens
QAKPQASNASTVVSGEFQPIASVLLIISICVEPAISANTSSE

SEQ ID NO: 938186 - protein, 108 aa, Homo sapiens
  misc_feature (66)..(66): Xaa can be any naturally occurring amino acid
RRLRRSLTLSPRLECSGAISAHCNLRLLGSRHSPVSGVAGTTGARASPANFFFSIFSRDEVSPRYXGWFRSPDIVICPSQPQSAGITGVTTAPGPNNTFLLFSLGCQG

SEQ ID NO: 938187 - protein, 117 aa, Homo sapiens
  misc_feature (63)..(63): Xaa can be any naturally occurring amino acid
  misc_feature (97)..(97): Xaa can be any naturally occurring amino acid
ARRPSTVVLARMCVVGRLDVFADQLLDRGDDVEMIFALEVEGLLGGVFGQVDDGVDHRLHATXGEHQRLQHGLFRQLLGFGFDHHQGVLGAGDHQVXVRGRDQVDGRVQDHFTVDHV

SEQ ID NO: 938188 - protein, 94 aa, Homo sapiens
STEFLATPAANNFRLAQATLQVSGKSAQYGIAAQVAVGIVELLEVIHIQQQRGQWLGFALGFMQSLDRQQVEAPAVGQAGEDVEGCQGLDLAST

SEQ ID NO: 938189 - protein, 119 aa, Homo sapiens
DLDLGGIVCICYIMWWDDLCVLWGRLSQKGEIPEHILSPNTVSNENEFPFSFFLLTLFLTLSAVHRVGKTVICSTDRKCSRACAIAETPSSPETGQLSNQRGTQTTTWLLSLPLLVQAP

SEQ ID NO: 938190 - protein, 76 aa, Homo sapiens
GTDITEERRAQERLRILANTDSITGLPNRNAMQDLIDHAINHADNNKVGVVYLDLDNFKKVNDAMGICLVTSYYAT

SEQ ID NO: 938191 - protein, 74 aa, Homo sapiens
SCPFLKLWRTYCYVRCLMMCRRMNCARSARKSIAGIRAMASTVDGGVNQHSKTRSRSSVWWHCDVIHSVAPVEN

SEQ ID NO: 938192 - protein, 102 aa, Homo sapiens
RASYELLQREYVPTRVQTTAPSGLLIQPHSPCPYASPGLRTAGHLLMHLIGSATLAISTINLPSTLIIFINSNSTNYPRTSVALTQAYVFTLLVPFNLPDTT

SEQ ID NO: 938193 - protein, 121 aa, Homo sapiens
  misc_feature (112)..(112): Xaa can be any naturally occurring amino acid
QGIQVSSERTWLQESTEEESGDQAISRLMLQANILQICDHHPGLVPGEPGYLFILYSNYANCLLPEYRLNDQRFSSTFPPGVHPQGLAGGPELPSNPSYPLTIWKESVHTKXEHVLLFARN

SEQ ID NO: 938194 - protein, 100 aa, Homo sapiens
  misc_feature (19)..(19): Xaa can be any naturally occurring amino acid
MLKAVGLDHRGNHRPSELXWRERQRVAIARALVNNPRLVLADELPVTSMRYRRQHLPVAWGIESLAGTAFLVVTHDLQLAKPMNPQVGIPDARLTAELSL

SEQ ID NO: 938195 - protein, 48 aa, Homo sapiens
RRALDLHQRPELVHLQARLVLRVVVELVGHVRQVVADAAAHGHRDFLA

SEQ ID NO: 938196 - protein, 31 aa, Homo sapiens
IQINYYYCIATTVAQPSDQSDKERERSRNNK

SEQ ID NO: 938197 - protein, 61 aa, Homo sapiens
SPETCLLETDYTFPTCLKRSRTLTWLIHLASVCCCPEALVTASSVALHVSSESEGETRQNV

SEQ ID NO: 938198 - protein, 72 aa, Homo sapiens
GRCKPLPGSLCDPADQLTNAPQPWRNSTLLRDKCSDNSSVTNSGLQQQFSISDTSDSACVEQAAREQRLNGS

SEQ ID NO: 938199 - protein, 142 aa, Homo sapiens
MGGLGSSRGVGGGPGWFLTTGWRCAVALGTVPYTLLTLNQSPVPTLSSTSSPHGILSEGGPGPPTPWTHFCAPERPCPGHVPTYALYCPPQPCGTQWCCGESSRPAKDRMVMRGRGTRGTWFWFMMLPNFSGPPEILDTAAW

SEQ ID NO: 938200 - protein, 323 aa, Homo sapiens
LFGVSKREDRRKETEKIFEEFGLKYAKYAKNTNAESSGSMNGGPDNRLTGILGGRVVHTIEVEPQEAFLSPLELWVQVLAAGSKPGVGCIRARVMGCRVVVGDEDETIQPGGQLLKLLVRYHAQLVGGGGYGRWDDLVGQQLGLVQSLAKLVSMWMRPTRFWLSSWFQTSTTKPSKCWFFATWTTVLLSSSISSSLSKTFRKSSVSSVLKQELRHYVQALGMLSDSSHPPLVHVVEARDLKHLTATSLQLQPDGGELCELAPKDLGDIVAMAVPWSYKAQYIPSKVSLPGLCRAVAAMLKNHTLSFEVRYHQTPGLAPAYLKT

SEQ ID NO: 938201 - protein, 91 aa, Homo sapiens
MTIGKMVADDLLSSFLGLPLPPCCGGPRWGRLGGFLELVVDVVQALAQLPDRDPNAQLPGQLQPHLQGLQGWVEDDVPPLRLFLYSKKCSE

SEQ ID NO: 938202 - protein, 39 aa, Homo sapiens
AQHSLRNAHCISFSIHRRSTWFRLARSLWWHTLAGTLTL

SEQ ID NO: 938203 - protein, 42 aa, Homo sapiens
  misc_feature (41)..(42): Xaa can be any naturally occurring amino acid
YSSMANQHCQLTYSTAYHRAPMNSKDLHAVGSVNALSLNAXX

SEQ ID NO: 938204 - protein, 89 aa, Homo sapiens
MGCSGAILDSSARLRLPGSRHSPASGSRVAVTTGTRHHAQLMFLYFSKDGFTVLARMVLISDLGHRCSRVWIQVAQLLLISANNSIDEL

SEQ ID NO: 938205 - protein, 73 aa, Homo sapiens
VGDSGVAAVLTIITSGCCLAVPRTAGNKVLSIMLKNQSSQALRVYETTGATIAKCHSLSGLNKSDLLSHSSGC

SEQ ID NO: 938206 - protein, 83 aa, Homo sapiens
QGTTMPVLPKHTVTFIPVPLTTPGRAEQVSDPARSPHSRRTPGRVGPEYRGAALPEQPCRPGVLRAAPLPPGRRQVAGIGEGR

SEQ ID NO: 938207 - protein, 93 aa, Homo sapiens
SVHSRAERFLCLVATPEQPILLAEEGGPRDTMMSLRSRSPGAGPAWDKTVTLPIAGVLGAVAVSRAGSRGTGRVCTMAMVAEAQVCQGLRGNL

SEQ ID NO: 938208 - protein, 135 aa, Homo sapiens
  misc_feature (90)..(90): Xaa can be any naturally occurring amino acid
ECPTRIPRRISHSSSAVQVPVVSPHGEPLSMVIRYRQAVTLKHADQLLLHGLAPFIGTVRQAQGKTGVVVQQGERMAASTAKRKVALKIXSPEAVRRVVFNLAVAGMPGEAPGSRPWRAIRLWTVLKAGMVCPWS

SEQ ID NO: 938209 - protein, 95 aa, Homo sapiens
VPGGDYSSQQGGKSSPWLCLVFAAGRVGSLWEFHNLFKLFVPDEESRLFFIQMRVMPREFIRMCMVPRLELEATQEGLEMLTGGRPGLSVAPPRG

SEQ ID NO: 938210 - protein, 124 aa, Homo sapiens
AAAYYYYEIRGRSTTDVSRVASSISISVESESTAHDSRDNSMNGPGSVLSSSTGVMGVKFIGRLRMVGRSDCLHRDVGDVVNATLMGTFPSSVEPCPSNLAGALMGLNGRMVQVTGAARYGVRR

SEQ ID NO: 938211 - protein, 101 aa, Homo sapiens
  misc_feature (34)..(35): Xaa can be any naturally occurring amino acid
  misc_feature (67)..(68): Xaa can be any naturally occurring amino acid
GSGGTGVPNHGLEAVVCRDDEHLEGLPALEKERXXPRSSRPHEPCSLLLKTTSERCPGRGLKLQVRXXSPAPPLHSRFTWNLLALGGTKPRILSTCAMADR

SEQ ID NO: 938212 - protein, 64 aa, Homo sapiens
SSREQVHQTNPLRTQLPRPATQEAREQPPHLPHSLTAISSLNPLHQSLSPCFLAMMTIKLVDSA

SEQ ID NO: 938213 - protein, 67 aa, Homo sapiens
CLHACMYSGRPITGEHACLQGSDTPTHMHKHTLNHFPVQDLVFSNTHITAGMHHVSQATLPKGQGRT

SEQ ID NO: 938214 - protein, 118 aa, Homo sapiens
CKAAVMDSPLCKTAMTELIESVRTWATPPWMCKYYRHPRCKYYRPLPGQGIPEEEQDLREKGGKLILMFNKQVKVLHSRQWAGHLNPNPTVPYTPITTPTLQMRKLRSGDIQSLPKIT

SEQ ID NO: 938215 - protein, 108 aa, Homo sapiens
  misc_feature (31)..(31): Xaa can be any naturally occurring amino acid
PAEAHEESVWRGRERVGEETEIIPTLEPLPXHEVPGHQSVFMNEPRLSDFKQVLLREGIQAEFVGGVLVCNNQVAVRRTETGRIGLEGCLCQDFYRIRDLLYEQYAIV

SEQ ID NO: 938216 - protein, 97 aa, Homo sapiens
VIRINKMLSCAGAYYEVLDHCSSILNKYDDNVKAYFKRGKAHAAVWNAQEAQADFAKVLELDPALAPVVSRELRALETRIRQKDEEDKARFRGIFSH

SEQ ID NO: 938217 - protein, 106 aa, Homo sapiens
QCETLSEKNKITNNNQTPDIQQSQALIKYLLCARNFAENPEEAILAGGWATAWGPEVEAGGAGIPVNGLPPRKPGPGAHPSVTLPCLAHTAGSVPGSPTQRGAVGP

SEQ ID NO: 938218 - protein, 60 aa, Homo sapiens
MEYYAAMKKNNIMSFAATWMQLKDIMLSELMPGTENEILHVLNWIKQMWPFYTTEYYTVM

SEQ ID NO: 938219 - protein, 99 aa, Homo sapiens
TKNIQSNIEKNKVEESIVAEFKNQSKATEARQQGLQQQSINGSMSRTDNSGTDTHLHDDLFFNRSVNAIQMVNLPTNDTGTTGYLYTPDSVTMNHRPKG

SEQ ID NO: 938220 - protein, 145 aa, Homo sapiens
NFHLSQRNPTLKTAKGTLAAQSFNFFKEKSVYLFLKNLNLVNFASPALTGTAQALGDFASGISGPSTPGAQTLGAMPCGALCRPWGLPGGRPDHDLASLCLKKLAFLQPHTTRGVLGTQGVGGSHQREAGAWPAPAGSCSWGAAD

SEQ ID NO: 938221 - protein, 118 aa, Homo sapiens
IPATPKTSCPRPATLEEPDASQPQLAKQYFSSSMLNNIINLCRSSASPKAAEAARLLLSDMWSSKELQGVLRQQGFDRNISWNLYLGQQPSEIQLPIFRRKFSSKFRFQEDMTQLRNP

SEQ ID NO: 938222 - protein, 65 aa, Homo sapiens
  misc_feature (12)..(12): Xaa can be any naturally occurring amino acid
EVLEGSDYQSHXRNAAVQLTSCGRAALRCQDTCLSAVGRHPGRFQTTCQPSQGECRGGNLAAFLF

SEQ ID NO: 938223 - protein, 108 aa, Homo sapiens
  misc_feature (36)..(36): Xaa can be any naturally occurring amino acid
  misc_feature (86)..(87): Xaa can be any naturally occurring amino acid
LDLLSSLLFPGLLAHPGAPWSSFSLGTRLSNRAHAXITSWAQRQVVAPWPLRTSGTHVTLIPLLPLRPSLSSEAFLSHGPCKPLAXXFSWGSSLSLDHLLMPFASTFP

SEQ ID NO: 938224 - protein, 46 aa, Homo sapiens
LPDDDTGSSLNQLNKAPLHNKVIRQRAAPLRVVRGQSSDSGKTVQV

SEQ ID NO: 938225 - protein, 81 aa, Homo sapiens
TSNQRSRAILLEASLHGGLAAPSSLPSEGFCLQPSVTLSSSVVDSVLLALCLFCQDRHSLWILSSGLAHAHSSGFGRTFVL

SEQ ID NO: 938226 - protein, 74 aa, Homo sapiens
RFLRHPIPQIRTTEVASPAQVHSGRTRTALCSGVFGYSHHRSERHPVRLLNEHHGIVAGGHEQGAGTVSGFRRW

SEQ ID NO: 938227 - protein, 135 aa, Homo sapiens
EFCSVTLLSPYLPQLRAGVWTGASQSASVSSSTFSKVIEKPVISSEVQYAPIKLRSDSQSRLLATCGQAVIDAVQLRKRSCAKIVNQRNHPIARLERLFGLLFFLPTALLIIPETQSAMVSAIYQQGVEHFIDGL

SEQ ID NO: 938228 - protein, 59 aa, Homo sapiens
  misc_feature (8)..(8): Xaa can be any naturally occurring amino acid
MKQISSIXPGNWTVYFGAGAEEMTPDHLPVCWLRLDPRARPPDLCGYSSRRPQVVLQDH

SEQ ID NO: 938229 - protein, 68 aa, Homo sapiens
SPPPPGRRCARSPLPPNLPRLPSPPIGPTPDASVEAQDQSTATCTFRARPTLPPTASQSGASLAGAAQ

SEQ ID NO: 938230 - protein, 76 aa, Homo sapiens
MLARHPLRAQEALSGGALVHGTNHEGVAHFLFFAGAPPSTYVPLHAPILLYGLGVFLDYDCQSEDCYNIGIKSYCS

SEQ ID NO: 938231 - protein, 30 aa, Homo sapiens
  misc_feature (9)..(9): Xaa can be any naturally occurring amino acid
  misc_feature (15)..(15): Xaa can be any naturally occurring amino acid
LNPPRREFXSGYAQXLEMRMAEMLRLSCNI

SEQ ID NO: 938232 - protein, 458 aa, Homo sapiens
AALVGPSVASVGGTARFSIPDRGPLLRVRVSVVCGRGSQGVETPPQGGAPSEGSVFLLISGLCTGGAGILVVGRRLVRRVWCGPVFFSREFAELARREFCLALPNAPCVVAGPHPTGGRLSCAGVSRSRCPPCVSVSLRVSVPCVSCLVVPRPVTGRLRPPRVRPPLGRAAGGLHASARPAAGLQGKSPRCFTVRLGLLVGDPHLSTRRGFVPAGPPWGLCNVSIWRKSTGAWRRLAPSGDSGLPRAPTVHCVPFPLGEPLNLGLGDAVLPLSRFTGSLTLAVPIGVPFGPACVISENPLAPTQFPIDRSVSPWATTPSCLLVHVAHANYGNADAFSSYLSLRLMVTEINQPVVPTGVEEQVDLDGCPRTGTSFIGPRLAKRDAQHVHYMTLEVVEDGHRDLVEAVWGQQPGRVPWWVLLGAMLRKGRHLILSSPGCKVWHCFSLPSSAAINARDGAR

SEQ ID NO: 938233 - protein, 48 aa, Homo sapiens
ELKAELERKKQRLAQIREEKKRKEEERKKKETDQKKEAVAPVQEESDL

SEQ ID NO: 938234 - protein, 106 aa, Homo sapiens
RADMSRKEGRSPECRCIGRVRGRVVPPGVLIQASNGTSGWGLSCSLVVHTDMTIDTRLKGKMFQERKLRETVRCGTGFTVVEKLQWDFIHAKGEGLTVMRAGKCSK

SEQ ID NO: 938235 - protein, 76 aa, Homo sapiens
PVCGKTFKNEGRARSSRLSSQHFRRPGRADHLRSGVRNQPDRHGEAPSPLKIRNQPDVAAHARNPGYSGGRCRRIA

SEQ ID NO: 938236 - protein, 68 aa, Homo sapiens
PRRCIYCRWVHWREGRSGGRSHCLVGHRDGVDLGPPGSPRRTAASSMLGFYAAAGGRGGGLLGGCLMV

SEQ ID NO: 938237 - protein, 123 aa, Homo sapiens
FAQATAVKAPDVLVKDVTEEVLTTLRTDPAIKAGDANKTAELVETPRVPHFNFTRMNRWQLGKEWRATTPEQKKQLTDEFRTLLVRTYSNALTRYKSQTIEYKPFKMAMPDTDMTVRTQINQP

SEQ ID NO: 938238 - protein, 46 aa, Homo sapiens
  misc_feature (14)..(14): Xaa can be any naturally occurring amino acid
VRVQSPLRVPCRSXDSLDRQFPSVSSAPYYYVLYYQSVKGTLDTET

SEQ ID NO: 938239 - protein, 53 aa, Homo sapiens
GAGEEVRKKSHQRSRRDMPQKELRRSRDCGFPSGSGMRTQAQPGTYADAHPPK

SEQ ID NO: 938240 - protein, 51 aa, Homo sapiens
ADLFFSPRYVSSGVPVTLVSFLTTRVLDQPKALARLPELLGSVDWIATASH

SEQ ID NO: 938241 - protein, 61 aa, Homo sapiens
GLDGLREEVAERPSRITLTVLEDLHGEQFLKAIDIVLVAVSEHIERFAALAREMAATETRE

SEQ ID NO: 938242 - protein, 68 aa, Homo sapiens
KRRNTVTSHTLPPELRELNDYAGACTLRVICGNLGEVERPMGRVLAGVAAVSRGEGRISSEVWISSWS

SEQ ID NO: 938243 - protein, 77 aa, Homo sapiens
RKRKKTEDSSSGKSVASDVPEGKVKMTFFSYPYEDLKVGRARWLKPVIPALREAEAGGSLGQEIETILANTVKPRQY

SEQ ID NO: 938244 - protein, 188 aa, Homo sapiens
  misc_feature (116)..(116): Xaa can be any naturally occurring amino acid
GITAEYLMLTYANDAKLYVPVSSLHLISRYAGGAEENAPLHKLGGDAWSRARQKAAEKVRDVAAELLDILTQRAAKEAFAFKHDREQYQLFCDSFPFETTPDQAQAINAVLSDMCXPLAMDRLVCGDVGFGKTEVAMRAAFLAVDNHKQVAVLVPTTLLAQQHYDNFRDRFANWPVRIEMISRFRSAK

SEQ ID NO: 938245 - protein, 137 aa, Homo sapiens
MQLVALRTGFHLNVIARIHQNVRTFTANHHKPDPVEIPRCGCLFCREERSTASSCCALSQLRSEASNVIWIFLLTGYRLKFAFTEHHQTQEHHHQRSYDCPQRDPRHIDAQVSDQRHAQIADSGNHCTAPSQTAAVE

SEQ ID NO: 938246 - protein, 41 aa, Homo sapiens
LQAKTHLIGCCSSINSDSEPIPSTRGAATDTQATGKFAAPA

SEQ ID NO: 938247 - protein, 147 aa, Homo sapiens
PTPAFLYSSGSVSLQPTSFTKSSLITRLEGSPEMLGLGVNPDICDMHEEKEVLTSQTSGCPFGAWGRVQKTRDPIPSQPFVIMRSDPAGFSAAPLCLLGNWNSGACLPTYPCHLALKSFQLPVTHSLGALHLLFPLWDVPLPHLFPK

SEQ ID NO: 938248 - protein, 135 aa, Homo sapiens
  misc_feature (7)..(7): Xaa can be any naturally occurring amino acid
  misc_feature (33)..(33): Xaa can be any naturally occurring amino acid
  misc_feature (127)..(127): Xaa can be any naturally occurring amino acid
  misc_feature (130)..(130): Xaa can be any naturally occurring amino acid
VSSAAAXPANGATLVAARDCAQGSSGPRRLRSXNENDKMKIEKCGWSEGLTSIKGNCHNFYTAISKDVTYKELKNLLNSKNIMLIDVREIWEILEYQKIPESINVPLDEVGEALQMNPRDFKEKYNXVKXSKSDS

SEQ ID NO: 938249 - protein, 142 aa, Homo sapiens
  misc_feature (140)..(140): Xaa can be any naturally occurring amino acid
EGIPLDSERVFLQNNRIGLLQPGHFSPAMVTLWIYSNNITYIHPSTFEGFVHLEELDLGDNRQLRTLGPETFQGLGEASRPLPLTSVGLSALPAGVFGRPCTALQLPLTLQGQPHSELPPGTDIFSWELGSNFKATCFFXTG

SEQ ID NO: 938250 - protein, 107 aa, Homo sapiens
LGRVPRVLGSFCPPVLQRSRYQPGGSRKGEENKKNKKYPKLARNESSGKEKEQEPASQASEANAQEPTAKETRKKEQPAKNQKKAKNKKEAAATQSDEAASPEAQQH

SEQ ID NO: 938251 - protein, 267 aa, Homo sapiens
PRVLGSFCPAVLQKSRFQPGCHRMGQFKEKKKKCGTVCLKYLLFTYNCCFWLAGLAVMAVGIWTLAINSDYISLMASGTYLATAYIMVVAGTVEKVNGVLGRCATFKERRNLLRQYKKNALKKKPAGEDRWYPRLRLLPAAEHGAQREPEEKQKPSATTKKAMSCDKTFGPAEAGEQMLRQKQITETGETVSGSAHRRPVAVVPDSCCKTVVALCGQRDHASNIYKVEGGCITKLETFIQEHLRVIGAVGIGIACVQVFGMIFTCCL

SEQ ID NO: 938252 - protein, 106 aa, Homo sapiens [sequence omitted]

SEQ ID NO: 938253 - protein, 114 aa, Homo sapiens
MKGPAPPASPCPWHLALRRWVVLSQLPQELQVALLLLQLGHGLLAGPKPPLRLLQFLPQPHVLLGQPPGLRAQPLLLCLQCTHMCRQGQQHLPGVGVPSRGWFLPCQTAPDPAQ

SEQ ID NO: 938254 - protein, 122 aa, Homo sapiens
HCTIMDDAATHLDSDCGGDDGIPKYAEIEWQHLTLQKVCHAEWAVGMSGQQTAAGHRDLWQWLTGYYGVLKNEVDGQPNKCCFIYLMAETPPGLGSQRCHREQSQPHPNPGPNQFSDWKPLD

SEQ ID NO: 938255 - protein, 48 aa, Homo sapiens
MHWGRVQPGLQDPKTLQSTGSRAGTARPTGPEDAAEPGNEGPAAGAPG

SEQ ID NO: 938256 - protein, 48 aa, Homo sapiens
DTQSLDALGLLIFLLSLMTLTLFSPDLIGDPDNYTLANPLNTPPQIKP

SEQ ID NO: 938257 - protein, 92 aa, Homo sapiens
KVKSRVRMPSKAKKSVAEYVAIRACKEFNLGGWGRDTGGTACERGQGVLRPGTEAASSGSVEEDWYRRLLGSDLYLDRINQKKMSARFRGDW

SEQ ID NO: 938258 - protein, 112 aa, Homo sapiens
AVRGFLGRGGRDQVPILQIGRLRLRPSARSLGRVMSWAGVFAPVLSICPSSSPRSGSFEALALQKWKLSHGELAMGKRQWHLTLMSIYYVPSASRAFSHSSVLGVKCCYEPV

SEQ ID NO: 938259 - protein, 106 aa, Homo sapiens
AEGYPAVFVRRGRFLVSKALHTQLFGARYVWLVSPISLPRERGMVFNYASPTYSISSGRYLSTGAIYKMALNAERTLISLVALAVYGRPPVNIYSLRGATYIETPP

SEQ ID NO: 938260 - protein, 125 aa, Homo sapiens
MCRLKNYTGECRHDLFKKYWTKWSLICDCRLKNNLQSTPCWPGTVVAPVVPALWEAEVCGSHEVRSSRPASPMWRNPLSTEGAESWLGVVVHVCGPGCSGGWGMGIAWAWEVEVAVGRDHATALQ

SEQ ID NO: 938261 - protein, 94 aa, Homo sapiens
LANRKCGEWWEDDVKIARRVGRKAGRQYRSTYDPHRPAMPENQKENHHTTSTSINPAVTPKAYNKRRALLSSGRCEDVCECECAMTSHPLIILT

SEQ ID NO: 938262 - protein, 74 aa, Homo sapiens
QAFGRNEELEMSSEQEIMSDEGFRRVAKGPRCLEMPEKDRKVRIDKRFRAMFHDKKFELNYAVDKRGRPLAIAL

SEQ ID NO: 938263 - protein, 93 aa, Homo sapiens
MYQRCFDNASETLFVAGKTPRLSRFAFSDDPKWESGHHVHDNETELIYVKKGVARFTIDSSLYVAHADDIVVIERGRLHAVASDVNDPATTCT

SEQ ID NO: 938264 - protein, 83 aa, Homo sapiens
EQGRLPLGTSSLNYLDPRISIAWCKRFRVPVEKIYTPTQRERFASVSPWQEKTLNSNDEPLETSFACVCVFLTIKAVLGNFVQ

SEQ ID NO: 938265 - protein, 42 aa, Homo sapiens
MQDPSRGSFQLMLVLQACRRQELRFGNLCLDFGGCIEMPGCA

SEQ ID NO: 938266 - protein, 104 aa, Homo sapiens
ELCVDGMEFCSFPSAGVMWYDFSSLHSPPLLGSSNSPASASQVAGITGARHHTRQIFVFVVELRFPHVGQAGLELLTSGDLPASASQSARIIGVRHHAQPHILY

SEQ ID NO: 938267 - protein, 102 aa, Homo sapiens
MEWNGMQWNGVEWNKHQWNGMEWNGMEWNGMEWNGMERTGMEWKGMEWNGMEWNLMEWNGMESTRVESNGIERKLIEWNGMECNGMNGMEYNEPEWNGMEGK

SEQ ID NO: 938268 - protein, 109 aa, Homo sapiens
GDDVAGSNSCRGAPPELAGSTGAHDDACNPSTLGRPWRADDEVKVIKSDRGQHGEGPSLLKMQELAGPGGALWSQLLGRLRQEDHFNLEAEVAVSRDRTTALQHGDKVR

SEQ ID NO: 938269 - protein, 99 aa, Homo sapiens
DGALYCGLHAYAGHHRGAIQKNSQCGPVELNGWDLNSFTETKRTLRAKQGGTASLKGASLHRVKSEGIIMAKKIYPKVDMTGGSTLPDMEEEVQKYWVD

SEQ ID NO: 938270 - protein, 52 aa, Homo sapiens
ARRRQHLSPHCTPGLIRLIWLARRVSPSFLTAPCASLPKLRLGRRGRPSPVD

SEQ ID NO: 938271 - protein, 90 aa, Homo sapiens
MRIYQKGHIVDIKGMRTVQKRLPHQCHPGQTRRVYNVTPHAVRIVVNNQVTAKIPAKTEFMSVLSTLSTLRADDSFLNRLKQNDQQNERS

SEQ ID NO: 938272 - protein, 70 aa, Homo sapiens
PHEEAIWKGRSLVQPSPPRSQAYERANLDSLVLLSPQMPTVSVDDMWSRRTAQMSPANPVNHENKEMVFA

SEQ ID NO: 938273 - protein, 78 aa, Homo sapiens
MANALLRDPGRPVSSMRCDCALAWSPLWAALHTAWPRLSEIVQGPREGRQGRILIFGCGFMNGKSFGPVRFPVPLFFC

SEQ ID NO: 938274 - protein, 66 aa, Homo sapiens
  misc_feature (3)..(3): Xaa can be any naturally occurring amino acid
  misc_feature (56)..(56): Xaa can be any naturally occurring amino acid
PCXPAKNYEEGEGSQDRELGFVVRAALSLLVVFVWSEGCSPVSKAALALGLLGIYXLPGRPSGVSG

SEQ ID NO: 938275 - protein, 158 aa, Homo sapiens
YGFYLALESFPHLAELIDQPRLYSVIKLGENGPDHVPVLPHQINGADCSSHPASGTSTGDRATTSPARAGMAPAVMTETERMALATGTMTGRKRPAQRPRRRCRSPPDLHRRHPTDDRDPLQSFRADLGELIDKVPKAVTIVCDEFQNARLRDRDGEG

SEQ ID NO: 938276 - protein, 147 aa, Homo sapiens
HCPEEVLVPVQYHGNSVHDKKVMNARQLIAGRLAHQVHSHGITAQRKEPVRARGTTSRHNPTPGPSPGRRWRSTESCPPTSGYRRKRAADFPVTTARTTQRQQQDQHHCTDRDGHLGAAFCAAVSINGWFISRSPVLSVRRVLRRFW

SEQ ID NO: 938277 - protein, 83 aa, Homo sapiens
TVVHLAAWLVLLALGAAILGGMGGGRGSQEHWVLLENTGHKSTGLFYHWHCPSHLLGGPNVSRCKTRRRYYFLTTAFPVNHHS

SEQ ID NO: 938278 - protein, 79 aa, Homo sapiens
IATCFFQDLPIFTDHGLSKFFFASFEQMSSLEDDLCAMGSRSCFPCRKSLVGSIYCCFDIVGSGEREKAYHFIVLGRIV

SEQ ID NO: 938279 - protein, 113 aa, Homo sapiens
MAHTYPPALRTPRVTPVWYHLFQLHMYASAHVMIKSPSYHSHPKEPKPRTRAPTTKQEQGDQTLWAEPDDLNAPADTHIHTLAPPANLIFATRICTDSNTTQQHVAATHHTPF

SEQ ID NO: 938280 - protein, 89 aa, Homo sapiens
PILQLPVEKLSRAGAFLMDAGSVLMLRVGTICTQTFLTQVLGVQNYASIPQPITDLPELATPDSARILPFISWLRAAEPILPNTLCNKG

SEQ ID NO: 938281 - protein, 77 aa, Homo sapiens
EEWLDDKSSEKVTREGSQVYAHDSPDVSPENWLKTYGLLATKLTLMDALSLAAVPHSSTYVPVLDKHVMSTLFDEAN

SEQ ID NO: 938282 - protein, 191 aa, Homo sapiens
TCDHSFLLQELPSLVTESPGHRLSRPEPHSHLLTQGLHTRRQGIWVFNKRLTKHSSIIPPESWLGALSLQHTHPPAAQKRPRLHPNRAAINIHLKLLGSTWTTNPLAILIPNKLQTPDPTTLRYKRRALPCWLTTPAALALHPSACRTAGCDHALSTTLVPTARHSCDWVTCEIPERALAVVFKIITDLYS

SEQ ID NO: 938283 - protein, 70 aa, Homo sapiens
  misc_feature (24)..(24): Xaa can be any naturally occurring amino acid
  misc_feature (28)..(28): Xaa can be any naturally occurring amino acid
  misc_feature (63)..(63): Xaa can be any naturally occurring amino acid
  misc_feature (66)..(66): Xaa can be any naturally occurring amino acid
FEYRGQDIRVMMQAETGVMPPHAXAMLXPQELGQAGGILPYTPQSNLGPSDVLTLDFWSPERXDEXNLSL

SEQ ID NO: 938284 - protein, 78 aa, Homo sapiens
STSKAALNSMASTFLSEIEAPTFTVLSMHPGWVKTDMGGEDGSIDVATSVSRLIDQVNAYSGRGGHHFINYKGETIPW

SEQ ID NO: 938285 - protein, 75 aa, Homo sapiens
IGKLHAHSPMELWKKVYEKLFPPKSINTLKDIKDTARDPQYAENEVDEMRIQKDLELEQYKRSSSKSWKQIELDS

SEQ ID NO: 938286 - protein, 130 aa, Homo sapiens
TVLGIRTWTSSHYGGSQEGPQADRYLSACFHSSPHNSFLPLALFFLFFFSFVSFSFLFFFLFFFLSFSFFSFLSFLLSLIFTQCFLPFFLSFFLSLSFFLSLSLFLSFFLSFSLSLSIFLFHFLERLLSR

SEQ ID NO: 938287 - protein, 180 aa, Homo sapiens
AAAYYYYYYNTRPVDQALVDQEGATLLTNAFEAIAAQQRVRQVARPLHLGSARCGLGNTWVLISEPITSHGVLPRPSQGHGQAVGFFARGAGRAPHPEGLSRRGAGNTCWRRKSKCLGSRKKKVSLVVNRSRATAATSVLLAHDQFEIGIITVQFVMLEALEQTHGDQGPFRGRQADPRR

SEQ ID NO: 938288 - protein, 132 aa, Homo sapiens
NGGPVEVTQIVLSTQHLDESLDSADVRAIVEPYILKALPEGWVNEGTVWHVNPTGKFVIGGLMAYRLTGRKIIVDTTAVRAPRRGAFSGKDLTKVDSLRTPPGIWPRTSSPRSPAAPRSSSPSHRRAKPLSI

SEQ ID NO: 938289 - protein, 135 aa, Homo sapiens
ETIDRKKTLQSETSSKIADDSILPSDAGVRRRASTSLRIVAWWSTRELRDDVVDLAEDLAEGLLFARCSPVAWLDRPQLLKELSDIYAGSYGVNFRRTGTPRRRREPSGQRPGAHHECASPLPSDDWIRRTSCRS

SEQ ID NO: 938290 - protein, 52 aa, Homo sapiens
LPRCPLHSSLNPAKDLQHVGNAAAGCGAASMSTEIIGHSNGDGTFPLLYQRC

SEQ ID NO: 938291 - protein, 130 aa, Homo sapiens
KTINWTLLEKRRLEPPFRPKVKSPRDYSNFDQEFLDEKGGLFQKDKNLIDSMDQSAFAGFSLVNPNSGNFWKIEGPGKIRVALASTQTCPLPTISTIGTVVTWCWPRPGPKKFLGGVWAGSQGKFPVRSV

SEQ ID NO: 938292 - protein, 110 aa, Homo sapiens
AQAQEGNGGAGNPKEPGRRAAGREEGEGAGGKESCAEGLRSDRDGGQRKDAPENGREDGTSPGEDQEEQPGPAGNGAHGAADGGRRAEPQKGGPAPPGTGGRQERATDTA

SEQ ID NO: 938293 - protein, 81 aa, Homo sapiens
AAPAPAATSELNSVGCGRKTEGHGNIQRPTGKTAMGQGRQSLELRCLQSRNAKDSWKPPEAKKEILPESLSKKSIILTPPF

SEQ ID NO: 938294 - protein, 81 aa, Homo sapiens
CRSLVRFQASISTPLPHAPQLKHTRAPLNATTPSCQSAASVGKENGDPSIENRQRLNRHSQWPQTNGKKSRPPKTKEMQIH

SEQ ID NO: 938295 - protein, 75 aa, Homo sapiens
FRVCGEGIPGEVMTEKRPGGSEEQALQLPEGRAFQAEGTASATALEQGKHLVGLGSQGCVMVKKGSSKVLTCGTH

SEQ ID NO: 938296 - protein, 122 aa, Homo sapiens
GELCAAATSETIMQVAATHFPMTEWAVADMLGCIIHSEFYRAKVQARCPGPVHKLSLAYPAPDVRQDLRSAVDDHSRLLDQRVGVVNPNKCVDKVVRALMRDPGLAARTEYRVLGGVSEQER

SEQ ID NO: 938297 - protein, 37 aa, Homo sapiens
MATPGSVIPEVPFEPSKPPVIDELSPTVYMNPESFMD

SEQ ID NO: 938298 - protein, 46 aa, Homo sapiens
GSTQRDGSHLQAKRRSLTMNPPPTLLAPYSSTSSPQTVRNKFLLVQ

SEQ ID NO: 938299 - protein, 74 aa, Homo sapiens
TILGFGYRLALNVYQHGLNCFLGQVTRFVVDFILHQCISRWISKRGGWVATLKLGNCPILNVLVVLGFDFIGTT

SEQ ID NO: 938300 - protein, 96 aa, Homo sapiens
AKAGGTASGCTEAQHFCDIPPMMRNSLLVRKRETNPNGEDILQSDQRFKSVKFMNDTQIEGLQQIGGDKEDSSAKCSVRSWNKRPGMEKLVMFKLG

SEQ ID NO: 938301 - protein, 67 aa, Homo sapiens
  misc_feature (13)..(13): Xaa can be any naturally occurring amino acid
  misc_feature (22)..(22): Xaa can be any naturally occurring amino acid
  misc_feature (29)..(29): Xaa can be any naturally occurring amino acid
  misc_feature (40)..(40): Xaa can be any naturally occurring amino acid
  misc_feature (48)..(48): Xaa can be any naturally occurring amino acid
  misc_feature (50)..(50): Xaa can be any naturally occurring amino acid
MPIDSFTISSNGXTCNGQRGKXAWIRPVXLSPMHCCICCXTVSEGWGXLXRSAFHSPRNYSSKLTFL

SEQ ID NO: 938302 - protein, 39 aa, Homo sapiens
LSLEAFYGDKVNIGLKILQAEGRVRKPDEGSSNDELNVD

SEQ ID NO: 938303 - protein, 114 aa, Homo sapiens
PLQPQFPPLQDFGSEGNYPDSYVYSCRLLGLAMVPVSPQTPDKCLRGCGTQPTPTNFCPAAAWRAGWTGEPQPLPSGSSHSEGSSPAKVAAAGKACVCRRGSDPVQGRGIGCPK

SEQ ID NO: 938304 - protein, 102 aa, Homo sapiens
GLAPAALNPAPTLLQGPSTIILHVCDGASIRMPGLWVPSSSRLLNTSTGQEGVPPTPRTQKLLGWDPFRPCPVPRPTWLPICGLSHLLFLRSVIILCCTLDI

SEQ ID NO: 938305 - protein, 274 aa, Homo sapiens
  misc_feature (110)..(110): Xaa can be any naturally occurring amino acid
  misc_feature (133)..(133): Xaa can be any naturally occurring amino acid
EAPWDRVGAAAEPSRDRDRAAPPSPAGPGPREPSARPRRPPGRGWMRRGPRGGDPRPRAPGAPRGGVRGPGTPRPVVRRGAPRDSRGPAPQPPPALSPGPARGPPPGGSXSQAELSTCSAPQTQRIFQEAVRXGNTQELQWLLQNMTNCEFNVNSFGPEGQTALHQSVIVGNLVLVKLLVKFGADIRLANRDGWSALQIAAFGGHQDIVLYLITKAKYAASAGVCPPGPRTPALRPRRLCCTFPPTTSVRARLAGPAKKARGNGEYGACVTAPG

SEQ ID NO: 938306 - protein, 77 aa, Homo sapiens
  misc_feature (61)..(61): Xaa can be any naturally occurring amino acid
LINTYISVPKENSTLNCASFTAGIVEALLTHSGFPAKVTAHWHKGTTLMIKFEEAVIARDXRWRAADLPEIKDTESP

SEQ ID NO: 938307 - protein, 138 aa, Homo sapiens
REAAPLHFAKCIIVLVFLSLVGQRTLPLAVGVGQVTLARSLQSRPVAMSADVTSSLAAFGEGWGVRELSDHSSPRPLLGLARRAPRVDPPATGVFSPLLPPSALMRSAGAAGPVWDEQSSPLVSLILLIHGIPGYIQT

SEQ ID NO: 938308 - protein, 114 aa, Homo sapiens
MVITRHGVLFDPYWAPSEYMLSTYIGEVTHTTNKCEKERRRLRFGGSESPQGLTTTWRAIKGVLLELFSAGGKICAGKSNERYFLGEILATRGLIFQGATCKALTWGWGAPTPH

SEQ ID NO: 938309 - protein, 135 aa, Homo sapiens
  misc_feature (20)..(20): Xaa can be any naturally occurring amino acid
MSESLKKRIFVAYTVVVLPXCIAGIVFFILFLVQASSVKKYKKRCDIMQQNLTSIRTAQMYSGDQTVARQKNTEFISHVDGLLEEYACMTPARSALIDDNVLVVYQHGMGSSALEPFVSPKNKTIYQAISEKQPE

SEQ ID NO: 938310 - protein, 133 aa, Homo sapiens
TQQAAAKRMGIPQPKVSGMMRGDFTNLSERKLMDCLNRLGYDIEIKVTASSRADRASNACNRLIGALLMAARITDDEWDELTPENFDTTALLRAVDAVDVLRGDLNDTADGAPPQLRTDLLKLHQLAMAAFNE

SEQ ID NO: 938311 - protein, 76 aa, Homo sapiens
HQGCELVRGVDGLDVLQGADDGLADAFQVFVQRIADGLRVGEEEAGMAVISIAITVSSALRKRLSTGLCRWVTGPG

SEQ ID NO: 938312 - protein, 45 aa, Homo sapiens
VQQARVKALLAGLPFGRRLKKAQTRFDEADGLLKSSHDPTAHANL

SEQ ID NO: 938313 - protein, 106 aa, Homo sapiens
MESHSVAQAGVLWYDFSSMQALPPGFKQFSCVSLPSRWDYGCATQHPANFCIFRRDRVSHVGQAGLKLLTSVDPPAWASQSAGITGISHCAQLHCCCFLLLVKRGR

SEQ ID NO: 938314 - protein, 66 aa, Homo sapiens
KSLSSKAILNKKNKGGGITLPNFKLQGYHDQNSMVLVQKQTHRPVGQNREPKNKATNLQPSDLQQS

SEQ ID NO: 938315 - protein, 116 aa, Homo sapiens
  misc_feature (106)..(106): Xaa can be any naturally occurring amino acid
DETQLVTRVIALHHIVNAELGRDRLPGEQALEHLPVALILIDQFRAQDIGFQNADANDIKIPDNKKIKNETRACLETCFQGKHRTRARKLRFSLPANRRKGGRTVXLLTLGRTVVC

SEQ ID NO: 938316 - protein, 131 aa, Homo sapiens
FFFFAMESRSCGPCDLGSLPLSLLGPSDSPPPASRVAGITGMHHQPWPILPPLVETGLHHAGQAGLELLASSDLPTSDSQSAGSSMSHPFLIEMGSRHVAQAGHELLGSGYPPISASQSARTTDATTPSLH

SEQ ID NO: 938317 - protein, 57 aa, Homo sapiens
LTPAELLHWKAGSDNPLLLPVFARLAGTGSPERVRFPLFDLSASCHQARFVTTISGQ

SEQ ID NO: 938318 - protein, 79 aa, Homo sapiens
KQRLALLLRLEYSGPILARCNLGLLGSSDSIASASQIAWIAGVCHHVQLVFVFLVEKEFHRVGQEFNNRPGQCGETLLY

SEQ ID NO: 938319 - protein, 100 aa, Homo sapiens
ASTPVADASDVQVDNVGRTIPVELIANVDECLHDVEINVVDSAEVENDGLDGRQILFSSVEVDVACCCFLELTLGGARIVPRPVTRVEVGCEVCASGLAE

SEQ ID NO: 938320 - protein, 70 aa, Homo sapiens
MVERRLEVRPGFVDGLGVESLVHLHHREAIEVGFFGDDPCFTRRGGEIGPGAGTHENREARNSRRVGVRI

SEQ ID NO: 938321 - protein, 114 aa, Homo sapiens
TDVSSKVLRTKNALLGYRPNRNAHLWLGAVAHACNPSTLGGQGGRITRSGDRDHGETPSLLKIQKISQVRWRAHVVPATWEAEAGKWRGPGGGACSELRSRHYTPAWATERDSI

SEQ ID NO: 938322 - protein, 149 aa, Homo sapiens
  misc_feature (7)..(7): Xaa can be any naturally occurring amino acid
ANLFQEXKVDLSKPLVATVALASQPGHVALGPYLCDKPDVPIYDGSWVEWYMRARPEDVISEGLGKDPLKLGRTQASSGDAGHQQCLAWYVRFCFHQESVSSLNSGGIWGDISKARNSVDLLAASEGREERRRRALEEGGHNSELPNWC

SEQ ID NO: 938323 - protein, 72 aa, Homo sapiens
GLPALHFDPWKKEFYRNFKSISKALVERGGVVTSNPLGFCILPARACPSYVPSLKPKPKPLSLRALVCHEGA

SEQ ID NO: 938324 - protein, 50 aa, Homo sapiens
LSLHPPSFSACRALGGPGAVGDFGLRAVDEFQQLIHISVVRTPQGSRPGP

SEQ ID NO: 938325 - protein, 159 aa, Homo sapiens
ALSGGAEPSATAAHLRSEVLCQWSRSAGCPRGGEEEKPGEDHPRNVPPPLTHILFLCFLPGAEISSDLAEEVSGSLGQQGPGGGLGRSSRLCPEKEQASGAKALGIPGLPSRGLLWVPTTPGLPLPLVPQGLQPNPFSPQQPQQGCHFTDGEGEAETGR

SEQ ID NO: 938326 - protein, 71 aa, Homo sapiens
GRRVDEVINQIGHGGVRTAIQVPVGVFFIVNVLKLVQAQRNQAISSTLNAVIAINSINTVLQLQSFRGKVD

SEQ ID NO: 938327 - protein, 129 aa, Homo sapiens
STAWQQGAVQVERAVLGGGQQLFAQQVAVVEREDVVRAQLGNALDPQRMVGIFRGVHSNALASTELRYGTVEGVLLRVVGMGEHCGDVVTCGEQDSMPGNQYRDRRRRQLSDSWCDLIGGSSRRGITSS

SEQ ID NO: 938328 - protein, 100 aa, Homo sapiens
  misc_feature (87)..(87): Xaa can be any naturally occurring amino acid
GRRADVATGDIMYLRRAAIRSLCTRPRGVLNGLAESSLHTETKVRSRVHALFVLSLVVILDRHRCGSRRHRAGDVVARDPTPGLWYXQDSLTSHESFLST

SEQ ID NO: 938329 - protein, 141 aa, Homo sapiens
LKPQPYRPARTFSTNYYAGLRKTFELIPDPPLFGDIFRRFKDVEVARTVMVLAVVLFETVNTWVRLSSTGHQGVWSSIGKNLRLSLTFAPEAQLEEEPEEEPEDTSEDAEDSEQDEGEEMDAGTEEEEEETEKESTEKDEL

SEQ ID NO: 938330 - protein, 45 aa, Homo sapiens
  misc_feature (15)..(15): Xaa can be any naturally occurring amino acid
  misc_feature (25)..(25): Xaa can be any naturally occurring amino acid
  misc_feature (35)..(35): Xaa can be any naturally occurring amino acid
TELWGLDTHTVPLNXTFSSSESPGXMCHGTQLSAXCAVGRESSGV

SEQ ID NO: 938331 - protein, 170 aa, Homo sapiens
VHSGRDELSSEDGEAKAVTKDQEPIGEMKEEEEDTFEYPDTTIDLSHLQSQRPLQKLAPREESLNSNDSKSQGRRHLSAKERREMKKKKLPCESGDLEVIEEKDKERESAVHTEAYQNTSKNVAAGQPMKRGQKSKMKKMKEKYKDQDDEDRELIMKLLASAGSNKEEKK

SEQ ID NO: 938332 - protein, 175 aa, Homo sapiens
EGLGHVSGVQGGGRCLPTPKCHTPPLYRMRIFAPNHVVAKSRFWYFVSQLKKMKKSSGEIVYCGQVFEKSPLRVKNFGICVRYDSRSGTHNMYREYRDLTTAGAVTQCYRDMGARHRARAHSIQIMKVEEIAAGKLRRPAVKQFHDSKIKFPLPHRVLRRQHKPRFTTKRPNTFF

SEQ ID NO: 938333 - protein, 259 aa, Homo sapiens
METTQFGELLLHIGGTWLRVHQEDLTEIRDMLLANEGARCCSAGAIAPCEVTVPAQNTGLDPEKTSFFQALGITTKISRGTIEILSDVQLIKTGDKVGASEATLLNMLNISPFSFGLIIQQVFDNGSIYNPEVLDITEQALHSRFLEGVRKLASVCLQIGYPTVASVPHSIINGYKRVLALSVETEYTFPLAEKVKAFLADPSAFAALPLQLLPPLLPLRLLQPLPKLKQRKSRRNQMRIWDSVSSTNPAKATKSACLI

SEQ ID NO: 938334 - protein, 191 aa, Homo sapiens
KNIPVTKDMVRVKRFQNNTACGRSCSECNVEPSFGLAGIMYTILEHTFHVREGDEQRTFFSFPAVVAPFKCSVLPLSQNQEFMPFVKELSEALTRNGVSHKVDDSSGSIGRRYARTDEIGVAFGITMDFDTVNKTPHTATLRDRDSMRQIRAEVSELPNVVRDLPTATLPGLMWRPGTHSLKGKRLARRRQ

SEQ ID NO: 938335 - protein, 73 aa, Homo sapiens
LDDIEEFESIRKDLEARKKQKEDVEGVGTSDGEGAAGLSSDPKSREQMINDRIGYKPQLKSNNRTSQFGNFEF

SEQ ID NO: 938336 - protein, 228 aa, Homo sapiens
MGVEKELGVAFDADEGLDVPVARHKVHDGLDLHFRVGKLATEVSEQGLLLAPGIPKAASQFLLGPPRRRGSPRCVIEFCATWIRFVGVDKTIRVSYNLQEDVHVVKNGREGGFLAIVLRDLFCKPDPTGLSDPLPGMDASVNPDCWAIGPSSAELQHIDGTTFKGAADLDLAYKLWVLCNQQVHEFIDLIQSMVGGIIESIGGQSPGWKADICCFSSSSRDCTSSIMI

SEQ ID NO: 938337 - protein, 68 aa, Homo sapiens
PVPTLPEGITVAYTVPKKTEDSASEVTVEDSGESLEDLMARMKNMYTVAGFCLIFSAYASPLELNNRN

SEQ ID NO: 938338 - protein, 182 aa, Homo sapiens
FKTLSWGTAFVIFKKLGFSHKCFETVPRIPFLGKPLGIQYAKPDSDIISKMRGTFADKERKRERRKPKTMEQAPAAANKKPGQGTPNAANTQGTAAPNPQVPDYPPNYILFLNNLPEETNEMMLSMLFNQFPGFKEVRLVPGRHDIAFVEFENDGQAGAARDALQGFKITPSHAMKITYAKK

SEQ ID NO: 938339 - protein, 102 aa, Homo sapiens
  misc_feature (33)..(33): Xaa can be any naturally occurring amino acid
  misc_feature (53)..(53): Xaa can be any naturally occurring amino acid
NGYHIQGKLTRRLVNSQCEFERRKPDGTTTLGXLLQWDPQDGEPGYCPVRLGXTTGRLQSGVNTLQGFKEDKRNKVTPVLYLNYGPYSSYAPHYDSTFANIS

SEQ ID NO: 938340 - protein, 126 aa, Homo sapiens
MEGPAAFLYLNSFLNLAHVSDPKIGVDGFDGERNIQAVVPSCLLSCLVQVCMYLNRHLADRSEERERPFSRLPVQTASACSRTGNRHTLCTQSVSSNPILETLSCTQSRSNYAIHCGINLPGWSVQ

SEQ ID NO: 938341 - protein, 119 aa, Homo sapiens
DGQSRTVRQFQFTDWPEQGVPKSGEGFIDFIGQVHKTKEQFGQDGPISVHCSAGVGRTGVFITLSIVLERMRYEGVVDIFQTVKMLRTQRPAMVQTEDQYQFCYRAALEYLGSFDHYAT

SEQ ID NO: 938342 - protein, 54 aa, Homo sapiens
MLPQVQSNWNRTEVVFHSLVVLRKGGESSRDLGGVRRPAPKMTRCGANRKGLVG

SEQ ID NO: 938343 - protein, 82 aa, Homo sapiens
EFIPDTWHAVLAVPTVGDGVEVGWGQVGAEPRAPARLLAVSDLLVLDELGALAKAFAGATSESFTPERERRYRKKRKRPQAK

SEQ ID NO: 938344 - protein, 74 aa, Homo sapiens
  misc_feature (30)..(30): Xaa can be any naturally occurring amino acid
  misc_feature (63)..(63): Xaa can be any naturally occurring amino acid
  misc_feature (68)..(68): Xaa can be any naturally occurring amino acid
  misc_feature (72)..(72): Xaa can be any naturally occurring amino acid
MGIAARRMLDLLLSKTAAACTCPVCVAGLXSPFPAPGKAQALHTGGGDPQLGPFSSALGCSVXYLPSXFKQXQE

SEQ ID NO: 938345 - protein, 88 aa, Homo sapiens
GPGRNEKQRRRSVLPPKSAASNAGECEVGCGRTDLETALGKPWLRRSVVWTPLRGARTGHAEHEPDWAPGAGCMGGGAARAGVSFSGE

SEQ ID NO: 938346 - protein, 88 aa, Homo sapiens
FLHFLDHYPHAINPEDPSKEILLAILMADKEKKGYVMASRLRSKLTSLGEKLTHQEVDDLLREADIEPNGKLKYDEFIHKITLPGRHY

SEQ ID NO: 938347 - protein, 145 aa, Homo sapiens
QVSGLKYTYDATKPPLKQGGTGGERIVDLQIADANGVFQKVDPNGTYTIATRFHPVDKWHKFGIFGDGKTIDDVYKAIDARPLQYSQVDMIGEYIKGKTLDPSTMSRVEGRITDLTPKVNDDVLRPAQSMAVAPTLSGFDAVGKA

SEQ ID NO: 938348 - protein, 80 aa, Homo sapiens
  misc_feature (15)..(15): Xaa can be any naturally occurring amino acid
  misc_feature (17)..(17): Xaa can be any naturally occurring amino acid
  misc_feature (32)..(32): Xaa can be any naturally occurring amino acid
  misc_feature (66)..(66): Xaa can be any naturally occurring amino acid
NCGPERMRKGPSRLXRXAMEPRAVAEAVETGXEDVIMEALRSYNQEHSQSLTFDDAQQEDRKRLAXLLVSVLEQACHPPT

SEQ ID NO: 938349 - protein, 106 aa, Homo sapiens
  misc_feature (6)..(6): Xaa can be any naturally occurring amino acid
IARNFXNTPPSHLFPAEFAKRAKTLATTEGIEVEVLDEKELAKAGYAAIIGVGKGSSRPPRLVRLTYRGAKGKKAKKVALVGKGITFDTGGISIKPAGGMENMTSD

SEQ ID NO: 938350 - protein, 162 aa, Homo sapiens
  misc_feature (4)..(4): Xaa can be any naturally occurring amino acid
MSKXIVCGERRMRMRSCCTRLAKVCMSKLTLIPPAHNFHHDLAGVGQDDGPVRQRMRGNRHEHDAAQGRMQQGAPADSEYAVEPVGVEMINAIRTLVVHEVAVDFDAQFGHRRTAAARDDDIVDGHAHVNRLAVAEQLRFEQGAAFGLEAATENLRQRGHVR

SEQ ID NO: 938351 - protein, 79 aa, Homo sapiens
  misc_feature (2)..(2): Xaa can be any naturally occurring amino acid
  misc_feature (41)..(41): Xaa can be any naturally occurring amino acid
PXLSLLPPLLSGRRQPHLNAVLSPSLGSGPCGQTLPGPRRXAAYQFALHRLSRRRARSLPCGCVEDAWHCVADSVGRLI

SEQ ID NO: 938352 - protein, 33 aa, Homo sapiens
NQQDMGGDNKGIKAGERGTPPESALTLWELCSL

SEQ ID NO: 938353 - protein, 159 aa, Homo sapiens
  misc_feature (139)..(139): Xaa can be any naturally occurring amino acid
ALVTFEDPKVVDRLLQQKEHRVNLEDCRLRVQVQPLELPVVTNIQVSSQPDNHRVLVSGFPAGLRLSEEELLDKLEIFFGKARMEVGMKKTREMLQGTVMLGFADEEVAQHLCQIGQFRVPLDRQQVLLRVSPYVSGEXQKAEIKFQQAPHSVLVTNIP

SEQ ID NO: 938354 - protein, 147 aa, Homo sapiens
SHSQKPAKCSISDLHSALSYFRRCVSRSNQSCGNLAAMPAEELVAKAQMNDVRWNATIRCPAGHGRSFVPESDQGPPISSLEYKDLRGICTRLRSYKDAGQRWSDADKQELYAGNCEEKAYAGLRNGLFTGFGGAIIPSFLLAADVA

SEQ ID NO: 938355 - protein, 138 aa, Homo sapiens
RYSQTSLTGWWVIQKRRRYRVLSRPIYLQKVRAKTFPRPNTRIKAGGPPRRCSIRKGQKIHQRCGSALTRKPIAQKRPFFADSEPARGGRDPRAPGAPLRRSGRPAFYTAAGVPPRPSADLILKPCRESTKRKLAFSV

SEQ ID NO: 938356 - protein, 51 aa, Homo sapiens
ASSEQYAAVCAAGHVEYKTLNLGCFGPRFLTFIIYGLACNILADIIFFREI

SEQ ID NO: 938357 - protein, 70 aa, Homo sapiens
PEPMPDCKHRQPQLMSRLSLHTSLEQRESAPASASPRKGTPQRSGGLKGSSSTARADAESEEAPRASKGC

SEQ ID NO: 938358 - protein, 91 aa, Homo sapiens
  misc_feature (89)..(89): Xaa can be any naturally occurring amino acid
MTQSVQSTFFKVTVSAKNNSFSKVGKIYLVSCCKEPETLEESVLLPLSRGLLAPSLVPPPNMCRRSPPLGDIFHLKLAFPTARDRPPSXLR

SEQ ID NO: 938359 - protein, 102 aa, Homo sapiens
LDATRPPDWRPCASLLGRAPHCRHDPSNFLLMNKSAPHFRPRWAFTPPPMPPAPLSPFINTFTQIIIKINMCQVLGCVLGWAQYPVTLGDIYLFSLSLYLHL

SEQ ID NO: 938360 - protein, 33 aa, Homo sapiens
VQHSGENNGGIDIYNFGGEDGKSSLKSIRSLNK

SEQ ID NO: 938361 - protein, 104 aa, Homo sapiens
RHYWSHLADDEDKYRLWFSDVVARTASLIAQWQTVGFAHGVMNTDNMSLLGLTLDYGPFGFLDDYEPGFICNHSDHQGRYSFDNQPAVALWNLQRLAQTLSPFV

SEQ ID NO: 938362 - protein, 80 aa, Homo sapiens
ISLSLARWSRHVRAPLTQCYAIPFSCVHSETEAISDPPSSSLALQSTGFTDKRLHQRTHLTAFMDSGILSHLSKEMWKVP

SEQ ID NO: 938363 - protein, 71 aa, Homo sapiens
MESRCVAQTGVERSGVSLSHCNLCLLLPGSSDSHASASRVAGTTGVHHHARLIFCIFNRDGASPHRPGWSR

SEQ ID NO: 938364 - protein, 119 aa, Homo sapiens
MLGEQGFRIQSVKTESEELFGETMEMMVRMKDIELDLLRGTEAIMLRSAVLIGLENRVEQIRDHINVRVLYYATCKCCYSFHPVAPLICRFCFCVGGRLGLNSFHLHETFMQPKVQPGP

SEQ ID NO: 938365 - protein, 81 aa, Homo sapiens
EKVVVGIVVWKMFKGMGIGRKMIKEGEEDEDVNEVGKVLKIDEDVKGESGIGKGSGGGDEEVEWVKEDFFIEESLCVYECE

SEQ ID NO: 938366 - protein, 110 aa, Homo sapiens
YVYVVSVMENSLNWTFKSSVIDSVISGTLKFSFDCIVEDFEDELIEFFSRVCFTILYDNLCLYANRFFVTMPCIYRMMSYDPLELPTLACIYFSQEGKLVAMPFIYYVFF

SEQ ID NO: 938367 - protein, 72 aa, Homo sapiens
DDHMRTQGEDAVCQPQRETPEETSPASTLILDFWPPELWESKFLLLKLVVLCCRPGLTDQHTSDNTWLDRTV

SEQ ID NO: 938368 - protein, 129 aa, Homo sapiens
TCSAKQAVANTGKMESPAWMPNFPASMRNPPIQTKGLTTLETFMDTLPDVKTTCITLLVLWTLSREPDDRRPLGHFPDIHFVEEAPRRSNRRFRQRLNQISHDIRQRNKCLPIPYYYLDPVLIENSISI

SEQ ID NO: 938369 - protein, 67 aa, Homo sapiens
STEKPFIKLSPGASVRSLTPVIPALWEAEVGGSRGQEIEIILANTVKPISTKKKKYKKISRTWWRVL

SEQ ID NO: 938370 - protein, 83 aa, Homo sapiens
RFDCKIEGYPDPEFVCFKDDQSIRDSPHFQIDYDEDGNFSLIISNFCGDDDAKYTCKAFNSLGEATCTPELILETMEEVQFKF

SEQ ID NO: 938371 - protein, 74 aa, Homo sapiens
GLGEPSLVALVVFGALTAAPGYWPTVLMTLKGLAPGCLSPLNPVANPTQNYVPACQEPECSVSNAVKGAPPPTR

SEQ ID NO: 938372 - protein, 107 aa, Homo sapiens
  misc_feature (56)..(56): Xaa can be any naturally occurring amino acid
  misc_feature (87)..(87): Xaa can be any naturally occurring amino acid
LDLFGTTDRDKYERELLNARKLAEALLQEKTATEVALQQAQAELSSAYEIAQRLGXIAEQMVAIVSHDLKNPLTAIKMASEFLARGXQPPRSANSWGISACPPNGRR

SEQ ID NO: 938373 - protein, 96 aa, Homo sapiens
  misc_feature (63)..(63): Xaa can be any naturally occurring amino acid
  misc_feature (84)..(85): Xaa can be any naturally occurring amino acid
  misc_feature (93)..(93): Xaa can be any naturally occurring amino acid
MRPCIKSRADLQCLCVERSAQKLGEEHAEIFDAHLLMLDDPELLDQVAAGLQWWPERRNGPGXPYPDTFIAVFETMEDEYMREXXADLRDVRXRGR

SEQ ID NO: 938374 - protein, 116 aa, Homo sapiens
QTRRLEGRRRSNLSQREPMAFPGKVGEQLNLREIEQLVDQLNRLPSKQAQMELTPGSQVGGSEVQVKNVPKSPGVAAVSRNNDGQKSTGEQQWGAGLEWDSPLRWPTSLCCAAATM

SEQ ID NO: 938375 - protein, 63 aa, Homo sapiens
QVLRQLVGEAFDRRLLLHQTEQLQQAATDIQQALHRALDQGLEGGDKAFLGRYPGQLVEVLLG

SEQ ID NO: 938376 - protein, 35 aa, Homo sapiens
VVSSGRDLIVKFVEGFALPGKHIGGAGYVNVVGRR

SEQ ID NO: 938377 - protein, 100 aa, Homo sapiens
GTPAGNQTLKLAAVSYGIICFPLESNPGTREQPDFGAGVRPEERGTVTARTGGPGRKTEATLGPQPRGVHKSSARAEGRCEACPRDRPADESANEWIKKM

SEQ ID NO: 938378 - protein, 34 aa, Homo sapiens
GPYPYPQQVSKDKRALKFIKKRVGTHIRAKRKRE

SEQ ID NO: 938379 - protein, 113 aa, Homo sapiens
  misc_feature (38)..(38): Xaa can be any naturally occurring amino acid
  misc_feature (55)..(55): Xaa can be any naturally occurring amino acid
STGPALSTIDDRVSEDGESGERRDVGPQLTCERMIACXDKLTPREGYNLTVLPQXRFLRSNRPLSLTPVFYQPGIVIVCQGSSAGFFGDQVYLYDEQHYLAVSVPVPFTMQTQ

SEQ ID NO: 938380 - protein, 68 aa, Homo sapiens
GTREGNKLSSGPLNCPPMSPGPSQLDTGTCFTQIDLTGYSTTTERHDTTRDGKNTISNTLKTQHQYFK

SEQ ID NO: 938381 - protein, 60 aa, Homo sapiens
ARQGMYADWWQELDAKGDEAEAEPKPELHEKGTATPLKLGKPGADEPTLTSLGSSKNYLL

SEQ ID NO: 938382 - protein, 40 aa, Homo sapiens
STDPPTLRDACELRSARSKIRLTLAVRIRASPRIVSRRGR

SEQ ID NO: 938383 - protein, 69 aa, Homo sapiens
DMESHSVAQAGVLWYDFSSMQALPPGFKQFSCVSSPVGGTTGVQHNIRLIFVFFVETGFHMLARLVLNS

SEQ ID NO: 938384 - protein, 106 aa, Homo sapiens
MESHSVAQAGVLWYDFSSMQALPPGFKQFSCVSLPSRWDYGCATQHPANFWIFRRDRVSHVGQAGLKLLTSVDPPAWASQSAGITGISHCAQLHCCCFLLLVKRGR

SEQ ID NO: 938385 - protein, 62 aa, Homo sapiens
  misc_feature (7)..(7): Xaa can be any naturally occurring amino acid
  misc_feature (13)..(13): Xaa can be any naturally occurring amino acid
  misc_feature (22)..(22): Xaa can be any naturally occurring amino acid
  misc_feature (34)..(34): Xaa can be any naturally occurring amino acid
ALQALQXEREVSXAIPLPEFRXPGVRQFVVLRRXPRSPAAVDGRSQSGTGQLQEQKKGLLIA

SEQ ID NO: 938386 - protein, 34 aa, Homo sapiens
RWHTATSAQPWKGDPWNSWSAFPIETGPKGEDQG

SEQ ID NO: 938387 - protein, 115 aa, Homo sapiens
EGGQVAHRLALNFSAQIRTHCAEPFTEYWTCLDSPNMQLFRHSRQQQAKFDQCVLDKLGWVSPDLGQLSKVTKVKTDRPLPENPYHSRARPEPNPVIEGDLKPAKHGTRFFFWTV

SEQ ID NO: 938388 - protein, 104 aa, Homo sapiens
ARLFEMEFRSCCLGWSARCDLGSPQPPPPGFKRVSCLSLLSNWDYRHVPPHLADFVFLVETVFLHVGQADLKLPTSGDPPTSASQSSGITGMSHRTWLTFSLFA

SEQ ID NO: 938389 - protein, 82 aa, Homo sapiens
VSMGLSPKPQCPEPRTPARAEEMSRLQTRVLKNWVESSSVSRDDSARESRGRELLSKKILVPSPGQILVFIFLFELTNHVIK

SEQ ID NO: 938390 - protein, 206 aa, Homo sapiens
GTQNHGWTFNGGLVLGRTSRTTNWSIHRNRIVCQLTPYQRSHLRWPVQAQPLIPQAVADVVTYQLGFHSIELNEPPLVHTAASLFKEMCYRYREDLMQESSLQLDPQEGGRVYSVPMGGMMVRQSFAIGGSGSSYIYGYVDATYREGMTKDECLQFTANCLALAMERDGSSGGVIRLAAIQESGVERQVLLGDQIPKFTIATLPPP

SEQ ID NO: 938391 - protein, 75 aa, Homo sapiens
RLPTQLRSLGSNRISAENARKHPFFLSLGERIHKLPDTTSIFALKGVQLQKEANIRSTSMPDSGRPAFRVVDTEF

SEQ ID NO: 938392 - protein, 99 aa, Homo sapiens
GRLDRKIEFSLPDLEGRTHIFKIHARSMSVERDIRFELLARLCPNSTGAEIRSVCTEAGMFAIRARRKIATEKDFLEAVNKVIKSYAKFSATPRYMTYN

SEQ ID NO: 938393 - protein, 138 aa, Homo sapiens
AVLGTVTFLAGNRMLAQQQLREQHISSRRSLKTLKAEMNIEQGVGTVHGVKGRTGDTTGGRRCLFVKKRKAELCLHVYLFLTFCFTEQTCLGPDCLSLCLDAWQDAVNIPGYPDVVFEKLKSVIHHQLWNKENGGLPE

SEQ ID NO: 938394 - protein, 157 aa, Homo sapiens
ISPTGAAGPEKRMEKKTEQQRRREKAARKLRVQQAALRAARLQHQELFRLRGINAQVARRLAELARRREQRRIRRLAEADKPRRLGRLKYQAPDIDVQLSSELSGSLRTLKPEGHILRDRFKSFQKRNMIEPRERAKFKRKYKVKLVEKRAYREIQL

SEQ ID NO: 938395 - protein, 37 aa, Homo sapiens
THNGKEEGLREKNQKPKLDRKKKKKAAALLLRRRWMN

SEQ ID NO: 938396 - protein, 32 aa, Homo sapiens
MATGQGKGCYTVDNEVQPSGPETIVVIIYLSR

SEQ ID NO: 938397 - protein, 58 aa, Homo sapiens
  misc_feature (34)..(34): Xaa can be any naturally occurring amino acid
  misc_feature (45)..(45): Xaa can be any naturally occurring amino acid
MGQTALFIFGSLCWCCQVSELQRWPLGQIYCYRXKRHSVSQMAAXQQAQRCLSEDGYG

SEQ ID NO: 938398 - protein, 140 aa, Homo sapiens
RPRRCARGKRLNENNISLRIIGDRSRFHPELQRRCARRNGDGGSNRFILQIAANYGGQWDIAQAAQRLAREVQAGHLRPDDITPELLQTCLATGDLPLPDLCIRTGGEHRISNFLLWQLAYAELYFSDLFWPDFKHEAMR

SEQ ID NO: 938399 - protein, 75 aa, Homo sapiens
DILTINITVITITIITTNTTTIIIIITTTIIIIILTIKMAEQMNLFVNAPHGSTVLRALICYISSLSLMLLPSDL

SEQ ID NO: 938400 - protein, 129 aa, Homo sapiens
PLTAFHTHIALIAFRTHLTPSTPTSHSRPSTPTSHLPHPPHTPSTPTSHSPPSTPTSHSSFHTHHTLLLPHPPLTLTSFHIHLTPPHPPLTLTSFHTHFIPPSTPLSPPSTRTSHLPHSSLTLTFHIHR

SEQ ID NO: 938401 - protein, 130 aa, Homo sapiens
GHFVDMVLVLLVVLVPWTRINLIDFYAIHKGKYDIGSIFRVDGGIYGRYNPQALVAYAVGIVVQIPFMNTPLYVGPISDTSRGGFVVVGGVGGDVAVVIPVGQFGTVRISAGWRGGSWWVGFNRARLSVD

SEQ ID NO: 938402 - protein, 54 aa, Homo sapiens
  misc_feature (15)..(15): Xaa can be any naturally occurring amino acid
  misc_feature (29)..(29): Xaa can be any naturally occurring amino acid
  misc_feature (36)..(36): Xaa can be any naturally occurring amino acid
  misc_feature (50)..(50): Xaa can be any naturally occurring amino acid
ASGPAWRRGIRIYVXVPASHVSELMAFMXWKLWDLXQQVKAQTDEILSKXQKIA

SEQ ID NO: 938403 - protein, 117 aa, Homo sapiens
LNEHGPRGGDEINIPQKGKNYGCRWQPGESTIQALRYRKRKGEIVAGTEQPVFYWKDSPAVSGMAFYNSDKFPQWQQKLFIGALKDKDVIVMSVNGDKVTEDGRILTDRGQRIRDVR

SEQ ID NO: 938404 - protein, 110 aa, Homo sapiens
FPPQLSVREHAAWLLVKQEMGKQSLSLGRDDIVQLKTYKWITHPLFSEELGVPIDGKSLFEVSVVFAHPETVEDCHFLAAICPDCFKPAIKEEDFLKQFPCPPLTGCCAV

SEQ ID NO: 938405 - protein, 104 aa, Homo sapiens
DPVNNPGASQEEEVLKDKVRDRLIILVLSDKATYDKLCKEVPNYKLITPAVVSERLKIRGSLARAALQELLSKGLIKLVSKHRAQVIYTRNTKGGDAPAAGEDA

SEQ ID NO: 938406 - protein, 103 aa, Homo sapiens
APASPPDPEEDDELMTREVQTNDLKEVVNKLIPDSIGKDIEKACQSIYPLHDVFVRKVKMLKKPKFELGNSWSCMGKAAALAKQLETRRVLRLSELTDMNRQS

SEQ ID NO: 938407 - protein, 118 aa, Homo sapiens
PPKYPGPCSSAKRQTRAQLWNSYALEPFPDALESIPMALSENSGMNPIQTMTEVRARQVTESNPALGIDCLHKGSNDMQYQHVIETLIGKKQQISLATQMVRMILKIDDIRKPGESEE

SEQ ID NO: 938408 - protein, 98 aa, Homo sapiens
TMELILPSGARVGHRSLMRYYKQRFGLPRAVTVARNQKAVGRVLQQYRALGWMGSTGAALMRERDMQYVQRMKSKWMLKIGMKNNATKQMHFRAQVRF

SEQ ID NO: 938409 - protein, 136 aa, Homo sapiens
KLQATRLTLLTSRLPGSIIMDLTGDLDALNNQVFACQEGIEYTVKITSKVNKEIVSGLKCLHHTYRRGLRVDKAIFMVGSYGPRAQEYEFVTSVEEAPRGALARGLYVVRSLFTDDDRLNHLSWEWHLHVCQDWKD

SEQ ID NO: 938410 - protein, 124 aa, Homo sapiens
RRLVAISTGSYFSKKKFFFLRWSLTLSPRLECSGVILVHCNLHSLGLSDSPALASRVAGTTGARHHAQLIFVFLVKTGFHHVGQVGLKLLTSSDPPASASRSAGITGMSTLPGPASIDSYFQVD

SEQ ID NO: 938411 - protein, 81 aa, Homo sapiens
MTEPSRYPKAGPNTEMANKMEMYRGELLGSEKLIHIGDPKWLNRHCPDASQQLGNHHQAPHAAGLLLGVLGGAVALTGRQV

SEQ ID NO: 938412 - protein, 134 aa, Homo sapiens
VDPQNVPNDSREAMPISLQCFLDLDESCEFSVSLSCPVWRHICIAAGEQFCFMQAWAGPPPSRTLSLLMEALSPPGPPSGFPCTCPWGELHETHTSSAGRRVRTRIGPAPGSEMESWFFFQNCFPLLGCGGSRL

SEQ ID NO: 938413 - protein, 110 aa, Homo sapiens
FFLDMESHSVAQAGVLWYDFSSMQALPPGFKQFSCVTLPSRWDYGCATQHPANFCIFRRDRVSHVGQAGLKLLTSVDPPAWASQSAGITGISHCAQLHCCCFLLLVKRGR

SEQ ID NO: 938414 - protein, 130 aa, Homo sapiens
VDFLSDTVHEELGGFITQDPPWNMKRKVRFKVCTKAVTGSNSKAVLQAGRRQCLRMAIVGDFDEEASRKNPPHVRSEEGTPMGSEVEEFEDWVQWLTPVVPALWEAEEVGLIEAQKFETSLGNMVRPCLY

SEQ ID NO: 938415 - protein, 66 aa, Homo sapiens
GFFKVPRTQVGFLLEMERGWPHPIGPVAPPGSPPGYVLPAGGIALQVGAFLETVDARAGTFICRDT

SEQ ID NO: 938416 - protein, 73 aa, Homo sapiens
MKFVYSVNRKRLNRNARRKAARGFECSHIRHAWDHAKSVRQNRAEMGLAVDPNRAVRSVKEEVKAVEVDIEER

SEQ ID NO: 938417 - protein, 80 aa, Homo sapiens
RGDPVLPARLETKVTEEHRASRSEIPRPPERNYPLGVPLNFCIQGHNSEGNVFLNSSDKPGMVMRACGPSYLGGSLETRK

SEQ ID NO: 938418 - protein, 64 aa, Homo sapiens
CCDTIDAALSRRERHNAPDTQSKDRAENVTHSVLQRLGSLEKAVSKEAGSSFGMDGDEVRRGTG

SEQ ID NO: 938419 - protein, 88 aa, Homo sapiens
MAHCSLELLASIDLLWAPQNAGITCMSHFTPPTSGLWTWAVPPSPSCSWGILAPSPASSAQEMSFACVLSAVGLWLYVEPSHHVFLVD

SEQ ID NO: 938420 - protein, 54 aa, Homo sapiens
RKDAGPGKRGSSGFRESFWPPHGCVGRRALSGSGTFGRRREPALAWLTSASSLS

SEQ ID NO: 938421 - protein, 84 aa, Homo sapiens
DDAGMRRESTDDLPHGSYVSSLMSHKQVVTRFVSPEPFALKSPSPRITGRESQLNVIHGPLIFQGRPLSKLRILRKHYFFGTQQ

SEQ ID NO: 938422 - protein, 37 aa, Homo sapiens
MTRFLTSPIDLVWSNPAPPGVQVARVEAVGGRGPEFS

SEQ ID NO: 938423 - protein, 80 aa, Homo sapiens
LLEAGVRDHPFPQVRCPREMRVFFYKPVSGAAASLSEMPCPERRNLERQSGYNVFAELWWALLVQISQWLCLHCEGNTTY

SEQ ID NO: 938424 - protein, 67 aa, Homo sapiens
LFLFMAWLHSDLGWSHIKPTAHWLSVWPTPRLPTTVMKQRLQMYNSQTTVSNQLHTDGVEDRGVGGL

SEQ ID NO: 938425 - protein, 86 aa, Homo sapiens
LEGVARPWSVAKRLFLEFCVLPHVGGGASTFVCLMPLRFLRGPARHYMFGRRGLAFMDNGSRGGVSSCPRSVAAVRVMRLAATPCI

SEQ ID NO: 938426 - protein, 154 aa, Homo sapiens
  misc_feature (68)..(68): Xaa can be any naturally occurring amino acid
KRFIVPIKKAHGMNGRARSPEPERLFSRTQMQGGWGSGKGIGGLSSPRACARPTQRSSAVGMRVLRHXALGASNHDDRRCQGRDPIEALPGLFQKPKANNEKRYIVGGGERLRGPGAPPEAQTSSSPADTLTCALGHFGDAGVAAFFTFSPRRP

SEQ ID NO: 938427 - protein, 41 aa, Homo sapiens
ILLSTRCPPRLAEWWCHGVGQGLNRTSTGKIVHTKISNQGA

SEQ ID NO: 938428 - protein, 88 aa, Homo sapiens
PPSAAYLRFTICDPGALGCRARRPLRLLLGIARGLYPWQEAPQPPGVDRQRRLATIPGISAVPGAPFPGLVFRIRKAGSRMSPGGGGS

SEQ ID NO: 938429 - protein, 71 aa, Homo sapiens
LLPTLRHAASGARHRGSRHTVTCKDVLCPSKGFVFFIPNFQRPFGVPHFTWTEETLHEDEIIGSFSFLPPF

SEQ ID NO: 938430 - protein, 82 aa, Homo sapiens
PSRPGSRAGSKAGSRASSRRGSDASDFDISEIQSVCSDVETVPQTHRPTPRAGSRPSTAKPSKIPTPQRKPPASKLDKSSKS

SEQ ID NO: 938431 - protein, 118 aa, Homo sapiens
PGLLRMMETAYGSTAADGHWSLRDAYDVLELAQVLHLATLDLALQPADVVAALTALTASLPTHSVRSEEQIARQQFSTPAAIGYIAALAARITAADTVLEPSAGTGLLAVFAARVGAK

SEQ ID NO: 938432 - protein, 70 aa, Homo sapiens
QALTRQTTRSYPAPPGVLAPGPFLVLHSRDSRRVPAAPEPLPGSQTPGALTAERAGLLESARPVHSPEDA

SEQ ID NO: 938433 - protein, 137 aa, Homo sapiens
RPPTTTKFAAAIDGVWRRRAEMGPRKGKEKQEEQDISLGPQVAYRENVFGVYNIFATFNDTNVHVNDLSGKRTICRSDWWDEGKGITDGSSPDDAMMATKDVTQEVQELGINGVNIKYRAEEEKDETPGPEEQTAIR

SEQ ID NO: 938434 - protein, 106 aa, Homo sapiens
STTCTSLSNASADPVMEGLRSAVRYDKTYFDKIVASLLPLLEKLTTGRIADCYAPDYMDLEDPRPIFDWMQIIRKRAVVYVGLDALSDTEVAAAVGNSMFSGRPAA

SEQ ID NO: 938435 - protein, 149 aa, Homo sapiens
MGARVSRRLNDRYGPMNASSPPRQQLLLVDDEEDALLELAELLEGEGFCCFTATSVKLALSHLTHHPDIALVITDLRMPEESGMSLNQRLREHTSRQTLPVIVTSGHADMDDVSDMLRLQVLDLFRKPIYHVRLLETLNNLFPQPRMHL

SEQ ID NO: 938436 - protein, 72 aa, Homo sapiens
RRERYLENGEPFRIEGFHDGVRVPGKATATLTISEKGGHRIYTGSMHDEVVYHQRRNAFRAALKLAQLVDAA

SEQ ID NO: 938437 - protein, 36 aa, Homo sapiens
LSTDKFKTDFYDQCNDVGLMAYLGTITKTCNTMNQF

SEQ ID NO: 938438 - protein, 69 aa, Homo sapiens
  misc_feature (39)..(39): Xaa can be any naturally occurring amino acid
SSSSIIVPIFLLLDKDDSKPAMRKIITYEGLNIDPEQPXYEYIVTLRPGQVKWSVVEHPGPGVRPRSPQ

SEQ ID NO: 938439 - protein, 115 aa, Homo sapiens
PPHYFFTYRIRIEMSSDALPEKACQLDSRYWRITNAKGDVEEVQGPGVVGEFPIISPGRIYEYTSCTTFSTTSGYMEGYYTFHFLYFKDKVFNVAIPRFHMACPTFRVSIARLVS

SEQ ID NO: 938440 - protein, 97 aa, Homo sapiens
KLLEPVLLLGKERFAGVDIRVRVKGGGHVAQIYAIRQSISKALVAYYQKYVDEASKKEIKDILIQYDRTLLVADPRRCESKKFGGPGARARYQKSYR

SEQ ID NO: 938441 - protein, 68 aa, Homo sapiens
KDVLLLISINSLSRAETYVFLFQRAGEAKGILIMMRYTTDIYQLCQSYRSQVDTAGTLTGIKQVYKKH

SEQ ID NO: 938442 - protein, 43 aa, Homo sapiens
  misc_feature (24)..(24): Xaa can be any naturally occurring amino acid
  misc_feature (29)..(29): Xaa can be any naturally occurring amino acid
TYNGTLEEVRAIQEIKPGEEVFTXYIDLXYPTEDRNDRLRDSY

SEQ ID NO: 938443 - protein, 102 aa, Homo sapiens
CKLQDMQEIIPPFGEELDALRPELGRPNMKSQCCWASKTHLEKEITPSRRLLGGESEGTREESKSGLKVSATPKIKAITQETLNGRFVLFQVNEIPKPAWDQ

SEQ ID NO: 938444 - protein, 117 aa, Homo sapiens
  misc_feature (37)..(37): Xaa can be any naturally occurring amino acid
TQRQRRSKALDDFYKMLQHEPDRAFYGLKQVERPTKXLAIDTLLISDELFRHQDVATRSRYVRLVDSVKENAGTVRIFSSLHVSGEQLGQLTGVAAILRFPVPELSDQEDDSSSEED

SEQ ID NO: 938445 - protein, 109 aa, Homo sapiens
  misc_feature (25)..(25): Xaa can be any naturally occurring amino acid
AGRPVRGAAQRLVTPWRGGAARTPXPDAGGAGRWAGAAVAASLLCALRVGLYMGQLELHVDLVPEDDAPPPRNAPTERVGRHPSARSRAAPRPVHSARALGPQPRPPLL

SEQ ID NO: 938446 - protein, 139 aa, Homo sapiens
  misc_feature (45)..(46): Xaa can be any naturally occurring amino acid
  misc_feature (50)..(50): Xaa can be any naturally occurring amino acid
VPPRKTGGRPAKAKSRPSRRPPVPSGRVHRLLRKGHYAEPLAAAXXYLGXVLEYLTAEILELARNAARSNKKTRIIPRHLQLAIRNDEELNKLLGGVTIARDAVLANIQAVLLPRRPPAPSGRTPSCRQRRATQASPGV

SEQ ID NO: 938447 - protein, 69 aa, Homo sapiens
  misc_feature (5)..(5): Xaa can be any naturally occurring amino acid
  misc_feature (58)..(58): Xaa can be any naturally occurring amino acid
SGWRXGLGVRPVPEDAGFGTEALASEATPRLLPTVGALGDQPFVGLLPKNLSREELVXALRAAVVVRKG

SEQ ID NO: 938448 - protein, 151 aa, Homo sapiens
KVLAYNVVPATMSASFDFRVAPDVDMKAFEKQLQRWCQEAGEGVTFEFAQKFTEPRMTPTDDSDPWWAAFSRSFKAMNLTLEPEIFPAATDSRFIRAVVDPSSGFSPMNRTPVLLHDHNERLHEDIFLRGVDIYTGLLSALASVPTLPSES

SEQ ID NO: 938449 - protein, 107 aa, Homo sapiens
MMCISKLPAVLLILSVALNHLRATPVRSGSNPQMDKPKFQHGHVCHTTPGKLFGSFQQQPWSSPPTNQRGIEYIMARGMRQGIQIGNPWISYSFKVNVLLQHLILYV

SEQ ID NO: 938450 - protein, 150 aa, Homo sapiens
EFPGRLLLLNSRPLDKNIKISQTWWHAPVVPATREAEAGESVEPRRQRLQRAEIMPLRSSLGDRTRFCLRKKKKISLAWWRVPVIPATREAEAGEFLEPRRRRLQWAEIKQLGSRLARTRLGSLGYPNHVRPKWDYPVVVNHLIKTKTPP

SEQ ID NO: 938451 - protein, 47 aa, Homo sapiens
RYSALFPRVAYGPTRYNYLTPRPEEERTLAAQEKHTPDALKRLPRDI

SEQ ID NO: 938452 - protein, 129 aa, Homo sapiens
  misc_feature (15)..(15): Xaa can be any naturally occurring amino acid
ELRKYLSISPFCALXPRLSLREFYSVFRDPLQDFTLMRFLDRFVYRNPKLHKGKENTDSVVMQPKRKHFIEDVRSLAVNSKEFLAKEESQIPVDEVFFYRYYKKVAVVKEKQKRNEDEDSIEDVDDKEF

SEQ ID NO: 938453 - protein, 101 aa, Homo sapiens
ILFKSNLQGNNSTQPFLLFQEKPQVWEDRQLSLGHRQISHTVCLDPEGLRNPQGFLVSLKVLVIPFWLPFDSFGFLPTGKQRRNQPANSYLKPIERDLGIS

SEQ ID NO: 938454 - protein, 140 aa, Homo sapiens
PTTSVTSPNAISGLIQLHQRPRPTPSAAPSNSTPAPAALLGFCCFEPRHWLPNLPKLPNIHWDLSSLLTSCFFPVTPRAERCPPSGPKMILVTAHSCGCFGEDGTLNSATLTHAFPDDRYRVGACAEGACKREILLTLEG

SEQ ID NO: 938455 - protein, 83 aa, Homo sapiens
SNTKKILNVQKSETILSSRLVFCIPCYHCRVTGRRVKGTRSAAHHSPDPSPSPHLCPSPNSHTCYTPLLLAKTVEMICKREGE

SEQ ID NO: 938456 - protein, 166 aa, Homo sapiens
LFQQPLIKSSKYKESTSNCYDNGCLNSPVRLLNHPLSHSSHNDKYAHHLPASAIITTTQKGPRTDVPVVFLLKGKFPGVRLKGTALQKGCHKSHLVLYHLQSEACSSLRQSHAANSAPGLTRIANCCPQRLPSISTPTPQQPPGGPQCPEIAATTHPPAAPNPISR

SEQ ID NO: 938457 - protein, 146 aa, Homo sapiens
KREDNSQHLGQPALMADISRKIQCGQTHENQVADTIASLKIGHKNEEQFQAALPVALGENPPLQGSLKLLPWGAEGAEGRGSECAAVVERTLEPLKRTEQALGAHRGKTRDRGDLVGWGRELRMARNKFMGTETTWKINQKEFRRH

SEQ ID NO: 938458 - protein, 76 aa, Homo sapiens
LQVGIFMSHGLVSSSALQPTAVPCGPRATVLVGSQGSFPVLEIIQFICGSWKTVELMEMETRMMEIFPEAGKGGGE

SEQ ID NO: 938459 - protein, 42 aa, Homo sapiens
  misc_feature (3)..(3): Xaa can be any naturally occurring amino acid
  misc_feature (11)..(11): Xaa can be any naturally occurring amino acid
QTXPSGPSTGXCRFLFFFAQECVFIEEGGFPEAGVSGMTGFR

SEQ ID NO: 938460 - protein, 154 aa, Homo sapiens
  misc_feature (46)..(46): Xaa can be any naturally occurring amino acid
  misc_feature (128)..(128): Xaa can be any naturally occurring amino acid
  misc_feature (147)..(147): Xaa can be any naturally occurring amino acid
STESAATADAAAFVFIALTRVCWFITTTTSYGELHVQGAVRRRVGXYVIGINDLDIMIQLNIGSGNHPRTLLRQGQRNFVTAVQLDSQTFKVQQDFNDVFLYTFDGAVLVEHTVNLGLDYCSSLALRXTGCGEALPRGVAKTTLERXRGDFSPG

SEQ ID NO: 938461 - protein, 102 aa, Homo sapiens
  misc_feature (35)..(35): Xaa can be any naturally occurring amino acid
  misc_feature (55)..(55): Xaa can be any naturally occurring amino acid
  misc_feature (73)..(73): Xaa can be any naturally occurring amino acid
  misc_feature (79)..(79): Xaa can be any naturally occurring amino acid
  misc_feature (86)..(86): Xaa can be any naturally occurring amino acid
SYCVLGSRSLVFRTSSNQDHFIIPEDSLNPFLCTXFTTFPDPLCLDLAKKLVLAXEICTLAKLRQLSICFPQXLSISQXPCRPCVXNGAIQDERSLGSRVTA

SEQ ID NO: 938462 - protein, 77 aa, Homo sapiens
MIRTRSSWFAIKLVPPAIVAERSLIMPSASTVTRLITRKNDLGQSRIETQERALVVGPGEAILKVERCSLTTNNITY

SEQ ID NO: 938463 - protein, 107 aa, Homo sapiens
GRLLLLNSRPVDRRAAVARNIGRHFHALAGMVQGVASQVIQQPLHRHPPQRERLDRLQPRAYPLFALVIGRHHFAHQLAQVDLFHRLVATVADKGEELVEDRVHVVD

SEQ ID NO: 938464 - protein, 71 aa, Homo sapiens
  misc_feature (1)..(2): Xaa can be any naturally occurring amino acid
  misc_feature (4)..(4): Xaa can be any naturally occurring amino acid
  misc_feature (31)..(31): Xaa can be any naturally occurring amino acid
XXWXRKQGVECASGDCDGLRQSWFNIHTDPXCPCMDSRLREDPGLCAIPSRLGGSFSVGGGLADPWPQEFM

SEQ ID NO: 938465 - protein, 121 aa, Homo sapiens
STHDHIKEVVRIQRRTPAEVEVALAFLEFVVIILSVLHFNTSLVDQAGFGDHLVAEVIEQATSGHMTFLGLTAALQLEVAVAAQDAELGNRVGGGGRHRDHRGGDHCQGRGFDEQVSQTIE

SEQ ID NO: 938466 - protein, 57 aa, Homo sapiens
  misc_feature (10)..(10): Xaa can be any naturally occurring amino acid
  misc_feature (30)..(30): Xaa can be any naturally occurring amino acid
  misc_feature (56)..(56): Xaa can be any naturally occurring amino acid
MRAHTDPCTXTQARTDTDTCTDTHSTCTHXDTPDVHTDTQLAHTDTHRCTQAWGQXH

SEQ ID NO: 938467 - protein, 34 aa, Homo sapiens
NFHVIVLQRVACLQSFGTQLRTWAWVGDVGQHPQ

SEQ ID NO: 938468 - protein, 52 aa, Homo sapiens
  misc_feature (21)..(21): Xaa can be any naturally occurring amino acid
MSQVTCSRTWVRGESCRKGQXPELNGWTGVVPTSNSHLGPTLHIRFLKALEC

SEQ ID NO: 938469 - protein, 134 aa, Homo sapiens
  misc_feature (70)..(70): Xaa can be any naturally occurring amino acid
AGAYYYYKIRGRRRPNPEDYKKAEEKLLKVRPFVTYFHSSKYISDLANVNICVAAGFSGDVFQAKARAAXAGKGVNIAYVIPKEGGNLWFDVLAIPKDATNVKEALAFINYLLKPEVIAQVSDYVGYANPNPGA

SEQ ID NO: 938470 - protein, 41 aa, Homo sapiens
KKSDQHGIVGRLLRGDSASERPRKSHGYILSFPQLSVIKNV

SEQ ID NO: 938471 - protein, 92 aa, Homo sapiens
EVESFSRLDDLIETIRGLGIKFAEIHMNYLHTTVTLRVIVVADILAQGLVAFFQGRCAFGADNPVTGPCAGRISLFIAAGPGVGFAEQSVDA

SEQ ID NO: 938472 - protein, 94 aa, Homo sapiens
IRNELFTASVAAAFLNDRRIRVSKRTQIEESLIGTGFPFRMISQIDDYLKMLRPVMEKAAGLRRSGLRADMAYTAAGRFDGFFEIGLKRGTSRR

SEQ ID NO: 938473 - protein, 104 aa, Homo sapiens
SPRLECSDTISAHCNLCLPGPSDSPASDSQVPGTTGARHHARLIFVFLVETGFHHAGQADLELLNSGDPLPRPPQSAGITGVSHHTRPSELIFEKSGQAIQWVD

SEQ ID NO: 938474 - protein, 96 aa, Homo sapiens
  misc_feature (62)..(62): Xaa can be any naturally occurring amino acid
  misc_feature (66)..(67): Xaa can be any naturally occurring amino acid
  misc_feature (81)..(81): Xaa can be any naturally occurring amino acid
QEVGFDPLYPGCSCPSISVCSQERMAESWPALLTCPIPVCPLSVRLQAHDPRQACPSVPVSXTETXXPLYRPPLPKAALVXAHTPPHHGIQDVEEQ

SEQ ID NO: 938475 - protein, 68 aa, Homo sapiens
STVPAGAGDYRALPPFVTTVGLFVNASRCELGEILDAVPLDLLQFHGDEAREQCEGYHRPYIKALRVK

SEQ ID NO: 938476 - protein, 108 aa, Homo sapiens
PADWRTMFFSTGSTPPSDMSSLQTTYVVIAVLVLLVALLIARTPLPDLRAQEQALQPVAGKGLWQYPEFVGGVITQFFYVAAQVGVGAFFINYVTEHWAQMGSQHAAY

SEQ ID NO: 938477 - protein, 127 aa, Homo sapiens
  misc_feature (47)..(47): Xaa can be any naturally occurring amino acid
  misc_feature (68)..(68): Xaa can be any naturally occurring amino acid
SHSTAPRSSVHPFPSMVFWVGPPFFISPILFLSIVLWVSPPIFIRPXFLSIVFWVDPPIFIKPTTFLXMALWVASPSSSAHSTWCCFVVTVPPPPLRFASVSSQCPCGRNKDHSIDGDHIAVQTSLV

SEQ ID NO: 938478 - protein, 117 aa, Homo sapiens
GPSTRQIILYKKCNKLYDVSTIQLNDKKKVSTIMVVNMNSADREGHSGDERNLMLEYPPPLNILECKDWPGVVAHRVVQATQVAEAQEWLEPGRRRLQGAEIAPLHSSLGNTVRLLS

SEQ ID NO: 938479 - protein, 119 aa, Homo sapiens
MGLNANTSRVAGDFEVLEIEGKTRCGCAGKITAGGDGEYNVGDQPAVRKEAVFFFNQKRRIRLDPLQEPPGKQTFLPSPGDSFKAAPLRGTSVQDAGFSPYQRGVYTHSPPPARGNTRR

SEQ ID NO: 938480 - protein, 101 aa, Homo sapiens
ARPGVHPALPNLPTSCCLPWNKQKLPRECGLSPGIACGLPFPGSWPPTPPHLCFLMPLQDMHGLSSCPRAMVGFRSQSAPSRSRTAPSPGTCYFLKLSTQA

SEQ ID NO: 938481 - protein, 131 aa, Homo sapiens
DRPGPNVITHGRVIALEGDPCLFAVVQGTGGQVVLELRLERVQRRAAPHRYVIIDPVDESRLQGDRLGLAIGAKIATLEAALIIVDQTEWNIEPQAELKNPRQEVLKNRQKGTADKGTDYPCSFLWRRRGR

SEQ ID NO: 938482 - protein, 121 aa, Homo sapiens
  misc_feature (34)..(34): Xaa can be any naturally occurring amino acid
  misc_feature (41)..(41): Xaa can be any naturally occurring amino acid
  misc_feature (78)..(78): Xaa can be any naturally occurring amino acid
LISSESRGGRELRVTQAHGLTGFLTQITVGTGHXPALSVSXGGNSGTRRLWSDVPSCFGTKPVVKVMAPSVRLARWVXVSLTKGPSRSPLTKWGTQGHSVHPAPMTAHGTSAGQLSCACLA

SEQ ID NO: 938483 - protein, 81 aa, Homo sapiens
DRLPVTVANGACLALAGHDTEYGLYFMNYHSRTPTVGTTTASASTITALGSILPLTPAPFRSGLAQSIMLGRGQYYLESTR

SEQ ID NO: 938484 - protein, 86 aa, Homo sapiens
VATDQRSKWDDFGQGVLPKRFIFGVNTIISLSFHIIQQLNYVSSLHRYLTDVAHVDIYWFIGSRLDVAPSKLPRLTTPIQGSSTVP

SEQ ID NO: 938485 - protein, 34 aa, Homo sapiens
ARLNCGVDGRGAFYMFSVNTERSSREGCHARRGR

SEQ ID NO: 938486 - protein, 34 aa, Homo sapiens
RPPTTTKLAAVRRKKEKIEEREQERNQEKEKRGR

SEQ ID NO: 938487 - protein, 30 aa, Homo sapiens
MMVDFQEVFPETEPDVTTLLKQGGEFVSQF

SEQ ID NO: 938488 - protein, 50 aa, Homo sapiens
MMLPFVMFSSAQIGRRLERSFAATRSLARERSNEASGMIWSTCHSDLFSQ

SEQ ID NO: 938489 - protein, 47 aa, Homo sapiens
  misc_feature (35)..(35): Xaa can be any naturally occurring amino acid
MKLSQIEAEMGPITYPGQGQLSRLHQENEYLFHVXLLCVKRDEFNTT

SEQ ID NO: 938490 - protein, 47 aa, Homo sapiens
MTSTCSPSYSGGRGGRMTRAREVAVSRNCITALQSGRQSQTSSQKKK

SEQ ID NO: 938491 - protein, 86 aa, Homo sapiens
MFDIMIRQLRSLKRMQDEAWRCLNVKVSPEKGTRGGKQDKRTVRLNISGGVVDGARETEIVGDSSSEEEKGHTSTGRSTGTIASLV

SEQ ID NO: 938492 - protein, 66 aa, Homo sapiens
RTHRRPQVAGAILSKENRAGGLTLPDLKIYCKAGRARWLMPVIPAFWEAEAGGSQGQEIETMLANM

SEQ ID NO: 938493 - protein, 86 aa, Homo sapiens
RRAKAVKTLLQSWSSRCEIMALGIDSAKEKMEREKPVEREMKSSVLPKASTLSKSSAVIEQGDCKNNALVPGPLFTSFDGCPPWPF

SEQ ID NO: 938494 - protein, 64 aa, Homo sapiens
PYDTEEELLELMNNTPYGLSATLWTNDLSKALRMVPAINAGTVWVNMHTMLDPAVRLAATSLRV

SEQ ID NO: 938495 - protein, 88 aa, Homo sapiens
  misc_feature (60)..(60): Xaa can be any naturally occurring amino acid
SEGPGSSLGPRPPMPAHAYRRTIGRQLAKTHFPRALIQCHMARQVGGDPLVDLPLNRLGXHGLSRSTANKGDLAFARPVMGLDRHPVD

SEQ ID NO: 938496 - protein, 93 aa, Homo sapiens
WKMDRFLNRFHLGEPEASTQFMTQNYQDSPTLQAHRGRPASPSTKPGGARCLLDRSFALRACGTLLNTEDTTTEPPLHTDPTLIPPHKNNKTP

SEQ ID NO: 938497 - protein, 87 aa, Homo sapiens
HKYYFLVGYSETLLSYFYKCPVRLHLHTVPSKVAYQHLYNNPLSSIKLHPAETGNARQQCYVGDNASPQRTQHQSLICSSTKTFYLD

SEQ ID NO: 938498 - protein, 115 aa, Homo sapiens
  misc_feature (5)..(6): Xaa can be any naturally occurring amino acid
  misc_feature (8)..(8): Xaa can be any naturally occurring amino acid
METVXXVXVRINYQNVHKVLANSRCSIHAPMTCISPWDWQWWLTHEAMVDSLLQRRHDLPVAVSALMPVHVLRSTPSCEHQAPSLPLSLQPRSPAPRAAPGLARSVLPTRLGDRE

SEQ ID NO: 938499 - protein, 37 aa, Homo sapiens
MHLQLPRSLRFSICPGQWAGRTVLTQEQLLVQAPWLQ

SEQ ID NO: 938500 - protein, 68 aa, Homo sapiens
MNYHTISNECSDIWINYCTGEEMKIDMSHRIHNDCVASIIASVAAAQMSAVLRQQGQRLPFAVVGPLR

SEQ ID NO: 938501 - protein, 83 aa, Homo sapiens
  misc_feature (50)..(50): Xaa can be any naturally occurring amino acid
  misc_feature (70)..(70): Xaa can be any naturally occurring amino acid
QEGSGHPLEIPCFPLKWAVGANSSGIFAGKSTIVYAMAKAHSCWRTAAPXLCSTGPLSVWLPVPPTPVSXLLGRSYVGWLWRA

SEQ ID NO: 938502 - protein, 68 aa, Homo sapiens
KTLGLVKMQKESLANLQMENKTYSVMNKKADTNMDLMGGLDIVIIEQEDDSDRHLAQHLNNDRNPLFT

SEQ ID NO: 938503 - protein, 69 aa, Homo sapiens
STPTLNDQITKKSEFLDFKKSQPTYFGDCESLTKEYVDTKRINTELLIKDQKIDNYVTTGSITTDAFAR

SEQ ID NO: 938504 - protein, 70 aa, Homo sapiens
LQKCCILRRKEGVYGYNLQDTTRYKQCFTKHERFFNTFRWGKNRCSVYLQRLRDWKTVNYRRGKRTCVSS

SEQ ID NO: 938505 - protein, 117 aa, Homo sapiens
ARHRYEVRLKNGSVLVLVRDKPWHPGANRLNGNLMPCAFSCFLVQSLCVAKERLLLKVPIFPSGSRPSNKGAYPAVRKLQGREMNPPKMMSGTPLIRVLGDYKSVLFSVGCFTALVD

SEQ ID NO: 938506 - protein, 85 aa, Homo sapiens
CCLRARGRQLLKQRRPIGFHLRSPGLPFIGNIYSLAASSELPHVYMRKQSQVYGEVPADGPGQGRRQADREARDFLVGIMDALGE

SEQ ID NO: 938507 - protein, 40 aa, Homo sapiens
MRTLAFRVAKFQNAVQPMVLSSGVRWRNAVSKMRLRTSLT

SEQ ID NO: 938508 - protein, 188 aa, Homo sapiens
SPSSKLPSSASEIRERHKILLRRQLQTHNVRFTKVEMKEKMLRQPERKVSYPQRKPIRLTADLFAETLQARREWGPIFNILKEKMGKKQSRKTGNCKKQSASPPPKECSSSPAMEQSWMWNDFDELREEGFRRSNYSELQEEIQTNGKEVKNSAKKLDECITRITNTQQLLQGKHKTAEQQETSQSGR

SEQ ID NO: 938509 - protein, 113 aa, Homo sapiens
CLVVVPFPAPDDTLFYCLILAGFDVLNFLKEFYSLDQKVWLTTPLLLAFTFWVSRGNSKGWVCDVVPACLCASFFLCVYFVLFFSVYISDPDRTTCGLSIKKIKRFKKQGRTP

SEQ ID NO: 938510 - protein, 91 aa, Homo sapiens
MATVKDAFPACPLPICCERGPPCLEALALALQFSSGEKGQCPSPELGPQFFLFPRTKAFGPSDPIPLTQVSFCVWGEERMISVWFHLLFSS

SEQ ID NO: 938511 - protein, 104 aa, Homo sapiens
ALIAVSSETEEERTFTFRQLHDEVNAVASMLRSLGVQRGDRVLVYMPMIAEAAYYSAGLQRIGAIHSVVFGGFDLHSVAARIDDAKPVLIVLADAGARGGKIIP

SEQ ID NO: 938512 - protein, 121 aa, Homo sapiens
GFVSLPLLAWIAQSPIIIITGEQLSSYEYGLLQVPIFGALIAGNLLLARLTSRRTVRSLIIMGGWPIMIGLLVAAAATVISSHAYLWMTAGLSIYAFGIGLANAGLVRLTLFASDMSKGTV

SEQ ID NO: 938513 - protein, 137 aa, Homo sapiens
THTCCAITPSLSLEKGLLAIVTGSLSAATGPWEPWSLLAASPGHQPGTRSPRPTVASAVPSCGQMDDPIQTALQGTERGSETRPELPSGHHHHLEPFTGSVNCVKTGCHQETSLQLYCKQTHVFKGIRRNPPWKNTI

SEQ ID NO: 938514 - protein, 101 aa, Homo sapiens
EQSLGTGVTERAAGCCGGEIRTMREVGTKELWDKGSKKAEKKIVPVDGEEKKSEGLDTEWDRTSSCALSSLVVSNRYPRGEPYIICYPEGSGGKRLWAEVQ

SEQ ID NO: 938515 - protein, 120 aa, Homo sapiens
MVAGRFQNGGGHFQDGASLVFSDLGFLASDIPRNGILGHAVSVLALLEALGHGRELWNPVTSVQLDEDEPRHIAVQEQWQAFSLTGSGSGCLAGSGAQQTPCWIPRDGSQQRVCNGSKQQ

SEQ ID NO: 938516 - protein, 55 aa, Homo sapiens
MLPDATVLKVWSLSLAWDASASCGDSETCKFSGPTLDCLTQTLGALALSDLCVNT

SEQ ID NO: 938517 - protein, 96 aa, Homo sapiens
MPLTALSSGFLASIWPQSLPIPLEIKFLLLTECPGRAFLAAFFIHVTDASGFSQRRTSHLCAAALSIRCPQQILSPHSVSVSHILTVGIIRRGATV

SEQ ID NO: 938518 - protein, 81 aa, Homo sapiens
FPPLIRAVTWIDNPIEVYVNNSAWVPGPTDDRALPNLKKKEDDKHFHWVSLSFYLPGKNTRMLNAYNPKLVGRRTYCQCHQ

SEQ ID NO: 938519 - protein, 128 aa, Homo sapiens
MAYSGRCLLSGYINKRDPNQGTCTNACRWEYNVQEGKEDYLVDDCFLLTDMYPFAFLSCTYCGEVNACVDQPVQQIDSLSVNEHTSILLFPALLQLNQYGYFLSKMLSRINSSRRINKIYISFASASE

SEQ ID NO: 938520 - protein, 89 aa, Homo sapiens
SGRHGSTFRELHLLMASLDWGQQWAGALGTHRAWPQPPLLFLVHPLAHEPLPGPCCYPVAVLEEVMLVPGHIYSTELLRQLYTTLAAQK

SEQ ID NO: 938521 - protein, 105 aa, Homo sapiens
  misc_feature (42)..(42): Xaa can be any naturally occurring amino acid
  misc_feature (57)..(57): Xaa can be any naturally occurring amino acid
  misc_feature (68)..(68): Xaa can be any naturally occurring amino acid
  misc_feature (103)..(103): Xaa can be any naturally occurring amino acid
DIAFTFKLCTELKMCYTAYFLNVKIFLSLYEETHLGNGFVIXSVNCVLNDMSVLHRXLVPSSATHITXLHNRLRSNIFISPYPIYFYTFFHHRLSLSKVYNGXTN

SEQ ID NO: 938522 - protein, 34 aa, Homo sapiens
YRFYGLLGAWVVLLNFSSNMAGWVGGGLNLALII

SEQ ID NO: 938523 - protein, 112 aa, Homo sapiens
MGTDAIIPVDQLRFALGLYQITGADIFVPGLLKCRDPFLICPVDLAPDDTNSPVVRGDLARYFLKNKRSVSSSGSGGRGNSYFGIMKGWPATGANTSLIAWLKVLLSSWEPF

SEQ ID NO: 938524 - protein, 31 aa, Homo sapiens
IGITNISSSHQGHHAIDSETFIVHTAIKTGK

SEQ ID NO: 938525 - protein, 70 aa, Homo sapiens
FGLRFGKREASPGNHGRSLGGAEGAGAGHLTSDPKGFILFLAGPGGGNLVLREVNLSFQPEAIKEMLRNS

SEQ ID NO: 938526 - protein, 134 aa, Homo sapiens
MTSRHSSSVWLRFRVIIWERGIMMLLNALVCDVHHPFEHIARIFVDKVVLPGITDQRQQFVTVFRFTVEKLAENREKNPFLLLIVSLLCELSSLMASYGFIMLVNQNAVVNHQRRGRLPVKCLANYSFSAMYGS

SEQ ID NO: 938527 - protein, 83 aa, Homo sapiens
KDNQFYERVLPRGVVTIYRVTSGLPTGVQAGTDLILAIHVPQDVPLVVGGNAAHVVMHGGEDGDGSFVTSTPAKIMGVSEMPG

SEQ ID NO: 938528 - protein, 57 aa, Homo sapiens
SIPDCFRGLVLHVCGFSSDTVQVVGRSTIQRLEDGGPLLTAPNYMLDIQETHAPNWD

SEQ ID NO: 938529 - protein, 96 aa, Homo sapiens
  misc_feature (57)..(58): Xaa can be any naturally occurring amino acid
MPQMMRLAVLEPHDYYVGLELVLQIPHFVSLVPLWLRWEGEGGVVPPSLNFFIITPXXTNRCVAVVVVWGVGEFTDVAPEPIAVIMYSSPGFASAA

SEQ ID NO: 938530 - protein, 124 aa, Homo sapiens
SALALAPQVGPRLQRLGFRAIGCLSFGSVRLALVSHAFREALSNLANSPGCSKTKKLVPLEDGRVCGAATHCCPKLTQEFTPVWFLDVCWVFSSVPYSPPRQSIGFLRCCDPVLLPVIKMLSDS

SEQ ID NO: 938531 - protein, 110 aa, Homo sapiens
NVKAKTTEGPLFRVNPLSLRLFCKIAFLLLRQSLFNLDNSTYFLLALGVLVVSLSSVSTLQVYGEAVCLVSPYFMLWCSLASVLVKHHCRGLDVSVKREESLMAISFSVG

SEQ ID NO: 938532 - protein, 40 aa, Homo sapiens
WSSTQSQSGEGRSVDYSYLQPGQDAMPNMLSIHRIISSFI

SEQ ID NO: 938533 - protein, 90 aa, Homo sapiens
SPAWLRVYGTCTFKFEWRRHSVLKSGTGQASPHKCSTDSARPVVCRSAKPNRFLSVKQNWIAASENCPCVRVPLAVANQHIPLSSHTVKE

SEQ ID NO: 938534 - protein, 105 aa, Homo sapiens
  misc_feature (94)..(95): Xaa can be any naturally occurring amino acid
PVIPALPEAGEGGSPEVGSSKPARSTWRSPVSTKNTKSARRGSACPQSRLLRRPMQEIRLKPGGRGCGVPRSRHRTAVSTTKNKTLSRGKKKPXXHKIEPVSVKR

SEQ ID NO: 938535 - protein, 41 aa, Homo sapiens
APAPTPNVLPPPSPCLCRPCLGRPPRPFDVCVLPPERRPVG

SEQ ID NO: 938536 - protein, 129 aa, Homo sapiens
ICPPGPKFRPGGQAEKIFGEGFKGRGFWFKKNNLPGSGKFCFWVPGNIHLGFQFGPSLWFFRPGFFLGAGGAGFHTPEKEGRAGFLGAQNRIHKGGGLRLFPPEFGGVLPPGKKIPLFFPKGNKKFSGG

SEQ ID NO: 938537 - protein, 152 aa, Homo sapiens
TVHTVTLQVRLILIVEYTPPGEDSICNDTCSVCWSMEVLSMCANHRPVCLYTPDLAVFHEQARTANRGPVCLYTPDLAVFHQQARTANRGPVCLYTPDLAVFHEQARTANRGPVCLYTPDLAVFHEQACTANRGPVCLYTPDLTIFHECACT

SEQ ID NO: 938538 - protein, 198 aa, Homo sapiens
MFAKAFRVNSNTAIKGSDRRKLPADVTTAFPTLGTDQVSDLLPEKKDLNIVKLYAHKGDAVTVYLNDDNPILFELEKNLYPTVYTLWSYPDLLPTFTTWPLLLKKLVGGTDFILPELLMPPAGLPQVHKGHLCPISLVGNRPPVAIGVAAMSTADMLTSRLKGRGFSLLHTYQDHLWRSGNKCSPPSIAPLALDSTDL

SEQ ID NO: 938539 - protein, 142 aa, Homo sapiens
GCVMIYRPVGLFQCVDRSTHPDCALRDRGSRYSKKAPRSLYRTRGGSYHSPLSGAGFQDSTVTGNCVALALLLPCSLPLQSSFVFCVSQMILLSKDAFCWENGVLRWYFNAACVQDFGRKGLVLFRGLKMLRWDWGKLFSCL

SEQ ID NO: 938540 - protein, 77 aa, Homo sapiens
YRGGPHAASLEEQAGAVPPLGLRMLHPVGFQACPDDPTGLCPGAILRPISHSNDRLFINPIKINLYSGTERRKKNIF

SEQ ID NO: 938541 - protein, 186 aa, Homo sapiens
PQGFPELKNDTFLLSTWGEETDYTPVWCMRQAGRYLPEFREPGCPGLFSTVALLSLWTASPLALLWMLHISRHPVVPGTGMEVTMVPGKGPSFPEPLREEQDLERLRDPEVVASELGYVFQAITLTRQRLAGRVPLIGLCWCPWTLMTYMVEGGGSRPWLRPRLGLSETQASHKWFESQERLGHIW

SEQ ID NO: 938542 - protein, 119 aa, Homo sapiens
SSPLCTDREIHCAKSASLAADLESTPAFRRCWGHQRSGSQAGEWLRGSVTEPPGCPSCLKRPGVFSDLICVFVLRRSRELCLHLLQLWGAAALSHLLAFGVLVPRVARFHAVSAVSGEH

SEQ ID NO: 938543 - protein, 105 aa, Homo sapiens
EAWTELGLGMAQARWWATFASYVIGLGLLLLALLCVWRLEEGPGKLPYCSGPPVYGLVLWAGAFYLFHVQEINDLYRAQAENQNVLEESTGQPESETQNLSKPKT

SEQ ID NO: 938544 - protein, 45 aa, Homo sapiens
NVVTGKTQRRYWENTTSLLGKHNVVTGKTQRRYCENTTSLLGKHN

SEQ ID NO: 938545 - protein, 109 aa, Homo sapiens
NRNLFLSVLEAGSSKIQVLVGLVSGGDPVSLPSRWCLVAASSGGDKCCILTWQKAEGQNGQMLCEASFRKALSPHSGGKSPHDPVTSLTLLHWRLSFNMNSRRTQTFNP

SEQ ID NO: 938546 - protein, 164 aa, Homo sapiens
AITQGMVDFFHEEQGHLVVGAPQDIIPQLKKKYDVDTLDMVFLNQLEDRYLPDTLLLEECGLLRKGTVLLADNVICPGAPDFLAHVRGSSCFECTHYQSFLEYREVVDGLEKAIYKGPGSEAGPDCPPALARLSHPPGMRCQLLCDFCGPGGLIKHTCRLRLTC

SEQ ID NO: 938547 - protein, 133 aa, Homo sapiens
MDMQSGRFHITKIPIPEKQMSIALGMECDPCGQLTNDLKSLTNLPTLSLNLIINAGISSALVASQDQKAVTPLDPVFSILCVSFISQPADLPGNKERALLHCKLLARSRNIVPATWDAEASVEGELPLIINQK

SEQ ID NO: 938548 - protein, 104 aa, Homo sapiens
SHNRVNARLAGAPSEDPQFPKVQWPLRELCSACHNERLDVPVWDVEATLNFLNGPPLPKQHHPGLPCSWVSCSDGMLDICFLFSIVDGSFRSRNPVFNSGPWEA

SEQ ID NO: 938549 - protein, 69 aa, Homo sapiens
CVHSLLPPAIFGEDGQLQSVRNCTRQPHSPAEPVSHPLTAQTCICIELASLWRRLRGESLSCQEDGVLV

SEQ ID NO: 938550 - protein, 105 aa, Homo sapiens
  misc_feature (39)..(39): Xaa can be any naturally occurring amino acid
AAAKTTEVCHELTRRHNIHVQPINLPTVPRREEPYGFAXTLYHTPQIMNYFLEHLLATCQQLALELSPHPSAECHFCRRPLHFEVPTERETSYFPGLSKPSSPQA

SEQ ID NO: 938551 - protein, 119 aa, Homo sapiens
QWGSLQKLPRAHTCFNRLHLPPYDTFEHLREKPLMAVEPAQGFDGVDYRPSASGVLVLQARSACTFAFAYQTFPTAIQQSSCRHAPWRRAFTTHSSKFGRANLRPSLTPCLSHHKFSPG

SEQ ID NO: 938552 - protein, 74 aa, Homo sapiens
AQQPCHGFVCLLYCSLPTFRNAILYNLISELRLSLHLCNLHITTTPNTTTKTPIVVCTRLTYKMLAGNFQKKTK

SEQ ID NO: 938553 - protein, 83 aa, Homo sapiens
  misc_feature (60)..(60): Xaa can be any naturally occurring amino acid
YALVMTPKLQYRGYAQVHSPYSSGQEFLTCSVSSLALLHLSLGNLLVPCTFTPDSQCTYXLDLVPYSPAFLRLRRSLSPHPPK

SEQ ID NO: 938554 - protein, 66 aa, Homo sapiens
KHCYGEDLYCLKMQAGRGWLMPVVPALWEGEAGGSRGQEIKTILANMVKPRLYYKYKKNKISRAWW

SEQ ID NO: 938555 - protein, 73 aa, Homo sapiens
HGPQLLLGSQWHLSVASYLPGPGWGTVLRHEARPPPAPLPRGSSIPLHFWNVCPPLIFVYSTHLQIYLRYEAK

SEQ ID NO: 938556 - protein, 35 aa, Homo sapiens
VHTNPPRSISDSPSALKKQRNSQPTSHRHCHQAHT

SEQ ID NO: 938557 - protein, 131 aa, Homo sapiens
DARSRAPNRVELCRDECEVLESDLCRQEYTIARSNPLILMRLQLPKCERCPCLRAPTLPTACALALQPRGWAATISAITAQAWITEERQAPPSQATSATVALQHPHSHHLSSTDFPELGGGTPTAGTPEPN

SEQ ID NO: 938558 - protein, 137 aa, Homo sapiens
PLAPGRYWTANRNTASRPDKPAIGLLPQDTWQRRDGRVRMTETVGFAKPAVLFVGSIKDRHQVQQPNIGLDPQATLGEGTWGHRGPEGGSHLPLVMWLVGMEPQVHQALQYRHPEAREHQPGFAAGFLAHPGICTIT

SEQ ID NO: 938559 - protein, 69 aa, Homo sapiens
EQEGPAGEGPRRWKLGISPPTEQTFSPSSKILLVTRWGAKRKFFLLSDLGGVAWCDGKGCWWEGQDSRV

SEQ ID NO: 938560 - protein, 36 aa, Homo sapiens
MSYDGNRSTSSYAGVSVLTCRPDTCCVSGPAYTGPT

SEQ ID NO: 938561 - protein, 36 aa, Homo sapiens
GGPVAGAGRARSFGSSWRAVDMQSPEVRAAIKAIFS

SEQ ID NO: 938562 - protein, 152 aa, Homo sapiens
ISAESHKLPHKQNRGTMTRAMRGIQLRYLESLKDQEACARFRDGPTSAEEGYVFQDGFNKLLKVFMKARPWRLPLRNGSPSWTSPPRARRRETRSQKDPTGLPGICLVNALRCPRTWRWHRAPPIPVFVCVQLCCTGLGPPLSAKGPLSMLF

SEQ ID NO: 938563 - protein, 122 aa, Homo sapiens
NAHTPLKPPGQCAKHSGCRERVNDRVPPRRWAVRNRPRKRCSSEKTDICGMLESGFTKSSHEMYKSFARKQPRNGHLSPAAYAVRSTQAPSNHPLGEAGKDPRGKIATTATPFFRAGLVGSV

SEQ ID NO: 938564 - protein, 46 aa, Homo sapiens
  misc_feature (9)..(9): Xaa can be any naturally occurring amino acid
DDDDQFSEXGDETKTPTLQPTPKVHNGKRVTSVKKPAVNKKQGECL

SEQ ID NO: 938565 - protein, 31 aa, Homo sapiens
NNLSSARLQQMSERFLHHTWTLFNKDSPSFT

SEQ ID NO: 938566 - protein, 134 aa, Homo sapiens
QHRLDANLSCRECQVCCSPKTNQVVEPTVLLAPVVRDVSSVMRLAFGDPWVEAAGVRVCRLCQCSDSIDPNAVGNCKRVTGECLKCIYNTAGFYCDRCKDGFFGKALAPNPADRCKALQLDLYGTMKQESSCKP

SEQ ID NO: 938567 - protein, 140 aa, Homo sapiens
  misc_feature (91)..(91): Xaa can be any naturally occurring amino acid
ILTSLARVAGLLSLRCPAQLGALRQVDGVYYNLDSKLLGPEALGDEDGVRAFLALRVAQGLCEVLLVVTKEVEEKAAGCGQTDHELTMGAXTRSLGIPPAAAQDCMPGKGRALHGPGGPHPLRTRALLPSGAGGLNKSAD

SEQ ID NO: 938568 - protein, 74 aa, Homo sapiens
NFRSLHRSAKNSTKAFHHAPAESMSLVWLLRAYVIWRPCYLPKSNSCHLGLTGGPYKWQTQSCLRAFALTVPTA

SEQ ID NO: 938569 - protein, 134 aa, Homo sapiens
QPPGKLMHTEVGEPLGYKVSDFQSPTQAVSSPCNCHGNSSTGCVLVIFCALPCPQHLTCVVSFGPRNSLGGSHGHYSMSQMGKLKLAQVTQQTVADHGLTPRHWAHNSKHELPGHPEVQLAAATRPKPWPISPL

SEQ ID NO: 938570 - protein, 127 aa, Homo sapiens
DGVAFSYRIPPLLNHMRNISKGHQEICQKKQFLREAEELRVLSYRSPQLPGENYCRMEGICLPQPLKSASSGREVVPAPWLLMQLCGHINVSADLLKGPFTWDGERSLFVSSASTFFRPPYQKQSYF

SEQ ID NO: 938571 - protein, 97 aa, Homo sapiens
HPVSFSHGEQFQGQESLSIWRQDKPCLLPKHTSPHWASGPAWAAQGSVSGGDVAAAPGTGVRRWPGRDIEGSTRRGQGEALVEERRRRADLLILINL

SEQ ID NO: 938572 - protein, 32 aa, Homo sapiens
  misc_feature (9)..(9): Xaa can be any naturally occurring amino acid
HGKERVTSXRQSGPQQGEAAGAGLPRKSKICL

SEQ ID NO: 938573 - protein, 149 aa, Homo sapiens
QSISFDSIAFECIPFLAVHSIPFDAIPYDSIQFETILFLSIPCGSIPFHSSPFHSIQFHSTLFRSIQFHSIRFHFFREPSITLPSIPVHSIPVSSVRFHSIRFDSFPFQPIPFHSIPFLSVSLDSIAFDSIQFNSVLFHLIHFHLIPFH

SEQ ID NO: 938574 - protein, 44 aa, Homo sapiens
APNHHHGGPPARAQRSTGWLPAARQARALIHSSVWRFVKVLGKV

SEQ ID NO: 938575 - protein, 70 aa, Homo sapiens
PYENLMPDDRKWKFHSETSPKTPSVENLSSTKPVPGGKEVGDCWFKGAGTSPSLACSDDVTGLRLLLLLC

SEQ ID NO: 938576 - protein, 132 aa, Homo sapiens
MTDIYDTATKITDIDTHSIERCCRIHQVQCADTACFIAQKRNISRYELTAIANIEVSDARNTNGGIDILIDLPHSPRGDADIPDAGFSITEWTSSVADNKPLITDIHFAVAVITKISSEISDNGVLILNSNV

SEQ ID NO: 938577 - protein, 68 aa, Homo sapiens
LLLLNSRHTRQQNGMNPGGAPRSEPRSCHCTPASASRVPAITGTRHHAQPIFCIFSRDGVSQCWPGWS

SEQ ID NO: 938578 - protein, 61 aa, Homo sapiens
MSHLSSQDYWRDDHARPIFVFLVETVFRHVGQDGIELLTSGDSARLSLPKCWDYRYEVDAA

SEQ ID NO: 938579 - protein, 32 aa, Homo sapiens
AAKLKNQPSKKDEGILEKYSNSRVYYVFFFSN

SEQ ID NO: 938580 - protein, 106 aa, Homo sapiens
LHAHTRGHLRPAPRPFHVEPRVCPNPSPGPVLYTYLQGVSWPAALFAIVSRQYTDYSCAGSVGSTRTAQSCQQPQRAEAARPIYVPHVSRFSRHPASKIYVSAPLS

SEQ ID NO: 938581 - protein, 55 aa, Homo sapiens
SSFCPSVSCCIMPGSQEASQHFLTTKPGLQIPGEIPGKHQHSSPARTTAKAHKGT

SEQ ID NO: 938582 - protein, 87 aa, Homo sapiens
MREPIYVREPLFFVIQILPASYTYISYAYECIMQSDQNFIGNSSTPLRELPGIGAAEESGAGAEADGSSAAEDVLGDRPVQGQYRQL

SEQ ID NO: 938583 - protein, 120 aa, Homo sapiens
MTALQMQKISEPSSAQPTMMSSIRGITMNGFHDIMILLPRVHSSVMHKDKTWWWSWHLRYWMELVATRTPWTCVSVASVRQWAAIGNWEAMPRRTTVESVPAMAPPAGLYGDNQSHTFLL

SEQ ID NO: 938584 - protein, 80 aa, Homo sapiens
PGVVIDGGVDVVEPDGYASWRERWFAFVPPGIRRSSAVRDAAEFLHINVDEIAGVVMLVTVVARVARITVPVIGSCHANG

SEQ ID NO: 938585 - protein, 58 aa, Homo sapiens
MGAAVAGSAGCPVMHEAGCCRGLGQRGGGRSQSSVGHKHVDFILGTWQGFLKGAAGKR

SEQ ID NO: 938586 - protein, 59 aa, Homo sapiens
MTSNKVWTKLCRELVRNADTRPGVVAHANIPRTWDAEASGSRGQEIETILANMVKPRLY

SEQ ID NO: 938587 - protein, 92 aa, Homo sapiens
MHKHLGLDNKECVLPSIVKRVLKSVVAKFNASELITQWAQVSLLIHWELPERAKDFSLILDDVAITELSFSWEYTATVEAKQVVQQEPSRPS

SEQ ID NO: 938588 - protein, 43 aa, Homo sapiens
MVFQILSFLEVKQEDFIDWLIIFEHSVDDYDFLWNRYPNPGKL

SEQ ID NO: 938589 - protein, 78 aa, Homo sapiens
DLGRGTWLTPTIPALWEAEVGRSQVQKIKTILANMVKPVSTKNTKNELSVVVCTCSPSYSGGRAEAGESLEPGRRRLQ

SEQ ID NO: 938590 - protein, 147 aa, Homo sapiens
DDLDGARLQLPLLKTMVGWPADVRWEIRQERFDGRLLFKMGDDDLPRRRVLVTLHTAIQIARFLEKTTVQRVIDSNLTPAFAGLFNQFQGQTPHKAQAPFQYVVRLSQDFTQDPVRYIGKALPEAHRQADIGHAAQTVEALEHRGAL

SEQ ID NO: 938591 - protein, 122 aa, Homo sapiens
  misc_feature (2)..(2): Xaa can be any naturally occurring amino acid
NXRLRAEFRLWREGGERHYAMFSQDDKRTPILIEEFPIASLAINQLMPQLKAACKRSAALSHKLFQVEFLTTLAGDAMITLCYHRPLDEHWHTAANQLATDLNVSIIGRSKGKRDVIGHDYV

SEQ ID NO: 938592 - protein, 33 aa, Homo sapiens
AAAAGRRRRFFVPVAKVFICAGPDRSRGPQQRN

SEQ ID NO: 938593 - protein, 103 aa, Homo sapiens
SVLALSVLDTLCPDDELVGFGFRAGPFLFPPRYLVMQRLFPRIPHMKDPIGDSFQNDKLVCCFFCLGTGLEAWWPLWEAQAARPLEARKLETSLANMEKLRVY

SEQ ID NO: 938594 - protein, 127 aa, Homo sapiens
EHKYPSSLTLEHKYPSSLTWEHKYPSSLTLEHKYPSCLTLEHKYASSLTLEHKYPSSLTLEHKYPSSLTLEHKYPSSLTLEHKYPSSLTLEHKYPSSSPLGFDSFEVRVLDCIPKLCSRVKLWYPQW

SEQ ID NO: 938595 - protein, 82 aa, Homo sapiens
GKSEFWRFPQKCTKLPYAREMKNLLPPQRLLGREGKGPPMLPKGPPSGLLPCFALNIAQEFKVDTPVLSIGIPQRNFGEIVV

SEQ ID NO: 938596 - protein, 39 aa, Homo sapiens
MLGQARLDLLTSGDPPTSASQSSGITGMSTTPGEVDAAG

SEQ ID NO: 938597 - protein, 125 aa, Homo sapiens
YYYKINGRSTPATDLGNIHAPLVHPQRFADVDPIINVLVQQQLNPFATQAHGLLPGRHPDKLAGRKDGVIRHVHAKSVTEADDVLGGLVIEADKTLELVGGLADKLGCDRHGKPRFRATRLSRRG

SEQ ID NO: 938598 - protein, 111 aa, Homo sapiens
  misc_feature (91)..(91): Xaa can be any naturally occurring amino acid
DRMGLTLSPRLEYSGTTSAHSNLPVPTSSDSPVSASRVAGSTGTCHHTRLIFLCLVQMAFHHVGQAGHELLTSSDPPTSAFQSAGITGMSXCARPASCQVKRHASSQLPMP

SEQ ID NO: 938599 - protein, 134 aa, Homo sapiens
DVKSVLDQVTDDILIGIQTEINEKLQIQEEAFNARIENSTTAYGLGTRRVMLTFTETHKTSQNNRLSGASCLHHLVVQGKPSSTFYLPTHFDKSWSPLRHLPSHTTPSLYCTNSNANISASTSLKNHISKSNYT

SEQ ID NO: 938600 - protein, 69 aa, Homo sapiens
LLLLNSRAVDVERTHDLCVEEDQKVKYGQGAVAHAFNPRGRGWWITGGQEFETSLGKMAKSCLHYKYKN

SEQ ID NO: 938601 - protein, 136 aa, Homo sapiens
MQAGSRRPASPGLLPLSLCGMESLTRGLGGEYPGLKGPKVRMLFDLLKHLVPCLMGGSNEIPETYIGIYQWVKSSFISWLKPGLLRVRQRAQARALFLPHLVDPQMWREVGNATVFIQTAFPFALRAQNLPFKPRP

SEQ ID NO: 938602 - protein, 50 aa, Homo sapiens
MFHIALFNFPQNIADLRLSNSKSCSGIGCNSLDVAGRAKRRREPHQQQTQ

SEQ ID NO: 938603 - protein, 80 aa, Homo sapiens
QVTPEFRTVGVVAAASTRHAHPPHNATAASWSRASGGTLAGSGAPGRADGQPRRPGLLRKSPDFCAGPRLDSAGTVGRLC

SEQ ID NO: 938604 - protein, 122 aa, Homo sapiens
SQTPAALDGDGSMKPLFSLPGNRDSNPALLYPTCDLGQSVDPLHASAFSPVKRVTLDLSSLVSSNPLVSLVSGEASQTLLEDSRGQSSMGLFCLWIVMSWGFPSSQPKKIMEQYVMNGGMGG

SEQ ID NO: 938605 - protein, 78 aa, Homo sapiens
FTDPDGRVGPELGQVRQVSMLGGGLRTGYVKKLQRRDKTFYYYNKRRECDDKEVHKVKMLVLYERVFVVLLVNYMLSI

SEQ ID NO: 938606 - protein, 176 aa, Homo sapiens
  misc_feature (42)..(42): Xaa can be any naturally occurring amino acid
  misc_feature (49)..(49): Xaa can be any naturally occurring amino acid
AHPQLNSELEHSSSQYMPLCREQQPSTQPLHPFPHHCKNLSXRLAGTHXQGRPFLPGPCTPTPTRRRFLPMKWMITQCRDNNHQRTLMPEQLSHKLPEAFHNQGPATQSKPDLHKMAAGQPCPGPLPLVVDSPRGAPGPLPHETVSATPTLKTTCGSRMYSFVSVAGLVRKMPQHI

SEQ ID NO: 938607 - protein, 88 aa, Homo sapiens
TRPQRGRARSVRTPSLRLLPFSSPFSLVQLLEKPCAFVQRGNKPFDVVQGAVENLGLLLYFLSKHGPGLLLRFQRGKTWLVEVHCGPT

SEQ ID NO: 938608 - protein, 112 aa, Homo sapiens
ASHLTATHSRIWICGESFLRRQHAVVTWNCKAIFLEAAALPQNNDGRPSGSWVLSGSSWVAEEMKTGCERNGFKLPEEQLQGKAAGIGLLSSLSRSAFSSVMSVGMLVAHHL

SEQ ID NO: 938609 - protein, 49 aa, Homo sapiens
MAEEGIDAGGVLPVTPALQEVLKTALIHDGLSTWKSRTFPKPLKKPNPS

SEQ ID NO: 938610 - protein, 49 aa, Homo sapiens
  misc_feature (33)..(33): Xaa can be any naturally occurring amino acid
NVGEGAVFWRQRFPPPANPEAAFPSFGFELPPXRERWEGALAMGEGPRG

SEQ ID NO: 938611 - protein, 143 aa, Homo sapiens
STPVIVGPTEEIRAPHAAIGKSPCWLGSTSSGAKKSQTPTHSHSSCGGLWFNLTAQDYVIQFAQGDVRLCLSASGPWTYVASSTCVDPRRRFLGGVCDLFDRGDMKSGARVGLARARPPERTWEAGDTQAQYTRVPPKVMHAH

SEQ ID NO: 938612 - protein, 130 aa, Homo sapiens
SYALVLWAMQSGSIAEAAALRRVSVILVVLFGMRYLKEPFGRPRSIACGLVLIGMFVMKLYPSDRTKKGMGYDSRFLVCVDRYFSAVSVHGRGQVQRWQVRARQNHDPRAFLENLEGFAKRAHSAQLNSF

SEQ ID NO: 938613 - protein, 61 aa, Homo sapiens
SWGVKILHIDDIRYYIEQKKKELYLLKKSSTSVRDGKPCSPFDVDKPSSMQKQTQVKLRIQ

SEQ ID NO: 938614 - protein, 101 aa, Homo sapiens
FFVRQSFALVAQAGVQWHDLGSSQLPPPRFKQFSCLSLRSRWDDSHAPPRLANFVFLVEMGFLHVRQTRLELPTSGDLPASASQSAGITGMSTTPGRKSIF

SEQ ID NO: 938615 - protein, 58 aa, Homo sapiens
DQTLDRHTGTQKTLMATPSLLIPRLQQAGFSGSCFCLWTQCTDIVAKAKASLARCTSL

SEQ ID NO: 938616 - protein, 54 aa, Homo sapiens
  misc_feature (28)..(28): Xaa can be any naturally occurring amino acid
GPESCGFDAGVGATQAARSRSPVQRVPXSSGPKSRSRPPRPTPRNWLGSAPRWL

SEQ ID NO: 938617 - protein, 30 aa, Homo sapiens
SFGLSRMQDSGDHIILFFILIEMKRESFLI

SEQ ID NO: 938618 - protein, 87 aa, Homo sapiens
QLFGIVDRVEFCRRNADAVQETLLLTLVLRDFEGSGRRMDRNAPGQHLGRSDRDVLEFVGHDVGGGGEFGKRRGIVIGGDDTAGWRP

SEQ ID NO: 938619 - protein, 239 aa, Homo sapiens
SGFDGLNRVTKGGTMGVTSIFSRLNLTICRVNRDSLNLFRCRLAISITKLLVSATLSQSPHQLMGYQNVEKSVQNEYKVLLRDRASANLVSLSNQQRELLATAPWSGQTSSSLDHIVSDIVNQTGPDSGLNLQNNMADSGKLGPFGRSQHVIAEQYHTVLKLQGQVFCQKAALVPTRINQQPITNEPTRDRNHVLSRMLRSPNTNLPKLQQTAAPYARILSLIGVPHLAPILGLFGKKY

SEQ ID NO: 938620 - protein, 45 aa, Homo sapiens
DNRADLLLGSSLAASAELTCGYGDARIDAGRSPRTRRPPGPENNA

SEQ ID NO: 938621 - protein, 30 aa, Homo sapiens
LLLLNSRHVDGRCWCWQKVSWRLDHSRRAK

SEQ ID NO: 938622 - protein, 90 aa, Homo sapiens
TIIARRGKFSVWIGGSNLASMSTFQQMWITKQEYEEAGHFHRYTANASRHNPHPASDFSRRRIFSMGGKLSSRHPAITIFETTSVADIVN

SEQ ID NO: 938623 - protein, 112 aa, Homo sapiens
  misc_feature (15)..(15): Xaa can be any naturally occurring amino acid
GRDYYYYYSKFAGRXDPRQDAYSSELREEACFPSLPATSSRAKQSPPAAQHFHQNNFFTDCSSRGDHHLTTHQVQDRIFQLHPSCFPMFADRWACLQEPKSPQPECNLPDPC

SEQ ID NO: 938624 - protein, 100 aa, Homo sapiens
RRRFSLAEGEGEFEIACEFDDLPAALVLDENAQTSLAHEFLLNAQGSLEIVKTFKATTGKLDRTAIRCLHPTSDKLSKLLSLKITDLKKLGEQEGISDRV

SEQ ID NO: 938625 - protein, 34 aa, Homo sapiens
RCVPSRMRKESRSNVDEYEPEKVLEAKKKKKKVD

SEQ ID NO: 938626 - protein, 40 aa, Homo sapiens
LPQKGATVNLSSGSQPQWLFETWPILLARLDEANADPLAS

SEQ ID NO: 938627 - protein, 63 aa, Homo sapiens
MWRWSRNLLISTDPPTSASQSARTTSVISHCAQPQNYLLIKKIGQAHVHACNLSTLGGRGGQI

SEQ ID NO: 938628 - protein, 104 aa, Homo sapiens
  misc_feature (20)..(20): Xaa can be any naturally occurring amino acid
MDRVPGSGVTEPTEAALRKXMVGHRGFWLTLSLEDLTNTRKTTMTKSTIALTELVEKGADADLLKQMIQFVAQRMMELDVEGLCDAGFDVKSPDRVNSRNATGI

SEQ ID NO: 938629 - protein, 109 aa, Homo sapiens
  misc_feature (81)..(81): Xaa can be any naturally occurring amino acid
ILRRSDVFTQLGEDLTVQATGSFFADGLQAQADLAVGRISLIKPFSSLPPAELEHFVLVNQPPMLVVDDRLEAHVGGFGQXGRLPGRALYWRSLVQVAIQAARGGDTVD

SEQ ID NO: 938630 - protein, 87 aa, Homo sapiens
  misc_feature (50)..(50): Xaa can be any naturally occurring amino acid
MLGSSTVNLIENQVMGSDIGGGHRRSIGLVHDLHIRPPERQDHLADAARXRSPGPGRGAADSKKTHSRLKNSTLGQQVSRQVQRRQA

SEQ ID NO: 938631 - protein, 119 aa, Homo sapiens
  misc_feature (105)..(105): Xaa can be any naturally occurring amino acid
MPRSPRRCRSGCSACCTRCTGGIPKPASDPCSPGTSGTPVTEVGEGDDALAPDPEHFVEDLVRVVHGMQGLGHDHDIEAVAGKVAEALVQVLLDDVDALGHAGRXVLRVVFQAVAVEST

SEQ ID NO: 938632 - protein, 35 aa, Homo sapiens
IFEYKYFSNDMIYDSPVHKPPLSIFTFTSHYSLLS

SEQ ID NO: 938633 - protein, 133 aa, Homo sapiens
ASPMRSCSPDHGQYVESFRPLVNHSRQHQCTQDSMHQKLPGIIGRYPHCCLTNQITGQMPSLTPVLLALRAAEAGALLAASDLRPSLGNIATSPLSQKLTKLAEQGGMHMLLHTAEVGTSPKSESPRLQSTYG

SEQ ID NO: 938634 - protein, 187 aa, Homo sapiens
NIEVLQNLVYLRELYLIHNGIEFIEVLENNIKLTMLDIASNRIKKFENISHLTELQEFWMNDNLLESCSDLDESEGSQELGDSLPVSVTPAEKDPQYWLKVMLALLFRSSDRCQFRQVLSLSWLFMWSLSSEELPSHGFLTHLLLLSLHYIISHKPNGYKGTDDILLRMPYTYFQMPLQLNLATLSK

SEQ ID NO: 938635 - protein, 97 aa, Homo sapiens
GKAHPPELNKFRTSKLSLKFTLADHVHGLLRGSDPFMNLVMQQRVETATSWTPEHYWNAGNPRNSSHHVRSLGTSIHHGCPAEKPMSSLHRARSTLP

SEQ ID NO: 938636 - protein, 98 aa, Homo sapiens
PLGMTQDQAKRLAQNSLDARLVKPYITDRSGEPGNFQLPGFTDLQRPGLIDHTDPVRLQTQLQQRDPQRTAQVLSLFAPIKTIAHDRLRQCLGKNPQR

SEQ ID NO: 938637 - protein, 90 aa, Homo sapiens
TQRQLPAYEWRFDDANPPVHAWASWRVYQQDKALNGVGDMDFLERIFHKLLLNFSWWVNRKDAEGRNLFQGGFLGLDNIALFDRSADLRR

SEQ ID NO: 938638 - protein, 74 aa, Homo sapiens
STITLALAFPQNYESLNSDEIIGMAKSDDVATPPAGKGKLKLILLIVLALFLAIGLSVGATWYFMHSAQSKPAA

SEQ ID NO: 938639 - protein, 120 aa, Homo sapiens
ARRRKACSPQLLRNAHDSATGTRVGLEFGFGSELRFAMDFDFRHKGFVTYRQLARQVVGFALDQTTHEQFDDAVFQGVEADHHQADRHFQGFQGGFEAGFQIAQLVVDVNAQALERTGVD

SEQ ID NO: 938640 - protein, 111 aa, Homo sapiens
GRRSLLFCSDLSLWQSLCPCILGVWPYQLSYPTPSDILNSARLNHKKLQSKVNTPPSSPQPQWALTNVLSVMAFLLFSPQIKALLPPLPIGKMGEKGLGKFLTLPPVIAGR

SEQ ID NO: 938641 - protein, 51 aa, Homo sapiens
GFLLVIFAIEIAAAIWGYSHKDEVIKEVQHALGLLHSPAAAQEAHQHHEGA

SEQ ID NO: 938642 - protein, 92 aa, Homo sapiens
SDNYDAIIVPLLLGREPGSYTTKKYFLQARQRWRSMCHQCVQGSAFIGFHAFAQQQLFSTEWVSGGLLLFDDVQGGVGRIVLVRLTLCQPSA

SEQ ID NO: 938643 - protein, 104 aa, Homo sapiens
SGPYSLLNWRAGSTSTLPDLIPFDSHPLHSLLLHSARFHPIPFHSIPFHFHSIPFHSVPFHSIPYHSIPFHSIPFHSTLVDSIPFHSVRFEGIPFHSMMIAFGR

SEQ ID NO: 938644 - protein, 31 aa, Homo sapiens
RRAKPNFRDVIWLQFGAHIFQANPMASMTFS

SEQ ID NO: 938645 - protein, 121 aa, Homo sapiens
GQQEPRCVPGLTRYSPAVGCTPPSRAPRCYAGRRALAALSVRPCCVLRLSAGLSLPLLTSVCLLLFAVHFAVPRPVLGTGKGWRVLRSEPGLRWLLVALTAPRHWYASPAGCRDRQWTRFV

SEQ ID NO: 938646 - protein, 120 aa, Homo sapiens
NKGSGTGSSTLEPTSLSVAPVTGLCLPLDGHVDALLILQALLLPSLADGSTPALRFVAVGDVGSLPNAPFHTARETANAKEISLTVQILGAIGQREEAKLPPKSSIFLLLMFNKRICSKA

SEQ ID NO: 938647 - protein, 78 aa, Homo sapiens
RLGRLVTHVSKKDLYLAVVQPTAFELTQMQPLDQDIYGREDVGSPKLFYADHPFIFLVRTPKAAPCYSLSPWDQAPPE

SEQ ID NO: 938648 - protein, 84 aa, Homo sapiens
LIPILLKLLKTKIFLEEKGLLPNSFYKGNITLIPKPDRMQQENDRPTSLMNTDAKILNKILTNQVQQYIKKIILGYEEGKNRLT

SEQ ID NO: 938649 - protein, 90 aa, Homo sapiens
TLWNRVEAPPRVVPWNVTLFSLLVAASCLEIVLCGIQLVNATIGVFCGIAGKNRTPLTEAPLTAGYTCSFLDAYLALLTPLLARINCFAL

SEQ ID NO: 938650 - protein, 93 aa, Homo sapiens
PLKKIMEACAGGFSSSVGYPGRQYYFNSSGSSGYQDYYPHAGQITYEEAPRNYDTYTAGLSEEEQLERALQASLWDRGRSLAPFSYFKAYLMW

SEQ ID NO: 938651 - protein, 101 aa, Homo sapiens
TFYVAAGKRACAGTLPFIKLSDLMRLIHYHGNSMGDTAPMIQLSPHCPALDTWGLLQFKVRFGWGHSQNISGLCNLITPSVLLSFNCNILTACGGLDGNPV

SEQ ID NO: 938652 - protein, 135 aa, Homo sapiens
DVTSPPPSPTTFHTSLAHATCEHHAHVFGGRRERCPARARHEAPCVLDATTLTWLQPETPRTPPSPRHGHVMVAAGTQLFIHRRLAGDRFYDDLHCLDISDMKWQKLNPTAGCSSRLCCPLSCGHGKTCVHLWWN

SEQ ID NO: 938653 - protein, 159 aa, Homo sapiens
PYNLIDPPCLSVLAIVVNGQGGCCPSVSAKSLILGQRRPSVATPKRVGVREKADSPAECRKRMRDDIDRRLGQDLAMRCLVFEGFTERRVFQRLHDFLDDAASEIDTARAMKVSSKVTGKTAEIGDEQRQGFLCLADSPERPAAVMSAGSAAWRRSGNL

SEQ ID NO: 938654 - protein, 53 aa, Homo sapiens
MMLYFLVVFLGTRTTYSVTFWLQEPRTAMGNGQWFRSGPNPDSFSLLWRSAST

SEQ ID NO: 938655 - protein, 67 aa, Homo sapiens
SAPSCARKSLPKALVLKLGSLGLRVGGSRRHVGYLQVLEEPGFRRIPELWHPFSVSPSPFPLLVCHG

SEQ ID NO: 938656 - protein, 151 aa, Homo sapiens
  misc_feature (69)..(69): Xaa can be any naturally occurring amino acid
  misc_feature (78)..(78): Xaa can be any naturally occurring amino acid
LRLCLEERDWLPGKTLFENLWASVYGSRKTLFVLAHTDRVSGLFDRAILLAQQRLLEDRKDVVVLVILXPDGQASRLXDALTSASAARVSSSGPTSPVVAQLLRPACMALTRDNHHFYNRNFCQGTHGRIAVSRNPARCHLHTHLTYACLI

SEQ ID NO: 938657 - protein, 144 aa, Homo sapiens
RRSDTIDTQDNHLVRTYLSKTQWIMVHMMSLHHLTIPYLRDEELYCNVVELKYTGNANALFILPDQDKMEEVEAMLIPETLKQWRDSLEFREIGELYLPKFSISRDYNLNDILLTLDIEEAFTRQAEPVRDHREPEPRSPPSGP

SEQ ID NO: 938658 - protein, 130 aa, Homo sapiens
  misc_feature (37)..(37): Xaa can be any naturally occurring amino acid
  misc_feature (47)..(47): Xaa can be any naturally occurring amino acid
LDLGAFAGLVKMMVMQMERRLDQRFALTDKDSERLRXEEISVERLPXDMPVHYVRREDYVRGQTVIEAKLDALALKLETVQLKGIEVMNIDAAKTRRESLRWYIIKTLDASRPVDPHEAVVLSTIQGIYR

SEQ ID NO: 938659 - protein, 69 aa, Homo sapiens
QLEQAQAIDDLMPAQKLKPRPTPDTSPAASGRIVLAVRTMHPCCVPSGEPVSLGVELAVTRGRVYVFEG

SEQ ID NO: 938660 - protein, 73 aa, Homo sapiens
LYPQRMIISRHLRSACSIPFHPQRVIISRQLRSVCSLAFHPQLHAQRMIICKTPPECVCSLPVHQQRMIISRN

SEQ ID NO: 938661 - protein, 113 aa, Homo sapiens
SVALMFRTRCRSTCSTQMRFECLHGLHRHLARAIQVPRELGMLDEVAGGYVTLHHLRGYEVVIFAVLLAGRRVPRGMGHREAKDGGVLLEQPLRQVLFPAREGPLSTISLGPD

SEQ ID NO: 938662 - protein, 91 aa, Homo sapiens
  misc_feature (4)..(4): Xaa can be any naturally occurring amino acid
  misc_feature (31)..(31): Xaa can be any naturally occurring amino acid
VDGXIGACELGQGNSRRQPGEDVHAEQGNAXKHQEQLHQQRRALEQLDIGTGDVRGKALVLMRMVITSKPITPPPINATSDTSKVHCKPVS

SEQ ID NO: 938663 - protein, 169 aa, Homo sapiens
AAAYHYSISARSTRTEIPTARIGKQQLPTPMYLQNPNWRSSLRLRGINGVSPKVRQVLQLLRLRQILNGTFVKLNKGSINTLPIVERYIASGSPICTSVNELIYKRGYAKINKHGIRLTDNALPARSLGKHGLICMEDLIHEIHTVRKRFNQPHNFPVGLPIVFYTRRN

SEQ ID NO: 938664 - protein, 165 aa, Homo sapiens
GLLLPNSRPVRQEKKQEVPAGRETLTKKRRNFRRAEALQRLTKKFAQKTLRQARSKLISEKAKHHHKEPRQMYRTQIRMPRIARKAGNFYVPAEPKLAFVLRITGINAVSPQVPPVLQLLRLRQTFNGTFLQLNHASLNMLPLVQTYIASGSPKSDVSKWNYSTS

SEQ ID NO: 938665 - protein, 68 aa, Homo sapiens
SVTSPAAPVCPMCTRPSGGLVATRSKKLHVKCHYSCTRTIASVSSVSRATENRAISAVFRPSYVQKKP

SEQ ID NO: 938666 - protein, 107 aa, Homo sapiens
DGSKYNSTCYLATSQMGDSEHSLKCHTWLLSARSNLLSENVSANCCQAFLVVPRYMNKTSLDWFTESRIQQHPGARLLKTLFYILYIYGTQQCDRRVWLGLNTSSPS

SEQ ID NO: 938667 - protein, 149 aa, Homo sapiens
  misc_feature (37)..(38): Xaa can be any naturally occurring amino acid
NIGQSHPLPPGWVLKLAWSPPRFPRGVHTSFLGQRLXXTHIVESRLGTFPLPTYLPFNSRNPILPRDYAYDHPCNTIMYLSVRVCVCVCSGGRAASPKISAVCAFFFHTFVHTIPCPGTTPWHYRMLGSSGRAYARSPLSFVFDIFIFA

SEQ ID NO: 938668 - protein, 66 aa, Homo sapiens
NTCCLGFIVFAYFLKSSDRKMVGYVTGLQAYVIHLLKCLIIWALILGIFMIILLIIIPVLVVLAQL

SEQ ID NO: 938669 - protein, 61 aa, Homo sapiens
CCCCGPCSHGALGHHHAQVQQLLGDAHVVARQDPGPGVRAVRTPGAHHGAHTRHNPRTDGS

SEQ ID NO: 938670 - protein, 73 aa, Homo sapiens
DKSQISLGSRIFCIGMNWSLLVEIFSRPGAARAPAQHRLRLQLLGGAGGSLFRWLRSSSGPAGQQPGPTAAEP

SEQ ID NO: 938671 - protein, 108 aa, Homo sapiens
  misc_feature (18)..(18): Xaa can be any naturally occurring amino acid
  misc_feature (41)..(41): Xaa can be any naturally occurring amino acid
KGGGCGEGTCGEADVGGXPRPGLPGTPPPPFTQRGPGTPLXVAQPSRSDLRAPFQLPLPGRVSGYGSRGGRRPPSAPDLDAGEALSRQAMATRWLLCLYAAHSLLSPR

SEQ ID NO: 938672 - protein, 101 aa, Homo sapiens
  misc_feature (33)..(33): Xaa can be any naturally occurring amino acid
IFQDNSILNNTYLYHLLKAGVTNARGTVRSLCXKMSTSWKGPGKGLLGSAERELLRLCGSGLAAVPLVAPGINARTRRSMAPSRPRLAAHPRSAAQHACSR

SEQ ID NO: 938673 - protein, 111 aa, Homo sapiens
RGAPPPLGGPRAFFPGAFLNPPGHPLGGGNPPPPPPFLDRGFRGAPPSLPPGAPFWGGEFSVLGGSKRAPPPLVFLAGLLGGGKKRFPLRRFPPPGVFFVGNKKIFFPPPL

SEQ ID NO: 938674 - protein, 38 aa, Homo sapiens
SRDITTLLQSFRIYVVPHTVEYLTWTCWSAAVSPGGDS

SEQ ID NO: 938675 - protein, 106 aa, Homo sapiens
STLQHRDSTHSHRHGDQFSQQAHPPVIGFVPLRAEKRCKHNLPNRVLGLLLEITAHHFKTLKLLKGIQSLGLRALPWAPGTQNSSSSSTGPLSTMGSGASQLAPEV

SEQ ID NO: 938676 - protein, 68 aa, Homo sapiens
TMHVYTYVTNLHVLYTYPKTKSIIKKKFSNVEILSHFSNKPCLLVQNKKRNRKAELTYILEFSDRDSH

SEQ ID NO: 938677 - protein, 110 aa, Homo sapiens
ESLAGWEYIIRAQNPKLPAVHSSLGGLVNLTPRISHPVAQGTSPLLVRFLALDIVASSTCVDPRRRFLGAYVTSSTAGHEDGARVGLARARLRSGPGKARPQAQYPVPPR

SEQ ID NO: 938678 - protein, 73 aa, Homo sapiens
SEKKEYSVAPNVSFKCKWDAVQFIEKKSVQPGAVAMDFFDNYKKQKDKQKKKRKAMAGKGQLEKSGKPPAAPS

SEQ ID NO: 938679 - protein, 144 aa, Homo sapiens
  misc_feature (3)..(3): Xaa can be any naturally occurring amino acid
  misc_feature (32)..(32): Xaa can be any naturally occurring amino acid
  misc_feature (38)..(38): Xaa can be any naturally occurring amino acid
TSXHVTQGLLLLCSEIRGHVEDSTCLRALRRXKVQLQXGSKEVCDQTEGAQMAPRRQLRSKGKMRRIEKYIVTPRRGVEATQASRSTELKTNRRERKVTVELGANRRCQSAEADSEGDHEVPEARMRNEGETAKTRQNRGTREK

SEQ ID NO: 938680 - protein, 61 aa, Homo sapiens
AGEEVACEPLLLAEKTKPRRKFKTAGDESRGGECGIRAKKDLGHCKRETEFWVNAGLLSSR

SEQ ID NO: 938681 - protein, 122 aa, Homo sapiens
  misc_feature (41)..(41): Xaa can be any naturally occurring amino acid
NEASLDHSTRGGCVFAPVERQRGGAGWQTSSFQLCFVQRGXAEASQWGVAGPAKKMSFYLKVRLIQWVQNQDADIGVDYGTGGVVACWVEMKEKPRSSHELRHVMYFFLVLLGWFFVLSPML

SEQ ID NO: 938682 - protein, 129 aa, Homo sapiens
  misc_feature (25)..(25): Xaa can be any naturally occurring amino acid
  misc_feature (37)..(37): Xaa can be any naturally occurring amino acid
  misc_feature (46)..(46): Xaa can be any naturally occurring amino acid
  misc_feature (64)..(64): Xaa can be any naturally occurring amino acid
  misc_feature (80)..(80): Xaa can be any naturally occurring amino acid
  misc_feature (83)..(83): Xaa can be any naturally occurring amino acid
LIKSLGAENPEELSFVICGLSLLPXQERVPEMKSGDXIPRPPGLRXVSCGDMVGDSAMYGVVSXTPEARSVADALLLGTXRAXSGNVPKKILSGGRSCAGCRRCLCRASCGRGVPARHAQEPARHRGGQ

SEQ ID NO: 938683 - protein, 99 aa, Homo sapiens
KSRSESLCPLTCKTVHIHLFSELLYHKYECRLDLEHVTLRLSPGSARGSVPSRLVGALVLKQRPRCPSGRGAAYCGLLKYKGSTARVKHEPAAAVATQG

SEQ ID NO: 938684 - protein, 110 aa, Homo sapiens
  misc_feature (52)..(53): Xaa can be any naturally occurring amino acid
SLGGPLIPSGVWVHPWGVCRCDGTRRSPRLKPGPCAAGLPSGCVDSGPSQQXXSPALGPRQPRAPAGEGYWERLGVGEVVSGIVSPLWTNVYVRSQFVWLSKNKNIFRRK

SEQ ID NO: 938685 - protein, 87 aa, Homo sapiens
GQTYQRTVGLVGHYGTAMAPPSGKWRRKLEITQHAKYTSSFCGNTKMNRRAVGIRHCRLLHEDSAWRRWTYNTTSALTVTSKQLKDQ

SEQ ID NO: 938686 - protein, 94 aa, Homo sapiens
STSSRIHADDSCAPPTQDRINMLKPMPNTQRQSTQRRLHSAATNGSAINCGTPMISITGAVCSGRSLLPEPGSWRNDGHRQQHDQHAGEHNQRE

SEQ ID NO: 938687 - protein, 143 aa, Homo sapiens
NRGWRPWLFLLSEMRFPAKLLAMLFCIPKAFEDRLGAHRGGRCGASLRTHSSYGQHHLGYLLSLGVLSCLGFVVLKLLTISSHGGVSSSASQATSGPRFGTAPVSLCVFVSDAFQQSPKISFLLREERLKPGEKLAETVDPPH

SEQ ID NO: 938688 - protein, 72 aa, Homo sapiens
  misc_feature (1)..(1): Xaa can be any naturally occurring amino acid
XRRTTFGGPSEKAMRREPGSPGRTAGLWGVPPKKKPSGPRKVTVFQRERIDYPVGAHKNSTSESSTSDPEVT

SEQ ID NO: 938689 - protein, 102 aa, Homo sapiens
  misc_feature (98)..(98): Xaa can be any naturally occurring amino acid
CRSSCSRSTLPAWRGFLSTEAVSPGGLHMRIWLWPCSREAEGAAVSFSQEVVLGARSGPGEAVEHWAVRSGSWGQRKGACPGNAGWPFREVVQGFCSXWCRS

SEQ ID NO: 938690 - protein, 67 aa, Homo sapiens
  misc_feature (5)..(5): Xaa can be any naturally occurring amino acid
MRDEXVQSYHEGQLSTRAAISRAWGGATDPIDQVGRVTAGLARKVRSPDATKPAQGGSGFALFGRGN

SEQ ID NO: 938691 - protein, 104 aa, Homo sapiens
  misc_feature (90)..(90): Xaa can be any naturally occurring amino acid
MGGALSPPLQYHGHGLFSGRPPPPPPIFCGNFGGPGAQAPHNPGAPGAPGPGGLVGLRGPGIRAPVGPGLWGPPGDHLLTPRLTFLSWKXAFTRFYIGKWMGLE

SEQ ID NO: 938692 - protein, 106 aa, Homo sapiens
  misc_feature (9)..(9): Xaa can be any naturally occurring amino acid
KKHLPFNRXFDVNTSAIQVIIEHIGNLDRAYEFAERYNEPAVWSQIATAQLQKGIVKEAIDSYITADDPSSYMEVVQAANTSGNQEELVKYLQIDRKKARESYVGD

SEQ ID NO: 938693 - protein, 45 aa, Homo sapiens
DCQTMTYSTREEAVALPLPGASVDGVSLLALMGVPPVRPSARSLC

SEQ ID NO: 938694 - protein, 89 aa, Homo sapiens
LPFFCTLAANVVLNRFKVFPMLVLLLEEVFCSSVLHDFHCRWTFVLSSVLSPDDPKFREDERCSLQVQQGNLRYISMTMILHLQLLALR

SEQ ID NO: 938695 - protein, 76 aa, Homo sapiens
NYLKVLSEHGFCPITSDIRYGQTFYYAEDYHHQYLSKNLYGYCGLGGTGLSCPVGIKKYFLRSWWAFDVSVKMLSS

SEQ ID NO: 938696 - protein, 63 aa, Homo sapiens
VPCEKAAFDVLLSLCEAVRCCFHGCCGGVTAYPDRSFLEDLDNASGIYASELELAPVRTSPYS

SEQ ID NO: 938697 - protein, 54 aa, Homo sapiens
LNEMWKCQNMLRSHVRELLDLHKQPTSEANCSAMFGKLMTIAKNLPDPGKAQDF

SEQ ID NO: 938698 - protein, 148 aa, Homo sapiens
  misc_feature (48)..(48): Xaa can be any naturally occurring amino acid
APEFCQKYMEQASAQTAFISVCGYTPYHVTRYPKHVVLCWLQRLHTTXAPAFGKPQGTVARLHTGQVIMSIRTKLQHQEHLIVALRTGQVQLSRPPEDPHLKELGLHQVQCSLTFEDTVADNRLIPDGCGVKHIPTRAPLDKCRALHP

SEQ ID NO: 938699 - protein, 96 aa, Homo sapiens
SSLSSQNYSKPADVTPLKDFSEGPKTDATDGTDYTCLSLYDILTLFHGARPIQQICSSDAYCSEVKATTLGEPQGVDHLRPGARDQPGHHGESRLH

SEQ ID NO: 938700 - protein, 130 aa, Homo sapiens
LILANNIDTVRLLNAVRCNLKLILYLSQHRRNQGSLKDYYGSHCDFGLHTSRPAWTLSVDLNNHIWCPHRPYLGIHLIPTYAYFAHIPRRPSLQKYQFRFEALLAATAETQITIEHIFWTKAHPSVAENY

SEQ ID NO: 938701 - protein, 92 aa, Homo sapiens
SPLLDLDLFNFDCQRRRGPLRLTEPRSLRAWRLCVKPVELLHGRGRPGARGSGRSMRVATACRRPTRRERRAKLQQCRAERVRIMREENARL

SEQ ID NO: 938702 - protein, 89 aa, Homo sapiens
  misc_feature (69)..(70): Xaa can be any naturally occurring amino acid
VVPICAGLRHECLPGRAEGDAACALLKSGVVRVRVEFRKLDPRYGVGVVHTHRSPRRLDLHATAAFCCXXWRPPQGRGLALLAGRFGLL

SEQ ID NO: 938703 - protein, 88 aa, Homo sapiens
MEAQNQPVPAIPDSPRPSHSFSASEPLRVLLSFRTTELLSLHFYCLQLLESSQSGCLFSQGPGPSCPLVLSNQLSEHFNLVNKNLLTL

SEQ ID NO: 938704 - protein, 129 aa, Homo sapiens
  misc_feature (13)..(13): Xaa can be any naturally occurring amino acid
NPAAPLPRPLVTXAKGSLTDSFPDLPQLAAEDWCCLIALEAPWTITDAALWITLTVEVPPGLIAITSKDSQLYEDTLAGRSVLIKNLTPQTLQPRWTGPYLVIYSTPTAVRLQDPAHWVHRSRIKLCPS

SEQ ID NO: 938705 - protein, 82 aa, Homo sapiens
  misc_feature (27)..(27): Xaa can be any naturally occurring amino acid
NHHFTGYKHPAAESVLECADGLTRHWXYHPLSPPGAGAACRSALCGHSRTVTAATPWRCVGRQAALISPLLQYSSLLLRGGE

SEQ ID NO: 938706 - protein, 85 aa, Homo sapiens
VGNGSGFSTPTTLTSCTVWGLPGLSNTHLCGWELGSATSLQLLRDTAILYAKRDGGSMFPANGGAINLYRKLTFAITPLYNRFTL

SEQ ID NO: 938707 - protein, 115 aa, Homo sapiens
VWGGPFFFPLGANRGGPKKTHPGFFGGPGGKQGVFWAPEKKQGGPKGRFWGGGFCIGKKALGGPPGSPRFGEPLGGGPPGKRPPFSGFQRPFYRFRERRVFWKVPRGGKKMVPPL

SEQ ID NO: 938708 - protein, 135 aa, Homo sapiens
  misc_feature (131)..(131): Xaa can be any naturally occurring amino acid
MLSTLRALSATEAVGVSGADRGLLGTVGAEMLVEQERGGSGGFSILTIMRHTGNTVGPGLQLTLYRKKQGQQHKALVGLSIQADELTKGMEAAHRHTLRGMHSQEIISIRQNAIRVNMLLIHGPEREATRXRIAI

SEQ ID NO: 938709 - protein, 120 aa, Homo sapiens
GFLELCPVPSTCPEFGPGAPHPAEGATPGFLETQEALGLQQSHSAAEVGLGVPQRQLFYGGSAQHISGQAEKEAEAATYLLRPAKTARSHKGLTSYQEDPTPEDNRSDRRKQTMLSSTEN

SEQ ID NO: 938710 - protein, 104 aa, Homo sapiens
MDCTRPGLWGEMSDCLRCMRVNWPRILLLRLWKTAALEFAVSTPGLAPKMLVLRSRFPLSQKKGLQEGRGGCFGGEGIARWFSFCSQWYLQETLSAGGVRELSG

SEQ ID NO: 938711 - protein, 63 aa, Homo sapiens
  misc_feature (29)..(29): Xaa can be any naturally occurring amino acid
MVVCEAVVDLSEVVSGRSFLFWCSMNESXRSLRVLVQERCIRGRGLPHSPLLFSRFRWRWRKS

SEQ ID NO: 938712 - protein, 82 aa, Homo sapiens
MRKQLMIPALLALSVGLAACSSQPNANLEQARTNFSGLQANPQASKVAALETKDASDYLDKTNKAYQDHEKVETVDQLAYRR

SEQ ID NO: 938713 - protein, 66 aa, Homo sapiens
MTLAQVTRMNCEINEVIMAKKPNYNTTTKESDYKMDKEHLTKDAEDDIQIANRYMGYMRRYVASPV

SEQ ID NO: 938714 - protein, 39 aa, Homo sapiens
MHRILYHPPKSLDQITSFNTQSHLYRVPKAYTTNVRITQ

SEQ ID NO: 938715 - protein, 103 aa, Homo sapiens
HAKRKPSPFMSDRPDRIELLCFRKHVHLARSPAICCPAQNVAPGPTPLSPALLGFPFTTCYLISSQNLLLVSALDIPAFPQVCKTPHCMRYQLLSSGKLTDSS

SEQ ID NO: 938716 - protein, 77 aa, Homo sapiens
AQTARSPGREEGEARPDLAPVQDMKDPFMVAEAWVAAEPPGGGGASLKAFVPEVSLPRTSSPHTPTLTPLLGSMVPL

SEQ ID NO: 938717 - protein, 123 aa, Homo sapiens
VLPTSRRMARPRQTFFALTNGGFSCPARCAWPGPGSKQGGLQQAGAASRPGVAGRALGHLCPAPKSPPLHDLEPAPHRLCTSVSWSAPRGQERTPSRSVPGLTAQLARRLECAWRNDCVAPVE

SEQ ID NO: 938718 - protein, 31 aa, Homo sapiens
MFTWVHGPQWLLPQKGAPHTRVDDFSHGRKS

SEQ ID NO: 938719 - protein, 123 aa, Homo sapiens
TPRNFSWGGPAGTPRREPFLKPVLRELPSPIPVIFAKATPVDRQETKQTYECPVYRTKLRGPSYIWTFRLKSEEKTATSRPGFKKSSCLRLPSSLDYRCPPPRPANFCILRRDGVSPCRSGWS

SEQ ID NO: 938720 - protein, 140 aa, Homo sapiens
  misc_feature (50)..(51): Xaa can be any naturally occurring amino acid
ALLLSRTLAAELTKMHHNQWPARGSIATPSIPHNREALSISIASDDHGVXXKGFIFERRLYMALVSHEMNSSRTIAVSISQKLLINHHLAENLLQILEISVVRRGTQHGTVVTRIMREIFGKPAKEPLDPSMFAANTNPP

SEQ ID NO: 938721 - protein, 62 aa, Homo sapiens
MVTIGKREKHQRSHHPILPDWQLAPHLQAHPGPKVGPYWGPTLFCPGISLPPDAICDPQLTP

SEQ ID NO: 938722 - protein, 106 aa, Homo sapiens
HAEVRAPVDGIVGLHDLQVGEYINVGQRRCLLVATSPIWVEANFKETELEKMKVAQPATIEVDSYPGVKWKAHVASIAPASGAEFSVVPPQTPTGNWVKIVHGIPV

SEQ ID NO: 938723 - protein, 108 aa, Homo sapiens
DGVCAAFLPEFLTSCDGVDANQKSVLGRNFKMDRDLRLITQNVHRLVDDLRYYRVCNDSLPPGTVSSSLLCLGTRTSLLHRRRLPATADVSQMGLGHTRWVLPPQATL

SEQ ID NO: 938724 - protein, 54 aa, Homo sapiens
TCDELLLGHEKEPAFRDYVAVARGNKDHSIRAQEPESGLSEETQVKCLRDQATD

SEQ ID NO: 938725 - protein, 37 aa, Homo sapiens
MPRSWVSVLGVFGQLTLCPRNGRVTGKWRGSHVVGLL

SEQ ID NO: 938726 - protein, 55 aa, Homo sapiens
MAGASRSGPLAPVAEEKEEAREKIMAAKRADGGAGSEGLGRDPAGEHHATQEAWR

SEQ ID NO: 938727 - protein, 61 aa, Homo sapiens
QKETNHLENDFKGDGMTELELRAQHRLQPIRRHPKELPQYGGPERTILKINYIFQCIPMEF

SEQ ID NO: 938728 - protein, 104 aa, Homo sapiens
  misc_feature (48)..(48): Xaa can be any naturally occurring amino acid
MTGAPQRKPAQWLGSPSCRPEVYIVFPAILTTQPEPAQPRLPEVPVAXRTVARAVLAFFLSFFTHLGTPGWLGLGYVGGGGGGSWGPLHSRPCLPDGWPRAASL

SEQ ID NO: 938729 - protein, 99 aa, Homo sapiens
WETEARSVGQAGVAGEDLGSRRGLPPGLTPCSCRSVAGSRDHRCLRTMPGYCCLYFVVEMGFHRVSQDGLDLLTSCSARLGLPKRWDYRRDSRARPTDS

SEQ ID NO: 938730 - protein, 124 aa, Homo sapiens
  misc_feature (44)..(44): Xaa can be any naturally occurring amino acid
KCEVTLQVPELIEDPIQKEGTLWERLQGLGLNPEASTPWRRGWXTPGAGIGAELWSQGLYCSAGRVRPERLRQLRERKPPFWLIVKHRLSRPTLSCPQGQQMKTQPERTNRPPQLSVRGQSNTE

SEQ ID NO: 938731 - protein, 85 aa, Homo sapiens
  misc_feature (11)..(11): Xaa can be any naturally occurring amino acid
QLSHANRQREXTLKHLRSVQGRLKDTQLHLDDALRVREDLKEQLAIVERRANLLQAEVEELRATLEQTERARKLAEQELLDSNRG

SEQ ID NO: 938732 - protein, 142 aa, Homo sapiens
MSYRQCSKGSGLECDQRVCRTNAPGRGLDGNNQALSPRASGRQKKLDRKRSRFNWLCCRPWQIVTEDKALKRNETILIKGLMAHTIQEISSATNSQQLIQRSFMNNRQLNKKMSLYCSKERRMPLFSLEQGRWGLTKDSLLD

SEQ ID NO: 938733 - protein, 104 aa, Homo sapiens
MRPVLRPLSRLDRKHGSIYSASEGPQETYNQGGRRQGKQTCFMWLEEEEEKWGEVPTLKQPGLLRTPSQQHHEDGAKPFMKDPPPQSSHLPPGSTSNTGGYNLK

SEQ ID NO: 938734 - protein, 101 aa, Homo sapiens
ATTAGSCHLRSSGSTWTRRAPSHPAALQVPYTREGPREPQPPAGPQGFAGSFCAEGSRRGAEVGWAPLEPQGTRRTGSLGVDSSPLSETLGPAQCGSGRRR

SEQ ID NO: 938735 - protein, 37 aa, Homo sapiens
QGLHVDPPAAQGPRPDPGAVDDVQAKDVRTPFLLEAR

SEQ ID NO: 938736 - protein, 87 aa, Homo sapiens
MATDQKTGRTRKRQRKPKPPKGQERNRHNQNPNTTEGPRHPQHPWPSQSDETIPPPKNGAQPWAPVRGRGRMSPSSCVCEIVQDVLK

SEQ ID NO: 938737 - protein, 33 aa, Homo sapiens
MAPRNEARGSLDSARHRRRAGDSPSSSPGSGGG

SEQ ID NO: 938738 - protein, 147 aa, Homo sapiens
PPTYCALAAPRPQPPPPPLPPRRRPPPFFSLLSPRRTPSPGPPPNQHPPPFFINPFLAAGPFKKRQTPPFPTFPQVPKGGRGTPGLELLFFKNPAPVFPGNGGANFWDPPLFLCMFVKRALLKHGNVLVCTDLDKWVLIKIPFAPRV

SEQ ID NO: 938739 - protein, 101 aa, Homo sapiens
QNEHEKWSIIIFTNNGKTSKILCMTAQIQLPHRGLHSMMKQKEQFAALAKFKSSIYRILIATDVASRGLDTPTVQVVINHNTPGLPKIYIHRVRGRPVQQR

SEQ ID NO: 938740 - protein, 129 aa, Homo sapiens
GKLICIRSLQPELPPSVPVRLVGLWVNLRFPNGQGCDNLWGRDKGMGLGVCVVAAREVPVVGGDDRAPPPLLDVLPVPLPTAGATRIGQDNATQIPQDLCIAVPLNGGPHLLGTWSDGELGLALAAWAS

SEQ ID NO: 938741 - protein, 45 aa, Homo sapiens
  misc_feature (33)..(33): Xaa can be any naturally occurring amino acid
GVALEVLEQKLVPAELRCTPLAIGLGPIFHEKXCFGRGGAGAFAL

SEQ ID NO: 938742 - protein, 86 aa, Homo sapiens
RRGLVLMGLTGEVWLLPTRRPEESPGEGCLGCARGAFSAGKEGAPTRLDAPEEGALVPSGIQAPLRLSRGLPPPTPPEVVKRVYEA

SEQ ID NO: 938743 - protein, 31 aa, Homo sapiens
MAYFMSWANRFHITSALILPTFSSWGNWLRQ

SEQ ID NO: 938744 - protein, 96 aa, Homo sapiens
RPHELLESQMEEGPWSLARSPGPSGAQGGGEGPGVDLPAPAATMSGPLVLPSSGVTQPSDKAASHMGAARTWGSSLYEEDDLQVNSYKNSLSHTRS

SEQ ID NO: 938745 - protein, 167 aa, Homo sapiens
  misc_feature (17)..(17): Xaa can be any naturally occurring amino acid
AIPGMNNITVILRNPEXLALDAIERLQRWWEENQAFETNSRFIEIPVVYGGAGGPDLAVVAAHCGLSEKQVVELHSSVEYVVWFLGFQPGFPYLGSLPEQLHHPSVLNRAYSFRQVLSGSAGRRLVFILLATPGGWQLIGHTSLSLFDPARDEPILLRPGDSVRFVP

SEQ ID NO: 938746 - protein, 114 aa, Homo sapiens
  misc_feature (48)..(48): Xaa can be any naturally occurring amino acid
RSQSLPILTEPSLDPFTAPFLWTTLHHLLPGPCENFLPSCLYPSPCSXALADDSSGFQNPLMIPSIDQSLPYSFKFLGDPGPAAFCILPTDAIVLASGLICPVSFLCVTGSFYP

SEQ ID NO: 938747 - protein, 95 aa, Homo sapiens
SQLKKTREIAKKTPLASYELIRSPQSSTTSAEQPQASSLSNPEKYTDELATQPRRLLNTLRELNPMYEGYLQHDAQEVLQCILGNIQETCQLLKK

SEQ ID NO: 938748 - protein, 67 aa, Homo sapiens
PGKSQLQFSSAIFARKHLELRKSLHVGNININLLFSFCTTSLFNMQYMLDFTQSDRYLQSTRHVCAR

SEQ ID NO: 938749 - protein, 90 aa, Homo sapiens
  misc_feature (53)..(53): Xaa can be any naturally occurring amino acid
QQSMNRAENNFCATDPHLSCLPTVTDQRPVPCPPQVTLRPLSSPPTGNSKSAXVPATGDSHDAPVPLTSDSEAAPVSPLGDSEAPPYTYG

SEQ ID NO: 938750 - protein, 74 aa, Homo sapiens
MRYVPSPCSATVLPLSSRLVNEQPCSWVCLVSSCFLPEFSPRGQLLLLSFIMILTFWVQQGGWERWSHVPYNLS

SEQ ID NO: 938751 - protein, 121 aa, Homo sapiens
EKAGSPAPSNRLNDSPTLKKLDELPIFKSEFITHDSHDSIKELDSLSKVKNDQLRSFCPIELNINGSPGAESDLATFCTSKTDAVLMTSDDSVTGSELSPLVKACMLSSNGFQNISRCKKK

SEQ ID NO: 938752 - protein, 57 aa, Homo sapiens
MRRILTSSRLLPHGSDDPEKLSRRSHDLPTLLTEPGPRLPPMCPIRPSAIKAYLSLF

SEQ ID NO: 938753 - protein, 71 aa, Homo sapiens
VKVQDSKLPPYKDLGKNLPFPTYFPDGDDGELPEDLYDENVCQPGAPSNTFAYHLWTWQNLTYSVSFDEPE

SEQ ID NO: 938754 - protein, 93 aa, Homo sapiens
GETQSTRAAREERKTSALKDSRGPHAPSADIILKRCSESTKRKLRLPSEVGAQSPASVSPLPPRACIYVFYKSLRLDAEGSPDPCPSASRHPQ

SEQ ID NO: 938755 - protein, 89 aa, Homo sapiens
WEFFSLKLLSGCALLAHTCNPRTSQAAPGRLLDPQSSRPASAIYWTPSLHKIKPLSQVRSPEPVVPATWEARGDRSLDPSQASSLQSAD

SEQ ID NO: 938756 - protein, 51 aa, Homo sapiens
MRTASQMPLNDRHGSGARLEKIPTKPQTQRNHRAFGNKETRPQRANSKGRS

SEQ ID NO: 938757 - protein, 107 aa, Homo sapiens
LKETVRQALQETLLREVVRKILLLQSWFRMVLERRHFYSIFFLSLRTPEYGGQRFAYPNDQEHQRIAWQGEDPRSLLQSLSRLQKPRAFILKSKVIKQKQIIPKVKK

SEQ ID NO: 938758 - protein, 76 aa, Homo sapiens
  misc_feature (53)..(53): Xaa can be any naturally occurring amino acid
EHGAGHQPPVREDREHRRRRPPEEAGGRGSRRTRRPGAGSLLSRMPPRWGAPXTRAVAAAAPARRAGLSFRSAART

SEQ ID NO: 938759 - protein, 39 aa, Homo sapiens
ELIPLMEVTGVLEGRAKQLYSAGYKSLMHLANANPEVLV

SEQ ID NO: 938760 - protein, 157 aa, Homo sapiens
PRFVPKRRVRPAAVSPGRSSGWPEFHKKGARTIGFFLDPRGRNNSPGSLQAHVQRLKEYPSKLLLFPREPPAPQEGDSFAGELKLAPQVAGRSCPSGTFLRRGKLGSSLGEGRISKPSLVSVWPVPTPGSSAFGQKGPREPPNRVLKRKNKAPLGAW

SEQ ID NO: 938761 - protein, 96 aa, Homo sapiens
  misc_feature (35)..(35): Xaa can be any naturally occurring amino acid
RRLQLNANQAFFLWVSGHSMVGVSAPMAEVWEMRXGEDGFLYMVYGLPGDVRDEIGGVKAEGSASLWELFKRVTKEGKGVWGTEIEEVIRSESRKQ

SEQ ID NO: 938762 - protein, 116 aa, Homo sapiens
PGFASVPLRAIVILELQWALAPFFLSFRIRAYKGLSFLSISAENFLLRPKAKGTENGIPSSFPRPLGIQANPLKSTILGSSYPNRALLNTFLHFSTQHPGSQGILRGRTCLVGAWE

SEQ ID NO: 938763 - protein, 133 aa, Homo sapiens
MGLQEMAGQLQLATHQGLHFIDQHRRGFIARVTNVEWLLDALYGKVLTDEQYQAVAPSPPPKQDAEALQFHTSLELDLQGIASSGTKGVPILTFEELGTDLSFFPRKIRVNPCKSHQIILNLIFLYTIYEKPA

SEQ ID NO: 938764 - protein, 112 aa, Homo sapiens
  misc_feature (53)..(53): Xaa can be any naturally occurring amino acid
EVGGPCTRALATLKLLSIPLVSLDIPSGWDAETGSDSEDGLRPDVLVSLRAQXLRGRFSGTLTFVAGRFVPDDVRRKIPLRCRDTRAPLRRGTVTATGGHTSGTLANKQPSV

SEQ ID NO: 938765 - protein, 32 aa, Homo sapiens
AFATACGRSLQPAGPQLMPEDALDTGLQPLPT

SEQ ID NO: 938766 - protein, 132 aa, Homo sapiens
MAPYSTLGRGVPTLLRSHLQHFYTVGNYVKTNGVAKHTIHHCASGQLQVHTCSDNSIQERRFAWEGLNGPALFVNHNLYQLETQCPTNTNSACLSKQHSGHLQQLTQILTGRWGKALPCVKLLLKYIPSEKG

SEQ ID NO: 938767 - protein, 135 aa, Homo sapiens
HLLRASVLSEFPRPSPRFSCRPFLSYVSILYQMILVLGPAGAIGLLYILSNVSGLGWEGSSRCLCNNVSRGSCCHSPIPEAAQSLCPKSGTLGLGHLFLFVPHFLSTLSAHESCPCICLGKHGINESTILVLKKK

SEQ ID NO: 938768 - protein, 98 aa, Homo sapiens
GRQRRIDHKLVGHHDGRCRPVGMHLVGHFGHAAVLGHQLPEVFDLGDTDITFLFRQVGRHFLERAGQAAVSALGGGDLQDRVTIGDRERCLELGVGPA

SEQ ID NO: 938769 - protein, 104 aa, Homo sapiens
MSKREHKPSRSRLAVESPATARLRNDAAHELPCHKAQQRFMTRSTRAQEIRSTLHPLSHHGYAARHEPVSLEALSTLRIRCRVLPYWHPQIDQRRQFARTSQLR

SEQ ID NO: 938770 - protein, 68 aa, Homo sapiens
NLPCRPITWHEGVSEMQYSIYISLGGWVFTMLIGSLIPGAGVVEILVVSLVLLICAESPTKVSKVTPT

SEQ ID NO: 938771 - protein, 104 aa, Homo sapiens
MENISQFFTSISMSSQSKRFRNHGKDRIMKEIIEENFLSCRNVMNFQIERAHLVTKMHGKRSTILALLRTSDSQNYCQRERNNTDTPITKFLAARLECLKHVDQ

SEQ ID NO: 938772 - protein, 98 aa, Homo sapiens
  misc_feature (71)..(71): Xaa can be any naturally occurring amino acid
RVLARLLIPPAPSVPLLWSSFFAQRRQCSLSARFSRSISSVRPSSSSSFCQQPPRFSCTARDAWVPKSFYXRLRRLRALRVQDSSRGPHFTVLCLQTP

SEQ ID NO: 938773 - protein, 69 aa, Homo sapiens
MNHDIPLKYFDIADEYASRMRRACRRGERTPLAHYFQLLLTRLMNNEEISEEAQHEMAAEAGINPVRID

SEQ ID NO: 938774 - protein, 42 aa, Homo sapiens
FQRVHITAPSRSCKGFLGVPGLNPLPVRIFHPKTRVIFRKLH

SEQ ID NO: 938775 - protein, 67 aa, Homo sapiens
LTLVGDKEQLTQHTGFFCSQNGILQCTKSKKALDVTLVSPLFLLNIGTRNFCLITFLHSQLIIVNEK

SEQ ID NO: 938776 - protein, 78 aa, Homo sapiens
MKQYSVIKWCRACIEDRLEIIFMKSDFGTSDRRTKHHSSQKLPGVLFYPQVLSPSAGIYLSHWKGKFVPKDATVNNTQ

SEQ ID NO: 938777 - protein, 97 aa, Homo sapiens
TNKWKNIPCSWIGRINIVKMAILLQVIYRFNAIPIKLPFTFFTELGKTTLNFIRNQKRTHIAKTIISKKNKARGITLPDFKLYYKATVTKTDDTVAL

SEQ ID NO: 938778 - protein, 114 aa, Homo sapiens
GRPLSFQRLLTRPPQSCFHAWTTEQSWMTFSIHDSLIFCDPRCPCNKVQCLGPLLGLLSGRDTAVRGHHSSPHYLSTLTPRPTPGLLPRLTQRPTTLSIHSKFSHDSSTCSRVD

SEQ ID NO: 938779 - protein, 98 aa, Homo sapiens
ALEIFQHSKYKVDFIETKASQNPERIVKLHSIGDFIDVSEGPLIPRTSICFQYEVSAVHNLQPTQPSIIRRLQGESLPIHLRAHLTKWDTLLERSRKM

SEQ ID NO: 938780 - protein, 106 aa, Homo sapiens
WPPRGNSSPSAKYIKKILDSVGIEADDDRLNKVISELNGKNIEDVIAQGVGKLASVPAGGAVAVSAAPGSSAPAAGSAPAAAEEKKDEKKEESEESDDDMGFGLFD

SEQ ID NO: 938781 - protein, 114 aa, Homo sapiens
SHEVELGPLKPNPWAGNLSSEAPTGLSFAKEQPRCCVSSRGTGDGHDGGETQTSSPPPSTKMEELRLPLSWAPTGWRAEASLGVLGPPSCVRSPGRLPCPGLSTACHRLLVLNG

SEQ ID NO: 938782 - protein, 66 aa, Homo sapiens
TCAEPPSFGSGAQAADVLELLLREAEPSARMYGGRTPLRSAMLRPNPILARFSSVHNGAPEPEGED

SEQ ID NO: 938783 - protein, 30 aa, Homo sapiens
SLLGSPAAPPTPKSFRTHQRPHHFLSGGHW

SEQ ID NO: 938784 - protein, 75 aa, Homo sapiens
LTSEYISILLTPTTTTNPASAELRLICTSTNGRVDRSQISQTPSPSRKTKSACIAYEINPDICTCLMKHLWKNTF

SEQ ID NO: 938785 - protein, 97 aa, Homo sapiens
  misc_feature (54)..(54): Xaa can be any naturally occurring amino acid
VDIKLARVTKVNERDRFSGTVHAGRVEFMDDTSRSIIRNVKGPLREGDSAHPFXSQSEKPGGCAELGCSLGLGCRVRPLGRWEWSVKSALFFVRTRN

SEQ ID NO: 938786 - protein, 74 aa, Homo sapiens
RRSFRTVSETKYKHANTNCVNIVSPAFLFYTTRLNVSYAEYISKNGGHILTKLTNVTKNIRCLLMLQTSSNYMI

SEQ ID NO: 938787 - protein, 117 aa, Homo sapiens
TIEGVMNHPELNSNEALDNVLPSAQMNDGQRQWLQESSRYTEQLANMRIQDLKVSLKPLHSVNNTITTEEEITLGRGFTDKVDRLKLAEIVKQVIEEQNTSHEYTIMTASNYVFLTI

SEQ ID NO: 938788 - protein, 73 aa, Homo sapiens
HQQHCTFTECPCRKRCEDTELIQTSLPGAGDGLEAELRVIQSMVIALVLSDAILIYLYALEDSYWDDDEQNGH

SEQ ID NO: 938789 - protein, 55 aa, Homo sapiens
MGYHTISNECSDIWINYSTGEEMKIIFHRIHNNCMASIISSLAAAHDVGVLRQQV

SEQ ID NO: 938790 - protein, 103 aa, Homo sapiens
TALQGCGKVIPELTEKLTSMPPVSPLPTCQCGPDCRLEKPAKYDDIKKVVKQASEGPLKCILCLQLSTRCVSSDFNSDTHSSTFDAGAGIALNDSLCQAHFLV

SEQ ID NO: 938791 - protein, 122 aa, Homo sapiens
YLSTEAGQRGSALGDLAPFRPPGFSPCPAGDLFPGHRYDGGLDSGFHRVDSGSKRWSGNGSTGEFSGLSFRIQGLARGPRGPRGRKGGGSAGGGPVRIDFFDRLVPGGGGGRGPVGGRRPPF

SEQ ID NO: 938792 - protein, 114 aa, Homo sapiens
TSWRTPALLEWDADDFRIFCGDLGNEVNDDILARAFSRFPSFLKAKVIRDKRTGKTKGYGFVSFKDPSDYVRAMREMNGKYDVAPHQVRKSMWKDRNLDMVRKKQKEKKKLGLR

SEQ ID NO: 938793 - protein, 104 aa, Homo sapiens
PPGGGAGGAPSPPLLSKGFSPGEKKGFFPFKRGGPPRGGFFSGVFFPPPRVFGGGKKGGGGPPGLFFFFFSPGGADNFPPPPGAPKRGGGGGPLGFFFLAFKFL

SEQ ID NO: 938794 - protein, 133 aa, Homo sapiens
GLLFKYCWTILTPWDYGLEEGGWVGKHSLAVSSAFFTYLYHPAAANLGTVLSLCWFPSKAAAEKMRWFNSSPCPKYSRLDPGGVLAFYESSPLTPKLRLLPTVPLGPPVTVYSFLFSEMRAAANSFTYLTPPE

SEQ ID NO: 938795 - protein, 76 aa, Homo sapiens
QLQHIVSDEICVQVTDLYLAENNNGATGASVNTQNSRSLLESTYQRKAEQLMADENCFKVRVGQVVEDLAGDNVSC

SEQ ID NO: 938796 - protein, 72 aa, Homo sapiens
  misc_feature (60)..(60): Xaa can be any naturally occurring amino acid
VSKNMNRRGADQNCWFNLLDRKPPVIFKISPQLAGQGNLTKDKCGGLPFGPAPAADRGCXAPAPTRAEGVAV

SEQ ID NO: 938797 - protein, 34 aa, Homo sapiens
QACPGGPPRSRREHPGVGSTGGERAHPAQLRDWR

SEQ ID NO: 938798 - protein, 137 aa, Homo sapiens
GQARSRLHQPVDSYDDPNSYRSAFRDGRIDLFSESEPTTLLNQLQDDILELRPLNETRELWPSVDLKRDTSIRFHIAHSAQREVEILHDQLLQVQRRPFAYQRDVIVMVPDVDSTRRIFAVFGQLDRSDLRFIAFTL

SEQ ID NO: 938799 - protein, 108 aa, Homo sapiens
  misc_feature (43)..(43): Xaa can be any naturally occurring amino acid
  misc_feature (45)..(45): Xaa can be any naturally occurring amino acid
DSGLLPEVFRPWSRWRPNPQSRGARDAGEGKQLKGAGPKLSLXRXEEEPHFRCQVAAPQPWREAAAAAAAARVLRWEAAVRGSHASSPPGPREGEPSSPGSGLRKRGE

SEQ ID NO: 938800 - protein, 75 aa, Homo sapiens
NNTAEPEFRLAARREVMINRNPGPTLPGTGGETRAQPPSEPRERQLTFSCRNSSLPELSLEVRVHVRLQKSLRSN

SEQ ID NO: 938801 - protein, 98 aa, Homo sapiens
  misc_feature (2)..(2): Xaa can be any naturally occurring amino acid
LXSALTPHPHTRGNTGSLHSTDPLLASSLTSASVPALFRPKAPPTLPIAATGRGEDMAAHRPVEWVQAVVSRFDEQLPIKTGQQNTHTKVSTENNKDV

SEQ ID NO: 938802 - protein, 67 aa, Homo sapiens
FYYFTVYSYLFNKLTIKQPQAGPSGDIPEEGIVIIDDSSIHVTDPEDLQVGQDMEVEDSGIDDPDHG

SEQ ID NO: 938803 - protein, 119 aa, Homo sapiens
FFFLRWSLVLLSRLEGNGTISTHCNLHHPGSSDSPASASQVAGITCMCHHARLTSVFLAETGFHCVGQAGLKLLTSSDLSTLASQSAGIIGMSTTPGPRFFLKKEYYFHMCTVTFKIYY

SEQ ID NO: 938804 - protein, 56 aa, Homo sapiens
GTSEPSDIIIFLIFIFIIIFFLFFLKYSLFSTSLAARRAGAGAGARSGPVPRVHKR

SEQ ID NO: 938805 - protein, 72 aa, Homo sapiens
KPPPLRRTLAPPPRHGGRAGPRGPPNSPSSARSRPPYELSAVQKIVRQRPGLEHSAELVYQPEEQAPAFSGR

SEQ ID NO: 938806 - protein, 173 aa, Homo sapiens
  misc_feature (9)..(9): Xaa can be any naturally occurring amino acid
KNPKKTYIXCCGEDTVYNVPRETALPATAFSGVIEEGVARVPVTKDCLESQVVPIHWVVSEDFPQSAADKGDSAWPAGTVRGAGAEEGVCGGRFKETGMRDRRPPLGRARRIWKKSGEGNGPESRAATRGAPTHKPISCSERSEGEAQRVKAEALEGSFARAFCLRLTLLCRF

SEQ ID NO: 938807 - protein, 107 aa, Homo sapiens
  misc_feature (9)..(9): Xaa can be any naturally occurring amino acid
MKECRCRVXECSRICAKRLRGAEYERYVKLREMTCEEIESMTAFEWMLGSFACDQLECKSSFTTYLNVCCSSRGETHGIGLRASKTEEDGVYKCDCEGCDAYICNAR

SEQ ID NO: 938808 - protein, 117 aa, Homo sapiens
GGGSGSREGELVSHSISKLIHHTTASKWIERQLADYYFYFHTLCFQVPLSARSQGLTPSPPISIAPAPSQATHTHTQELSSPPSAYTSFSSTNEMQLICLTSPDLRETNGNTRHFPD

SEQ ID NO: 938809 - protein, 153 aa, Homo sapiens
PAYTPIRDDVPHQHPLSATLPMATRADDQEHTRLHMALVQANLPAVHRLVNLFHQGGPALDIYPNYGRHRSTSLRSPHYRLWSGPGDTWSQPHALAPAQCQTGRCTLAWRSHRQPRRCLRALLDSAAPGTLDLEARHIIGTLTRPARGSQHRV

SEQ ID NO: 938810 - protein, 39 aa, Homo sapiens
DRGEWPQGASPLPALYSACTAIPMLVARKNTESMGHPDF

SEQ ID NO: 938811 - protein, 66 aa, Homo sapiens
DLSTQKLPGSSAFRQQRVIRNPTKFSCQERWLTHVFPALWEAEAGESLEAKKFETSLANMEKPHLY

SEQ ID NO: 938812 - protein, 70 aa, Homo sapiens
HWFPGKPCKGSGYRCIRMNHKMDPLIDRAAQRIGLSSQELAGFSQVNSTLWVDPYEVSYRIGGDGAIGVL

SEQ ID NO: 938813 - protein, 90 aa, Homo sapiens
LLLLNSRKYDHRDRMPGHSHIAKFRPSNTDELMWYQYHQNQLHSDIFSLIFGGRAGLARNTRKELSFSKVELKVKTARDDSDSLRSSARG

SEQ ID NO: 938814 - protein, 67 aa, Homo sapiens
VDLITVSGTEVVPDFGEMVSQWPFHSIQALSFHGSTDTPLLPALFSLGNKPQHLNLSKNKEEEMAFY

SEQ ID NO: 938815 - protein, 149 aa, Homo sapiens
MVSSERRETRDSGIRKVAQAMAKGGQGLEPRPKGESGDYKATQKIAFSATRTINVPPCAGDQTIRFGHVITNMNKHYEPGVGSSPASGPVSTTSPNTASSRGNLWVELMRVLERAQKVVTFCDLCLKTRVRVTTVGMVFKLERGENVFL

SEQ ID NO: 938816 - protein, 44 aa, Homo sapiens
MDEENRGVFFYAKMGLWTSSVFPMSPRLPEVILGPLLCALSVAR

SEQ ID NO: 938817 - protein, 43 aa, Homo sapiens
SRKPHSNVLRKCSVPKRPASASVLCSLVLSRDKADRTQTGHVL

SEQ ID NO: 938818 - protein, 70 aa, Homo sapiens
VDKTSLHYPESSYSSISSKKRYAGFTWGNVRNLEGWAVPVAHAGNPSTLGGQAGGSRGQEIKTILANTVK

SEQ ID NO: 938819 - protein, 84 aa, Homo sapiens
RHSAMFGDILVVTTARKDGMLPTYWLEARMLLNIPYTLQDSLLQSQRIIWSKAVNSVRVEKFCSRSLVKFKFNYFGKVCLSLFL

SEQ ID NO: 938820 - protein, 75 aa, Homo sapiens
  misc_feature (25)..(25): Xaa can be any naturally occurring amino acid
DNSAPPLWKHTPPPTPSPQNFYFYXAAGLFLCHKTFLETHTPGAVSKFIFVGCPPQTPFFPEKGAPTPSGSPLSF

SEQ ID NO: 938821 - protein, 126 aa, Homo sapiens
ESGILNGAKFCPYEITARRRKKVSTVLFKYPLGRGRRACQSFPTGLAPADTLTNACRLQPATPTPPLSNPIRQHGYKSSKPSAIIPVPPQLKTRTEQAYLRSIWQTLQDVTRVKVCILKSWKLESA

SEQ ID NO: 938822 - protein, 42 aa, Homo sapiens
SVAADRPGMLRDPFSVKSFSGLSSTSFSCRSSSFMRISRASA

SEQ ID NO: 938823 - protein, 54 aa, Homo sapiens
MKQEKGAIKKEHGPGTVPHACNPSSFGRPEVGRSQGKEIKTILANMVKPQSLIK

SEQ ID NO: 938824 - protein, 78 aa, Homo sapiens
FINIFFPPFPGGPQYNVSGAPFAPVFRNPRKPYLFFFGKGLRYTPAVPPSFPQTPARVFVGTPSPNPPFGLGPLLTPG

SEQ ID NO: 938825 - protein, 98 aa, Homo sapiens
FLRKSLNLSPRLECSGAIPAHCNLCLQGSSDLPALASRAAGITGVCHHAQLISVFSVETGFHHVGQAGIKFLTSRDPPTSASQSAGITGMSTTPGQAL

SEQ ID NO: 938826 - protein, 108 aa, Homo sapiens
  misc_feature (83)..(83): Xaa can be any naturally occurring amino acid
DAQHLGVFIADIGYHQAFVLDEVRVPVGRKPLLQRGLVRRCDVGEQNGQTVFVRSWALLDYPVQGQDAERGDEVPGLGALREXSCANTVGSRPATHRAWSRIRRATEP

SEQ ID NO: 938827 - protein, 106 aa, Homo sapiens
  misc_feature (62)..(62): Xaa can be any naturally occurring amino acid
MSRVKARGSRGAALRLGVIRTVGAGHGDRGGSGDPGLREAACPKETPIGPDPNASEKTPSGXTPIGPRPERLGEDSQRERAPRPSQGPAANPAGRKKRRTHRTPAL

SEQ ID NO: 938828 - protein, 116 aa, Homo sapiens
MEWKGKDLNGMDWTRRNGMDWNGMQLNVIDWNGMEYHGMERMECNRKEWNGIEWNGMKWNGIEWNGRECSGTEMSGIDEVYLNGIEWNGLELNGKEWTRMEWKGLEWNGMEFNGMD

SEQ ID NO: 938829 - protein, 69 aa, Homo sapiens
RFDPQQTLLKMAVYSLSKRWLRLIGVYRSQNRPLKRDMKHRQPFEFYAVARSVLASSFLDSTLDVYGYA

SEQ ID NO: 938830 - protein, 66 aa, Homo sapiens
IVTNARVLRPFYGAAVRLQIAHQRFQQRGFTDAVGTQYRQFFTHFQQQVEIFKQRTVIKPFGQTFH

SEQ ID NO: 938831 - protein, 79 aa, Homo sapiens
VRRIIGNVKAGSMQSLDARLHFGNLAGLGAYQMSQDPKNVWDFLATSGNLAGIKGERFYHSGKFMPAEIIAGASMLMVT

SEQ ID NO: 938832 - protein, 106 aa, Homo sapiens
MGRQPTEGGKFVNQKPDKNPGGGQNVYVPPPPIHMGRPQPQGSGIRAKGKGGGPLGHCGGAHAGNPSTLEGGGGRIAWAQEFETSLGSKGGPHFYKNFFKKRKGAQ

SEQ ID NO: 938833 - protein, 131 aa, Homo sapiens
  misc_feature (59)..(59): Xaa can be any naturally occurring amino acid
TTWHILWAGGGRNGRAWERDARVPCLQGRWVMTVLWRLRVPCRVEARGGPGGAGDPDCXSACFPPQTALRSASLVLEGGAAPPQASCQAAGSPEAGRLPILSCQHPALPNIDISWPRATEQGQGGPAKPAP

SEQ ID NO: 938834 - protein, 102 aa, Homo sapiens
  misc_feature (78)..(78): Xaa can be any naturally occurring amino acid
VFSGPPGLSSLSVTLVSTILSLTSSALYRREILVSAPQVPESSAPVVWNDAGKRLCSVFPPLHAHTSFRYPSPCIVRXGPSRTGPGTQLGPIRPPAGELPPS

SEQ ID NO: 938835 - protein, 106 aa, Homo sapiens
SFVSILSLRYSSPLDKSQALQCRGLTWSGAETSSCRARLEWLSSTAGSGAGPYLSVDPARRLRSVSVGAAGGLLDESRRLRRYRGMFALRNAGGEEAPWRWPRVCT

SEQ ID NO: 938836 - protein, 107 aa, Homo sapiens
GSPSSLLFLSLVACAAFLPGPRRPQQFWGHCFPQRCGGLFLLLVRIRGFSLGLCCALRLLRSAFVASSFAAAASFSPSFSSPSLASLSGFSFVLLGLGGLRPKLIPF

SEQ ID NO: 938837 - protein, 33 aa, Homo sapiens
MFRLAVRSSGPHAHRVRILGERSLKSPIESDLD

SEQ ID NO: 938838 - protein, 89 aa, Homo sapiens
SSLEAGEADGKRCVTRIKHEVREQGGVKAEKLRAEYRGGPDAASLEGSAGGVAPLGLRMLDPVGLEACRDDAFRPLCLAGILRAEFDQQ

SEQ ID NO: 938839 - protein, 126 aa, Homo sapiens
LLCLWAVRLWQVVADLPSISFQAAVATHLCFSRSSYTWGRTATQSDSSVSSSAIDMVGVPSRRGEQHRPGPPEDMPPVRAHPAQPRRAPSAILDARRLSQLVRLSLRAPNAELLCGADREKDNKRP

SEQ ID NO: 938840 - protein, 48 aa, Homo sapiens
  misc_feature (38)..(38): Xaa can be any naturally occurring amino acid
SEPSDIIIFIIFIFIIIFFLFSLKYSLFSTSLCCETGXRWRPAAASGP

SEQ ID NO: 938841 - protein, 142 aa, Homo sapiens
TNRSEWNRRESYSSGMERNGINQSGMEGEWNGMETNRMESTRVEWNGKDWNGMEWNGINSIVMEWNGMEWNGMEWNGINPNTMEWNGMERNGMEGNGINTSAGQWNGMECNGMESSGMEWNGMESTPLQWNGMEWNGIEWNG

SEQ ID NO: 938842 - protein, 100 aa, Homo sapiens
GEPRMGASDTALLEDLGTAVAFSWRGWWPFQPTTKCLILPEKLAPSFTPRTPASPPEASCEARTPASPRPDLVDDSPTQSVLLSRCARPSLLRIKHVLLP

SEQ ID NO: 938843 - protein, 194 aa, Homo sapiens
SKGNHRHPESDVQLIKTGDKVGASEATLLNMLNISTFSFGMVIQQVYDNGSIYNHEVLDITEETLHSRFWRVSADVASVCLQIGYPTVASVHHSIINEYKRVLALSVETDYTFPLAEKDKAFLADPSAFVLIPHCCCHHRCYCAAAAPAKVEDKENRRSRKKIWDLISMTNHQKAANLPSFVCKTHDIKAYFFT

SEQ ID NO: 938844 - protein, 53 aa, Homo sapiens
PFPTTNGGNKLARDPGTQGTSSPYSSREGSICSPRRQEEKGARAAAIFPNGTS

SEQ ID NO: 938845 - protein, 70 aa, Homo sapiens
PPTRDPGNLAPTCFTLAPPTAHFSGPPSGPSPVLWTPVSPPCNAPILVPTKGRPSSPLLYLKGGGANEEA

SEQ ID NO: 938846 - protein, 133 aa, Homo sapiens
RCRLMRQRLTGPTSKRTKRQRSSRPESASEVRERVQTVAASTMRVAVTPGASTRTMAARPRGSAARRTMRVTRTREPTARCCRPSPAVAGSEWVTPASPPQLVQGRLRCPRAGPRGVPLQFSHRGPPARPRPL

SEQ ID NO: 938847 - protein, 69 aa, Homo sapiens
METVLASTVEPRLYWECRKLAGHGGGRLWFQLTGRLRREGGVGLGGGACGEPGYRRCTPAWVTGRDSIS

SEQ ID NO: 938848 - protein, 44 aa, Homo sapiens
QQAAQEATRRMQLMHAQIVNLANSATDAVSREATGSAAHSHQAQ

SEQ ID NO: 938849 - protein, 47 aa, Homo sapiens
MLARIVSISWPCDLPASASQSAGITGVTTAPCLAPPPFTLPSSSVCR

SEQ ID NO: 938850 - protein, 103 aa, Homo sapiens
MCLGPSERFFSLIIVFVIIDIIVTILFIVFGNLDRDHRQMRCRISTGLEQRDDTAVRSFSGPSGRRSGLCPCCAFSQPYLQSYTSSPPPAASPSHIHPLRRHK

SEQ ID NO: 938851 - protein, 39 aa, Homo sapiens
TRVSAYIDWINEKMQLDLLLGAAAASPCNSNKLPSPRAK

SEQ ID NO: 938852 - protein, 82 aa, Homo sapiens
LKKSGKLKVPELVDTVKLAKHKELAPFDENWFYTRAASTAPHLYPGVALCGSMTKIYGGRQRNVFMPSHFSRCSKSVAAGSS

SEQ ID NO: 938853 - protein, 115 aa, Homo sapiens
  misc_feature (93)..(93): Xaa can be any naturally occurring amino acid
QGEKGPRLKPQREGTPKNPLPPKGKIWAPPGEFKTKKKGKGTPKREAPEGGPVKKGKKKTPPGENGKLRSAPQGRKQPGPKGAQIGRGPPPTXSLLGSGKNPFPRGGGTPKPPRG

SEQ ID NO: 938854 - protein, 118 aa, Homo sapiens
MKKYTAETRDKKEKTPPTKKRADPRGPKQRRPGPTRKNPPQTQRGTPPGAPEKGRRKKPNPSLLYEGKKTTPPPPRQKRAEKRGAAYQQIEKKNKGAGPQKGPGVKKNPPNKKTPPGP

SEQ ID NO: 938855 - protein, 42 aa, Homo sapiens
QQQQQQRRRNHVDGSSKPAVLAAPSGLERYGLGAAAAAATAA

SEQ ID NO: 938856 - protein, 143 aa, Homo sapiens
MVWPRRGTRLLAAAAGSACLGLYRADPRGYPPVTAGSQLPLDPWSAPTPFVTSLGDTPAPLRRHEGGSSAAQISGPPRFPLLSLGCALSRILGPPLSSQTHPRSLTHASFPALKPAAPPFIFCTSSQAPHGSLSEGDFLRNLG

SEQ ID NO: 938857 - protein, 41 aa, Homo sapiens
MGRNKNKPQKRKGGTRKRENINGGLFHTFTHSRAPKKGEKA

SEQ ID NO: 938858 - protein, 66 aa, Homo sapiens
EGRRSRPVFMSRQDSHHPCCRLVGGRRVVGRDSGVSRCEAVRDALDALSAWGLRVAGRSPWEVGGG

SEQ ID NO: 938859 - protein, 41 aa, Homo sapiens
ADYYYYYYYYNSRPVDPDCEPDLHFIRGVVIIITFVYNNGT

SEQ ID NO: 938860 - protein, 86 aa, Homo sapiens
SQRWEVRQIKRDRPRSKCLGVCSLRRKRMEVLTADGSLQVWVLRRAQVGGEGRGKSLRSPLAAAKAQVLSNKASRFSKLYLAQSIH

SEQ ID NO: 938861 - protein, 45 aa, Homo sapiens
MRRRFRIIRRQSRLPWRAGGGGGGGGGKLRRRLAAAEVKLPQCSR

SEQ ID NO: 938862 - protein, 51 aa, Homo sapiens
MCVSICSRVDVVGAPRRTQESRTRTRPWASQHSPWRSWRPLQSPNKRSHSL

SEQ ID NO: 938863 - protein, 132 aa, Homo sapiens
MLYNCLDFLQWLVPAHHGDCLGRGPEEHYRVYFGDIWDKMLQKGMKKSCVLPVSLQFCALPWQEELCLRFMREVDRLMTPEKQSPDGSGLQRTLRLTFLHAQPSLGTAALPPQQGNVLHGAEASVSSPPIPL

SEQ ID NO: 938864 - protein, 150 aa, Homo sapiens
  misc_feature (95)..(96): Xaa can be any naturally occurring amino acid
  misc_feature (112)..(112): Xaa can be any naturally occurring amino acid
IKISRLVAARRGSKKCKTNPPGKCCPENQSEGLKDAFNTDSSRNPASFGTAVSQNQKTPSNISNRRIAGFSKKKGLHLKGRVTKHEGVPPAPASXXLSRSVRYCCLLSPPWXEGAQHPVCVCAHCLPACLPGFFSGCLCLCPGSLSRPGH

SEQ ID NO: 938865 - protein, 138 aa, Homo sapiens
  misc_feature (110)..(110): Xaa can be any naturally occurring amino acid
QETTQVTLQIKPLEKSHLLQCFQQSSRKKKQVYGLHLLESAAAELQSGCTWGGVCGPQDGDFKPGLLKCPSERPAGIQRGATGLFPLGSFVGWVGFLARRFLPPGIAQGXPEAAKLNTRQAGLVFSRNSPRTPVVLAF

SEQ ID NO: 938866 - protein, 111 aa, Homo sapiens
MRNSVVVSTFMAHRLRSEEKACGSNWIDASPYRCTRLDVCDDTESPHSALAFVRNTSAKISSAASSARMLRSCRRRRSGILCSRYGNPRTAGGRGRDFTISSRPGASGTQR

SEQ ID NO: 938867 - protein, 189 aa, Homo sapiens
ASTGLPGLAGDQCEFGENGDPGIPGNPGKVGPKGPWLETVAQGPLEPQAPKVNRETTRPPRKSPSLPQEPSVAPCAGTQTIRFDHVITNMNNNYEPRSGEFTCKCPGLYYFRYHASSRGNLCVNLMGGRELTQEVVTFCDYAENTVGVSSGGMGLQLEQGENVLLQSTTRTPIWQEGATEFLPVPGFQI

SEQ ID NO: 938868 - protein, 110 aa, Homo sapiens
PCYVTGWVRLWTIGPIADKLSRPVARGGSRHVLYDCLVGLQVVENHGVAVGDGVILACNGDSGGPLNCQFENVSWELFGIFIFGSWRGCNTCKKPVVFIRVSAYIYWINE

SEQ ID NO: 938869 - protein, 94 aa, Homo sapiens
  misc_feature (5)..(5): Xaa can be any naturally occurring amino acid
  misc_feature (10)..(10): Xaa can be any naturally occurring amino acid
  misc_feature (15)..(15): Xaa can be any naturally occurring amino acid
  misc_feature (21)..(22): Xaa can be any naturally occurring amino acid
  misc_feature (40)..(40): Xaa can be any naturally occurring amino acid
MEVEXCSLGXRALLXSRRPRXXTIGLHDVCYVVIRAQAGXGTKGPWGQAEGLSRDVPVSLAVPRPRTVAVSGEAASGVQGAPAHRAFSFRLGRA

SEQ ID NO: 938870 - protein, 56 aa, Homo sapiens
MEHTCPGSCILCRVQLLLGTAGIISPGPWTRTGASPPPSRLCLTEPQSRPPVAVGF

SEQ ID NO: 938871 - protein, 60 aa, Homo sapiens
SFGLTGGFRNYGYHYVDEPGKDTANMQRWKIAPDWDVKLTDDLRFNGWLSMYKFANDLNT

SEQ ID NO: 938872 - protein, 112 aa, Homo sapiens
GERNPEGLYPGKMTMTPWQGVPHAQFLETLESPKKKGGRRGTKKGATKKVPPFFGRKNGFLSSPSTRGGGGGGKKKNPPPPPAALQDIVYRTMEIFQLLRNMQLPNGVTYPH

SEQ ID NO: 938873 - protein, 99 aa, Homo sapiens
  misc_feature (7)..(7): Xaa can be any naturally occurring amino acid
  misc_feature (43)..(43): Xaa can be any naturally occurring amino acid
  misc_feature (60)..(60): Xaa can be any naturally occurring amino acid
TRTESAXLWGPGRHGSHWHSRAAARTQRAKRGGLELGDAGARXQLVLTNPWNIMIKHRQXREGPPLTDDNKFTDPAISMDLLRAVLQPSINEEIQTVFN

SEQ ID NO: 938874 - protein, 100 aa, Homo sapiens
  misc_feature (8)..(8): Xaa can be any naturally occurring amino acid
  misc_feature (40)..(40): Xaa can be any naturally occurring amino acid
  misc_feature (50)..(50): Xaa can be any naturally occurring amino acid
  misc_feature (60)..(60): Xaa can be any naturally occurring amino acid
  misc_feature (65)..(65): Xaa can be any naturally occurring amino acid
  misc_feature (73)..(73): Xaa can be any naturally occurring amino acid
HEVKLLAXVVGPCRPVGGRASQRDKTAGEAELASGRQGGXPGCEPLSPAXLPPPAFVVAXMGKAXVARAYGCXLPGRVLSPPLALRLTPAVLPGDRAAGP

SEQ ID NO: 938875 - protein, 97 aa, Homo sapiens
  misc_feature (25)..(25): Xaa can be any naturally occurring amino acid
  misc_feature (31)..(31): Xaa can be any naturally occurring amino acid
  misc_feature (76)..(76): Xaa can be any naturally occurring amino acid
TRGVQAVLRHRVCCRSTGPNPLQRXAAPAYXAYAVYPRALKEVHQPSPAPADRAMAQRKNAKSSGNSSSSAPAADXASAGSSSPGARKRDKAWRTQE

SEQ ID NO: 938876 - protein, 33 aa, Homo sapiens
GTRGHRGFSGLDGAKGDAGPAGPKGEPGSPGEN

SEQ ID NO: 938877 - protein, 31 aa, Homo sapiens
  misc_feature (19)..(19): Xaa can be any naturally occurring amino acid
HEVRPERLPPGAASSSPLXLLGAPPRPPGQC

SEQ ID NO: 938878 - protein, 43 aa, Homo sapiens
HERVCGTVTFIFQMVIYMGVVLYAPSLALNAVTGFDLWLSVLA

SEQ ID NO: 938879 - protein, 123 aa, Homo sapiens
AAQLNQPPGEPSAVSAYGQGKAELILILAAARTQHNVDAAASLTVPEQYVSAFSKLAKDSNTILLPSNPGDVTSMVLQAMCVYGALTKAPVPGTPDSLSCGSSRDVQGTDASLDEELDRVKMS

SEQ ID NO: 938880 - protein, 106 aa, Homo sapiens
  misc_feature (84)..(85): Xaa can be any naturally occurring amino acid
MAKTGARDSLALKKQAVMLRTAYGENYMAGNCRRLLELERSLQLTTSKKPGPSVTQPQGNEFCQQPERWPPDERPPQKKGGGVXXPPPPFLGKESRFEKSPVIAVL

SEQ ID NO: 938881 - protein, 99 aa, Homo sapiens
QLKGEHGGEEFLLSNKTALSSEKKLKTVAPNAAWYSTAVAESRGFYTLRMKDVHADWSMGGLLKEEPFDWLKGIRKFSLPVVDSTWNWQPGFQAFQALA

SEQ ID NO: 938882 - protein, 89 aa, Homo sapiens
LTTPTCDEKVVWTVFREPIQLHREQILAFSQKLYYDKEQTVSMQGQMSSACSSWGSDGDKRSGPGVAAATALASCWAPMACVLLAGFLR

SEQ ID NO: 938883 - protein, 138 aa, Homo sapiens
MSTIEELIEETEAGAAMEETRGGGSGYGGDRSGGYGGDRSGGGYGGDRGGGYGGDRGGGNGGDRGGYGGKMGGRNDYRNDQRNHHTDDCFECSFVSDMIHSEIARVLPAAFLVASSWVVKLSDIWIFIWVGGLGQFFF

SEQ ID NO: 938884 - protein, 113 aa, Homo sapiens
FGRAWTFGPPWGLHRTKETPQTPARTYPGYFCIVVEKNFIHDSDSVKSPPRDILLVSEQTTSFGGRTPLDTVFIITPEDALKRGSNTPPSSRARGGGFCPHPKAFGHSFWRGC

SEQ ID NO: 938885 - protein, 97 aa, Homo sapiens
FDELREEGFRRSNYSKLKEEVRTNGKEVEKLKTTLDEWITGKPNPAEVPYTGPSMAAATTHQPGSNYRACTCTTASSHTCMRSHWNNGYPVMEDKMQ

SEQ ID NO: 938886 - protein, 170 aa, Homo sapiens
SSTNRHKSLFKCAKCSFPQNSGLEFQSHIPQHQVDSSTAQCLLCGLCYTSASSLSRHLFIVHKVRDQEEEEEEEAAAAEMAVEVQQPEEGSGEEVPMETRENGLEECAGEPLSADPEARRLLARPLRTMVATMITVNHRPLRGITSFLWRGRGDRRLCSVHGQGWCRSVF

SEQ ID NO: 938887 - protein, 93 aa, Homo sapiens
KDHASRIIHKLICENPEDSSYDSTRGGIEENGSPEERRQNSVSNFPPPAGREFILRTTVPRPAPYSKALPQRMYSVLTKEDFRLAVKIIDEDV

SEQ ID NO: 938888 - protein, 74 aa, Homo sapiens
GRPISFVFSFNFNVNSQYRILGDIGVASSGKNCQPVLPSGKFRPRNPDPQEFHLLLFWDRKPGVGLEPSCFLLT

SEQ ID NO: 938889 - protein, 87 aa, Homo sapiens
VCFPKDSHEFSCDVSFKFRRILTVTGTTESMLGIGLRGLTDLQVLFFSIPSFLLSLQRGSEQVCRCKFLHDKQIEYNTSSRLSKNDG

SEQ ID NO: 938890 - protein, 173 aa, Homo sapiens
MRIAIFHFTGGLLSTFSASARSRLWAARSARPPLTCGAADSACGRVASVRRPGLIVEGSVGWALAQFIEDVVGAHQVIAAEAQVALVVSLTPTEFTHLHTDVCCTGALRSVPRGRSRVRRVHRCSTSACSFCAPSVRSFLGAHVRLEQQTLGGQRGVFDLHARAQLAASGQRS

SEQ ID NO: 938891 - protein, 54 aa, Homo sapiens
AGLGNYFLIYKTGFNSAGVGNGVPFPPKAQGPEMRPFTWRVSVLVFKSLKRYPK

SEQ ID NO: 938892 - protein, 136 aa, Homo sapiens
  misc_feature (4)..(4): Xaa can be any naturally occurring amino acid
FGFXSPPHQISPGLFHAPFPPRPGAGCSPNGFPTPRVPKTGVFRGVPNPRGGFFKTPQSPLATPFLPVVSPLEGPAPNFGTPSFPKGGGPILRGEFSPLPPLLKGVFREKKKREMWPRSIPLLKALGPPFLRGVNL

SEQ ID NO: 938893 - protein, 142 aa, Homo sapiens
GAPFPPPPPGALCGGLGVFFPPGGFPGPPPAPFERGNFFPPGGFPLTFPQGRGFSPPPPIWGGEGGPPRVWFPLQRGPLWKPRNPRRNPANFFAPSKRNFGGPLFRFREPRFLKGFPFCPNWGFREFYFPGWFFLKKGVLNL

SEQ ID NO: 938894 - protein, 158 aa, Homo sapiens
INISKKVIYTKTTSTGHQHQRPKIDKTTKMGRNQSRKAENSKNESTSSPPKGHSSSPATEQSGTENDFDELTEVGFRRSVTTNFYELKEDVQTHRKEAKNLEKRLDKWLTRINSVEKTLSDMMELKTMARELRDTCSSFKSRFNQVEERVSVIEDPIY

SEQ ID NO: 938895 - protein, 69 aa, Homo sapiens
PRPLLQPIGARTLHELKLWTGSREELLEEKIPEDGPYTLPNSSSGAAGPCPKRLPLSPKNRGSRKLPLN

SEQ ID NO: 938896 - protein, 89 aa, Homo sapiens
MLLVKAATLSRLEAEVSDLCSASLKDHLSEKTPDQKGKARASCEEASFSRSAPKFTQLSSREQIICTRQTKYIPTITREMAGYLSQWVW

SEQ ID NO: 938897 - protein, 78 aa, Homo sapiens
VPGGDLAKVQRAVCMLSNTPAIAEAWARLDHKFDLMYAKRAFFHWYLGEGMEEGEFSEAPEDMASLWKDFEEVGLDSF

SEQ ID NO: 938898 - protein, 82 aa, Homo sapiens
GVPEDDHDDLYLDGRREPQEGMKPSPAVTKTRLSGLPVRLLPSSVAAGPLWGFVPCSGAQAGVVHIHRPQQPSKMGKGVALP

SEQ ID NO: 938899 - protein, 76 aa, Homo sapiens
MTEEDLSVPILSQKLQFEQPFTRTNTFTRAKESRREITAPECSTEIREDVLKRVGRTVSHCALFVMYFRISSDFVK

SEQ ID NO: 938900 - protein, 108 aa, Homo sapiens
  misc_feature (4)..(4): Xaa can be any naturally occurring amino acid
RPFXPWVATPPPPSTMLDFPHRFPRAEVSRLASLNSLDEHGVLAQLIPALLPLLPTKAANDLGLKDITYYYVEGLCRARSRSHLPSWRRPASSLSGGRASSAGLIPHS

SEQ ID NO: 938901 - protein, 31 aa, Homo sapiens
QDEADRLGKVYDKYMCSFLFNLNNDFVVDAA

SEQ ID NO: 938902 - protein, 50 aa, Homo sapiens
MPGETEEPRPPEQQDQKGVEAAKAVEEPQYRPPEAVARRCRTTSSRVLRG

SEQ ID NO: 938903 - protein, 30 aa, Homo sapiens
SLPLLALPDGADCSLSGGGASREDRAEAVR

SEQ ID NO: 938904 - protein, 242 aa, Homo sapiens
  misc_feature (158)..(158): Xaa can be any naturally occurring amino acid
  misc_feature (182)..(182): Xaa can be any naturally occurring amino acid
MARVVQVSCRAFRVLRGRLRFAEPGTREVEDGLLWWDKWDAFDEYGAITIDGEEYISLKEYAGKYVLFVNVAEVLRRDEASTIELNELQEEVAAFGLVIVGFACNKFGKQEPGEEVRDRFLQSSMSDEVEVLFANFELFEKGDVNGEKEQKFYSFLKXSCSERSELLGRFDRVFWETMKVYXICWNFEKFLVWPDGIPIMGWHHRTTVSNVKMDILSYMRRQAALGGQEEVTEGRLHPMSTM

SEQ ID NO: 938905 - protein, 110 aa, Homo sapiens
GLFGAKGQFSLDVVVVVVVFETESRFVSQAGVQWRDLGSLQVRLLGSRHSPASASRVAGTTCACHAQHFGRLRWVDHMRRLGVRGQPGQHSENLSLLKIQKLVRHGGARL

SEQ ID NO: 938906 - protein, 47 aa, Homo sapiens
AGRQSGFPYPGALHPFHVIRITHVVLCRADSQQHAVLEASTVSVCSI

SEQ ID NO: 938907 - protein, 154 aa, Homo sapiens
AREWPFILIPLPTRFPILKRQLGQRFLMCFTPLWATPSLQYYAPASKLRGLGWETSFPPERICKGLQINTRTLGKLVPGPEISQGNLAPTHNKKALGPFRRRFFQTHIPRRITYFAPREFLRLSPSGTQGDPVPNRCSVSDAIPKKTYMRDSNR

SEQ ID NO: 938908 - protein, 43 aa, Homo sapiens
LSEGHDLLQEDGRKGAPSSKAAPPLSTESSEEEAQSLTLRGSA

SEQ ID NO: 938909 - protein, 50 aa, Homo sapiens
  misc_feature (2)..(2): Xaa can be any naturally occurring amino acid
NXGRIRTRKFMTNRLLQRKQMVLMSHRERQCLDRMETSNVQTHDVLMIDY

SEQ ID NO: 938910 - protein, 46 aa, Homo sapiens
RYKLCKVRKIFVGQKDPSSGDIMMPHIRYPILISDDTSDDETADTD

SEQ ID NO: 938911 - protein, 47 aa, Homo sapiens
HVLRINKMLSVLGLTGSKQACEVPLESPGTVAGYTWQYTVIAQLQTE

SEQ ID NO: 938912 - protein, 39 aa, Homo sapiens
ASLEEQFQHFKLLACIASRPDSVTSRCYVLEARVSLSRI

SEQ ID NO: 938913 - protein, 35 aa, Homo sapiens
TGFALLGFPKGFLGALIGGPPAGPGPGFPGEPPGT

SEQ ID NO: 938914 - protein, 149 aa, Homo sapiens
  misc_feature (54)..(54): Xaa can be any naturally occurring amino acid
GGGRGVSRGFLPPPPSPHRGGVFGPIIGGFLKVGFPPPPFRPRGGGGVGGGFFXKSLFFSPPHSPGGAPPPFFSPFGDTGGPPPPRLFLWAGGGVIFFPGDPLGPFGLFQKLFWGPLWGGPPGGPAGFSGGPPPPGEKGKKFFFWGPVL

SEQ ID NO: 938915 - protein, 47 aa, Homo sapiens
GNLCAMRASEESDAGWAKREDEAESVTLAVHVSTEQNMMQTLDLYSV

SEQ ID NO: 938916 - protein, 157 aa, Homo sapiens
  misc_feature (16)..(16): Xaa can be any naturally occurring amino acid
  misc_feature (61)..(61): Xaa can be any naturally occurring amino acid
  misc_feature (142)..(142): Xaa can be any naturally occurring amino acid
TPPFFPPFPGGRFFAXTKGPGRVFSRGFPSSPPFRLWGFFCPQIPGPSKIFLKPPPFTQMXVGGPAGPPFKQALFWTPQFPWGPPPLFFPPLGPPGPPPPPVFFLGRGGVYFFPGEPLCPFPLFQSFFLGPFWRAPPRSRPXFSGPPPPPGVFVPFL

SEQ ID NO: 938917 - protein, 103 aa, Homo sapiens
RRPPQDKRGDFVGLQERAQQGIRATAFSARSNPAACQDASCSPAACPVASVGSHRQPAPGGAAPPPLAQKAVAASAGPRPSAPGSPRRASASPSRSRPQGLLL

SEQ ID NO: 938918 - protein, 142 aa, Homo sapiens
  misc_feature (112)..(112): Xaa can be any naturally occurring amino acid
HVLTSLRSIQQTLKDGQRDRRWSFIMQCDLCCNRVLEARSSKRGVGSTMLSLKMLGRICSMPFHSLLGFPASPDIPWLVDASPQFPPPPPPPQKKIFFPPKKFSPKNQIWGXPPPSLCVPLRSLYSSSKDTDTSHSGLSVHS

SEQ ID NO: 938919 - protein, 75 aa, Homo sapiens
SPSDSCWVRHDPSAAQAICRHQRQTLQGVLRFSVNAAQVIVCPERCSHVVVLRPPLKMGLYSSCNLPLTVHPALL

SEQ ID NO: 938920 - protein, 45 aa, Homo sapiens
ARQPCCACPETREARDAVIIEKGEEHCGHQFEAHKEGMRALGFKI

SEQ ID NO: 938921 - protein, 67 aa, Homo sapiens
ILNGVSNTIIVVIETHPYELFTFVPPVYNSALLEELNSRMDHFSIIEKQILSLREKVHEKEREEYSC

SEQ ID NO: 938922 - protein, 117 aa, Homo sapiens
  misc_feature (95)..(95): Xaa can be any naturally occurring amino acid
  misc_feature (106)..(106): Xaa can be any naturally occurring amino acid
  misc_feature (110)..(110): Xaa can be any naturally occurring amino acid
  misc_feature (117)..(117): Xaa can be any naturally occurring amino acid
MTSALATMRVDYEQIKIKKIEDASNPLLLKRRKKARALEAAALAQLSHRALLPTGGQAITLYRNIFFKRRDRTVHICLLSSSAAWSLFGGGGGGXKKKKKTPLLGXPKFXPKGVWGX

SEQ ID NO: 938923 - protein, 128 aa, Homo sapiens
  misc_feature (68)..(69): Xaa can be any naturally occurring amino acid
MAYQSVTECVPNPAHTGTRCPRLSSKYYFRSHVRGPYAPNTANKITQEQGSSGVRVGSWVFRGVCGEXXPPGWGFGLKNYPPSFFSPFFLGLTAKVTGFGISRPGFEPCLANYELSFMRIRVKRTPKQ

SEQ ID NO: 938924 - protein, 152 aa, Homo sapiens
MITIRPHSNSMRRALVAQFLCPLKPKKWDNFLRSKDPPYEALEKTLLHLGPFSSSSIRAAYLYLKSKVSHNGLQKQNSSPPTLIADDHAVGIWRPGEDGSGCRTCCVSCIYGCTDPKTALCSLLLIYSDFEGSIEDVSCLYLVSPPSAQPPN

SEQ ID NO: 938925 - protein, 101 aa, Homo sapiens
PSQQRAVQCLVPAEKVLQATPLNTGAKGVDRGHLAPPDSMLIVSDEERSRMIMSAALEAQAASRPVQPGAEVHVLQGAQPTVPPAVTSSARGHSRTCHAQR

SEQ ID NO: 938926 - protein, 103 aa, Homo sapiens
  misc_feature (14)..(14): Xaa can be any naturally occurring amino acid
  misc_feature (58)..(58): Xaa can be any naturally occurring amino acid
  misc_feature (78)..(78): Xaa can be any naturally occurring amino acid
MSALAVMLMAGLPXSAAEDTPAASAEAKADAPLQADYYTRRAKSILEAEKQQYRETAXLAASYPGMDVVVCEAGCTTXRKPEVVWAKRHAEAAKTVTQGLLVP

SEQ ID NO: 938927 - protein, 113 aa, Homo sapiens
ARHPYYSHQEYLSTEAHIVLLETTGTKYFKAWFITILWGLFFTLLQASEYFESPFTISDGIYGSTFFVATGFHGLHVIIGSTFSLSASFGTLNFHFTSKHHFGFEPPPDTGIL

SEQ ID NO: 938928 - protein, 133 aa, Homo sapiens
  misc_feature (58)..(58): Xaa can be any naturally occurring amino acid
PRHTEARVHLCHPGRVLKQDPVAHVAWRIPGPPAHPPERGFLPPVVRGLCTPGTIPLXPAELGLVYPHLQRLGPGPALPEAFEPPLGLTYPGARAPACRGRGTEDLAELPAPDPATNRGPQDSEARSARSPEN

SEQ ID NO: 938929 - protein, 120 aa, Homo sapiens
  misc_feature (99)..(99): Xaa can be any naturally occurring amino acid
IKITTTNHLPTHNTRSLSTHSPHTPSTAGGRSRCGWGTCIPNNQGHPTLTPTTPSHHCHHPNPSHTTSFIYPSPHPPLTPRTHPFHPPPPMARARLWAXLTANPPSANPKAKPSRISTVV

SEQ ID NO: 938930 - protein, 104 aa, Homo sapiens
  misc_feature (36)..(36): Xaa can be any naturally occurring amino acid
FLLPSPGPCAALCPRSRPAHGTRIPHIPFAHDYPAXSSSALLELRILLGAPELHGAHERARRTRGTFLVRDSSQRNCFFALSVKMASGPTSIRVHFQAGRFHLD

SEQ ID NO: 938931 - protein, 54 aa, Homo sapiens
  misc_feature (37)..(38): Xaa can be any naturally occurring amino acid
RGRGRACGVGMSLTWLGPGSKRNNGGVVHGKKFVMAXXAGAGSDSDEIACQGTA

SEQ ID NO: 938932 - protein, 62 aa, Homo sapiens
  misc_feature (28)..(28): Xaa can be any naturally occurring amino acid
GTSELPASVMQQDSRKANGKYTGRKMNXAKPLSYDSDSRAPGREGVCVASPQRPSQGFSMGK

SEQ ID NO: 938933 - protein, 106 aa, Homo sapiens
RLTAPQRYEAASMREAADAPGSDEAPRGPPQEIWLQRPPHQKYVPADGHDVGASGESRGGADLPSATGVRARVRLSCAASSLNENVDQQRLLKLGTSVSELVSRFD

SEQ ID NO: 938934 - protein, 130 aa, Homo sapiens
QRTGVAEAHVPTCVDDRVHRVFIANGALIAPLAQTWGHWRLGQAHWRIGAVPPAELPRGPELHVLSKGSEQAARRALGEVGVEAGEQGSDGIPRSARISGAEDADLRDGPVQAEEHPKRSARVQAQLHAA

SEQ ID NO: 938935 - protein, 161 aa, Homo sapiens
RDSMPTSSGFSAPRRCHPIPWALSSPIIFILPVRRAYWGTQIPTPHTFLCKVTGRCGSVLVRLIPAPRGTGLVSAPVPKKLLLVAGIDACYPSARGCTAPLGNFSQATFVAFFKTYSYLPPALWEGTVFTKSPYPGFTDHLVKPPTRVSVPRTQAPAVASP

SEQ ID NO: 938936 - protein, 87 aa, Homo sapiens
DVDRKELDLRVRQFDNTTSKDIQPLPMPVVVYDDKASSYLKDANLDAEKLKKSVIISQSVDDASAANIEFDHPKTFNDELLGTPTAP

SEQ ID NO: 938937 - protein, 31 aa, Homo sapiens
AKIMRHSSKGSHQPPWSPQQALAHRGVRPRS

SEQ ID NO: 938938 - protein, 45 aa, Homo sapiens
ARGGGSWGGGGPSRLSSSVLKPFISPAPGRYLWGRVPRITTRAAR

SEQ ID NO: 938939 - protein, 67 aa, Homo sapiens
LLLFLLGPGVDTEWCPSSKSPLTLLNGEELFFSWNPYESNFFQPSAACSPVPVTDRRASPRGRHGCC

SEQ ID NO: 938940 - protein, 66 aa, Homo sapiens
REKEMEEDERDRKREKEELEEIRQRFWQKGIQIQMQSPEDGTRGWEAQQPQIKQEPESEEEEEEKQ

SEQ ID NO: 938941 - protein, 32 aa, Homo sapiens
RISHVHVPAAAPRSGLRVAGRLPGTETPLRCG

SEQ ID NO: 938942 - protein, 171 aa, Homo sapiens
ALDEKLLNIIDLQSLHGYYELPFLILLRPTRPGLGACRAAGHVLHCGHLTEHHEEVEPLILVLNSLAFELNQGFAVPKPLVGVLCFALNSLFYRNKSFPRYGLVLKKLNTGNTGFPVSHQGGVRITWDCAQATFISYDKMVISLKGGEIYVLTLITDGMRSVRAFHFDKAA

SEQ ID NO: 938943 - protein, 74 aa, Homo sapiens
  misc_feature (2)..(2): Xaa can be any naturally occurring amino acid
VXDLLNLFHPFITNWKKQPPGFYSLPINGPLWAINIDLSSTLSRRQTGTPFDLAEGRSELVSGFNIEYAAALST

SEQ ID NO: 938944 - protein, 76 aa, Homo sapiens
TVWRIEGFIALGGFPGILQKHCCILPDRNTDEDPQAQGIRSLAENSQLRRGSLGFLPGAHTRDPFVTVFKGTAAQT

SEQ ID NO: 938945 - protein, 32 aa, Homo sapiens
ANPYIPVLCIVRARDRNVRIVNCVTILMLERA

SEQ ID NO: 938946 - protein, 56 aa, Homo sapiens
SPVIVLGGPSGPPQQQQQQQSVPEPGRAATSGPRRYPSPTAELWPEIGRHGGTQQR

SEQ ID NO: 938947 - protein, 143 aa, Homo sapiens
CEVSPTTFLVWDAAFRANLLPNGTREVSKCLARQLRAVGTVTQMEGEPTPVNLTEPARLEFEFVLVLSFGTVLFLATVYENYALVYSCTCIIQLFHVDFAWILASNPNLPPETVGSLIYILSSDNIDVKKVTVTGLVSCPKLS

SEQ ID NO: 938948 - protein, 126 aa, Homo sapiens
MGAAGPFPPLFFLWAAGGGYIFPREHPCPCWLSQKSFLVTLKKGPLQERFLVPRGAPPPRDFFSFFPAGGGPPGFFPPRFFFLFSQGGGALFFRGKKNFFCKILVPPQIFFFFKKNMPKIKFVSSF

SEQ ID NO: 938949 - protein, 94 aa, Homo sapiens
EKNVRPVVRLCPGVGQRNLILQPVAELKKQTGFEHRMAKEQWWLKVRPLVRILAKKKASYEVSDSGQLEQCAALECVTESRRHVAAGTVDCVFL

SEQ ID NO: 938950 - protein, 74 aa, Homo sapiens
  misc_feature (26)..(26): Xaa can be any naturally occurring amino acid
  misc_feature (57)..(57): Xaa can be any naturally occurring amino acid
LPLPFLTLTLCSHMGWGAEFPPRGDXLPAGAATSIATMGHLAGRGFAGLLQGPWSIXPRLFIPYNVTFLFYFTL

SEQ ID NO: 938951 - protein, 67 aa, Homo sapiens
SDCTGNFCLFKSTTKDLLFSDDTKCFVKLPEGTTPEKYLGAEYMQSVGNMRKCSTSRLLEACTFHKH

SEQ ID NO: 938952 - protein, 75 aa, Homo sapiens
DTALHAAASKGYADIVQLLLAQGARTDLRTNEKKLALDMATNAACASLLKKKQQGTDGARTLSNAEDYLDDEDSD

SEQ ID NO: 938953 - protein, 90 aa, Homo sapiens
LGVRMAEDIKTIIKNYKTAPFDSRFPNQNQTKNCWQNYLYFHRCDKAMTANGGDVSVCEWYRRVYKSLCPVSCVSAWDERIAEGTFPGKI

SEQ ID NO: 938954 - protein, 101 aa, Homo sapiens
KGEKRSSEKNPVFDRRSKAFVCKPGGGPPSGLGKVLRKSRMKVNLFRGGGPPTIMMVQRCGDKVNKTRVVLPHRGVRIHRYRCLKVLLLKEDFSHSYRSEI

SEQ ID NO: 938955 - protein, 74 aa, Homo sapiens
TMKGVAVWDSVVTNLSIRSSWGYSFKFHPVRCHSRSSCCFEHLPTLLPKSFYGVGPLCFLYQSCHTVWEVISEV

SEQ ID NO: 938956 - protein, 37 aa, Homo sapiens
LGGLLRGRGGPVAFGGSWGAVAMRSPSVRAAIRAFFS

SEQ ID NO: 938957 - protein, 162 aa, Homo sapiens
SLFPRAPALALLSPFIGPPLGGFGPGGPALGRGPPFLRVPLGLSPTPLCPQARVGPGGFLGLACGPRLPFRGAPLSSLGGLVWALVSARGPPLGGGSCRVGLFPGALPGLGGAFSPPPPPSPPPPPPPFPGFPPAPAAFSVPLSVSFFWGLLVWSPFPFRFI

SEQ ID NO: 938958 - protein, 70 aa, Homo sapiens
ALLPYFVYVVSGVKSVSHDLEQLHVLLQVARSLFRNPHLCLGPISACLVGIAIYCVWEHLAASLTPLIDH

SEQ ID NO: 938959 - protein, 30 aa, Homo sapiens
MLLVRKEIIARRASIRRVSITRSNPFGTTI

SEQ ID NO: 938960 - protein, 75 aa, Homo sapiens
KGCEFKSWLFKFYQARSQVLLCGEVKNPYLLTSNKTTVKEQNACLTHPEQISYGRSAVVENSSPQRLYLSCREGS

SEQ ID NO: 938961 - protein, 97 aa, Homo sapiens
EQEIATYRRLLQGDTDAHLTQYTKEPVTTRQVRTLVQDLQDGQVISSRDQAATSPPVRTRYPGRPPSRQGAAAPSAPQSPAPPASAPCLSPFPMLPC

SEQ ID NO: 938962 - protein, 69 aa, Homo sapiens
AAQRHRTGREEQDHHAALLQGLALRVKPNHGPLRAQFTTAPQVYGHRSGSCTGQTPGRTRRSKPESSAE

SEQ ID NO: 938963 - protein, 68 aa, Homo sapiens
PFFLLLLELLFLVLVDCGHMGKYNSLSKKPKKAPKVELGTKTVDTSMDEGLQGTAYAHSLSNKSKKKK

SEQ ID NO: 938964 - protein, 99 aa, Homo sapiens
GGAHPPPPPPPGGVLGGVFPPPPQERGPLFFWGPPGGSGGGGFFFFKIPPPPPPGGGGGGGPPPGGGGAPPPLGGGGFFFFFWVPPPKKKNRVFFFYIF

SEQ ID NO: 938965 - protein, 35 aa, Homo sapiens
MATPGPVIPEVPFEPSKPPVIGGQPQWLTEFQRVS

SEQ ID NO: 938966 - protein, 51 aa, Homo sapiens
QLSSMVWNGHPLAIADSACSAPALRHHLVHYAHLQASAGGKSSPSCRARRR

SEQ ID NO: 938967 - protein, 98 aa, Homo sapiens
RTTQQKVSCMLEASSVFTAAPPPPDHCSNYRLNSPPVRSAAALDSHRSTNPIVNCARKVCRLPAPYENLTPDDLSLSPINPRWDHLVARKQAQGSHWS

SEQ ID NO: 938968 - protein, 59 aa, Homo sapiens
  misc_feature (33)..(33): Xaa can be any naturally occurring amino acid
MEVAPWTLEAAGAAGGASGAMPAAGCRSFFAFXTATSPVCQRGFRPSCGAGQGRMGLET

SEQ ID NO: 938969 - protein, 139 aa, Homo sapiens
MERQHGQRSVNMLKDSRFFEPDVTRTQVNTVVSGALIRLLTKKDPFVKYGIGRKLWIFLHRDRSEEEFGRIHQAQAAAVKPGKLFSKKPKPPFKVKFSCKGGSIKVLCSGPFEQSQMSLSEFSMPPTPVTPVTPTTPAL

SEQ ID NO: 938970 - protein, 81 aa, Homo sapiens
SMCAGQRLASEPQVPAAVSLPTSSVPETRGRNKGSAALGGALALAERSRCNYPSMLFFSHLGATRLPKGGGPGNDLSRGST

SEQ ID NO: 938971 - protein, 44 aa, Homo sapiens
SGPPVCKSSEVLYERPQPTPAFSSRTSYSWKSIQMPCSNKQEVV

SEQ ID NO: 938972 - protein, 100 aa, Homo sapiens
LTVHTIPIDQLQWGASARDCHASMQKLDFLQHLLAAFWATSGSITDSSPTPSVMTLSRAPHSACGPEAVQKLASRGRLVTVSPMPQPDFELPSSGGPPRS

SEQ ID NO: 938973 - protein, 124 aa, Homo sapiens
FTPFKQAVKETCAWFTDNYEQALEVKLKDRISCLRTIRLQEPSGHHPSNLARSSGTHQQTGACIPFALHPKAFFHGAPHSRWSSGKPGFPQARRFAPHTSPLRVSTLILHPTPWEPIKCIFTGK

SEQ ID NO: 938974 - protein, 43 aa, Homo sapiens
CVDTSSPKAGKAALETGAHVPRPRAWHALRTLRHSIREPRLPP

SEQ ID NO: 938975 - protein, 59 aa, Homo sapiens
  misc_feature (28)..(28): Xaa can be any naturally occurring amino acid
GGRVQRARGQACACGRASSSAPSPCSPXASLSSELSSSKYGNRPPCAGAAGLRVRSGPR

SEQ ID NO: 938976 - protein, 101 aa, Homo sapiens
SDLCPRVPCRRMAPAARPGPGALLACTYCSLAHLVPWAPPQVTAQPLPTPPRPHPPRVFLPCDSWNLRPPQSPGSGCPPQTMPPDDSLQPRNKCTPQNTQQ

SEQ ID NO: 938977 - protein, 63 aa, Homo sapiens
MYSSPQPIFSRFLRSLASLLAVPRARFSSGVSKAFISSSCSFRSSRSRSRSCRSAAGSGAAAV

SEQ ID NO: 938978 - protein, 114 aa, Homo sapiens
  misc_feature (25)..(25): Xaa can be any naturally occurring amino acid
  misc_feature (37)..(37): Xaa can be any naturally occurring amino acid
MGRLPLHPQRGRAAPRRRGALPGYXSLARRCVAPGHXREPRPKLHHSLSFSGFPSGHHHPPGGLESPLLLDSPHVAHAAAALLLFGLVLLLLRLLLFSPPRPPPRAPRHAAPRR

SEQ ID NO: 938979 - protein, 49 aa, Homo sapiens
SNPKKKAFVSHGAIQINTTSGVFKTVTIRQFQNLTAVSRFLSTKKSSTV

SEQ ID NO: 938980 - protein, 94 aa, Homo sapiens
ITVTNLGSKVSVPPKETSPGWDHPSSFAPSICSSRWILEWQNWQHKNIKGVIFDNPVYLKTMEEDLLMDMGRHGASGGCTCPVIPVISTDDDSA

SEQ ID NO: 938981 - protein, 49 aa, Homo sapiens
AAPVLRGGAGVGSMIKIYGGRQRNGFMPSHFSRGSKSVAAGSSKALEGL

SEQ ID NO: 938982 - protein, 164 aa, Homo sapiens
  misc_feature (16)..(16): Xaa can be any naturally occurring amino acid
MAKFPSEGMAFNFTHXINPALSTEKIALTDEEATSFSMKSGFFNLWEPCFKPMNNFGPTANQGNQGALIGTSLNHSSPFSSFLIQNSFCKFKILPKQFIIQIFKFFPLRFPPKKNPFQQLPRKAFPQALPGTNLPVGKVGEEVGAVPVRHPRHDYLLNVVDDVL

SEQ ID NO: 938983 - protein, 83 aa, Homo sapiens
KTNPSDTGNFGFPIQEHTDLGIKSDPTLGTHGLDFYVALARPGLSIADKNRRTGCIGPKHRISKEEAIRSFQPKHDGIIPPGK

SEQ ID NO: 938984 - protein, 141 aa, Homo sapiens
  misc_feature (119)..(119): Xaa can be any naturally occurring amino acid
  misc_feature (121)..(121): Xaa can be any naturally occurring amino acid
HQTHSSWTPPNAQYWSQFHSVEPQGPQLRPQQHKQNKQVLGYCLLLMLAGMGLHYIAFRKVKQMHLNFMDEKDRIITAFYNEARAAARANRGILQQERQRLGSAAATIRANPRPRDRAXGXRPEGLTWMGPAGRSAFASFP

SEQ ID NO: 938985 - protein, 60 aa, Homo sapiens
MYLSLLLLQLGNKPTFWPSSLRKIGGRWVFEKSSATKHNAEHDAGDKEELSMNVEYDWTV

SEQ ID NO: 938986 - protein, 86 aa, Homo sapiens
RMPFDFEARGSPLTLCQELSKAGELTWDSWLGRKRSPLRTSLRQADHLIHSPRRLCVLLCVFCVLSLHAPPATLVDWDQVLTPVRK

SEQ ID NO: 938987 - protein, 96 aa, Homo sapiens
  misc_feature (10)..(10): Xaa can be any naturally occurring amino acid
MVSNGLHTPXCPGGAPALTLTVRLHQQRVAHQWVGAGHRGDGPHLLPFPRVARHPLQLAQDQSGAGQGNGTRRAPQQQLLPHEPQPEPRHSPPLAA

SEQ ID NO: 938988 - protein, 119 aa, Homo sapiens
MGERPYSFQTCGRSFPATRILRRHLAILSEPGQEHAEPRSECVECVESFSCSCNLLRHLLVHTGAGPTPYCSVAAASAVTPTLRPPAHSRSRDAVLAWPAFRQFALRHLPGVLHSGCLH

SEQ ID NO: 938989 - protein, 76 aa, Homo sapiens
GLLGVGGAMVPPQAHLISTVLSPSEHQPRGKGERMCDADPPSRMVSSTSHPQCQGPLLGAFEGGRWRGFHFDVGAA

SEQ ID NO: 938990 - protein, 118 aa, Homo sapiens
  misc_feature (9)..(9): Xaa can be any naturally occurring amino acid
KSFAFVCPXWYLLFYLVKYIFAVAHRLFFPFPLPLFAYRWVARVFEISPFYAFDNNGLSVADAYYRHEIAITCLVLEDLGIQSTPLVLMAIEVLRRLRTYRCLSVEIEDVNPAKTVNI

SEQ ID NO: 938991 - protein, 69 aa, Homo sapiens
RPLLLLNSRPYDSHVQGLPDRCDHTSSRVPPYRLVASAAIQVDIPHVPSSAPTSSRPPDLCDPTSSGSP

SEQ ID NO: 938992 - protein, 109 aa, Homo sapiens
ASELSMSGAVLSLPTSCLVAKTARCTDSVIILNRCSSISMSGISSMNALCLCLVSLCHSCCEVEVRVEETFYYVKLYNTCEGNSIWFMRSVVFLQVSSKMRHRQGFGPH

SEQ ID NO: 938993 - protein, 74 aa, Homo sapiens
THPPHDKLFPVSVGFRMSDYVLEESWLSASIFLPSLQCLLISLSRERRSQSSESESTTLLSTFVTVVSTDTFYF

SEQ ID NO: 938994 - protein, 69 aa, Homo sapiens
IIPPNKNVSKVEIRPYVIDYIPDLQIALETHPALGGSHYRRAATPPGRDLSSAPSGTPLTALNTDPAGA

SEQ ID NO: 938995 - protein, 80 aa, Homo sapiens
LSYREKEIFDNQLLEERNRRLSVREQPAVLSAGLAVEAPPVCMSLSEDGGLEGARLCLEPVCAFLCVAILISILREKPIW

SEQ ID NO: 938996 - protein, 61 aa, Homo sapiens
HTENDNCSQDVRPEESCGEMSEQQVGSDEAEQLRSGLFQLSSSSAWQPSHSTGPRAARLPR

SEQ ID NO: 938997 - protein, 77 aa, Homo sapiens
PQTFAGPIIGPGGTASANFAANFGAIGFFWVEEMLDIAINRSSLSPVELSLDSSKHFEEHILIKCSDKLFLSCYAFS

SEQ ID NO: 938998 - protein, 136 aa, Homo sapiens
  misc_feature (120)..(120): Xaa can be any naturally occurring amino acid
GTLLGVPGEQKLEKGSLVLTGAYTILRPESPAPLHGGLSQGCVIAEPSSAPLRTLLSRAPSPLRRRDSLAGRLSETQGAELCAAGSGLGRVSDPRPWFLKHGPAPLSSSSPEAQDPKKGXQCLVPSSSPCCASGAA

SEQ ID NO: 938999 - protein, 31 aa, Homo sapiens
NLKILQLISVNNFMIIPVRLAKGTKVEIKRT

SEQ ID NO: 939000 - protein, 32 aa, Homo sapiens
  misc_feature (16)..(16): Xaa can be any naturally occurring amino acid
PAHSQIVIEALALVGXKRRCEPSSTSGGSQVQ

SEQ ID NO: 939001 - protein, 72 aa, Homo sapiens
MRSPLFQHFLFGGPCGASSKAAASGKFGVINETCGNNRLRSVATAEGESTGAAFCQHNGVEYHVLDLITLQP

SEQ ID NO: 939002 - protein, 75 aa, Homo sapiens
STKTKMKRRAVCGLDCGFWIETVGGGSWTFQSPFRCKGKFGIRRLEGFEGPLAALYFFRNSWAIINGVIYCKKKV

SEQ ID NO: 939003 - protein, 44 aa, Homo sapiens
GQGQARQGDESHSPPGPAAAVSGAPNPRAALPGPEIVVAEEQRP

SEQ ID NO: 939004 - protein, 135 aa, Homo sapiens
CQIQWGLSAQPWPRALALVYLPGQAKRLYTGLGKQWSEHKMPCAAARGLAHPAGFDPPKSYRTASGFCALFSSLNDIIYGLSRHSLPKWRSCAPSCPHPSQVPQIIGAQAEVKSLGPCFRRSWTLGKTCDPFLLE

SEQ ID NO: 939005 - protein, 38 aa, Homo sapiens
DFFLKLLDGAILGHGESLLSLRGLHGDFHDFGSAEQRS

SEQ ID NO: 939006 - protein, 71 aa, Homo sapiens
RVITNRERQPGSVYVVHVKDANGSSFATRLSNIFVIGKGDKPWISLPRGKGIRLTIAEERDKRLAAKQSSG

SEQ ID NO: 939007 - protein, 130 aa, Homo sapiens
MPQNTNPSVYLRRGGAGPSVLICSTGPEVFLPRPGVGRNVKSCLPGLPLNSYPKRGRRVVVPTRFFTDREINFLVSNKADPFFDGGGGVEKKNEIPLLVFPPRGDSGGTYGRGERLGGVVPPPPPPPLFF

SEQ ID NO: 939008 - protein, 37 aa, Homo sapiens
MSTQFSSRLHTLGGARRRSSSVKVTSGEGSEQQPQVS

SEQ ID NO: 939009 - protein, 90 aa, Homo sapiens
SATPAWCKYKLIERQCNYTYSQHLYVVAKPEVFKSAVSDCYVIFGEVKSEDMSAFAQAQAAQMLRPRASVSDDAGTASSAPSFNLIDLTS

SEQ ID NO: 939010 - protein, 35 aa, Homo sapiens
VWLIKPPIGLVLLLTVQKPNHLCSGGGGGPGCAGR

SEQ ID NO: 939011 - protein, 102 aa, Homo sapiens
  misc_feature (2)..(2): Xaa can be any naturally occurring amino acid
  misc_feature (24)..(24): Xaa can be any naturally occurring amino acid
MXVPRAPRGPPRQWIAAPHRSLAXLALTPASRLRVAARDHVHAAVHDHDDPMGRYEEHTEEKTASPPPRDTQKLLQGTGSFQPAGAYGHHQATTQSRARMAA

SEQ ID NO: 939012 - protein, 125 aa, Homo sapiens
QNEYRYGVDIGSTGACNRWNAQSVSFSSTSSRAGIVGTEIDAFGNHGVFALYQRTTVLVRSRSTVGDAARVGRALASPAAIANPDPKQATEWEAVGDRLRFRAGQPYDAASEFVFASPHVACDPE

SEQ ID NO: 939013 - protein, 115 aa, Homo sapiens
VFKPDGPSRFRKAYKPEQPLVRLRASYIGRPLECSKMRMGTLTTMDCSQLLQDWLGSPKSITAPDWAGFGPIHLNEIQCTGNEKSIIDCKFNAESQGCNHEEDAGVRCNTPAMGL

SEQ ID NO: 939014 - protein, 79 aa, Homo sapiens
KQSKARDNPERNASCLADSQDNGKSVNEPLTIEYPLEQNASLQNSNADRPRSPGNEEEMADHEECWSGKDASEVIAAKT

SEQ ID NO: 939015 - protein, 44 aa, Homo sapiens
MFLLLLCPDIATSRPVNPEVPLNHRSLQSLSAEPHCLQESREFQ

SEQ ID NO: 939016 - protein, 100 aa, Homo sapiens
QEQGGGPATRHADSHGPFCFGFFLKNPFRFLGAILWASWGCSWVQPWGYRLGSEKAGRSLGLESKPSPSHQSGFHKTFHSDYGQLGFRQFPTEQQTEERD

SEQ ID NO: 939017 - protein, 91 aa, Homo sapiens
MKTCWQILEIESTTQIDIIRQAYLARLPLCHPETDPQGFKALRQAYEEALRLAVNPVEEADDEEKDTAVTPSWSGVALPSIIPVVVDSPSA

SEQ ID NO: 939018 - protein, 83 aa, Homo sapiens
MTNAIQLKAKAGSNKFSSYSRFPRVTWYSSVSQTVFPGTLSHRLAIGEVREEDFCVKKSWQTLGLVKLNRVLLLNRANKLTNK

SEQ ID NO: 939019 - protein, 81 aa, Homo sapiens
EAMAFEISNGSHELLSQGQKQIFIQTSDGLILSPPGTIVSQEEDIVTVTDAEGLCCRMAPLKGFLLKVLKPPPPVGQGPSH

SEQ ID NO: 939020 - protein, 97 aa, Homo sapiens
GAPRGGGAPLVPPGAVIGYKTASLTCTSTAHRAYWCRRFHDFRSSAVARARQPRPWPNTPKPGDILLPRPRPEPPAAPRPRQRRSEAAWSDRDQGAV

SEQ ID NO: 939021 - protein, 126 aa, Homo sapiens
HEVRHSNCRGAASRETFNPGDLQLTSKLRIALLQLRGARRSLRPAAAVSHAPKYAEGLLPQLPLGPAVTQRKHGAPSQRVPSPSHRRGFSSRPWAIFSSDGWQGRGGRGRDPREAVPMWVGEGGGR

SEQ ID NO: 939022 - protein, 123 aa, Homo sapiens
ETGFYSVTQAGVQWCNYSSLQPQTPGLLLPWPPKVLGFQVAPLHPADFVTGFYSVNQDECSIAFIAHCSLKLLGSSCLGILSSWDYRYVPPCLANFKIFYRDGVLLCCPAGLELLGSGGLLEP

SEQ ID NO: 939023 - protein, 100 aa, Homo sapiens
SGWRLLEGMHRFRHAPHPVLRPTAGTSTVLSPRQGSWPVMALTGTAIRRLIIQAITQAAAMAIKVATIRVICPRMVASCSAVVRDHRILSLHDRILDSRT

SEQ ID NO: 939024 - protein, 87 aa, Homo sapiens
STAYIHQVSVQKEALSFEDGQPVQLKMAAWLTYSAHPEKSMTPAPWKPSNWKLDPLPTFTSLCCAIGVHHPVRTYRVGLGGPDTTVN

SEQ ID NO: 939025 - protein, 51 aa, Homo sapiens
AAAHATLPSASWFSCLPRAVCWVKGIPTILGPFPFGAQPCALGSNRWHPLV

SEQ ID NO: 939026 - protein, 143 aa, Homo sapiens
MKKFTFIDSVSLLLSLLLGVAMGRQDLGSARSKRPAVNNYFPRRHCSLAGSLGELLDPSGGHLRLLLVVLLPSLRVVLLWGRSGLLGLLADLFVILFPGRSRVLSVLWVGAEGLTLSRWAQGPVRGRGRGPGAAGSSVSSRRP

SEQ ID NO: 939027 - protein, 46 aa, Homo sapiens
MPRSLPEIVAATVEIVDKVLEIPPPRPPIPFLTSLFHKYKPQLEDE

SEQ ID NO: 939028 - protein, 46 aa, Homo sapiens
FMADLQKTRKQKGWNRHLTEWGGRRLLAERERGLWRCRSTRLQESQ

SEQ ID NO: 939029 - protein, 42 aa, Homo sapiens
QQEPQVGPELPLGEEAAPCHERGAVVAATPAPASPPAVLRTR

SEQ ID NO: 939030 - protein, 71 aa, Homo sapiens
PPGSSSGQGTMVSLAAPDPAIWASTTWSTELRTQMSGPDHPDPSVREQQGRRVKKFHLQTQFTSPAHLCSP

SEQ ID NO: 939031 - protein, 69 aa, Homo sapiens
TGQSGKPPATWKSQTRLSAATCRSHAWLLGTWESFQNPRRQPRACRYPRLPHLQASASKMGSHQFFLPQ

SEQ ID NO: 939032 - protein, 116 aa, Homo sapiens
RRPPLHSSLTLLLRLECNGATSAHCNLRLPDSSDSPASASPVAGTTGGNHHAQLIVFVFLVETGFHHVAQASLKLLTSGDLPASASQRAGITGVSHRARPELFVKASEAVGVEKEQ

SEQ ID NO: 939033 - protein, 150 aa, Homo sapiens
MAIRLDRASAAASEGMARGARAPWTFGTERPGKSVGEMSAVPPTQLQIGRGRRSTSSCTEEPSRSGACSGSGPTLGACCRPTPAQPPAGILHQRPPLLTARAGPGLGSSHAPRPQHRKASAASTDTGPRQAVASRDSIVRAHASMQTSGR

SEQ ID NO: 939034 - protein, 172 aa, Homo sapiens
  misc_feature (144)..(144): Xaa can be any naturally occurring amino acid
MPSDCNAACIVLAERLVLSHLHRTATASPPGRPPSSPRCCKSSETYPRQVRGFGALGGGGFSQEPRICQSPHKGRGVGKAPPCSQREDCPYFSGPHLPPPPALFPPGSPGGFPRTLRVEGAAYVGWRGASCLLDAQTPTPFTLXSSRLMAMREKLRATRAHSSMLVPHLQTL

SEQ ID NO: 939035 - protein, 65 aa, Homo sapiens
IKELGDHVTNLRKLGAPEFGLAEFLFEKHPLGDSDNESSPPGYFPHSRGVISLVTKAVQACGGFL

SEQ ID NO: 939036 - protein, 63 aa, Homo sapiens
INHMPSPEGLRELVRDPVIRTPHTGQLIDGHGHESLDLLEVSPASAWSTGPVICESQIQNQEL

SEQ ID NO: 939037 - protein, 70 aa, Homo sapiens
NKWEVVGNMAVSRYYFGCCEMQGLIYVIGGISNEGIELRSFEVYDPLSKRWSPLPPMWNQESISWCGCTQ

SEQ ID NO: 939038 - protein, 145 aa, Homo sapiens
PPSHSSVAGLTAPAYRVTLQSSRAPSLKDWLRFTNTTFHCQLLSGPCLAHPPCISAHVAEKPDDPPELPSLRVCAEALTLGARTHNYGTCAAACVYFAISGLSWSKMGRLEGWEVFANTQGVSPVLPGPPALQNASRNKFCVCVK

SEQ ID NO: 939039 - protein, 126 aa, Homo sapiens
RFVEKQNVRFMHQRTGHASRCLKPNGSSSVAWERYFSAERLLMREIFSFCARPRKPYTPEKKREILFDRQVTVERKFLRHIAEMGALTGTLFQIHPQHQRLAGSRHQQTAHHLKGGRFTRPFAPAN

SEQ ID NO: 939040 - protein, 68 aa, Homo sapiens
ILLNHTFNETQIEWFRAGSALNRMKELQQLRSQAGCPDPLWTLLDVTFVTGPCASSEPNLAVQHDLLL

SEQ ID NO: 939041 - protein, 30 aa, Homo sapiens
SETKINSLAHLEKKEPGGGIYSGFKRQIIK

SEQ ID NO: 939042 - protein, 145 aa, Homo sapiens
  misc_feature (10)..(10): Xaa can be any naturally occurring amino acid
  misc_feature (74)..(74): Xaa can be any naturally occurring amino acid
ATLPYHLVDXCPGAGDSQPVHVFPRRVPFRNIIPGNFDSGRGMGRWDGADTTTGDADFNPDHRRKELPLFLTRXGGRMNGGMFSLSGGMHVERKWSSSEPNFFNPQAPPKPGPPLLGEAAPASRRSGGARSPESHNRAGSESGRP

SEQ ID NO: 939043 - protein, 67 aa, Homo sapiens
PPPFPPLLGGGGGKNPLAPGFFFSGGVFFPPPPPPGGQGGAPPPKNFFFKKNFPPPKFFFGGGVFFR

SEQ ID NO: 939044 - protein, 132 aa, Homo sapiens
NSAAFQTCLPSVIQSETNFTSSSGACLLLPSGSNRMHRRIDCQHGRPGPPTEQLREPEVAGRRDCEGAGSSPRPEVLRGREPAGPRSARGRKRRAASGGPQSLGPGETAGLKVPGEAWVPQPLGICSRSALE

SEQ ID NO: 939045 - protein, 144 aa, Homo sapiens
QPAVNDLSLRHHSKEEAKYFLTLSSWVTPPHCLQADILFHASPPCSTSHQPSKSSSPHGTRLRLRPACSGRRTAPVGGLLPHRRPRHRPLLLALEKQQRGPVNKLFPAQAHQAHACNQLGRRQCGQHAQQRRLGQLVQVSGGGR

SEQ ID NO: 939046 - protein, 85 aa, Homo sapiens
ESRILMGFQCLVQGVRIYTAWLLYCLKGNETSRTKWKPSSKNSIQTQDAGLTQKSQGNSPKLWELPPDVPLNQAPSCLNLLFTHT

SEQ ID NO: 939047 - protein, 123 aa, Homo sapiens
GPEGRGVCDPQLGGGEERNGGSHPRAGTKTPGETQIQGHWNQFSAPLPQGISPVSQHWATWALYNLVSVYPDKNSPLLIKEGGIPLLRDIIKMATARQETKEMARKVIEHCSNFKEENMDTSR

SEQ ID NO: 939048 - protein, 92 aa, Homo sapiens
  misc_feature (24)..(24): Xaa can be any naturally occurring amino acid
HKISTAKVGNQPSEGSNLVRPTSXLPLLPKHGRKPGTPQAPTAAQGAGPQTRVPGLPCPLSESLASSSPLTFLETLEYFMVPPPHLPPPSVG

SEQ ID NO: 939049 - protein, 142 aa, Homo sapiens
  misc_feature (20)..(20): Xaa can be any naturally occurring amino acid
  misc_feature (120)..(120): Xaa can be any naturally occurring amino acid
ARSRSWLFVDDAACAGPHWXNVRSVPSWSLVPPPSRRPRPGRRPHGPRIAGPGSRKARLHQPLDPRGEGLGFSGGHGFRSPPPSPLRSHRFEIQNSVLGLLQQRHELGSEHPRLFSCLLXPAARHCRCGGGCGVALRRSAAA

SEQ ID NO: 939050 - protein, 119 aa, Homo sapiens
WWAEIALPLAIRAWCLWLLATALKPDTWVHGLGTLQGPRHTVSSMVAARVCAGPGILKSEERPGGQGSYQPGSCAWCRGVAMAMLDEGGLDFPQLPKTSGSRGGTEPSPRPCGSQDALL

SEQ ID NO: 939051 - protein, 216 aa, Homo sapiens
  misc_feature (196)..(196): Xaa can be any naturally occurring amino acid
  misc_feature (202)..(202): Xaa can be any naturally occurring amino acid
  misc_feature (205)..(205): Xaa can be any naturally occurring amino acid
AWSRPRYGVDLIRYTHAANTVVYSSNKIDDTIRYLSLHDNKYIRYFPGHSKRVVALSMSPVDDTFISGSLDKTIRLWDLRSPNCQGLMHLQGKPVCSFDPEGLIFAAGVNSEMVKLYDLRSFDKGPFATFKMQYDRTCEWTGLKFSNDGKLILISTNGSFIRLIDAFKGVVMHTFGGYANSKSCDTRSFIYSRLQXYYEPGXKTXKIHVWEWREVV

SEQ ID NO: 939052 - protein, 249 aa, Homo sapiens
QSHRLSAKSPDEGMKQNLHAEVKSPGERPSLQAERRKQMSPEKAKSPEKAKSPEKAEAKSPEKAKSPVKAEAKSPEKAKSPVKAEAKSPEKAKSPVKEEAKSPEKAKSPVKEEAKSPAERPSPTADRTEAKTPEKAKSPVTGRRPRPLTRRSQKRTEVKVPSEGRTDHSPQEVHSHKQPPKEGHSDEKATDTTKHSNTRQTNKHARRPPSNGHQTQRPKEEGHTTATWRTATRPKKSRVQNNEANKTKE

SEQ ID NO: 939053 - protein, 105 aa, Homo sapiens
SGDKPPGGEPKNLGGTPGRGPNPRRGPRTLSKEPCKPKAEKRENPPARVLKHAALPEKAPEDKAPPGEIRQGAKEHPGQPKRTQRESPSSRIQSNTICSLGLSLM

SEQ ID NO: 939054 - protein, 78 aa, Homo sapiens
KFLSTQGSLWERLAYGITPENEHHLVAQRDIQTVPDENETREKESYQLLPDILLNRNPWSCLNSQKELPLSWEPVPAI

SEQ ID NO: 939055 - protein, 376 aa, Homo sapiens
FQNFSLPKNRSWPRINSATGQYQRMNKPLLDWERNFAAVLDGAKGHSDDDYDDPELRMEETWQSIKILPARPIKESEYADTHYFKVAMDTPLPLDTRTSISIGQPTWNTQTRLERVDKPISRDVRSQNIKGDASVRKNKIPLPPPRPLITLPKKYQPLPPEPESSRPPLSQRHTFPEVQGMPSQISLRDLSEVLEAEKVPHNQRKPESTHLLENQNTQEIPLAISSSSFTTSNHSVQNRDHRGGMQPCSPQRCQPPASCSPHENILPYKYTSWRPPFPKRSDRKDVQHNEWYIGEYSRQAVEEAFMKENKDGSFLVRDCSTKSKEEPYVLAVFYENKVYNVKIRFLERNQQFALGTGLRGDEKFDSVEDIIEHYKN

SEQ ID NO: 939056 - protein, 57 aa, Homo sapiens
  misc_feature (13)..(13): Xaa can be any naturally occurring amino acid
  misc_feature (16)..(16): Xaa can be any naturally occurring amino acid
  misc_feature (25)..(25): Xaa can be any naturally occurring amino acid
  misc_feature (36)..(36): Xaa can be any naturally occurring amino acid
NDLTYFVLAAETXFFXDEWIHTLNXILQISPEGPLXGRRSTELTDLGLDSLDNSVTC

SEQ ID NO: 939057 - protein, 32 aa, Homo sapiens
YFCASSQEAVSMNYGYTFGSGTRLTVVEDLNK

SEQ ID NO: 939058 - protein, 34 aa, Homo sapiens
YFCASSHLAQGAYPGNTIYFGEGTWLTVVEDLNK

SEQ ID NO: 939059 - protein, 116 aa, Homo sapiens
MVMQPSLTVWALSIGLQRGVVTRGDQATFLLFAFSDVSKGIFALDISREGEGKGALDLGGEATSIGLWQGVVTHWDEALAASFLPVAFSHLSNGILDISKDEGEGDGGLFSATGPS

SEQ ID NO: 939060 - protein, 189 aa, Homo sapiens
MNGMEPKWNGMEWNGKEWNGIEWNPPDCRGMEWNGMEWNGMEWIQPEWNGKEWNKPEWIGMEWNGMEWYGIEWNGKKWNGMEWNGTEWNGKEWNGMEWNRMEWTGMEWNGMEWNGINLSAMEWSGRECNERKQHEWNGMNECKGIEYNQSECNGMEWNGMEWNAMEWNGMNEMERQGMEWNQPECNGME

SEQ ID NO: 939061 - protein, 1272 aa, Homo sapiens
FIAPRNESNNLASDTFITHKKSSFIKNINQGSSSSVIESDEECAEIVKQTHIKPTKIVSLKKKVSKEIKKDQLKKENNHGIIDSLDNDRNSTVENIFQEDLPNDKRTSVSDVLLSFGRSSGKRTSDTDEIAATCTINENVIKEPCVLLTECQFTNKSTSSLAGNVLDSGYNSFNDEKSVSSNLFLPFEEELYIVRTDDQFYNCHSLTKEVLANVERFLSYSPPPLSGLSDLEYEIAKGTALENLLFLPCAEHLRSDKCTCLLSHSAVNSQQNLELNSLKCINYPSEKSCLYDIPNDNISDEPSLCDCDVHKHNQNENLVPNNRVQIHRSPAQNLVGENNHDVDNSDLPVLSTDQDESLLLFEDVNTEFDDVSLSPLNSKSESLPVSDKTAISETPLVSQFLISDELLLDNNSELQDQITRDANSFKSRDQRGVQEEKVKNHEDIFDCSRDLFSVTFDLGFCSPDSDDEILEHTSDSNRPLDDLYGRYLEIKEISDANYVSNQALIPRDHSKNFTSGTVIIPSNEDMQNPNYVHLPLSAAKNEELLSPGYSQFSLPVQKKVMSTPLSKSNTLNSFSKIRKEILKTPDSSKEKVNLQRFKEALNSTFDYSEFSLEKSKSSGPMYLHKSCHSVEDGQLLTSNESEDDEIFRRKVKRAKGNVLNSPEDQKNSEVDSPLHAVKKRRFPVNRSELSSSDESENFPKPCSQLEDFKVCNGNARRGIKVPKRQSHLKHVARKFLDDEAELSEEDAEYVSSDENDESENEQDSSLLDFLNDETQLSQAINDSEMRAIYMKSLRSPMMNNKYKMIHKTHKNINIFSQIPEQDETYLEDSFCVDEEESCKGQSSEEEVCVDFNLITDDCFANSKKYKTRRAVMLKEMMEQNCAHSKKKLSRIILPDDSSEEENNVNDKRESNIAVNPSTVKKNKQQDHCLNSVPSGSSAQSKVRSTPRVNPLAKQSKQTSLNLKDTISEVSDFKPQNHNEVQSTTPPFTTVDSQKDCRKFPVPQKDGSALEDSSTSGASCSKSRPHLAGTHTSLRLAQEGKGTCILVGGHEITSGLEVISSLRAIHGLQVEVCPLNGCDYIVSNRMVVERRSQSEMLNSVNKNKFIEQIQHLQSMFERICVIVEKDREKTGDTSRMFRRTKSYDSLLTTLIGAGIRILFSSCQEETADLLKELSLVEQRKNVGIHVPTVVNSNKSEALQFYLSIPNISYITALNMCHQFSSVKRMANSSLQEISMYAQVTHQKAEEIYRYIHYVFDIQMLPNDLNQDRLKSDI

SEQ ID NO: 939062 - protein, 85 aa, Homo sapiens
KNLTCSKHGVRVVTSKHYSLLPKPIHDFLAIIVRRRVSAFFPFYRSDLSLHGPQDVGYLVGLDHKVKVNHLQMTIRGVGRSRKEI

SEQ ID NO: 939063 - protein, 922 aa, Homo sapiens
MIDLSFLTEEEQEAIMKVLQRDAAEAIMKVLQRDAALKRAEEERVRHLPEKIKDDQQLKNMSGQWFYEAKAKRHRDKIHGADIIRASMRKKRPQIAAEQSKDRENGAKESWVNNVNKDAFLPPELAGVVEEPEEDAAPASPSSSVVNPASSVIDMSQENTRKPNVSPEKRKNPFNSSKLPEGHSSQQTKNEQSKNGRTGLFQTSKEDELSESKEKSTVADTSIQKLEKSKQTLPGLSNGSQIKAPIPKARKMIYKSTDLNKDDNQSFPRQRTDSLKARGAPRGILKRNSSSSSTDSETLRYNHNFEPKSKIVSPGLTIHERISEKEHSLEDNSSPNSLEPLKHVRFSAVKDELPQSPGLIHGREVGEFSVLESDRLKNGMEDAGDTEEFQSDPKPSQYRKPSLFHQSTSSPYVSKSETHQPMTSGSFPINGLHSHSEVLTARPQSMENSPTINEPKDKSSELTRLESVLPRSPADELSHCVEPEPSQVPGGSSRDRQQGSEEEPSPVLKTLERSAARKMPSKSLEDISSDSSNQAKVDNQPEELVRSAEDDEKPDQKPVTNECVPRISTVPTQPDNPFSHPDKLKRMSKSVPAFLQDEVSGSVMSVYSGDFGNLEVKGNIQFAIEYVESLKELHVFVAQCKDLAAADVKKQRSDPYVKAYLLPDKGKMGKKKTLVVKKTLNPVYNEILRYKIEKQILKTQKLNLSIWHRDTFKRNSFLGEVELDLETWDWDNKQNKQLRWYPLKRKTAPVALEAENRGEMKLALQYVPEPVPGKKLPTTGEVHIWVKECLDLPLLRGSHLNSFVKCTILPDTSRKSRQKTRAVGKTTNPIFNHTMVYDGFRPEDLMEVCVELTVWDHYKLTNQFLGGLRIGFGTGKSYGTEVDWMDSTSEEVALWEKMVNSPNTWIEATLPLRMLLIAKISK

SEQ ID NO: 939064 - protein, 393 aa, Homo sapiens
MAESLRIPEGPIDQGPAIGRVRVLEEQLVKAKEQIENYKKQTRNGLGKDHEILRRRIENGAKELWFFLQSELKKLKNLEGNELQRHADEFLLDLGHHERSIMTDLYYLSQTDGAGDWREKEAKDLTELVQRRITYLQNPKDCSKAKKLVCNINKGCGYGCQLHHVVYCFMIAYGTQRTLILESQNWRYATGGWETVFRPVSETCTDRSGISTGHWSGTPIMNLLVITLFPGQLDCTIDTQKIHFVEDNSISWSAGLHNRYTENSLRGVILDIHFLSQADFLVCTFSSQVCRVAYEIMQTLHPDASANFHSLDDIYYFGGQNAHNQIAIYAHQPRTADEIPMEPGDIIGVAGNHWDGYSKGVNRKLGRTGLYPSYKVREKIETVKYPTYPEAEK

SEQ ID NO: 939065 - protein, 845 aa, Homo sapiens
MILPNFFFPTQQSQWQASGQKGFSESSSGQCLTNCICRCFLGKLVPWLDMFREHWIKQELNRSPCSRTSQSFYYANSHMSLQEGNTINSSPKEHFFFFEIGSCSVTLAGVQWYGRGSLQPQPRGLGRFSRLGLRSGWDCRPNHLFFFFFLNYGDGESCYVARAGLRFLGSGDPLASASQGGVVCVSRCARLQRTFLKIGGAKDHTLRNTDLGLPTVQRNVACPILYSTPDDLQEVLLNSSQGSNLNSSQQDKEAAFRKDPGAVVLEDDPSLMANLECSREHWSLDDRAKGSDSIFLTWQEAGNKTEIRKRQAELVFSLTFELPAVLLTKNKKAGLKTTKVEKYKVTEVSSLQEDSYNLSPKFFLYKAQIFTGKCSPNDPFSVFVYSCISPMFIEHLLSVWPVVRNAHQLPGSKAILQFSDVYLKSVNPLASPLPPPLQLDTYHFPTWYTDLAQLGRRNGQVFFTTLLNLAKNLASWVRAAWEPAKPEETSLLCLGPSISAGVKNLPVLFLTSGTVRQKVLRLKSRKIQAVCGAVKTTDHRTDTPAQILALPSCSGVTVGRIGEIARTLESGGPAQIWLHYVRYILGKLPSLSQLQYFHLQSGMRRTRMITLIISDMYVYSKEVEFITCIYVYKDLKIAVNKYVAAFIFNSSEVPIFFICKVEIGVPTSMSGYESLKEIMLYKVLAYKNKSINVKILSNGYYFCSSSISISETKLLYLFGLQFPHLSSERPGSDGFSSVTAHGFPALGPTRPRGYLQQSCQWPLSLGQPKSTSNSPISLCTVHETRNGEGKMPCLCKCYLDLCCSINMAATNHRKLKRNKSKLRYAMSVKYIMDVKNLILKILRSY

SEQ ID NO: 939066 - protein, 1408 aa, Homo sapiens
GRTSLSLGLLVADFGAMVNNPHLSDVQFQTDSGEVLYAHKFVLYARCPLLIQYVNNEGFSAVEDGVLTQRVLLGDVSTEAARTFLHYLYTADTGLPPGLSSELSSLAHRFGVSELVHLCEQVPIATDSEGKPWEEKEAENCESRAENFQELLRSMWADEEEEAETLLKSKDHEEDQENVNEAEMEEIYEFAATQRKLLQEERAAGAGEDADWLEGGSPVSGQLLAGVQVQKQWDKVEEMEPLEPGRDEAATTWEKMGQCALPPPQGQHSGARGAEAPEQEAPEEMLGHSSCSSPSRDCQAERKEGSLPHSDDAGDYEQLFSSTQGEISEPSQITSEPEEQSGAVRERGLEVSHRLAPWQASPPHPCRFLLGPPQGGSPRGSHHTSGSSLSTPRSRGGTSQVGSPTLLSPAVPSKQKRDRSILTLSKEPGHQKGKERRSVLECRNKGVLMFPEKSLSIDLTQSNPDHSSSRSQKSSSKLNEEDEVILLLDSDEELELEQTKMKSISSDPLEEKKALEISPRSCELFSIIDVDADQEPSQSPPRSEAVLQQEDEGVLPENRGSLGRRGAPWLFCDRESSPSEASTTDTSWLVPATPLASRSRDCSSQTQISSLRSGLAVQAVTQHTPRASVGNREGNEVAQKFSVIRPQTPPPQTPSSCLTPVSPGTSDGRRQGHRSPSRPHPGGHPHSSPLAPHPISGDRAHFSRRFLKHSPPGPSFLNQTPAGEVVEVGDSDDEQEVASHQANRSPPLDSDPPIPIDDCCWHMEPLSPIPIDHWNLERTGPLSTSSPSRRMNEAADSRDCRSPGLLDTTPIRGSCTTQRKLQEKSSGAGSLGNSRPSFLNSALWDVWDGEEQRPPETPPPAQMPSAGGAQKPEGLETPKGANRKKNLPPKVPITPMPQYSIMETPVLKKELDRFGVRPLPKRQMVLKLKEIFQYTHQTLDSDSEDESQSSQPLLQAPHCQTLASQTYKPSRAGVHAQQEATTGPGAHRPKGPAKTKGPRHQRKHHESITPPSRSPTKEAPPGLNDDAQIPASQESVATSVDGSDSSLSSQSSSSCEFGAAFESAGEEEGEGEVSASQAAVQAADTDEALRCYIRSKPALYQKVLLYQPFELRELQAELRQNGLRVSSRRLLDFLDTHCITFTTAATRREKLQGRRRQPRGKKKVERKLMGPSRPHPNLPSAAPTPAICREDLGHPAWVRPPQAFLGLGTTSALRCDDDHSPIQGFLLWALLSRVALEHVTHWIYRLQPLPLSVLTVGVLAQAVGLPGHPLYHLHHCRHPQGEAPGQEAAASGQEEGGAELMGPSRPHPNLPSAAPTPAICREDLGHPAWVRPPQAFLGLGTTSALRCDDDHSPIQGFLLWALLSRVAFGACHPLDLQTPAPSSVRAHSVSPFLVFFFFFFLRQSCCVT

SEQ ID NO: 939067 - protein, 1207 aa, Homo sapiens
VPKNAKEKEVPLEEEMLIQSEKKTQLSKTESVKESESLMEFAQPEIQPQEFLNRRYMTEVDYSNKQGEEQPWEADYARKPNLPKRWDMLTEPDGQEKKQESFKSWEASGKHQEVSKPAVSLEQRKQDTSKLRSTLPEEQKKQEISKSKPSPSQWKQDTPKSKAGYVQEEQKKQETPKLWPVQLQKEQDPKKQTPKSWTPSMQSEQNTTKSWTTPMCEEQDSKQPETPKSWENNVESQKHSLTSQSQISPKSWGVATASLIPNDQLLPRKLNTEPKDVPKPVHQPVGSSSTLPKDPVLRKEKLQDLMTQIQGTCNFMQESVLDFDKPSSAIPTSQPPSATPGSPVASKEQNLSSQSDFLQEPLQAAIPPGKQPSSLASPNPPMAKGSEQGFQSPPASSSSVTINTAPFQAMQTVFNVNAPLPPRKEQEIKESPYSPGYNQSFTTASTQTPPQCQLPSIHVEQTVHSQETAPGNHHFYFLILKMTALAANYHPDGTIQVSNGSLAFYPAQTNVFPRPTQPFVNSRGSVRGCTRGGRLITNSYRSPGGYKGFDTLEDWKQDTPKSKAGYVQEEQKKQETPKLWPVQLQKEQDPKKQTPKSWTPSMQSEQNTTKSWTTPMCEEQDSKQPETPKSWENNVESQKHSLTSQSQISPKSWGVATASLIPNDQLLPRKLNTEPKDVPKPVHQPVGSSSTLPKDPVLRKEKLQDLMTQIQGTCNFMQESVLDFDKPSSAIPTSQPPSATPGSPVASKEQNLSSQSDFLQEPLQAAIPPGKQPSSLASPNPPMAKGSEQGFQSPPASSSSVTINTAPFQAMQTVFNVNAPLPPRKEQEIKESPYSPGYNQSFTTASTQTPPQCQLPSIHVEQTVHSQETAPGNHHFYFLILKMTALAANYHPDGTIQVSNGSLAFYPAQTNVFPRPTQPFVNSRGSVRGCTRGGRLITNSYRSPGGYKGFDTYRGLPSISNGNYSQLQFQAREYSGAPYSQRDNFQQCYKRGGTSGGPRANSRANCFIMRNSLLLIKQQGGVILLQVSSPERDNETFNSGDSGQGDSRSMTPVDVPVTNPAATILPVHVYPLPQQMRVAFSAARTSNLAPGTLDQPIVFDLLLNNLGETFDLQLGRFNCPVNGTYVFIFHMLKLAVNVPLYVNLMKNEEVLVSAYANDGAPDHETASNHAILQLFQGDQIWLRLHRGAIYGSSWKYSTFSGYLLYQD

SEQ ID NO: 939068 - protein, 464 aa, Homo sapiens
MAVTAGADFCYAIEENCEAVPHRATVYAQLVESGRMWSWNKLFPIHVQTSLGEQVIVPPVDVESCPGAPSVCDIQLNQVSPADFTVLSDVLPMFSIDFSKQVSSSAACHSRRFEPLTSGRAQVVLSWWDIEMDPEGKIKCTMAPFWAHSDPEEMQWRDHWMQCVYFLPQEEPVVQGSALYLVAHHDDYCVWYSLQRTSPEKNERVRQMRPVCDCQAHLLWNRPRFGEINDQDRTDRYVQALRTVSLLLGEPFFTTSLLPWHNLYFWYVRTAVDQHLGPGAMVMPQAASLHAVVVEFRDLWRIRSPCGDCEGFDVHIMDDMIKRALDFRESREAEPHPLWEYPCRSLSEPWQILTFDFQQPVPLQPLCAEGTVELRRPGQSHAAVLWMEYHLTPECTLSTGLLEPADPEGGCCWNPHCKQAVYFFSPAPDPRALLGGPRTVSYAVEFHPDTGDIIMEFRHADTPD

SEQ ID NO: 939069 - protein, 741 aa, Homo sapiens [sequence omitted]

SEQ ID NO: 939070 - protein, 585 aa, Homo sapiens
SITSAITPTNTVTSMTTMTSPPTTTNCFTSLSSKILSSTPVPSTEAIISGTTNTIPPSTLVTTLPTPNASSMTTSETTYPNSPTGPVTNSMSKISYPASMTQTSSTATSLPPNSPWGSTTEIAKSPTTNLVTNAIKATSHTTTTYTSSTIYFTASTYTSAMTSVSLGTMVTSTSMTPSTVSTSIPTSQPKTVNSSSGGITGSLPMMTDLTSGYTVSSMSAIPTTVIPTSLTVQNTETSIFVSMTSATTPSGRPTFTSTVNTPTRSLLTSFPTTHLFSSSMSESSAGTTHTESISSPPATTSTLHTTAESTPSCTTTTSFITSTTMEPLSTIVATTGTVKTTVTSSTATFRETTTLTSTTDISTESLMTAMTSTTRLTSAITSKTTLTSLKTTASRPTANSTLSSLTSSILSSTLVPSTDMITSHTTNLTRSSPLLATLPTTITRSTPTSETTYPTSPTSTVKGSTTSIRYSTSMTGTLSMETSLPPTSSSLPTTETATTPTTNLVTTEITSHSTPSFSSSTIHSTVSTPTTVVSSGPPTSGTIVTSITVTPSSLSTDIPLTTPTTITHHSVGSTESLLTATDLTS

SEQ ID NO: 939071 - protein, 162 aa, Homo sapiens
SSWPSPVLYPWGASPSAFFFLGLFWGHSWALQGPRFFLGILCTLFAVSSLPASISFSRRSPPHLRSRRDLRPILFRVLASLSLTLRDSLETLGPEHMLLIPGPCPFLHQPPISCPANTIVVFWVPPPASRARSCLEQPLLSVASLPSFVLRCFSSMGYIISL

SEQ ID NO: 939072 - protein, 49 aa, Homo sapiens
IKQPQSGQIKWITGPRGESRTESQKLSCDYTELQYYPKQDVRYTEKKYI

SEQ ID NO: 939073 - protein, 59 aa, Homo sapiens
LLDYKKRIIQAFQGSLCLDFKVQATLCGFVTIKSSSPNMAASKGRLRMPFPHYLSNKGS

SEQ ID NO: 939074 - protein, 294 aa, Homo sapiens
  misc_feature (287)..(287): Xaa can be any naturally occurring amino acid
IGNTASGVSSSEQKIDGLSNSGQQKKSMLPVSFTSAALRISPMMPWASMALWGSFLKSTIATKLRIKAHAAINKQGAAHHVFGGITGQPDHRIGHVFHVAYAAVGNQLEQFFFSRAFGGRTVDCRANRPWRDAIDADALFTDFLGEGAHQHLHTALGGCVIHMPGPRDDLVHRTHMDDFAGRPPKPVANALALKIRTAARAHRKLAGEVDPITVFQSSKVMSTKLASFAGPNWPPKCPGDRRAQGSGRTGAPRSVSLETSRRWQLPAPPCFNFPTKASAGPPGNFIXTPRPQPP

SEQ ID NO: 939075 - protein, 176 aa, Homo sapiens
DESVMVVEDDPAVRMLVLNVLDELGYTVHPAADARTALPLLESSLRIDLLVTDVGLPGMNGRQLAEVARQHRPGLKVLFMTGYAEKAAERQGFLEPGMDLIAKPFTLDALANRVRDMIGQTSCSSGIIPRPPHAPRFQGNQSMKAQARHILVKTAEEAEQLRLRIVKGEAFDVLAK

SEQ ID NO: 939076 - protein, 201 aa, Homo sapiens
PLHNGKTGPAGRAAPPVTVVEASLCRGQCRQVDEVINFVGEVVIASAGANLLARGSSNGPLQESTSVVSGLMEEILDGALHLRMIPIGDTFNRFRRVVRDVSQELGKDIEPLISGADTELDKTEVEKIGDPLMHLLTSCDGSRIESPSLREAAGKPAKGRLQLNAFQDSGSIVLEIADDGAGLNRDRILQKAVERGLVPVG

SEQ ID NO: 939077 - protein, 61 aa, Homo sapiens
DLRCPGVVSSLGSGNTDSDCSCLWVQCRTCWSLGLLPQPALRNLGRRENLKLPNSTLRLKN

SEQ ID NO: 939078 - protein, 59 aa, Homo sapiens
MKGTGTQKYNGQGIHQTSSKLQECLGQKRLLRDAGLLIGIKAEMDRATAVHALTAGCCE

SEQ ID NO: 939079 - protein, 104 aa, Homo sapiens
SFDCEWNVVACLDRMSVLCQMSCQSSSSLTRSWLPDRYPRWLDQDDRSSRSGSLDPLDCGPTTVADRSERAIQQAGRSVLVGLQQIGSIAISSVDPVSLVYLCR

SEQ ID NO: 939080 - protein, 236 aa, Homo sapiens
TPVASSAISILSTTPVDNSTPVTTSTEARSSPTTSEGTSMPNSNPSEGTTPLTSIPVSTTPVVSSEASTLSATPVDTSTPGTTSAEATSSPTTAEGISIPTSTPSEGKTPLKSIPVSNTPVANSEASTLSTTPADSNSPVVTSTAVSSSPTPAEGTSIAISTPSEGSTALTSIPVSTTTVASSEINSLSTTPAVTSTPVTTYSQASSSPTTADGTSMQTSTYSEGSTPLTSLPVST

SEQ ID NO: 939081 - protein, 245 aa, Homo sapiens
LSTIPVDSNTPLTTSTEASSPPPTAEGTSMPTSTPSEGSTPLTRMPVSTTMVASSETSTLSTTPADTSTPVTTYSQASSSPTTADGTSMPTSTYSEGGTPLTSVPVSTTPVVSSEASTLSTTPVDSSSPVVTSTEGTSSLTPTEGTSIATSTPSEGTPPLTSMPVSTTTVASSETNSLSTTPADTRTAVTTYPQASSTPTTADGTSMPTSTPSEGSTPLTSMPVSTTTVASSEINSLSTTPADPS

SEQ ID NO: 939082 - protein, 73 aa, Homo sapiens
SFYRLARTSQPETGVRETQTATDERQPRYDQQHQAKKPKEQSDLTAAARSHSPEHSSTDTTTAIASHRQHPTH

SEQ ID NO: 939083 - protein, 210 aa, Homo sapiens
  misc_feature (195)..(195): Xaa can be any naturally occurring amino acid
  misc_feature (200)..(200): Xaa can be any naturally occurring amino acid
MIQLFFQDVLPNCCASKMEKYCCESNILFKMMIFVDNAPTHPHFIGDLHPNIKVLCLLPYTTSLIQPMNQGVVAVFKAYEKILRRIFAQAIAATEKHREDTDAILEVYNSYDCIKNLAWAWTDVTKEYVNDIKKTLKKFVHDFKESAKDEEVAEMDKAVVDMANNFNLDVDEDDIEKLLDVVPEELTNELLELEXEHASXKKGARRKRKL

SEQ ID NO: 939084 - protein, 67 aa, Homo sapiens
ARLLAGLSRSVRVLPPSTYGQPSRHSMRRCRLAPAAVARPGGQQRTRQAQRAAGEVGHVPFTRMRLQ

SEQ ID NO: 939085 - protein, 75 aa, Homo sapiens
MSVIVVALGGRTYLIWPDFKGHHDDYKYGRNELVDYWCSLERLLACALAYYVAPAALYAAAALKVSAQCPAKKKS

SEQ ID NO: 939086 - protein, 34 aa, Homo sapiens
KHFSQSSDVIKHQRIHTGEKPYKCDVCGKAFRIH

SEQ ID NO: 939087 - protein, 118 aa, Homo sapiens
SYGSDPSIISLQGFTAAQMGNEAVQQILSGHSEIVIIYFSLNGDLETGRFRRKSIQHVFTVNMKSTPIRTSDVDYRLLEASKAGDLETVKQLCSSQNVNCRDLEGRHSTPLHFAAGYN

SEQ ID NO: 939088 - protein, 68 aa, Homo sapiens
GCLARVQKLCTPENINCRDTQGRNSTPLHLAAGYNNLEVAEYLLEHGADVNAQDKGGLIPLHNAASYG

SEQ ID NO: 939089 - protein, 258 aa, Homo sapiens
MEFNISKENSTWRKEIDERGNNWGLLPDSRAWGGEPPRGFEKQTHPCKNRKQPFYLPEKQTSALMITQIRVNFYLFKKIIHSVPFLAQFSWRQGGDRTYVFFTSCFLLFAELQMVRRARSWFIRATRIRETMEAPRKRINTITNSPARTTTFEPRGWGGFFCWWEQRKCRPPQSGTVLIAPAASIDEVIAGVPLHVKVPAWEGCTARPSDCVGGAVFFIVEHIAGVVFRILPSGSTWDRGIRCIAAGGQVTRGILCDS

SEQ ID NO: 939090 - protein, 298 aa, Homo sapiens
MLLSGHEGEVYCCKFHPNGSTLASAGFDRLILLWNVYGDCDNYATLKGHSGAVMELHYNTDGSMLFSASTDKTVAVWDSETGERVKRLKGHTSFVNSCYPARRGPQLVCTGSDDGTVKLWDIRKKAAVQTFQNTYQVLAVTFNDTSDQIISGGIDNDIKVWDLRQNKLTYTMRGHADSVTGLSLSSEGSYLLSNAMDNTVRVWDVRPFAPKERCVKIFQGNVHNFEKNLLRCSWSPDGSKIAAGSADRFVYVWDTTSQKVLYKLPGHAGSINEVAFHPDEPIILSASSDKRLYMGEIQ

SEQ ID NO: 939091 - protein, 39 aa, Homo sapiens
VDTAVYYCAKALDGSGSYGLGSAFDIWGQGTMVTVTSGS

SEQ ID NO: 939092 - protein, 68 aa, Homo sapiens
EEKKHYLMWGLSSDFWGEKPHPQLHHREGPPGLNTCLKKTDSQAEGTRKHCQDLGAFTKSMVVFGCPN

SEQ ID NO: 939093 - protein, 35 aa, Homo sapiens
VDTAVYYCAKEGGYSYGSFGAFDIWGQGTMVTVSS

SEQ ID NO: 939094 - protein, 134 aa, Homo sapiens
NRDENTPDELWILQHHDVLTQGQAGKPEHILQATQLPIVQSDRGGQVTWHGPGQLVAYFMFDLNRLGWNVRTLVTYAENLMIHLLKKYKIEAYAKADAPGVYVAERKIGSLGFKIRKGRSYHGLALNIDCDLLG

SEQ ID NO: 939095 - protein, 706 aa, Homo sapiens
NYAYPGVLLIGTDSHTPNGGGLGGISIGVGGRDRVDVMAGIPCELKCTKVIAMKLTGSLSGWTSPKDVILKVAGILTVKGGTGAIVEYHGPGVDSISCTGMATICNMGAEIGATTSVFPYNHRMKKYLSKTGRADIASLREEFKDHLVPDPGCQYDQVIEINLNELKPHINGPFTPDLAHPVAEVGTVAEKEGWPLDIRVGLIGSCTNSSYEDMGRSAAVAKQALAHGLKCKSQFTITPGSEQIRATIERDGYAQILRDVGGIVLANACGPCIGQRDRKDIKKGEKNTMVTSYNRNFTGRNDAFPETHAFVTSPEIVTALAIAGTLKFNPETDFLTGKDGKKFKLEAPDADELPRSSFDPGQDTYQQPPKDSSGQRVDVSPTSQRLQLLEPFDKWDGKDLEDLQILIKVKGKCTTDHISAAFPWLKFRGHLDNISNNLLIGAINIENGKANSVRNAVTQEFGPVPDTARYYKKHGIRWVVIGDENYGEGSSREHAALEPRHLGGRAIITKSFARIHETIKKQGLLPLTFADPSDYNKIHPVDKLTIQGLKDFAPGKPLKCIIKHPNGTQETILLNHTFNETQIEWFRAGSALNRMKELQQYRKVPASWLSCPTLDPLWTLLDVRSTGPCASSEPELVYPAWPSSEMTTRPASCSLHPQPLSDPPWRALEIKSQPLPFSLVLPSKMPCNLYLFLMTALPLKKSFHPA

SEQ ID NO: 939096 - protein, 30 aa, Homo sapiens
VDTAVYYCAKGSRDHAFDIWGQGTMATVSS

SEQ ID NO: 939097 - protein, 41 aa, Homo sapiens
NPVLRTGRHGTVSRDSTSRPAQHFGDGTRLSILEDLNKVFP

SEQ ID NO: 939098 - protein, 30 aa, Homo sapiens
VDTAVYYCGSENGFSLFDYWGQGTLVTVSS

SEQ ID NO: 939099 - protein, 37 aa, Homo sapiens
  misc_feature (29)..(29): Xaa can be any naturally occurring amino acid
LSDSGFYLCAWVAKIYGYTFGSGTRLTGXEDLNKVFP

SEQ ID NO: 939100 - protein, 31 aa, Homo sapiens
VDTAVYYCARGGEWELTVDYWGQGALVTVSS

SEQ ID NO: 939101 - protein, 38 aa, Homo sapiens
  misc_feature (27)..(27): Xaa can be any naturally occurring amino acid
LSDSGFYLCAWDLGDNSPLHFGNGTRXTVTEDLNKVFP

SEQ ID NO: 939102 - protein, 34 aa, Homo sapiens
VDTAVYYCAKGLAAGGGGGAYDIWGQGTMVTVSS

SEQ ID NO: 939103 - protein, 34 aa, Homo sapiens
LSDSGFYLCAWSGQLAGVDEQFFGPGEDLKNVFP

SEQ ID NO: 939104 - protein, 41 aa, Homo sapiens
VDTAVYYCAATSSTVPVVRQSYGPAGRFDIWGQGTMVTVSS

SEQ ID NO: 939105 - protein, 74 aa, Homo sapiens
RGGGQSLSVEGVGGVVRSGGGGHRHGGPGVEKRALGVGVVAAAESQRVVGVRSPASQAARCARGGDVHSASHGG

SEQ ID NO: 939106 - protein, 31 aa, Homo sapiens [sequence omitted]

SEQ ID NO: 939107 - protein, 37 aa, Homo sapiens
VDTAVYYCAKELQGKQQLAPPYYFDYWGQGTLVTVSS

SEQ ID NO: 939108 - protein, 540 aa, Homo sapiens
MRFSKDKGVYSAPNKRRIIMKNTTDWFIILKETSHTHSSHSRLFNTGKDLAHQTTCWHPTSYMLFGFSIGLQLVTLVTHKITLLSIVTAISVTLGVATIISISQGKSLNGWLGMFSVFGIIFVAYQLKNYLQIAEQLVYLFTLDLAVILNVDWNKSMAKKIGGLDLKSWVVTVLCWAGLWSLSAIVIGRFTDDPRPVMDALVFSSATVGGLLTFLKKPESYYAWIVTGITSLPLWYITYKQGDATYRMLLSSLVYVMNDAIGLTVSPWFSKKGRARLAEQEAQYLVNKKQSTELYNKLFFLLHKSLYIFIFNGIIIKRVLDMGFLRLLVRVQKNELAGCNVGYAYMKAAKENNKMADEVVTPEIDEKTEVPVTFTEKDLQSAKDRAYDKARNDLQATFEEKLAQAVKDAKAQALEESKMTAEQKAQKELDDKIKTLEAREAGIKQRELTADITGQLSAAGLPVDLAKSLATLGDERRLKRPVQVVAVQRRPIQPAQITVVQERLKRPVQVVAVQRRLKRPVQVVAVQRRPIQPVQITVVQ

SEQ ID NO: 939109 - protein, 569 aa, Homo sapiens
  misc_feature (562)..(562): Xaa can be any naturally occurring amino acid
IRELLLFSPLDCEAGAQNRRGGKSSPFFLTQRTAVLPRNNFCLGVEDTVDKLKMLEGRKTSIRKAVQVAYDRAMIHLSRVRGPHSFVTSSYLKGRAGLHPLALPPSRRGQRSLFCPCQMYGRQLPPLMVGQGLGFLPTKGKGPVLTNRMVLLAGLLCAKNIPPKSSGDISLKNQLEVETAVGLGPSLEIAQMARGPGLLLEGLPGPLHPTPTNYTSGRVRFQTLIPEMPWIRQGPRGNLPKLTLSPAYRLFSHLFSVPSSAPIAQSCFLFPIFLFFFSCAKLTETVTTLVFFFNVSFPLKAAAMPGGVSAKLLRPRQKPATTYDPFPETTPPQTSFSCDTTSQLCECAPWIKAVPSCFFLCCHEVVQASGWAPIRLGVRVSICPHGCRGWFVWSCARQLGLPSSPFSPSFSSSWTFSAIAVLSFTLHHLDGMAPATKHLPGLRSALPCLPLLLPLPNSRECITFISNPLPPSFFLFNPLPTFTFSKMEGKKKKLLRLLLLQGPPPEEEALLAVLLLLLAAYTAEEEEEEELAAGPPGGSPGGVVGGSPGFLEEFWTKQSLGXSLPFLHT

SEQ ID NO: 939110 - protein, 46 aa, Homo sapiens
DLGERLESAILGERLESAILGEKLESAILGEGLESAILDERLESVI

SEQ ID NO: 939111 - protein, 82 aa, Homo sapiens
IIDVARRSVEIPRLRFIVRDANGADIYAWNAVLEQPVLNPGERAWFKIRLASPPAEGREIAVRFFRKQNIADRRNLNVSRFD

SEQ ID NO: 939112 - protein, 122 aa, Homo sapiens
SKVIVRGYKWAEYHADIYDKVSGDMQKQGCDCECLGGGRISHQSQDKKIHVYGYSMAYGPALHAISTEKIKALYPDYEVSWANDGSEHSHPGALASSSHFRAPAFACTPLRGLPVLLCGSLW

SEQ ID NO: 939113 - protein, 112 aa, Homo sapiens
  misc_feature (69)..(69): Xaa can be any naturally occurring amino acid
  misc_feature (84)..(84): Xaa can be any naturally occurring amino acid
  misc_feature (86)..(86): Xaa can be any naturally occurring amino acid
  misc_feature (98)..(98): Xaa can be any naturally occurring amino acid
  misc_feature (111)..(111): Xaa can be any naturally occurring amino acid
LGQVLQLVDEVDHVLAHGRAVDTVHKAPVLQPGILSLHLLYHLFARGAHLGGDADGHAISRAVLRADPXKAPGPSWMVLLRSAXNXTRKKGIMGPFSXNSVNPPFFSGKFXS

SEQ ID NO: 939114 - protein, 109 aa, Homo sapiens
  misc_feature (87)..(88): Xaa can be any naturally occurring amino acid
TLLSQSKSAFWFGAERPLGLAFPRKARPAPWPREQTKSTAGPITLGALRPAMVMEVGTLDAGGCGRCWGSERRNCLLLDAASFFSFXXFHIAFSVNVRFSTIVRAGQGP

SEQ ID NO: 939115 - protein, 39 aa, Homo sapiens
DCGCREMALWKSYFSGRRATAIGKCESVTVDVVRGCPQG

SEQ ID NO: 939116 - protein, 588 aa, Homo sapiens
RQRDHHEVQRAMGRMRADAFEPAVAAGHGRRPVGGAPQDAQDHQPQHGDADRLVGVDGRAHPVVGKAVDREDQRDVDDHQQCDDPVQRDGGACVAMVRGHAGIFGGSPTQPVRRAIVRSSASDIRNRRPVPCVHLPIALAPLSVNDLLRSAFVAASPRLSPPATPLRSWLIHGGVLLLWGLLFAMAFRLGNVQAWSVGVAYVLYDTVLLLFVGWQTLAILRPRGIALASAPLPHPAVAPHRATLGVIVAAHDEAAVLPVTLAALLGQTDAPDRIVIADDGSTDGTAELLTTRYGLEAPEPGQLSAASTLHPNLHWLRLPHGGKAVALNAAVLCIDTETVLTVDGDTLLDARAIAAVRRAFSDEPALVAATGVITPVCSRTLGGRLLQWFQTYEYIRNFLSRYAWMRVDGLLLISGAFAGFRRDAVRAVGGFDTDCLVEDYELIHRLHRHAQAHGLDWRVRVLGDAQARTDAPSSVGAFLRQRRRWFGGFLQTQYWYRAMVGDRRYGWLGTAMLPVKAIDTLQPLYGLAAFGLLVMYLVRGDFGVLLPAAGVIAAKIVLDLVFHLWSVHLYRRWVGHGGEAGMLQAFAA

SEQ ID NO: 939117 - protein, 63 aa, Homo sapiens
  misc_feature (25)..(25): Xaa can be any naturally occurring amino acid
MGFMGTQITHGCHSAQPHTQNQSTXVGLTQTSWHTQTSHTDVSVHILACTDVINATAHMWASQ

SEQ ID NO: 939118 - protein, 47 aa, Homo sapiens
MRIVKWQVCGFKCLHPVRRQEQTKALPDSRLDPGPQQLHWIILRPLN

SEQ ID NO: 939119 - protein, 76 aa, Homo sapiens
RSTVRDIASLIYNSSRITYLHRITYLHRITYLHRITYLHRITYLHRITYIHRITIYIASLIYNCSRSTVRDRITYL

SEQ ID NO: 939120 - protein, 138 aa, Homo sapiens
HSGAGGRFATAAVGTIAGAVLAPITSGTASTAWSGISGSSNALQASMDDNFAQAAAVRRRASVAEAGKTGILAYSNATTPGSKVTIAVSMAFNCSVAGASADASSLQAIVAAPVNMPSGSAVTPTSFPSAPVTVLTHF

SEQ ID NO: 939121 - protein, 66 aa, Homo sapiens
MSVVWFVGDRKVFLEMHFEDLFLQVHTVFWFGADDQGNLKIPIRFQTVKVSTREPKDRFSFKSRTT

SEQ ID NO: 939122 - protein, 107 aa, Homo sapiens
LAAQDVLANGGAGVSPFWLVGSILMLTLGELCLSPIGLATTLLAPERMRGQMMGLWFCASALGNLAAGLIGGHVKADQLDMLPDLFARCSIALLICAAVLIVLIVRF

SEQ ID NO: 939123 - protein, 76 aa, Homo sapiens
KLSSLHFGVLQYYLVVVFFDADYLTPDRLKIVGRVLMLQAHRSSMKFPGLEEHLIVYILISNLTPDGRRISDHLSA

SEQ ID NO: 939124 - protein, 76 aa, Homo sapiens
VAQGYPLTHKRAHIRINGGAVEYRVYAEDPHQSFGDHLSGDCLSTKEPLHLPSVRVDSGIRPGGDIGTYDDPVFQN

SEQ ID NO: 939125 - protein, 102 aa, Homo sapiens
PPFGDFAPGPKISARGKFSNFRNPYIFTPWLGRNLFFAGTPRVEKDPSNGVSETPFFCEGFFRGVTSFGLEKKCGDPRGPGFYFLLSKKPPNWIILTIKGAV

SEQ ID NO: 939126 - protein, 139 aa, Homo sapiens
  misc_feature (70)..(70): Xaa can be any naturally occurring amino acid
  misc_feature (95)..(95): Xaa can be any naturally occurring amino acid
SKVCLFNWTVMLTSRSSTWYEVLDIPGDFHPLLKGKSVKTTFGLLLFNIILIWEPFKGTVDYVNREFTKXFFEDLFREIMVDNPKQGEVVPQGKXSVDECLMFTHNCNFLGGLGTHFIKPRRSWMPLTVRPQKLLRLRR

SEQ ID NO: 939127 - protein, 96 aa, Homo sapiens
LGFLLNLVDKTAAEFEGLTSILKNVPLWVKGYPTATHATDKSFGKEESVDVAAFLVVSFKEISRATLTFGNHHTDLSAAINSEARLSSSNKDSLKT

SEQ ID NO: 939128 - protein, 123 aa, Homo sapiens
  misc_feature (10)..(10): Xaa can be any naturally occurring amino acid
  misc_feature (109)..(109): Xaa can be any naturally occurring amino acid
SRPSWLTHGXNLVSTKKIQKLSRVWWRVPLVPATGQADAGESLESRKQRLQSTKIVPLRSSLGNRARPCLKYKTKQKTVGRELRILFFVYTLESKKGDRQSGSQGESRXKARDKSCAAGSGKR

SEQ ID NO: 939129 - protein, 50 aa, Homo sapiens
LEEEKRKVEDLQFRVEEESITKGDLEQKSHISEDPENVATVSEKSRIMEL

SEQ ID NO: 939130 - protein, 44 aa, Homo sapiens
MAINAATSRGRARNHERYFPPMPRVRVSTTTFNSSWYTGAHATD

SEQ ID NO: 939131 - protein, 125 aa, Homo sapiens
MKLSSAAGQESPGHPHPSPPAWTLKKPSESVAQRAMCSARACPVACPVGCPAACPVGCPIACPVSCPVACPVGCPVGSMATAPQGLSPQEWEADRETGSSSHAGTTQCSIHSPSSSSRHLSRTQT

SEQ ID NO: 939132 - protein, 96 aa, Homo sapiens
KLRLWPSRHVAECSVCGYYFWIATLVLASSRYSALAAEAQQVLSVSSESAVAYAPVHRSCLTLLALCKSVSRSGSVGDRYLVPAQPSISWQYASAK

SEQ ID NO: 939133 - protein, 483 aa, Homo sapiens
PSPVAWLELSGSTLSSCRTSPFSCGPGKSMPGTTSSSSDSTVEESPGWLLSALPRSPLLQPRGNWKQGAIQRMKEEEEEDGEDDEEEEEEGFFQKVLTPLLSWLLSRRLWLGPQCSKLPLPSCCRQPPPAGPPVEGDGWLKSFQRSRRMCFTSKSFRPEPDMLYAQKAKGWQLTQGSGGWEVQDQCTRIWSKENLLALNTHSRRQKGKRENKVCVSTWQKSRGDRTYSSMATTPSMTKILEGCMYRKLKFEKRMAQSQAGTRFKLQREREEKHLNISGIIQDYLRQVFCVSNNKTDFTSEYLQNWDPNDQGEMKNNLFEDCLFCLPASTERLTLLAEALIPIPWLDPGSFMLENLALLLLLLLLLLLLLLLLLLLLLLLLLLLLLLLLLLLLLLLLLLLLLLLLLLLLLLLLLLLLLLLLLLLLLLLLLLLLLLLLLLLLLLLLLLLLLHFLKIYYLILLFDVIIVIYFSILPHTAYLLLKNL

SEQ ID NO: 939134 - protein, 85 aa, Homo sapiens
KLCSEEQIVRQSSMLHCGLAVSIRVGYIVSIRVGTIMVLLSLDAGLNQLTRKVSRSGLMGLVSLYIRTHWYRRLLIVKLVAVPSW

SEQ ID NO: 939135 - protein, 95 aa, Homo sapiens
ACTICPSYSAASARLIPAVAAHGPIHARGVHRQTGLRLDGVCICACSRLTSHVRVRGRVGSPTQSSSTWIRVDVQPVYRPVQWLGYMRCVQAGQA

SEQ ID NO: 939136 - protein, 42 aa, Homo sapiens
EFRADPGVQPGGFGAGVAGFGNGRVGKPPSPEIWAYGDQVRS

SEQ ID NO: 939137 - protein, 75 aa, Homo sapiens
SFSTSKAESQLNQSRTTTVSSVDIAVSTSGLCSWSRSALISSPGLDRILGIRCDYSGLSQSVGLGSWIRPVRILC

SEQ ID NO: 939138 - protein, 53 aa, Homo sapiens
NSGMQQVEYLKVNINDNRTQMQCYSQMWLIGWKGDEGHWIYYTDTVSESSVLL

SEQ ID NO: 939139 - protein, 103 aa, Homo sapiens
AFTAADAGGGAACSVRSGGLLLACCQVPGVCLGLGQSAAWICDQDDRSSRSISRLVVRSSSWLMIVLISDLGPVWTVCRTMSDCLIGSIAMSSVDLDSLIRCR

SEQ ID NO: 939140 - protein, 182 aa, Homo sapiens
MNHSAHFHFTCCLPRVQDPRNRHPLKIRKHIPARAPPRAPPSEELALNELVTLHCLATRFSPKDVLLRWLQGSQDLPRDNYLTWASRRTQQGTTTFLLTSILRVAAEDWKKGDTFSCIGCHAGPALAFTQKTIRTLWRVNPTPCSHVLCLSMAAGGTAPASLSPPRLVPPPRAINSPMLPPT

SEQ ID NO: 939141 - protein, 114 aa, Homo sapiens
MRARYLISHSTVLYCLTYDRHRWTIQSHCPVTYQDLGSACDYDPRIRQLCGKTTGYDRLIMRSLGYYYDVEIPVSDKTTSCDVSSLHVCLSVSLRHRYGTAVSTIYGVQDLITV

SEQ ID NO: 939142 - protein, 117 aa, Homo sapiens
QFLSYTIPKHTEVFLILSTALRDPHYFEKPDAFNPDHFLDANGPLKKNEAFDPPSPLGKRICLAEALPVRNCSSSSPPSSRTSPVASPVAPEDIDLTPQECGLGKIPPTYQICFLPR

SEQ ID NO: 939143 - protein, 30 aa, Homo sapiens
TTATLGFGAPQAPVADNLSDTLKKLKITAV

SEQ ID NO: 939144 - protein, 196 aa, Homo sapiens
MAVGARDSGQSASYHGVGVSQGLSPADRDGRCVSTLRALRYSRIRALRGTPGKTPLAGCLRPLLAYRLVLSSSRPYQYRVKPPDAAEPGPLCTSKRPWAPASHSRPRTVELDPGLLRGHAWPKTWPSVTEGQSCACKVQDCVKAITYTLNQGSSTLTWEAGYLGSCARIQGSQGIPREFPFRGIPGPRFPKGSKFR

SEQ ID NO: 939145 - protein, 73 aa, Homo sapiens
TSRFGEELLAYQERWKAETGTRMSPPSSHLHHHLAASMPPKPVRPRHWAQLCPPYHQSSGQHCKPATFINTPG

SEQ ID NO: 939146 - protein, 57 aa, Homo sapiens
IIITSCLFCPVIFLHSCPFRSEPKLKNMHFSLGLWVFISERSHVMENFDERNVVLGE

SEQ ID NO: 939147 - protein, 77 aa, Homo sapiens
  misc_feature (24)..(24): Xaa can be any naturally occurring amino acid
  misc_feature (64)..(64): Xaa can be any naturally occurring amino acid
NSASPDVNRSCQGFLQNLLPLELXTSARNLATGPRNAHSPGFLLSCVPSVQDPTENRTVQLTWXPLPEPLELWPKAL

SEQ ID NO: 939148 - protein, 130 aa, Homo sapiens
ITLLPASCVFFWQPDCEPCLPVHTVRLFTAILRPFSQLPLPNHHQQQKAWLRHRYPPGFSSSSESCSCNHPVVLPACCTDKTNALRPWHYHRESLIGGLALCLTPVIPATGEAGVGGLLEPRYFRPAWAT

SEQ ID NO: 939149 - protein, 72 aa, Homo sapiens
GVAARAAIAGIRQTEAGESGREVAVSRDGSSTVQLRLRMRGRPWGDGDGDGDGDGDGDGEGDFLKKLPFVLI

SEQ ID NO: 939150 - protein, 88 aa, Homo sapiens
EIFKSLVIELDKDLYGPATTCGVASDTHDPGDGFQVKALPGDRRCCSDLLLSLDYQPPQFKLGSALARLLGLHTQSRSAIVQALLTDL

SEQ ID NO: 939151 - protein, 107 aa, Homo sapiens
HLSLPILFLICIVTHLGPKVSEIVSFNKRMKLWKKKKKKKRFAPRRTAASAPGGSPRRASGCRPWRRPAAVGTARGGQRRLPGPASGSSAAGDPGHRAGPCSSAGRS

SEQ ID NO: 939152 - protein, 71 aa, Homo sapiens
  misc_feature (25)..(25): Xaa can be any naturally occurring amino acid
EISSNITKTRKTRILSSSQPNQGLXELTRRASDCVHSEEDNQQGAEGTASRVQTWTDVTKEDRKQTGTVQL

SEQ ID NO: 939153 - protein, 70 aa, Homo sapiens
EEMPATWTARLPDGPSHPAPAVPLSPATESALSILPSRRELTRRLAHAADSRRDARQAGAVQPLPLRGRT

SEQ ID NO: 939154 - protein, 137 aa, Homo sapiens
TNLTLLFSFAQARACAEAGVFLISPFVGRIYDWYQAKQPAADYDADQDPGVKSVRNIYEYYKQHRYQTVIMGASFRKVEQILALAGCDRLTIAPNLLEQLKHSDQPVERKLTPSTEAFHQPAPLAEAEFRWQHNQDA

SEQ ID NO: 939155 - protein, 73 aa, Homo sapiens
QKVCGRYLQQQLDATNCLGICEFGEQQGLLGVAAKAWAFLRENFEAVAQEDEFLQLARDRLATCLASDLLQVP

SEQ ID NO: 939156 - protein, 87 aa, Homo sapiens
PTISSRVLDNGEQSNNMQDRRRQQQLPTRAQDAVSLVVCLSPVPWAPSGWGEAGRYAWGRTILRWDPAKEPQEVGERAGAWLSGRHP

SEQ ID NO: 939157 - protein, 39 aa, Homo sapiens
SGNAPLCCTRNPARQRCAAHVSIDPENPPFFAISPPSNG

SEQ ID NO: 939158 - protein, 71 aa, Homo sapiens
ISRDPHCRSPQVDDYLLVQTPWGHGTEGDLAYHKPVGHVNVENGDENQKAQLSTWTKVFDWFGNVPASGSR

SEQ ID NO: 939159 - protein, 33 aa, Homo sapiens
ASTNQTSMYLCASSMGQGASTEAFFGQGTRLTV

SEQ ID NO: 939160 - protein, 31 aa, Homo sapiens
SPNQTSLYFCASSGLGNNEQFFGPGTRLTVL

SEQ ID NO: 939161 - protein, 104 aa, Homo sapiens [sequence omitted]

SEQ ID NO: 939162 - protein, 1012 aa, Homo sapiens
AVRADLPRPEVAPLRGLPRPKFSAPRGLRAPRSPRPEVSARTMRLGSPGLLFLLFSSLRADTQEKEVRAMVGSDVELSCACPEGSRFDLNDVYVYWQTSESKTVVTYHIPQNSSLENVDSRYRNRALMSPAGMLRGDFSLRLFNVTPQDEQKFHCLVLSQSLGFQEVLSVEVTLHVAANFSVPVVSAPHSPSQDELTFTCTSINGYPRPNVYWINKTDNSLLDQALQNDTVFLNMRGLYDVVSVLRIARTPSVNIGCCIENVLLQQNLTVGSQTGNDIGERDKITENPVSTGEKNAATWSILAVLCLLVVVAVAIGWVCRDRCLQHSYAGAWAVSPETELTGEFAVGSSRFWGAQGRLGCQLSFRVSKNFQKAKVPCLEQLLFLETQRSPRWCARHFLQPPLGMGWHPGVHFVTLRWDFPNMHRSRETSARPPRSPVPSPDQGVQGGSRHRRPAPMGCPEWVQAPAPSPRGVSRAGPGTGAQPPWGVQGGSRHRRPAPMGCPEWVQAPAPSPRGVSRAGPGTGAQPLWGVWSGSGHRQLLSVAATPAALVCPSVPGATEMWIPVQFGKNVHTRSPTWQVPLAARGAGLRRQASRAPRHGPGSPPSPVCRPGEGVPRGQWAQGVRSHHAVVSPVDPGELMADRRNALPRPGRPIQMMQEHSLLKTRPACSRRSQSKFPEQAAVSEALNPVFATKLSPEKTGVCLQKGKGCFMFLSLLHLPSKATFDRQLTAQSVDRASVRRHRERPGGSLSMDSQTAGEHLGQPPEGPLLDPRENLLALAVILEGGPFKSVIHTKGKCPQVSGLPAVTASHPQEGTGDGLSLPGACGIQHQALPSTPDPLWVFPWDAEILRPKGVWFKKKTGRPLFQDGVCAAGVTRGCLQGTRSQELFCPERSQPASRPEATGPTHVCAHKCSYAVHTEEPPEVPTGLQCPLPHSLGGTMSLGCSGEKLSHLWKTHGWSLPEERLCQGRVWLQGLPGLLALQRERHSPAGLETPMSSRRRPGNTVPRVLSSS

SEQ ID NO: 939163 - protein, 48 aa, Homo sapiens
MGLVSWTDLIQRLLGSAVQMTLWTYFPAMFQDDGEESSPTASMLSLFR

SEQ ID NO: 939164 - protein, 273 aa, Homo sapiens
VTLSDEWTEHKAFSQKSFFQFLTEDIPFFTIALYWLPNITLQIPQSILSESFRETALCSLNSSHGIVAFPSRSRSLRLFLWNSQIDIWKPIEVYGAKGNILREKLKRIFLGNCFVFCGFISQSYSFLLKKPFAKAVSCGICKVVFGSPSRARVKKEISSVKTWKEASENLLCVLLIHLTELQLSPQEAVYYGCSCGICKVIFGSPERAMVKKETSYDKNWKEAFCETALCSVNSSHRITAFPSRSLCLRLLLWNFQSDILKPLESYGEKGNIL

SEQ ID NO: 939165 - protein, 305 aa, Homo sapiens
EKEEQLIPQDIPDGHRAPPPLAQRSSSTRSIDTQTPGGADKGSNNSSRSQSVSPTSFLTISNEGSEESPCSADDLLADPRDKENGNNSPLPKYATSPKPNNSYMFKREPPEGCEGSKSLRNARQNNFMRFQPFTVLDKNKVNFIPKSGSAFCLVSILKPLLPTPDLTLKGSGHSLTVTTGMTTTLLQPISMASLSTNTEQERVSRGTSTVLPSASLLHHQNPLRKLKDRAQLKQWVLGAKNPADHVTVVSCGILSSRLAVKCFGFPVRCDSKAPGRTSGPLSVLPLRMKATDVLHLLGLEALAET

SEQ ID NO: 939166 - protein, 34 aa, Homo sapiens
SSGRPGRYWMSGLRNFLDFDLSPYNHTITSAATT

SEQ ID NO: 939167 - protein, 108 aa, Homo sapiens
MHIIRSTEMADSVPDSPRSKDWVGTSIYGLMIYSSSRCLFNRAIGFLHRTERIEAEMTQIKSPGFLISNTNILMELTFQGTNVSRNSFNLTLGFHQWNQVNIWQKIAI

SEQ ID NO: 939168 - protein, 30 aa, Homo sapiens
TSAPSFGTTSGGLFADNLSDTLKKLKITAV

SEQ ID NO: 939169 - protein, 31 aa, Homo sapiens
PRVLKVGGNEVTELSTGSSGHDSSLFEDKND

SEQ ID NO: 939170 - protein, 211 aa, Homo sapiens
DGLSQGPLNPVHNETAKHLKFPISKSLGLPGFDLEELLGNTLSRALFQNVFCLKLTQACLPFCGPYKCSFSQMMAPAGSAPSAQHRARHTVVHRERLLDAHPKANQGARGLGPGPHILFQHLALLGAGTPAEGALLQLLDATAVAGRELLEATTLQEVQLLGPAPLLQDLLLGLQFRAELGLQGCLGRGAGMHLGHGLASHLFATGPRRSD

SEQ ID NO: 939171 - protein, 77 aa, Homo sapiens
MTLILGYTLTKKCPDLKKYFDSCNGDLDPEIVKSFLFQLLKGWILHSRNVLTQGPEAPEPLINRNGELKLADFGQDL

SEQ ID NO: 939172 - protein, 47 aa, Homo sapiens
ANVRERRRMQSINDAFEGLRSHIPTLPYEKRLSKVDTLRLAIGYINF

SEQ ID NO: 939173 - protein, 134 aa, Homo sapiens
TPQDTNRASETDTHSIGEKNSSQSEEDDIERRKELKAFEEKLRLDMGLVKSAGNIPPRSSSLTPEAHGHLSMRNTSVMKKGGVSLQNFCKFPSSLLLSHLLAIGLGILYWKRSDTSTSTFDEEWSLTWFVSGYF

SEQ ID NO: 939174 - protein, 128 aa, Homo sapiens
YQITAYNHTITYAERRRKQYNDAQRCYRIVEKKLPFRIAFSVIGTEEWKTEFHLCIGVCFHFFLKSLKPSNHATIQSIVRAVGVVPGIPEPCCVPEKMSSLSILFLDENRNVVLKVYPNMTVDTCACR

SEQ ID NO: 939175 - protein, 30 aa, Homo sapiens
SEDTAVYYCARGLPWNYGNYYYGMDVWGQG

SEQ ID NO: 939176 - protein, 37 aa, Homo sapiens
SEDTAVYYCARDDNPPGVDGRLWFGEWHYIMDVWGQG

SEQ ID NO: 939177 - protein, 30 aa, Homo sapiens
VDTATYYCARRHRVFGYFDSVPLFDYWGQG

SEQ ID NO: 939178 - protein, 30 aa, Homo sapiens
VDTATYYCARNWNYLGGLYYSYGMDVWGQG

SEQ ID NO: 939179 - protein, 32 aa, Homo sapiens
VDTATYYCAHIGLFGSPAGPPYYYYMDVWGKG

SEQ ID NO: 939180 - protein, 30 aa, Homo sapiens
VDTATYYCAHKRVTTMVGGTVTRFDYWGQG

SEQ ID NO: 939181 - protein, 37 aa, Homo sapiens
AADTAVYYCARDRPTYYGSGTSKVSSHKWDFDLWGHG

SEQ ID NO: 939182 - protein, 30 aa, Homo sapiens
AADTAMYYCARAPVVLPVVMPYAFDIWGQG

SEQ ID NO: 939183 - protein, 34 aa, Homo sapiens
AADTAVYYCAREVHVHTVLLTAIGESRYDIWGQG

SEQ ID NO: 939184 - protein, 34 aa, Homo sapiens
AADTAVYYCARRGYGILTTYRASGDDDMDVWGQG

SEQ ID NO: 939185 - protein, 34 aa, Homo sapiens
ASDTAIYYCARQTSVVVVTFLVPPSYFFDPWGQG

SEQ ID NO: 939186 - protein, 34 aa, Homo sapiens
ASDTAMYYCARDLSGPTHIVMLVSHHYFDYWGQG

SEQ ID NO: 939187 - protein, 32 aa, Homo sapiens
PEDTAVYYCTRARIVSGYDYQDLGYFDNWGQG

SEQ ID NO: 939188 - protein, 32 aa, Homo sapiens
PEDTAVYYCVRYNSTWFPGGGRYDWFDPWGQG

SEQ ID NO: 939189 - protein, 30 aa, Homo sapiens
TDDTAVYYCVREGEGLTTVTTRGIDHWGQG

SEQ ID NO: 939190 - protein, 30 aa, Homo sapiens
AEDTAVYYCARDAAVLPVGWAEYFHHWGQG

SEQ ID NO: 939191 - protein, 32 aa, Homo sapiens
PEDTAVYYCARDQVLSCTSSTCLEGMDVWGQG

SEQ ID NO: 939192 - protein, 35 aa, Homo sapiens
AEDTAIYYCAREGEWFGNSHERDYFYFGVDVWGQG

SEQ ID NO: 939193 - protein, 31 aa, Homo sapiens
SEDTAVYFCARDGNYANCHESLPHYDYWGQG

SEQ ID NO: 939194 - protein, 30 aa, Homo sapiens
SEDTAVYYCARGPQEIWYDVADQFDHWGQG

SEQ ID NO: 939195 - protein, 30 aa, Homo sapiens
VDTATYYCAHIRPSTTVTTSAEYFQHWGQG

SEQ ID NO: 939196 - protein, 42 aa, Homo sapiens
PEDTAVYYCAKEGGEVFSSSSSYLRVPHTAGGYLYFDLWGRG

SEQ ID NO: 939197 - protein, 36 aa, Homo sapiens
AADTAVYYCARDAGIRDTAMIINGIKYYGMDVWGQG

SEQ ID NO: 939198 - protein, 36 aa, Homo sapiens
AADTAVYYSARDAGIRDTAMIINGIQYYGMDVWGQG

SEQ ID NO: 939199 - protein, 34 aa, Homo sapiens
AADTAVYYSARDSSGSGGYYSSEYYYGMDVWGQG

SEQ ID NO: 939200 - protein, 31 aa, Homo sapiens
ASDTAMYYCARVFLPHGREEAEAPFDYWGQG

SEQ ID NO: 939201 - protein, 30 aa, Homo sapiens
TEDTAVYYCARDKLYCGVPPVILGDYWGQG

SEQ ID NO: 939202 - protein, 82 aa, Homo sapiens [sequence omitted]

SEQ ID NO: 939203 - protein, 249 aa, Homo sapiens
KFVIPDFEEFTGHVDRIFEDAKELTGGKVAAYIPHLAKSNPDLWGVSPCTVDGQRHSVGHTKIPFCLQSCVKPLTYAISVSTLGTDYVHKFVGKEPSGLRYNKLSLNEEGIPHNPMVNAGAIVVSSLIKMDCNKAEKFDFVLQYLNKMAGNEFMGFSNATFQSEKETGDRNYAIGYYLKEKKCFPKGVDMMATLDLYFQLCSVEVTCESGSVMAATLANGGISPITRESVLSAEAVRNTLSLMHSCGMY

SEQ ID NO: 939204 - protein, 112 aa, Homo sapiens
RGAPFFKPVGKAQYAGGSDPIFQVPSVTPFFDSERELPDPLRFPSEAMPHPASARARCAHPLTCAHCLALPSEMNPVPQMEMQKSPSSASLALGAVDRSCSYSAILAPPQNN

SEQ ID NO: 939205 - protein, 30 aa, Homo sapiens
VDTGTYYCAHRTVSYGPYKADWYFDLWGRG

SEQ ID NO: 939206 - protein, 30 aa, Homo sapiens
VDTATYYCAHRTVSYGPYKADWYFDIWGRG

SEQ ID NO: 939207 - protein, 30 aa, Homo sapiens
VDTGTYYCAHRTVSYGAYKADHYFDLWGRG

SEQ ID NO: 939208 - protein, 30 aa, Homo sapiens
VDTATYFCAHRGNNYYDNSAYGDFDYWGQG

SEQ ID NO: 939209 - protein, 137 aa, Homo sapiens
CHLHHLPNSIASNVIRADPGLGLCPEQLEEALCGFQVVGSFSFANLIAGSDTAGFTLEYDCCSWSHSRLDNYWRQGFALDALSGTGGRIPGATTEPTFESGGRLEQRSAVALGWFTRQNSPSSSEEKKRPIYEGANC

SEQ ID NO: 939210 - protein, 446 aa, Homo sapiens [sequence omitted]

SEQ ID NO: 939211 - protein, 475 aa, Homo sapiens
MEMASSAGSWLSGCLIPLVFLRLSVHVSGHAGDAGKFHVALLGGTAELLCPLSLWPGTVPKEVRWLRSPFPQRSQAVHIFRDGKDQDEDLMPEYKGRTVLVRDAQEGSVTLQILDVRLEDQGSYRCLIQVGNLSKEDTVILQVAAPSVGSLSPSAVALAVILPVLVLLIMVCLCLIWKQRRAKEKLLYEHVTEVDNLLSDHAKEKGKLHKAVKKLRSELKLKRAAANSGWRRARLHFVAVTLDPDTAHPKLILSEDQRCVRLGDRRQPVPDNPQRFDFVVSILGSEYFTTGCHYWEVYVGDKTKWILGVCSESVSRKGKVTASPANGHWLLRQSRGNEYEALTSPQTSFRLKEPPRCVGIFLDYEAGVISFYNVTNKSHIFTFTHNFSGPLRPFFEPCLHDGGKNTAPLVICSELHKSEESIVPRPEGKGHANGDVSLKVNSSLLPPKAPELKDIILSLPPDLGPALQELKAPSF

SEQ ID NO: 939212 - protein, 30 aa, Homo sapiens
LEDSAKYFCALGELYKTYWGIRTLYTDKLT

SEQ ID NO: 939213 - protein, 31 aa, Homo sapiens
LEDSAKYFCALGGPPGLLRWGIRLTYTDKLT

SEQ ID NO: 939214 - protein, 31 aa, Homo sapiens
LEDSAKYFCALGELPNSFLRYWGFLYTDKLT

SEQ ID NO: 939215 - protein, 30 aa, Homo sapiens
ERDEGSYYCACDTPPDWGIRHSSWDTRQMF

SEQ ID NO: 939216 - protein, 615 aa, Homo sapiens
MRVRGRAEDSDQDRQRPWAARIQDIDGSEIIRRMEMGQVAVVAGFQGIGPDNRVATLGCGGSDTSVVAIAAGVKADRCDIYTDVDGVYTTDPRVEPKDASFEDFLRGNAGNGIAWCQGSAGALGRTCHGAQGAHFRASSFTDPDAPGMGDPINPPGTLICDEDEIVEQQVVTGIAFAKDEAQISLRRVADRPGVSAAIFGPLAEEHINVDMIVQNVSEDGSKTDMTFTIPTGDVDKALKVLDKVEGEIGFDNIQSETGLAKISVIGIGMRTCRRCRTAFKALAEKGINIRAITTSEIKISILIDGPMRNWPSYLHAVYGLDKKAASSDSILKHNCMQGRAAERVRGPATFCEQRLFVLDAGVKNAHKGIGVTSRAGIGNRLAERTSAILKEPPTIMRELTTGPRVLLKRLRELMAEPLEPQARLDRIVREIAQNMVAEVCSFYILRADGVLELYATEGLNPQAVHLAHFASVRVWSARLAASARPLNLTDAQSHTAFAYLPETGEEAYNSFLGVPVLRAGRTLGVLVVQNKTKRAYREDEVEALETTAMVLAEIIATGDGLRRARPGIELDLGRPMSVTGQAFNDGIGLGHVVLHEPRIVVTNLFNEDSQAELNR

SEQ ID NO: 939217 - protein, 231 aa, Homo sapiens [sequence omitted]

SEQ ID NO: 939218 - protein, 311 aa, Homo sapiens
MASKDFAIGMILLSQIMVGFLGNFFLLYHYSFLCFTRGMLQSTDLILKHLTIANSLVILSKGIPQTMAAFGLKDSLSDIGCKFVFYVHRVGRAVCVGNACLLSVFQVITISPSEFRWAELKLHAHKYIRSFILVLCWILNTLVNITVLLHVTGKWNSINSTKTNDYGYCSGGSRSRIPHSLHIVLLSSLDVLCLGLMTLASGSMVFILHRHKQQVQHIHGTNLSARSSPESRVTQSILVLVSTLCYFTRSPPSLHMSLFPNPSWWLLNTSALITACFPMVSPFVLMSRHPRIPRLGSACCGRNPQFPKLVR

SEQ ID NO: 939219 - protein, 221 aa, Homo sapiens
MAGGVRPLRGLRALCRVLLFLSQFCILSGGESTEIPPYVMKCPSNGLCSRLPADCIDCTTNFSCTYGKPVTFDCAVKPSVTCVDQDFKSQKNFIINMTCRFCWQLPETDYECTNSTSCMTVSCPRQRYPANCTVRDHVHCLGNRTFPKMLYCNWTGGYKWSTALALSITLGGFGADRFYLGQWREGLGKLFSFGGLGIWTLIDVLLIGVGYVGPADGSLYI

SEQ ID NO: 939220 - protein, 113 aa, Homo sapiens
MPEPGSNSSSGIKQTSSRHQADIKQTSSRHQADIKQTSSRHQADIKQTSSRHQADIKQTSSRHQADIKQTSSRHQADIKQTSSRHQADIKQTSSRHQADIMRTSSRHQADIKQ

SEQ ID NO: 939221 - protein, 105 aa, Homo sapiens
MTDPDVPGPSDPYMKEHLHWMVTDIPGTTDSTFGKELTSYEKPKPNIGIHRYVFVLFKQKRGNKYSITCPFSRDYFNTRNYQNDLGVPVAAAYFNARRATAPRRR

SEQ ID NO: 939222 - protein, 409 aa, Homo sapiens [sequence omitted]

SEQ ID NO: 939223 - protein, 144 aa, Homo sapiens
GNCAIRGSNALRAPHERILTCHISRSSTVGAHHTCTPLAYIAVRSSGIMFSQHTAPLTRPTAVSITGKVEPSPLPQIKRSVPVGISLRCLTTRPPDGSKYSTVQYRVLPLRSITPRTRLAPVRADNPASASVLVPGLPWIAQLP

SEQ ID NO: 939224 - protein, 420 aa, Homo sapiens [sequence omitted]

SEQ ID NO: 939225 - protein, 223 aa, Homo sapiens
MACLGFQRHKAQLNLATRTWPCTLLFFLLFIPVFCKAMHVAQPAVVLASSRGIASFVCEYASPGKATEVRVTVLRQADSQVTEVCAATYMMGNELTFLDDSICTGTSSGNQVNLTIQGLRAMDTGLYICKVELMYPPPYYLGIGNGTQIYVIDPEPCPDSDFLLWILAAVSSGLFFYSFLLTAVSLSKMLKKRSPLTTGVYVKMPPTEPECEKQFQPYFIPIN

SEQ ID NO: 939226 - protein, 207 aa, Homo sapiens
MFSVVDENLSWYLEDNIKTFCSEPEKVDKDNEDFQESNRMYSINGYTFGSLPGLSMCAEDRVKWYLFGMGNEVDCIQRSFMVQALTSKNYHTEIINLFPATLIDVSMVAQNPGVWMLSCQNLNHLKAGLQAFFQVRDCNKPSPDDDIQDRHVRHYYIAAEETIWDYAPSGTDTFTGENLTSLGSDSRVFFEQGATRIGGSYKKIGLS

SEQ ID NO: 939227 - protein, 97 aa, Homo sapiens
SCKASGDFFRTNVFAWLRHVPGQGFEWMGEIRPVFDVIRVAERFQGRVTLIADVSASTAYMELHRLSLEDTSVYFCATRTPGDGWPFEFWGQGTLVT

SEQ ID NO: 939228 - protein, 193 aa, Homo sapiens
MKPKQVSRDLGLAADLPGGAEGAAAQPQAVLRQPELRVISDGEQGGQQGHRLDHGGHLEMRKARGGDHVPVSHEQPRGGEDAAVQEPRQRPEPELGLKRAVPGGQRPDNAKPNRDLKLQAGSDLRRRRRDLGPHAEGQLAPRDGVIGLNPLPDVQVNDLRGALDAQLRQAAGGALQVVHSRQLRQAPGPPEES

SEQ ID NO: 939229 - protein, 220 aa, Homo sapiens
CFEYWVKDRPGTSYNGSCGGGEYQSLRPKISRYHIRQSFDPTMNQFSSFSFSCYTSESSPFEPLGYSLNVLYSRSVSFCNPIFSDWFSLGYSTFKITYLERDFRLFYSRAVPEYQWWAVDFRCVAAVSSVPKIVDWMDNFKLVGLLNNYRYASLTSNFFGRLSTFQDGCLIRMRYRLARRVSQNYSTTISGTTKLIVQPNARKYESLFQPCSWRSDCVSL

SEQ ID NO: 939230 - protein, 138 aa, Homo sapiens
AWTRPEVSQSATGVGPAKTDRRRIGSSFNGVDDPLPETCHGGPARNRPRDPGTGGALMNARPDTDGRTIARYLGQLRLRCSTSPIYYRQALRTFQEVVIRDQRTPGQLGREVLETWMRECAMHWPMATLLHRARIGNR

SEQ ID NO: 939231 - protein, 162 aa, Homo sapiens
MSTRVTRSLRTNCGSDVWAYGAMSTRVSADPMCGHMGRCRLESVRIRRVGVRLRIDLAMSTRVRLRIRCVGIRADPMSTRVSADPMFGPMGRCRLESVRIRCVGVWGDVDSSQCEFDVWAYGAMSTRVRLRIRRLGVRGDVDSSQCEFDVWAFGLGLTWRCR

SEQ ID NO: 939232 - protein, 34 aa, Homo sapiens
VGVRKTGQIWPNDGEGAFHGDAGKSPGLRLNHNG

SEQ ID NO: 939233 - protein, 602 aa, Homo sapiens
MAAEEEAAAGGKVLREENQCIAPVVSSRVSPGTRPTAMGSFSSHMTEFPRKRKGSDSDPSQVEDGEHQVKMKAFREAHSQTEKRRRDKMNNLIEELSAMIPQCNPMARKLDKLTVLRMAVQHLRSLKGLTNSYVGSNYRPSFLQDNELRHLILKTAEGFLFVVGCERGKILFVSKSVSKILNYDQASLTGQSLFDFLHPKDVAKVKEQLSSFDISPREKLIDAKTGLQVHSNLHAGRTRVYSGSRRSFFCRIKSCKISVKEEHGCLPNSKKKEHRKFYTIHCTGYLRSWPPNIVGMEEERNSKKDNSNFTCLVAIGRLQPYIVPQNSGEINVKPTEFITRFAVNGKFVYVDQRATAILGYLPQELLGTSCYEYFHQDDHNNLTDKHKAVLQSKEKILTDSYKFRAKDGSFVTLKSQWFSFTNPWTKELEYIVSVNTLVLGHSEPGEASFLPCSSQSSEESSRQSCMSVPGMSTGTVLGAGSIGTDIANEILDLQRLQSSSYLDDSSPTGLMKDTHTVNCRSMSNKELFPPSPSEMGELEATRQNQSTVAVHSHEPLLSDGAQLDFDALCDNDDTAMAAFMNYLEAEGGLGDPGDFSDIQWTL

SEQ ID NO: 939234 - protein, 59 aa, Homo sapiens
MLTDRKNQYRENGNTTQSDLKIQCYSHQTTINILHRIRKKNYFKIHMEPKKSPYSQDNP

SEQ ID NO: 939235 - protein, 31 aa, Homo sapiens
SEDTAVYYCALRPYYDFWSGINYNMDVWGRG

SEQ ID NO: 939236 - protein, 30 aa, Homo sapiens
LRTRPYITVRDRRHIVVLNALCALLNTGAR

SEQ ID NO: 939237 - protein, 30 aa, Homo sapiens
LRTRPSITVRDRRHIVVLNASNALLSTGAR

SEQ ID NO: 939238 - protein, 31 aa, Homo sapiens
SDDTAIYYCARDSGKIAVVGYNFGMDDWGQG

SEQ ID NO: 939239 - protein, 31 aa, Homo sapiens
SEDTAVYYCAIRGRQQLGGNYYYAMDVWGQG

SEQ ID NO: 939240 - protein, 31 aa, Homo sapiens
SEDTAVYFCARVIGTTIFQGVIGSFDYWGQG

SEQ ID NO: 939241 - protein, 67 aa, Homo sapiens
WNEKRGDFLGENETYELMRCLEDLTSKKTLCMENLIRERARGMMTIETREGGNAETFVWREILLGEL

SEQ ID NO: 939242 - protein, 181 aa, Homo sapiens
PPCQWRPRIKWTHRKSAGLIAPGFSGRMSSSSMSSDSYLGLPPGRGVTRGSGPGNLKGKVSAVQEVPGARSALRSNATEISVSTINNGGTEKLPRERGRSAWLKSRSTSPEHRSDRPTAPEINSVSRAGHGSPLQRTSKGSSIERTAMATHSSQGHDPDHSGLLPYLGNRAFGKLVLDHGG

SEQ ID NO: 939243 - protein, 91 aa, Homo sapiens
LNTFHNIALVTVMSTVESAMAPPASLTHWRILLSGLPALHLHDFLCQLSGYSRSSGRRSHSPVGRGTGQTPRPTQTTIHELCSPALPPVSD

SEQ ID NO: 939244 - protein, 99 aa, Homo sapiens
MASDTQASGTATWHPPRCLLPLHHDSGASPTSAHAHHKLALSLETRPSSRGASGGPPDLPVSLSEHLVSVYKEDVYSGSLGTETYLREWSLCSAHPPEE

SEQ ID NO: 939245 - protein, 70 aa, Homo sapiens
QQILRCGVRKDDRTGTGTLSVIRTTKKRKKVKKRIPFADKEKSVLEGSFGGIDVVYEGIQNDKKLSSKGS

SEQ ID NO: 939246 - protein, 134 aa, Homo sapiens
EIESHSVASLQYSGAISAHCNLRLPGSSDSPAWEAEGAVSRDCTTAFQPGRLSGTLPQKKERERKREREREKGKERERKKEREREKELQEQFLYFIFTLEISQICFSLKEHAYVKLNDCWASCTFSFQTGKALK

SEQ ID NO: 939247 - protein, 146 aa, Homo sapiens
ATMGSTVVQINYHSAVTHQKKDFLLSRDKYKSIVEIWLQNVERTVKGIAKRRRYRCRSTASYQRIFKAQSPNERALGPPFRTLSGGHPYQKKRSPCSMAGVMPFPYCFFRMRAIDSAAAGCHTPFPEIEYPFYYSDDPGCPIPSWW

SEQ ID NO: 939248 - protein, 87 aa, Homo sapiens
AASSPAKEEEIRTKTHNRGKTMGRHSRWPRRDPSEEINLGGAWCFTPVIPALWEVEVGRSPEPEEFETSLGNMVKFHLYKKISRVWC

SEQ ID NO: 939249 - protein, 111 aa, Homo sapiens
GPPPPVRGGCGGGGEFPPPFGPTLLPGHSPPPKKGAGVFLGGGGPFFPLKPIFPPLFFFWERGGKGGGGPPLSPPPPLGGGGGPKFFSFPPPWGLFWGEGDPPGKLFFFTP

SEQ ID NO: 939250 - protein, 107 aa, Homo sapiens
MYWFLGVLLWVGGAYPTRTEKAGEVIPVLLRDVIPRFRPPLWIGSDNGPAFLAALVQKNGKGIGDRTETTCTSRPQSSGKVERMNRTIKNSTTVFPAGYLKQQHKGH

SEQ ID NO: 939251 - protein, 101 aa, Homo sapiens
KMYAKCQKKLAPDWLIFFIGGYDKKDNTCSMFVYGGCQGNNNNFQSKANCLNTCKNKRFPCLDKDALEELTECGSCSEYMFLYMTDAKDWIHSLTLRIQRS

SEQ ID NO: 939252 - protein, 83 aa, Homo sapiens
KRKIRDESLCPPTPGALSLFCYEDQEAVCLICAISHTHRAHTVVPLDDATQEYKVGNAHHPPISLWVNRQNRQRMTYSLAHTS

SEQ ID NO: 939253 - protein, 117 aa, Homo sapiens
TTINKQPPQKNNYNSISSILIMLLLTSMSLAIIIIVLCKFLIKPFLNDQNCSFISPFAYLETPYICMDNIRENEISTKRTSIISLTPWKPSKSTLLADDLEIKLFESSENIEDSNNP

SEQ ID NO: 939254 - protein, 87 aa, Homo sapiens
KNSSLCWISVPREPRVLVEKRWTCSQHHSRQQQMAIEHFKMRLSVDASPEKSPVKLRKIVGGILGGHLDQHSSLPQIYRSKKQSPEK

SEQ ID NO: 939255 - protein, 72 aa, Homo sapiens
PVVEVILAGDQDFQRMDSLLLSSLVNTAEIIPKVWVSPRSYQNLHHTVVSVDGSHHERCPAQFVPCIDICAF

SEQ ID NO: 939256 - protein, 46 aa, Homo sapiens
MDQPRACPRSMGIVWLCRSFEVKSFQGGIVSVENQVFTGKLTPRGR

SEQ ID NO: 939257 - protein, 67 aa, Homo sapiens
RALSLTKTPAIVCAPWPPHACPPLCMVSWEKRDNVPLPAPAPFFCWFSTNTYPHSTPRTSRLHPQSM

SEQ ID NO: 939258 - protein, 74 aa, Homo sapiens
TQAPSLELPDPAYPVRANKGESRGFAAEFQGSPWRDQASVWLLSGLLQLLTLDTFEHSDQEKPAQPSLHGERLC

SEQ ID NO: 939259 - protein, 40 aa, Homo sapiens
  misc_feature (29)..(30): Xaa can be any naturally occurring amino acid
RQCGQGCWGMGVAGGSTPLIRPLLLLAPXXSPGDLAAAST

SEQ ID NO: 939260 - protein, 88 aa, Homo sapiens
NTSHPNIRAFTPRLTVRNTNSERRYRFSTEKHDYANRERSRRASAPRATLISHLSLLSFSTVQKSITHRISLRNYFDNLISLNISQPP

SEQ ID NO: 939261 - protein, 67 aa, Homo sapiens
PTAPPYDSIQIYGYEGRGSVAGSLSSLESATTDSDLDYDYLQNWGPRFKKLADLYGSKDTFDDDSEQ

SEQ ID NO: 939262 - protein, 118 aa, Homo sapiens
LRLLLAWESRIRCRHSGPFLQRRPPFRRGSLQPTSHNQVPPFSGMEIAIPQFPRFPPSPRPFFPRVEVLKPPSPPLFQLPPSLLRMEIHYSLPLSRVDSLGPAIWSITALLGSEDQAL

SEQ ID NO: 939263 - protein, 183 aa, Homo sapiens
HRADEVSHGVWNVNGKREMCGCTAFTGDSDASCFSLFSLNRAVIVILMFVLGNLNVHTLRQLQRRRPAPLKHAVHEYPVLAQAAQVEVAAGVGPGLRGRQLRSGPAMAAAARGREDLEVAPGDEARVAHAHVHRALRRVAAVVTERFFIRYSNSRPSRRATAQPPGGDPPPPAPTPPAPPPAG

SEQ ID NO: 939264 - protein, 140 aa, Homo sapiens
VCVCVAINVQPSGNTKRKHMRITGSLPTGVVRRGPQSSRPQNGRSTDSLHCIPGKASDVQRQPVKAARSGAVPCKATEAEPPKAMGAHLLPQRDLNHFSFLPLCEEGYVCFPFCHDCKFPEAFPPTQNCESIKPLSFKIK

SEQ ID NO: 939265 - protein, 107 aa, Homo sapiens
FRSKYASEWSIIFLGIQLNLSMKSKYVLSQGSWQLKAPSFCPDAPTLNPQERNTRWRVHACVVSPAFHLPCRDRGPWAELRVPVSVFLREMELTSTGGGVPSDSATG

SEQ ID NO: 939266 - protein, 106 aa, Homo sapiens
LNAKKRVGINPFLFALWVPPFTFPSIKFPLGHLVKPLSGQEAHFWIVVPTNPGALWVFPPLPPQNPVFIWCFWKQGLPHFRPSGKLPIFPPVTWPPTHKFRFKNKF

SEQ ID NO: 939267 - protein, 146 aa, Homo sapiens
TYDFGSSDQPAQGTSHEFQIGTPLEIGLSNPAATPRAPRTLAKGSLTDSFPDLLSLAAEDCCCLIALEAPWTITDAELWITLTVEDSQLYEDTLAGRSVLIKNLTPQTLQPRWTGPYLVIYSTPTAVRLQDPPHWVHRSRIKLCPS

SEQ ID NO: 939268 - protein, 165 aa, Homo sapiens
SSTISSPFSARIDFNPPSALIACSEIPQKFRFFVLPFVDINQLRNCRTAGFNLEDYNGLFGAVAVNVKVFDINQAGTYTAFGLGGSFFVGAHVVAYVFHFRLYFAVSQRNLISVAVLPSARKRISKISEIEMSQRRVGRYLACSQFTLKIQVIQVKVRQRMLLIP

SEQ ID NO: 939269 - protein, 118 aa, Homo sapiens
  misc_feature (18)..(18): Xaa can be any naturally occurring amino acid
LPPPPFLKPKRGRLWAFXFFPGSNPEGVLPNPPPKSQGLGGPRVPPVLARVFGGHFFPLSQENPPQFGFFLPPLRPVGPPKMAFPGIFPGFPFLGTPPGFPPFSRVWGGGFPPPPHFF

SEQ ID NO: 939270 - protein, 88 aa, Homo sapiens
MQRLSGQIQSPSREGGFRMRFLLPSDLRSEQDPTDEVSAGCGPALVTILALPRGRSRGRPALGAGWLGAAVAMYVARCSAIRSNSAEA

SEQ ID NO: 939271 - protein, 69 aa, Homo sapiens
NRYCLAQPATMCTGRQHSSSPCRELQRSLSQMGQWNDTVHRLALLLVLPFIGIEEKQLVLFDRTANRPP

SEQ ID NO: 939272 - protein, 84 aa, Homo sapiens
NVLVESGEKSLGEGEKADVNVFRKRNGGENENGYCRSSGVDGVGRRIRAAVIRRRIKISRVRNISDITKYDVIACVGDDNGNFN

SEQ ID NO: 939273 - protein, 107 aa, Homo sapiens
QQEHAFKTQIAHAFVCGLRMPLSSFPPWAGQVFLALIPVNPQPSSLGIRAIMDISQCCRDFVYGQFWGQFMARFWGACSQQSIAPKKVLNIREIQIKTTVRYHSTPI

SEQ ID NO: 939274 - protein, 107 aa, Homo sapiens
QAFFLVAEAIMDSSLTRRGQICWYQNPGVGLDPINDATLLEACISPLLKLYCREQPYYLNLIELFLQSSYQTEIGQPLALLPAPQGNVDLVRFPEKRSKFIVKSKTP

SEQ ID NO: 939275 - protein, 84 aa, Homo sapiens
  misc_feature (63)..(63): Xaa can be any naturally occurring amino acid
  misc_feature (67)..(67): Xaa can be any naturally occurring amino acid
  misc_feature (73)..(73): Xaa can be any naturally occurring amino acid
NACSEIYIHGLGLAINRAINIALQLQAGSFGSLQVAANTSTVELVDELEPETDTREPLTRNFXPPPXPKPTQXIHIRVFRVTPK

SEQ ID NO: 939276 - protein, 67 aa, Homo sapiens
  misc_feature (3)..(3): Xaa can be any naturally occurring amino acid
LNXKSSAWGVLQELRTLSQCWEEGYLVSPVKPMKPMRPATWGGVVGRLFASTSRKACERSSQDFRTT

SEQ ID NO: 939277 - protein, 104 aa, Homo sapiens
  misc_feature (46)..(46): Xaa can be any naturally occurring amino acid
  misc_feature (48)..(48): Xaa can be any naturally occurring amino acid
MLTPEIQYLMDLGANLWVTKLLEVHSRFPAVVTSHRPAACLPFWGXPXPGLPCRGAEQDAAGAGRPQPPPGATSDPGVRGGSLGEAASQDWAHEHREGLTEISI

SEQ ID NO: 939278 - protein, 89 aa, Homo sapiens
GEYSCEARNSVGYRRCPGKRMQVDDLNISGIIATVVVVALVISVCGLGVCYAQRKGYFSKETSFQKSNFSSKAPPMSENDFKPPKSFII

SEQ ID NO: 939279 - protein, 69 aa, Homo sapiens
SPTGKIVRPASSTARRRRYTMESRSVTRLECNGAISAHCNLCLPVRGEASWTSWVQWGLGELFCLAKDL

SEQ ID NO: 939280 - protein, 43 aa, Homo sapiens
ERKKGRKDKEKRKKRKKGKEKGKEEKREKEERKKEKEKDRKKG

SEQ ID NO: 939281 - protein, 73 aa, Homo sapiens
  misc_feature (21)..(21): Xaa can be any naturally occurring amino acid
MARGYVKAWESSKEAGPPYYXSNTGCGRKTTRKGERGDGEKETHILEIRRVFYDKEIQEFSLRILDEKLPTPT

SEQ ID NO: 939282 - protein, 100 aa, Homo sapiens
KRNGLTLTVIKVIRRPGMVADASNPSTLEGGGGQITRGQEPETSLANMMKPRIHQTHKNQPGVVAGTYNPSHSGGWGRRTARTRNVEVAVSQDRATALQL

SEQ ID NO: 939283 - protein, 42 aa, Homo sapiens
DKKKKDKKKKKGEKEEKEKERKKGPSKATVKAMQETLAKLKE

SEQ ID NO: 939284 - protein, 50 aa, Homo sapiens
TPEKKMTLAGRGGSRLQSQHFEEAETGGSRGQEIETILVYAVTPCEYYKS

SEQ ID NO: 939285 - protein, 49 aa, Homo sapiens
MRELDTRGQKQVNPNKKKGEKEEKEKKNQKGPSQSPVQAMREALVKLTQ

SEQ ID NO: 939286 - protein, 62 aa, Homo sapiens
KEEESKKKEKTVTKEEEGEGRRRRTKKKKGGGEERTKEKKMKEEEEKERGRRKKKEEELRRR

SEQ ID NO: 939287 - protein, 44 aa, Homo sapiens
KEEESKKKEKTVTKEEEGEGRRRRTKKRKGGGEERTKEKKKKEG

SEQ ID NO: 939288 - protein, 36 aa, Homo sapiens
FLSGCEKPTEGQEKEASRKDRRAGKEIDISKGESYV

SEQ ID NO: 939289 - protein, 58 aa, Homo sapiens
MLFAVCGSGTSGISNTGDTVKMTNSRALTPNLQNQKLWSEASYLNFNQRVILIKFENH

SEQ ID NO: 939290 - protein, 211 aa, Homo sapiens
  misc_feature (6)..(6): Xaa can be any naturally occurring amino acid
FSLGSXLCHELKSAFQRHKYDRISYQKMSSSIEVFCKGYPSNFSTYLNMCGYCEFVVYSGYSYIRQLFSNLFRRQGFSYDYVFDWYMLKFGAARNPEYVHRDRLEPELEDRMGHYQGSATRALLPGPPSVANANRLSSAAEPVACTPASCIQPAGNTSPRAILRVARDSKVSMSLHRGAPANVSSSDLTGRQKVSRIPASQTSVPFGHLGK

SEQ ID NO: 939291 - protein, 98 aa, Homo sapiens
  misc_feature (58)..(58): Xaa can be any naturally occurring amino acid
  misc_feature (83)..(83): Xaa can be any naturally occurring amino acid
LPQQNALQGTDTQHGLVSPPNSATLNLRPSSAPERAKGLKSSSCQSSLLRSCPSRTRXIPPGGSASHCVSHPFQPPPTSKKKXSQSRGNSPAAAILDG

SEQ ID NO: 939292 - protein, 34 aa, Homo sapiens
MVSGIYILGLNYNRVGCFSVSESIILLPCLCWLY

SEQ ID NO: 939293 - protein, 113 aa, Homo sapiens
PSRLVHTGLGWTELKPTWCLALLNRENKVEETLWSQFLGMDLKKLTTSMSYLLGCSCSQPLCCEEDHVVTHRGRMPGSCSQPSLAHEWAVLGWPNSHHARRAGGSSHRALPNL

SEQ ID NO: 939294 - protein, 72 aa, Homo sapiens
IPSLQRWSLIYLTPPCSKTMDEDIVIQQADEIRLKIVGTRVDKNDIFAIGSLMDDYLGLVTEPGGLPPLVLL

SEQ ID NO: 939295 - protein, 106 aa, Homo sapiens
MQREDMKSAEFRYKTSSSHLSREHIPIQFLDQTGICHSFQLGDLVYVKKFQKEGLTPAWKGPHTVILTMPKALKVDSIPAWIHHPHIKKTNKAQQETWVPKPGQAP

SEQ ID NO: 939296 - protein, 84 aa, Homo sapiens
  misc_feature (80)..(80): Xaa can be any naturally occurring amino acid
MGFGDRFGYPRGSAELLANGKRNAGDFQEVTSQGLKLLLTVDCDEMPAEAHALGAKWLLHLTAMKTGVGMVLLDALQQGXPNPL

SEQ ID NO: 939297 - protein, 75 aa, Homo sapiens
SVPIIWGPLVLYLSWSYYRTFAQGNVRLFTSFTPGNASFFPDFALRILEGGDLSAFPGPEFLKAQNPQLHPRHFW

SEQ ID NO: 939298 - protein, 77 aa, Homo sapiens
MCNILGCSLALSFRLECGGLILAHCNHCLPSSSNSHVPATQEAEAGELLEPRKQRLWGAKIAPFHSSLGNQSKTPSK

SEQ ID NO: 939299 - protein, 114 aa, Homo sapiens
MSRQPDIPKITANTTERFLDTGDTSRDFFHLSMAETVFPIIIMTHISEELEAWKEETTCPFPLRAIICIHHLLKRTFRPGAVAHACNPSTLGGRGGQITRSDQDHPGNTPNPVS

SEQ ID NO: 939300 - protein, 112 aa, Homo sapiens
TRICGGWEWKVVQSLWWRFLKKLQIEWPYDPAVPRLGIYPKERESVHQRDTCTPMVLAALFTIAKIWNQPQCPTTDEWLKNEIVFHCGCWYIYTMKYYSAIKQNEILSFAAT

SEQ ID NO: 939301 - protein, 113 aa, Homo sapiens
MLTSSQPQLVPCFSSHSPQITHSSSCHFLSRLLCMTLHLSCPVALAAHLLSLLAIFTKGFAFGEVPYQLLLTAATTIHFHTPNFFLSLSIPPHHFPILLQPFPLFFSTPSRFI

SEQ ID NO: 939302 - protein, 107 aa, Homo sapiens
HTQTHSTHKRTAHTHTQHTHEHTAHKRTAHAHTCTHSTHTSTQHTHKDTAHTCTHSTHTRTQHTRTQHTQHTHKHSTHMHTAQHTQHTHEHSTQHHMARTHTHTHTG

SEQ ID NO: 939303 - protein, 70 aa, Homo sapiens
  misc_feature (45)..(45): Xaa can be any naturally occurring amino acid
EDILFKGFRSTVPLNDKVQDVAVGCSGRRILVVLTTLELRRFLTXTVICDITHSNSSTWDGEDMNPVLKP

SEQ ID NO: 939304 - protein, 66 aa, Homo sapiens
RPSVRAKNRQVDGGGRSPREPNGRGRSRQTRFSPYPIPAVEPDFLKSVLQQRLIALGGVIAARISV

SEQ ID NO: 939305 - protein, 103 aa, Homo sapiens
ALVESLPPPTLRIGTAPAEPGLVGGSGCAFFMAYSGPLRFQVLCGGDLEGVGYRTRDAIQLLILNGFVLTRLNYPCSCGRHGGFAFTYAGHVAVKKNGVSDKI

SEQ ID NO: 939306 - protein, 188 aa, Homo sapiens
LNQYTKTFGYPPTDEDALPSFFGSMLGQEIDPLRNVLVTVAGYGALFTTFQALVDEGDEVIIIEPFVDCYEPMTMMAGGRPVFVSLKPGPIQNGELGSSSNWQLDPMELAGKFTSRTKALVLNTPNNPLGKVFSREELELVASLCQQHDVVCITSTMYRSHPSSAWPLLRLRYNLTFPGSSWPWGVAF

SEQ ID NO: 939307 - protein, 151 aa, Homo sapiens
QIRRAEDVGFHCGVNSGARIKFLVCDKLPGTLSLSSSCQCHVVRLQELGKVVTREIGMLAFAPMRQRVEVDQDVVDEAGMAHDEPVLRQSGDEPLHQRAKIGSAREIIGAGEIGIEGEIGLARTAAELGAEDIEHQRLRRTQSLRERLVAA

SEQ ID NO: 939308 - protein, 143 aa, Homo sapiens
LAAVYLFSRFPHASMSTKDNKMTCVQATHTKWQVPHSAPHGAKTYVHDSLWFCFVLLILCGVKILLQMPKRPADTLMGNSNKKNEAFVFIYNRESQAAGETGQWCKCEMSYKRIGCWDHYIYDLKKQKHELLKFYVERIKRSQ

SEQ ID NO: 939309 - protein, 168 aa, Homo sapiens
NVKISDFGFAKMVPSNHPVGCSPSYRQVNCFSHLSQTYCGSFAYACPEILRGLPYNPFLFDTWSMGVILYTLVVAPLPFDDTNLKKLLRKTQKEVPFPANHTISQECKNLILQMVRQAPKGAPLLDIIKDFWGVKFQPEQPPHEIRLLEAMCQLPNPPKQPQSLQISP

SEQ ID NO: 939310 - protein, 114 aa, Homo sapiens
  misc_feature (16)..(16): Xaa can be any naturally occurring amino acid
LSSRSNSALTLTDSEXENKSDSENEQPASNQGQFTLQPLPPSHKQHFAQHHPSITFFNRNSLTNKRNQSPAPPGALPAELQTTPESVQLQDNWVLGSNVPLESRHFLFKTGTGT

SEQ ID NO: 939311 - protein, 106 aa, Homo sapiens
  misc_feature (14)..(14): Xaa can be any naturally occurring amino acid
MGPRGPFFQFLPPXLRAERINPPPPGGFLNRAPRTPPPPGNPGPLGSVLGGRIFKVFPNLELGERVFPKKGDPPQKPGGPPGFFCFPPPPSPFYPRFSPPFSPFPV

SEQ ID NO: 939312 - protein, 116 aa, Homo sapiens
GQGGAPPNGLRKPQGALREKPSLSVAKSCIRGMRQGTQGFGSPWGLGAAPGRGKPGQGWCWARSSIFRCYPPLPPLTAQAKSSGLQFSPFPTPFLFGVFTFAWVCSLANKPSLCGS

SEQ ID NO: 939313 - protein, 119 aa, Homo sapiens
FGFGGWVGFFLPGSPKLGSKKLWVNPKKSMWKRKVVLMKALQMSAIDSLGNSKRLLNQGWPVKAAMESMAKLPGPALKARYPVKEKIFFKGLKVKIIPLTLCDGIFRVPFFKGNQFFPM

SEQ ID NO: 939314 - protein, 38 aa, Homo sapiens
PSVGVDISREERLHKCRLCYKQLKSISGLVKSKSSERP

SEQ ID NO: 939315 - protein, 95 aa, Homo sapiens
KPNPPQKKLFKPPPCSPPFWAPRVWGDFRGFPPPPPPRVLQGPPFFLVWGWGGVGGPLFPPPGPGGPKGPPRPKKPPLGPPPGFPPPLFPNPLFF

SEQ ID NO: 939316 - protein, 111 aa, Homo sapiens
GHKLASVRRSGYQQPEHQQRSPAPPPQQPAPRWARSRGGMKAPRRSRVKAQRRPGRLQLAGSARRHHRRRRLLRPPPPPQTRAPAGRQPGPIGTGGLRSSDPGCVPWFRLF

SEQ ID NO: 939317 - protein, 71 aa, Homo sapiens
KATCTSSVSQQDSRSRKRAGQKTPTLAGRHVPLKIEKQAIWVPHSSYIRLGQFLFTEDYKTLPPTHLVTPF

SEQ ID NO: 939318 - protein, 41 aa, Homo sapiens
HPARQHHRLYARRKPASQGSMAAMQSLACAMAIGRSRHCAA

SEQ ID NO: 939319 - protein, 78 aa, Homo sapiens
NPALVAKLKGFQQENEELKAGMAKHMAISRQLSPEQAVLQKSLEKESKVTKRLFMENEELLWKLPNGDLCSPKRSPPL

SEQ ID NO: 939320 - protein, 87 aa, Homo sapiens
KLAKKRKETMSSTRQEMTVMVNSMDKSYAEQGTNCDEAFSFMDTHNLNGRSVSSPSSFTMKTNTLSTSVPNSYYPDPFVPTAILATL

SEQ ID NO: 939321 - protein, 144 aa, Homo sapiens
GGGPLGVALSPIRELGPRFPVSGRALKNCPFPLCPRAPGGPGGVKGGPFLKKNRVPRGAPPPGGIFLGRPKNWDLKTGPWGQQPPSPPKGGPPPWRVFFFGGGGKIFPKGAPVAGSQGPPVWVLGPGLSPRAPCFFFFGKRGPL

SEQ ID NO: 939322 - protein, 104 aa, Homo sapiens
MTVLKEAIPLGRVTGETTKQLAKAVQVHQDTLRTMYFAGHVLMFNDCVPSGILETSYTQTHKWAALPVQAALDIKLAFVLIKFPVFQNPFRPRFQTWILNCSPD

SEQ ID NO: 939323 - protein, 148 aa, Homo sapiens
IRAKYEQRLFLAPFKNAQEVPLAKQLFKSVQEKNLPNVLLLLAYSNKEQINSPTGDRDRRTALHVACELPNVVMTQLLVWYGIDVKAKDVNGHTALFYARKSANQECVDILLQHGCPNEPSSSMSTPIQRRKSSCSSILRTDSRTALV

SEQ ID NO: 939324 - protein, 57 aa, Homo sapiens
  misc_feature (6)..(6): Xaa can be any naturally occurring amino acid
  misc_feature (20)..(20): Xaa can be any naturally occurring amino acid
RRGTPXVRVHRDGPALTPAXARPAGALVLSDRRHSPPPLPFRARSAAAAIKLLCREK

SEQ ID NO: 939325 - protein, 82 aa, Homo sapiens
CTSSAPEEKVLLCHKTHTDIALKGGELDLSHMRDAHTAQPGSFPWFSGMTTELTLVGFFEFKEEFVPCYLCSFVMTVSWIIQ

SEQ ID NO: 939326 - protein, 156 aa, Homo sapiens
VHSVQHDGKSLLQFTWSGIGSFKALVRPEIGLLRIHAPWLPMSAARRGGGCSGPLGARRKSEQLPAVAAPRRDLPAPRPPPRPGGCAAAPLPSSAPSSPPRPPSCSHPPARPGLFSSGGVVGVGAYVHGSAAHRPLPEIAPPARGPSYTALLPAAA

SEQ ID NO: 939327 - protein, 71 aa, Homo sapiens
  misc_feature (30)..(30): Xaa can be any naturally occurring amino acid
  misc_feature (69)..(69): Xaa can be any naturally occurring amino acid
TSPLPLQNKFRDFQKQAFNGMGEQFSYSTXLASFFFPGIGRGGSPSLVMVFIFTYGLQGTGVKSFPLPXAA

SEQ ID NO: 939328 - protein, 121 aa, Homo sapiens
GPPFGFGVTPPLPFWLPPVFPGDWPLLARGHFGGKKMVPRDCPIFNFGFGGFILKVGFDPFFPFFFWGFQRPRLFVSREVLPPPPPPSWSPFFFPVWGKVLGPAFFLGWGFSSKRKKVFLN

SEQ ID NO: 939329 - protein, 123 aa, Homo sapiens
MGEGPLNYAQLWGGPLKCPILWGFQKWNPRCTGVGWGLQDSPPKPPYVKDRGTGVASPSPQAPLCLVVCWGAIAGPAPRKGPRPFSPFLYPSGPASSPFLTDQWGFLPAARSFPFPGGFCAPE

SEQ ID NO: 939330 - protein, 234 aa, Homo sapiens
GRVNFFNVDMLLLEEAICVTFLGGSKPPQRVIFIEDLKLAATFVARELMDTVSHHLRDQRPWLLWLLLCFLGCVSLLCPDLLPFLFACQRCAVFFFFCLFMLWQHVWGTAVMVAILLKLGTSGQEKAWFLVASMNPMKGADRTPSLPVSTTSTAPGPHARGEGDTPKCSKICEPGYSPTYKQDKHYGYNSYSVSNSEKDIMAEIYKNGPVEGAFSVYSDFLLYKSGVYQHVTER

SEQ ID NO: 939331 - protein, 113 aa, Homo sapiens
IYRCFMIRNRIILFKKVLNFFPNEMRDSTKSFTTCGSGAPGLTCPHRRRVNTKRLTVDERTYVDVKNRRVNRCTTLYGEENCYYVAMHYIAEAMALQLYDVAKLHTEGYIPRK

SEQ ID NO: 939332 - protein, 123 aa, Homo sapiens
QDLQLVKGTMVATYLALNRSKAPPQVKPIELSILGQRGVRKFPSPPLLGPRAFGPQGGASFTQSACFPKGAGRNPRAKGSWNPRGRGNCQPQTPLIRVLKVPFPSPGWAFFGSGFGGGKRFPV

SEQ ID NO: 939333 - protein, 99 aa, Homo sapiens
PGIAGANPALRFNWGEPMPWPLNMFNRNRVDTSPPPVFWHVMCMQLFGFLAFMIFMCWVGDGYPVYQPVGPNQYPSNNLYLERGGDPSKEPERGVPYEI

SEQ ID NO: 939334 - protein, 125 aa, Homo sapiens
  misc_feature (8)..(8): Xaa can be any naturally occurring amino acid
PPGGAPLXKPGVFSKFIQPIGRSNPGAKKILGEVFLLLPLGGGREQGSPPRRVLAPVPPGALMAKNFPWGGGSGAGVGSKDLGSPKSFVFLKKLNSCFLKNFWGYMFGFLKPLRGPPPFHKNPAW

SEQ ID NO: 939335 - protein, 104 aa, Homo sapiens
FSAPFSPHSTAKRPKRFPLVASGVFKPNPPNKQVHFQSLGFFVLGKRLTNLKMLSAPCLFISSGHAHPCCFGWRRCHACSLFVSHPPRAIPCEVGRPGWTPFPE

SEQ ID NO: 939336 - protein, 128 aa, Homo sapiens
GTGDRAPFFKGFPQLCNLGFWPVNQEYLLGLLTSLKVDFYQLKLINPLKYPEGVPPPQKKLFPSAGTPKFSRERVFNEWGIFSLFFFFFLIKKKKAWGSWGYPVFLGLGWEYKGEIPLLPSLLFHFFQ

SEQ ID NO: 939337 - protein, 100 aa, Homo sapiens
KLLGGPFARGKIPCPSRVPHQDSKSWKRAGWKTYPLGGKPLPLKIENQAFWVPHTGYVRVGPFLFTGDYETPAPSSLGAAPILGPSPPPPGGSLKRHVAP

SEQ ID NO: 939338 - protein, 86 aa, Homo sapiens
GGGGTRKGPPEGARGKGKGAGRNLKQQLLAKELDAQLGAYNARMGPRLTAQQIRVRNRTPGFPFAPWLGGGGWGCAAQDGFVFFMF

SEQ ID NO: 939339 - protein, 106 aa, Homo sapiens
GFPLGKGGGGPPPFFLGCSPLWGPPGFPFCLPAVFLGGMGGGYPFPPGTPFSWFGVFFGPPLGVLAPGAQIWARGVVPLVANPFAPFSPRPKTVFWGGGGVFLIGF

SEQ ID NO: 939340 - protein, 210 aa, Homo sapiens; identical to SEQ ID NO: 939083
  misc_feature (195)..(195): Xaa can be any naturally occurring amino acid
  misc_feature (200)..(200): Xaa can be any naturally occurring amino acid

SEQ ID NO: 939341 - protein, 107 aa, Homo sapiens
ARADALIPRLRPTPCTKWALSGSPVPSSPLTAAESPERERARRGGEGCEPRGPAGPHSGASPREAGWPLAPRCPSRALAGPRARASPGMAPASRGAQGRPPGSPGAA

SEQ ID NO: 939342 - protein, 157 aa, Homo sapiens
  misc_feature (75)..(75): Xaa can be any naturally occurring amino acid
TCPKRPQTERRRPAQGPTIRQLLRASSALGAEVLAESVNTRLTLVHSSGRKACPKVGAGRRRPGGRTSLPGHREXGSLTMGSRFTRRTLAPCRPCRQRRSPHTSLPTRMVGKVVSVGVAALQISSKAAPEAWPGARLAATLSGARGGVARHSSSAAA

SEQ ID NO: 939343 - protein, 68 aa, Homo sapiens
RSEIDLLNIRREFIEEYDKSLHQAIEGDTSEDFLKALLALCGGEDKGHSFGGHFCQEMVISTSRHGQA

SEQ ID NO: 939344 - protein, 95 aa, Homo sapiens
GPPVFMATSVPVATSVLVATHGCRLCSTCSSRTGSLSAFGGALEQTFLPVHFPSHQGPDLMSGKANGSEWARINMPKSSYYKLRGLLPWAGSVLP

SEQ ID NO: 939345 - protein, 103 aa, Homo sapiens
VPPVFGMWPFNWGGSLGGLKNWPSCKPLSFLRGCPKWSLALGGFSTLAPPVPKGPQEPFLLLDRVGGGGRGPPNLAFFALFFFFKFQVIGGGPPFAQMVLCSF

SEQ ID NO: 939346 - protein, 74 aa, Homo sapiens
KDLASHHDVVGFLVAGTLLKALFMDIVDENKYAPAMFPALLERHGVICPSVQYVPFPCISFKWGHSSFLGGYSS

SEQ ID NO: 939347 - protein, 108 aa, Homo sapiens
QWLILLYRRPMGMFQPAVLSTAVWQDFLPSRLFQFMSGFDFFTTATERYTFLRCFLAISAFIVLCQDRHQTTLARYVDISSVQAHGVSFSIHDLGNAVFWGLCRFTLY

SEQ ID NO: 939348 - protein, 146 aa, Homo sapiens
KNFNTVCFRQGLHSSQRAIMVSLHTSGNAFSFVSESRVSFRASSLFFLASSKTLSSVLLLFVRFLYQSLDLLHALDGILNFPIDVLTPLSGHFLQLIVGDQLVSQDLPTLPAQQQPHTQQQSLHLASSSSDTGAQECLGLRRRRSC

SEQ ID NO: 939349 - protein, 148 aa, Homo sapiens
HNLMVLSRDPEDNLTVIREEGNTQYILGMAYKSSCGGARCEIPEAKGSSQDPERANWPSEDDDHITNEVGVTPKSSLRDAIVGLIPSQLPHDDGLVSRGGQYHVRELRGGSDLGNPAIVALEGATKGHLLSHGGSGCECRRSDEDGTG

SEQ ID NO: 939350 - protein, 72 aa, Homo sapiens
RMSGAINILNLRDNFLVVGEWDPLLVQSGDGMKGFGRELDGYKRKNFIPAGDDSGFTKQTFPVQTEYFGFAW

SEQ ID NO: 939351 - protein, 148 aa, Homo sapiens
DQELKALRTETRFSVLQEEAAWGQVEALQEALSRAQAVLQEKERHLLEQTELSHSLEASTATLQATLNTCQTHARQLEEALRTREGEIQDQGLRHREDMQQLQQALARRDEELRLQKEQGQLLEKLLAQRDQEDVLQERQNPGQQKKE

SEQ ID NO: 939352 - protein, 68 aa, Homo sapiens
  misc_feature (1)..(1): Xaa can be any naturally occurring amino acid
  misc_feature (17)..(17): Xaa can be any naturally occurring amino acid
  misc_feature (57)..(57): Xaa can be any naturally occurring amino acid
XKPYELEPREIARGPPXHMFPPACAGPQPPPHTTGSHRQRQRGKVQQWPTAGSCTGXRESPALQESAP

SEQ ID NO: 939353 - protein, 134 aa, Homo sapiens
QQGALDAVKDLPSVHVEEALVVAEGPESGLRLLLQERCLVAPLLLRLLLFLGAVAAARAHGHCHVPLGGHLVTLARGGGIGGLGQEIGGFLELVEGQLVGRCHGRRALLTASRSEDGAPFPGPVPRLQALRSEL

SEQ ID NO: 939354 - protein, 141 aa, Homo sapiens
HGGQTESPEDFPRLPVGEDHTGPLEDGVRDGNRPPARESLCLLHQGLPHRLVATQDDHRPGAQVHREDVPVFLPQPLEGVEKALVMDLQDVPQEGQRPRSGRKVARGGGAAPGPEQQEASEAQEEREGGQHHGPLSACREL

SEQ ID NO: 939355 - protein, 88 aa, Homo sapiens
MHHDSEVGQSLIALAEEALLELLYSCFGLLSVDEPLKICFVFLHRNRWIDGLFHDALQKNATRTCIAVKGEGSKQEDHNHLHVEAAVF

SEQ ID NO: 939356 - protein, 178 aa, Homo sapiens
PHLPQRQQAHLRVRQHADDMAVLLHAAEVLVQLPLASVVLPLLAVLGEGLLLRLVPVLVEAPLALVTDVLGEHRLEGAEAPRGLHVAHDAHDHHGRGLHDGHGLHHFLLVHLGARPVHLPHDVRHAGLVAQEGGEVHGLARVVLGEALHLAAVPAAALPGQEAQGPVPGRRELPVRHR

SEQ ID NO: 939357 - protein, 154 aa, Homo sapiens
PNALGCAGVHPSCGLTDASSGVHLVIWLMAVVLDPSLVGVHSLGGGVMEVPVGQASGLPAVFDLAPGHGAMPRAVILADSREGGQRLVPLHELVAFLAADNEVVTELVLRLQVLDDGELIERLGLGALDDLGGVVQLPAPAVPRLVREKQQIHL

SEQ ID NO: 939358 - protein, 68 aa, Homo sapiens
AVGGFDGTTYLKTIEVFDPDANTWRLYGGMNYRRLGGGVGVIKMNIVNPIYGDHVEDSLVYALYSGEL

SEQ ID NO: 939359 - protein, 89 aa, Homo sapiens
DQVATGTVTIVCVANKYFPDVTVTWEVDGTTQTTGIENSKTPQNSADCTYNLSSTLTLTSTQYNSHKEYTCKVTQGTTSVVQSFNRGDC

SEQ ID NO: 939360 - protein, 117 aa, Homo sapiens
GQPPGKAKIPAPVSSVCSQTNGALGPTPRTAPPAPEPAALRAHPVVQLEASPGGPATNLWDPNQAPPPLRVLWPHGQQDPDPLWDLASNSPNLLMVFKTLMGRVSGTPGQNKKVLFF

SEQ ID NO: 939361 - protein, 114 aa, Homo sapiens
CSMKSNVILWELNTSLTKEFLRMLLFTFYVRMFPFPKKSSQSSTYPFADASKREFQNCSIKRNVQLCELHAIITEKFLRRLLSRFYVKIWPFRTKATKRSQYPLAGPPKRVFQT

SEQ ID NO: 939362 - protein, 82 aa, Homo sapiens
KKKKFLAERRKVLAIDHLNEDQLREKAKELWQSIYNLEAKKFDLQEKFKQQKYEINVLRNRINDNQKVSKTRGKAKVTGRWK

SEQ ID NO: 939363 - protein, 72 aa, Homo sapiens
KGGEKASFGKPLGVWNPQALGALGGFFTRGFPIPRGKLGGPFTVLGLAHVDFFLTYLSKPSVGGVILILSFS

SEQ ID NO: 939364 - protein, 71 aa, Homo sapiens
EPGKEAVHPVDVEPRGFSKKFPLRFVFQGGPGRGGLDLFLVNIAIEIQLDTPTCPYFKSVITRTEFCLYDF

SEQ ID NO: 939365 - protein, 36 aa, Homo sapiens
VLLLLPSPSSSFVTVFSFFLLSSSFSSLLSSSRNSI

SEQ ID NO: 939366 - protein, 78 aa, Homo sapiens
KLLEVKLGELPNWILMRDFSPSGILGGFQKGYPRSSNKYINLKKGSISGITMVVACYGLFRNSFSYKHFKREGVRKYH

SEQ ID NO: 939367 - protein, 108 aa, Homo sapiens
QGQWMRLCTSSTDSKVARVNTNLRNAMVSHLDGTTHSVEDIGRSLLTYGHRIPLSEWESRIAKVDASVVCEICSKYIYVQCPAVAGYGPIEQLPDYNRISTGMFWMRF

SEQ ID NO: 939368 - protein, 121 aa, Homo sapiens
RSKRESPTFPLPKQVSESPPHPLFWFPAPQGLCRPLFWGGPSQAYRLPLAGGKSPGGPLLGVFELGKRGPPPPPRGVFFNPKFPPPPMGGGRAGGTPPPFFFPLPSPGGKNGGAFPLFKKT

SEQ ID NO: 939369 - protein, 111 aa, Homo sapiens
TGSQTNRTCTWATHTHTHTGEATGSQMNRTHTWARAHHTHPHTGEATGSQTNRTCTWATHTHTGKATGSNTRSRQCLLRVASVSPRGNGTMGYFVFKITCFPEYEKYMNYL

SEQ ID NO: 939370 - protein, 72 aa, Homo sapiens
GQAGLELLTSGDLPSLAPDMLGLQVGATTPGHSLMSFEKVIYACNHHHHNQDLEHFHHPKIPWYSSLVTSKP

SEQ ID NO: 939371 - protein, 139 aa, Homo sapiens
MPGPLAASEMVRVPGPTSREGEGADWNRWEVAVAGLRPPRSQLHNLRLEFFPISASVSFSHKMANAADCGTLGDLSPPCAVTVPWPGALSGPLCTRMAASLRDCAGTTGGASGENPDSGCGFMNGKSFGPVRFPVPLFF

SEQ ID NO: 939372 - protein, 37 aa, Homo sapiens
  misc_feature (32)..(32): Xaa can be any naturally occurring amino acid
MKYVAFLYDMKVREMLQHQKKIKTKKEVLSFXCIKCR

SEQ ID NO: 939373 - protein, 104 aa, Homo sapiens
PPPPPGFGFWGGEFAPPQIFEPPLPGGPPKGGPRKVFWFLGPEGGPPPKARGLGLAPARGGQKRAKGGGGAGPCPPPALSPPPRFSPLGFEFLFFGHKPKIPPW

SEQ ID NO: 939374 - protein, 68 aa, Homo sapiens
VLCSEECPQDLCSYSSGHTTLWALNFFTHFGLWGDGSRCFVTRAWEWTGLSGKVESTLKVLEESYTGA

SEQ ID NO: 939375 - protein, 141 aa, Homo sapiens
  misc_feature (26)..(26): Xaa can be any naturally occurring amino acid
RVKVFFFNINGCFPPLKEVGAPLPPXPQGEQRWRFLRKSLVSPRGLQCELYSEFQIGAPGGRGVPVRGPLSPLTAKLRPFRPRRPGFLRTIAFCVVLGPPPRAGGPPPFRGPKEFCALWVSPHAPRRVLRKTKPIGGPWAL

SEQ ID NO: 939376 - protein, 98 aa, Homo sapiens
RCRLSLKDQVLREEPPERGETLGTERLERDWVPPICCDKFGFPNTSASVSLNHRAIGVLVGKTDPADQMQAAAGGKKEKKETLSRSLASTEGPNTRPR

SEQ ID NO: 939377 - protein, 134 aa, Homo sapiens
AKFAQALVRVWVAGEAIKVGSTKGRIEKLSDPPPGLGSVESSRIQGCFTTVGEKVRVKCNRIYLGALRSDSAQMVPVEQDCPKKWYTIFKDHVSLGDYKPDGITWSFITINRILIFLPRFPLPSSSPTWDRACL

SEQ ID NO: 939378 - protein, 32 aa, Homo sapiens
SEHERAAILSVPAAQNPEDLRMFARLLHYFRG

SEQ ID NO: 939379 - protein, 50 aa, Homo sapiens
  misc_feature (15)..(15): Xaa can be any naturally occurring amino acid
RKLAVGGVNDGGGEXRQHCEAQDSHYLDRNGCFMDVRRCRLPIHRTRLDG

SEQ ID NO: 939380 - protein, 108 aa, Homo sapiens
MYMGGDYVYFENSSSNPYLIRRIMELNQTAYGNVEAKRGVLLPDGWDISKQPSIVPGRQSTQWAGVSWLRFPRGLVNEVLVTPPGSGLSLTWQSSASVVMVWLGVGSH

SEQ ID NO: 939381 - protein, 118 aa, Homo sapiens
KIFFWGAPPPPPPPALGGCFLKAPPPHKRGGGGGGGPPGVWPPPRPGPFGGGCRAPFGPGGPPPPPPGGPGGGVPPPPPPPPKGGGGVFFFFGVPRFGGAPPVWVVFGGGFFNPRTLF

SEQ ID NO: 939382 - protein, 114 aa, Homo sapiens
TAGQTSKLARQASIELPSMAASSYKSWWKPGGYRLSLRPRLRPARLFGSCTGYWLSSGKQECEQSAADLLVQEHLRTGMTLHPLSFCNDLVSRWQTRRDECAWIPESPGGGNSH

SEQ ID NO: 939383 - protein, 67 aa, Homo sapiens
  misc_feature (22)..(22): Xaa can be any naturally occurring amino acid
GSIASVGAISAEFFNDSAFLNXHVGGQHSFPGSLGMDGFGQSVGILARPATAYGFRRDEPYYYGYGS

SEQ ID NO: 939384 - protein, 103 aa, Homo sapiens
AGAPVWEPRMTLDTQAKVRPPQAQPCAGQARAVTAAWGPQHCCLVSPVASLAGFQPPGCPFLSQAGWGPVQDPAMYPKKRVPSSFLFSFFWKLLFRAPCPNQE

SEQ ID NO: 939385 - protein, 85 aa, Homo sapiens
  misc_feature (7)..(7): Xaa can be any naturally occurring amino acid
APKAKTXFFASFKREGEGKYRAECKLDPKTGFRPDPRPDPKLGAKTQPRLLVVPQNENRMEDRLAEPSRAKDPPISGVEVGKASP

SEQ ID NO: 939386 - protein, 154 aa, Homo sapiens
  misc_feature (58)..(58): Xaa can be any naturally occurring amino acid
  misc_feature (75)..(75): Xaa can be any naturally occurring amino acid
ASQNGRCNGSQDDGARRPSGRRREAASARSPSPRPTPTAAPVERPAHQDGANRFEPSXSVDHAAAPLSRRAPRLXPRAVKERAVDACACSGANSPEEGPVKTSGARSRGSGRVIIDPQGTRRPLKKSPTTLWKVPCTDPFPGARSAKQHGRAVI

SEQ ID NO: 939387 - protein, 135 aa, Homo sapiens
RSRPLRWQEDPEPEDENLYEKNPDSHGYDKDPVLDVWNMRLVFFFGVSIILVLGSTFVAYLPDYRCTGCPRAWDGMKEWSLREAERLVKFREANGLPIMESNCFDPSKIQLPEDECPVAKWGSRSPAFPTPCLPF

SEQ ID NO: 939388 - protein, 107 aa, Homo sapiens
GGGGVFFSKKPRGGGPPSPPPPPFFWGPPRGGPPPFFFFGGRFFPPPPPPPPPWGGGGGPFGGGGVPGVGAGGPPPPPPPPPPGGGPRGGGGGVFGAFFFSPKKKIF

SEQ ID NO: 939389 - protein, 142 aa, Homo sapiens
GQVLTAYQPPSPPVHSGFHRYQFFVYLQEGRAISLLPKENKTRASWKMDIFLNRYHLNEPEASTQFMTQNYQDSPRFQAPGSDKAKDRRNQRGLPACLPARPPGSPNSRESTPPTPTTYGLAVGAPLGYGTLLLLIKNNENP

SEQ ID NO: 939390 - protein, 107 aa, Homo sapiens
YPVGPGQALGRLLVWEERVNWGSGRPLLTTHPQIRRKSNLCAAEEFGVCGERGGRELESMDVISGPELHSWPRAKTPSPPPAPQVVIQNGFRRFQHQQFGDFVSGLL

SEQ ID NO: 939391 - protein, 67 aa, Homo sapiens
VMKMTLFLYYLPPKTHNPNLIMRKTSDKFQEGGILQHRAQNILKTVKVIKIKESLKNCHSQEKLEEI

SEQ ID NO: 939392 - protein, 128 aa, Homo sapiens
TSHTANTPPGPVSGMERERKVSMRLHRGAPVTSPSSDLTGRQDTSRMSTSQRSRDMASLRLHAARQGTRCRPQRPRRTYSGPRRPLTGLPATQATAGHEGRWVLGVQDKPKRWAGLDGGQGAKTSPGH

SEQ ID NO: 939393 - protein, 105 aa, Homo sapiens
SGREAAVLDNHVATQRELLSVLKTKILAQFTERSPCIERKKSVLAPLYPILSIFSLRNQAQALGTCPGTRGMGRDLRMALQFLPGVRASALPPPAPGAHLLLPGC

SEQ ID NO: 939394 - protein, 71 aa, Homo sapiens
CDQGALAARPAPAPGLLPRAGRGLTRKSSWQYTFSPTLEKAFPRSRRPQESQVKQSVWYRLPMAWHACLAP

SEQ ID NO: 939395 - protein, 47 aa, Homo sapiens
GFGIPFRFCQALPNQSFSVNDAALQPLHGTLAPWVRGFDKNIWKKMP

SEQ ID NO: 939396 - protein, 92 aa, Homo sapiens
WRLSLTSSRSIEQGRADQDSPSPLIPGQHISLAPTSGDPRANCTLNSDIIQGPEAHTPAPDQRLAFVHARPMPGPIRALTQPGQEPTAAPKL

SEQ ID NO: 939397 - protein, 125 aa, Homo sapiens
FLNRALDIFNTSLVFPIYYVFFTTVVVTSSIILFKEWNSMSAVDIMGTLAGFVTIILGVFMLHAFKDLAISWANLPHMHKNPTPPTPSPEPTVIRLEDKNVLVDNIELSSTPSPEEKPKVFIIHS

SEQ ID NO: 939398 - protein, 47 aa, Homo sapiens
MKPHTNFISGWLFISFLYTSRSPIFSATAALLSVTKMDENPEVSIFF

SEQ ID NO: 939399 - protein, 121 aa, Homo sapiens
CRSFHLCGRAAPPATFPTSAGEWHTAGRLSRGLLRCYPDVPFRCSSCMLSLSSFIVLFTNPNSATHTLSTLLSSNQEQDQLLQVITQVGERQLRRSCLLPSQRHIVGEQMHRISLNSSNLV

SEQ ID NO: 939400 - protein, 130 aa, Homo sapiens
  misc_feature (93)..(93): Xaa can be any naturally occurring amino acid
NPLRKRFSNSLASRFHSLGCKTDEVFLHPIQHAPEFLKFSETQCARHILYPALRPQVDKSPVERFVASGNAGLLQTPLELVRIYLPILSSYGXKVPSKEDPEFVQETRVLREPLRTRLRSTRRQRQGARG

SEQ ID NO: 939401 - protein, 120 aa, Homo sapiens
  misc_feature (41)..(41): Xaa can be any naturally occurring amino acid
GQTGLGTVRVIVMDRSTDIVKAIARLIEFYKHESCGQCTPXREGVDWMNKVMARFVRGDARPAEIDSLWEISKQIKGHTICVLGDGAAWPVQGLIPPFRPELKERMQRFAQQHQARQVAF

SEQ ID NO: 939402 - protein, 59 aa, Homo sapiens
EGSMREEKEPNDKREGIIGSSHILTPTRFLDDLKMLDQKLEDVPLAMTMTLTLTLSLSR

SEQ ID NO: 939403 - protein, 77 aa, Homo sapiens
ENVGVAILVKVLCDFPRAKQYFSQFKHMEDPLEMERSPQLRKHACRVMGALNPVVENLHDPDKVSSVLALVGKAPFF

SEQ ID NO: 939404 - protein, 135 aa, Homo sapiens
CRGRKAKPQQNKELHPFNVFSLNIMDFTHTTDRKRQSFIQNTEECQLHTEQKPSSRDTHLAFQNAVARCQQLLLHLPTSTVPRHSDPPRVEKRQGAAHTGVCADAQNTACTVSGGAQMPPASKTNPYFNYVINPF

SEQ ID NO: 939405 - protein, 51 aa, Homo sapiens
AAPAWYTPRRFCRSSASRRHRYAVAQVGGERTRSSSVSAEHGLTRRGMHRG

SEQ ID NO: 939406 - protein, 151 aa, Homo sapiens
ACGPALAQVHQVHQKQEDGHGHGQGHQDVSHQEPHGCPVDLWLLWSQLLPLVPKALGTRQDALSTPSVLPGADRFFNKGANCCVVHVFSGCTQWPVWSGSQAATEVLAPPVLLMGVPLAWCCCQCVLRRSTVGAIGADSPHRHRELSEREL

SEQ ID NO: 939407 - protein, 100 aa, Homo sapiens
RALPGEKALGRYKDFEMSSSWSICVGPKCNDKCPYTGKERRDTGEQGEATVRLEASRGYTATGQGGPEPPEAEKDEEAPSPGALRERGPAAPLISDFCPL

SEQ ID NO: 939408 - protein, 71 aa, Homo sapiens
AVCIGILPGMGAYSGNSDSESSSDSEGTINAAGKIVSSMFRNNTFVEAPHPLRPYKRELLPKGRSDRSCCP

SEQ ID NO: 939409 - protein, 153 aa, Homo sapiens
  misc_feature (37)..(37): Xaa can be any naturally occurring amino acid
PVKAEERFPFGKAIEKGSCEDIGVEEASELSKLNVSXSVEAAPRAAKVLCVSKHSNICVDRLLCYLAPQFLSPDVVSRGHFSPNLCVEHSYSGFISTHFGFPLLAFLEAFSWKPAPSPARGSSQQRGGIQVPSGSGLASGAEATGGIMALGII

SEQ ID NO: 939410 - protein, 118 aa, Homo sapiens
EKWKALPVRTRTRQGCLFSPLLFNIVLEVLARTFRQGKERKGIQTGKEEVKLSLFADNMIVYLENPKASSRKLLELIKEFSKVSGYKINVHKSEALLYTNSDQAENQIKNSTPFPPAA

SEQ ID NO: 939411 - protein, 139 aa, Homo sapiens
WTNPGFGVHSARLTFKPAPLSPGTGRPAGLPKIRSSPCPHATGFGWGWFKTRTRQFFVKNLRDPPVLGGPRRQPFPSPGSSEGPSPPCKNGVGLQLGVAWTFLSKIRFLKKGIPNGFFFFSNDLEKPFYGGKLFWPPPQ

SEQ ID NO: 939412 - protein, 102 aa, Homo sapiens
GWGPPGPFKTPPAFWVPFGPSTRPEQVLPTWAFPYIIIISWPPGPPQQRFSVGPVFFSPFCCLWPRLGPPAPLWGGNGLQGLGQGLVLFGARPFSAFWYLNN

SEQ ID NO: 939413 - protein, 124 aa, Homo sapiens
MFPWFSWLSKYLPETLAANADKVGMCPSSCSRQVSSRSRLSLLVFTSREDDFVAITELMHLVGAGFQVCDAEPELPTCRQRVEAAVGMDLFQKAHEVTLKSKSLSRADSGIKQNVMPWVLPMIR

SEQ ID NO: 939414 - protein, 70 aa, Homo sapiens
PPGWGPSSSSLEMVASFTPKAFSLGSSLRGKQRMSKHNFLQGHNGQGVRAPRPFYDPPNLLGPLWALNKT

SEQ ID NO: 939415 - protein, 98 aa, Homo sapiens
HRHLFYSEHGRILSYAASSQQATLKSEGCPNRGSQIRNRQPLKSVRCNKSNGAFDIPKSCTPRKLYPQSVRVSIGKRHPVPLGAITTVQGAVFFGKVI

SEQ ID NO: 939416 - protein, 86 aa, Homo sapiens
PPQQHRPVTSTRLQGAAETRHHGMTVSGNTSHRHQYLPLLQQDHRRTQARPWAAAVKYTWQTFFISRGINEGPCLLFLLPLLIFFC

SEQ ID NO: 939417 - protein, 70 aa, Homo sapiens
KTVPKPEFPVIVLPNLVDPQDLHYYLEREVTKEFGKFGAVNRVLIFPKKQGEEEDAEILVKIFVEFSKTF

SEQ ID NO: 939418 - protein, 75 aa, Homo sapiens
VAYWRQGGLSYIRYSQICAKAVKDALKTEFKANAEKTFGSHVKIVKVKKGIIFPDYSLKCYISKGKMCGPMLWQI

SEQ ID NO: 939419 - protein, 157 aa, Homo sapiens
PRHPGRPISGHGMDSRPAMAIFELLDYIVNEPPPKLPSGVFSSDFQEFVNKCLIKNPAERADVKLLMNHAFIKRSEGEEVDFAGWLCRTLRLKQPSTPTRLQCDSQRPAVCVLVPVGTVAAASGDSDAVCCGRGPMPMHLKTKQNEERERKKESYKK

SEQ ID NO: 939420 - protein, 74 aa, Homo sapiens
QRQRVDALLIDLRQKFPPRFVQQKSGEKPVPVDQAKKEAEPLPETVKSEEKESTKNIQQTVSTKGPPEKRMRLQ

SEQ ID NO: 939421 - protein, 121 aa, Homo sapiens
  misc_feature (46)..(46): Xaa can be any naturally occurring amino acid
GRSGKSLPTPLFFERGGPAGQPGVTTAFLVLTPRCHSFFQLPARPXQSTLCARKKVPRGLKSLNGWFSRIKDPIPHARFGGPPQQGWSGAPGLSLNLFPRAKTVFFVFGLVCFVFKTIMFP

SEQ ID NO: 939422 - protein, 111 aa, Homo sapiens
CAVSMGTRSICVNAVPSLAEVLSCLALGSSNDARALLRQSESLVSGRVVWCSIFQDQLPGGSTGVLPQEAPHSAFGGNRTGQNRTEQNSVSRDAVWCEALYICSELEQTFQ

SEQ ID NO: 939423 - protein, 74 aa, Homo sapiens
EKEQSCSTPVIGLTFDFLSGNVVTHGVELQLCCIQLLKHEAERRIDNRVPDIEGRIKETNPLARNCNSSDHYIQ

SEQ ID NO: 939424 - protein, 172 aa, Homo sapiens
  misc_feature (6)..(6): Xaa can be any naturally occurring amino acid
  misc_feature (10)..(10): Xaa can be any naturally occurring amino acid
  misc_feature (17)..(17): Xaa can be any naturally occurring amino acid
  misc_feature (25)..(25): Xaa can be any naturally occurring amino acid
HTHLKXLRLXVDYETMXLKGGSVAXDNLNTSSENNDEKIVQNAIIKKIGFFGSKLQDYQRSEIMMLIMGKVHVFGKYKNNLDISKLGDLGKRRIKIMLMRSLIMVTSGYKEKKIVNEMKGYLMDNLLITIYNGGLRTEKVGIGSNDINIMDRHDNREKLRGIRIITDVADLK

SEQ ID NO: 939425 - protein, 83 aa, Homo sapiens
QLQPGCYSKRVVLRSKGSVCSSLSVVWTQDAPPGSIDSARVCLLKVCSAEGLPTQPLYIDHFPALCKVIGQALYKRRIINTLV

SEQ ID NO: 939426 - protein, 124 aa, Homo sapiens
QWFDVVMLAREFAAMRGTISREHPWEVMPDLYFYRDPEEIKKEEQPPAEKAVTKDNFGVNGLSPPEFTATQPEVADCSEGKQVPSVLIKQFPTEDGSAHPPTEDCSAPPTAQPTEWVGPTTDWS

SEQ ID NO: 939427 - protein, 77 aa, Homo sapiens
AYFALPGLTQEGLFRVNGNVKVVEQLRLKFESGVPVELGKDGDVSQQPVCVKLFLRELPDSLITSALQPRFIQLFQG

SEQ ID NO: 939428 - protein, 121 aa, Homo sapiens
SEGSQVKAQAGSRAPLGCPTPHTVWYPAGTARLPEASQSTLVLKQAVRKPLEAVLRYLGEQPGVLGGSTTLLQAASHPSSCTGVPAFSSWELLDTPQGLELSCCGSLHRARLRQNHWDPGC

SEQ ID NO: 939429 - protein, 99 aa, Homo sapiens
  misc_feature (11)..(11): Xaa can be any naturally occurring amino acid
GEVTNDFVMMXFCGSSSPSSGGSSAHGMGWAGIFSVNPPLATPSLATPSAFQGQVGPHMKEGTTFLVEPGTLAQARQPEGWVGPQLGILPGPQHNYNAT

SEQ ID NO: 939430 - protein, 129 aa, Homo sapiens
  misc_feature (36)..(36): Xaa can be any naturally occurring amino acid
  misc_feature (66)..(66): Xaa can be any naturally occurring amino acid
  misc_feature (68)..(68): Xaa can be any naturally occurring amino acid
  misc_feature (80)..(80): Xaa can be any naturally occurring amino acid
  misc_feature (101)..(101): Xaa can be any naturally occurring amino acid
  misc_feature (103)..(103): Xaa can be any naturally occurring amino acid
RKRQPPSASGSPSSSASVAPASMCSGRGSSDAGRLXFCLASPPSVFGSRGRREPAVPCRSGPGLLXPXLCPSALGAPCPXSLLVVGPLCSSLPVGSLSSLXLXGLWVCRGSPAPPAALAASGLPPCCRR

SEQ ID NO: 939431 - protein, 74 aa, Homo sapiens
QRLCKPYIHAQKPQGPRKGSCAGMPCQQELKTLQTRHPRTKAPETSVRKHLCEDICPAPACPTPHRHHPCYGPL

SEQ ID NO: 939432 - protein, 70 aa, Homo sapiens
EQEVDYTLPHIEIGKKNYGEQFKAIRGSGEQHNFALILQLVFSKGGRRKRGSIEFTHFSSYCQEKTESLL

SEQ ID NO: 939433 - protein, 104 aa, Homo sapiens
  misc_feature (17)..(17): Xaa can be any naturally occurring amino acid
NSSQSEEDDIERRKEVXSILKKNSDWIWDWSSRPENIPPKEFLFKHPKRTATLSMRNTSVMKKGGIFSAEFLKVFLPSLLLSHLLAIGLGIYIGRRLTTSTSTF

SEQ ID NO: 939434 - protein, 143 aa, Homo sapiens
PRGLAPRGIGSPRLRGERGGGKGPSKNPGFPFRPSQPLGRPGGPPTGGVGAPLPPPGVWGFGGGAPPPGGGLPPPPGVFFLGLKGAPPPPPPPPGGFVAGPLCLGGNPGPPRGPLDPGGVAPWGLGFFGAFFGRKKKRETLVF

SEQ ID NO: 939435 - protein, 57 aa, Homo sapiens
EYYESLGDLVEVIIFKKLHMSKGDKCYEILSVEAIEKLILNPEVGPEWNICNKGLER

SEQ ID NO: 939436 - protein, 97 aa, Homo sapiens
QPLINCIEAQLADVRADMSGKSGLTAVHGLKSRLKQEISTYRSLLEGQKDHYNNLSASKVLLRQQAKGLLLSFGGCLLGRGMGRKGPLPPALPLMCQ

SEQ ID NO: 939437 - protein, 117 aa, Homo sapiens
RAEVQLLNNTWVSSASPSASAACVPVQCQVQLHRCRCTRCPKAAHAPRAIIRTTLSPSWAGRFEQDRELVADMAGEDGQAAALTPAGCAASQVPGAIIPGRKIHHTWKQLGPPSDEE

SEQ ID NO: 939438 - protein, 61 aa, Homo sapiens
VSSSAGSTPTAVPRAASVSGEQGTPPKVQLPLNVELPFVSVGVLCLQPSLLPGLTCPRVVS

SEQ ID NO: 939439 - protein, 75 aa, Homo sapiens
  misc_feature (45)..(45): Xaa can be any naturally occurring amino acid
AQPSQGTAALLPQQGNVLHGAEASVSSPATPCKKRRLPESGPPSXFWSPLLVVIPPPNWEALGVSYGPRPPFPFQ

SEQ ID NO: 939440 - protein, 47 aa, Homo sapiens
MWPPKEQECGPEVIGAHGHILQALSLNGHCIWSLQFCEPINSFYSLK

SEQ ID NO: 939441 - protein, 78 aa, Homo sapiens
  misc_feature (43)..(43): Xaa can be any naturally occurring amino acid
MFTDIVTQQLTGDLEHQKYLQKKYYHRHGRTNRPSCGESAGLXAQKGGHFIQRTDRVAELSLTRSLSRSPGSATGSRL

SEQ ID NO: 939442 - protein, 60 aa, Homo sapiens
  misc_feature (41)..(41): Xaa can be any naturally occurring amino acid
MSPLARCGLFQANSMVLVPTVSSVCCTFKCSESDATIRGSXQAQRYPWLGLRQVVPLKGS

SEQ ID NO: 939443 - protein, 46 aa, Homo sapiens
MVTLVTAPSILSVSHKPGNCAAFSSLISYCPRWRRQHSYHSDVGAA

SEQ ID NO: 939444 - protein, 88 aa, Homo sapiens
VVAAEVLEVLARAIRQEKEIKGIQISKEEVKLSLLADDMIVYLENPKDSSRKVLELIKESSEVSRYKINIHKSVVLPYTNSGQKIKSR

SEQ ID NO: 939445 - protein, 82 aa, Homo sapiens
EGFRGFWKFPKDFGLSSQTNQGPWLVAFSKSRKLEKRGIKAGIGTPLWRPPPTLIGPPFLNSFPPQGQGSLYLPLDKLLFFL

SEQ ID NO: 939446 - protein, 102 aa, Homo sapiens
MDILPISNSSCSCLFILKSHTIALIKNEFMETESILVAAKGWRGRMGSASLTDTGLPFGAMKKFWRSPVLMVPRHCHCNKCHQWHLSCFAHFRPLKNYTFKA

SEQ ID NO: 939447 - protein, 76 aa, Homo sapiens
VSIDIGPSPGNEVNFDSSGRVLAQASGNGVIHLLDLKSGEIHKLMGHENEAHTVVFSHDGEILFSGGSDGTVRTWS

SEQ ID NO: 939448 - protein, 43 aa, Homo sapiens
MWRPSEKLSVNQEGILTRERAGTFILGFQPPELLRNKYLLMNQ

SEQ ID NO: 939449 - protein, 35 aa, Homo sapiens
  misc_feature (14)..(14): Xaa can be any naturally occurring amino acid
  misc_feature (17)..(17): Xaa can be any naturally occurring amino acid
GQAHGLMVTEVSSXAFXEVKCVYFIHKRKKRKRKS

SEQ ID NO: 939450 - protein, 149 aa, Homo sapiens
  misc_feature (27)..(27): Xaa can be any naturally occurring amino acid
KGGGKRPGSYQPPKKLEKSSRGPNQKXPKSMVAVWVFNPPPVAPKPGPVPFFPSQEPPPKREYDQCCIQVRLPNGTSLTQTFRAREQLATVRLYVELPRGEEIGGGQDPVQLFSGFPKRAFSKTDMERPLQELGLVPFAVFIVAKKCPN

SEQ ID NO: 939451 - protein, 70 aa, Homo sapiens
DHELTNLLGGMNNSGRATFMNCNTTKVCSFAPEASTTMNPLEGMNNSRRAALRSRNTHCEAFTGSLWLLC

SEQ ID NO: 939452 - protein, 32 aa, Homo sapiens
  misc_feature (6)..(7): Xaa can be any naturally occurring amino acid
MEGKRXXLIKRKCSRTFETVLLLRRMKPFPGF

SEQ ID NO: 939453 - protein, 73 aa, Homo sapiens
GVFSNGPGGAPRQPTKVIPLKALWRMGPPPSYGPFKWFLVDQFPFGRSLGHHTSSFYQNPAFRLLNRGGVSTY

SEQ ID NO: 939454 - protein, 145 aa, Homo sapiens
MQTVTAALRKLMVTDSSEDGLSSGGVRVGQVDECDPASVVVCVLNIEKEEEDDIGLQMHFTLIQSMCCEIDMNIVRVSGMQRMAQLMGETAETQGTTEVGDVHCLLVTNPHTDAWKSHGLVEVARYCEERWGNNQWVPYISLQER

SEQ ID NO: 939455 - protein, 67 aa, Homo sapiens
AAVSSPGECVQAAECRSGGLLGALPQPAKQAAHGRHSSLQPQWHVKVVSTGLGVQPAQEPGAGPGGS

SEQ ID NO: 939456 - protein, 74 aa, Homo sapiens
AFYDVVGKTVGKTDYIPLLDVYEKTGNSKSKKKPCSETSQIEDTPFFKPTLLANGGHGVKGNDTTGFPTEFLER

SEQ ID NO: 939457 - protein, 121 aa, Homo sapiens
DRHVVLRLVVAERTGHAAAAGLQRRQAVAHHPAKGRRARRRPPQGFLMAVGVQQHPLAAGAHARRTRRCPPPCIDELLHEHRLVRQAPAHVRLRRAPQAQPVVLHRAQARRLHEQHRLDRR

SEQ ID NO: 939458 - protein, 112 aa, Homo sapiens
PFLPPGGLWGPLGLLYRGGGGPKNQWGNPLGGRGPVPPGVFGGGFLTQVWGGGVRGGPPLPFVRERGLVNGGVPPQRGLGFWVFFGVCPPPAPGGGVNEIILVFFKKKHTTH

SEQ ID NO: 939459 - protein, 108 aa, Homo sapiens
RRINCEQCSSCRNRKTGHQICKFRKCEELKKKPSAALEKVMLPTGAAFRWFQCRRRNPKLPSPCNVTARVVSSKGFGRRQTDAPVFRTKNILSQISFLFLYIYFLLSF

SEQ ID NO: 939460 - protein, 38 aa, Homo sapiens
AGPKKPLIPFKNATYAFLPDALEQVLSGLELFDPSVVF

SEQ ID NO: 939461 - protein, 93 aa, Homo sapiens
PIFDYNYDGHFDAPDEITNIYANTDVPIPTHYFVVLTSCKTKSHTRKTALGGWMSYPLSSLTDLPTWRAVLKVNQKLFGLKKDLQLTLPGSVM

SEQ ID NO: 939462 - protein, 75 aa, Homo sapiens
KIPFLGICEAKNPRLENLRLATILEAACHHLGSGSPPFWQPGRDLQSGSSKTQKNEIICLLSTYDLEAPSPLQVV

SEQ ID NO: 939463 - protein, 106 aa, Homo sapiens
NEEIDEMIKGAPGSNYFTCVPHNVWGETSGERTLRKPSQTHSKVFDPEGKGVLKAEYVRENADHAGGEVFSKRRVDKMFAAFPPDVTATLDYKNLVHIITHGEKKD

SEQ ID NO: 939464 - protein, 141 aa, Homo sapiens
ILLDSIMACGVVASNLNLKPGECLRVRGEVAPDAKSFVLNLGKDSNNLCLHFNPCFNAPGDANPIVCHSKDGGAWGPSNGRLSFPFSLEMYAEVCISFEQGNLTVKLSNGKEFKFPNRLNLEAINYMAGDGDFKIQCVAFD

SEQ ID NO: 939465 - protein, 61 aa, Homo sapiens
  misc_feature (54)..(54): Xaa can be any naturally occurring amino acid
APGLPMLGDVGMYGYISQTLYMIAVNRHKKWSLRTVEFRVHHHHDRRIDRLSTXCLSTIVV

SEQ ID NO: 939466 - protein, 38 aa, Homo sapiens
TAPQQPLLLFMIATYALLPDHLDQLLSGLELFDPSVVF

SEQ ID NO: 939467 - protein, 95 aa, Homo sapiens
APMAVEANTLQNPETKVGMAVPPPPVAMAVAEDFYEEPKLSRRGEPKKCQGSSRFPQICELTPAQGGQGLAAPKKTCFRPKLLGMGQKPGGGIWG

SEQ ID NO: 939468 - protein, 181 aa, Homo sapiens
  misc_feature (134)..(134): Xaa can be any naturally occurring amino acid
YQERYSGRTLTKGEVGCFLSHYSIWEEVVARGLARVLVFEDDVRFESNFRGRLERLMEDVEAEKLSWDLIYLGRKQVNPEKETAVEGLPGLVVAGYSYWTLAYALRLAGARKLLASQHMRRMLPVAEFLFLMFXLRKKTEQYKAHFWPRDLVAFSAQPLLAAPTHYARDAEWLSDTETSSP

SEQ ID NO: 939469 - protein, 135 aa, Homo sapiens
SNAGAAEIFVYRTPIMQHQNVYLQEHREYAGSIYDTHTDGSGICLSSRLRPILSIRPKYDHFLAQAPWQYPADLHLVYWLEHMGYEYDVFTDEDVTYEGLARLAPYNVVITGSHPEHNSGPQLDALHNYTQQGGR

SEQ ID NO: 939470 - protein, 115 aa, Homo sapiens
  misc_feature (13)..(13): Xaa can be any naturally occurring amino acid
  misc_feature (36)..(36): Xaa can be any naturally occurring amino acid
QYSTFAKSQGPIXQQRWRRPVPLRGRSCLLLSTDPXSIARAELSSPLHRLRRYSEAEHVLLSTDPGGRARGTARAELRSAQHTPGRHREGRAAFSAQTLWALPRFGTTRSRINGE

SEQ ID NO: 939471 - protein, 127 aa, Homo sapiens
RSIWAVETHCRFVHASPAVAVRPRTPKRFAGVHVSFPDTKEVCRGTRVLSREASATSVLMCLKAHECLEGRGSGWMVPTVGLELSSGLVYRRHSESSYGKYWVGIWADGASRILVALSGKSCGSKSN

SEQ ID NO: 939472 - protein, 95 aa, Homo sapiens
RAVATEAALQLRQWSANDWSESSLGAWKRSLCRVGLSLCAGRGFSARLGSAQLSLSRHLLSAQHLRSVTGEGSGPVPAFLNMGTAADSLTHVQGT

SEQ ID NO: 939473 - protein, 197 aa, Homo sapiens
VRPHRGPTDQQGIRLCQSLTYSYPCGKRVFGSASEAVLKALMDQWFSEHDNGLYSSVSAETAVCKAQSSPAFELSVQAIPLASKDGSSLLWVQAMEFPFAAQSSGGLGSSPPQLLLWLSRPLTRPPSGHKRGLFTLHSPRPGWPPDGQEAPGSRSLFQCKRHQESQGPGSAAWGWPALEESARGWGDSLRLSSLPSS

SEQ ID NO: 939474 - protein, 124 aa, Homo sapiens
  misc_feature (70)..(70): Xaa can be any naturally occurring amino acid
VPKNPPLLFSTTYESRVAHFLEGSEDYGVIKTDVSQPVALFKAKDMQAVQRPLMALGSLPVTKNDGHYGXDPNWFMKKAQEHKREFTESQLQEGKHVIGLQMGSNRGASQAGMTGYGRPRQIIS

SEQ ID NO: 939475 - protein, 79 aa, Homo sapiens
VHIEAGKDEIIKNGSLKKMSARIRKYQILNNEVFAILNENMKSVETAAHPPPRNPNHPNLWYPPCPVYFCEINFDSIYE

SEQ ID NO: 939476 - protein, 105 aa, Homo sapiens
  misc_feature (27)..(27): Xaa can be any naturally occurring amino acid
  misc_feature (30)..(30): Xaa can be any naturally occurring amino acid
  misc_feature (36)..(36): Xaa can be any naturally occurring amino acid
  misc_feature (51)..(51): Xaa can be any naturally occurring amino acid
QDLCPHLSPAGGRGDKRNRTIEAKSPXDLXGDEICXQKIFYLRASLSGPPXRECGSSADAMMQALLGARAKESLDLRAHLKQVKKEDTEKENREVGDWRKKKFES

SEQ ID NO: 939477 - protein, 98 aa, Homo sapiens
GDLAPGPQNLGPGGLKNCSFMGGIDGWSPPAGGALPPWANLPRPPFMPFFKPTATLPPPFGRRLVSPSFPIRGSLAPSSKPPPKFPCNGLLGPPVGST

SEQ ID NO: 939478 - protein, 91 aa, Homo sapiens
  misc_feature (31)..(31): Xaa can be any naturally occurring amino acid
  misc_feature (36)..(36): Xaa can be any naturally occurring amino acid
SQTLRAPVRVIPFGCCFEGYWGTVGTGRGWXQVVSXEYILCQQTVDEAPSSSLTKPGAVPACLRQGFAEALSVNTGKGVCSLPCGPGAAGA

SEQ ID NO: 939479 - protein, 69 aa, Homo sapiens
IAPIGIGLEARFAEVCSFHYSVTKLQRLGSPDPPRLSVTSKGGLRGDQAFSARESGHDEAGYACTTWVS

SEQ ID NO: 939480 - protein, 134 aa, Homo sapiens
LVASFSLQDCKERAEWMGVSDKDVIVCSTGSSLLLFDINGLRLQTFQYCPEEILRLCVDPVHVIVTCNNGSLDVYVWEERSPLLRRCYRLRKRGYLPLSGFIIKTLCDESSIILVMTSSPIPCFLMAYTLKVCS

SEQ ID NO: 939481 - protein, 66 aa, Homo sapiens
LLANKNDVTEEDRRGMLLTRPGVFASESPWVTDDKCVTSSDTDKPLPQQEGSSYIQNLRTQDLRGK

SEQ ID NO: 939482 - protein, 108 aa, Homo sapiens
QETNFPSGKGSSAKANPMVQIAPKNDVDVQIDRRSYLPQDIAGGVEFYNGVRKIRVPAPGKAVGSHSPAYYARSPGSLVWCKCQQEVFGLSLQEVELVGSLPAAMGSF

SEQ ID NO: 939483 - protein, 118 aa, Homo sapiens
VSSTGQTLYQAWGLGVSLLSGHGALVHLRLHVTLYLWHHASTVVPLPARAKPAQMPAESDRIIFLNVTASSLYPLERFAQEMCGGRFNKTCPEQLGKAQVCHSAAGTSCPSSHSLFLI

SEQ ID NO: 939484 - protein, 78 aa, Homo sapiens
  misc_feature (47)..(47): Xaa can be any naturally occurring amino acid
GSPVLAMVQSISYEKLNLPVPRPSCVRSEYSPLSVLTIEPVGSIAYXEYEDMISYEVHLSLAWGPLQQACLAEQCCGP

SEQ ID NO: 939485 - protein, 77 aa, Homo sapiens
  misc_feature (50)..(50): Xaa can be any naturally occurring amino acid
GSDQGGGGEGKLDADRLTMAEHRRPQGSPCTYPSGCAHCMPGKGQHFMDXGEAPPPPHTPAPHCRCCLNKSADLQKK

SEQ ID NO: 939486 - protein, 77 aa, Homo sapiens
QPSGSSSPWYDASTPYGGPSHDANDGPSSSWDDASGTCSWNEAAHGRPYANDAWAPNDETSCPSHDGAHSARNDSTR

SEQ ID NO: 939487 - protein, 66 aa, Homo sapiens
QEVGWDLEPLINPERHDRRLDHFRVCSDITLYKGKTWGLGDDPHKSIPADEPICGCNALSVHSPKK

SEQ ID NO: 939488 - protein, 104 aa, Homo sapiens
RGLVLLPRLECSGMILAECNVCLLGSSNSPASASQVPGITGTCHHTWLIFLFSVEMEFHYVGRADLELLTSVDPPALASQSAGITGMSHYALPIFRKNIRKQKY

SEQ ID NO: 939489 - protein, 81 aa, Homo sapiens
QRLVIPVIMFCHIRLQDQPVGLEDQPNSCAVSYHVLKGPFGWDFRNALGVESDPQLTASKKTGTSVLQPRGTGFCQQLHEL

SEQ ID NO: 939490 - protein, 94 aa, Homo sapiens
MLCSQEPGSVATLPSATQSAPGSAELRGGAPEALVVQCHAPGRLGTRVPGPDTLAGRSVDYRATDLLLTGPHTAAKMMAAYLANSNARNHLLPS

SEQ ID NO: 939491 - protein, 78 aa, Homo sapiens
  misc_feature (51)..(51): Xaa can be any naturally occurring amino acid
HTVIMPVIAGGILAALLLLIVVVLCLYFKIRNALKAAKEPEAVAVKNHNLXQGVVGPEQPGHTHCLGVLSCPTVLLRI

SEQ ID NO: 939492 - protein, 71 aa, Homo sapiens
  misc_feature (21)..(21): Xaa can be any naturally occurring amino acid
ETHTSSFSSGKESPPVSDTQXEGDEPMPIPEDLPTTSGGQQSSKSDRVVDNLRTMDADEGQDMSQVSGETL

SEQ ID NO: 939493 - protein, 72 aa, Homo sapiens
  misc_feature (63)..(63): Xaa can be any naturally occurring amino acid
RENEALRCGQGASLTVVKQNADVALQNLRVVMISAQPSLQQLPSPAQTMNPAAEHPEIHSRIXEVKDEEEDS

SEQ ID NO: 939494 - protein, 104 aa, Homo sapiens
QPPAARKRQERISLQSLQRKHGIVCVLIPDVQPPVREYISVTLSHKFVGLYPSSLSKLSIMSSLRKFNLKQGGIHVKKSGSYRKKEDAEINLSAKLFYKKRVDI

SEQ ID NO: 939495 - protein, 142 aa, Homo sapiens
  misc_feature (11)..(11): Xaa can be any naturally occurring amino acid
MAVLLKGVREXPPSGLLSQESGGFSPVAPFQRCKCLLCFLLSSGGILPLPTHLFFSLLQSRHRAATDYTMMGGWTPPSGAGGAEDVNKGAVQAEAEIMVRSRGRARRVQLCPEASPETEKMPESCLLYSQQNCEPIKPFLFK

SEQ ID NO: 939496 - protein, 168 aa, Homo sapiens
PSAGGAPLLSQPPRGGGPFSLWGGGFPAFQIWGGVFSPPPPFPPSSPRRGGGVGVVGAFFGGAPRLPPPGGGPDPPPPPPGFFFFFFKGAPPGGGGGFFFVGGPPPPPPPRGVFFLFPLFPPPSGPGGGGPPPPGVFCGGFPLFSPPFFSGFGVFGGFFSPFFFFFFL

SEQ ID NO: 939497 - protein, 46 aa, Homo sapiens
MLRGGLAFGVPTLLCKVHCGCHHGFRDLGQRERGGPGCVYIKSAFL

SEQ ID NO: 939498 - protein, 108 aa, Homo sapiens [sequence omitted]

SEQ ID NO: 939499 - protein, 88 aa, Homo sapiens
SGHSQGEKVLLEELYFTGLQGWVLLVMYCGIGAGNHRAICVNGGGGGCGERHVKVPANAGVLTGSPLVFPIRGVRWLEKPLFLCLELN

SEQ ID NO: 939500 - protein, 51 aa, Homo sapiens
KERERTLALEEEQKAGQKEAGVGGNGKKDGLCSAIFGPDGAWPDRIKDFFT

SEQ ID NO: 939501 - protein, 74 aa, Homo sapiens
PRLRQCPRFTFDLSGGSAASKPDLGLQKAGVPFGVPYHELKGPKTGGVLRLRAPPRAVKHSLFLVSCNKRDILG

SEQ ID NO: 939502 - protein, 35 aa, Homo sapiens
PPPPPPPTFPGFPPAPGAFSGHRSVFIKKDLLFCS

SEQ ID NO: 939503 - protein, 114 aa, Homo sapiens
IRLTGGARPPQAVVPFLQSRALRSPVCSKGAYLLMELAKSQGKTLKIYEGAYHVLHKELPEVSNSVFHEINMWVSQRTATAGPRPHHACIARCPAHGVGETSRVRTKMAFQIWQ

SEQ ID NO: 939504 - protein, 80 aa, Homo sapiens
EKIKAKYPDYEVTWAERGVLSTPSPGPVASNSHFKAPAFACTPFAGVALPVPGAAFGDVLSPRPWRQASLAPKLNVLPPL

SEQ ID NO: 939505 - protein, 46 aa, Homo sapiens
MFSIKKKKAISPYWGRECLSGEMLSCDVSLLFGNTEVNTKTKHAQQ

SEQ ID NO: 939506 - protein, 98 aa, Homo sapiens
  misc_feature (20)..(20): Xaa can be any naturally occurring amino acid
  misc_feature (53)..(53): Xaa can be any naturally occurring amino acid
  misc_feature (60)..(60): Xaa can be any naturally occurring amino acid
  misc_feature (68)..(68): Xaa can be any naturally occurring amino acid
RGGGTNWADPATFNRTGEKXGREGFLDTLGVFPRAGGRLEGAKTWGRFPGDLXLEMGPSXFARDLGGXLGGPKGSYHGRINSPEGPSDIPDLKNQKGF

SEQ ID NO: 939507 - protein, 139 aa, Homo sapiens
  misc_feature (109)..(109): Xaa can be any naturally occurring amino acid
GPKKGVFQLVCPPPPPPRGGGVWWGGRFYKHALFVTPARPGGHPPRCFFPLKESAAGPPPAVFSLGGGGGIFFFPGRERPVAPFVGAPYYVLGQKPGGGGGANSPGLWXQGGGGAPPPPPVPPRGGGENFCFLGVFFFE

SEQ ID NO: 939508 - protein, 125 aa, Homo sapiens
RGGARGERRGGRAAAPAPMVGYCNGAQGSTLSFPPGVPAPTAVFQRPSPSGPPPRWFVPGCPHPGRYACFRTGQALCSFQCYRINLQMRLGGAEGPGPPFWVRKALKPDFGPRPMAAFEYLPPPI

SEQ ID NO: 939509 - protein, 41 aa, Homo sapiens
PPPPPPFGGPGDVKFYPKRGGAPPPQGGSSPPPGAPGFFPG

SEQ ID NO: 939510 - protein, 63 aa, Homo sapiens
QRVWHISRTITAKSKGTHYIRIWAVCRSRDGQGVEEFIVMIVKHQAILIFFDLDRFDTPSVVF

SEQ ID NO: 939511 - protein, 108 aa, Homo sapiens
SDWVSLCLPGWSTVVPSQLTATCLPGSSDSPASASLVAEITSTCHHAWLFFVFLVETRFHPVGQADLELLASRDLSTSASQSTEIIGMSHRTRPILDSYCFCPLLSSS

SEQ ID NO: 939512 - protein, 90 aa, Homo sapiens
LYIQILVQLIVRFVMSLSVIIPIILSLLFVFFFKFFLTLRFFISLPFPNILWRWLIMQDAKLHTLIVSDAPHKKPSFVVTFLALPLLSSS

SEQ ID NO: 939513 - protein, 70 aa, Homo sapiens
SPMKEELIGKEKQGSNVQNFLNGQVRSLTLVTQALWGAERGGSPEVRSSGPAEVQEFQTILARLVKPRLY

SEQ ID NO: 939514 - protein, 33 aa, Homo sapiens
QTVFAFIGQEFLTEPTHTHPHTHTHDACPSVVF

SEQ ID NO: 939515 - protein, 38 aa, Homo sapiens
LDSSRVSLISPMLKCMERYRPTATSASQAPTTLPSVVF

SEQ ID NO: 939516 - protein, 61 aa, Homo sapiens
RATAKGKLLKDRSPCKQLLNKVCKSLDDHSSRRGLSGVEDCGKLAFAASVKFSSLQYVLSI

SEQ ID NO: 939517 - protein, 133 aa, Homo sapiens
RASIVALRKMITSFLALWWHVCVCICIYTHIYINTQTHIYTNTRIHFRPQFLAHNSHSPCYTLLLQHWVCQASGDNHSNLLPFLLPAQDRTLIFPTFLMVGHKTHSRDGPTPPLSYKPQKAFQPGQHNETLSL

SEQ ID NO: 939518 - protein, 148 aa, Homo sapiens
AWSRPRYGIEWNGKNWNGMESNGMIWNGMEWNGINPSAGECNGMECNGMESSGMDGMEWNGMEWNQPECNAMEWNGMEWNGTARMEWNVMESKGVERINPNVMEWNGTEWNGMECNGMESTRVQWNGMEWNGMECNVMESTRVQSNGI

SEQ ID NO: 939519 - protein, 30 aa, Homo sapiens
RSNVGSDSDPTGSNVGSEFGSNTNLKWERP

SEQ ID NO: 939520 - protein, 111 aa, Homo sapiens
FETESYSVTRLECSGVISAHCNLHLRGSRDSPASASRVAGTTGARHHAQLIFVSLVAMGFHHVGQDGLDLLTSGNPPASAAQSAGITGVSHRSQPHRACFYDLFSPLLSSS

SEQ ID NO: 939521 - protein, 156 aa, Homo sapiens
KVQKVYYIENKAEHLSDFETTFELQPLERGFANTLGNSLRRTILSSVPSVAVFGVKIEGVEHEFSVIDKVREDVVTILNNLKKLRFSFKKEVFLQNEIQVASFDGRKVGKITGADILVNSALEIVNKDQVVANTSEVGALKFEMFLTYGRGFVDFE

SEQ ID NO: 939522 - protein, 30 aa, Homo sapiens
ALFYFSFGRRRHCCTQLVSVPRFYPLLSSS

SEQ ID NO: 939523 - protein, 118 aa, Homo sapiens
MAIGGTSMTVKSDQVAEEQYMGVYRVQASELQNICTISSKLTSLDIVFLIYKRETSILFNGKSHNYFCTNVIELSKIRLDMLAHTFNPSTLRGQGGQITGAQVLETSLSTMAKPHRYQ

SEQ ID NO: 939524 - protein, 97 aa, Homo sapiens
RSSADVNVAPCTIRKSDEVQVVRGHYKGQQIGKVVQVYRKKYVIYIERVQREKANGTTVHVGIHPSKVVITRLKLYKDRKKILERKAKSRPVEKSKA

SEQ ID NO: 939525 - protein, 47 aa, Homo sapiens
MLLEKEVLGRTWCRMPVIPALWEGEEENHLSPRGRVKPRQHRETCDY

SEQ ID NO: 939526 - protein, 102 aa, Homo sapiens
  misc_feature (82)..(82): Xaa can be any naturally occurring amino acid
ASISDPGAELRIGGWEAQEAPGLVWLNCDSGEIGRGGQFPEVRLEGGLCLRGGPGLEVWGPLFQVPGGVRPHGAAGVRSPDXNLPTPTAPSLQGPPPWKKKK

SEQ ID NO: 939527 - protein, 173 aa, Homo sapiens
LQPAQPQLVQQRQDAARSSSDLQRRLRGSSVEMLQDVIDVIKRSESWALKKPKSVSQKLKSVFRVPDLSGMLPVLKKLTDVQYYWVDVMLNPGSAPSNVAIFVDQRQVKTVRPCPFKNSNPCDFSAFGVFGCPYFSSGKYYWEVNVFGKIAWILGGPSKISSLNKRKSSGFAF

SEQ ID NO: 939528 - protein, 34 aa, Homo sapiens
LQCRQILNHLLRQQHMRISQKTCAQGALKNAPLI

SEQ ID NO: 939529 - protein, 74 aa, Homo sapiens
GKAFMPKVGKEIVPKAKIEKWDLIKLKSFCPAKETIIRVDRQSPEEEKIFAIYPSDKDLIFRISKELKHISKKN

SEQ ID NO: 939530 - protein, 70 aa, Homo sapiens
QELFKRISEQFTAMFRRKAFLPWYTGEGMDEMEFPQAESNMNDLVFEYQQYQDAPPKKEEDFGEEAQKEA

SEQ ID NO: 939531 - protein, 58 aa, Homo sapiens
HASADAWVQKFKTRLGIIMSPISTTKFNKLAGHSVHTCSPGHSGLRQEDHWNLGGCHC

SEQ ID NO: 939532 - protein, 101 aa, Homo sapiens
YFSRRPPLPIDPSMFPTWAAKNEQQGVKRGPSPRPPEGGLGYNQLGDDDLKETGFPLSPPNQGAFSAGPGFNLKFLRSKWTPSWGKINRGPRGGYFGWNFD

SEQ ID NO: 939533 - protein, 33 aa, Homo sapiens
MPGVVQNRRQGDVAEIGLHCLWPLSSPCPSVVF

SEQ ID NO: 939534 - protein, 110 aa, Homo sapiens
ETESHSITQAGVQWHNLGSLQPPPPGFKRFSCLSLPSSWDYRCLPPCPANFCILVEVGFHHVGQAGLELLTSNNPPTSASQSSGITGMSHSAWPPGSSLIHPLSDPSVVF

SEQ ID NO: 939535 - protein, 40 aa, Homo sapiens
MRQFINPAWLAIRHLVGRYHLSVDTVQISVSLLSSSCSSI

SEQ ID NO: 939536 - protein, 47 aa, Homo sapiens
RVVKCLFIGAGGVHEGAGHGTLVGTLAVSYFRLRGIVCPKGTPSVVF

SEQ ID NO: 939537 - protein, 36 aa, Homo sapiens
MRQFINPAWRGVIGGADNFRLSGKGAHIIVPLLSSS

SEQ ID NO: 939538 - protein, 32 aa, Homo sapiens
PPPSPWAPPNTVSCPPGPGSRKTRLPSFPAAS

SEQ ID NO: 939539 - protein, 86 aa, Homo sapiens
MANNAICVIPIIKTRRVNWRRDPPNPGRKDRMSEHLDAVSRSEQPNKVKTFFGHPFGLTTIFFTEMWERFSYYSMRAILLYFLVDT

SEQ ID NO: 939540 - protein, 57 aa, Homo sapiens
  misc_feature (6)..(6): Xaa can be any naturally occurring amino acid
ALYSLXKFPPTQGGALPPPIYNIKPSFTGENTLRVKHLSPIFLLSPNPGIITGVSSS

SEQ ID NO: 939541 - protein, 101 aa, Homo sapiens
GGPPPPPNKATTGWGAAAIWAWRLGRGSPPKAPPAGVRIKGAAVEKTGGPTEGFWGLNPPPPPGGLKVRGPRGGGFPPPPGGQALFPAPHKPPIKFFLGPP

SEQ ID NO: 939542 - protein, 108 aa, Homo sapiens
IQLGTKKGGFWAKGPGPPPLHPGVGPRWLKPLSLGPPPTKWGAAPPPGWGFPPTPFNGGGKRGKGGGPPPPPGVWGGPAPQGFSPPRGAFPPPLWLNPTRIKPPGFFG

SEQ ID NO: 939543 - protein, 174 aa, Homo sapiens
  misc_feature (117)..(117): Xaa can be any naturally occurring amino acid
YKGPLGSVLIVQGGGPPPLWGHYSGQTSLGPRGPGGLGNKVGQPPTVPFKGTGPFGFLVGSLIPAPKGKGGGFRPFGLKNGPDGWDTILVPPQPGGPCPPGGICQGPLFFPFLNQQXPGPPPLEGGWFPPGSPSGGPGPPFLNPPQSFRGSGSGAHLGSNQGVFSPKNKINLAC

SEQ ID NO: 939544 - protein, 99 aa, Homo sapiens
VQTNAKAHSPHPPSGPCWAGPEMQVKLFPVPGLKSTLITDGSPPINLFNTAFGLLGMGPKGQPLGKRVASGPTPGEGISPQFVQAPQAPGNNPVGPVLR

SEQ ID NO: 939545 - protein, 62 aa, Homo sapiens
MPGPSASVSVGSEALAGRPFIAGFYSKGRIMGPATISYPTAGSLVAGFLIANNISPASPFQA

SEQ ID NO: 939546 - protein, 124 aa, Homo sapiens
SHRRFSPRFKRVSTASSIDLPPLPPPSFGRGVVAVFPKGSVLFRPKAKAQAQAQGSTRARVQPPLQFQVRVPKVPRAASKGFKLIFFPTLGQKGWLGPPPPPLGFPLPWGGVLLCFLFQLTLGR

SEQ ID NO: 939547 - protein, 70 aa, Homo sapiens
  misc_feature (17)..(17): Xaa can be any naturally occurring amino acid
KETLGRGEQKGCRGSTXAGAGPRSRERAQACTRSKAKATAPKPFFSCSPRFADFSPALVNNSKFLFWRVR

SEQ ID NO: 939548 - protein, 57 aa, Homo sapiens
MPAKPVKSASQPSQPSLTTPASKPSQPSQPANQASQASHPAKPGQPKFFLIKGTSRS

SEQ ID NO: 939549 - protein, 114 aa, Homo sapiens
RLETAAQLAPCTPTMKLPSGLHLLEPLPSGSPHILVFPSPKDLMGTLPPAHQAFDRRVDYQEKQRDLEIGIRKKPFAQPKESKQPSRSSPPLLFAVHCSQLEIVGSSMCLPSGM

SEQ ID NO: 939550 - protein, 35 aa, Homo sapiens
  misc_feature (12)..(12): Xaa can be any naturally occurring amino acid
MQEVLGPLVWPXHWTPKGTLPPEGAALDKLHVVLR

SEQ ID NO: 939551 - protein, 78 aa, Homo sapiens
RPPGQVRGGMEWNGMQWNGIIRNGMEWNGMEWNGMEWNQLQCNGMEWNGMEWNGTTRMEWNVMESKGVEENQPECNGM

SEQ ID NO: 939552 - protein, 118 aa, Homo sapiens
AWSRPRYGIECNGTNCNGMELNGMEWNGMESTRVQGNVMEGMQWNGIIRNGMEWNGMEWNQPECNGMEWNGMEWNGINAQCRGMEWNGMQWNGIFRNGMELNGMERMEWNKPECNRME

SEQ ID NO: 939553 - protein, 112 aa, Homo sapiens
SGRPGRYRGMEWNGMQWNGIIRNGMERNGMEWNGMEWNQLDCNRMKWNGINPNRMEWNGMESTRLQSNEDGMELTRIEWNGMEWKGTERNGMERNGMEWNGTEWNGMEWNGI

SEQ ID NO: 939554 - protein, 120 aa, Homo sapiens
RAAARVGTRANVMERNAMEGNHPEWNGMEWNQPECNAMEWNGMEWNGTARMEWNVMESKGVEENQPECNGMEWNGMEWNGMQWNGINPSAGEWNGTEWNGMESSGMEWNGMECKAMESTR

SEQ ID NO: 939555 - protein, 118 aa, Homo sapiens
RGRGRGTMEWNGMEWNGMEWNGIIPSGIGGNVFEWNGKEWYQPEWKGWEWNGMETNRMESTRVEWNGKDWNGMEWNGINSIVMEWNGMEWNGMELPEYNGMEWNGTEWSGMEWNQPEC

SEQ ID NO: 939556 - protein, 121 aa, Homo sapiens
SGRPGRYNGMEWNGMEWNGMEWNDTEENGMERNGMEWNGMELNGMEWNGIVPSGIGGNVLSGMERNGINQSGMERNGMEWKLIEWNQPEWNGMERTGMERNGMEWNGMEWNGMEWNEINAS

SEQ ID NO: 939557 - protein, 66 aa, Homo sapiens
SVVAAEVHICHVALGRTGCHGLGHCRGGEIDGREYGIKSIGILWLILELLSTEEYDNATSWLPHRY

SEQ ID NO: 939558 - protein, 32 aa, Homo sapiens
RAAARAGTPPLHPGRASCLIQAVLRNGCGGLW

SEQ ID NO: 939559 - protein, 35 aa, Homo sapiens
GRGAEGGRKGNQIGNNNEHLLRDRPWAKYLPGRPL

SEQ ID NO: 939560 - protein, 72 aa, Homo sapiens
VVAAEVRNRMEWNELKWNGIEWNGMEWNKPECNGMEWNGMEWNGSTRMEWNVMESKGIEQNQSECNGMEWNG

SEQ ID NO: 939561 - protein, 123 aa, Homo sapiens
VVAAEVRNRMEWNELYWNGIAWNGKEWNGINASAGECNGTECNGMESSGMEWNGMEWNGMESTRVQRNGMEWNGMEWNGMEQPEWNGMEWRVRELNRINPNVMEWNAKEWNGMEWNGMEWNGM

SEQ ID NO: 939562 - protein, 149 aa, Homo sapiens
VVAAEVRNIMEWNEMEWNGMQWNGMEWNGFNSNGINTIAMEWNGMERNRMESTRVEWNGKDWNGVEWNGMELTLKRMKWNGMERNVLEWNGMESNLSAGECNGTGMQWNGIIRNGMEWNGMESTLVQWNGVEWNGMEWNNPYGMECNGE

SEQ ID NO: 939563 - protein, 69 aa, Homo sapiens
GRYVTDMTSRQAKDTELKTLDSIAKPRLLNPFPLSNCCCGAAFTSTLWSTEIEGLCYPSSDKLQPELFS

SEQ ID NO: 939564 - protein, 41 aa, Homo sapiens
SPRGFPPAHGVKPEILALYASFDLASPYPEPMQFGNMPPSL

SEQ ID NO: 939565 - protein, 70 aa, Homo sapiens
GKQEARGSPGLRWGPFFGESLPPPNESPLFHWGPFPGFSFGVGNSGRYRQGMSRFYPIFPGPPSLPPSPL

SEQ ID NO: 939566 - protein, 128 aa, Homo sapiens
SSHMAPLLTLLLPSSTLKTYGQEQWLAPAIPSTLGGRGRQIAWPQEFKTVLGNVAKPHLERKEEKGRGEEEEELHIYTYTHTHTYVHTYIHASWTWWCVPVVLAFQETEVGGPLEPEIAPAWVTVRPC

SEQ ID NO: 939567 - protein, 123 aa, Homo sapiens
  misc_feature (18)..(18): Xaa can be any naturally occurring amino acid
GGLGTYAFGIAFHSKKEXKGSPPGRKHKAGGFGNALCFWVQQDQPRSPPAPAFQVLGGHFLLFKVQKSFLFPPPPGTSPCLTFSLYGNIFDFFTSFGVRCSTFFAPGCPPLSQPVYPDYFGGL

SEQ ID NO: 939568 - protein, 67 aa, Homo sapiens
HLQNIKMPATGPARWLTPIIPALWEAEVGGSRGQEIETILANTVNPISTKNTKNEPGVVVGACSPSY

SEQ ID NO: 939569 - protein, 71 aa, Homo sapiens
QKHMYYNRDWYKRNFAITFFMGKVALEKDLDPASTESQEEQPLVVLFEPARVQVSTCSRWSSCSQGLSQKL

SEQ ID NO: 939570 - protein, 73 aa, Homo sapiens
KGMGARPSRGGTVVRKGMGARPRSGNSGEKRYGGSSQVGEEQLVRKGMGARPRSGRNSGKKRYGGSSQVGEQW

SEQ ID NO: 939571 - protein, 36 aa, Homo sapiens
RYDFFCHFWLIPASQVTARKYLPAKIPVMFALLSSS

SEQ ID NO: 939572 - protein, 118 aa, Homo sapiens
SGNVLRLQVDAQINHAVGPLLPAAAGAPAPLYLRGPASAHVRPALARRILRPHEKAGGEPVPRLHNSLCVGPRDSVGQWLPSRLGLSQRRPLVRPLQLPHPAPCARLIGVYLDSKLCG

SEQ ID NO: 939573 - protein, 44 aa, Homo sapiens
RRPPGLVRDADHMHHVHDACQDAMPEPDVLLEIQHIHNGFSFRV

SEQ ID NO: 939574 - protein, 124 aa, Homo sapiens
QVTPFVLNSGKCKLVVEEYYEVLDHCSSILNKYDDNVKANFKRGKAHAAVWNAQEAQADFAKVLELDPALAPVVSRELRALEARIRQKDAQPTPRFLGFLFHSSSTWSCVSSRVQSYCCQPPCP

SEQ ID NO: 939575 - protein, 72 aa, Homo sapiens
SVSIQLIYIDIEFNYIVTNFCLLDLFLMEGADVSNCDSGSIYFSFQFCFCATSFENQLSGAYTLRIVIFLED

SEQ ID NO: 939576 - protein, 111 aa, Homo sapiens
  misc_feature (17)..(17): Xaa can be any naturally occurring amino acid
WSWEAGQPPGLGTVGGXHSPSRTNGLGLGSPSGRRVTLACQFAFPPPRVLWFGWGFTPTPGLTLQVVHSQNCILDFYPTVPFPAPQRYPDIYPQWMGGQDRQRSINRQALC

SEQ ID NO: 939577 - protein, 100 aa, Homo sapiens
  misc_feature (12)..(12): Xaa can be any naturally occurring amino acid
  misc_feature (46)..(46): Xaa can be any naturally occurring amino acid
KRNIPAAAHQVXVLPYPFTPHWQFERAIQTPIGSPWNPQRAFQKLXTPKVVPKPGHFFNPIKAKKVGSRFSPRWALFVIQRNPKRIPPRPKKQLKKCSVN

SEQ ID NO: 939578 - protein, 64 aa, Homo sapiens
MAKLDPGTRRPKRWFKVLFLEGAFQHVGKTFNQGKIFKEHFLPSPNCLHLPFREMGVIKGNLTF

SEQ ID NO: 939579 - protein, 73 aa, Homo sapiens
ANSRSSENTKQMMSSFMLSISAVVMSYLQNPQPMTPPGDTSLEGSHFGPCLSPRAGLWVVNLLPSTAILGFPE

SEQ ID NO: 939580 - protein, 154 aa, Homo sapiens
VPSVPALTNAKEFVYNGGGSASLFFDTADGQGSGTQSPFGVSGAGTCNNSSFDMAQVFGGGANSLFLEKTPFVEGLSYNLNTMQYPSQQFQTVVLAKLTIYLEKTPFVEGLSYNLNPMQYPSQQFQPVVLAKLTIYLPVGPGAPKTTEKRKERP

SEQ ID NO: 939581 - protein, 73 aa, Homo sapiens
RIGAHRVVQDTRGVGRCLCESSICVYAVLSKDTPTDTDTSLRREQPLPLSVQDDTFFLNIILRFAHHTEYVCM

SEQ ID NO: 939582 - protein, 70 aa, Homo sapiens
  misc_feature (7)..(7): Xaa can be any naturally occurring amino acid
ALNGSTXPWGKMSISSIGVVGAPEDNRSHSAHFFEFFTKEIALGQDRKIIRFFPLESWQIGKKGRVMTFL

SEQ ID NO: 939583 - protein, 70 aa, Homo sapiens
  misc_feature (6)..(6): Xaa can be any naturally occurring amino acid
  misc_feature (13)..(13): Xaa can be any naturally occurring amino acid
KEGVYXQVKKQTXIRELMLKTWTPQWLTCKVQRLQAKASINTWKPYIGLAKKVGYPEVGAYRLQVNPNIF

SEQ ID NO: 939584 - protein, 69 aa, Homo sapiens
SRFGERVLVSHRSVVSSQLVIEGQRWVNQYCQFPVGNYCGPPYICELIIGFVREVYECMRILPYEENLG

SEQ ID NO: 939585 - protein, 117 aa, Homo sapiens
PQKRGGKKKLPKPVEIAEGAPLEKTLVKKKKKKDSQWILPSRGLSAPQLSGPCGGRHLWPEVPTKFPPEGLGAFCGMPMGCRVLPSRPLSPQLHSQEGPFNVFHRGFQTQINFFVNS

SEQ ID NO: 939586 - protein, 107 aa, Homo sapiens
PPDPPFHGAGSPIPAPSSPKNQRGFVKVSNGGFSVAGPQGGARGGLTSQESRGAFSPPPGSGPLRLGFVPRFARNFPMPSPPSGGPPVGEKSALGFFFLSHFIFIME

SEQ ID NO: 939587 - protein, 71 aa, Homo sapiens
LGPGVQPLCEAPRTGVVPRGCLGPPGPFGGPLFHHHRPGVKGGSPTPRALGISLLEGRGASPFPGQKNGPG

SEQ ID NO: 939588 - protein, 127 aa, Homo sapiens
GSGLAPARLRNEPHLALVTNTGPAPGSFSAQLGGCLVATAVHPGAPRPFLKDIADNPGQAKGSDKGSPILPAQAPAPLGKKYFFFFIFRQSFTVAQAGVQWCDLGSLQPPPFGFKRFFCFSLPSSWG

SEQ ID NO: 939589 - protein, 81 aa, Homo sapiens
MLFERRYVLMLYAKPHTSVLPNSSVAEAFRMNGEPWRPVVVCFKSYIANALYSSCVKCWCLERPVLARTEQLRCMSAAQET

SEQ ID NO: 939590 - protein, 59 aa, Homo sapiens
LPTPLEPSTGIHDGLPANLLVGQTRKSRVPPPGGRSHGLLGLARGPPPWVPCGNKQANE

SEQ ID NO: 939591 - protein, 68 aa, Homo sapiens
NPPFLAPPGHWGGGVGVPPPPPFCPPPPGGARFGFFAPFGFLGVFPPPPPPPPPKKPPKGAFLGPRGP

SEQ ID NO: 939592 - protein, 123 aa, Homo sapiens
GLGEGGRRIIPSACLAKNQAWSLGLPPPRLLGAFWFQASWRWVAKIINSSPVAPVLGAFNPGSFCHSFPGALSKGVGSGRMAMPRCVFRPFTTVCVQAPPSPKALGPPGIRVKGLRGIKSVPL

SEQ ID NO: 939593 - protein, 101 aa, Homo sapiens
PLKILGFGWDWKDPKFGGNMGLSQIKKEGFQLLGKGGVRLGQAKSLKLGPFLGWVPKKIPGFPGKGAFFLKAFIPCQPPGKIRQKVLFIGAPKGSLGSGGF

SEQ ID NO: 939594 - protein, 105 aa, Homo sapiens
KNPPPPKRNFGEKPKGFGPPPFKSFFLLVGPQTKRVRHFPPPQVFGTSVKVVPPADLPAVGALGVLFRGQRGQVFFVGFFFGPVLLGARGGGAPFGPFFQLINCR

SEQ ID NO: 939595 - protein, 81 aa, Homo sapiens
TFPLPHPPQGTQYSLLATLELLGKLLLGTLAGGLGDGLGPHPCFLVLVNLFAFPVLDLDLAPSTFFLAEWVEWSIKPHVPV

SEQ ID NO: 939596 - protein, 71 aa, Homo sapiens
NATSLGEGKDLEDPGPLPEAQTRPPGPGRREPFKIYGPLGEKNQNPEKATPAALTGRHGHLRALGPLGTLG

SEQ ID NO: 939597 - protein, 96 aa, Homo sapiens
EKELAWEKEKHELGLMKLKNRFRDPLESDTIVVHAILSDHKISSYRLVQPSKYSKFKRASQSERKPSKLDRFEKEGPGRKDSQRDAGGSVTIQEES

SEQ ID NO: 939598 - protein, 75 aa, Homo sapiens
NHPHSPRSNSHSHPNPLKLHRRSHSHNRPRAYILITILPSKLKLRTHSQSHHNPLSRTSNSTPTNSFLMTSSKPR

SEQ ID NO: 939599 - protein, 138 aa, Homo sapiens
  misc_feature (20)..(20): Xaa can be any naturally occurring amino acid
  misc_feature (24)..(24): Xaa can be any naturally occurring amino acid
FTVGGLTGIVLANSSLDIVXHDTXYVVAHFPYVLSIGAVFAIMRRVHSLISPIFRVHPRPNLRQNPFHYQIHRGKFNFFPPTLFRPIRKAPTLLGLPRCKPHMKHPIICRVIHFFNSSKIKNFHDLKNLRFETKSPKS

SEQ ID NO: 939600 - protein, 112 aa, Homo sapiens
MGEIASFDKAKLKKRETQEKNPLPTKETIEQEKRSEISEDPGGFPTPVLFETPVVCGGKAPCKMDTSPKLPFELGHSAPMPPACGFLKGPPPNRTAKFSGLPRDFIENFLFE

SEQ ID NO: 939601 - protein, 87 aa, Homo sapiens
  misc_feature (23)..(23): Xaa can be any naturally occurring amino acid
  misc_feature (35)..(35): Xaa can be any naturally occurring amino acid
HEEVDSKCYVQTRQQFFVEWIPXCQDNQFVTFTLXASKIAVTFIGNSPAIQELFKRISEQFTPMVRRKAFLPWYTGEGMDQMEFPQA

SEQ ID NO: 939602 - protein, 179 aa, Homo sapiens
  misc_feature (8)..(8): Xaa can be any naturally occurring amino acid
  misc_feature (10)..(10): Xaa can be any naturally occurring amino acid
  misc_feature (17)..(17): Xaa can be any naturally occurring amino acid
  misc_feature (21)..(21): Xaa can be any naturally occurring amino acid
  misc_feature (31)..(31): Xaa can be any naturally occurring amino acid
  misc_feature (33)..(33): Xaa can be any naturally occurring amino acid
MFARSTAXRXAIYKPVXVRPXGLHDYCDIIXHXMDMSTTSSKLEAREYRDAQEFGADVRLMFSNCYKYNPPDHEVVAMARKLQDVFEMRFAKMPDEPEEPAVAVSSPVVPPPTKVVAPPSSSDSSSDSSSDSDSSTDDSEEERAQRLAELQEQLKAVHEQLAALSQPQQNKPKKKEKDK

SEQ ID NO: 939603 - protein, 90 aa, Homo sapiens
IQHPSLLQSTLHTAARGTLQRPTRLCSELCGLPPSQKAQPAPGLTLHSAPCERASGPRGSLVPEGLPDPGAAFLEVVRTHGPARSERCVK

SEQ ID NO: 939604 - protein, 180 aa, Homo sapiens
KLKTTGLRSCSVICVEQLPLSQDICVVPLRWNGSRSCTLSHPHTPRRCAVVEARRSPHHLLEWIAHPLRGGVPQDDYPQSAALRWGRLSLLRSLIWVPRRAVEARWMVCYTPAVVVMRPPHLRGATPTALYGGAPPLLLGAPYHSLLGVRNAHPPQFIGEPPTASCGYPPHKRAHAAAPR

SEQ ID NO: 939605 - protein, 68 aa, Homo sapiens
SELRGDVLYALQPCGTKLRKQKRTKTHLSALVTKGASEMNCYKAFRNIHLFLSSSKYNDNSTDAIKNL

SEQ ID NO: 939606 - protein, 103 aa, Homo sapiens
GVGLSKRMPPMVSRAKWKSFHCSPPRCWPCCYPTVKGKFFPQKIFGGFGPLNPFKNPNSFLNRFRGIVPKKKKPQKKGSWVSLKAPPPPPQKAPFFKTHGKGP

SEQ ID NO: 939607 - protein, 105 aa, Homo sapiens
  misc_feature (33)..(33): Xaa can be any naturally occurring amino acid
  misc_feature (35)..(35): Xaa can be any naturally occurring amino acid
GPLYTDPGNRGWAPKPLSPFICSLDSSGCPKVXYXFVVSGPWAQQMYGKGESLWEPHMGPGPLFETLSQTMFNSVGREQGSGMGVIVPIIEKGKIPPRALKGRMG

SEQ ID NO: 939608 - protein, 112 aa, Homo sapiens
AKFEENVILSPPPPAPDIRDNNTGVMYTHCFIGSNIILSFLDIRNNITLCVYTCREIQWNVILCLPGYDEQYHVGMYNFRDIGSDIILSPLEVRDNITGVVYSFWDVGTNII

SEQ ID NO: 939609 - protein, 117 aa, Homo sapiens
QDWVYGKKYSAKVSTKPFQPPIEKTISKTKGKAPRTQVVTLPPSREEMTKNQVNLTCLVKGFYPNDIPVEWENNGQPEKNYNTTPPNVEIRGVLFPLKQAPRGQKQVATRENFFMLR

SEQ ID NO: 939610 - protein, 74 aa, Homo sapiens
KNHPRKWERPSSDEENENGDFTVEKCPGRAPPGEMEVPTLCWTKPHCPGPCRPPVHRLNCHDLEADKRPPAPQP

SEQ ID NO: 939611 - protein, 95 aa, Homo sapiens
RPQKPSLEFKEFVGLPCKNSAAFSQGRRYQGSPGALLCLGTPKRHCDGFAFQYEYEPPCTSLCGRVQAARLPPQVMGWALPFLMDAQPGFEPTPM

SEQ ID NO: 939612 - protein, 84 aa, Homo sapiens
PQHRCRVIVLERIRDRFKPVLELNRQACYAFILCVRYSMVYGCNAAYNLYFRKHEGPNQIEGRNGMSFLLEAGTWFCIPLEQPF

SEQ ID NO: 939613 - protein, 115 aa, Homo sapiens
  misc_feature (2)..(2): Xaa can be any naturally occurring amino acid
FXILIRPSIGILAPEAKNLARGGIGAPPSAQQPLVPPLFPLWAPGLVSPSANPRAPFGPCPAPRPVAPCPCPRGDMAAQSQGWVGGCPKDPFWEPLFPGLGPINPPLFLQLVLPP

SEQ ID NO: 939614 - protein, 73 aa, Homo sapiens
PPETTGSSLLHQGWTYFASVLFDSWAHGYSDRIETMAHLGFFIFGVCHAKEPSNCDAEKLLKVFRNVKPAIVW

SEQ ID NO: 939615 - protein, 103 aa, Homo sapiens
  misc_feature (32)..(32): Xaa can be any naturally occurring amino acid
DTRMIRKQTALIAEMEKVIVVWIDQTAHSMPXSQSLIQSEALTRLISVKTEEVRKLRKKSWFMRFKEISCLCNIKVQSEAASTSGEAAASHPEDLANARHGGS

SEQ ID NO: 939616 - protein, 125 aa, Homo sapiens
LFQGRAGGGPQIGPIWVPRGPCPTLQGAPGASPFLWHANWVVVGGCALRPLKTPSFKGPLRKKNPAPGPAGGGSRLALTFFFFFFKKKKPLKNPPLKPNLFGFLTKGFSKFGWGFVLKVREFFPP

SEQ ID NO: 939617 - protein, 75 aa, Homo sapiens
QQLTELYRDISQHLRDESGNSYSPEEYALQQAADGTIFLVPRGTKMEATDLAGPKEVELLMGFPSFPFDKGTPPP

SEQ ID NO: 939618 - protein, 77 aa, Homo sapiens
  misc_feature (6)..(6): Xaa can be any naturally occurring amino acid
VRPGLXMALSGSPKPWGQLSISSMGVVGPPEDNRSPRAPFFEFLPQELALGQGRKLIRFFPLGSWPIGKIGAVMAFL

SEQ ID NO: 939619 - protein, 102 aa, Homo sapiens
MAVRGHWGASSQELPDVGSGGNPEKGAHLQVHSRVPAAPMKAPSDLPASPFPSPAPHCHCRHDNVTLSLTGFDSTLSACILTANEKAPISYLFIFPINRRKQ

SEQ ID NO: 939620 - protein, 152 aa, Homo sapiens
KSSLSLLCLSPVLPQGHREPNALAVRSPSSEYLGLLPSSSTGGQHLIVSTDTAGWQQHGGQCCHCKPEDKEMNYQTSGRGKFHERSSKTLRGCTEGHSNSGVVIKAFYKYLCIHKRQATGQLQKEANEFQICFFSCQMQGCAATFAILVKGK

SEQ ID NO: 939621 - protein, 124 aa, Homo sapiens
VLAAVGKKKKDVILADLLPSLAVYLRTLAPGLFFSLMASRARKERKSKNSSTLTSQGQGREAALLGLLTLQGTVAFVEKFNGDFVSQRGKVLKKQHLGADHAGRGTNQNTSNNASIPGVRRKAP

SEQ ID NO: 939622 - protein, 101 aa, Homo sapiens
PLLGPQKKGVIWVARENPPGGPFKVKKKGLKGGKGGLGPPPPRPPPPQRGGQRGEGLKGWGGGRFPPKLGEKFSRGGPQNFNPKGSLGGGIFGGFWFFFWG

SEQ ID NO: 939623 - protein, 95 aa, Homo sapiens
WFPGIIAAPLPPLPGPQWLCRESGGDLQRADAGEKPKAFIHWVSQPLMCEVRLYERLFQHKNPEDPTEVPGGFLSDLNLLVFNRTVTLKEDPGKV

SEQ ID NO: 939624 - protein, 122 aa, Homo sapiens
DLDSQVSQKGLGPVIQPQPKSYFKSISVTKITKPDGIVEERRTVVDSEGRTEHYSIPTPKQYEQILVGDPRITIDLRTLDRCLFPSVDIIPGTVGSESQVACVNPQSAFKVLSYLYTPLPTS

SEQ ID NO: 939625 - protein, 99 aa, Homo sapiens
DFLQKLSSSLSRTWEDLAGGAVFGAQAFTPPVGSERQSILTRQCCWFPECTQVLPGSVCSERAWPNALACEVGTPGPCEPLEGRPRNVRVGQGTPLPRV

SEQ ID NO: 939626 - protein, 70 aa, Homo sapiens
INVGGNTAAVEFSPGMKTTSASPSRVSGRMFQSSTILRCEQRYTCALSESLPYILQLNGRLVALAFIKLA

SEQ ID NO: 939627 - protein, 172 aa, Homo sapiens
  misc_feature (119)..(119): Xaa can be any naturally occurring amino acid
  misc_feature (124)..(124): Xaa can be any naturally occurring amino acid
DWCISLAIKAKVPPLWVEASQGLFPPAEKKSMMWTPWAMVFLDPWKDRSLPDTLLLKECGLLRKGPVLLADNVICPGAPDFLAHVRGSSCFECPPYQSFLEYREVVAGLEKAIYKGPGXKTGPXLPPPAPLWGFFTQPGTKGAKRAPVALLRLRAVSYNAKPPSAEACALTC

SEQ ID NO: 939628 - protein, 48 aa, Homo sapiens
  misc_feature (8)..(8): Xaa can be any naturally occurring amino acid
  misc_feature (13)..(13): Xaa can be any naturally occurring amino acid
GGAPPNPXAPETXGGGGRQGSFNSKPPLLATKLCGDMIFVTALGRSPP

SEQ ID NO: 939629 - protein, 121 aa, Homo sapiens
  misc_feature (47)..(47): Xaa can be any naturally occurring amino acid
SEIPKLPAVSSPPGGVWFNFPGPELVIQFAQGTVRLCLSGFRALEIXLPPGPVWIPGDVFLGGDVTVFSPGDIKNGAPVGLGGACPSGRGLGRGETPQGQFPGGPPGYGPGPRGAKLGLLR

SEQ ID NO: 939630 - protein, 68 aa, Homo sapiens
MPHVPRLQLQAAPPIVGKAFAPAQPPPYSPCALGTLCKGALCSLSPPSLDFWTWPPDLPLLNKTAVDV

SEQ ID NO: 939631 - protein, 136 aa, Homo sapiens
ERDIDHTLHAANTGWLCPCSACLEERRRRQLLSGDCAAPDRALNAARISPSVHDMRYMRITECRFILCARFCFACRCPLCVHFQCSDPPHPYMRFTARMSSISCPVYVHLLTVTNILVSHEYFTAGLASAPSTTVL

SEQ ID NO: 939632 - protein, 39 aa, Homo sapiens
SQGKETIYYPEWFVLMLLVGMPPHQGRFCPDLFVPSVVF

SEQ ID NO: 939633 - protein, 98 aa, Homo sapiens
GLRGKQHSLFKGLGKAKKEAPPMEKPEVVKTPLRDMFFLPKMVGSMVGVSNGKPFNQVEIKPEMFGPYLGEFSFPSKPVKHGRPGIGAPPSSRFFPFK

SEQ ID NO: 939634 - protein, 153 aa, Homo sapiens
  misc_feature (15)..(15): Xaa can be any naturally occurring amino acid
  misc_feature (27)..(27): Xaa can be any naturally occurring amino acid
GKGPIPGPGKPLPPXGGLFGKPGKFFXKKKGPGWAPFPCPRGGPPPFKGPSRGGAPPPKFPQNLGGKGPAWSPPVWGPPFFLKNPGPWGDFKGPRPPLGPPPPPPSLGGGGGVKKTPPPPFPKKGGGGPRVPLGVQKPGKVGGPVFPFLKGGR

SEQ ID NO: 939635 - protein, 100 aa, Homo sapiens
PPPPRPPGPMGFFGREGEGAPFPNPPPPRGWRFFFSPGPPGFPPWKRAVGAPPFFLVWSPLWPPPLFPFFFPVVFFLGFLGGYPFPPGTPFSFFWIWARG

SEQ ID NO: 939636 - protein, 128 aa, Homo sapiens
FQNWKFTWMSSWPRKIHKPGPPGSKKFWFIVSNPQRPFFLACWTKSGGCKNLAPPQKNEGPPPRKTGGPPGQFLPPTLVKKTKPGGPSARPGAINRAPWAPGPGVFSPPPPVFPFWGFFLFLEMMGLF

SEQ ID NO: 939637 - protein, 34 aa, Homo sapiens
TKLVLFHKMFRDRQWLVLGQQLSNVATGIFVVLL

SEQ ID NO: 939638 - protein, 111 aa, Homo sapiens
QAPPEGGGGLLVRSLGRSQGGGGPRGAGARGLFFSLGGSGDHFWPPFWEGGGGLGGPVFLGPRVPAPGAGDLFFQGWGAGGGFGPPGGGGVGGGFFFGPPPPSPFRVNFPG

SEQ ID NO: 939639 - protein, 118 aa, Homo sapiens
GPFWGAPPRPPPGEFPTRVGPFFFPPPPGGWGPRGYFFFFLKKGFFPFAPAGFFFPPPHHSPSPPPPQGLVSGVGPPGPPPLIFYPFFGPRVGFPFGLTLYGGFKKLKGGPFFCPGVG

SEQ ID NO: 939640 - protein, 138 aa, Homo sapiens
  misc_feature (17)..(17): Xaa can be any naturally occurring amino acid
  misc_feature (20)..(20): Xaa can be any naturally occurring amino acid
  misc_feature (37)..(37): Xaa can be any naturally occurring amino acid
  misc_feature (41)..(41): Xaa can be any naturally occurring amino acid
GVGGGGVRGAGVLGGVXSVXLWCAGGGGVSGVRLGGXCGGXGPWDGGGRAGVAQGGGGVGVRGVGGARVSGVCQGGGLGIGGGGGVGFRGPGGWGRWGACARRGREPACGGGSAVRGVHLSPILLLSLNPGIITGVSS

SEQ ID NO: 939641 - protein, 123 aa, Homo sapiens
  misc_feature (20)..(20): Xaa can be any naturally occurring amino acid
VGSPPNVLTNTPAELQFSLXLTTCRRLPEAIEEVKNGGWTSWKPLWLCGYGLPQSPVGIIGVGGIGEAPPGPLARPGFHRVVCIPGPPCLKAEKTPMLSGPFACSKDIFNEGYSFVKPRQIHK

SEQ ID NO: 939642 - protein, 54 aa, Homo sapiens
QNGPVDGQGDNPGPQGVEQGTDPAGPSDSDKKLPEMDIDCIPPLVFIKTDYYKA

SEQ ID NO: 939643 - protein, 101 aa, Homo sapiens
IPFGNRKRGVLGKGPWGPPPPPWVGSPVAIGPFPWAPPHRLGARPPARLGFSPNPLLWGGERGGGGGARPPPRALGGARPPGVFPSPGGFSPAPLFKSNPD

SEQ ID NO: 939644 - protein, 123 aa, Homo sapiens
MGLSAPSCLSKCDRAGPKPGCTLLDWDNLLSLGKSAEGPKLLRGLRLVPPPKIVRFLPLPARVSGPRSIENTPPMARWKGLLVPASNCPPWCSWPGQPPGLGTGQAGPGRGLSLGGNKSSPTP

SEQ ID NO: 939645 - protein, 123 aa, Homo sapiens
  misc_feature (18)..(18): Xaa can be any naturally occurring amino acid
  misc_feature (51)..(51): Xaa can be any naturally occurring amino acid
  misc_feature (65)..(65): Xaa can be any naturally occurring amino acid
  misc_feature (100)..(100): Xaa can be any naturally occurring amino acid
  misc_feature (122)..(122): Xaa can be any naturally occurring amino acid
GGTKWASPPCPLQGAGPXGFWVGPLIPAPQGTGIVSAPVPKKLLMMGGIDXCYPSARGCTAPLGXFAKAPFDAIFKTYRYLTPALWKETVFPQFPYQEFXDPLVKTPPKVSGQRTQAPTGGXT

SEQ ID NO: 939646 - protein, 119 aa, Homo sapiens
  misc_feature (18)..(18): Xaa can be any naturally occurring amino acid
MGFKTVLPFTALGFGQDXALAVLKNRFHPNITLEAAQGLLVETVPPGFLGDLGSGGNVDACVIPKTGAQLFRTLGSPPKPVKRFGRSPFVPGTPAVLTPPVKPLTLGLVEETVPAMEVG

SEQ ID NO: 939647 - protein, 88 aa, Homo sapiens
PPPQGFLPVFSPPRGGEGPPWGWAPPPPPWGPPPPPGGGGAPGGGAPPQIGALYPKGGPPGSGFFFFFPVFFYPLSPPLKKVFFFPPP

SEQ ID NO: 939648 - protein, 70 aa, Homo sapiens
AFPFNPRFNENNRGVLVCHTKLDYNWGREKKPSVFPFESGEPFKIQGLVEPGPFKGAVNDGPLLQDHPRV

SEQ ID NO: 939649 - protein, 105 aa, Homo sapiens
  misc_feature (6)..(6): Xaa can be any naturally occurring amino acid
  misc_feature (18)..(18): Xaa can be any naturally occurring amino acid
  misc_feature (24)..(24): Xaa can be any naturally occurring amino acid
  misc_feature (77)..(77): Xaa can be any naturally occurring amino acid
  misc_feature (83)..(83): Xaa can be any naturally occurring amino acid
FAKSIXLLGGFVLYGEVXNGFVMXKGCVVGTKKRVLPLRKSLVVLTKRRALEKIGLKFIDPTSKFGHGRFHLMEYTXAFLRPXPPHPLPHQGRKSSGPSLQLIFH

SEQ ID NO: 939650 - protein, 62 aa, Homo sapiens
VPMFQIAIKSGPSIPTGAGVETQKQVRDNVVSVGTINQPLSVVVENQQYNLRADAGIPSVVF

SEQ ID NO: 939651 - protein, 41 aa, Homo sapiens
MGLSDERTILTLSEQLKCEPGNKLTLHVQLDLGEVVPQPVC

SEQ ID NO: 939652 - protein, 141 aa, Homo sapiens
  misc_feature (30)..(30): Xaa can be any naturally occurring amino acid
WLSQYGPKAKAQSKQWLSRGGSGPVKPKPXWWRAKVTPTGFGNAQALLLVALLEGQGVITSAYYENVLRKLAQVLAENPWGGFPWRVFFPRAIFFITQGQFCKGFDEKSLGIPLPVPIWPLLTFFCFLILKICRGPPFFFV

SEQ ID NO: 939653 - protein, 30 aa, Homo sapiens
INLISMLRKSLCENSLGPFSGCSYPFCRLL

SEQ ID NO: 939654 - protein, 74 aa, Homo sapiens
TGPKMWFKILPGLSVMGVCLLIPGLGTGYIPRFPNGGKEKRVAPFGYPWSLMEKDRGIFGVDRFYVSKGLENLD

SEQ ID NO: 939655 - protein, 117 aa, Homo sapiens
GEPPGPFPPGFLKIPGPLFFAPPWFWGPPKNQAPFAPWVPGVFGPPPPGGGGVFFLPPFFLGRGSPPFFPPDPPTPFGKSCPPGPPGPPPPFPGGPLKKLVGRSWARFFFFFFLNPP

SEQ ID NO: 939656 - protein, 109 aa, Homo sapiens
LIQAAQLLQVKKKTDDDAEALCFMGNALTTAQIVKVLNLYTPVNEFEEKVFGSVIRTIQMGLRDRKDSPQLVMDGKHIFPVTFPFNPFSLALETIQIPASLGLGFISRV

SEQ ID NO: 939657 - protein, 130 aa, Homo sapiens
  misc_feature (1)..(1): Xaa can be any naturally occurring amino acid
XGTPRFLHRVKGALGVPPVTLAPTRGGEPPPLGLEPGWARAHPRGGAPLERVSGGVGGPGAPPASPGPVGPPPLPGASWYPSPPGGGVVWGRAPFVLAVFPSPFLKVFFLGDPLFKLGFFSWVYPLVLFL

SEQ ID NO: 939658 - protein, 185 aa, Homo sapiens
PHQNLTKLPPLGMPPGHFSHDAWEPGFTCRFGCICSDYFHVLPLSNHFDWLDNRASRRQNPLDPSNVWGADPNFNPVEGFSDRPGSLPGFAASLSLGQYLIKVRPSSETGGLGGRLNHAEFSQIPLLVFPPPPDPFVEFLNRQRFPGFNRLVIFRFYPLFPPLGVFELKGFYSLFWSAGDGEIPI

SEQ ID NO: 939659 - protein, 51 aa, Homo sapiens
SLVNLDLQASYTYLFLGFYFGRDDVALEGVNPFFRELAEEKREGYERFLKM

SEQ ID NO: 939660 - protein, 45 aa, Homo sapiens
WSLFRFRSRPQYRFRFRSRPQYRFRCRPQSLSWNQSQPPIKPPPP

SEQ ID NO: 939661 - protein, 61 aa, Homo sapiens
VYLYCQPSSMQRSIVWERVEETPKSRSDILAEPSEALAVALPHHDRAHEDLDGADIGQRYL

SEQ ID NO: 939662 - protein, 70 aa, Homo sapiens
  misc_feature (56)..(56): Xaa can be any naturally occurring amino acid
GLGGRGKAKRVFEEKGGDKRAREEFGAKARGVFEGQEGFRGAKGGGGAPKPQGKKXKFEKLLSLGFPFSI

SEQ ID NO: 939663 - protein, 120 aa, Homo sapiens
VCPFRRGLFQSAQSLPWTRGKAMSFLPQPLPVPVYISGERPRGLPARHPAGCQPGLHGALGLGSLRLPPAGLGMRGSARARATAATRVAGGAEVRPCWKSGCGKKGQVRGAEGRSPSGSP

SEQ ID NO: 939664 - protein, 72 aa, Homo sapiens
PRPFCKKCGKPPPHKVTQSKKGKVFLYAQGKRGYYRKQSGYGGPTNPFFRKKAKTPKKIVFKAWGGWAPLQI

SEQ ID NO: 939665 - protein, 73 aa, Homo sapiens
EAQREFERGASGPEVLWYPVHPPQLLARVLSPSLPRASGTSRLLQVRGLVSPAELELVLAHECHAPLPPPQKK

SEQ ID NO: 939666 - protein, 103 aa, Homo sapiens
GGPPPPGGGGGPPPLFGGKTPPLPPPREGGAPPRGGGGGGAPPAFPPVFFFFFLGGGGAPGGPFFPPPFFFFFFFFFPPPPGGGGFFVFFPVFFFFLIFFFPP

SEQ ID NO: 939667 - protein, 125 aa, Homo sapiens
  misc_feature (5)..(5): Xaa can be any naturally occurring amino acid
PWRDXGGPSVDLSITEGGGKRNKICGRHSLYVDFSDVGWNDWIVAPAGYQAFYCHGDCSFRWGEHLGCSRDGSVQTLVSSVDSGIAKACCVGSEVSAMSMLELDEYDKVVLKNDREMVVEGCGCR

SEQ ID NO: 939668 - protein, 113 aa, Homo sapiens
  misc_feature (28)..(28): Xaa can be any naturally occurring amino acid
DTAVREGFEETGIKSEFRAVLSIRQQHXNPGAFGKADMYIICRLKPYSFPINFCQEEWLKCGWMGFNGLAKTENSTPLPSRGGRLLLYGDKKGFGKIGLAVEELPAVYPGLFY

SEQ ID NO: 939669 - protein, 41 aa, Homo sapiens
QRSAVFISRGSVVPPPIPLDVPSLTTPSVVFQQQYSSSRRP

SEQ ID NO: 939670 - protein, 90 aa, Homo sapiens
PPGFSLFASGLDVGGDWGRVTISPRGPVWPGFGFYTPPLRGFGPPGPKFGPGGSPKSPPPAAASQKPAPEKKPAGKNPPPRGKKPGGLTF

SEQ ID NO: 939671 - protein, 79 aa, Homo sapiens
IAKMVRDALDAHQQSIPAVLEIPPKGPPYDAAKVSLLGRARGMFPAEDLRWGLLIALSPSLVSRPLPRVALSLFYFLSL

SEQ ID NO: 939672 - protein, 106 aa, Homo sapiens
  misc_feature (19)..(19): Xaa can be any naturally occurring amino acid
GAPPRGAPGPQKRALGFQXPSPPGAMGGMPPGVLQAGVGKGLAPGWPGGLPNPGGGGGPRPPFLPPALKGGGGPFPPWDFPPGRGFPGVLFGFPKAPPFNPNGFSP

SEQ ID NO: 939673 - protein, 129 aa, Homo sapiens
GSGTRWGLGLAPSPPTVFSRRMGLLVKTQIFWGEKKSPGVGLNPGVVVPVFQPRKKDLSLKGKPLGLVQIQGVLFRQPPPFKTRDSGNFWGGFLVLKKGLVRRVVNKVLRFPGSRKKMPDGPLGPLGVF

SEQ ID NO: 939674 - protein, 114 aa, Homo sapiens
RGPMAVMLCWFPRDALTNYPKPGGLKQQNLIPLQFWRLEIWDGGVGRAVVPLKALGKNPSLALFSLWRQWAVRGIPQLIGASLQFLFFLFFPFLTTVIGFRAPPNPGWFFFDPY

SEQ ID NO: 939675 - protein, 84 aa, Homo sapiens
GSAAVLQRRSENEEFVKVGRLGPSDYFGEIALLMNCPRAAPVVARGPLKCVKLGRPRFERVFGPWSDILQRNIQQATRFVSLSV

SEQ ID NO: 939676 - protein, 96 aa, Homo sapiens
  misc_feature (18)..(18): Xaa can be any naturally occurring amino acid
RASPVAALKAKVIQKLEXVSKPPAYAYPATPSSHPTSPPPASPPPTPGITRKEEAPENVVEKKDLELEKEAPSPFQALFSDIPPRYPFQALPPHYG

SEQ ID NO: 939677 - protein, 103 aa, Homo sapiens
  misc_feature (28)..(28): Xaa can be any naturally occurring amino acid
AFVEKTKGPWGPPALFRTHGEKKRRPLXALKNGLRRAPSGGQRLALLKAKTPQRCLGFPIFFFNPKKVLIYNSLFIKVAPTIRIIPGWALGFFPPWEKTLKPG

SEQ ID NO: 939678 - protein, 133 aa, Homo sapiens
QSNVLATGGGPSDRHICIWNVCSGACLSAVDAHSQVWSILWFPHYKEVISGHGFAQNQLVIWKDPTMAKVGELKGPPSRVLSLAMSPDGAPVASAAADETLRVWRCFELGPGRRREREKASAAKSSLIPQGIR

SEQ ID NO: 939679 - protein, 101 aa, Homo sapiens
NLILKKGPAHLWFRIKFLPPGFGGKKKILNPPWVGRGPPPPPPPLFPKRLKPGFRAGFNRFFFWEKIPFFAPRVENPVNPRPGFGFFSLNPFFFMDGAQLI

SEQ ID NO: 939680 - protein, 108 aa, Homo sapiens
LGLLPPPRGVGLPKKKGSGKGGPKWGKLKGFRPGWIPLRGFFCLGPHPLLGQGGPPLSDMGGPRFRPLFPGPPWAGPPGVGPPPPGPPWGPPPLGAFGPPLWGGEFFF

SEQ ID NO: 939681 - protein, 66 aa, Homo sapiens
YASGTRFFLRQVRQGLCRPGWSAVARSISAPCSLRLPGSGDPPASTPSSPTTTTVARTTGVRHYPD

SEQ ID NO: 939682 - protein, 30 aa, Homo sapiens
RYDFFFFHLSHFFLLCYFYYFVFTPFCRLL

SEQ ID NO: 939683 - protein, 39 aa, Homo sapiens
AGQKEPLLLFMIGDNDSLAKCHGSRCSLVSSFYPLLSSS

SEQ ID NO: 939684 - protein, 138 aa, Homo sapiens
QIGGGVAAGVAGEGFDQHHGEHDYARDQQKPEDPGKSHPAHTKAFIIKGDSLSLVVHGQAVPDRGLSGAVQCRWFQALADWPEFCQVCQPAVAALELDDVVPGPAQGAGRDGVPHAGLAVAHDSAFGRKLIQVPHGAA

SEQ ID NO: 939685 - protein, 134 aa, Homo sapiens
  misc_feature (24)..(24): Xaa can be any naturally occurring amino acid
MRERTAVQGQYLTVEQLTLDFNMXTLPSSRPPPLCVYHVSIFSSSMSSSFLEVGPGCNQSPINHLLNATGIRVVQSGGAPPTTDTITPVLKVAMVHSLHGSTMQVSVEWIELGHMSVHPQSMELVQPYVREHGH

SEQ ID NO: 939686 - protein, 115 aa, Homo sapiens
MGVFFSPPFLARGGFFFSPPPKTGERIAPPCPGSPPFNPGENGGGGGSQTQGPFFGFPFAPRGVFFFFFFSRVGGAFPGAGLAPGVVFFPPPFLFFSGFPFSRGFPGQKKKFFFF

SEQ ID NO: 939687 - protein, 107 aa, Homo sapiens
FVGPPPPPPALLYSSRSGFSLLFFATFYSKLCCGPAVGLGLAKRIPMEPPFFFSVPPLCRALCPPSPFPPLVFIFKAGVCQGAGCQIDSFFNWAVFLNVIKPFCLRG

SEQ ID NO: 939688 - protein, 45 aa, Homo sapiens
MAYRTQTDFSPLPMLSLFLLSIMLGVHFDYVLSAKMYNKGSVLYK

SEQ ID NO: 939689 - protein, 109 aa, Homo sapiens
ARKAVLKGVLSHIKMKVRTSQAFRRPKTLSLRSQLEYPGKSAPGRVKLVTSAIIKFALSTECAMKKIEDGSTLVFSVDVKATWHQIKRAVKYLYGIHVGKVSALIGPDG

SEQ ID NO: 939690 - protein, 145 aa, Homo sapiens
RKKPSSEGGFLQNGVIKAPVRKMLHLPPVFTKSRTFQRWSPPGSFFWGGGSLFCPPNLQGVFWGPPFCFPKKLFSSSWGYPLGGGGCLPKPRGAKTGACFRPGFFPPPFFRVALGEGGTPKLGFGFFFRGFLLGRGGGFFFNRWA

SEQ ID NO: 939691 - protein, 134 aa, Homo sapiens
  misc_feature (47)..(47): Xaa can be any naturally occurring amino acid
EGGWQYLILQSINKTCSHYECAFLGGLKTENCIENLEYFQPIYVYNXGEKNQKLEDHSEKNWKLEDHGEKNQKLEDHGVKILEPTQIPAPGPVPVPGSQKPSFCILGQTAASTVWDGHHFNQCFCYKSLCCSVV

SEQ ID NO: 939692 - protein, 101 aa, Homo sapiens
PFPPSGFPFPGSVQDPGLHVWRVEKLKPGPVGQKNQGVFFSGGSYLVLPNGPKKVSPLPLWIGQQSSRDEQGACSVLAVPLNPLLGERPVQPREGPPADVQ

SEQ ID NO: 939693 - protein, 108 aa, Homo sapiens
MALPFLPRRAPYHVLTDTVGVLCVILHLRRDVIMHNSKVLIPEYLNFITLHADSQISLSYLGSLCVTALLTQLCCRLSAIRAAMTGTDLRVIYRDLLSTSTGGASSNI

SEQ ID NO: 939694 - protein, 120 aa, Homo sapiens
AAGCLLFDQNDKVMRQNLVYYQTPGTRGAFQMSTSSPDLKQFSSLMWPHSRRSCMTSNDPSALASPSAGITGVSPHALASFSPLHLSFYPHICFHPFIPVFLMFTLVFPMFIAAFFTILV

SEQ ID NO: 939695 - protein, 114 aa, Homo sapiens
  misc_feature (8)..(8): Xaa can be any naturally occurring amino acid
  misc_feature (14)..(14): Xaa can be any naturally occurring amino acid
KGGRAVLXVFKGFXGFPPPFAKKKGMGVPSAPKVGGLKPPKKFAYLGGLAPEVGWKFPAVPPPLGGKRKEKAQIPSRKKKPVLGVREPAEKNVGKKIAQFPGVLQTPGLLVWAP

SEQ ID NO: 939696 - protein, 68 aa, Homo sapiens
LATDKMTPFVDFIETLLNEQVKPSKIGCPRANVRKMGAAESGLAEYLFDKRTLGDSDNERYSLGLISP

SEQ ID NO: 939697 - protein, 33 aa, Homo sapiens
MQGGNGNANNTGDHGRHTAEGSSTIIATLLSSS

SEQ ID NO: 939698 - protein, 40 aa, Homo sapiens
GRANRTCITCYDSSLWFLARMLVAHGMHYRMQLLSPSVVF

SEQ ID NO: 939699 - protein, 39 aa, Homo sapiens
GTADRTCITCYDQQHCVLAEDLCTGCILGCSTYPLLSSS

SEQ ID NO: 939700 - protein, 160 aa, Homo sapiens
GRGEDPELHGHTAHTRGRATLPDHSHRARRAHRARDVVEELVGGGVPASSSLGARQAGRHPRAVLSGDKARGLVAWPRSGWGSPAPRWPHPRPAHLFPFSEGFLEKEARSLLGAWGTQWLFPMARVVQVGKSGSLSTASCPRLPRAGGAPGRPARHQGLE

SEQ ID NO: 939701 - protein, 112 aa, Homo sapiens
LFRLNIVLFRALLYSCLFRLNIVLFRALLYFCLFRLNIVLFRALLYFCLFRLNIVLFRALLYFCLFRLNIVLFRALLYFCLFRLNIVLFRALLYFCLFRLNIVLFRALLSSS

SEQ ID NO: 939702 - protein, 85 aa, Homo sapiens
NMLGLMHGTCPETSGGLLICLPREQAARFCAKIKSPKYGEGPQAWIIGIVEKGTRPARIIDKPRIIEVAPQVAPQNVNPPPGAPF

SEQ ID NO: 939703 - protein, 30 aa, Homo sapiens
MTYNILYHSSHTYKKEMFKDLPILPFCRLL

SEQ ID NO: 939704 - protein, 66 aa, Homo sapiens
GFSEKAFLVPAYTEQSQIKGYVWRSAVGFLFWVIVLTSWITIFQIYRPRWGALGDYLSFPIPLGTP

SEQ ID NO: 939705 - protein, 131 aa, Homo sapiens
LGFIEWATGPNPKKFWAQGFRPPFLRGPRPPGWLQGVENLGVVSVLGPQEVSPKNDWGRCWRRSVDKMGKCGNPQSPFSGSPASKTDKWVRGPQTWLPPLLCGKRATTVPDGYFFLSPNPFGTQVNPMHVG

SEQ ID NO: 939706 - protein, 56 aa, Homo sapiens
  misc_feature (37)..(37): Xaa can be any naturally occurring amino acid
TGPNGPLVAWGPNPWASWALALAFGDLLGCEGKGRVXIKELGIFNGINKTYKFILG

SEQ ID NO: 939707 - protein, 33 aa, Homo sapiens
EIGYCYVAWAGMQWLLPDTIIGQCSLLGSSDPS

SEQ ID NO: 939708 - protein, 56 aa, Homo sapiens
SSKSHARENRCCSCWEQNPAFRGNGYFTTKAGCGPFGDRLGPSQNVRLQCGENAPA

SEQ ID NO: 939709 - protein, 84 aa, Homo sapiens
PELFSRKDLGSTEDGDGTYDFLTDKKDEKAEPPKKKAPYEGRKKTTVYRGLVQKRGKKQLGSLKKKFKSHPRKPKSFSSCKQSG

SEQ ID NO: 939710 - protein, 35 aa, Homo sapiens
ESDRSKRPLKTIYDLPGCSLTRSSWHRGKLASSRK

SEQ ID NO: 939711 - protein, 67 aa, Homo sapiens
TPISDRVWAGGSFFPTNGTPGAPTFPRAPERPLLICRFWSKSVQEARTQLPSGVQFNWSPVEKPVFL

SEQ ID NO: 939712 - protein, 63 aa, Homo sapiens
  misc_feature (17)..(17): Xaa can be any naturally occurring amino acid
  misc_feature (31)..(31): Xaa can be any naturally occurring amino acid
  misc_feature (39)..(39): Xaa can be any naturally occurring amino acid
  misc_feature (61)..(61): Xaa can be any naturally occurring amino acid
RLQNQLQGALYAVGLLXHAAGSGFHPSVLDXGGGQYLIXGFHNAHVVSQGLLRANLTSWVXGQ

SEQ ID NO: 939713 - protein, 158 aa, Homo sapiens
RILRSVMAIIRMLVVDPVDRSKGLGHALTSECFARARRDRCRTIALHTSPIMTVALPMYLKMGFSKVHDAPPIHGVPYAVYTKVLLIPMPFLLVDFPVFDPVALALGPIVIRWYALAYIVGIVLGWVYARSLIKKERLWGGEVPITLPQLDDFILWVT

SEQ ID NO: 939714 - protein, 154 aa, Homo sapiens
TNLSVTLDWPVPDISHERNHAIYVVLVSGFSLSIMFPRFISTSLFFITKLYSTVLIYNWFSLFLGVLFCKVTANIELANIEPLPLQEIELGSCKPLVTFLPTDRYVILFYVYFCLKTTNLIYNVSIYLYTYVHMYICIICAYIYSWFINIEVMA

SEQ ID NO: 939715 - protein, 198 aa, Homo sapiens
  misc_feature (18)..(18): Xaa can be any naturally occurring amino acid
  misc_feature (24)..(24): Xaa can be any naturally occurring amino acid
  misc_feature (69)..(69): Xaa can be any naturally occurring amino acid
GLIMEQVKVQIPVANARXLLQKDXGKVFPEVYKETWGLPGNSEQKCIPMCMDRYMDAWNTVFCAYNLRXQRERTNMFPARAGHPPLLFSITVFKRGGPHVRTACPGLKRVAPVLGHTGMCPCPPPPCPLPTSAAWISGVWGPVPSLSAGSPVAPPSGLWGIPLVGPSQPHILGGQLVWTLELGVVKPPRSCPLLRMGK

SEQ ID NO: 939716 - protein, 76 aa, Homo sapiens
WNLPWGFGVLAGARTLVRGPMDLTCQGNFNVAVPFPDAKGCRRVLLALPPPCDKIGASDSGLLPGQEGNALSQTSL

SEQ ID NO: 939717 - protein, 59 aa, Homo sapiens
REPKAKIAKWDSPNLKSFCIVTEPITPVKSHRPDWEKILPIHPLVKGLIFKFYEDLNLP

SEQ ID NO: 939718 - protein, 105 aa, Homo sapiens
VFWFRLFPTTRGGEGRPGHGFSPGPGQFWGPGPPALVGSAPVPAPPRPAGPYFFWGPSWAPCRGVAQVPPAMGLLIVRPRRGVLVPPGGAGGFFDPGFFLRGLPP

SEQ ID NO: 939719 - protein, 38 aa, Homo sapiens
RNDFLAFSSSMGDTPSSSTSWISSKVTGRVLKRDWRGR

SEQ ID NO: 939720 - protein, 131 aa, Homo sapiens
QCPIRVVEPNFACEQNSTSVRPKAERFLPPPFRPRVVIGKGGPGGIRGGKGGLMDCGGPGGMFKGGPGGTKGGFRGGRGMDQGGFGGGKQGGPGGPPGPFMDQMGGKKGGRGGPGKMDKGEPRQERRDRPF

SEQ ID NO: 939721 - protein, 111 aa, Homo sapiens
LALFGGPFDPVCSKNRVGPGPDFPGFFSPPGPRGGGVFGFSRIPPFFFFCWPPPPVFFFFSFSGPPFFGFWVFFVGSLIFGGAFFVFFLVWRPFWGIFLGVPFKGLGTRKL

SEQ ID NO: 939722 - protein, 124 aa, Homo sapiens
  misc_feature (14)..(14): Xaa can be any naturally occurring amino acid
ENFIFMGDFNAGCXKVPKKAWKNIRLRTDPRFVWLIGDQKDPPVKKSPHCAYDRIVLKGQEIVSFVVPKSNSVFDFQKAYKLTEKEALDVSGPFPVEFKLQFSRAFPHSKKFVPLRKKTKSQRS

SEQ ID NO: 939723 - protein, 122 aa, Homo sapiens
QRGLAQDPQGFHPQARLTASIAHPKLGKRACARISKGLRLFRPKAKAQAKAKGQTKAQGAAPASVSGQASQQYPGPFKGFRVDIFAHIRAEGLVRPPPPAPGVPFAWGWGPPVLFVQINLRP

SEQ ID NO: 939724 - protein, 73 aa, Homo sapiens
NGILNGKIGNGVGFNHVNSRVPEEPSRTPPEIFREEVGAGGGGWWSPYKNFSFRDPIEVFKRPPIKNRGPFGG

SEQ ID NO: 939725 - protein, 118 aa, Homo sapiens
TPKKLYLVLDYVNGGKLFFHLQRERRFLEPRARFYAVEVARAIGYLHSLNIIYSEACLWVKARTKPFLLQQLGVGGTLNPDEILGDLVLCFGGGWSFLLRGPRAQPFWGFLLHFWQPP

SEQ ID NO: 939726 - protein, 171 aa, Homo sapiens
MPVYSPPHKAPPAARSHPGFLNNVNQSKWFSITLLELGLPIPPTPNSSLIATLALPKATGTRRQLAHPAAAQPGPPPPLTCQAQLDGPVPPASGVRHVPGGGGGGGGGRHGGDGEARRSHHSGRGWGPSSRRLGRHGRRVPDVPRVVAMSRGGSGTPSSPLLPLLLPRPGP

SEQ ID NO: 939727 - protein, 130 aa, Homo sapiens
ALKPEEKVEDCEEVQISPELLAHGRQKKLDLLNEGSARDLPSFQRIGPKKAQLIVGWGELPGPFNQVTAPWIGGGRGRGKPGTPKTLSPIILSPQVEDLERVEGITGKQMESFLKANILGFPPGQRCGAS

SEQ ID NO: 939728 - protein, 97 aa, Homo sapiens
SPPLGARVGFRDRPSGPAPKRGGMAFASPFATIQLLIRPKTAAHRSARTWFGGPPGDLGPPRASGGVVWSPLRAREGDGFYGPSLVFSPPFKFGLKL

SEQ ID NO: 939729 - protein, 39 aa, Homo sapiens
ENEPSQRAALPINSTLSYRKQRPGRPRRLSNDDPSSHAI

SEQ ID NO: 939730 - protein, 82 aa, Homo sapiens
KKKSPLFLRTVSFVGIFAGGQGFPPILQVFRALMKGPYDPLVGPLFFANQTEKGFLLGPELGELRNKLFARFKFWDPLGKAP

SEQ ID NO: 939731 - protein, 134 aa, Homo sapiens
  misc_feature (21)..(21): Xaa can be any naturally occurring amino acid
GERKPASSYVGPPINKNARAXFSSIRHMIRKNKFRPDLGMVELGFGDQAWGDWPVLWGRASPYWLQYGVERDGFLLSAYSPPPALAKGAACGGYGVSPVLFPRPQAAIRRARAILGSQKPVMVKRKRARPPKSS

SEQ ID NO: 939732 - protein, 109 aa, Homo sapiens
  misc_feature (98)..(98): Xaa can be any naturally occurring amino acid
VPNGVPLGRTHQKLGIAPSPKMGFGKVKIPKPFFGGFFKKKKLGEPPPQEGGFFAPEKEKFGFSGRGKFVQKAGGSQIFPKIKGFPRVQGSLGFGFVXTKGIYPPKWGF

SEQ ID NO: 939733 - protein, 117 aa, Homo sapiens
RAPRSLSPRLPPSAPGASSSHGNGASVPSLRSFPLGPKPHFPLELVLFEVFVSPWLPGLFPANLPPQAFFFSFPYPWYPVLFPAPGGVGPKPSGMLSGPLLGLGRTPPPLLRCCLGG

SEQ ID NO: 939734 - protein, 121 aa, Homo sapiens
GKNFGFWVGYSSRAGTPNMFREYRGLTPAGAVTQCFRDMGARPRGRAPSLQFIKVEEIPAPKCPRPAVKQFPDSQIKFPLPPRVLGRQPKPRFPPQGPPPFFLGPGPRPGGPPINSGTPRL

SEQ ID NO: 939735 - protein, 85 aa, Homo sapiens
PFFPFARQEGRKGSLRVHGFKELGSPPVPPLVKGGGSFDEKMKGLDVNPGSGVQVHEDWGLVGGLGQGIREKKGLKVREKVNRLG

SEQ ID NO: 939736 - protein, 96 aa, Homo sapiens
LAVERGLGPWFRLCLVVWLRGRGKKAGRPSLQPSASNPLWSIRVDAVVVRPPRSLPRQPGVVLGFPVPNAALLGFKFFISRSLFMPMPKINDAPEL

SEQ ID NO: 939737 - protein, 125 aa, Homo sapiens
  misc_feature (3)..(3): Xaa can be any naturally occurring amino acid
VLXFPVTFSGLASPVGGGYSGTGPGFWGLEGRGPFALGSQGALPAQAGLFWEPLAPRLSLANLGGCVPPARPSCGLPRSPCSLLPRFEGRVCGPFLPSCPCPFLPVAFPCYPRLLAPSFYKEGPS

SEQ ID NO: 939738 - protein, 64 aa, Homo sapiens
GPSPEGPCKPFSSCSSPAFTPKPSCPPKKPLRLAEPPCFPRGVDLAQLGPQGPPMELNSPGPPP

SEQ ID NO: 939739 - protein, 118 aa, Homo sapiens
LFGRHRLKGPPEMWWSQWLFCHLEKVSLAQLERKWWSVVEEQWVQGQFWSIEILNASTIISMQGETLHVFVHGIHRGIFSVGVILTKSMSELTPSRQNPYPPFSSYPPPPASLPGFPL

SEQ ID NO: 939740 - protein, 104 aa, Homo sapiens
LVFLQFPSPLFAPLNFVMEKVESILPSSFWPQLTRVLEKPCSPLTSPAAAPISFVPTPCGPQKSIAFKKGSPSEIFKCSWAFPFLKLFFLSKIPLCSVFFFFAF

SEQ ID NO: 939741 - protein, 118 aa, Homo sapiens
QSSVRSEGERRLPRRGVFFKIGDTTASCVCDAQYAPGYAIVWVISEVVTPRFLCSGGVSPYAVPNACRGDSGGPLIVHYRSRFVRVGVICWGVVDVCEASSGLSRFLLTPGSFSSASF

SEQ ID NO: 939742 - protein, 110 aa, Homo sapiens
  misc_feature (11)..(11): Xaa can be any naturally occurring amino acid
ALGLAGAQLGXGPGFLETRWPPRGALGPAGQLVGCWGFWLGPGGSRFWSRAAGWGVVFIAGGGGAAPLGQSPGFWGPWVGFPLRGGWGGGRGWDDGRFPYWGPLTWSSPG

SEQ ID NO: 939743 - protein, 112 aa, Homo sapiens
  misc_feature (11)..(11): Xaa can be any naturally occurring amino acid
CKGTGPFGFVXVRLIPAPKGTGIVSAPVPEKLLMMGGIDDWSPSGRGCPAPLGNFAQAPFYALFKTFSYLTPGLWKEAGFPQFPYPEFPGPLVQTPPRVSVQRAPGPAVGST

SEQ ID NO: 939744 - protein, 108 aa, Homo sapiens
  misc_feature (14)..(14): Xaa can be any naturally occurring amino acid
KESNNINISIKKPXQNPIQRSPASKIKGDKSTTMKKKQHNNAETSKNKNASSPPSDHKSSPARAQKCMQNEFDELTEVGFRTWVIKNSSKLKKCVLNQCKEGVKTRLE

SEQ ID NO: 939745 - protein, 93 aa, Homo sapiens
QGYYPAIHSPFHSPSCPKQGMFAPFPFPCFCHTTLSGGLSIYPGYMSPHAGYPAGGLLRSQVPPFDSHEVAEVGFSSHDDEDKADDVIEVPGK

SEQ ID NO: 939746 - protein, 114 aa, Homo sapiens
LRGPQGGECPPFFSGPQGVFGGPAFHPRSQAPPFFPFVGIIPPPTFGGPHWGGGPMGGPLNLGPPFVGVWGGPPSGPPGHGAPRGGVLVLFLLGFFLGFVFCFFVPPHKFFFFV

SEQ ID NO: 939747 - protein, 120 aa, Homo sapiens
RRSGAGWRGKNNRAARSPRPPDSRLAPLAVPFTPKFCSLKADWVMALQPQAKVCLKDRVTLTLSPLLGFHPGLCFPWGRRWGRFDQGKAVRRGFPPAFFSFEGENPEPSPCPWVPVLEMV

SEQ ID NO: 939748 - protein, 84 aa, Homo sapiens
VEAGMELVGRKSWGGFTHRPELASQAWAEHLHLPERNVSVLFAFAQVGPLGCLLWSKANSLSPWGTTASGVRKRVGFPVSINVD

SEQ ID NO: 939749 - protein, 114 aa, Homo sapiens
  misc_feature (3)..(3): Xaa can be any naturally occurring amino acid
SPXSAPKQASKGRPFSLCSPLAVSKADYGEPKVFAWEVPPWGLGLPVPKSFDQGRVFEGEVPPPGPQFQPGPLPSFGLWPFFPRGPPPFGGLQVFFPLPPLLPLGFYFGNVGGE

SEQ ID NO: 939750 - protein, 119 aa, Homo sapiens
SGLGPPGGDLGWAPALGRGSNKWAPPQGFGPLKGAHFPPPPPKPFGVFPRARGFWPPKRGFPFFLGALVGLAPTPGFWVGPGFFKGALWFPPGPPPFGLVLNPPRGKVFPFFPLKAGPF

SEQ ID NO: 939751 - protein, 99 aa, Homo sapiens
  misc_feature (24)..(24): Xaa can be any naturally occurring amino acid
FSPKAVLVRWLQGLQRLPREKYLXWAFGQGPSQGPPPFVVASILGVAAEDWKKGAPFSCLVGPGALPLAFPQKPFGRLGGKPPHVNVFVVMAEVAGPCF

SEQ ID NO: 939752 - protein, 125 aa, Homo sapiens
MEPDGAYEPGFVGIRFCQECNNMLFPKEGKEDRILLYACRNCDFQQEAGHSCIYVNKITPEVGELTQIIAHVSQDPTLPRAEGHPCQKCGPKEAVFFQSPSARAEDPLGLFFVGTAPPCGPRWTE

SEQ ID NO: 939753 - protein, 122 aa, Homo sapiens
RFPRRPGPPGKAGSSRPRGLAFRGGGPPPWRAPPLRVYESSGVKFRNGPARPKPPRPQSGLPPDKNSRGGLPFIPPLEGAPLLGGGPCNSSESGARPGRPCSLPPPCFGPFFYLHKPPPSPP

SEQ ID NO: 939754 - protein, 116 aa, Homo sapiens
PKFLGVKIYPLPFTSLPRGGPFFPLGPFPFGGPPGGPNFWPWGVGKVGPLSLKPNGSGPRLGLVNGFFFPPPFFFPPSPFPPRAPGGFFLGVPRRVGFFEKIFFPLGFFPWGYGGF

SEQ ID NO: 939755 - protein, 113 aa, Homo sapiens
RQCFRQFRYQNGGGPREAFRQLGEFSPQGLGLAFRPKDQFVEILVQNQLFPFLPKGVGARGFPPRRVGGFLGVTGGVGGGQGGAFCGDWGHVGAGGLELGPPPRVNKKWVLAA

SEQ ID NO: 939756 - protein, 102 aa, Homo sapiens
LSPNFGGPHLRTRVFGPGCGGRGPLGLGVFRGPPWSQPWGKGGPGVFSFAGERGPYPGKTLLFFFGPVSLKREVFWGGAFFFFVFFPPPPFWGRPLIFFWGW

SEQ ID NO: 939757 - protein, 72 aa, Homo sapiens
APPPPGALRALPLVPRAGRGPPGLPKCHPSRAGVGFPPPDLPSPREFSGRVGNENPLGVPPFPFRAFPPSLF

SEQ ID NO: 939758 - protein, 107 aa, Homo sapiens
GGAPLPPGGPPVQGLGQPALGGGAFWALGERRAPKAPLFPPKKGPRGSQVAGVWVFPGSPPGGGAPPPLGGGGGGALSFPLERGPPLMVSPQPPFWGGGFWFKRGVF

SEQ ID NO: 939759 - protein, 111 aa, Homo sapiens
PLVQGEVHPRVAAAPNEDLAGDDENDAEHENTLDNRPNFDGPFAKTAKNPVLTKAFMPFKKWLLYPYCPPRPFKEDLCSNLEKAFVLFSWANFVKKKTGFSVSTKNSKGLE

SEQ ID NO: 939760 - protein, 88 aa, Homo sapiens
FLQRPSRTPPKSRKDQKNHLTQWNISFDEIVNIGSTDAGPGPEPENSSGTIKEILGAAQSVGCNVDGRHPHDIIDDINSGAVEMPNRK

SEQ ID NO: 939761 - protein, 66 aa, Homo sapiens
LSGPMQAALQAAAHASVDIKNVLDFYKQWKEIGVILTPRPCSGADSRFFLPSLAARTSTCIPPTQL

SEQ ID NO: 939762 - protein, 64 aa, Homo sapiens
MTCLWVALCRQAGLSEAPSDVSVGRPVPPGRAIGNTCSNRSALADSPCSGASSWAVQSSSPSPS

SEQ ID NO: 939763 - protein, 220 aa, Homo sapiens
MGRCIHVILQEEFSTSFEQPGFPTTSKSWKKQGKSKDKVAVAECPPSRGVPSLLSSLSRETIGVQPGRGGEEVQGIARAGLSMGKGQRPPGPGHVRATQAWARRGGGARQRPEEGARVPGAARGGARTGPDTQLRATRTHRARAQTPQLRREAARAVSFLFPKFRQSPRSHGQPFQQLRSHWQAPRQGWPAQKGEGGGRPFRREEAGAVTGKGKRTARGT

SEQ ID NO: 939764 - protein, 73 aa, Homo sapiens
FLPPPARVLGPRSIKNPPPLARWKGFLVPAHNCPPWCRWPGQPPGLGAGQAGPGRGLRFGGNKNRPPPQFCLG

SEQ ID NO: 939765 - protein, 54 aa, Homo sapiens
MTQHESTLLLADPCPLTRSQGPQLAFKDPILSTLAGSGVPEYLEGGPHGRIWSS

SEQ ID NO: 939766 - protein, 88 aa, Homo sapiens
PPCGFTTGDSESKGAWLSWWKLSGPISNDRFDEIPPPWGGNVLGPKFVARIAKLEKAKGKELAPKLGKWTLVSFLDIKIIEIIPIFLP

SEQ ID NO: 939767 - protein, 105 aa, Homo sapiens
RLGILGGSMTPSPPDPDLGRCFDMDPARPSCSDLLPWEGVPEPALCGAQLQGAEGWLEAPQLGRGLLSACAPWGGGSPQPGPLGFFFKGLPEKTAPQSIKNWAEP

SEQ ID NO: 939768 - protein, 119 aa, Homo sapiens
GQGPGGGPKRPGPPGPSPPVNPGPSLPKWGFCLKSFFPKNSPRSPWPPPPFRPPFLFPIGYIDPVGVPMGFPAPCWGCFVPVGPSPPRGVSVFGGPLFPFWGKGIRGPPRLSLLIPCFW

SEQ ID NO: 939769 - protein, 85 aa, Homo sapiens
GWVFYPVPPEEKSQWGHPKTGKRKRVAGDFPYGWDQETDENGQVFFVEAEKKMLAYAAFSFCFGSLKGKGPFSCNPVACFPLSIP

SEQ ID NO: 939770 - protein, 78 aa, Homo sapiens
WPPSSSAYLGTVCPEGPCFPSSCGSALYVPLKSFAVYSFGHNIHICEVYQLQKTQLSSRPQLNASLLCKGNACNTIIT

SEQ ID NO: 939771 - protein, 110 aa, Homo sapiens
  misc_feature (14)..(14): Xaa can be any naturally occurring amino acid
RSWPKAAKSFFLAXALQVAVPRRSPRLPGARVASAPPSLRLLRLRVQGATVLKIVPPCPEPPFSSSPVFPEALLRPRRTDEELEIRDGTDGPAVCAPGSESAPPAGSCGR

SEQ ID NO: 939772 - protein, 178 aa, Homo sapiens
  misc_feature (67)..(67): Xaa can be any naturally occurring amino acid
  misc_feature (70)..(70): Xaa can be any naturally occurring amino acid
  misc_feature (72)..(72): Xaa can be any naturally occurring amino acid
  misc_feature (77)..(77): Xaa can be any naturally occurring amino acid
  misc_feature (81)..(81): Xaa can be any naturally occurring amino acid
  misc_feature (108)..(108): Xaa can be any naturally occurring amino acid
  misc_feature (119)..(119): Xaa can be any naturally occurring amino acid
  misc_feature (138)..(138): Xaa can be any naturally occurring amino acid
  misc_feature (176)..(176): Xaa can be any naturally occurring amino acid
ENLPPESPYLYGLHPNAEIGFLTVTSEKLFRTVLEMQPKETDSGAGTGVSREEKVKASAGRTSWRRXPEXFXTWLRXMAKXSGKDTHYVVVALSRDVKEMNSSLTNEXCSLFAHRNAEXWELKEENMTIHRPTVEDLXTASSSYYRHRAIDTVGVGPRTIPTTIDGARRAWGTQTXDR

SEQ ID NO: 939773 - protein, 80 aa, Homo sapiens
CCSDMSNQFGGFFKPVGKKAGGAGKVPKFAPKGQKGKWILSLIPAPPLFISGGRTVSELFVSIGPLSLVVKDWFMITMPC

SEQ ID NO: 939774 - protein, 107 aa, Homo sapiens
GGFCPRPNNLFPYPLRDGPKLSLPLAPPFFGSIHPPNSLPIEARPCIQDGTSSRPSPPPSPGALKGPRPPKVGGRGPPSPALVWGKKLGVGGSPVGRGAFKLKSFPF

SEQ ID NO: 939775 - protein, 109 aa, Homo sapiens
NRITLAIVCSCHWCKAFPALASSTSLSAKNRVIVCVPFLILSHGRIFQKRNLNWVHSLSEEFPLVLELYWGIFCVQGNCFLFADYVTMGLLKHMPPRVKKEPTCFCESS

SEQ ID NO: 939776 - protein, 84 aa, Homo sapiens
  misc_feature (35)..(35): Xaa can be any naturally occurring amino acid
PMIFSSPVLVSVRPSKGLMDKVLSRALPLTSTDFXIPVCFRVNYALLSVTPGGPAEMFPKTGVHGDFRFFLWPLQHGPFPFCGF

SEQ ID NO: 939777 - protein, 86 aa, Homo sapiens
  misc_feature (14)..(14): Xaa can be any naturally occurring amino acid
  misc_feature (25)..(25): Xaa can be any naturally occurring amino acid
GMAAGQKHSSLSRXGSQAKGLLTSXTIGGQAKTLLTSQTGWRPGKGCNFGILGGQNRRLGGGGCNELRSRPCPPAWAPLSPSFSDF

SEQ ID NO: 939778 - protein, 106 aa, Homo sapiens
TVVMRRTEPAAQQTLSPELGAKGASLVEHVWLVFGPPQGTYGGYFLGPEERLPHNHRFYMRRGGSSHLRWHAASWALPSGCRLVHPLFKSFSSPLSFKVCLTFKNI

SEQ ID NO: 939779 - protein, 103 aa, Homo sapiens
VLGRLIPAPRGPGIVSAPVPKKLLMMGGIDDCYPSARGCPAPLGNFAKAPFYALFKTYSYLAPDLWKEAVFPQSPYPGFPGPLVQTPPRVSVQRAQGPAVGTT

SEQ ID NO: 939780 - protein, 54 aa, Homo sapiens
DDEEDDDEDDEEDDDDDDDVIITRLSGELGEGRSVTEEMNQLSNCLNKKTPFLK

SEQ ID NO: 939781 - protein, 76 aa, Homo sapiens
EAPDLLLAEIDLPKLDGALGLSLEIGENRLVMGGPQQLYHLNAYIPLQINFHESKAAFPRKRKQLMVAMPLLPVPF

SEQ ID NO: 939782 - protein, 153 aa, Homo sapiens
KQFDAWVGNNDHQRALWPGIMTLSDEYFSELRASAVPLDNRALLALKGSALALDVYAWLAHRLHRIHGRGVTLYWANLREQFAQEYKGKDPDKDFKKEFVPTLKKVLAVYPQAKVKPVTGGVLLLGSPPPIPYKGGPTVWLNSVRSPPPDEAA

SEQ ID NO: 939783 - protein, 81 aa, Homo sapiens
  misc_feature (8)..(8): Xaa can be any naturally occurring amino acid
KEPTSDEXVRGALGGHPGGHFLNADPGFVHSNGPLSPHDMYDYLHLNRLGYTPVCRGLHSLFLGLLAQNQGQGVPLLEPAP

SEQ ID NO: 939784 - protein, 115 aa, Homo sapiens
PLFALGALHSPWSLDGPMGPGLLNTPPFNFGFPPPGNPRLGPRGKPRRAESVFFKRQAWPKCQPSGVPGGPKKNPVPFVKRPGWPKCPPSGVPGGPKKTPARFVGICFFLKNPWP

SEQ ID NO: 939785 - protein, 104 aa, Homo sapiens
PPFFFLPPRGVEGGFSPRKALLPPPGKKGVFPQKGGGPPPPPHFGPGGFSPPKRFWGPPGGLNGGPKGGGAGPPPPGGPLFPPRGGFCPPPPPFKNPGGGGFPF

SEQ ID NO: 939786 - protein, 101 aa, Homo sapiens
AKWLDGIPKWYSNAAGFNKLGLMRDDPISGDEVVKEPLKSLPETLYNARMFPLKRALALNLKPQILPKKQGAQFEKENFSPDPFLKGVFREKKKKKEWAKK

SEQ ID NO: 939787 - protein, 119 aa, Homo sapiens
SSKEFGGDALLVFANGQPFNGDAFEVGKGGPFMPRFFKTPWGGFFQGKQAIFWGKGGGGSPWGFSPPLPNKNLPFSPGDGARGPDSSQNHPCFLPLPWGGPPILFFQHPFFPSPLLPLK

SEQ ID NO: 939788 - protein, 52 aa, Homo sapiens
PPARQTPPQPYTAVWPERSLGIYLWSLVLQNVAFHKALAKGGELFGGGGVEG

SEQ ID NO: 939789 - protein, 109 aa, Homo sapiens
EAGWAQLVKAVSWSPVVHVKPRSGRCSWHCRACRCSPIHSSRLAGPAPTRLSTRWASSGVRGVARSPPSSRQARQASRKVRRRGKRAVAAAGAAGGTGLSSPGVLAQCG

SEQ ID NO: 939790 - protein, 101 aa, Homo sapiens
KNWAPPGGGWGFNFFVYPKKGGDVGVPFGRNPTRWPRWVLWGGPLAPPFPPPFSPGVPFGFWGGANKPSWGVPFFPPPWTPFGPAFSLVWNLVPNKDFIPP

SEQ ID NO: 939791 - protein, 79 aa, Homo sapiens
  misc_feature (4)..(4): Xaa can be any naturally occurring amino acid
  misc_feature (36)..(36): Xaa can be any naturally occurring amino acid
  misc_feature (52)..(52): Xaa can be any naturally occurring amino acid
  misc_feature (58)..(58): Xaa can be any naturally occurring amino acid
HTPXSTSPQSPQGGLRSAKASQECEGAQLPGGAMEXHTVTFSITLSDTWTSXFWTGTXVDLAAYFLVILPVLALAEGGA

SEQ ID NO: 939792 - protein, 45 aa, Homo sapiens
  misc_feature (10)..(10): Xaa can be any naturally occurring amino acid
  misc_feature (33)..(33): Xaa can be any naturally occurring amino acid
VLNSMWQYRXLRSLYKKDGWSQYHFLASFSTIXRDRQRPYSSSRT

SEQ ID NO: 939793 - protein, 103 aa, Homo sapiens
  misc_feature (35)..(35): Xaa can be any naturally occurring amino acid
  misc_feature (44)..(45): Xaa can be any naturally occurring amino acid
  misc_feature (61)..(61): Xaa can be any naturally occurring amino acid
  misc_feature (68)..(68): Xaa can be any naturally occurring amino acid
  misc_feature (74)..(74): Xaa can be any naturally occurring amino acid
  misc_feature (84)..(84): Xaa can be any naturally occurring amino acid
MADAKNEVAHCSPGEQASFMRPLLLGGYWVLCLSXWGHAALYHXXLREEGKGPPQGTSVLXLALPEGXCAPGLXFPGTPYSNSXPLWTGMGNPQPSGTNPPHS

SEQ ID NO: 939794 - protein, 88 aa, Homo sapiens
  misc_feature (8)..(8): Xaa can be any naturally occurring amino acid
  misc_feature (34)..(34): Xaa can be any naturally occurring amino acid
  misc_feature (40)..(40): Xaa can be any naturally occurring amino acid
  misc_feature (48)..(48): Xaa can be any naturally occurring amino acid
  misc_feature (69)..(69): Xaa can be any naturally occurring amino acid
LKALRLKXNLSKLPQVVTDVGVHLQKLSTKYDPXYTKLIXLNSLKKMXNLTELELIRCDLERIPHSIFXLHNLQEIDLKDNNLKTIEE

SEQ ID NO: 939795 - protein, 66 aa, Homo sapiens
  misc_feature (20)..(20): Xaa can be any naturally occurring amino acid
  misc_feature (25)..(25): Xaa can be any naturally occurring amino acid
  misc_feature (38)..(38): Xaa can be any naturally occurring amino acid
  misc_feature (47)..(47): Xaa can be any naturally occurring amino acid
  misc_feature (52)..(52): Xaa can be any naturally occurring amino acid
  misc_feature (66)..(66): Xaa can be any naturally occurring amino acid
KFSRFPEALSIGIDANDMEXVEDIXTSCKDVVVQKQMXFMLGRHGVXLELSXDVEEYEDLTEIMSX

SEQ ID NO: 939796 - protein, 137 aa, Homo sapiens
GHPVPDPDVKLLMDAADVDGSGTLNCEEFVTMSIHMKRISSEEHLTQAFGYFDKDKSGYIEFEELREALLDENLGPNNEQVIQDIIFDADLDKDGRICFEEFQAMMKSGIDWKMASRQYSRAMLNALSLKLFKDKSM

SEQ ID NO: 939797 - protein, 39 aa, Homo sapiens
MGGLFYPLRGPAFEGTFAHVIQLSWELLRWKTPNKVRLS

SEQ ID NO: 939798 - protein, 114 aa, Homo sapiens
LRKKVVPVRQDLSHSRAVFPNTRPSRGPCEVAPLPHGGEFSPPLLKITPCSLLALWPRGGPIGAPRGVLMQINPFFFLKKRGPPPSLGGGGGVFCGGPGQVRAPFLPPPRLTGS

SEQ ID NO: 939799 - protein, 49 aa, Homo sapiens
LPLIPKKQVSWELLPPLPRDQQGQEAVPDPETFASCTAKGPLLKAHCWF

SEQ ID NO: 939800 - protein, 149 aa, Homo sapiens
QGGSFFGPLVGRGIFSSPVGGWGRLFLFGLRAPPFFWGSTPHPVGGVGPSFLPPGGGALKGGGGFFSPGGLPPLFQGFFPGGGPSFVGDFGGHVFWGPTRVCFARGGGFFFGVKNAPGGGFSHFGFFGGGSGGGGVGFPLLGLLTFAPL

SEQ ID NO: 939801 - protein, 32 aa, Homo sapiens
ARVASVDMGPQQLPDGQSLPIPPVILAELGSD

SEQ ID NO: 939802 - protein, 83 aa, Homo sapiens
  misc_feature (19)..(19): Xaa can be any naturally occurring amino acid
LDCLGPCHLLPLLSPGSPXWGVGFHFSLPPPSAAFAFHALPITSLPPGLLPFVGVELPAPPQALMGKGFPFGMAAGGKPLCFF

SEQ ID NO: 939803 - protein, 123 aa, Homo sapiens
VAPPLRTGFLEQKKTTAFPRGGVGFPSSLPLKGGRGFKGFPLKKTSLGKGFSPRGNFKGGGPLFQNQFLGGGPPPGFWGFFPKFFPPRGSRGFWLGPPPFGKKLLGPQAWLKILGDGNPMAPF

SEQ ID NO: 939804 - protein, 110 aa, Homo sapiens
RPVNPKCRPGKQGGRIPPAPVWGPSGHLCVAPGWVHTKVGAGPGFTLEELRLAGIPKKVARPLGIFLDPRRGKKSPGSLQANVQRVKGARSQFFLFPRKPSAPQKGNSFF

SEQ ID NO: 939805 - protein, 85 aa, Homo sapiens
APPAGARANGNFWWPIPRDANRVSPAPPGPAKVDGATATEGPGTPCRDPIPGENPQPTKNRGEISVIPGGLRVSPTARASLSLFA

SEQ ID NO: 939806 - protein, 162 aa, Homo sapiens
  misc_feature (93)..(93): Xaa can be any naturally occurring amino acid
  misc_feature (151)..(151): Xaa can be any naturally occurring amino acid
  misc_feature (156)..(156): Xaa can be any naturally occurring amino acid
  misc_feature (160)..(160): Xaa can be any naturally occurring amino acid
VEELLKEVRLSEKKKDRIDAFLREVNQRVVRVPSVPETELTDQAWLPAGVRVPLHQVPYAVKGVFPTSQPPSPGLLYVRQATFLGNLASDQIXQMWNVGTGPMPRRNSYRDKRRARTRRYFQQAVPIYRGPLRLTTMSPETTPLRQLFASXYTNGXPPEXPH

SEQ ID NO: 939807 - protein, 97 aa, Homo sapiens
  misc_feature (12)..(12): Xaa can be any naturally occurring amino acid
SSFGAGKKHGGXGALASYPPPLGVTRGTPSPNWRKRKGTGSLGLGGNPALEEVVGRSLGTPNFLPSPLGPAWKPTDKGGFPHGLPRVYDAKIPTHGP

SEQ ID NO: 939808 - protein, 41 aa, Homo sapiens
  misc_feature (10)..(10): Xaa can be any naturally occurring amino acid
MTCRIHRQTXRVLTGWPVPITFYDTFPPLYSHPWTGGPCLG

SEQ ID NO: 939809 - protein, 92 aa, Homo sapiens
  misc_feature (67)..(67): Xaa can be any naturally occurring amino acid
  misc_feature (69)..(70): Xaa can be any naturally occurring amino acid
  misc_feature (76)..(76): Xaa can be any naturally occurring amino acid
LGVAPEDVRNDEQSGFICNPAHHGRRNVCSDQAFPISLIRPWVLQVIFVSSPSLVYMGHALHRLEFXSXXRKALKXQLRVELEQVESEMPRD

SEQ ID NO: 939810 - protein, 101 aa, Homo sapiens
  misc_feature (20)..(20): Xaa can be any naturally occurring amino acid
  misc_feature (23)..(23): Xaa can be any naturally occurring amino acid
  misc_feature (31)..(31): Xaa can be any naturally occurring amino acid
  misc_feature (79)..(79): Xaa can be any naturally occurring amino acid
MGIEVCYWVARGVRGGGPGXPGXVIGRGAFXRPCTWGFGSFQDSSRGQGGQVGVRPHRGNLAGDDPGDCLGSIKSGGKXDLPFHPSHPLISSQKTSKVIFN

SEQ ID NO: 939811 - protein, 47 aa, Homo sapiens
  misc_feature (9)..(9): Xaa can be any naturally occurring amino acid
PLWPRGGPXPPPPQKTKWGPPAPPRGPPPLGGAPPPGGFFPKKPRGF

SEQ ID NO: 939812 - protein, 76 aa, Homo sapiens
  misc_feature (16)..(16): Xaa can be any naturally occurring amino acid
  misc_feature (33)..(33): Xaa can be any naturally occurring amino acid
  misc_feature (57)..(57): Xaa can be any naturally occurring amino acid
MASKGLQDLKQQVEGXAQETVSTAGTAAQQMVXQATKAGQKTMDQLAKTTQETIDKXANQASDTFSGIGKKFGLLK

SEQ ID NO: 939813 - protein, 33 aa, Homo sapiens
GPSLCSLLPPPAENRLFKMLRSRFAARNKNALR

SEQ ID NO: 939814 - protein, 118 aa, Homo sapiens
PPALRATGFPLPRGASPRQGNHALPPFFFPPTLPGRVIFGAPSFWPEMLQGPVVFSLPQPEPSYFWCSLVHCGKMSSKARGLAPDVLIATGGSFQLGEQGNPFMYMPPRICIPPVSWG

SEQ ID NO: 939815 - protein, 184 aa, Homo sapiens
MGGPAGEKIIPPTNPPPRGGEQHISLPPPCCEGVSPCPSPPTPLGGEGVWEPPPPSPHIFPTGRGWGGNPKKGTTPPPPPKKFGGVPKFFPRVGGGGGPQAPLPLFNPQKSKTRGRAGPQIFLGPPGGPPPPPPRGFFGGGALFFWVPPGPPPPPGKRKPPPFLSPPGVPPPPPPKGKIGGLFF

SEQ ID NO: 939816 - protein, 115 aa, Homo sapiens
  misc_feature (20)..(20): Xaa can be any naturally occurring amino acid
QEPARGPPPEIAPNAPFLYXEAFYTGAGAKGPRGKKNPLFGGPRGFPPPGGPPKGCLVLFQKGNPWVLPPKKRGAPPRAPRGGTPGPLFFFSGPGGGGGRGGKKVDPPPPPLFFF

SEQ ID NO: 939817 - protein, 148 aa, Homo sapiens
QGEALRVMDMLHSMGPDTVVITSSDLPSPQGSNYLIVLGSQRRRNPAGSVVMERIRMDIRKVDPVFVGTGDLFFPMLLGWTHKHPNNLKVACEKTVFTLPHVLQRTIQCAKAQAGEGVRPSPMQLELRMVQSKRDIEDPKIVVQAPVL

SEQ ID NO: 939818 - protein, 78 aa, Homo sapiens
RVFGSLLWALVCIGLNRSVLGLVVFGILFCMHVPGVSLVSRGLFPRGSVFASDPQSSFPGSCLRAVGCRSGRWAGNGD

SEQ ID NO: 939819 - protein, 118 aa, Homo sapiens
  misc_feature (8)..(8): Xaa can be any naturally occurring amino acid
  misc_feature (11)..(11): Xaa can be any naturally occurring amino acid
  misc_feature (55)..(55): Xaa can be any naturally occurring amino acid
MERFDKKXKPXPLAQGHHQHRLWPPPPSSTCALTTTYTAHQPLQGSHGLSGEQFXPGLSSQLPPPTHAYTHALLDKANIPLSRTLHLLRPHSLGGGDIALLAFGLGAPSLLLHCSLWL

SEQ ID NO: 939820 - protein, 90 aa, Homo sapiens
INPPVQNRANGPCRTTARSIPHGQLPLRPRNFALHLLFFTFLSLPVRKLPPLVGSQGRLTQLTAWSKPGPGPCQGQPKEMGIKRPKSPQL

SEQ ID NO: 939821 - protein, 97 aa, Homo sapiens
ANPGRFPPSERIRGVLRVITEELPDVPLYYTLAQRGARVKTFPCKRFKEGPCQRGGQCCYSPSPPTPRVFVDAAPGCPKTSNQTPPGPGGAAGPGID

SEQ ID NO: 939822 - protein, 68 aa, Homo sapiens
PISPLPRPAQIGLPLPSSSHSLVPENGFCPANPFFKNAQAQPLGGGGASLVNPQTFRTPLITINTCAQ

SEQ ID NO: 939823 - protein, 121 aa, Homo sapiens
DRAQIDFNGRIRNGSVYSAHSTNSLNNPQPYLQPSPMSSNPSITGSDVMRPDYLPSHRHSAVYPRLFRPTSDYVIVMNQLSRDMMHRERHTLLCCEASTSAAQYTSSSTQSLVYTQPEHSE

SEQ ID NO: 939824 - protein, 67 aa, Homo sapiens
MRCARISRHDAQADRACSVRGTRVASHIAFPSLSPPRSPPPPEQPQGGGEGESSVRSSSLGPVRSAL

SEQ ID NO: 939825 - protein, 143 aa, Homo sapiens
  misc_feature (39)..(39): Xaa can be any naturally occurring amino acid
LGQMKKIRMVPGPLSRQKMLCEHILCSKPLPCRQPAPIXGFWIVPDILGPPMICITSTYECLIWPLLRTVHPGSPPLLCTRKNVEVAKFPPRVLGETPDSFEKHIKSLLQRRVANPAFLKAFEKDKAPPPEKCLPAKGHSVPP

SEQ ID NO: 939826 - protein, 158 aa, Homo sapiens
  misc_feature (2)..(2): Xaa can be any naturally occurring amino acid
  misc_feature (21)..(21): Xaa can be any naturally occurring amino acid
  misc_feature (128)..(128): Xaa can be any naturally occurring amino acid
RXVCYDLFHFACLNERAAQLXRNTPPARYQCPGCNCPFFTPTNLACPVASALREKLAPVNCGPRKTGPPSDRGGVEAQKPEPSNTSDFSDLSSFNASSTPEPEEVDRRLCCPSLLQPGPPAPSFPKAXPEQHTVIHMGNPEALDLTPLGRVYDTRDDD

SEQ ID NO: 939827 - protein, 107 aa, Homo sapiens
QRGPPKKKMVGQSFFFLKEGGRKGGFLKFPFFLNPKRVVIKEIGRFVLPAPHFLKKIFHIQDNKTQASGCTVGLLLICICWASVYVVEAEILATCFNSVILILMKMY

SEQ ID NO: 939828 - protein, 73 aa, Homo sapiens
KLSPERFGFCSYHLKFTAHAGKQLLNMSTTFMGRSRPLEDVCRQTPRSADPARQEGWVRALVCALGTQILPAQ

SEQ ID NO: 939829 - protein, 137 aa, Homo sapiens
EHRRRNAADECELQQHVDQRRQQDRQDQRDRDRALRIAHLARDRHDRREPEVREDDAARGHGHLDARHAERREALHGQVRGLEEREQHRDHRQWHDELEDADDVVRLRERLHARIVQVKEEAEQRGLHEPAERRRIA

SEQ ID NO: 939830 - protein, 83 aa, Homo sapiens
EEISGGGALPACPRRSYNISFVALALYGFIGGAFSRVGYGRRIAFVGAGAAVTRIVGFAVQAACGNAPALNLLQYLIPIIPIV

SEQ ID NO: 939831 - protein, 82 aa, Homo sapiens
RGQGTSTCSTAGSNFSRGSSSFRGSRGPGRSRSQSRSQAKGQDRNPERNQNDPCWGIENIMSAPGKGSRDVFSPPPVMSGAS

SEQ ID NO: 939832 - protein, 141 aa, Homo sapiens
QIGCLGGPWALNKGHSGPYRLQQGKTGPQAGEEQLKIWRGSFDIPPPPMDEKHPFFNSISKEGRFAGFKPGDFPPLESLKDTIARALPFWKEEFVPQIKAGKGVFFSAPGNSLGGIFKPLEGISNQGFMEFNLPPGFPIFF

SEQ ID NO: 939833 - protein, 115 aa, Homo sapiens
RLCIDTVIWPAPAPPPGVSPPETARGPGFGRSAREAPPRPLARAPVVTVEEAPALRCPEEPSRARFLFGWIRPAPPHNKRARAGRRRSQRHVRSTRRSVRVWGARRRPPDSPGAA

SEQ ID NO: 939834 - protein, 139 aa, Homo sapiens
MGAALSLTAGVALAGSDTRSGCPDPQCAEAEVRHPRPLAGPQVDPAASAKEASFLNTVRNRQSRSLSLGERQEIADIAASKPKIDLEIHFDYNSADISKGSTQAVQELGKALSDTSMKGSTFVLAGHTDAIGGEAYNQA

SEQ ID NO: 939835 - protein, 55 aa, Homo sapiens
  misc_feature (10)..(10): Xaa can be any naturally occurring amino acid
  misc_feature (17)..(17): Xaa can be any naturally occurring amino acid
GVHSRTRWDXGTYRPGXVVGEPAPVDVLVLLEEHADDQPVHLSCVSSHLAAWPAV

SEQ ID NO: 939836 - protein, 74 aa, Homo sapiens
HKISWVSECALMLAQGTVGAYLNKYIPAKWTWMVFCINSYCSLTDVINTGDACSLDEYLGSWNSQVNAFCVPFP

SEQ ID NO: 939837 - protein, 32 aa, Homo sapiens
FRPLTPAPGGGGGAFWAPGLNLTRPGAPPGPP

SEQ ID NO: 939838 - protein, 112 aa, Homo sapiens
AHISWVVALSSRLCLKPRGSMAAAGTLRLSAQILPWMDQRTTHRPVIWVNQFCHPPQNRKQHEKLPLTPYESISNQVISTPPFPSPYPPNFENFDPRMLREADLNNKTPVSR

SEQ ID NO: 939839 - protein, 155 aa, Homo sapiens
GLGSIGPCGVPQVGSHKSGARPGFNLEEFKVAGISKGGARPMAFFWVPGRGTNSRSSFRPKFNGLKRSAPKLFFFPGKPRAPKKGTVFFKNLKWPPHLPGRLFPSGKFLKKRKAGFSLGKKKILKPLLVSVWAGPTPGFLGYGQKKPRKPPNRVF

SEQ ID NO: 939840 - protein, 68 aa, Homo sapiens
EGIRGHRGLHPGPLPAKKMALGMTQVGGHPACNIPQGPQLVAQNLGFSLANLLLSKGAKNILGCCPAA

SEQ ID NO: 939841 - protein, 153 aa, Homo sapiens
MRWTFSYYCTILESWKLQKSVLTATQYLMSAPDTLQWTASATAPRVRRLAGLLLLAVLEDFNMSQDLLHPRGQPDSVDQAMTESRDRRGRPHSPTASRAAEHSGIPVQAQGHRVQARHTVLLRPRSLGVSQTHFPHVSQPQLGCSMERHLPLK

SEQ ID NO: 939842 - protein, 142 aa, Homo sapiens
RPRGELQVPGGRWQWDTRANAHRETPGWLGSARVAALGGMSNEVPRDIWRADTFEGQPCQASPRPMKDKPETGRGRRSTRRPVRVEGCRTTSGVPVPGPGTIVCKPRRQDARLETPVSSSELSPTPRSPQTVPKPPAGDIRM

SEQ ID NO: 939843 - protein, 122 aa, Homo sapiens
PPIGFFPPPGGQVCPPKPRGSPNPSLFFPNLTFWAFPPPFPGVKISGATPGPFAADLGVLFKKKTGGGGFFGKLGVGGKGGCPSFGVLGPVPGGYGVFPPPPPLFFFFLKKAKMGINPRGPG

SEQ ID NO: 939844 - protein, 92 aa, Homo sapiens
  misc_feature (56)..(57): Xaa can be any naturally occurring amino acid
  misc_feature (65)..(65): Xaa can be any naturally occurring amino acid
  misc_feature (67)..(68): Xaa can be any naturally occurring amino acid
  misc_feature (72)..(72): Xaa can be any naturally occurring amino acid
  misc_feature (74)..(74): Xaa can be any naturally occurring amino acid
TGHPMSASTKLKRNSATHHFPWMFPCRMAWLETRVHSHPSFNVTARDFQRFFADLXXEEGWYMWXQXXDLGXGXQQDLHLLQTPLPSCVPCK

SEQ ID NO: 939845 - protein, 225 aa, Homo sapiens
  misc_feature (4)..(4): Xaa can be any naturally occurring amino acid
GGVXAQVLPPLVHTPPGGCCPPNFFFSLGARGPGFTRGAPKPPPLLVVAAHLLLGGGGPPPPPPPLRGGFFRGSFWGWGPLGWAHGWGGGHGFPPGARGPRFFLVCGFFGSQTHWGGFFFGGGDPPPPPFGGRFWGGGPRGAPPPNVFPRGGFSFLGVTLFRGAPGPPLPPGGGGPPGAPPPPGAKVPPPRAPGGFFSPPPLGVFFFFFFLGPPPPLFSFRGVFF

SEQ ID NO: 939846 - protein, 122 aa, Homo sapiens
  misc_feature (13)..(13): Xaa can be any naturally occurring amino acid
  misc_feature (113)..(113): Xaa can be any naturally occurring amino acid
GCFGAKAKRKTIXDGARRSCRRERSYSGRLHKVGQIVFEFVGEPELMDVHVFCTDSIQGTPVENDEMRPCWFQLDQIPFKDMWPDDSYWFPLLLQKKKFPGYFKFQGQDTILXYTLREVDTV

SEQ ID NO: 939847 - protein, 67 aa, Homo sapiens
PGPSLPPNWVSKVRPAMEEGGPSATPLSPALGDPENTPGVFTDSRDIIQRMPLCQSELLKKGTPKFN

SEQ ID NO: 939848 - protein, 142 aa, Homo sapiens
  misc_feature (58)..(58): Xaa can be any naturally occurring amino acid
VFRAPRGFPGFSGVPPLPPRGWCGVFCPDLPDFLKLAHFPQFAEWGGGGGVFRATSIXLPLFPWEPPRPPFFSFFLPWGPRGRFLFCVFGGGVGFFPIFPRGPLGPFGLFWWPFFSRFPPGPGGAGPGFSGPWVPPGVPPGP

SEQ ID NO: 939849 - protein, 122 aa, Homo sapiens
  misc_feature (7)..(7): Xaa can be any naturally occurring amino acid
  misc_feature (9)..(9): Xaa can be any naturally occurring amino acid
  misc_feature (20)..(20): Xaa can be any naturally occurring amino acid
  misc_feature (29)..(29): Xaa can be any naturally occurring amino acid
  misc_feature (38)..(38): Xaa can be any naturally occurring amino acid
  misc_feature (47)..(47): Xaa can be any naturally occurring amino acid
  misc_feature (76)..(76): Xaa can be any naturally occurring amino acid
GGAGGGXFXGGVGGGAAGGXVGGVGGGGXRAGPSGVAXWGGLCVVGXGVGGLVWLSDVRGSGCGSQAGTPPAFFPXRKWGAGAPRINNIKPSFPRGTPPRVKPPSPIFLLSLNPGIITGFSS

SEQ ID NO: 939850 - protein, 95 aa, Homo sapiens
KTLVQTQWGTLQRRTRLRAQAGGSKENAEDAGGETRGRHLGGNPRTQRINDSRGNLATATANMGNPKGKAHGKKEPTTLGEAIKHPEDLKGTWPS

SEQ ID NO: 939851 - protein, 113 aa, Homo sapiens
MGQPLKGRVTLEIALNEHNTEGCNSKLTLPLRRNKPKHGLRMDSPLPTHEPFRKRKQACYTQLKFYQLRILKEAKCSAALEQWSQGSSPGVAPIARNHLRGPYTNKQRPMGSR

SEQ ID NO: 939852 - protein, 83 aa, Homo sapiens
CSSCKPCCTLLGYGATPPLRFVTVGDWGGVPNAPFHPAREMANAKQIAWTVQILGADFILSLGGNFFFPGVQDINDKRFPETF

SEQ ID NO: 939853 - protein, 81 aa, Homo sapiens
RPPARRNAWALRLGPRFYRHSKQGGNEQSHAGFCRTPDMPKGIYSVKGTLAKRQNWLQFPEETPYHVPQGMNQTTLPPTVD

SEQ ID NO: 939854 - protein, 155 aa, Homo sapiens
EEKRPGRWAMRLTPFDGSRDILGTPEGGQRGGGNSKREKRETKGCKRGSAGNEDISAESKTTVEQNVREITQGKQDIKGRTGPKREQRQRRLGPAIGVKIGIDSEDGTGNMEKEYDRCNRTRRARCQNLMEQGGETTKRMTTGTRTTLDRRKGSQ

SEQ ID NO: 939855 - protein, 238 aa, Homo sapiens
PKRLDSVVQFAELRSQLGFRLSFDVELNRGGWTLAWRLRDAIVPGSNKRFWKRRGAVLNAEEVAEDWGIWSDHRMTMAVELQRDRCQLKLAEGLELLEDDEEEKDDDRHMMREQRIERATSCDYHHGVRVMLTCLMTACTERFRNQWIDLLMYQSDSQVRQDYYQNECIDQEHALHEEVTMDQNGEFSEAWMVEKMPYMRHKALLGHVGDYIEWSKTKVTLVKNMKLRKWELENVGLD

SEQ ID NO: 939856 - protein, 139 aa, Homo sapiens
NSLRLSIALSFNQSKELGAKTDQQQPAQNGGINQTWWGETPKKSREIPLQKRKRGGPLKEALGMGKKTVGITKSGGTGERPGGPWTGGPKHSSRAGKAQGPWNPRRVKGERLGGKRQAGKAREGSARKKRGKREHEAPR

SEQ ID NO: 939857 - protein, 40 aa, Homo sapiens
MKGLAEQKKQARATDPGQDGPEAQLRNQGISADEGNEKGT

SEQ ID NO: 939858 - protein, 77 aa, Homo sapiens
SAVGMPGLEQATDSTHDINVTARAIRIIPMVINDVWLNLLRNANYGIRAQEEIKVLTGGGVYSPIETKMIQYLHTQS

SEQ ID NO: 939859 - protein, 53 aa, Homo sapiens
MKSNIPYEYRGKNHQGNISKTNQKHVKRIIHYVKGMYLREAKFRSTYNTISAM

SEQ ID NO: 939860 - protein, 74 aa, Homo sapiens
EEKRRQRGGNENRCLNPIVSTLFAETPRGQQCEFSYTLPDLAAGITILLTDRNLNTTFFDPAGGGDPNLYQHLI

SEQ ID NO: 939861 - protein, 137 aa, Homo sapiens
MNDNKPQNRKRYDQGSEGTAERRGGKVNQQPNRQGISMELYEALEEDSTKGLKRRERRGSKDRNGHDTGDVPGANKHKNWLRDAQEIHHEKCRTITKDETGGPSRKRMAENPDGRTRRKDRLRMVKEKGNRGTQEAA

SEQ ID NO: 939862 - protein, 75 aa, Homo sapiens
IPIRLQAITTLRLFMPALELMVAYGRISPSFGHFVEYSGRYPIIVIFLQAFYVSFTLNLDFFNFFLVIDTGGFSE

SEQ ID NO: 939863 - protein, 167 aa, Homo sapiens
  misc_feature (148)..(148): Xaa can be any naturally occurring amino acid
NAAFFDWGTIKIESPGIDQTRSGFPGVARMKTEALDGDLRKIGSLDEGQTMTGPPGVTQMMTGLPDEMPMKTGETGVMRMMTDHLDEDWKRTEEAGQQPMRTEDQDVGMDDDRGPRRGGADDERQPDVMQKKTRGPGQGWTKNGDPGXAWKKTGAQGEAWMKTGDPS

SEQ ID NO: 939864 - protein, 173 aa, Homo sapiens
MLPLFDTAPDKPISTPRSINRGKLQGVLKEVNCCLRTFEARLNGSHPWTQNSLASNRKLEPALPDTTYNHRMDNGKKRRKARSPRGDEIKDLKETKTALGPPTQLERTIRTRNDRPNADNYRAKGKIIQANRICTKAEKAKEVTTRNATTTGHKHSALTEAKKTTPFLEANGN

SEQ ID NO: 939865 - protein, 108 aa, Homo sapiens
RAQGPPFPPRGEELALNNLVPLVSLAGGFSPRVVLVPWLQGSQELPPKKYFIWVSRQEPNQGPPPFFFTSILGVAAQDWKKGDPFSCMVGPEALPLAFPQKTFDRLGG

SEQ ID NO: 939866 - protein, 131 aa, Homo sapiens
NPRGFWQGEDNWPTSLGVGHETGIQIPVGCETGVGAGDCTSPPLLEGEDAPLTQSKKKPVPPRQGGSHCGKGPGGQGLLLPGAGPPDPPLRIQLPRPAPQEAGGQPPHLPPSFGPFQPQPPVSVPSPWFLA

SEQ ID NO: 939867 - protein, 135 aa, Homo sapiens
GPPRLPPFFPARFFGGMGGGAPFSPGDRFCRVLGFLPPPQGDLAPPAPNLAPGFFFRRGGPPKGVFFFLGWGGGPPEKKTPPWGGGPPPPEIFFLGARPRGGFGVSPPPPGAFSPGAVFFFAPPPPRKARGFFFY

SEQ ID NO: 939868 - protein, 112 aa, Homo sapiens
LTPPEIFGQSSFPQLQRGGRLLKGSPDDMFRRWGLQLPLSWSWVRTSLMPVGTFERAKAKNSWPGLQGFAANAENGAGPLRTPPHHPFLPLYFSPIVLVNIDLGIKMLVEVW

SEQ ID NO: 939869 - protein, 116 aa, Homo sapiens
  misc_feature (5)..(5): Xaa can be any naturally occurring amino acid
VKVLXEDSRAAFRLFETKITKVLHFTKDVKAAANQMRNFLVRASCRLRLEPGKEYLIMGLDGATYDLKGHPQYLLDSNSWIEEMPFERLCRSTRQRAACAQLNDFLQEYGTQGCQV

SEQ ID NO: 939870 - protein, 81 aa, Homo sapiens
APYPKNKKATSRKDEELDPMDPSSYSDAPRGTWSTGLPKRNEAKTGADTTAAGPLFQQRPYPSPGAVLRANAEASRTKQQD

SEQ ID NO: 939871 - protein, 119 aa, Homo sapiens
  misc_feature (21)..(21): Xaa can be any naturally occurring amino acid
  misc_feature (77)..(77): Xaa can be any naturally occurring amino acid
VALGKEGDKNVLPTLSLGARXPVFHEKDYDSLAQPGFFDRFIRWICKPPRPGPPVEGCEPTPSMVLSGPGSHTASTXVHWEDAWGLHFSSSSQGVPEAPAPAQPQVSPGPPKVGGPPSP

SEQ ID NO: 939872 - protein, 103 aa, Homo sapiens
RFALQKHQWGLVQVDTLNPSSKKKLWLIPCGDTQRGLNKLDNSVLVKLEFFFVTWTALQKTSANCPSQSPGIVPIINNVNGFKWGPADKIPKTPVILKIPPFL

SEQ ID NO: 939873 - protein, 96 aa, Homo sapiens
  misc_feature (86)..(86): Xaa can be any naturally occurring amino acid
IFIVAGLAALVACFWYGHQNVTDLYNPLIPTNIKYEFGPAIFIGLARFALIILGRALFSGSCPGNETKVGYRAPRFYPKSNSSKEXCVTWDLLAPA

SEQ ID NO: 939874 - protein, 106 aa, Homo sapiens
PPPFYGAGGISRKQFILVFWSLKYVSKRGGAPFPVFVPRAAPFFGRPFFTPCFPGLVSSKFSFGISRGPPNRGAPRPPCVLGPLLLWGQGERGGPLPPSLLKRGPL

SEQ ID NO: 939875 - protein, 113 aa, Homo sapiens
VQGQPRQHRDIPPHKKQKTKQAYGQGYVVCGALHMLYKSQISSSSLRKLKGTVPRYCERTTISGNSFHNNRNQGCGGRCSRSPPPSSPSLLPPHSNASCWPCTSRLPLGGEFL

SEQ ID NO: 939876 - protein, 70 aa, Homo sapiens
HPGAVSVDQQRSQSLLNRPWVIPVEFRMLLTARFRKVKCYTGLERPQFIKSNQSSNAYQRYENNVGLCPQ

SEQ ID NO: 939877 - protein, 66 aa, Homo sapiens
  misc_feature (10)..(10): Xaa can be any naturally occurring amino acid
ILKKALLSQXMTTSMRVIAPEDLSVGYSVEVEDSDTDDPDPVKTYANVCLCLSFSQKRFKNKNTKE

SEQ ID NO: 939878 - protein, 154 aa, Homo sapiens
FQTQAPPKTRGSRAVQWPYPGGGPFPPPQFRQNQKIAPAPPPVPQMMDLLYKNHFPILGGGHPNPSGPPVTGNKEPWGIFLFLFLMKQKKGHVPQGFFLPAPPVTFNRILGPRFQLRATAGQVVGFHPGLAPGVATGFWGNPFGFFKKGQRWFF

SEQ ID NO: 939879 - protein, 83 aa, Homo sapiens
WHRFQPQGRVGSLAAGVTGIAPRKVPYLGIPAGAQPGHPPFFVTSILGVATEDWKKGGPFSCMVGPEALPLAFTQKTIGRLGG

SEQ ID NO: 939880 - protein, 148 aa, Homo sapiens
QFQARDPLGRRCCGVFLCGPFILKGVGAGSRFCFGAKLFCHYQCPSLLAPSASEHASGVHTGSALSTTQLFPDLHEGMALQSLGPVAHSYSVLRYCYHSSLICIWIPFPLQDYETPEGEGLGQIFFLYVQFPAQPLQPCNCLINDLSL

SEQ ID NO: 939881 - protein, 137 aa, Homo sapiens
LPAFQKGGPAMGIFLDPEGGTSPRSPFRPTCNGLRRPAPKLSFFPGSPRPPKRETVFFKNLNWPPSWPDRLCPSGTFIKRKKLGSSLRKKKILKPSLVSVWPGPTPGFLGNGQKKPRKPQNRIFKKKNKALLGAWNP

SEQ ID NO: 939882 - protein, 165 aa, Homo sapiens
  misc_feature (14)..(14): Xaa can be any naturally occurring amino acid
  misc_feature (60)..(60): Xaa can be any naturally occurring amino acid
  misc_feature (103)..(103): Xaa can be any naturally occurring amino acid
  misc_feature (109)..(109): Xaa can be any naturally occurring amino acid
QGQESGLHPAGPFXLVGSKARVRLSTFWAGAHKKLMPNCKWVSNLAVPPAGDNVICWSYXNKLVWFDLGLSPKPYRMLRPPKKGLGGVAFPPRDPLFGSGSDXGSVIVXHGMVDNDLLQNPLVVPVKVLKGHVLTPDLGGVGVFFPPPQPWVFSLGGEGAVRLFP

SEQ ID NO: 939883 - protein, 123 aa, Homo sapiens
FCLPRVFCGDFGGNPFSREPVVQFSVFNAPHRGFGPPGPKFGPGGNSFPGPPFGPVFPTPRAWKQNFFGPRGPGGGFSPPWGWGPLGNLSKGPPLVPPRLGSPPPPLFFFYLGGSPKRGILLG

SEQ ID NO: 939884 - protein, 115 aa, Homo sapiens
  misc_feature (56)..(56): Xaa can be any naturally occurring amino acid
GGLPAGRAQPFPPLGGPGGGTGFPEVLKWPFKYGSYSGRWGQGGDGDFFNFKKKGXRFSPPPFPFLKQRRRAGCPPFGPLVPLPPLWKGSLGRLPPFKGSSPRGPPLGKKPPFFF

SEQ ID NO: 939885 - protein, 75 aa, Homo sapiens
  misc_feature (11)..(11): Xaa can be any naturally occurring amino acid
QNRPSFIVMSXPWGAKNVGDPGTPPAERGIKPGLRPQSPGGAPTFYVPGPQTDQTLVLLMGKEGVPGGLVTKRCI

SEQ ID NO: 939886 - protein, 107 aa, Homo sapiens
  misc_feature (27)..(27): Xaa can be any naturally occurring amino acid
EAMQSIPKGVFEAVSFPKRISFFSDQXPTLLPLLVIRIIDAGWNHWGLDSLLFKPWEPKDSSPYAKAPKLVVCALGLSVGLMGIVGGTVFIIQGLRSVGASKHQGPL

SEQ ID NO: 939887 - protein, 81 aa, Homo sapiens
KPDAVQPDSLPYPQYLGVIKAQISCAKDIHPALLDCANKVTGKTPAPPVGPGGPFYKWGTGSGAASGWWVVCKRNKKRPGP

SEQ ID NO: 939888 - protein, 108 aa, Homo sapiens
  misc_feature (32)..(32): Xaa can be any naturally occurring amino acid
SPGPSPVLKMCNRQFAWATAFSPWYCMHAMLXAPFPFWAPQVFPDPRVPGMFPPPPAPLTTFVSFKHLHAHLVFSLCPQKGGHKGRVYFSWEEQGKGGGPRISPPFSK

SEQ ID NO: 939889 - protein, 189 aa, Homo sapiens
MIASSWAVKKNDYLKKDEVERLKASLDGSFKNLEFAFYYIVGVSSFGAQVPDAKKACTYIRSKIDPSNVDSLFYAAQASQALSGCEISISNETKDLLLAAVSEDSSVTQIYHAVAALSGFGLPLASQEALSALTARLSKEETVLAKVQALQTASHLSQQADLRSIVEEIEDLVARLDELGGVYFQFEEG

SEQ ID NO: 939890 - protein, 146 aa, Homo sapiens
GGGHAFDDLVGNFAATFAVGHHSDAIALGDMGNGAAAEAPVGAAVTEIPALPLLLDGKADGVRPDAHRRHHVLHRCPIEHDLRLAGERFLHIDHEQRIIRGRGPQAGRRLFGIDMPAGRPQRLAIFMAACGPCLPVRRQRLFETGM

SEQ ID NO: 939891 - protein, 94 aa, Homo sapiens
QTPPGASELLSDPSKGLRCWPSIKGEGWVLMDEVTFKNPLVWVHASPEHVVVTRNPKSSAYKWKETLFSVMPGPVLPGGALGISNSIKLRQTPP

SEQ ID NO: 939892 - protein, 100 aa, Homo sapiens
MAEICNANGPPNSPKGSPDPKHARKPPQNCQAYPQGVCKKHRGRPEPGVPGERPKAHPGLAGELLKAPWPCASWPLSASPPGSVFPHLCVAFGQIKASFG

SEQ ID NO: 939893 - protein, 56 aa, Homo sapiens
LAGGGARPLESRGSRYEVVVRGKPSTKQQPSGVASSPSRVPPGPVSQGLFNNRPPP

SEQ ID NO: 939894 - protein, 161 aa, Homo sapiens
LSGGTLGGLLAFRSQTLDPAEAQLGAIATSFAAQVNAQNALGVDLSGKPGGNLFTTGSPITYANQGNTGNAALSVSFTNASQPTTGDYTLAYDGAKYTLTDRASGTVVGTSTSMPGSIGGLNFSFSSGAMNAGDKFTVQPTRGALNGFGLTTSSGSAIAAA

SEQ ID NO: 939895 - protein, 137 aa, Homo sapiens
EGGGPPAPSTRGGGGKAKEGGPPPPCGKGKTRFLGVFGVFPPLAPRFFGWPPHLKRGPIFPGVPALFLGPKGPPPPLLGPPSLPPPWPRGGRGGHPPPRGPPPFFPFGELGAKNPPPWGPFFFFLGGGEPGPSPFFF

SEQ ID NO: 939896 - protein, 104 aa, Homo sapiens
  misc_feature (37)..(37): Xaa can be any naturally occurring amino acid
MARPCYGIQQRQTLSPLNGGDIINALCFSPNRYWVCXATGPRIKIWDLKGKILVDELKQKVFSSSSKAEPPQGPPLAWFVKGQTLFSGYPDNLGRVWQVTLGPP

SEQ ID NO: 939897 - protein, 151 aa, Homo sapiens
SNLGGVGSPIKPGGEGFSSGVPGPTVSHVSDIVGPDGLVYAVEFSHRSGRDLINLAKKRANIIPVIEDARPPPKNRMLIAMVDVIFADVAHPNQTRIVALNAPPFLGNGGPFVISLKAHCIDSPAPTEAVFAPQVKKMPPENIKPPEPFTP

SEQ ID NO: 939898 - protein, 160 aa, Homo sapiens
SEARRTFSSAERPARCRHSGRTSEPSVVFRRLAAHPSLFRRHVDRRRAEQRVAECALHDLERDAGGQHLPADRVPERVRRGTGQLAPLGLAQVPHHLEQLRDRPLSEPARAAHRIAVRCRAYGRFADIWGSPNFSRARGGVGMTSGATSGNPGGLRRGGR

SEQ ID NO: 939899 - protein, 91 aa, Homo sapiens
  misc_feature (23)..(23): Xaa can be any naturally occurring amino acid
  misc_feature (61)..(61): Xaa can be any naturally occurring amino acid
LLGAPFKSNRVKAGIRMHANFFXVEAASQRAKQDMPGQIAGVQKFYDARLGLDMRSPPYRXSFEGEKKRAGVWDAEHEYLYEDPQRAMQVV

SEQ ID NO: 939900 - protein, 66 aa, Homo sapiens
NALTVASEPCREVFKLYSHWGVLDDLEEASVKLALPCDINLRGELAVLVSRSPDEIRFPGLQDSAC

SEQ ID NO: 939901 - protein, 68 aa, Homo sapiens
  misc_feature (5)..(5): Xaa can be any naturally occurring amino acid
SARSXGGLRREQLMPQAFKDLPKGVDPARREFFFSDFDFQNIFGKSKEEFSSMAPWRQRQEKKQLGFF

SEQ ID NO: 939902 - protein, 168 aa, Homo sapiens
  misc_feature (79)..(79): Xaa can be any naturally occurring amino acid
VAPPGGRFSPPRAPRGVPWGWGPLSRTPPCGRCGLFCWGPGFPPAPNPGVSPQAWSSGGGFSRPLKPPPKPAGWGPPFXRWVFFAPPPGAKGFPGVGSPLGRGWGVFFFGAGPRGQGPPPPRGLFFPGGGPLGPGAPPPPPPGPPGDFVFLFGAPVWGPPFVGGPFFF

SEQ ID NO: 939903 - protein, 58 aa, Homo sapiens
GPWNARKKLFQLRSRLPGGNPCKKALRQFSSYVTKGKNGHRVLLVLGWSHDPIQPLDL

SEQ ID NO: 939904 - protein, 117 aa, Homo sapiens
LPERICKNWFLERGCRRPPKVDVVEPPGGTNRDRSGHGRAEQRENCPPQPKGDHEKLLLAGGAEVEEVREPRRSSSGDAASPSPPRLMRHVHAAARTRTWAGSHGLAPGHRFDLAEC

SEQ ID NO: 939905 - protein, 119 aa, Homo sapiens
QEGEKIPRVPSGPRGRGEGGPPPNFPFPPETPGPPKRGQFFLKNLNGPPPCRGGFSPPGSFLKRKNPGSPLGKKKFLNPSLFPVGPGPPPGFWELGQKNPRNPPPGFFKKKKKPPLGVG

SEQ ID NO: 939906 - protein, 64 aa, Homo sapiens
KKEILETIQLPLSTLYYVSLGLKRSGLLLHGPPGTGKTLLAKAVAPECSLTFPQVWYSINRCPF

SEQ ID NO: 939907 - protein, 73 aa, Homo sapiens
  misc_feature (7)..(7): Xaa can be any naturally occurring amino acid
SGRSSEXILKKALLSQEMTTPWRVIAPEDLSVGYSVEVEDSDTDDPDPVETYANVCLCLSFSQKRFKNKNTKE

SEQ ID NO: 939908 - protein, 121 aa, Homo sapiens
  misc_feature (11)..(11): Xaa can be any naturally occurring amino acid
  misc_feature (61)..(61): Xaa can be any naturally occurring amino acid
  misc_feature (76)..(76): Xaa can be any naturally occurring amino acid
LSRVGQISRNXVGGQRSLVNKWTTFLKARLVCSVPGVKGDTHFDQLQDVFLLSSRDHRTPXLYAVFSTSSIFQGFXVGVYSINNVPRAFLGPFAPKEGPMPQWVLYQGWVPYPRPGMCPSR

SEQ ID NO: 939909 - protein, 81 aa, Homo sapiens
TALNVGGGEEGGKPFLAGGGAKERVMRNASESAQNAWGECSTVIGDLPNKGLVALGEFLSAKQVNLGSRPLLTLGEITPPY

SEQ ID NO: 939910 - protein, 101 aa, Homo sapiens
QGGVAAAFVGKPELGGPHVAPPIKEKEGGILAWRPLEPNGKKVKLSFPVCTLSSSFRKNGCPEDFPPWVGVKKQPAKVRGLRALGCCSIETDSGPGPYLLF

SEQ ID NO: 939911 - protein, 70 aa, Homo sapiens
PGALFKKLAFSERGLDKARLAGKELRFPKEKKNIFVVAAGQLGNMHFSNCWASPPITPRAFPTLFFMSPF

SEQ ID NO: 939912 - protein, 40 aa, Homo sapiens
VPGGGGGVPPPSRGLSLWAPKRQNLNKGNKGPKNPVFFRG

SEQ ID NO: 939913 - protein, 47 aa, Homo sapiens
  misc_feature (21)..(21): Xaa can be any naturally occurring amino acid
MAAFKPWRRKKPSWGPLKKTXFPRKKGLYARDKFFRWGGFHKRFFPL

SEQ ID NO: 939914 - protein, 119 aa, Homo sapiens
  misc_feature (74)..(74): Xaa can be any naturally occurring amino acid
KPKIPKGVNRKLDYLAYIAHPKLGKGACARISKGLRLSRPKAKAKAKAKDQTQAQGAAPASVPGQVPKKDPGPXKGFKVNIFANIRKKGVVPPPPPAPGVPFERGWGPPLLFGQITLGP

SEQ ID NO: 939915 - protein, 113 aa, Homo sapiens
SLPLPGKKPPYSPSPPGWGPPPSLNFGAPPPHCILGTFPLQGVFYFQPLGETSPLKKGAGQGCVVMGFPPPPPPGQGWNWTKTSPFNSFFSKPFGVRRLCGFPPANKPYPVFP

SEQ ID NO: 939916 - protein, 93 aa, Homo sapiens
  misc_feature (76)..(76): Xaa can be any naturally occurring amino acid
GKRSGEFCFFRAWRGPCQPQNKVELWPDIGAFCLSGPEGTLGVLGLPPTPPCQQQRKKLLPARDIKALFVCEEEKXLPRKGVSLKNGDKKGSC

SEQ ID NO: 939917 - protein, 159 aa, Homo sapiens
  misc_feature (24)..(24): Xaa can be any naturally occurring amino acid
PPGGGWTRAGVFFSFKKGAAPPGXGVFIKGGGVGGGNPFFRGGGGSFFLGGGVFFFFLGGGGVFSPPFFKKRGGGGPPPPPLGWGKKNPPLAFSPRGGGGGEGFFFEPPFFFFGGPPGGGGGPRGVFFFFFFGGGPPPLGGVFGPPPGFSPRGGGVFFL

SEQ ID NO: 939918 - protein, 174 aa, Homo sapiens
TYVQKFKRELSTKWVLNTVSTGAHVLLGKILQNHMLDLRIANSKLFWRALAMLQRFSGQSKARCIESLLQAIHFPQPLSDDVRAAPISCHVQVAHEKEKVIPTALLSLLLRCSISEAKARLSAASSVSVHFQGDMCQQYTLWEELSFGWVGPNCPELGKSPVLNRIISIFTGVF

SEQ ID NO: 939919 - protein, 185 aa, Homo sapiens
QPGAELLLTGVGHLHIVAGLSPQVRIAETVGVGVYPDAKRDELPVAGTVDAAAERQGQLVLFRQLLLDARAGKQLEIVAGEALARVLRPALGVGLLYPQAPGKRQVGPGAGQRQVGRVDVLVVPEAVALVGVGPRDAFHGVSELHVVVRGYQAGFQAGLQRHFAPQGHYIVQLCRLNGEPAFLHV

SEQ ID NO: 939920 - protein, 156 aa, Homo sapiens
RMERSPPRAVLVQALDGGANMLQVLADAFAGALRVAVQDGLHEALVLHGQLLQGLGRAQAEHIVAVALHRGQHHGEQAVHDLHQHQVVRGLGNGQVELRVGTRRQLGVAALLVLDHHLEAALDMVLVALRGALGGQPGRTGLQRMAGFQHVIAVVG

SEQ ID NO: 939921 - protein, 46 aa, Homo sapiens
  misc_feature (11)..(11): Xaa can be any naturally occurring amino acid
  misc_feature (26)..(26): Xaa can be any naturally occurring amino acid
EGAREWGERKXEGTVWRDKKRRPILXTLMALSRVLLPISPFIVIMV

SEQ ID NO: 939922 - protein, 92 aa, Homo sapiens
  misc_feature (37)..(37): Xaa can be any naturally occurring amino acid
  misc_feature (82)..(82): Xaa can be any naturally occurring amino acid
SLPVRGENVEISKTPYPVLTRIGLERSLRYPIQLFPXASLVCRKPKGTKVQVDDIKRVFSLFLGESPSPQYMKEDQGPFLFXELKGETMDPS

SEQ ID NO: 939923 - protein, 33 aa, Homo sapiens
QFLLLLVKNSLQNPHTHIHTHTHTHDACPSVVF

SEQ ID NO: 939924 - protein, 43 aa, Homo sapiens
MIAAAVTDSIPSVLADGSCPGNRPSRTIVARYREAGRRPGIGC

SEQ ID NO: 939925 - protein, 39 aa, Homo sapiens
IPPGPPGGPPFLGPPTGTPPPVLNFPRFPPKKGWGPPWG

SEQ ID NO: 939926 - protein, 107 aa, Homo sapiens
  misc_feature (18)..(19): Xaa can be any naturally occurring amino acid
  misc_feature (92)..(92): Xaa can be any naturally occurring amino acid
SPGEMHREKSIPVGAFPXXLKLSPSGPGWVAWPTKAKTQRLPVFHPPVKPPWLNGKHVVFAKILKGMEVGRKVESPKTTTRDKPLKDVFLPXWGKIEVEKPFPLPKE

SEQ ID NO: 939927 - protein, 46 aa, Homo sapiens
RSVPLDPIRDEFIGNWAWVIVELVYFWLKLTPLQSSLGDKARFHFE

SEQ ID NO: 939928 - protein, 76 aa, Homo sapiens
EWNLDTIPKLFLSSEKDGETKVTEMVDMPGEEQTMQFLEKNVMFKFEVPAILPEKESEDVEDVPEADSDSDKERII

SEQ ID NO: 939929 - protein, 47 aa, Homo sapiens
ILVAALTFFLGKDEDEKQDSDSESEDDGPTARDLLVQYATGKKSSKN

SEQ ID NO: 939930 - protein, 122 aa, Homo sapiens
MGSPLPTGPPKCGAVPPGGSPNARGGGLPALLDPGGPGIPCPGFPRFFPASERKPPGIFPGPEGTAPGPSALKNPCPGPPAPPARGGPLGPKAPPGGGAGPPSGGPGPGLGGALSIKPPGVG

SEQ ID NO: 939931 - protein, 153 aa, Homo sapiens
GHVALREHRGVAAVREVLVIEEAVADAGIDVDVAGRPQRQRPRFGAEAIGELDRARGRVEVLVADRGGKQSVQEGQAVSGQVAHGAGREIPRARHGDVAAIDAEVGIDQFDPGAQVEIGNGRELARLCAGQHLQRVERLLREAGQRRLVESLV

SEQ ID NO: 939932 - protein, 127 aa, Homo sapiens
LGVIVVQGITRPLAHLVSVLQRMAQGEIDSEIKEAVRGDEIGSVGRAVEGIKAMVARKAAEEAEVKRRADAAAAAERRRTMVELADGFERAVGGIVGTVSSSATELQATASTMTVTATETASQSTTV

SEQ ID NO: 939933 - protein, 72 aa, Homo sapiens
ALTGVLFGVPQKAKGEVAENPAKVQTGDVADRSFVVQGFSSRFPLPMHPWPNRTGVDLAVFIFNLFPYMGSF

SEQ ID NO: 939934 - protein, 135 aa, Homo sapiens
MRFLCGPRLLVIDEFAYARRNPDPEANTALFEVISRRYLKSSTILTSHTGIAGWGERLGDPMLAAAVLDRVLHTGIVVSIDGPSYRMRAHQKRSDALRRALHPEAIPGPPPTAGGNHADTSRPPAELQLAAAMPP

SEQ ID NO: 939935 - protein, 30 aa, Homo sapiens
FETFKLVSAFAAFDPPFAPDNPHSIKTSEA

SEQ ID NO: 939936 - protein, 103 aa, Homo sapiens
  misc_feature (32)..(32): Xaa can be any naturally occurring amino acid
GFSPFQREEHRRGRSGCSAPHGQIQETVTFKXCGHGLSPEEWGKLDPAQRDVMLENYRNLVSLWLPVSKPESYNLENGKEPLKLERKAPKSSYSGEPDRWESS

SEQ ID NO: 939937 - protein, 119 aa, Homo sapiens
  misc_feature (81)..(81): Xaa can be any naturally occurring amino acid
FGLGGGKGGPLPFLGPGNIGLGVSPKRGPFLKGRGPSPGVFWPRFGQPGPRKPRWGSLGPSFCLGPQMGGGGDWVWGFPFXLFTPPPPPIPPPRFPPKGFSPVGLERANLKKKGPRWVF

SEQ ID NO: 939938 - protein, 79 aa, Homo sapiens
  misc_feature (33)..(33): Xaa can be any naturally occurring amino acid
RFGKKRKMALILKSGEAAIVDMVPGKPMWVESXQTYPPLGRFAVRDIKPHVSVGVLKTVAKKAAGAGKVPQFAPKAQKG

SEQ ID NO: 939939 - protein, 121 aa, Homo sapiens
  misc_feature (31)..(31): Xaa can be any naturally occurring amino acid
LQPLLALGVPFFAKEKHKPQEKIKTVMGRPXRPFPSPSVFFLTQGSGRPCGFRTPKTSMFNSEGAGVKNGPQDWSPLRRPNSPSLSPPQQGIRDAAPCRSFLLTPPVDPLPFGWPFPKPKK

SEQ ID NO: 939940 - protein, 139 aa, Homo sapiens
MAGEKINKDFQVEIPEFLSAFENSLGAVDEMLKTIMSVFKNELLQKLGPLDQAKVDLVFAYPLNSMFWVFLATQGVYPKEHPVKQELERIRVFMTRVKEIPAKKKAGKLGKGAASRFVKNALWEPKSKNASKVAHKGKS

SEQ ID NO: 939941 - protein, 59 aa, Homo sapiens
  misc_feature (22)..(22): Xaa can be any naturally occurring amino acid
METGQCGLLVDSDACLLREGGXPLKHPLVCRLEGPPFRMSLMGCTMRVMATKLSAPLGM

SEQ ID NO: 939942 - protein, 132 aa, Homo sapiens
  misc_feature (4)..(4): Xaa can be any naturally occurring amino acid
  misc_feature (29)..(29): Xaa can be any naturally occurring amino acid
KGGXPPPFGSVLNSPPGRRGFWGNPPSGXFPSFFFQKRGGWFRPSGPLEGPLFFKRAPPPFFLSPSLWAPPSPRPPPLGLSPGLFWGCLQTFWVGGPQNSGGPPPGGGSLAFLGLVGAPPPGFLFGFYPPFL

SEQ ID NO: 939943 - protein, 145 aa, Homo sapiens
  misc_feature (57)..(57): Xaa can be any naturally occurring amino acid
LVVEVAHPKIIHEFGAQILRHANLLSLGVTMATHPDGFRLEGPLVAAHSLGPCIVLXEGPVRGFCPFAPGNSNPMGGVALAAPSLGFNGVIGVLVVDTSLLPAPLQAGDPFLLRSLLPPETRSFAWPFTPPIPPLPCPTSPGFPF

SEQ ID NO: 939944 - protein, 150 aa, Homo sapiens
RRISKHTFTDRIQSVASAARSRLDKAIRQASRPRLGSGRSPRSAKRDRAVRTPMGLIKTIGRKPGVQRILGVAAAGYLRLVRRTNRFTVEPEGAYGRLDATGPFIAAMWHGQHIMISFMRRPQDRVATIISRSPDGNINTLALTRLGVRV

SEQ ID NO: 939945 - protein, 107 aa, Homo sapiens
  misc_feature (29)..(29): Xaa can be any naturally occurring amino acid
  misc_feature (58)..(58): Xaa can be any naturally occurring amino acid
  misc_feature (72)..(72): Xaa can be any naturally occurring amino acid
MPRWVATRKTGAEVVLQSKALAGPDDHVXRPSLLMMTPSQIISMPVLSSAFPPGTFFXGAARLGAGFPPVAXVAARGRRGESAPLRAPGVPGPRSSAALYPLSAADI

SEQ ID NO: 939946 - protein, 103 aa, Homo sapiens
TRCSCWQTGGFGFLQSITPSSRIILYKGVLGGAAYVNPFPNIALETSDEHREFPMGAPCIFYPLGISPSGVRGLALQEFLCRLSLLWGSPGSRSHSPVGKGKG

SEQ ID NO: 939947 - protein, 134 aa, Homo sapiens
  misc_feature (39)..(39): Xaa can be any naturally occurring amino acid
FCQEQVNCPHVRWDTRFCFPEKKGGGEGCLWTCSGTPRXRVGKNGPWWWLGRQSVVLNPAWNLFLAQPGCGLTCRKSISLHPTPCAFLRQTFHGSLRFQHCQHFPSFFSCFPPLPGSSGTKAGKVSFSSLRFFF

SEQ ID NO: 939948 - protein, 112 aa, Homo sapiens
  misc_feature (51)..(51): Xaa can be any naturally occurring amino acid
  misc_feature (78)..(78): Xaa can be any naturally occurring amino acid
  misc_feature (83)..(83): Xaa can be any naturally occurring amino acid
GSSESSFGKSSFWGSAYPKIPLKDVSPRVEKGSDGMPPPAAPPAVYKVMKXCWHLDAAMRPSFLQLREQVEHIKTPEXHLCRXASAWVMGLWGLNLENHGPGAPAHWARALN

SEQ ID NO: 939949 - protein, 137 aa, Homo sapiens
  misc_feature (39)..(39): Xaa can be any naturally occurring amino acid
  misc_feature (52)..(52): Xaa can be any naturally occurring amino acid
RVFPIQESPHALGQGPAPAHVYPVSQPALQRAGPPGYRXFRALVGKAKDPHXIFSIQPPAMGPPFLPKGPGRPQPLLQVRTLVPSPPCLGAEIFPQKKAKFFVSFFSLFFFKEPIFPYVEGGSHAMKLKFLIPFFWP

SEQ ID NO: 939950 - protein, 85 aa, Homo sapiens
  misc_feature (47)..(47): Xaa can be any naturally occurring amino acid
GNIPPMPNSWQTLSGSRLYIEEKIRNAQLAQYNFLLVVGEKEKISGXVNIRTRDNKVPGGRPLFETIERVQQLKEFRSQQAEEEF

SEQ ID NO: 939951 - protein, 84 aa, Homo sapiens
KTSQYFVIKRWLSRRRRAPQGHLGYTEHKVVSFDFKATPTSPPLTLGLAIALNDHFVKLIFWYDNEFGYSNRVVDLMAHMASKE

SEQ ID NO: 939952 - protein, 113 aa, Homo sapiens
  misc_feature (47)..(47): Xaa can be any naturally occurring amino acid
RGGVSVIHPFPPRKFGLKPKGGGGNPGPPPGGPPPIFFPPVPWGGPXWGGPPSPKLPPVLRGSPPRPPLGGGALWGAPKFKIFLGPPPGKPLAGGPPPWPPRGGAPPPPGGFF

SEQ ID NO: 939953 - protein, 102 aa, Homo sapiens
GPPPPPRGLRVSPPRGPGRGGRGAPPGGGPLGGLGPPRAGASLPPGPRVGGAGAPFGGAPGGTGRFRIGGGGPPPPPPPQGPWFGFLPRIGGVFFFFFFFRR

SEQ ID NO: 939954 - protein, 111 aa, Homo sapiens
PRRVFPSPGRVGVISKTPPPLWGAPGFLGPRPFWAPGAPPGKLKGFFLFWGPPPGGFSGGKKRFAPPGFFFWPPPPFGARGFPPPGVFFLNFGPRRARGGFFFPLKFWVPP

SEQ ID NO: 939955 - protein, 114 aa, Homo sapiens
RVGTQGLAIPFGADEKDAKIPNDGQGRFGGNISGRPGGKDLPSSLGPARGKTRPFWDGAGWPSGGGPRGGGEGGNFGPPPWRPPPPGFPFLGPPPPWTPLFGLAGFFFSQTKNG

SEQ ID NO: 939956 - protein, 151 aa, Homo sapiens
  misc_feature (8)..(8): Xaa can be any naturally occurring amino acid
AKKKKKKXPGPPKAPAKKPKKPAAKKACIKPVGATAKRQGTPGPTGHHNGRRRIHRKALMRVYVAQLVARPAFKVPFLVGQYLLYGFEVRPFFPCSRQPCPHVVDCFVSRPTEKTVFLLVMYVVSCLCLLLNLCEMAHLGLGSAQDAVRGR

SEQ ID NO: 939957 - protein, 131 aa, Homo sapiens
  misc_feature (96)..(96): Xaa can be any naturally occurring amino acid
  misc_feature (124)..(124): Xaa can be any naturally occurring amino acid
  misc_feature (126)..(126): Xaa can be any naturally occurring amino acid
RPGPLRLKRVWQKSLLPKWRVLEYNLPPRKGNFLPGPFHRVSQLNSDSNRSPSLRIPSAGKGLWAKGFSKRRVTFWLLWPRLPALGPLPAVVPHFXAVGRPPGPFGLWVMEGTALPCGDSPHSXHXVAPPG

SEQ ID NO: 939958 - protein, 138 aa, Homo sapiens
LCRAPAVLTSTRTSAEDGSQSPKGPIQILPGALPLHLEPGHQFTKVLALYNSINRAPRRPRFWYPRRWNPCPLCYSWAPNPKWSNCPTLLCAPSNSTKVPPRPAPPRQGRPPPPPPPLPFPWGVYLRTPVPQTPLGPP

SEQ ID NO: 939959 - protein, 139 aa, Homo sapiens
MGARVDMFEVGLAPVPSLFNQMILIRRVGRSLGPPTPTMGLAPPEAPAPQKLGFQLAQKMGRLGGNHQRGVFPQQGPLGGFFPGPKGGFPQKKGFLGPGGFPPPPFPTGLLAFPFVFPLGPPPLKALTPPPALKGCFKF

SEQ ID NO: 939960 - protein, 89 aa, Homo sapiens
  misc_feature (41)..(41): Xaa can be any naturally occurring amino acid
FGPLGAPPPWGRDPPVFSLPPGGAGGGFSPVGGPPRGAGGXFSPPGGIFPRKNPPPPRVWGGGAPFFGKNPGPPGGPPPPPRGGGGGFF

SEQ ID NO: 939961 - protein, 102 aa, Homo sapiens
FPKIKFGPPLSFVFRAGKGGGPPSLAGFGPLAGGFPFKLERGGGPPGAIKGLGFSLPPFPGALGVLYRALFSPPGLFAGGPFPPFRFVFSPGPDLKGGVWAF

SEQ ID NO: 939962 - protein, 125 aa, Homo sapiens
  misc_feature (13)..(13): Xaa can be any naturally occurring amino acid
KPHLFPFKVTGPXGFVVGASSLPPGGLGLFPPLCLKNCSLWVGSMAGTPQAGGALPPWGNLPRPPFMPFFRPPATWPPPFGRGLVSPSFPFRGSLAPSSRPPPEFPGRGLRAPLGVPPRGFFPKK

SEQ ID NO: 939963 - protein, 81 aa, Homo sapiens
GALPKVNGPSCCSRVADALLASKGAYLLMELAKSQDKTLKIYEGAYHVLPKELPEVTNSVFHEINMWVSQRTAPAGIGSPP

SEQ ID NO: 939964 - protein, 115 aa, Homo sapiens
ISCLKSTWVLAPWQQWLFFKISLGPTLKRRKPKILLTKPLQLAFSTTLAPETTFTFGLSTKTKWIFSGQTQCPTKKGPGLAGTGVKKGLLQSSLKKSLLWKFRGWKKQFQPWTLP

SEQ ID NO: 939965 - protein, 121 aa, Homo sapiens
RWSGTWKKNLVCLQGSLFLSLGAPRGGTFKPWPPTSRISPQKCWVWPGPPNRLPRVVPVSGGFSIPAPRIRARVTLGAPPLPFTWSTPGAFSRIFSAGADRFSRFQTVGGGPWGLSPVSFF

SEQ ID NO: 939966 - protein, 117 aa, Homo sapiens
GRHGWGKRTRGSKPGGGQAKCVFSPFPPLSPKMPQKGQTKAWLPLLHVFWGFSWSMKTPKDSLSLPFDAKADQAVPLQFHGEVSSFSSLKKFLEKSLSAHAAFPSVKGVGWGGFPCP

SEQ ID NO: 939967 - protein, 93 aa, Homo sapiens
PFLPMAPASPLLNGNPDCGGGCHVWYVKIASKYILCQCPQWLDMAPFSSFQTTTGIRRACFGCAFRREAYVNKRAGPGFVVPPPTPNTALWVL

SEQ ID NO: 939968 - protein, 110 aa, Homo sapiens
VVQTGQQGPPFTSPAPLVFWKTGFEKPKVFALEISPQGLGLPVPKRFPPGEFFRGKGPPLVLSFSLAPPPPLGFYPFFPGGPPLFGVSRFFFPPPPPPPLGFFLVMLGGN

SEQ ID NO: 939969 - protein, 117 aa, Homo sapiens
MRKWISCHQKPPLPKRGISISSRSPASLNLGPKAKMAERTLAKIFPVPCFTLFYFSDPSPPPIEPVACHLVSPLCLFFLMDLFPPLLPLSPWIIRLGMGVRGVIVFKKVANKNPPMW

SEQ ID NO: 939970 - protein, 62 aa, Homo sapiens
GNALTPKLAPVQIKVEENFGFETNEALDSSWVFRGPNKMLPYPTLASPAFDGRMPNKLAPPS

SEQ ID NO: 939971 - protein, 80 aa, Homo sapiens
SPREQKRRHHVPLLTLAKHDNGRVVARSFDAEVRAVIRIGSVGIAFLVVQIVFGLIADEVFEREAVMCGNVVQAGGRPAA

SEQ ID NO: 939972 - protein, 172 aa, Homo sapiens
RALDQFSPVVEAKLIKHKKGIVNEQFCCNGWQTGPSTFIPWWWFSQGPQNPLVRATPRPSIKKFFVTPGVLRLQLRIQKGMAPLQFYPWQQKFFPNFKSISKALVERGGVVTNNPLGFLILPARACPSYVPSLKPKPKPLSLRPWFVPKGPSVPNTVPAFKSPFCLANNKNF

SEQ ID NO: 939973 - protein, 151 aa, Homo sapiens
RFDRALWSANNVRRAPGSERDSLLRLRPRPGTSELHSALALPGPPLHCPDPRGLALRAPPRRLRARRASRAPGLRAAGRRAPGCRGGSRAADPSAPEAAVRRLARRLPPAGRCVREPVGLARALRRVYSKGVSANPTARAAFHPELEKPRP

SEQ ID NO: 939974 - protein, 61 aa, Homo sapiens
MHAYTGMCARPHHAFLGPLVHSSSALLFSLLMSQSYMYSIVIGIHVRLRHQETKVLSCTVK

SEQ ID NO: 939975 - protein, 128 aa, Homo sapiens
  misc_feature (11)..(11): Xaa can be any naturally occurring amino acid
  misc_feature (30)..(30): Xaa can be any naturally occurring amino acid
AGPREGGGVTXPCPGELGLRARRCGQGHAXQPLLGATAAASQQPASFGLSGEAMGQRLYNVNPPLAFVKAAELKDEGRSYFKKRKQLRELKIPTTYQVKYITKLIFPTRHRLSVPLGSVCYKIFKGRF

SEQ ID NO: 939976 - protein, 36 aa, Homo sapiens
GVSEEKEERHTQRLSRRAIHKQWPTGSDGTAVGSNN

SEQ ID NO: 939977 - protein, 113 aa, Homo sapiens
MPPEFKDLSIVRETKPLQKKCADYQINGEFICKCGQAWGPIMVPKGLDLPCLKIRNFVVVFKNNSPKNQSKKWVEFPIPFPIFAYSECCLLSNKDKPLIENSFKKQPVNHLKG

SEQ ID NO: 939978 - protein, 77 aa, Homo sapiens
PQKALAGLAVFKMSKTQPGAVAQACNPENLGRPRQADHLRLGVRDQPDQHGETPSLLKIQNKPGVVVHACNPSYSGG

SEQ ID NO: 939979 - protein, 177 aa, Homo sapiens
  misc_feature (7)..(7): Xaa can be any naturally occurring amino acid
QRAVDRXVRPASKAPRIPRAPGWVHLAHRGMPHGSVPTKVRAGPGFNLEELRVAGIHKKVARTIGISVDPRRRNKSPESLQANVQRVKEYRSKIILFPRKPRPPKKGDSFVEKLKLAPQLAGPVMPVRNVYKKEKARVFPEEKKNFKAFASLRMGRANARLFGITGKKSQGTPKTGC

SEQ ID NO: 939980 - protein, 106 aa, Homo sapiens
MGKPDPLRDSGTYDQKEEPLERDFDRFIGATANFNRFTLWGLETIPGPDAKVGGALTWPTLAAAIHAQGPEDGEPELEIQSCDPFPAVNQLFGTDSIPPIKELFPA

SEQ ID NO: 939981 - protein, 113 aa, Homo sapiens
LNISPCWGRENKAQLLSRGSPWGSVKAPWRPLKSKCLWKPLQLHPPTLSPRKAPHQPSPRRPSSRPLRVLPFSCNLAANTPARPLRCLLQPMFLQALHRVALINFWLRNEINE

SEQ ID NO: 939982 - protein, 73 aa, Homo sapiens
  misc_feature (61)..(61): Xaa can be any naturally occurring amino acid
PRRKPEKAGLLENRWFNGSRSRGAVTRAGLQKSLLPPVLNGKKPPRRLLQLHAFKAPFQKXAGGAVWPPSQKK

SEQ ID NO: 939983 - protein, 79 aa, Homo sapiens
GAQRRFQLWFQNIELVNWADGGQHTSIHPAVRLKLPLPPLPPGGANFFGQQEPKPTSKLACPKPLISLFPFAPPQPRGV

SEQ ID NO: 939984 - protein, 73 aa, Homo sapiens
ASMEFVGYKDFLAAAGHLDVYVQFTGVTMAELWLRGLTLTSDDPPASASQNAGITGVSHCARLGSYVTRMFVQ

SEQ ID NO: 939985 - protein, 129 aa, Homo sapiens
FFQNRNPVGKGSFAGGPRTDSFPDCTPGGVTRPLCAASFVKGCNSDLARSSGVLSPSKVFRTGKRLSSSKAPVLGPPRGGRVPPFGPWVGPPLPPYKNQTGFPGRQQGQPPPRVGSSPAGLFCNKVPGV

SEQ ID NO: 939986 - protein, 92 aa, Homo sapiens
GTGGPTTWEEFRKWFTQHTFLQQSCCLDLTTSYNNLATYVFLHTVKGTPFRLLTKERLGYCTLGAKDYGLQFTSSRKFLSISPNVLYFLANF

SEQ ID NO: 939987 - protein, 122 aa, Homo sapiens
EARSGEGDTPPNGYSRGGCPSGAARAGPSLPQPPFVEQSRFGETPSFRLGSPPQGAGVARPKKFPPGGGLKGKGPPPGPRVQAGPPPSLGLWPFFPGGPPPIGGPRVIFPPPPPPPPGVLFW

SEQ ID NO: 939988 - protein, 55 aa, Homo sapiens
  misc_feature (27)..(28): Xaa can be any naturally occurring amino acid
  misc_feature (40)..(40): Xaa can be any naturally occurring amino acid
  misc_feature (52)..(52): Xaa can be any naturally occurring amino acid
MGIKHSVEILVIGRGAGAQPVSLCSPXXTERGSSGSLYLXDAHLNPNRGPSXEKP

SEQ ID NO: 939989 - protein, 64 aa, Homo sapiens
  misc_feature (6)..(6): Xaa can be any naturally occurring amino acid
  misc_feature (20)..(20): Xaa can be any naturally occurring amino acid
  misc_feature (33)..(33): Xaa can be any naturally occurring amino acid
  misc_feature (40)..(40): Xaa can be any naturally occurring amino acid
  misc_feature (50)..(50): Xaa can be any naturally occurring amino acid
EFGTRXRLAFFFLSLLPFSXAPSVESTSSSFRXPLSGWSXAVFSGLEANXDAGHVVTPGTIPRS

SEQ ID NO: 939990 - protein, 82 aa, Homo sapiens
  misc_feature (58)..(58): Xaa can be any naturally occurring amino acid
  misc_feature (75)..(76): Xaa can be any naturally occurring amino acid
LQEFGTRICNLSPNPVLAKTCAVLTQGLMDLGLCRMCFVKNVFAGSMLGKRHRHAPFXVTQGHSALWKAADPLPXXARVLSK

SEQ ID NO: 939991 - protein, 82 aa, Homo sapiens
  misc_feature (3)..(3): Xaa can be any naturally occurring amino acid
  misc_feature (26)..(26): Xaa can be any naturally occurring amino acid
  misc_feature (44)..(44): Xaa can be any naturally occurring amino acid
  misc_feature (62)..(62): Xaa can be any naturally occurring amino acid
  misc_feature (64)..(64): Xaa can be any naturally occurring amino acid
IRXEDLSWCLFYKGTNPIYEDTALIXLITFQRPHASSCRIRRKXSRGGGLQVHATTPGKFLXFXVETGFHPVSQDGLDILTS

SEQ ID NO: 939992 - protein, 96 aa, Homo sapiens
  misc_feature (23)..(23): Xaa can be any naturally occurring amino acid
  misc_feature (35)..(35): Xaa can be any naturally occurring amino acid
  misc_feature (67)..(67): Xaa can be any naturally occurring amino acid
  misc_feature (80)..(80): Xaa can be any naturally occurring amino acid
FGRGQPEEGEFSRTSLESHVEWXVWRERGTFRYMXQQEIGNLQGEAKGIHTPTSLSALTLISCHNSXWAKLDQKASELEXPVDVVHSVHLFQGKRV

SEQ ID NO: 939993 - protein, 111 aa, Homo sapiens
  misc_feature (18)..(18): Xaa can be any naturally occurring amino acid
  misc_feature (43)..(43): Xaa can be any naturally occurring amino acid
  misc_feature (56)..(56): Xaa can be any naturally occurring amino acid
  misc_feature (74)..(74): Xaa can be any naturally occurring amino acid
  misc_feature (76)..(76): Xaa can be any naturally occurring amino acid
  misc_feature (97)..(97): Xaa can be any naturally occurring amino acid
  misc_feature (101)..(101): Xaa can be any naturally occurring amino acid
SFKTVSRSVACCPCLLCXIGSLQPLPPKLKGFSCLILPSSWNXRHVPPCLTDFCIXSRDMVLPFGQAGLKRLIXSXPPTSASQSVGIAGVSTCAQPXRPFXHTWLGILAVC

SEQ ID NO: 939994 - protein, 67 aa, Homo sapiens
  misc_feature (27)..(27): Xaa can be any naturally occurring amino acid
  misc_feature (41)..(41): Xaa can be any naturally occurring amino acid
  misc_feature (58)..(58): Xaa can be any naturally occurring amino acid
  misc_feature (63)..(63): Xaa can be any naturally occurring amino acid
SGVPYFYLSPLQLSVSNLQENPYATLXMTLAKDKLLQRNMXLNSKKSLCVKIMLEGMXTKVNXTEIG

SEQ ID NO: 939995 - protein, 136 aa, Homo sapiens
  misc_feature (1)..(1): Xaa can be any naturally occurring amino acid
  misc_feature (70)..(70): Xaa can be any naturally occurring amino acid
  misc_feature (98)..(98): Xaa can be any naturally occurring amino acid
  misc_feature (100)..(100): Xaa can be any naturally occurring amino acid
  misc_feature (120)..(120): Xaa can be any naturally occurring amino acid
  misc_feature (126)..(126): Xaa can be any naturally occurring amino acid
XIRHEATPYHSTPFHSTPFHFTPIHSIPLTSIPFHSSQFHSTHSPFHSISLHSTPLHSTPFHSIPFHSTXLISTPLHSTPFHSIPFCTFLLHSTPLHXTXLHSTPFHSIPFHSMTIPTNXFHFHYXPIQAIPLPLH

SEQ ID NO: 939996 - protein, 82 aa, Homo sapiens
  misc_feature (2)..(2): Xaa can be any naturally occurring amino acid
  misc_feature (69)..(69): Xaa can be any naturally occurring amino acid
HXLGTAGQKALELVACIEEVGLAEETATVCGLLATGGQLALRGFSFPVWKAADGLSLIQGCRLHREHFXSLRFRLVLSDTTA

SEQ ID NO: 939997 - protein, 80 aa, Homo sapiens
  misc_feature (5)..(5): Xaa can be any naturally occurring amino acid
  misc_feature (8)..(8): Xaa can be any naturally occurring amino acid
  misc_feature (70)..(70): Xaa can be any naturally occurring amino acid
VTINXRRXQVTQAKLKFRPKSDLTKKAIRETTTQIPQLVIPRLSTTTRLVLQKTRHQISPKTLHSDQHPXQHLPYRIAHQ

SEQ ID NO: 939998 - protein, 37 aa, Homo sapiens
  misc_feature (19)..(20): Xaa can be any naturally occurring amino acid
  misc_feature (31)..(31): Xaa can be any naturally occurring amino acid
  misc_feature (35)..(35): Xaa can be any naturally occurring amino acid
MSKRRVGETDVRQHVRAQXXSQILAHSPFSXIRHXSS

SEQ ID NO: 939999 - protein, 96 aa, Homo sapiens
  misc_feature (30)..(30): Xaa can be any naturally occurring amino acid
  misc_feature (70)..(70): Xaa can be any naturally occurring amino acid
  misc_feature (75)..(75): Xaa can be any naturally occurring amino acid
  misc_feature (79)..(80): Xaa can be any naturally occurring amino acid
  misc_feature (83)..(84): Xaa can be any naturally occurring amino acid
MQNSALKAWLDSSYLSGANQSWIEQLYEDXLTDPDSVTLTGVRRSSSYLVRESNPDQFHSQTREYFRRLXKDASXLLFXXSPXXDTNCEAWLNVPV

SEQ ID NO: 940000 - protein, 74 aa, Homo sapiens
  misc_feature (6)..(6): Xaa can be any naturally occurring amino acid
  misc_feature (18)..(18): Xaa can be any naturally occurring amino acid
  misc_feature (21)..(22): Xaa can be any naturally occurring amino acid
  misc_feature (30)..(30): Xaa can be any naturally occurring amino acid
VSTGKXPLQPSSGLTGWXDVXXPGHTEQAXPVGAPMRTPAEPWTIYRHTASCRPDAPPVFRSSAHPCFIGLFVC

SEQ ID NO: 940001 - protein, 42 aa, Homo sapiens
  misc_feature (21)..(21): Xaa can be any naturally occurring amino acid
  misc_feature (32)..(32): Xaa can be any naturally occurring amino acid
  misc_feature (38)..(38): Xaa can be any naturally occurring amino acid
MSPSDTTGLLTPASTICRVSXNSYKVALLMKXSGSNLXGKSS

SEQ ID NO: 940002 - protein, 44 aa, Homo sapiens
  misc_feature (1)..(2): Xaa can be any naturally occurring amino acid
  misc_feature (15)..(15): Xaa can be any naturally occurring amino acid
XXSNRIMIRHLPLAXFMSWDTMYSVGGKLITLERQRHDRVSQLY

SEQ ID NO: 940003 - protein, 51 aa, Homo sapiens
  misc_feature (2)..(2): Xaa can be any naturally occurring amino acid
  misc_feature (17)..(18): Xaa can be any naturally occurring amino acid
  misc_feature (48)..(48): Xaa can be any naturally occurring amino acid
VXTVVGTSEDVIGCSAXXTYSLFDCVDVSWSELRTYNRMREVIWQFHXARG

SEQ ID NO: 940004 - protein, 36 aa, Homo sapiens
  misc_feature (2)..(2): Xaa can be any naturally occurring amino acid
  misc_feature (19)..(19): Xaa can be any naturally occurring amino acid
  misc_feature (21)..(21): Xaa can be any naturally occurring amino acid
MXPIVINRLQRKLGYTFNXQXLLQQALTHRSASSKH

SEQ ID NO: 940005 - protein, 138 aa, Homo sapiens
  misc_feature (1)..(1): Xaa can be any naturally occurring amino acid
  misc_feature (29)..(29): Xaa can be any naturally occurring amino acid
  misc_feature (76)..(76): Xaa can be any naturally occurring amino acid
  misc_feature (80)..(80): Xaa can be any naturally occurring amino acid
  misc_feature (90)..(90): Xaa can be any naturally occurring amino acid
  misc_feature (119)..(120): Xaa can be any naturally occurring amino acid
XRHEGLSALTARYPCAVQIISEERFRQLXKIKTIGSTYMAASGLNASTYDQVGRSHITALADYAMRLMEQMKHINXHSFXNFQMKIGKKXWIMARFPRAVFWGEAGGSRLGDGVSGVLXXGFLFLLLPISSDVRIDPF

SEQ ID NO: 940006 - protein, 122 aa, Homo sapiens
  misc_feature (82)..(82): Xaa can be any naturally occurring amino acid
  misc_feature (108)..(108): Xaa can be any naturally occurring amino acid
MWLLADCGNPQHRSTCEDPLFVTNVDDTRLDDIAAWTYRAPVEDQARLGFAIAHALDNSAPAVDGIEPELQSKIDVIVQALXGAKKPLIISGTNGGSLEVIQAAANVXESPERSRALTSVSP

SEQ ID NO: 940007 - protein, 127 aa, Homo sapiens
  misc_feature (50)..(50): Xaa can be any naturally occurring amino acid
  misc_feature (63)..(63): Xaa can be any naturally occurring amino acid
  misc_feature (72)..(72): Xaa can be any naturally occurring amino acid
  misc_feature (90)..(90): Xaa can be any naturally occurring amino acid
  misc_feature (97)..(97): Xaa can be any naturally occurring amino acid
RSISHIVGNAEGGQRATGHQHLFANVHHLVQLGRVRVEIDHIARLFRRLXAGVHRHRDICLRXAGSIVGAVXGHRYQTTFRLILTDQCQXGLRCRFXEKIIDTRLRSNRGGSQTVIGGNHHRFNGHF

SEQ ID NO: 940008 - protein, 62 aa, Homo sapiens
  misc_feature (15)..(15): Xaa can be any naturally occurring amino acid
  misc_feature (31)..(31): Xaa can be any naturally occurring amino acid
  misc_feature (39)..(39): Xaa can be any naturally occurring amino acid
  misc_feature (45)..(45): Xaa can be any naturally occurring amino acid
  misc_feature (48)..(48): Xaa can be any naturally occurring amino acid
  misc_feature (62)..(62): Xaa can be any naturally occurring amino acid
MVPVSPLIIRADNPXRDEVGFLCQPAVTVIXVKIVRVKXRYGYPXTLXRVAVPGASSGSCSX

SEQ ID NO: 940009 - protein, 114 aa, Homo sapiens
  misc_feature (85)..(85): Xaa can be any naturally occurring amino acid
  misc_feature (94)..(94): Xaa can be any naturally occurring amino acid
DKFNQVMAGIDAAFEAGFEKVKVNTVLMRDVNHHQLDTFLNWIQHRPIQLRFIELMETGEGSELFRKHHISGQVLRDELLRRGWXHQLRQRSDXPAQVFCHPDYVGEIGLIMPY

SEQ ID NO: 940010 - protein, 96 aa, Homo sapiens
  misc_feature (7)..(9): Xaa can be any naturally occurring amino acid
  misc_feature (36)..(36): Xaa can be any naturally occurring amino acid
NSARARXXXDDVDAFNFIRTIAVARIMMPTSYVRLXAGREQMNEQTQAMCFMAGANSIFYGCKLLTTPNPEEDKDLQLFRKLGLNPQQTAVLAGGA

SEQ ID NO: 940011 - protein, 111 aa, Homo sapiens
  misc_feature (15)..(15): Xaa can be any naturally occurring amino acid
  misc_feature (59)..(59): Xaa can be any naturally occurring amino acid
  misc_feature (74)..(74): Xaa can be any naturally occurring amino acid
EISRGQFENAFNSEXNRMQQQLGDQYSELAANEGYMKTLRQQVLNRLIDEALLDQYARXLKLGISDEQVKQAIXATPAFQVDGKFDNSRYNGILNQMGMTADQYGQALRNQ

SEQ ID NO: 940012 - protein, 128 aa, Homo sapiens
  misc_feature (1)..(1): Xaa can be any naturally occurring amino acid
  misc_feature (6)..(6): Xaa can be any naturally occurring amino acid
  misc_feature (33)..(33): Xaa can be any naturally occurring amino acid
  misc_feature (106)..(106): Xaa can be any naturally occurring amino acid
  misc_feature (119)..(119): Xaa can be any naturally occurring amino acid
  misc_feature (122)..(122): Xaa can be any naturally occurring amino acid
XQGIHXTKQGGRTVEHLATVDRSRLFVAVIAIXYLSLAEQSGFFTLPLVPKIPPAQAERKIERPPGFAGNKIFRIKQPRTADIPRTNRHLRQPVTLFPQTQFEDLXGFIFIRLIARERXGRXLVTCRV

SEQ ID NO: 940013 - protein, 107 aa, Homo sapiens
  misc_feature (92)..(93): Xaa can be any naturally occurring amino acid
GLQTANEKSMKHESCQTLQPEAQKKAEAAAAALKKKAEGSEAAAAEARKKAATEAAEKAKAEAEKKAAAEKAAADKKAAAEKAAADKKAAEXXAAEKAAADKKAAAE

SEQ ID NO: 940014 - protein, 115 aa, Homo sapiens
  misc_feature (11)..(11): Xaa can be any naturally occurring amino acid
  misc_feature (32)..(32): Xaa can be any naturally occurring amino acid
  misc_feature (76)..(76): Xaa can be any naturally occurring amino acid
  misc_feature (91)..(91): Xaa can be any naturally occurring amino acid
  misc_feature (102)..(103): Xaa can be any naturally occurring amino acid
MLNAPGISTIXGVVCGDLTGKPAPYVGPQDVXLAIIGAVFKNGYVKNKVMVFVGPGVQALSTDFRNSVDVMTTETXCLSSVWQTDEEVHNXLALHGRGQDYXXLNPQPNGYYDVC

SEQ ID NO: 940015 - protein, 91 aa, Homo sapiens
  misc_feature (10)..(10): Xaa can be any naturally occurring amino acid
  misc_feature (12)..(12): Xaa can be any naturally occurring amino acid
  misc_feature (46)..(46): Xaa can be any naturally occurring amino acid
  misc_feature (76)..(76): Xaa can be any naturally occurring amino acid
PVVASYSEQXCXGAYVSLTAKYPIGEHVVLMASAGYSELPEEITDXPMIDRNESFTFVTGAELAFLIHRWMSVRLXLRRNATKVVTLDLLC

SEQ ID NO: 940016 - protein, 111 aa, Homo sapiens
  misc_feature (66)..(66): Xaa can be any naturally occurring amino acid
  misc_feature (90)..(90): Xaa can be any naturally occurring amino acid
  misc_feature (99)..(99): Xaa can be any naturally occurring amino acid
MSETITGELPNLREKVVWGEISPFRPFCSKRCQLIDLENGLLKKNESPAVAIFPKAMTGAKNQSSXICLMPHVGLIRRGQRRNQASCANXGCGVNALSXLQKQNLSMMLEI

SEQ ID NO: 940017 - protein, 73 aa, Homo sapiens
RFPRVLSQPQVRALPGRGELINIPPLMVELKKHKPNFDVPETALRFAGHFLEPYPLPSWVKNYSEVSLQKINI

SEQ ID NO: 940018 - protein, 76 aa, Homo sapiens
KAFLGDPSAFGGAAPVGVAPPTAPVVAAAPAKVEPKEKSEESAEDMGFGLFDYSPKSNPLSPFFLPTKEIKASFFL

SEQ ID NO: 940019 - protein, 114 aa, Homo sapiens
  misc_feature (9)..(9): Xaa can be any naturally occurring amino acid
MVECSDSTXVGFSQYGSDCSGQRCFTMVNVADSTDVNVRFCTFKLFFRHRLSLYDTDKSVISPHQPGNMPDLLNAIKEGKNREEKRSGADRQIRTADLTLTKGALYQLELIIQH

SEQ ID NO: 940020 - protein, 122 aa, Homo sapiens
  misc_feature (75)..(75): Xaa can be any naturally occurring amino acid
  misc_feature (104)..(105): Xaa can be any naturally occurring amino acid
DELHLQTLTQFKQRGDRTSIQSRCFIEEQQAARRDIFTAQASRFIFPALYHHHQNRQYRYQSPHRSTMHQTLRAXAIGTTVNLNFHFQIVAVIQQFFTDGLRRXXPHYQSAGLRRLIQFLPV

SEQ ID NO: 940021 - protein, 126 aa, Homo sapiens
  misc_feature (94)..(94): Xaa can be any naturally occurring amino acid
  misc_feature (108)..(108): Xaa can be any naturally occurring amino acid
  misc_feature (112)..(112): Xaa can be any naturally occurring amino acid
  misc_feature (120)..(120): Xaa can be any naturally occurring amino acid
  misc_feature (126)..(126): Xaa can be any naturally occurring amino acid
IIASGELLMTFAPPRFEIEHCAVAHREQFFPAGFAQHAVTVHQTGEMAQLRIVFDSSKQRHHKRQLGRGFTATHRYPFDKQHCFAVMAKHFGHXHGLRHGVGMLRALXQVGXTLFANPQXFHTILX

SEQ ID NO: 940022 - protein, 100 aa, Homo sapiens
  misc_feature (34)..(34): Xaa can be any naturally occurring amino acid
  misc_feature (39)..(39): Xaa can be any naturally occurring amino acid
  misc_feature (45)..(45): Xaa can be any naturally occurring amino acid
  misc_feature (65)..(65): Xaa can be any naturally occurring amino acid
  misc_feature (81)..(81): Xaa can be any naturally occurring amino acid
IFGLANPDDVRNICDAKGNSFVDAMKVCGFTLPXAPLTXRQAIIXFVELHIEQGCVLESNGQSIXVVNAIVGQRRYTVNVXRRIKPCRHHADGVIRRDTD

SEQ ID NO: 940023 - protein, 132 aa, Homo sapiens
LVPECWQCPGQKPCFPTPLALKFLGPVSPPPPPRRKPGKGPVIFGPCFLLTPPHFCERVGPGQRLFKFCLALFGKSPLSPLKAFFPPFGGAFGVLLFLVPVLSPLRLGPPPDSPPWGKAWPPPGFPKVPLFP

SEQ ID NO: 940024 - protein, 104 aa, Homo sapiens
  misc_feature (39)..(39): Xaa can be any naturally occurring amino acid
  misc_feature (47)..(47): Xaa can be any naturally occurring amino acid
  misc_feature (57)..(57): Xaa can be any naturally occurring amino acid
  misc_feature (95)..(95): Xaa can be any naturally occurring amino acid
  misc_feature (101)..(101): Xaa can be any naturally occurring amino acid
  misc_feature (104)..(104): Xaa can be any naturally occurring amino acid
LAVTSSTTKSSYGWARIHRNNDSSSCSTASSLKKANARXASSRHSSXGCGGCPPHLXAQSQSRYVPKACSAHGRTVPANGNRYCPYRTIPGRCVXLRGRRXYAX

SEQ ID NO: 940025 - protein, 152 aa, Homo sapiens
  misc_feature (40)..(40): Xaa can be any naturally occurring amino acid
RNPVKHGGSRLYGVSFCQEPRGGPLGGQMGGQAHPRQPPXRGGALSLGAVPTGSPQVCPASQKGRPFSFNRGRGRPGRPPVLTTAPALCRVGLPCLPSQRLPFGLSFGQREPFGGPACFFWFWGGGGGGGRAPPPPWFFFPAKGKKVLFPFL

SEQ ID NO: 940026 - protein, 237 aa, Homo sapiens
  misc_feature (83)..(83): Xaa can be any naturally occurring amino acid
GLPPEILPRCGRGGPDLPGFHRFSVTQVFFPSLGGCFCDPASFRHLRRWEGVGGTFPVGRFALALVPRARFRFKKNPGGPGCXFLVPPSAPPGWKFYPFPPPEDFWTGAVGPFLPSGAPPKGGAPPPLFFSPGPGFRFGFPLTPFFKPGGQPPPRGVSFGVSPKRVERGGFPPFFFSPLGPKGGFSRKGISGVFFFGGRGAQPKFSPPGGGVSFPNFTPPWSFFFGPPAPNKTPFFF

SEQ ID NO: 940027 - protein, 130 aa, Homo sapiens
  misc_feature (2)..(2): Xaa can be any naturally occurring amino acid
  misc_feature (12)..(12): Xaa can be any naturally occurring amino acid
  misc_feature (14)..(14): Xaa can be any naturally occurring amino acid
  misc_feature (19)..(19): Xaa can be any naturally occurring amino acid
  misc_feature (40)..(40): Xaa can be any naturally occurring amino acid
  misc_feature (74)..(74): Xaa can be any naturally occurring amino acid
  misc_feature (114)..(115): Xaa can be any naturally occurring amino acid
  misc_feature (126)..(126): Xaa can be any naturally occurring amino acid
FXPWLKFSIGFXIXTLVFXLILRKDFSHSSAAAGTIFAFXSFTTLLFYSTYGALYLSEGFNPRIESLMTAFYFXIETMSTVGYGDIVPVFLNQHDCSLFRSLFPALPFFATSMXXIFGSGYPRGGXRYPN

SEQ ID NO: 940028 - protein, 86 aa, Homo sapiens
  misc_feature (20)..(20): Xaa can be any naturally occurring amino acid
  misc_feature (34)..(34): Xaa can be any naturally occurring amino acid
  misc_feature (55)..(55): Xaa can be any naturally occurring amino acid
  misc_feature (68)..(68): Xaa can be any naturally occurring amino acid
RHERTETLQKLCPGGQLPFXLYGTEVTTDTNKIXEFLEAVLCPPRYPKLAALNPXSNTAGLDIFAKFXAYIKISIPALNDNLVKGS

SEQ ID NO: 940029 - protein, 131 aa, Homo sapiens
  misc_feature (6)..(7): Xaa can be any naturally occurring amino acid
  misc_feature (27)..(27): Xaa can be any naturally occurring amino acid
  misc_feature (39)..(39): Xaa can be any naturally occurring amino acid
  misc_feature (91)..(91): Xaa can be any naturally occurring amino acid
  misc_feature (98)..(98): Xaa can be any naturally occurring amino acid
  misc_feature (106)..(106): Xaa can be any naturally occurring amino acid
  misc_feature (124)..(124): Xaa can be any naturally occurring amino acid
  misc_feature (130)..(130): Xaa can be any naturally occurring amino acid
SGTSIXXNGNSVNALPELKNSKAIYNXQQKAPTVVGPVXGIYNPSADAIKLFTKEPLKPATSTITLYITDPTISSHHRSSTMNPPPHTQPXGQPQPRXYYYILATXKPSRLLNPMIRVSIKLKXTAMIGXL

SEQ ID NO: 940030 - protein, 131 aa, Homo sapiens
  misc_feature (9)..(9): Xaa can be any naturally occurring amino acid
  misc_feature (11)..(11): Xaa can be any naturally occurring amino acid
  misc_feature (57)..(57): Xaa can be any naturally occurring amino acid
  misc_feature (129)..(129): Xaa can be any naturally occurring amino acid
RVRSLWPNXPXNLQYFIHDKISNDSKWREVQIIFSGHEVPGEGEHKIMNFIRHLKSXKDFNQNTRHCIYGLDADLIMLGLSTHGPHFALLREEVTFGRRNSEKKSLEHPNFYLLHLSLLREYMELEFLXPG

SEQ ID NO: 940031 - protein, 32 aa, Homo sapiens
SAPFPPGPRAKDARPPPSPCLPVPENKVLLDF

SEQ ID NO: 940032 - protein, 79 aa, Homo sapiens
  misc_feature (45)..(45): Xaa can be any naturally occurring amino acid
KESSSSDSSSSSSSDSESEKEESNDKKRKSEDAEEEEDEESSNKXPKNEETEEPATIFVGRLSWSIDDEWLKKEFLQPG

SEQ ID NO: 940033 - protein, 168 aa, Homo sapiens
  misc_feature (59)..(59): Xaa can be any naturally occurring amino acid
  misc_feature (93)..(93): Xaa can be any naturally occurring amino acid
LLSFKRKDGLGARHRFPFRDLGFPTQEAWESFLLRLYNCSGPLSTASNLFRGVFVVVKXKVVALVPSIQALFKQFPSFFLFFLKVFFFFFQFXGAPRGGKEEFSPPKLFLPPFFKLKFFHPLFPFRFRGPPLSPSLIFFLPALFRPISSPFWGFFPNFFFVFFPWVFF

SEQ ID NO: 940034 - protein, 72 aa, Homo sapiens
IYEVDKQDCRQFCPTGIDGAMTIWDFKTPEFSIQGLLDNVKLSEPPPSSMTNCGRPQLFRGTMARKPAPRKP

SEQ ID NO: 940035 - protein, 96 aa, Homo sapiens
  misc_feature (32)..(32): Xaa can be any naturally occurring amino acid
RNQHIMIYLGAGHHNKINWAMEDKQEMVDIIXTVYPGAPKGPGLVVSPKDYSPKYRFLGAAQFARINVVEPLLYGNVFSYLKAFGKYRKLQGWSPF

SEQ ID NO: 940036 - protein, 63 aa, Homo sapiens
MEFRPVGVPKKNPPKNPPKGRNGPPPRAGMTAFFLLGSWAFSEFFPMPINLDLHLLIKTPATP

SEQ ID NO: 940037 - protein, 138 aa, Homo sapiens
  misc_feature (44)..(44): Xaa can be any naturally occurring amino acid
MLGVRLGPTSAKIPFLLLFTGGNLTFFPQHFLGPIRNAPTLLGXPQAYPPWNPLSFGGSFISLTAGIFIIFLVWEALASKRKVLMVEEPPLNLGGVYGGPPPLPPFEGPGFIKFCPKREGSDPPKLVSSPPPGPPGFF

SEQ ID NO: 940038 - protein, 113 aa, Homo sapiens
KSGTLSGRSSPVPPPLEELALTKLVTLRCLAPGFSPKDVLVSWLQGFQEFPREKFLIWAFRQEPNQGPPPFFLTSILGVATQVVKKGDPFFCMVGPKALPLAFSQKTIGRLGG

SEQ ID NO: 940039 - protein, 34 aa, Homo sapiens
MACTYLIAAVLSGDPRGRSPCCGGNVVVIGAGGS

SEQ ID NO: 940040 - protein, 131 aa, Homo sapiens
  misc_feature (97)..(97): Xaa can be any naturally occurring amino acid
GGQRPRFFYEVFCLGHPQGTANPPNWDGFLGGGASLKPNFVGIINAKTMSPILLPPPSCQGRGIPAQKPSDCPFPAYAFDGVICSLLWPHPNCIFLXCLYFPPVMVGARPIPFPLSIMVGTKRPQGGFSLA

SEQ ID NO: 940041 - protein, 90 aa, Homo sapiens
  misc_feature (60)..(60): Xaa can be any naturally occurring amino acid
  misc_feature (73)..(73): Xaa can be any naturally occurring amino acid
EWSFQNSGGARGRGKNFPPMFSLCVLGISKRNVFFQPVAELKKQTDFEHRIPKEQWWVKXRPLMKILAKYKAXYYVSDSGQLEHVQPWSV

SEQ ID NO: 940042 - protein, 106 aa, Homo sapiens
  misc_feature (52)..(52): Xaa can be any naturally occurring amino acid
  misc_feature (54)..(54): Xaa can be any naturally occurring amino acid
PFKVPVINIPTNPPADHVVWSLFNTLFLNWGCVGFIAFAHSVKSRDRKMVGXVXGAQAYASPPKGLNIWALILGILMTLGFILLLGFGSVAVSPILFPIIQEKRGF

SEQ ID NO: 940043 - protein, 101 aa, Homo sapiens
  misc_feature (11)..(11): Xaa can be any naturally occurring amino acid
  misc_feature (39)..(39): Xaa can be any naturally occurring amino acid
PRPNLAKNPFXYHIHRGKFNFFPPTLFRPIRKAPTLLGXPRCKPHMKHPIIWRVIHFFNSRKIKNFHDLKSLRFERKSPKSKKTPHKPGGAIWMPPPLPPI

SEQ ID NO: 940044 - protein, 89 aa, Homo sapiens
  misc_feature (42)..(43): Xaa can be any naturally occurring amino acid
IGEDDIWRGLQPLPSFLKAKVSVAKGTGKTKGSGFVSFKDPXXYGGPMGEINGKYVGSPPIKLRKSMWKARNLEGVPKNQKEKKKRGLK

SEQ ID NO: 940045 - protein, 154 aa, Homo sapiens
  misc_feature (64)..(64): Xaa can be any naturally occurring amino acid
  misc_feature (66)..(66): Xaa can be any naturally occurring amino acid
  misc_feature (70)..(70): Xaa can be any naturally occurring amino acid
  misc_feature (82)..(82): Xaa can be any naturally occurring amino acid
  misc_feature (97)..(97): Xaa can be any naturally occurring amino acid
  misc_feature (103)..(103): Xaa can be any naturally occurring amino acid
  misc_feature (106)..(106): Xaa can be any naturally occurring amino acid
  misc_feature (127)..(127): Xaa can be any naturally occurring amino acid
  misc_feature (130)..(130): Xaa can be any naturally occurring amino acid
  misc_feature (142)..(142): Xaa can be any naturally occurring amino acid
  misc_feature (146)..(146): Xaa can be any naturally occurring amino acid
FVIKGYYANPYAVRARAPYISIGTTLATGATNDLARFACHSPIDFSLPCIISFICESFSFFALXLXACAXATIGIFFSFAFXRSTFRSFLRSLSLFXHNYNYXLDXRHRLSSQTLAVLTGMHIRSHXLFXFYISISHFEGIXGGNXELQIVYSV

SEQ ID NO: 940046 - protein, 65 aa, Homo sapiens
  misc_feature (36)..(36): Xaa can be any naturally occurring amino acid
  misc_feature (51)..(51): Xaa can be any naturally occurring amino acid
  misc_feature (65)..(65): Xaa can be any naturally occurring amino acid
MIFLVTVAIIVVVTIIIAVPRHVVVAIVFIINVNQXNNKPIYAVVVQFRVXGVRTAGRTVEEKCX

SEQ ID NO: 940047 - protein, 105 aa, Homo sapiens
  misc_feature (3)..(3): Xaa can be any naturally occurring amino acid
IRXESPFCSVYQKKTHLKMNSQQQKQPCTPPPQPQQQQVKQPCQPPPQEPCIPKTKEPCQPKVPEPCHPKVPEPCQPKIPAPAQQKTKQKYVVHSHALEELATGY

SEQ ID NO: 940048 - protein, 201 aa, Homo sapiens
  misc_feature (23)..(23): Xaa can be any naturally occurring amino acid
  misc_feature (138)..(138): Xaa can be any naturally occurring amino acid
  misc_feature (141)..(141): Xaa can be any naturally occurring amino acid
  misc_feature (164)..(164): Xaa can be any naturally occurring amino acid
  misc_feature (169)..(169): Xaa can be any naturally occurring amino acid
  misc_feature (181)..(181): Xaa can be any naturally occurring amino acid
  misc_feature (191)..(191): Xaa can be any naturally occurring amino acid
LDYQERIHVHIITTCNTSTCASXVPIPPAPSTTPNPVITISRVPAPCNRIRITQPTVLFESCIIRPCMPIRHRAKFNITRTRGKCTIKYSISEWVLSHNACMSNLMYPCTRYCREFPYTPSRAPPYAADRALSNRNRXVHXSRTQALMRRFEQDFDLINTHNGXGGSKXLQKKTFPSRGSXTVDVPKEGRXNLDMGVGLRG

SEQ ID NO: 940049 - protein, 142 aa, Homo sapiens
  misc_feature (7)..(7): Xaa can be any naturally occurring amino acid
  misc_feature (10)..(10): Xaa can be any naturally occurring amino acid
  misc_feature (29)..(29): Xaa can be any naturally occurring amino acid
  misc_feature (33)..(34): Xaa can be any naturally occurring amino acid
  misc_feature (59)..(59): Xaa can be any naturally occurring amino acid
  misc_feature (85)..(85): Xaa can be any naturally occurring amino acid
  misc_feature (97)..(97): Xaa can be any naturally occurring amino acid
IKAYYRXLRXHIPPGEIVVHRITSSSPAXSQPXXPIISIIISVVGAAFPPMRLPGISKXGSPSPITPAIIIVHLAISKVNQTSGXRGRPRFRNHTNXPPFTPGVFIREGGEQQPQAPPLPPPAQSSNGGTSRCTRVGGWDGV

SEQ ID NO: 940050 - protein, 41 aa, Homo sapiens
MARTTAAIPTPYALSSYGIAIVFDNRFGGDNKKKCKESVEK

SEQ ID NO: 940051 - protein, 127 aa, Homo sapiens
  misc_feature (40)..(40): Xaa can be any naturally occurring amino acid
  misc_feature (85)..(85): Xaa can be any naturally occurring amino acid
  misc_feature (100)..(100): Xaa can be any naturally occurring amino acid
  misc_feature (102)..(102): Xaa can be any naturally occurring amino acid
  misc_feature (106)..(108): Xaa can be any naturally occurring amino acid
  misc_feature (119)..(119): Xaa can be any naturally occurring amino acid
  misc_feature (122)..(122): Xaa can be any naturally occurring amino acid
PRLDYRITARFPSIPSGHLPCHHQRRHWYVIAAQSIIPMXPIFDYMGGHNCGGRDTQEFVKDRSPSIIVSFDPRVSLGRPQIRSXTSHCHHVMYSHLSIXRXVECXXXPWLLEPYRHIXMWXHTAWS

SEQ ID NO: 940052 - protein, 77 aa, Homo sapiens
  misc_feature (3)..(3): Xaa can be any naturally occurring amino acid
  misc_feature (5)..(5): Xaa can be any naturally occurring amino acid
  misc_feature (27)..(27): Xaa can be any naturally occurring amino acid
LLXPXVIKDYYHSKSIIVPRNPVIRPXGGPRMTVEKWCSNSSARAFVFATPATAASATIVVPCRFRTFAKHSVYCPG

SEQ ID NO: 940053 - protein, 88 aa, Homo sapiens
  misc_feature (13)..(13): Xaa can be any naturally occurring amino acid
  misc_feature (61)..(61): Xaa can be any naturally occurring amino acid
  misc_feature (74)..(74): Xaa can be any naturally occurring amino acid
  misc_feature (84)..(84): Xaa can be any naturally occurring amino acid
MQVNYCFRSSDRXTSTKTVNTSNHGCNNGKCRDYLQFSFIISLFRGGVVFDGNFVVTFCIXRAQILFHDTAGIXTSCRKKILSXPYKK

SEQ ID NO: 940054 - protein, 123 aa, Homo sapiens
  misc_feature (15)..(15): Xaa can be any naturally occurring amino acid
  misc_feature (37)..(37): Xaa can be any naturally occurring amino acid
  misc_feature (59)..(59): Xaa can be any naturally occurring amino acid
  misc_feature (63)..(63): Xaa can be any naturally occurring amino acid
  misc_feature (70)..(70): Xaa can be any naturally occurring amino acid
  misc_feature (89)..(89): Xaa can be any naturally occurring amino acid
  misc_feature (95)..(95): Xaa can be any naturally occurring amino acid
  misc_feature (100)..(101): Xaa can be any naturally occurring amino acid
  misc_feature (103)..(103): Xaa can be any naturally occurring amino acid
  misc_feature (106)..(106): Xaa can be any naturally occurring amino acid
  misc_feature (112)..(113): Xaa can be any naturally occurring amino acid
MGLKQKVFHICCLIXNGIGGPGIKRRQGWASGPFKAXFEAGQTTQGQSNRINAEQGFRXVTLXTVRWINXAEVLGMKIKVRSAETHEKXGKSGNXISAKXXGXDRXGPRSVXXGPKYFQVQEE

SEQ ID NO: 940055 - protein, 137 aa, Homo sapiens
  misc_feature (1)..(2): Xaa can be any naturally occurring amino acid
  misc_feature (77)..(77): Xaa can be any naturally occurring amino acid
  misc_feature (89)..(89): Xaa can be any naturally occurring amino acid
  misc_feature (103)..(103): Xaa can be any naturally occurring amino acid
  misc_feature (117)..(117): Xaa can be any naturally occurring amino acid
  misc_feature (125)..(126): Xaa can be any naturally occurring amino acid
XXNPGVFGDEILMAIYPARQCCKPGEAQFAFPIPYEQATLLEKNKNIELMASPSIMQRYISMNVTQKPFDEPEVREXLNYAINLSRALXESCLLRAYANGSYXVWVPAKYRLTGQKXIKPVGLTXXSGKPRGIYLEK

SEQ ID NO: 940056 - protein, 104 aa, Homo sapiens
  misc_feature (11)..(11): Xaa can be any naturally occurring amino acid
  misc_feature (26)..(26): Xaa can be any naturally occurring amino acid
  misc_feature (87)..(87): Xaa can be any naturally occurring amino acid
  misc_feature (91)..(91): Xaa can be any naturally occurring amino acid
NSARGNPEIPXAPGEEHWLLDTSLNXVFGRQSLKSNPQLSFATRMEDWTFLGQHKRHPEFPVVTRESRRNSRKTTCFPRHRKMKPFXSTAXQEEVPRLGIGRFG

SEQ ID NO: 940057 - protein, 82 aa, Homo sapiens
  misc_feature (3)..(3): Xaa can be any naturally occurring amino acid
NSXRATPSLNLQWPCTWDNVKHLRCGPTGSACSGLDHSSILIYHIVPAADIRSDSLLISRALTWHQMSVCITGVLALQPEEP

SEQ ID NO: 940058 - protein, 98 aa, Homo sapiens
  misc_feature (11)..(11): Xaa can be any naturally occurring amino acid
  misc_feature (44)..(44): Xaa can be any naturally occurring amino acid
  misc_feature (49)..(49): Xaa can be any naturally occurring amino acid
  misc_feature (88)..(88): Xaa can be any naturally occurring amino acid
IRHEPSVITWXIMHCFVSKHALIMCREPGRPSTLDKVHEEGCSXYANAXSSLRGPPGYSRASPPQKNQSLPTVLLCALTSDFTGGYPXPPSHSLCQRV

SEQ ID NO: 940059 - protein, 82 aa, Homo sapiens
  misc_feature (6)..(6): Xaa can be any naturally occurring amino acid
  misc_feature (11)..(11): Xaa can be any naturally occurring amino acid
  misc_feature (16)..(16): Xaa can be any naturally occurring amino acid
  misc_feature (18)..(18): Xaa can be any naturally occurring amino acid
  misc_feature (82)..(82): Xaa can be any naturally occurring amino acid
EFGTSXTGLIXRCDRXLXNPSRQSSGVEPPVQIRRGDRAQRRGCRKTSVFLSKETRISGNFVGRIKGTKCPFDLQFLTWDFX

SEQ ID NO: 940060 - protein, 97 aa, Homo sapiens
  misc_feature (11)..(11): Xaa can be any naturally occurring amino acid
  misc_feature (97)..(97): Xaa can be any naturally occurring amino acid
IGHERHELLVXYANFDFFFDFFCDLLVIQQRVVQPPYVGIFNSFSPVIEISSYCIVVRKNAWNDFYFFEFTKASFMAQDVIFLEKVPCALEKKVKFX

SEQ ID NO: 940061 - protein, 101 aa, Homo sapiens
  misc_feature (30)..(30): Xaa can be any naturally occurring amino acid
  misc_feature (39)..(39): Xaa can be any naturally occurring amino acid
  misc_feature (42)..(42): Xaa can be any naturally occurring amino acid
  misc_feature (83)..(83): Xaa can be any naturally occurring amino acid
  misc_feature (101)..(101): Xaa can be any naturally occurring amino acid
PEYKAAFKALKVRQRLTIQMNFIAFFCSWXYLFVLGLWXKAXIVLLLGILSLFVGALIGVNILGIAVAAYVAVNTNKWFYEEXVKGLKYLEPLNNRWLSQX

SEQ ID NO: 940062 - protein, 71 aa, Homo sapiens
  misc_feature (25)..(25): Xaa can be any naturally occurring amino acid
THNRKILLLNYVAQIQFSNGFTENXARLQQLDLRCRLGRGVRDHIAQAAENGVALFLLNLDQSICLINWCA

SEQ ID NO: 940063 - protein, 70 aa, Homo sapiens
  misc_feature (3)..(5): Xaa can be any naturally occurring amino acid
MRXXXTRRRGKIILLRRAGTNQHINVNGVDQLTCGRHQFAPEVLVVTTNHQIHIVFLDCIDQNLAQVAAA

SEQ ID NO: 940064 - protein, 91 aa, Homo sapiens
  misc_feature (9)..(10): Xaa can be any naturally occurring amino acid
  misc_feature (42)..(42): Xaa can be any naturally occurring amino acid
  misc_feature (44)..(44): Xaa can be any naturally occurring amino acid
  misc_feature (64)..(64): Xaa can be any naturally occurring amino acid
LQEFGTSSXXCCPHHPHPSTPEPSSGDPLTADEWTLWLVLNXFXLSSPALLFCRLIPVHFLVVXRAQAQKTQPKAQILGSPPASSVRGFPP

SEQ ID NO: 940065 - protein, 81 aa, Homo sapiens
  misc_feature (60)..(60): Xaa can be any naturally occurring amino acid
  misc_feature (72)..(72): Xaa can be any naturally occurring amino acid
MEFGTRSCVTTVGPGCFLTLSVTWIGAAPLILSRIVGGWECEKHSQPWQVLVASRGRAVXGGVLVHPQWVLXAAHCIRNKS

SEQ ID NO: 940066 - protein, 67 aa, Homo sapiens
  misc_feature (38)..(38): Xaa can be any naturally occurring amino acid
  misc_feature (49)..(49): Xaa can be any naturally occurring amino acid
EFWNEKKLKKKGKEKAEEQQVVDPETGRTRLIKGDGEXLEEIVTKERHXEINKMPSWVASLRAPAGQ

SEQ ID NO: 940067 - protein, 109 aa, Homo sapiens
GIRHEGAADVLGSPGAAPCLTTRGEAAISSGHGFTSPEGTCELECSLSTGMGLIEVHSPPIASILLSLSLKSRKSLSWCSKQFEAQSARTFLKGHVVLQTTLSSGLNSP

SEQ ID NO: 940068 - protein, 54 aa, Homo sapiens
  misc_feature (3)..(3): Xaa can be any naturally occurring amino acid
  misc_feature (7)..(7): Xaa can be any naturally occurring amino acid
  misc_feature (18)..(18): Xaa can be any naturally occurring amino acid
  misc_feature (31)..(31): Xaa can be any naturally occurring amino acid
  misc_feature (34)..(34): Xaa can be any naturally occurring amino acid
  misc_feature (43)..(43): Xaa can be any naturally occurring amino acid
  misc_feature (46)..(46): Xaa can be any naturally occurring amino acid
ADXRIPXRVNYPGVRRKXTFRSTSVTKAEGXGYXPGPFLVIPXFHXERNKRLCL

SEQ ID NO: 940069 - protein, 78 aa, Homo sapiens
  misc_feature (2)..(2): Xaa can be any naturally occurring amino acid
CXRPRGSEQYSDVQHTGTNPPKYPSKQVGQPFQLSTPQPLPHPYHGAILDRGVGVMEQVYCACPVLGASLSQQWEVGP

SEQ ID NO: 940070 - protein, 43 aa, Homo sapiens
MDEDKFELWAFSSGEYEYPDQETNNSTLFDSVCFLNKAPMRWK

SEQ ID NO: 940071 - protein, 71 aa, Homo sapiens
  misc_feature (2)..(2): Xaa can be any naturally occurring amino acid
  misc_feature (53)..(53): Xaa can be any naturally occurring amino acid
  misc_feature (71)..(71): Xaa can be any naturally occurring amino acid
KXRARHRTPECYVCTDCGTNLKQKGHFFVEDQIYCEKHARERVTPPEGYKVVXVFPKGASRFDHCFPAGLX

SEQ ID NO: 940072 - protein, 84 aa, Homo sapiens
YILEVRIGELNAAGPIYKGNRVSYVKAFMKKSEEEISTDYLRDQVSCVHSCLNAGSRIVCLASINLELQDKSPCLLSSSIKLSF

SEQ ID NO: 940073 - protein, 72 aa, Homo sapiens
EQRKPEPAGELLTGEGEAHGLVRFRLNSFIATCNNLTGLGTGRNNLGFGLKLSLFQILEEFYIYKDGTINLF

SEQ ID NO: 940074 - protein, 104 aa, Homo sapiens
  misc_feature (23)..(23): Xaa can be any naturally occurring amino acid
PPRGRVLGSPPRGGGVPFFGPPXQGKPPGVGFFFPGFFSKKKGFPPPPGFWKGKGGVFFFWGGGIPPLGGGPLFFFPPPPPGGLGGFPLLGKGPKKNPRGGGFF

SEQ ID NO: 940075 - protein, 137 aa, Homo sapiens
DIFASQASAAWPGPAPRGENFRPISIHRGMAQEERLSRYHQFKDFQRRILVATNLFGRGMDIERVNIVFNYDMPEDSDPYLHRVGRAGCFGPKGLTIPFVFDENDAKILNDVQGRFEVNVAELPKEIDISPYIEQSR

SEQ ID NO: 940076 - protein, 91 aa, Homo sapiens
  misc_feature (36)..(36): Xaa can be any naturally occurring amino acid
  misc_feature (47)..(47): Xaa can be any naturally occurring amino acid
  misc_feature (69)..(69): Xaa can be any naturally occurring amino acid
RPPADPVSHHHGTRDPRDNGSRSGALPYNGRLLEKXVEKRGLEKRRXPPKEEEEKAYYPPAPPPYLETXLQGSQKGRLKKNLALSRESLVV

SEQ ID NO: 940077 - protein, 104 aa, Homo sapiens
SPFRPTCSGLRGPAPNFSFFPGSPRPPKRGTVFFKNLNWPPRWPGRFCPSGTFFKRGKPGSSLRKRRILKPLLVSVWAGPPPGFLAFGQKKPREPPTRVFKKKN

SEQ ID NO: 940078 - protein, 125 aa, Homo sapiens
QARVVVRGSPPPPPCPFLLGKDPLVPTPQKPMSLEVPLVCIDPTRLPEAPALCSPRRRPFEVLVGWAQRPSRRLEASPCISFPPPLWACLWFFSLPLWRQALCGVFSLVLGPRGGWSPFPGPNTF

SEQ ID NO: 940079 - protein, 86 aa, Homo sapiens
LVGGASEQNPTSEQDMEDFPSQSELLYSIDPITWPTEQVSLGITAPSYFKVHINNRVFDLDVGSGHPHGATAIKGLFVQRLKSYVI

SEQ ID NO: 940080 - protein, 119 aa, Homo sapiens
  misc_feature (76)..(76): Xaa can be any naturally occurring amino acid
PPGAYMETLSLSGALALEFTKGHQRPGAYPFFGQPSAPEPTPALAPMAPLLATDCALNTAFAWGSGASHLITILGXVKPHANRIAFDFQRGNDVAFPFYPRFNENHRRVLVCHTKLDNN

SEQ ID NO: 940081 - protein, 91 aa, Homo sapiens
  misc_feature (28)..(28): Xaa can be any naturally occurring amino acid
TNIVGLLLERDVDINIIDWNGGTPLLYXVRGNHVKCVEALLARGADLTTETDFGYTPMDLSVALGYRKVQQVIENHILKLFQSNLVPPDPE

SEQ ID NO: 940082 - protein, 94 aa, Homo sapiens
  misc_feature (3)..(3): Xaa can be any naturally occurring amino acid
  misc_feature (82)..(82): Xaa can be any naturally occurring amino acid
MVXLSPRVRRQDFLLLFLVVFVDFIDTLSFLHVVGQFPGFLGHTAPGRRHRRGSGEVVVSTTKTQLYLARFPGCGLDPPHHXEQTLTLDVLLVP

SEQ ID NO: 940083 - protein, 54 aa, Homo sapiens
  misc_feature (19)..(19): Xaa can be any naturally occurring amino acid
PTWTLSLYEGWMNFRPDTXSRKTRKETLIRYSTPPFSTNDCFWKLSRSPVRSSF

SEQ ID NO: 940084 - protein, 168 aa, Homo sapiens
  misc_feature (10)..(10): Xaa can be any naturally occurring amino acid
  misc_feature (18)..(18): Xaa can be any naturally occurring amino acid
  misc_feature (25)..(25): Xaa can be any naturally occurring amino acid
  misc_feature (35)..(35): Xaa can be any naturally occurring amino acid
  misc_feature (37)..(37): Xaa can be any naturally occurring amino acid
  misc_feature (40)..(40): Xaa can be any naturally occurring amino acid
  misc_feature (57)..(57): Xaa can be any naturally occurring amino acid
  misc_feature (63)..(63): Xaa can be any naturally occurring amino acid
  misc_feature (67)..(67): Xaa can be any naturally occurring amino acid
  misc_feature (122)..(122): Xaa can be any naturally occurring amino acid
  misc_feature (135)..(135): Xaa can be any naturally occurring amino acid
EGVKGKKLKXTFPEPKKXKPFSSKXATWIKKPNPXFXTHXIPPLLEQQMVWYPQDLXTDGAPXTVSXKGFFRQTDLGTWKYLLDDLGFMEKREAEKVEEAGSGDLRFPAEEHCFEDGMAQQXPPSREKSFEWEEXFYPGPHDGSQHIKGFSPQKDAMEDFRRDLARAE

SEQ ID NO: 940085 - protein, 92 aa, Homo sapiens
  misc_feature (2)..(2): Xaa can be any naturally occurring amino acid
  misc_feature (32)..(32): Xaa can be any naturally occurring amino acid
  misc_feature (39)..(39): Xaa can be any naturally occurring amino acid
  misc_feature (72)..(72): Xaa can be any naturally occurring amino acid
  misc_feature (83)..(84): Xaa can be any naturally occurring amino acid
MXGLTSFLDMQSPCPGILLMQGVFMFLGVSGXRLGKGKXGEPVLPSSPLVDALSHTPWEFKGPEVVRGCTPXFNNKVCGPKLXXPTLIAIKV

SEQ ID NO: 940086 - protein, 63 aa, Homo sapiens
  misc_feature (3)..(3): Xaa can be any naturally occurring amino acid
  misc_feature (47)..(47): Xaa can be any naturally occurring amino acid
GCXEFGTWNEWRGSLKSVAVQLGKANLSPCFWPKRNRMLSSVLLAVXCVFMNTMSRRGWQPPA

SEQ ID NO: 940087 - protein, 88 aa, Homo sapiens
  misc_feature (1)..(1): Xaa can be any naturally occurring amino acid
  misc_feature (15)..(15): Xaa can be any naturally occurring amino acid
  misc_feature (36)..(36): Xaa can be any naturally occurring amino acid
  misc_feature (47)..(47): Xaa can be any naturally occurring amino acid
XAFLTGVTEPLEFLXMFLAPLLYLLHALLTGISLFXATLLGIHAGFXFSAGAIDYALMYNLPAASQNVWMLLVMGVIFFAIYFVVFSL

SEQ ID NO: 940088 - protein, 118 aa, Homo sapiens
  misc_feature (3)..(3): Xaa can be any naturally occurring amino acid
  misc_feature (19)..(19): Xaa can be any naturally occurring amino acid
  misc_feature (44)..(44): Xaa can be any naturally occurring amino acid
  misc_feature (46)..(46): Xaa can be any naturally occurring amino acid
  misc_feature (62)..(62): Xaa can be any naturally occurring amino acid
  misc_feature (88)..(88): Xaa can be any naturally occurring amino acid
  misc_feature (90)..(90): Xaa can be any naturally occurring amino acid
SPXIRIVDDICHLNPPSTXARLLHTVFVDLHFFIDAIAHMHDLXTXVINARTRRIDTNKAPXFAFCGIENALTVGYQATKCNDPTDLXPXTHDTTNFDCVVKRDHREIGGNVIDLAYI

SEQ ID NO: 940089 - protein, 54 aa, Homo sapiens
  misc_feature (12)..(12): Xaa can be any naturally occurring amino acid
  misc_feature (36)..(36): Xaa can be any naturally occurring amino acid
MAGAPPPASLPXCSLILDCCASNQPDSVGVGPSKPXVGYNLMPVFKPIGKHSIR

SEQ ID NO: 940090 - protein, 116 aa, Homo sapiens
  misc_feature (1)..(1): Xaa can be any naturally occurring amino acid
  misc_feature (5)..(5): Xaa can be any naturally occurring amino acid
  misc_feature (7)..(7): Xaa can be any naturally occurring amino acid
  misc_feature (9)..(9): Xaa can be any naturally occurring amino acid
  misc_feature (24)..(24): Xaa can be any naturally occurring amino acid
  misc_feature (59)..(59): Xaa can be any naturally occurring amino acid
  misc_feature (89)..(89): Xaa can be any naturally occurring amino acid
  misc_feature (108)..(108): Xaa can be any naturally occurring amino acid
XSARXRXIXHAHGLLELEYEGFYXEGILRYEEEDAVIDEEGKVITRGLEIVRRDWSEIXKETQARVLETILKHGDVEEAVRIVKEVIQXLANYEIPPEKLQFIEQLTXPLHEYKGR

SEQ ID NO: 940091 - protein, 101 aa, Homo sapiens
GKKFPLLCPPGGECKDSLSVQGNLVPPRKIVVNPGGKGNRDLRGSRQCALSSRVHQSREPQSLQNKKKKFLLACTHRGQTSFFSRPLLIKDFTLVYYYRYT

SEQ ID NO: 940092 - protein, 85 aa, Homo sapiens
AAVQWCNLSSLQPPPPGLKPSSHFKRRKCPQPSGVLLEISRKPYSIVKSAVSLSGSSSYGEASSRYIYIHTCIYIYLRIYIYVYI

SEQ ID NO: 940093 - protein, 211 aa, Homo sapiens
VVGFQGAVGATPNIRAPPFCPLAGATPLHPPLGLVPPRALAWARFPQGPFPRSRFMQGRCPPGQPLFGDPPNHFLFLSPPPEGTTEVILSLLFNQFPGFKEGRLGPGRHNLPFGGFPIRARQGPLPIPPRGFRFPRTTPLSFPLPKRRPFFPQGGPFPCFGGPPFPLGSAPLRLVPPWGPFWNRVWVGGSPPPLVPRFVPPPCPRGCLAGI

SEQ ID NO: 940094 - protein, 137 aa, Homo sapiens
  misc_feature (37)..(37): Xaa can be any naturally occurring amino acid
  misc_feature (73)..(73): Xaa can be any naturally occurring amino acid
PPPPQEKKRISPPGEGGGFGGPPPPRGAPKFPPVLGXEGSPARFFIFPTKKGGGGVCFPGVPPAPPIWGVFFXFPPGGGGRGFFSTPGPPFGKGAPPPKGGGLPRGPPPKGGGRGGPGGFSPPPPPGGGPPGIRFPL

SEQ ID NO: 940095 - protein, 90 aa, Homo sapiens
  misc_feature (9)..(9): Xaa can be any naturally occurring amino acid
  misc_feature (54)..(54): Xaa can be any naturally occurring amino acid
ISTTTGRNXLVFGWWGMVPHPKYLGALIRARGGSLPGGGSHLVPYFTLLYFPGXLGPREARDKRQCLKKYGLAWQENCGGVPFRIMPYIY

SEQ ID NO: 940096 - protein, 145 aa, Homo sapiens
  misc_feature (25)..(25): Xaa can be any naturally occurring amino acid
  misc_feature (127)..(127): Xaa can be any naturally occurring amino acid
WVSLPPFGGGEGGGVGGTPGGLGPXAPPGFYAPREGFFFGVRGTPPPGKRPLSHQFVPLWAGGFVGASPFPPPEGGGVCPPHPPPPNGGFCSPFFPKIPRVGGVVLGGEKKPPPPPGGGGGRPPLFXFFFFFFKGGRPGPPGGGG

SEQ ID NO: 940097 - protein, 147 aa, Homo sapiens
  misc_feature (3)..(3): Xaa can be any naturally occurring amino acid
  misc_feature (43)..(43): Xaa can be any naturally occurring amino acid
  misc_feature (51)..(51): Xaa can be any naturally occurring amino acid
MRXVEPPAKKQPPQQRDARDDDIALFGSDNKEEDKEAAHLREXRLRQYPEXKAKKPALVAKSSILLDVNPWDNYTDMAQLEACVRSIQLDGLVWGASKLGPVGYGIRKLQIQCVVEAHKVGTNFLEEEIPKFEEHVQRVDIPAFNKI

SEQ ID NO: 940098 - protein, 107 aa, Homo sapiens
  misc_feature (35)..(35): Xaa can be any naturally occurring amino acid
  misc_feature (39)..(39): Xaa can be any naturally occurring amino acid
  misc_feature (42)..(42): Xaa can be any naturally occurring amino acid
  misc_feature (50)..(50): Xaa can be any naturally occurring amino acid
  misc_feature (52)..(52): Xaa can be any naturally occurring amino acid
QGRKKRGPHGPLKEGGQGGRLDSKRKNVGAPLALXMGMXQIXRPHTPPPXRXSLFFLSFHQKDVFEFILEFRCFARCCDRYAPNPAHSLFEDTSERSHSFFWGIYTP

SEQ ID NO: 940099 - protein, 171 aa, Homo sapiens
MLNTSSVLEQLIDKFNWVSRLADLTQGVDQYYLRVTTVASLTSDSDVPSGVTEVVVKLFDSDPLTGTVPVEVSRENPKFMETVAEKALQEFRKKPREEEMWMLLLHQRGHFESSSPRDELQPPRESFARHQVARPQPPGPPLRPASPRFGSCPLTLASAAHGKNRIAPACN

SEQ ID NO: 940100 - protein, 118 aa, Homo sapiens
NVVQAHARQHEEEAVLQHLCVLFVLLLPQTGAPVASRCVAGTSTVRWGVSSICVFGGQTCHGLWLVKAFVATGPQLVIIAAAALLTAEHTVCLAQLHKAAVQAWVHRVPVWVQLFERG

SEQ ID NO: 940101 - protein, 109 aa, Homo sapiens
PYRPCHWPWSLCIFVLVGKTISLPWSAQVCFRHFSRRFPKGRAKNGGWPLVSTLLLPQPFGVPPCPQKMLTQWGLPPPGPKVTKLQPPCFLLPGVALGMERGGIKPVPL

SEQ ID NO: 940102 - protein, 30 aa, Homo sapiens
RPPTPRQPGKGREETSPPPTRTKNKGFCAS

SEQ ID NO: 940103 - protein, 165 aa, Homo sapiens
  misc_feature (6)..(6): Xaa can be any naturally occurring amino acid
  misc_feature (13)..(13): Xaa can be any naturally occurring amino acid
  misc_feature (80)..(80): Xaa can be any naturally occurring amino acid
APVRQXQSKREAXLWGPGEKKAAAKGTSNERDHLSFEQELTVPTLVENKKAQLVVIAHHVDPIELVVFLPALCRKMGVPXCIIKGKARLGRLVHRKTCTTVAFTQVNSEEKGALVKLVEAIRTNYNDRYDEIPRPWGGNVLGPKFVARIAKLEKAKGKELAPKLG

SEQ ID NO: 940104 - protein, 177 aa, Homo sapiens
WPAIGEPDFQALAIHRGDAQEEEGFSGISSLKIFNGEFWWRTNLFGRGMDIERVNLAFNYDMPEDSDTYLHRVARAGRFGPKGLAITFGSDENDAQILHDGQGRFEGHISELPDEIDISSYIEQTREKTRPFWNGTVCPSGEDPRGGGKETLLPPPLAAPPPWVPFFGSPPLLDPPF

SEQ ID NO: 940105 - protein, 144 aa, Homo sapiens
  misc_feature (65)..(65): Xaa can be any naturally occurring amino acid
GPWGQIWPSVSFPPPPPGPGVGKPFSMGGTMGPGPPSFNFFFRGGNTQGWVGGGAPFCGVPFFPXLQEAPPVLGVGVFPFPGLEGINPPAGFSPPPPVVWQGAPRIPRPPRGWPNPPPVAPLAPLALFFSGAPWGRGCSLNCSL

SEQ ID NO: 940106 - protein, 165 aa, Homo sapiens
  misc_feature (4)..(4): Xaa can be any naturally occurring amino acid
  misc_feature (15)..(15): Xaa can be any naturally occurring amino acid
  misc_feature (41)..(41): Xaa can be any naturally occurring amino acid
  misc_feature (47)..(47): Xaa can be any naturally occurring amino acid
  misc_feature (107)..(107): Xaa can be any naturally occurring amino acid
RRGXNGGRDSPGPLXFSPLDAPGGKGWVSLTHRVGRYYLGXGPWASXGVLSERTPPKFGLAPSTQIGIRQGKIPKPFFGGFFQKKKVGEPRPPGGWVFPPKKKKFLXSGPGQVGPKSGGPPIFPKIQGFPPVPGPPGFGVGFAEGIFPPQLGVLMFLGPYLKAGP

SEQ ID NO: 940107 - protein, 75 aa, Homo sapiens
SSESSHMVAFRKDLAPGGVMPAYLASEISPWDGVIVPPQKKAYENPPEKKEGEEEGGIPEAPPQGKEEESMETQE

SEQ ID NO: 940108 - protein, 37 aa, Homo sapiens
KQIETGPFLEAVSHLPPFFDCLGSPVLLEEKASCRKK

SEQ ID NO: 940109 - protein, 73 aa, Homo sapiens
  misc_feature (50)..(50): Xaa can be any naturally occurring amino acid
  misc_feature (61)..(61): Xaa can be any naturally occurring amino acid
  misc_feature (70)..(70): Xaa can be any naturally occurring amino acid
EQIISFSTLCLYMRPDRGFGQRGKQLPRPYSRPQVHGLGSQFWAPSSGSXHSILILFLHSXLLGALCDTXMSV

SEQ ID NO: 940110 - protein, 114 aa, Homo sapiens
SQRNKDIPNMLDVLKDMNKVKLRAIERSPGGRPIHKRKRQNSHWDPVSLISHALKQKFAFQEDDSFEKENRSWESSPFSSPETSRVSYTNVKLIFQFFSRCVVICYSLCVQGSL

SEQ ID NO: 940111 - protein, 112 aa, Homo sapiens
GVGQLCFALHHIRNRIDCKTLDANFVMKVRAGRTAGRADIADEVALLHVVARGDREAREVGVAGLHRGAMLDADVEAVARIPVGAADDAVGGGVDRGASRRGEIDPGVLAAA

SEQ ID NO: 940112 - protein, 101 aa, Homo sapiens
  misc_feature (14)..(14): Xaa can be any naturally occurring amino acid
ICLPLVKALANSGXKNQRFPETTIVPVSQASLPKGWPAGLPPAFGGQASTAFFKPRQRRPWGRWNPSIFTDALGSCRTLTVPRPFGPCPFPYNLINPFFKG

SEQ ID NO: 940113 - protein, 209 aa, Homo sapiens
  misc_feature (10)..(10): Xaa can be any naturally occurring amino acid
LDSLPGPLHXLPQDLHPRDDEMETDKQEEKEVPKCGFLPGNEKVLSLLALVKPEVWTLKEKCLLVITWIPPLIPKIEDGNDFGVPIPEKVLERVNPVQPKVEAFPTTLSKFFSERGDAVAKASQETPVMEYRALVHERDEAPYGEPRALVLDLRAFYAELYHIIRRPLEKIVHPKGEEKPSMFCTRGKKDKSSFLFCAVNPDSKPSIHQ

SEQ ID NO: 940114 - protein, 97 aa, Homo sapiens
MGGNLTFFPQPFFGLSGMPRGYSGYPDGNPPWNILSFVGSFISLTAGILIIFMVWEAFALKRKVLIVEEPPLNLGGLYGCPPPSPPFEEPGYIKFWP

SEQ ID NO: 940115 - protein, 101 aa, Homo sapiens
PPPPPPPAGGGPKKPGGGETAGGGLPTTPRGKKGPRPNWGPQFLGFRTKRKGKGIPLPLPPPWVGTPPKAKPALGPPNQGWGDPPPPPPGPKIFSLKNVLG

SEQ ID NO: 940116 - protein, 146 aa, Homo sapiens
  misc_feature (3)..(3): Xaa can be any naturally occurring amino acid
  misc_feature (29)..(29): Xaa can be any naturally occurring amino acid
  misc_feature (92)..(92): Xaa can be any naturally occurring amino acid
GPXTEPVVFGNLWRPPLFSPGEGPLQGGXFCAGPKSVSPERGLFFGVCPSQGWFSPQIEAGAPPKKGAFLGFLWGGHHPRVWFSKERRRAPXDFWVGGLFPPPNGGGPPGGAPKFTPGGFFSPPPWGGRPPKKCPPHPRFFFGGGP

SEQ ID NO: 940117 - protein, 166 aa, Homo sapiens
MPFVFPPCHVSVGALPSRLENLPQYDDIKKVVNQALEGPLKGILGYNEHQVVSFDFNRDPPSSPFDGGGGIALNDPFVKLIFWFDHEFGSRHRVVGLMGHMAFQELDPLAPRPPQEPKRKRETLPVGGSLPPSVPPPPDFPLLPVSMLTPLKGGGPREPPLFLFPQ

SEQ ID NO: 940118 - protein, 172 aa, Homo sapiens
GKGPDAAAISPNQSPTSSLIWEGPPPPFFRWPFSGKVPPLAPQQISPGPRCTPIISVRMKKNNVSSPLSCPPLLSPYLQKLFGEFPIGAPPLNLRAASKESPLGEKDLGWGEPHQPVLQVTSLPPPKEGGCPLKACFASLYPPPRGLFPCLCSRGFPREIVLFLNFLKNLFF

SEQ ID NO: 940119 - protein, 115 aa, Homo sapiens
  misc_feature (36)..(36): Xaa can be any naturally occurring amino acid
  misc_feature (50)..(50): Xaa can be any naturally occurring amino acid
  misc_feature (74)..(74): Xaa can be any naturally occurring amino acid
IFQEMADKCSPTLFLFNGQAAFHMAQGRWEAVQGLXQEALNKDSGYPKTXVNLIVLFQHLGKPPEVTNRYLFQXKDAPRFHPFFKEDQAKENDFSRVGLPVRSQGLRLAQNCQDH

SEQ ID NO: 940120 - protein, 39 aa, Homo sapiens
  misc_feature (27)..(27): Xaa can be any naturally occurring amino acid
HYGFWPGPLGAFRELRLAELGEAHRSXRGLVGTRPRGQG

SEQ ID NO: 940121 - protein, 72 aa, Homo sapiens
FYHSDGLNASEGAISPHFFNDSTFKMEMFVGSIPFLAALEWMALANQLAILDALATAYGFRPDEPYYYGYGS

SEQ ID NO: 940122 - protein, 119 aa, Homo sapiens
  misc_feature (39)..(39): Xaa can be any naturally occurring amino acid
  misc_feature (44)..(44): Xaa can be any naturally occurring amino acid
  misc_feature (53)..(53): Xaa can be any naturally occurring amino acid
  misc_feature (69)..(69): Xaa can be any naturally occurring amino acid
GLYLFSGVVHNFPGTFKSFCGAPRGWPSPGATPAFKPFXLSLKXKPFCFKGPXGARGPPPPRVFGSFKXFFSGGVFFFRGFSFNPRGGDPFFFKKNPPQMGGGSFFSRFFPTQGGFPPY

SEQ ID NO: 940123 - protein, 127 aa, Homo sapiens
  misc_feature (60)..(60): Xaa can be any naturally occurring amino acid
RWVWDRALGASPSPAPKLSWGSNFGFGGGSSSFNRPRSPRAGVVKKIQTPYGKMGFWSFXVLPQGKNWGAPPRLPLLGCPKGWEGGPFSGGPWGQGTPLGVSPSPPPPWGVFFLGAPPGPAPRYKTI

SEQ ID NO: 940124 - protein, 109 aa, Homo sapiens
GKNDIVWFGCLSPPNVMLKYDPPMLEVGPSGKCLGHGDRFPHECLSALLVVMSEFLQNLVVYKGCGTSPLSLCLATWYAGCLFTFHHDCKVPEVLTRSQADVGAMSVIA

SEQ ID NO: 940125 - protein, 122 aa, Homo sapiens
KGRASGNWPWRPFGIQQRTRSSIKTPLGSYECKLCLTLPNNEGSYLAHTQGKKPQTNLARRTTKEAKEAPAQPGPEKVKVEVKKFVKIGRPGYKMTKQKDSEMGQQSLLFQIDYPECPEKKK

SEQ ID NO: 940126 - protein, 145 aa, Homo sapiens
  misc_feature (69)..(69): Xaa can be any naturally occurring amino acid
GGWPPPGPQSLQRFGEGVGHIFRWGPQHQGWPVKEVSLPPSAPRVGGYCSHPPQLFLLFYKFRPAVCKXGKGDAFLDQFRKEDIFKATFYEMARFRGVVQRPFYESPAAPQPKYFFWGPQEQYFPPPQPLFLLDGNHSLGQACSL

SEQ ID NO: 940127 - protein, 199 aa, Homo sapiens
SGPGCVLPLLNFLGLPLFPPGGPPGSPLFSISPGGVFFKPVPPLLLAAPIIFALCLGGGRKGSLFSFPPTGVFPPGPKIGCPPPFPSPGGPSPIGGFFPFPRPRERGLRFWGGFKPYSPPPPPWGGLGPFFFNPPPPGGRGPLLNLGGKVFSNGFPPPPGGGGFFWGPPRGKKNGVLGFFFPFLAPPRGGFFFLPPGPL

SEQ ID NO: 940128 - protein, 68 aa, Homo sapiens
GVGTRHKALIRIMVSRSEIDMNDIKAFYQKMYGISLCQAILDETKGDYEKILVAFVGETKHSLEGLKL

SEQ ID NO: 940129 - protein, 154 aa, Homo sapiens
  misc_feature (122)..(122): Xaa can be any naturally occurring amino acid
  misc_feature (136)..(136): Xaa can be any naturally occurring amino acid
MGIVKAARYLKDVAVQEQVCSVPRLQWWSWQVCAGQAVGLAQGRWPKESDEFVLQMVINAESDAEVKGLDVDCGVIEQIQVNKAPKMRRWAWRADGGINPYMSSGCRIEMIVSGKEQFVRKXEEEVGQKRRVWEEXLQPHFFPAPAPLNSLLPR

SEQ ID NO: 940130 - protein, 144 aa, Homo sapiens
APGLVHKKVGPARVQLGEAQGAPIHQEGGPALGFSVDQEGGQVPGVLQANVQRVKEYRSKLILFPRKPSAPKKGDSFVEELKLAPQLTGPVMPVRNVYKKEKARVIPEEKKNFKAFASFRMGRANARLFGIRAKKAKEAPEQDV

SEQ ID NO: 940131 - protein, 123 aa, Homo sapiens
PNRKADDNATIRVTNLSKDTRETDLQELFRPFGSISRIYLAKDKTPGQSKGFAFISFPPREDAGGAIAGVSGFGYDPLILNVEWAKPPPTKPAAPVYSVRDPWRQKTASERAGSKGNKTAPLP

SEQ ID NO: 940132 - protein, 72 aa, Homo sapiens
  misc_feature (16)..(16): Xaa can be any naturally occurring amino acid
  misc_feature (30)..(30): Xaa can be any naturally occurring amino acid
PMVTRFLGPRYRELVXNWVPTAYTWGPVGXVGLVWATHWRLILDWGPYINGKFKKDNELPQPFTDCFGAWWC

SEQ ID NO: 940133 - protein, 226 aa, Homo sapiens
  misc_feature (19)..(19): Xaa can be any naturally occurring amino acid
  misc_feature (34)..(34): Xaa can be any naturally occurring amino acid
  misc_feature (75)..(75): Xaa can be any naturally occurring amino acid
  misc_feature (96)..(96): Xaa can be any naturally occurring amino acid
  misc_feature (133)..(133): Xaa can be any naturally occurring amino acid
  misc_feature (223)..(223): Xaa can be any naturally occurring amino acid
TTQAKPSLQAASGIGLSGXTPARALALVEPCPYXALMPAESGAGAARSAPGSPWLGDLAALLEIMLACPCSAPRXGVGLVSAAAAAVAASISSKSXGLSSSSSSSSSSSSSTCSETAAQTPGGPGGPEAGSKXEGGQAMPPLPFLWSLPWSLAWEEGEEASGGDAKGPQSRSDKGGKPKKPPTQKKKKKKERTYPPKEKPKNNPNRNQLPQKDPEVKTNQKKXKTN

SEQ ID NO: 940134 - protein, 56 aa, Homo sapiens
GPPPGGGGPPFWPWGGPPPPPHKNQIGFPGAPQGGPPPWVGPPPPGVFFHKIPGVW

SEQ ID NO: 940135 - protein, 84 aa, Homo sapiens
  misc_feature (3)..(3): Xaa can be any naturally occurring amino acid
IVXCPTVWYTQKVRPGPGFNLEELRVAGIHKKVGRTIGIFLDPRRGNKSPESLQANVQRVKEDRSKIILFPRKPSAPKKGNSFF

SEQ ID NO: 940136 - protein, 112 aa, Homo sapiens
  misc_feature (32)..(32): Xaa can be any naturally occurring amino acid
  misc_feature (42)..(42): Xaa can be any naturally occurring amino acid
EKLFQTKRSPETQVFPLSPFRDYVPENQASLXWLVKSFFSNXIPFDWENNWPPEKNFKTPPSRCGSEGLFFLLTNSPVQKKVDQGNVLSCSLMVRVLPNPFPQKNLFLFPGK

SEQ ID NO: 940137 - protein, 178 aa, Homo sapiens
  misc_feature (2)..(2): Xaa can be any naturally occurring amino acid
  misc_feature (5)..(5): Xaa can be any naturally occurring amino acid
  misc_feature (11)..(11): Xaa can be any naturally occurring amino acid
  misc_feature (95)..(95): Xaa can be any naturally occurring amino acid
  misc_feature (119)..(119): Xaa can be any naturally occurring amino acid
  misc_feature (142)..(142): Xaa can be any naturally occurring amino acid
GXQFXQPPAPXLAGPPKAYHQVRKPVFWADNIEFFGGYKGKGSKGSQWFATKKFPPKPPGPCQSGLYWGMASCLCTFFVARVGQKGSIPALRSQXKFIRLARGFLIKGGKLIKNNASPXYYLFYKSINPLGGFVPYGEMTKXFVILKSCVVGTKKRVLPLRKSLLVQKKRGGFGKNFP

SEQ ID NO: 940138 - protein, 67 aa, Homo sapiens
QVQRSFVAGPTPWPKKPSLAPQEGAEQGWSTIPNRLYTGPGGSRPGRFGAQGPKGGFGAGPPPEEGI

SEQ ID NO: 940139 - protein, 215 aa, Homo sapiens
  misc_feature (90)..(90): Xaa can be any naturally occurring amino acid
  misc_feature (99)..(99): Xaa can be any naturally occurring amino acid
PGNQLFGQDRCESSGGVQGKGYKGGTSGGPQKNCPQDPQGPGKRGLDGARHLLRVAFSVGAVGEKGFIPAFRSHKKFIRLARGPLQGREXGQEQCLPWXLPIFKKEQPPGEGLAPMGKGPKTLSFLKGGWGGPKKGGSPPPSPFWGKKKGGVWRKNDLKVIYPPPKVGPGRFPTLGGKKAFLGPLKKGRIAKEKGGLCPGPIFPGGGGPKKVFFP

SEQ ID NO: 940140 - protein, 168 aa, Homo sapiens
  misc_feature (63)..(63): Xaa can be any naturally occurring amino acid
ALYGPRPVVITSSDLPSPQGSNFLIVLGSQRRRNPPGSVVMERIRMDICKMDPVFVGPGDLFXSMLLGWTHKPPHNLKVACEKTVFSLPPVLQRAIQCAKTPAGERVRPSPIQLELRMVQSQKGIEGPKIVVQAPVLLGPPPLARYTQRVGVSVFVPVKTCNVCLKTL

SEQ ID NO: 940141 - protein, 99 aa, Homo sapiens
KRPGQNPPTVFWMEFPLTPEGPLSPGLLEPSNPKGGFCWNPPCKQAVFFFSPAPDPKALLGGPRAVSYAVGFPPPPGDIFMGFRHANTPDCPLFSNKVA

SEQ ID NO: 940142 - protein, 109 aa, Homo sapiens
  misc_feature (29)..(29): Xaa can be any naturally occurring amino acid
WKVPLGAGGRSTGEFGNPFSPPVALECEXAHFGPQHGASPGTGGHPKAQALFVSFRAPGKHNGPPWEWPFAYPPGCPGSQADWIVPCGGHPPACALQGTCGPFLKGPPK

SEQ ID NO: 940143 - protein, 73 aa, Homo sapiens
  misc_feature (2)..(2): Xaa can be any naturally occurring amino acid
RXPRTNSDNQNMLSREFQISRTEKAETKRKSPCFPKKRWNRRSKQANRNEACAANMHCTFHKHCLLILLLLAV

SEQ ID NO: 940144 - protein, 131 aa, Homo sapiens
  misc_feature (130)..(131): Xaa can be any naturally occurring amino acid
SGPPPAQGSKNNFQFLLKFAEKQLETDHVFICFHKNRKDKTPLLRTFSFLGFEIVKPGHPLVPKKPDACFMAYTFEKKFSGKEEEKAPSGLGIRPLGPPLVNRVGKNRKLAHLAWVCPHVVIVQINAPSXX

SEQ ID NO: 940145 - protein, 40 aa, Homo sapiens
LGLGAKWLVHSSIYIIKVGPDFLIRPQCCSTHTKSIPVLL

SEQ ID NO: 940146 - protein, 98 aa, Homo sapiens
  misc_feature (13)..(13): Xaa can be any naturally occurring amino acid
  misc_feature (36)..(36): Xaa can be any naturally occurring amino acid
FMGGPWKGKPPFXPAPQGVFGWGGGNFPPPVFPPPXKRFFGGFRAPTPGPVWVSKGPRGSFPAVGKNPPGGPKFWKFFFGFPFPLGAPPPPGGARGPF

SEQ ID NO: 940147 - protein, 161 aa, Homo sapiens
  misc_feature (28)..(28): Xaa can be any naturally occurring amino acid
  misc_feature (100)..(100): Xaa can be any naturally occurring amino acid
LPQSSVSHLERSLTPYNARPQHGKKLMXVRIVKHAFEINTCSQAKTLLQVLVNPIINSGPREDSPPIGGPGIFKKQAVDVSPLPRVNQAIWFLGPGAFEXPFRNIKTLFEGLANELINAAKGSPNSFALKKKGELGGVAKSPPFFSPLLPNKPVCPLGRSP

SEQ ID NO: 940148 - protein, 94 aa, Homo sapiens
  misc_feature (20)..(20): Xaa can be any naturally occurring amino acid
VLRALRLPPWGRFAVRDIRXPVAVGVIKAVDKKAAGAGKVTKSAQKAQKAEMNIIPNTCPPPFNQWWKNGLRTVCFNWPFKFSSKRLVNDNHAS

SEQ ID NO: 940149 - protein, 84 aa, Homo sapiens
KKLIPFWLKGEEGPKFLKFGKPPWLKWVLASPIGLRAFQTIPLGLLFWFVFRQTVRVGVIKPVDKKVAGAGKVPKFAQKAQKGK

SEQ ID NO: 940150 - protein, 50 aa, Homo sapiens
MGFPPPPPPGQGWSWTKTSAFKSFGSKPFGVRKRGGGVLLAKKPLPGFSP

SEQ ID NO: 940151 - protein, 136 aa, Homo sapiens
  misc_feature (23)..(23): Xaa can be any naturally occurring amino acid
  misc_feature (49)..(49): Xaa can be any naturally occurring amino acid
  misc_feature (135)..(135): Xaa can be any naturally occurring amino acid
MGFEVSFLKFLEESAVKQKKNTXKGHPNSGNKKGSHSNSRKNIDKAAVXSGNHVCPCKKNETFVQFANPSQVQGRDNVKIVLNKNFKNCPELVLKQLQEMKPPVSLKKLEGHSNGPKMFVMKNISIGKAPGKGQXL

SEQ ID NO: 940152 - protein, 111 aa, Homo sapiens
LGGLGGEGIQIGVGGGGDQFRIPPPGVRARGGWPPLYPKVPRGDFYGGWDWRLYKVFLEGRGRGWNLLVPPVPPGVVNPPPPLFLFFKGLLVFLNLASKGPFFCPIKIGNA

SEQ ID NO: 940153 - protein, 140 aa, Homo sapiens
WVGQPGHFIPAPPPWGGGEGPGSNPNPGRILFVRLGPLRHHHGNGLYNMGEPFSATDPKAIGHRNFHAGYSMVGAGLTVGLSNLFCGVCVGIVGSGAALADAQNPSLFVKILIVEIFGSAIGLFGVIVAILQTSRVKMGD

SEQ ID NO: 940154 - protein, 175 aa, Homo sapiens
  misc_feature (97)..(97): Xaa can be any naturally occurring amino acid
  misc_feature (131)..(131): Xaa can be any naturally occurring amino acid
PTTRRFVLGAPPPPPERVVCVFSLFGAAKNFLKRGGGPFFSALLWGGVVWGVFPPGGVFFITPLFVVPPAGGVFNFGVFLPPRGGGRPPRVVFYPGXPGSWRGVLFFVVFFPPPPPFFFPPRGSSPNIVGXPPSPKKGGGGVFFFFFFLGAGTPPPPPFFFFFWGGGEGPRFPPP

SEQ ID NO: 940155 - protein, 164 aa, Homo sapiens
  misc_feature (115)..(115): Xaa can be any naturally occurring amino acid
PAMWLGHWWGLGLLRWAFLARFGGPSPAFLGLSVDRSGEPKAVLFARLEAWNNQGFLDGVVPPVLAWGSGAAAGGWAISGPKGSLSLVRLWFGFPVSFLVEPFLGPVGLGGGGVXGLNVPASSSSPGRCLGFVGVWSFLAPPGGPVLLFCPCLFWRSLSLPPYF

SEQ ID NO: 940156 - protein, 111 aa, Homo sapiens
  misc_feature (46)..(46): Xaa can be any naturally occurring amino acid
  misc_feature (67)..(67): Xaa can be any naturally occurring amino acid
SGRCSHFSLLEQLKSSFNGWPAGKLTQGEEQYISGSPGGFHNFESXVLSGVTKVVVKLFYSDPNTVXGPVEVSRKNPKFMEAVAEKALPEYRKKPREELNVDFAFAPTGGF

SEQ ID NO: 940157 - protein, 146 aa, Homo sapiens
  misc_feature (45)..(45): Xaa can be any naturally occurring amino acid
SAAGKEDVASKRPRVLRAGVNSVSSLVENKKAQLVVIARDVDPIXLVVFLRALCRKMGVPFCLIKGKARLVRLVRRKTCPPVAFTQVNSEDKGALAKLVEAISPTPISDTMSSSVTGVALFWVFEFVARIAKLKKAGGKELATKMG

SEQ ID NO: 940158 - protein, 83 aa, Homo sapiens
PRVPVTPWKQTVFYMEDYLPVKTGEEIFGPLGIRPNAKNNRGLGFPLDLGFKGQLCELSCSPDYRMGLGPAFPPCTSPGGEGF

SEQ ID NO: 940159 - protein, 116 aa, Homo sapiens
GGGFGWFVSAAPIPPHFLWGGPPPPPLFSFLPVFLTIRGSFPLLGAARLGAKVNGLVPHPAVSFPGRLGPPNWFSFSLLPGGGRPFFSRPGGGGVLVCGLLVLWRNNPGTKLFFWF

SEQ ID NO: 940160 - protein, 86 aa, Homo sapiens
ARGSPFGWACPLGLKVSFPLGVGGPGGYGFLFPPPQVFPPGRVSWVGVFPLLGPPLGPPFSPFPFPPFLSPPLAPSWGPPWVLGDP

SEQ ID NO: 940161 - protein, 39 aa, Homo sapiens
VSCPSFRPHKDFLEGLPIIIFREVLTRLRPKLIAFPPQP

SEQ ID NO: 940162 - protein, 168 aa, Homo sapiens
MFNFSAEKLSSWGLVMKYLGMATPFFFLPDGGKIKDWRNGLTPIIIPKVLENEDRRSASFILPQLSISGTYDLKSVLGQLGITKVFNNGADLSGVTEEAPLKLFKAVHKAVLTIDEKGTGAAGAMFLKAIPMFIPPEVKFNKPFVFLMIEQKTKFPLFMGKVVDPPQK

SEQ ID NO: 940163 - protein, 80 aa, Homo sapiens
VTAPGMPHSQEPAGLGSARPPAMLVATPACIPTDADRCSVQDRHSESQPGLRGAGTLQSLGESPAPPHQILTEETATESP

SEQ ID NO: 940164 - protein, 44 aa, Homo sapiens
GTGFKPKAKQENGERTGGVPLIKAPKKETPDENGETQKADDFVL

SEQ ID NO: 940165 - protein, 122 aa, Homo sapiens
AFGARGPFPPKCGGGPQAPQNPQVGLGKPGFPLPRGGEGAPPGAKAPGGGGVRPPPQQGGVGGGPPPRGLGGPGVGVPAPGLLGAPPFPLTPRGGGGPGLGPGKPGTVGLGPGPEPGIFFFP

SEQ ID NO: 940166 - protein, 138 aa, Homo sapiens
MPEKWVPGWQCSPVPQNPGVSFCPPQESHLLGTLGGGQGLKAPREGPLPGLFPQEEGKGLCVPPQRKRALVLGSNPPFCVFPPKWKVPKVPFLFPFLPPGRALPPPPPEAPPPPWGVFRSFGQGGHFFPRGENFPLRA

SEQ ID NO: 940167 - protein, 103 aa, Homo sapiens
  misc_feature (46)..(46): Xaa can be any naturally occurring amino acid
NPTSPLGPVWQFTTLKGQARALSLWPRVKTSVLWKNTKGPAGPGSXEKREARVTCPPPTSESRSIEPCQRREKGGCRFLFLGHGEPQDLCTLFLTPWLGLRPV

SEQ ID NO: 940168 - protein, 35 aa, Homo sapiens
RLNLPKCWDYRHEPLYLVFIKFLTQFMPLPPSVVF

SEQ ID NO: 940169 - protein, 103 aa, Homo sapiens
PPPPPKNGPRAKPPPGFPRGGGPPLFSPGPQGGAPPPPPGPPWGAGALLTQMGGPPSPPFFFQGGPRAPLGGGGWAPWVSLYFFTFFFFLGGGFIKEKTLFFF

SEQ ID NO: 940170 - protein, 102 aa, Homo sapiens
PLSPKKYVPGPQCLAPGPRPVFCPSILAVSQKEWKPGEPYPWVVAHKALPNRVPKRAVDKSPGEPPLYKVSLVMFDKMAPVIYPFGLPPGLGGVAPLCGQPN

SEQ ID NO: 940171 - protein, 74 aa, Homo sapiens
GPGPWGPPPPHGPGPWGPPPGHGPGPPPRVPILEEVKKNGPQDGKPEKIAQLPWNGAYNPNFFFLINSPLGAPF

SEQ ID NO: 940172 - protein, 69 aa, Homo sapiens
NKLLLLAKCLAQQALDLVLNLAKTLAILHCVAQPLLLALFCQQGTRNLLPFLPLPEGWFFHLDTPGSKS

SEQ ID NO: 940173 - protein, 112 aa, Homo sapiens
  misc_feature (2)..(2): Xaa can be any naturally occurring amino acid
  misc_feature (5)..(5): Xaa can be any naturally occurring amino acid
IXRAXKRERIDLPPLLFVVWGGETSATIIFIISRGSRGHCAPFSGGGYTGVVGGASLGKGCFSPARPKGRSGNFLSSLLEGGPTGIVLGAYSTRALWRSQGCHKNSLVLARL

SEQ ID NO: 940174 - protein, 106 aa, Homo sapiens
AQVHCSRRLRRSWPLTIWLPDVLGTRFQPKGRFGSLAAGVTGTAPQKVLFLGIPAGAQPGPPTFFCSSYFGGGSRGLEKGGPLFLLGGPQGPAVGFYTKDLRPLGG

SEQ ID NO: 940175 - protein, 86 aa, Homo sapiens
KPHGPRTLYFALLVLTSPATTLLGNLFFWRELQKAPLSLAKGWQLFLAALTQGVLEPPPYGALFFPLLSLGLYPCWLLFWNVFFWK

SEQ ID NO: 940176 - protein, 107 aa, Homo sapiens
GLLRNQKEHGCKTRPSTWASPRPLLNWSRKAQQGKIGGCPQPCAPVKPAPPLSFKHPGWPLGPGSLHASALGPVGSKHRACPPPPKDLRAMPVPPHVGGCLGPLPAP

SEQ ID NO: 940177 - protein, 104 aa, Homo sapiens
  misc_feature (47)..(47): Xaa can be any naturally occurring amino acid
MSSDEFANTMPVRPPRVKRKMNPRAQSPAADHFILLPWSVASQLNTXTPVGITIIMVPEVKYARVSTSIPTVNIWCAHPINPRKPIDIIAQPIPMYPNGSFFPE

SEQ ID NO: 940178 - protein, 111 aa, Homo sapiens
ERVSVAQAGVQWHNLGSLQPPPLGSSSSPPSASQVAGITGVHHPHLANFCIFGRDGVSPCWPGWPETPDLRRSGHLDLPKCWDYRREPPHPASSPTFDITSFLLFSPSVVF

SEQ ID NO: 940179 - protein, 44 aa, Homo sapiens
LKLMNTDLVAFTKNQKDPGVLDRMMKKLDTTSDGQLDFSEFLNL

SEQ ID NO: 940180 - protein, 144 aa, Homo sapiens
QQQQEKKAGIGLMLPPPPALEDDMESQLAGSLISGGQFMCDLDTDRDRARAGPSAPDLSTPAWVPDWLALFVWAALEWTPASPFLGAWREVAQPPGLLPSLGLHGEPGELSSGGPERTPAPKELVLAPAFPWPRDTQELINALE

SEQ ID NO: 940181 - protein, 69 aa, Homo sapiens
  misc_feature (37)..(37): Xaa can be any naturally occurring amino acid
LGMEFRFPPPPPPPRAQKFRGTHSGAGTNSFFFVAGXATMVGYPFLNGIFSIQRATPFWAPGPRTLGMV

SEQ ID NO: 940182 - protein, 96 aa, Homo sapiens
  misc_feature (4)..(4): Xaa can be any naturally occurring amino acid
ADIXCKYAELKEKIDRRSGREMEDGRTFLKSGDAAIDEWFRQAHVCESFSDYPPMGRSAVRDMNQTVTVGVIKAVNKKAAGAGKVAKSVQKAQKAE

SEQ ID NO: 940183 - protein, 137 aa, Homo sapiens
RARSALFSECIHGIISSLWLLLMLKRSRCLSSVSLFQGHLSLPHRLPVIETLSLSLLFWVTSLPHRLPVTETLSLSLLFWVTSLPHCLPVIETLSLSLLFCSFIPMLQLLESRAVSLMSLGNKQPLFVYVLPLSCFL

SEQ ID NO: 940184 - protein, 70 aa, Homo sapiens
SSTRSKGVQQHPPPHTSATEPFLVDGPTLGAQHLEAGGSLTRHVTQEFVSRTLTTSGTLSTHMDQQFFQI

SEQ ID NO: 940185 - protein, 126 aa, Homo sapiens
  misc_feature (43)..(43): Xaa can be any naturally occurring amino acid
  misc_feature (48)..(48): Xaa can be any naturally occurring amino acid
VHGAPRGVGGRGGWIKTPRTPRPPPYMGGPLGGGAPNPGFGFXGGPGXFREPPTIPKGGPPPPPIFPPTGGRAGHPNGAPPKAQKGGAISPGVGGKFFSLGLPPPPWVFFLAPRPGPKTQGGFPPP

SEQ ID NO: 940186 - protein, 101 aa, Homo sapiens
KNLKKPLPFYSASAIEKGFSFFIPVGHSPTPCLRVCPLDRAPCPLWWSGPFFCSSSTPRLPQIPRAAAGARGSFFTLLDASKGGPFQLPGLLRLLIKISFF

SEQ ID NO: 940187 - protein, 100 aa, Homo sapiens
QKKALLGFWVTWNTNSGHCHKAQAVLGVFFRREAPKKFLAYKGVRAALKALLPYLEGPFEGLSRTLQAPAFLAFFWPNIKLPVPAPAPPPWETHKGALPL

SEQ ID NO: 940188 - protein, 100 aa, Homo sapiens
MDISKGKIPKLLFDAFFKKKKLGKPRPQEGGFFAPEKKKFGISGQGKIGQKAGGSQIFPKIKAIPQLQGSLRFGFALRNGFIPPNGGFKCFKTLIKKLAP

SEQ ID NO: 940189 - protein, 95 aa, Homo sapiens
HITINMMHQNHGFQTASKVYLPGPGAVADACSLSTLGGQGGRIAMSGVRGHSGRHGEALSLLRMQELAGGGGVCLSSRLLGMLRQENHLNRGVGG

SEQ ID NO: 940190 - protein, 125 aa, Homo sapiens
  misc_feature (7)..(7): Xaa can be any naturally occurring amino acid
  misc_feature (58)..(58): Xaa can be any naturally occurring amino acid
VGGHRGXGVGTQGFLGQTLVLWDDGPCYPQFLPVGFIWRVVGFFLKKKVLKSGRNLQXYVLVEGVILTPRVAARWDLPLSQNALVPAFCPTVDYVIFLKGPFSKARGFTFSLWPAHFVFKAFGAQ

SEQ ID NO: 940191 - protein, 138 aa, Homo sapiens
  misc_feature (18)..(18): Xaa can be any naturally occurring amino acid
  misc_feature (76)..(76): Xaa can be any naturally occurring amino acid
GSRGGGGVFPGVFQLPPXGAEGWLWAKNGGFLKCVPPPPFPPRGGGWGGGGFLNPALFLARRAPGGPPPRFFPPLXTPGAVPPPGFFFGGGGGSLFSPGTPFPPWALLGAPLNPVGPKKGGGGGGVFPGFFPPPGPPF

SEQ ID NO: 940192 - protein, 108 aa, Homo sapiens
EKKLGSPIRQSPKGERGGKFTSSCNFEPPTRGGCGSDNIGSWIFQAMGWKKGTGLGRKKQGIVTPFKAQTRVGGSGLGARGSSFGVPSTESYKETLPKTMVARFNKAQ

SEQ ID NO: 940193 - protein, 213 aa, Homo sapiens
SGWPCGAGGVFARRPLGVSLGVFSRLSPFSSWRVIALLAYGPWVAFLVFRLGRSSPLYPSVVSVWPFCPASLGWFPRCSPGFPRCGALGGWGFFLAPNFLGLFKMWGPPPPLFALGGLGGGGEASFSLFVLGGGGFSFPALPVVFASLWGARASPPFGFLGGGGGGLPFCPGGPFGPLGAFGGPFLPFGPLGGGGAGRGFRGFGGPRGRPRGR

SEQ ID NO: 940194 - protein, 72 aa, Homo sapiens
HYVLSIGAGFAIIGGFIPYFPYSQGYTLDQTYAKIHFTIIFTGGNLTFFPQHFFGLSGKPRRYSGYPDANTT

SEQ ID NO: 940195 - protein, 101 aa, Homo sapiens
  misc_feature (8)..(8): Xaa can be any naturally occurring amino acid
EWAIMVPXERALYRDVMLENYEAVAFVGPPPSKPALVFHLEQGKKSCFPHPQGVLNRNSWKAGWIGSLELKRYPFLAKPVFGRIGSKIFRNRQCWEDRKKA

SEQ ID NO: 940196 - protein, 104 aa, Homo sapiens
  misc_feature (48)..(48): Xaa can be any naturally occurring amino acid
KKFGGVPKFFPGVGRGAGPQAPWPFFYPKKSKTWGRAGPEILLGPQGXSPPPPPRGFFGGGAVFSWLPPGPLLAFGKGKLPPFLSPPGVPPPPPPKGKFGALFF

SEQ ID NO: 940197 - protein, 157 aa, Homo sapiens
GVPRFPSQKSKNISFVIAKPDVFKSPASDTYVVFGEAKIEDLSQQVHKAAAEKFKVPSEPSALVPYQHPGPGLGWSARKRKRREEEKVDQAGLELRDIELVMAQANVSRAKAVRAFRDNPSDIVNALMELAMSAPGRKLEPSYAFPQLWYSINRCPF

SEQ ID NO: 940198 - protein, 105 aa, Homo sapiens
PPIPREPPPPFFFPPKKTRGPFPPRVFNFGPGGENIFPRETLLPFGPFLGPLKHNFFQKTGLGPPRISRNFFPPPPQIFFPLSFFFNPPPFGGFFCPLKKNFFFP

SEQ ID NO: 940199 - protein, 71 aa, Homo sapiens
VSAAKEYGAAGIFPARDTYHPMREYPPYHTHGRYVPPSSTDCSPYEKVFAGNGGSSLFYTNPAVAATFANL

SEQ ID NO: 940200 - protein, 143 aa, Homo sapiens
  misc_feature (13)..(13): Xaa can be any naturally occurring amino acid
GFSPYPPGPVFPXGVSQGKKGGWGGVLPPRGGAFPPQGGQGSPPRGFFGSPPPSGGPPFGSPPGVNRGGPRGALRGSPPPFPWKGAGPGGENSLFGEGPRGGGFSPPVFFFFPRAFFKIFFFFPPGAFFFLGKKGGGVRVSPL

SEQ ID NO: 940201 - protein, 45 aa, Homo sapiens
PTGQKEPYYFYDATYAFLPDALEQVLSGWAFDPLCLSSRIVVVAG

SEQ ID NO: 940202 - protein, 93 aa, Homo sapiens
QLKTDAALIALEAPWTITDAELWITLTVEDSQLYEDTLAGRSVLIKNLTPQTLQPRWTGPYLVIYSTPTAVRLQDPPHWVHRSRIKLCPSEKK

SEQ ID NO: 940203 - protein, 85 aa, Homo sapiens
FMNQSGAAPDNRRLNMLQQNVEWSDRMNTYGLRSPEWVQICCPDAYATNLHNLFVRRAVQMSKCGIGNDGPLVAEMQDPKRKSRS

SEQ ID NO: 940204 - protein, 126 aa, Homo sapiens
TARAPGRKNTRSRPYLGVSFDPWRSPCGNRAIPMEFVIKQALGGATKDMGKILGGDEEKDPNPPKKEEERQEALPQAEEEGMAPRAPSLTETVVSSVRLSWACASSCMSGPLGVFSPDGIPANKPQ

SEQ ID NO: 940205 - protein, 99 aa, Homo sapiens
PAQGAPKVSSALDKLKEFGNPLEDKARELFSRIKQSELFAKDAGVVFKDLLESEGETQDLLFGALRVTSQEGPFKFSPPQGLFEGSLHVAPGAPHKNPS

SEQ ID NO: 940206 - protein, 104 aa, Homo sapiens
LGPFFPGGPPPLTGKGVKGPPPRGRGLGAPHFKGFLIFLRGGNFFAPPKTPGGIFLGGISPVKIFLVVFLEKPPLGGVVPGFPIWFFGVSRGGGPFPPPPFSGI

SEQ ID NO: 940207 - protein, 80 aa, Homo sapiens
  misc_feature (8)..(8): Xaa can be any naturally occurring amino acid
GFGTTPLXSRRGPQPEVWPIRFLNAGKAQKFQPKFEECRKGFEKKKKKGSGQNCPSQKGAEKLKALSVKEEPQEDAEEKP

SEQ ID NO: 940208 - protein, 71 aa, Homo sapiens
RPKSVEGGYALQSGYFQESVPKQGSKGRPSSLSSPLLLSKTDSRKPKVFACEVPHQGLGLAVQKSFYRGEC

SEQ ID NO: 940209 - protein, 103 aa, Homo sapiens
  misc_feature (14)..(14): Xaa can be any naturally occurring amino acid
MGMPLPSGWCHPPXWRVFWDIPKVPHRRREFFIVGKLQDGFLPIPTCSFVAPWNSLSLAQGRGFPKTHPVGCEESPVFSCFSLPCKMQRGPHCLWGGQLLQGF

SEQ ID NO: 940210 - protein, 109 aa, Homo sapiens
LAQHVVQARALRCAARLPAKRYSGDGPAGVLGRELVALEVQYVAVRAVQRNAVGVGLGGGNEHVLRQVGAAAVPRDDGALRIVQPIGTDHARDEPAVLRDGRLLHGQRE

SEQ ID NO: 940211 - protein, 101 aa, Homo sapiens
KIRLPLGQSQDLCTRIMGITYPHKEAGKQPKTPLTLLNISSFVKFIVNCFSSLTNLNSVQKPFPGGFVPKRFASRFKNHFILSLHKLVERQELKKKKNGFF

SEQ ID NO: 940212 - protein, 101 aa, Homo sapiens
ANVWAPKPVQVLLSSSGLLVGCGAGHSLALCQMPAHPALVQDPKVTYLSPNAIEDPEFQKAMGKKRNWKKANQKLQPKANLAGPKMGGCDKESLIKWLFPP

SEQ ID NO: 940213 - protein, 191 aa, Homo sapiens
  misc_feature (69)..(69): Xaa can be any naturally occurring amino acid
FSQGPPSFLHTCYWPPGLIPGTPLVGFLLWRGIPGYVPLFPRGYGFCRPPMGGGTGVSSRGFPVSPPLXAMGGFFWPPKTGAFPKFFNTPPPFPQKGGGGGGGGVFLTKPLFFTPPFPGGPPPPFFSPLKKPGGGSPPRFFFWAGGGVNFFPGDPFFPLGPFWGPFKPVFSQKPGGAGAGFPGVFFPPGPP

SEQ ID NO: 940214 - protein, 124 aa, Homo sapiens
  misc_feature (31)..(31): Xaa can be any naturally occurring amino acid
  misc_feature (105)..(105): Xaa can be any naturally occurring amino acid
MSPKLSPEVTFLFGGQKEEEASSTLIPIPRXPFPRPWALTFSNGRALQASALNAWRGHRDNAGAATEKFIKRAEVNGLQPRASMKAVKKMVEHQHSHFTLPTMPXEYPLHTTALGPAICTHFCL

SEQ ID NO: 940215 - protein, 110 aa, Homo sapiens
METLSNMFELDLPPVPSLLSKMIINEELMAPLGQPTQTVVMPPLEPPAQKNLVFQLAKKLGTLVENNKRVFSPKQGPSGGFFQNQKGGSPKKKGYMPPGGSPQKNFQRAY

SEQ ID NO: 940216 - protein, 126 aa, Homo sapiens
KTEFHFCCPGWSAMVRSRLTTTPPPGFKRFSCLSLSSSWDYRHVPPCPAIFVFLVEMGFLHVGQAGLELPTSGNPPALASQRAGITGVSHCTWPKTAVLTCPAGCKFEQSENVIGSIGSFSYPLFP

SEQ ID NO: 940217 - protein, 35 aa, Homo sapiens
QVKRPLYFYDATMLLPDALEQGASGLELFDPSVVF

SEQ ID NO: 940218 - protein, 37 aa, Homo sapiens
  misc_feature (16)..(16): Xaa can be any naturally occurring amino acid
TGQKEPLLLLGCHYAXLQMPLEQVLLGWSFLTLLSSS

SEQ ID NO: 940219 - protein, 44 aa, Homo sapiens
  misc_feature (5)..(5): Xaa can be any naturally occurring amino acid
  misc_feature (13)..(13): Xaa can be any naturally occurring amino acid
IEQNXLAVFEVSXGMAFGRGCLGSSALLVFGLLLQPLRPFCRLL

SEQ ID NO: 940220 - protein, 60 aa, Homo sapiens
SHPHKSPSAYQPRTRAQGSGRSELLSRSHTAARLGLSGGPVCPPVVAPIPGGVKRLHPLA

SEQ ID NO: 940221 - protein, 105 aa, Homo sapiens
  misc_feature (55)..(55): Xaa can be any naturally occurring amino acid
PGGGSPPGFFLGAGGGFLFSPGDPFCPLGLFGGPFNPVLSKKPGGAGAGFPGVFXPPGAPPNFFFFFSPGGFGGLGPRNPPPFGFFEGEFPPPRVFFFFFFPPPL

SEQ ID NO: 940222 - protein, 120 aa, Homo sapiens
TVGGAFGAAPLFGVTGGFQGFPPTLFCSGMAVGNCIPWVLSPGFVSGPFLKLGPSGGGFFPAFLGPGRKGLPEEAFGLEGPNGGGPPLPLSPWGDGWGGWLPPTWFFYFLFRNKPPSAPG

SEQ ID NO: 940223 - protein, 136 aa, Homo sapiens
  misc_feature (36)..(36): Xaa can be any naturally occurring amino acid
GTPSPGPPGGNILFFLEGPPPFVVWPTPPLRGAPPXLVFGPPPFGPPLGAPGVSRGFPPPNGEIGSPRNGGWVFSPPGGAPPPNFSNFSPRPRGAPFFGGGGFFPPPPPKDPPFFPPGGGGGAPGGGFFLKPGFPP

SEQ ID NO: 940224 - protein, 129 aa, Homo sapiens
  misc_feature (26)..(26): Xaa can be any naturally occurring amino acid
GQIPFFKFCYQCGRSIGVPLLPCPRXYGILTFSKYCKTKAWAEFPKKDFGDLVAIVTQLEQVSRRKKKFQLNTTCPSQAWGGPRTVWVFYLPEPPQGIFQPNAGIFAPLGSCFVTVFPLRPPNKLAPRG

SEQ ID NO: 940225 - protein, 142 aa, Homo sapiens
EFRDIVDHASELGRFPRTNGPSNFQEKGGAHIRAKRKREELSNVLAAIRKAAAKKDEPLPCPFPEIKNSLTEALGFLLSVVGVGVSGAPSPLFGGRFEPHPLRGVAGCESKTVGRPPFPGQQVRKPPDCKWLLSFNRFYAPL

SEQ ID NO: 940226 - protein, 41 aa, Homo sapiens
PPDFTSTKVVPVTAFVPPPQPHHAQPPCLGEDPKVKVYAVA

SEQ ID NO: 940227 - protein, 128 aa, Homo sapiens
  misc_feature (127)..(127): Xaa can be any naturally occurring amino acid
MANHLISGGTGYVPQDWLTVQQLFLGANCRTHNNFLILPWFIDFIADEVDLTSALTRKIMLKTPLISSPMDTETEADMAIAMALMGGIGFIHHNCTPEFQANEVHKVKKFEQGFITDPRGAEPLTHXG

SEQ ID NO: 940228 - protein, 68 aa, Homo sapiens
AVNGLFLNPASNNGKGQCPVPWCSQLPSCFGPGPRAFCRPCSSGNCPGPELGPPTALGGGSCITNPNP

SEQ ID NO: 940229 - protein, 79 aa, Homo sapiens
  misc_feature (2)..(2): Xaa can be any naturally occurring amino acid
  misc_feature (16)..(16): Xaa can be any naturally occurring amino acid
IXGGAPPPVVAPKKNXGGVSPPGFIGAGGGNLFFPGNPFCPWALLGGPLKTRGGHKKRGGPGRDFRGFFPPRGRGEFNP

SEQ ID NO: 940230 - protein, 137 aa, Homo sapiens
IHEVMQAALPSCEKNLFPSGSYWLLHLVAITNQYCSMSWTWKVPLSLSPLFSRPSPESCWWPPYVVTSQLVQGALSLVRSLSYLHSASSKSRGTPVVHTSVRDQKGPCGISGHASLAEVSPSQALVHRITSNYMCYP

SEQ ID NO: 940231 - protein, 46 aa, Homo sapiens
VWAGPAFVLQGLAGFRGGRLPPLAAPPLHSVTFENPAGPSLAPGFA

SEQ ID NO: 940232 - protein, 83 aa, Homo sapiens
NLVMGFFNNMQDINGQILCVLAKSFFSLPNGAAILPFSLKQFFTFTVVLFKMNVKALFYGCNLPFPLQKFLFDGIHKLWYDMI

SEQ ID NO: 940233 - protein, 89 aa, Homo sapiens
LPPFDVGGGIALNDHFVKLISWYDNEFGFNTRVVALMAHMASKEEDPWAPSPSKSPKGKKRPSLLGGPCPTQSPPPLNFPSSQLPCRPL

SEQ ID NO: 940234 - protein, 110 aa, Homo sapiens
  misc_feature (46)..(46): Xaa can be any naturally occurring amino acid
LLAPPYSHPPLSRMGFFGPYYVLPKARFVALVFRLKKERVFRGDFXLWAGVLKVPPPGEKFWGLGGFFFRGGPPPFFRGNRGLSPPGGFSPFFQKMGGRARAPAPPLFFF

SEQ ID NO: 940235 - protein, 116 aa, Homo sapiens
LICFVLFCFGKDRILLWDPGWFSTPGVKQSSCIGLPKGWNYRHEAARPALITFITPNSLCGIPGLCTQIARVAPKGKKVGPLFPFFMPTGVANFPNPPGAGADFCPLFAEIKFPLG

SEQ ID NO: 940236 - protein, 105 aa, Homo sapiens
  misc_feature (40)..(40): Xaa can be any naturally occurring amino acid
RFLGSPFGAPPPVFPQNLKNPPGGGLFFFGPRAPRLFPPXCLGGGGIWVLPPPPPPRFFFHFRGGRGGPFPPLAPPFRPRGFPVPLSRPFFGAPLGGFFFFWAFL

SEQ ID NO: 940237 - protein, 155 aa, Homo sapiens
PLRFRGRSHFNNGRGGYILIIILPSELKLGAHSQSDHNPLSRASDSTPPNRFLMTFSEPRYLALPPPINLVGELSGVVTTFSGSNITLLLAGLNKQGTALYSLYIFTPTQGGSLTPPINNIKPSFTGGNPLRVKTPIPHFPPIPQPRHHYPFFLL

SEQ ID NO: 940238 - protein, 117 aa, Homo sapiens
SPHPTARAQGFFEGERGRAPIPQPPFPGGWAFSLIQWARRFSRLKRGRWAHPIYFGLVPSLGPPGFPFLVSGWFFVGICGGFPFSPGNRFCLVSVFIPPPFGVLAPGAQVLGRGLGP

SEQ ID NO: 940239 - protein, 148 aa, Homo sapiens
DKCGHWPLASCRQRSPADKLRASTKGCLRSHGCLEPHLSTGLAWSHGGSPLAHLPTKPCVQTVLTNAWKRTIPVLQILTAQRKGTLPTLRSQEGNLEGMPKLGFDGCIGVHQTDSGWAGWERRFCKKKRQVPWLDRMTNTMTGRRRGK

SEQ ID NO: 940240 - protein, 129 aa, Homo sapiens
  misc_feature (19)..(19): Xaa can be any naturally occurring amino acid
  misc_feature (62)..(62): Xaa can be any naturally occurring amino acid
GYSGGFRPAYGGLPNPAPXKNWGSNFGLGGGPTPLTPPSSPRGGVLKKTKPPIGKWGFSSFXSLPKEKIGEPPPTHPLLGGPKTWKEAPFSGVPLGKENPLWVNPNPPPPLGGFFLGAPPCPAPQKKKN

SEQ ID NO: 940241 - protein, 159 aa, Homo sapiens
AHVFRTGNFRSKRLEKIGKELKQANREGKIIPLTVWNDWAIIKATLEPFQTGEDIVSVSDAPKSCVTDCEEEAGTESQQGTESSHCKYVAESVMAQSTQNVDYSQLQEIIYPESSKLGEGGPESLGPSEPKPRSPSTPPPVVQMPVTISVFAEHSGIKR

SEQ ID NO: 940242 - protein, 115 aa, Homo sapiens
  misc_feature (34)..(34): Xaa can be any naturally occurring amino acid
QNPETHSGPEVHLFPPPSKELALNKLVTLTCLAXGFSPKDVLVFWLQGSQEFPPKKYLFWAFRQEPNQGPPPFCVTSIFGGGTQGLKKGGPLFLHGGPRGPSVGLSPKNHRPLGG

SEQ ID NO: 940243 - protein, 77 aa, Homo sapiens
EEDESGTREKRAYACVFRGIWDSIGDQPDELSFHRGGFIRILSKEYNMYGWWVGELNSLVGIVPKEYLTPAFEVEER

SEQ ID NO: 940244 - protein, 149 aa, Homo sapiens
SGNTSGAKVHLLPPLLEELALNELVTLRCLAPGFSPKDVLVPWVQGSQEFPPEKYFTLVSRQEPSQGPPPFPVHSILGVATEVCKKGAPFSCMVGHEALPLAFSQKAFARLGGKPPLVNVFVFMGGGGGPWFLAARLSPPLNKLHVPPS

SEQ ID NO: 940245 - protein, 133 aa, Homo sapiens
  misc_feature (42)..(42): Xaa can be any naturally occurring amino acid
  misc_feature (82)..(82): Xaa can be any naturally occurring amino acid
ELKYAKQFALSPVALKKLRVKKLKKFLDAWGEPSKGWAEKFXSIRKINELMPKYAPKAAQGRGRFVVCPIFVAPEGEKPGSXGYSQNSPFGNFFFKGAPAKPGIKCEAWGFPDDAGPPGPPWGDSLPFVGGGL

SEQ ID NO: 940246 - protein, 167 aa, Homo sapiens
TSSLLEQLNGSLLVSRLANLRQSEDQYYFRVPPVASHTFDSGVPSGVTEVVVKLFDSDPIPVRVPVEVSRKNPEFMETVAEKALQEFPQKPREEWNVDVAFAPTGAFESSSPPNEVQPPKESFARPPVTRPQPPGPQLRPASPRFGSCPLTLDFAGHGKNKIAPACH

SEQ ID NO: 940247 - protein, 97 aa, Homo sapiens
  misc_feature (33)..(33): Xaa can be any naturally occurring amino acid
EEEIQNLEIDVDELLDMESDNARAARVKELLVXCYKPTKAFIFGLLDKIRGMQKYEPPPKKVRVPDPGERWVPQDNCCPPNLVATEYRGTLRPGLVP

SEQ ID NO: 940248 - protein, 87 aa, Homo sapiens
ILPPTGRPRVWGFFILWGKPPPPPTNFFWGAAKKKRAPGGFGFWRDKGAPPNFFPPLFGGPPPPPRGLGAKGFPPAPPLFFFGGFFF

SEQ ID NO: 940249 - protein, 125 aa, Homo sapiens
CKSKGSRPGEPGPLGGRAFGFYHVKLGCPPRGGPVSYTSHEFLFLHPDLSQRVNFNQRGFCQRDSGKFRPIFCQCYFFCAFPCSFLLFPASLMGFRPWPTFFRTQREGSPISKKPRGFILTPFPP

SEQ ID NO: 940250 - protein, 168 aa, Homo sapiens
  misc_feature (26)..(26): Xaa can be any naturally occurring amino acid
  misc_feature (36)..(36): Xaa can be any naturally occurring amino acid
  misc_feature (83)..(83): Xaa can be any naturally occurring amino acid
RAVFRQTLPKAQCPIVERLSNSMMMXGRNNGKKVMXVGIVKHAFEFIPLFTGENPLQVLVNPIINSGPREDSPPIGGPGIFKXQALDLSPLPRFNRPFGFGHRRFKGPFRNIKTIFEGLANEFINVAKGSSNSFALKKKDKLEGVAKSHPLFFQLLPNKPFCPLGQPP

SEQ ID NO: 940251 - protein, 76 aa, Homo sapiens
LGPFFRGAFPPLQTPPLFGGGTWAPGVSFRLPWWGGGGPLFPAFCLAPGSHFFSGGLGKIGEGFGFVHPRYQEALF

SEQ ID NO: 940252 - protein, 112 aa, Homo sapiens
  misc_feature (25)..(25): Xaa can be any naturally occurring amino acid
PPPPRSGCIPPPKEGGPPTLGVPPXLLFKKRVPFLFPPTPLTLEPWGLGAILTPFPFLGGPPKPWPLGRPNCFFLWGLGGGFSPAPPPAPSFFSHLKAPFLKKNKHKRQKKQ

SEQ ID NO: 940253 - protein, 156 aa, Homo sapiens
  misc_feature (41)..(41): Xaa can be any naturally occurring amino acid
ARRPLKAGGREGLLGWSSLCGSGATTLGAGPGLPPVGLSWXIRRGGGGPPPGRGPGVIWGRGRPGFFCGGAVWPFGPLGFPPFCPGRPGPLGILGKFITRFPGGGVGGGGGGAPLGVAPGGFFFGPGPPPPPPPLGPRPFTPVGFFYFFGGVFFSP

SEQ ID NO: 940254 - protein, 101 aa, Homo sapiens
PSSQGALFGVFWVFFPPGGFPAPPGSLCNEKGYPRGVFPPSLPPRRWFFPPPPPFKGESGFPPGLFPPSKGPGFEPPKPPPRTRPNFCSPPKEFWRVPFSG

SEQ ID NO: 940255 - protein, 180 aa, Homo sapiens
  misc_feature (12)..(12): Xaa can be any naturally occurring amino acid
RPRGPTISPSSXPVLGGGLRGPVPGRSSKTPLRFLLRKTRGPLWGISLKGGFPPRGGGFPIRKGVGGAKKPPFPKRGVFFSLGFPGPLKQGAKTKRGWKTFGKIFPGPGFSFFFFLGPSPPPQKTGGGKLGFPGGPFFFGGFFPPLFPPWPWLNRPGKGGGGVIFFSKGGDKKPPMGGAR

SEQ ID NO: 940256 - protein, 112 aa, Homo sapiens
FISTLAEANRPLLALAEGESELVSGFNFEYAAGPFALFFIAEYPTFIIINTSPPPFFLGATYEALSLELYPTFFVPKTYFYPPGFYELERHTPDSVRANSYPSYEKTSSPSP

SEQ ID NO: 940257 - protein, 105 aa, Homo sapiens
LSASLRPRSPSPALTKDVKAAANQMRNFLVRASCPLRLEPGKKYLIMGLDGAPYDLEGPPQYLLDSNSWIKEMPFERLCRSTRQGAAWAQLNDFPQEYGPQGGQV

SEQ ID NO: 940258 - protein, 137 aa, Homo sapiens
  misc_feature (13)..(13): Xaa can be any naturally occurring amino acid
ELGRPRNIKKQSXSVKGKRPNYGLFFSARKQRGLGFFPQNKKRPTKKRGDPSSFVGLGPTLFPFAWGAGTSPPPLGFSPLGVPGPNPKGIPFALSLKGGPFGVPSPQGTSFPLGPPRGGGGYPLPGFFFPVGAPPKN

SEQ ID NO: 940259 - protein, 79 aa, Homo sapiens
YRFEKRRPGRGRGRARRKGTAAPFPFSLFRVRRQTRENEDVGGNAAKRRILAIRRAPTPPRAVQSSARFEEKKAARQCL

SEQ ID NO: 940260 - protein, 130 aa, Homo sapiens
GEGPPTPPFPRGADLLCKSAPVFPPYRAGGAPFLWGGASFGPPRFPIFFARFGCGGVCGAAPFSPPRARPVFLCGFWPPIRGLRPPPPNSPLIFLGAPPRGVGGGGPPLPWVVFCFLKRGRGAPPPRGFF

SEQ ID NO: 940261 - protein, 104 aa, Homo sapiens
FPPPFPPLPRPQPTWPPGAHQGGAHQKTMAAMGGQKLNWTPPGPGLELGAPQGCGDPGGPGRGDPGRAGGFPKIPLENFIKKFFWVGGPVNFLGPVGPSGVFPA

SEQ ID NO: 940262 - protein, 113 aa, Homo sapiens
RRSMADAYVQTQTAATLWNGSHTMSKQPSVDIPPRGLKMAVTFIGHSTTIPELFKRISEQFPAMFRRKAFLPWFTGEGMDQMEFPQAENHMNGLVFEYQQVPDAPPKKEEDFG

SEQ ID NO: 940263 - protein, 124 aa, Homo sapiens
AGFGGGFQPPGAFGIPPWEGGGAPPFPGQKGGPFPSPALFLGGVFLNPFFPPKFFPPPFFGGVGGFFPPGGPKGFSFFPRPPGFFFFFSKGAPQNQAGGGPPGPLFPRDPPFKFPRGPLIPFFG

SEQ ID NO: 940264 - protein, 93 aa, Homo sapiens
  misc_feature (10)..(10): Xaa can be any naturally occurring amino acid
QVTESFAFLXWCFSPILYAFSSPRFRQYLKAFLAPGLGWPLAPGPAQASLSSCFESSILSAQKEMVGMNALGEGQFETSPNKGDVGNKSAWVP

SEQ ID NO: 940265 - protein, 96 aa, Homo sapiens
NYVALQLQSPFPISRPRRERPYMEHPTRSIDLCFPSRLWDFMPRQWDMACPPCPKEDQIKDSMMDACFKGFPLPLHEGSTSQYSCFANPGGPPLNG

SEQ ID NO: 940266 - protein, 127 aa, Homo sapiens
  misc_feature (33)..(33): Xaa can be any naturally occurring amino acid
DSTSGLLGAFSGGGVQKIFTHFFLFGVSTTQVXTSRNQGGSGFLFPYGGGQKKPWVLFPLPPKNLVLSCDGFPQPCWKFGFFPKPDVLGGRRAMAPPRNLKGEPFFYFVGKSPKVWAPPVRDILKKM

SEQ ID NO: 940267 - protein, 80 aa, Homo sapiens
RQKPPEELNVDVAFAPTGGFESSSPPDEVQPPRESFARPPVTRPQPPGPQIRPASPRFGSCPLTLGFAGHGKNRIGPACH

SEQ ID NO: 940268 - protein, 91 aa, Homo sapiens
  misc_feature (40)..(40): Xaa can be any naturally occurring amino acid
SVPKSGTRYMVPTEGPLDLWMSIFGDCHGRNSSFKREGRXQGESLCPGRNLMSLKSSTPAPTAIVFLIKGGDSLPFKSIYMRQIDPMVGLI

SEQ ID NO: 940269 - protein, 59 aa, Homo sapiens
  misc_feature (56)..(56): Xaa can be any naturally occurring amino acid
TDKGTELSPESLNLPAQPPQQELNSKSEGGDSRTTHTRLGTDRKQKYRLTVVQGMXAAS

SEQ ID NO: 940270 - protein, 82 aa, Homo sapiens
  misc_feature (21)..(21): Xaa can be any naturally occurring amino acid
DPRSGKSWKMALILEVCDAAXVDMVPGKPMCVESSQTIHPWGRFAVRDMRQTVAVGVIKAVDKKAAGAGKVTKSAQKAQKAK

SEQ ID NO: 940271 - protein, 171 aa, Homo sapiens
  misc_feature (70)..(70): Xaa can be any naturally occurring amino acid
  misc_feature (99)..(99): Xaa can be any naturally occurring amino acid
QVQGIVAIGDYMAPSVLGVKCSKEVAPPSRGAIILAKLSIVPVRRGYWGNKIGQPPTVPSKVTGPFGFVXVRLIPAPRGPGIVSAPVPKKLLIMAGIDXCYPSARGCPAPLGKFAKAPFDALFKTYSYLAPGLWKEAGFPQFPHQGVPGPLVQTPPRVSVQRAQGPAVGST

SEQ ID NO: 940272 - protein, 139 aa, Homo sapiens
  misc_feature (45)..(45): Xaa can be any naturally occurring amino acid
LLRGGVSRTRCLFLFVEEGFIPTTSPLVGGSYWGPGNNSKPPPPXVGSQGPFFSFNRLPGGQNRWAPGEVFFFSFGGGGFAHPLTQKGLFLFPGFLVWRAGGPPFPGFLGWPGGVWGVPLFFFSRAPAWGFRPPPPPWG

SEQ ID NO: 940273 - protein, 100 aa, Homo sapiens
AAPSIYMINLAVFDLLVVLSLPGPRNCMAVKGRSLEGISSLSVMDNYGPVGVPWGPLPIPKPCGKKGLFSVGTRVCGNGHRSIFQAPTAARQEGRKFGPP

SEQ ID NO: 940274 - protein, 125 aa, Homo sapiens
SISGKLDLITLMSKTIDGQILLWLLGVNTRNLFLPLFLLLGANADKTPKAEEVKSSDSFLKLTTRAQLGAKSEQLLKKGKSIPDVLLVDIIVNAIKYVLHFSSSHLFNIFFITQRCIKNNTDFLL

SEQ ID NO: 940275 - protein, 104 aa, Homo sapiens
SWKMAHPVCYNIQKKSTLHLVFGLRGGMQIFVKTLTGKTITLEVEPSDPIENVKAKIQDKEGIPPDQQRLIFAGKQLEDGRPLFDYNIQKKSPLPLVLRFRGGV

SEQ ID NO: 940276 - protein, 110 aa, Homo sapiens
  misc_feature (58)..(58): Xaa can be any naturally occurring amino acid
METLSNMFELDLPTVHSIISKMIINEELMASLDQPTQTVVMPRIEPPAQQNLVFQLAXKLGSLVENNKRVFSHKQGTYGGYFQDQKGGSPKNKGYMPPGGYPQQQFQTAY

SEQ ID NO: 940277 - protein, 78 aa, Homo sapiens
GDLAPRAQNLGPGFLGPGVGPPGVKEPGVPFFLGAPPPCPRWKNPGGVLDLPLFFAPFPKGGGFFRGGDPPNGPKPPF

SEQ ID NO: 940278 - protein, 192 aa, Homo sapiens
  misc_feature (111)..(111): Xaa can be any naturally occurring amino acid
PTEASKACGVGGLAGPPSFIFANNQDLPGALSSNAIPEVLELDSIRSHHWCIQGSSAVPGENLLPGIDWLLDDISTRIFTAEMNHSKCPPPNSSGSSTFSQPYPWGVGSKXAKITLPLLPPSLVVVMLPAVALWPPGSHGGRAVPWLSFWLLTWPLATIPKKKGWAGRSCYFCYPGCGPHPSLSCEINRSLP

SEQ ID NO: 940279 - protein, 190 aa, Homo sapiens
MRANITLANVIRQLGSLSKNAKDIFGELFSQANTFAFRVSSLAERVDRLQVKVTQLDSKEEEVSLQGINPRKAFRSSPIQDQKLFGRNSFPVPVLETYNTCDTPPPLNNFTPYRGDGKKALKFYPDPSYFFDLWKEKMLQDPQDIIKKKRKHRKEKKDYPNRGNVNPRKIQTRKEKWEKMKMLQGPQDFI

SEQ ID NO: 940280 - protein, 136 aa, Homo sapiens
PARKRLPQFEFFLPPWGGFPRKIHFWFWPGGPLGFGPLWARAGGGPFLPWGLPAPFFGVKSLVSWARLGKLGGRLLRWPPRGKKKKNPVGVSGGFRPPGAFFPLGPPLGGGGGPLPPFLFFGFLGFFFLKAPLFRP

SEQ ID NO: 940281 - protein, 93 aa, Homo sapiens
  misc_feature (46)..(46): Xaa can be any naturally occurring amino acid
QRGGGGGGGGVFIKKAVFWTPPFPREPPPPGFGPQKKPRGRSPPRXLIWAGGGEKFFPRKPVGPLGPFGGPIKPGWAKKPGGARAGIPGEPGG

SEQ ID NO: 940282 - protein, 86 aa, Homo sapiens
  misc_feature (11)..(11): Xaa can be any naturally occurring amino acid
  misc_feature (86)..(86): Xaa can be any naturally occurring amino acid
PPFFVPPRLAXGAPPPVFFPPLKPRGRLPPRVFFLGGGGGKIFPRGPPFPLGPFWGPLLTRFFPKTGGGRGGISRGIFFNFPLLFX

SEQ ID NO: 940283 - protein, 119 aa, Homo sapiens
  misc_feature (113)..(113): Xaa can be any naturally occurring amino acid
FDSIVNTGVPYPRFLWAETIGFFRRLLWRNPNRRVGSSEKNPKNVKKPPFFRILGWEALLGRGLPPPFGPPLAGRPEVSNFYGGFPGGAPPLGPPPAGGPLPTGGQAPFLDFXFGAGGG

SEQ ID NO: 940284 - protein, 158 aa, Homo sapiens
  misc_feature (87)..(87): Xaa can be any naturally occurring amino acid
MCSLWAPCLRGTIVCCLEEKPEDRGKLAPGIREFAPVISHNLKTKKTRVKLPSGSKKVISSTNKTVVGVVAEGGPIYKPILKAGRGXPKYKAKRNSWPQVRGVAINPVKHPFGGGNPQHIGKPSPIPKNAPVGRKMGFIFAPRTGGFRGTKTVQKKKN

SEQ ID NO: 940285 - protein, 76 aa, Homo sapiens
LGAPVDKRGLQKLAGLGPPAFFFMNMKHFGLPFPSAPKAKGKCGLQAAQPKGLWLRAVGPFMGLPWWIHIKPVFVG

SEQ ID NO: 940286 - protein, 104 aa, Homo sapiens
  misc_feature (60)..(60): Xaa can be any naturally occurring amino acid
GFPQPAPLPGALQIGASISRCSLWVCPSPTLRSSWKEDGSSQSKGLETGLKALKNWANPXPPPLGPPQKKGGAGGSFWLVPKAGKKKPGFKKKGGFPGPGDPVP

SEQ ID NO: 940287 - protein, 115 aa, Homo sapiens
PRGFPFLLPGGFLGGIWGGYPFSPGTRFARFWVFFRPPLGVLAPGAQILGRGFAFFAPGGGPCGVFGPPPPFPPRGFVFPWGGGVSGGRGPPPSPPPGGRGGAPFPFFFFNFKIP

SEQ ID NO: 940288 - protein, 115 aa, Homo sapiens
MRSPLLGALRVGFAWKKPFRLGVHCGEPWAPVWGPHGVPLEPRGPLFPLGPPGGGKGFFPSPVPVLRAGKKGGQTPFPPPFLQRGGGGGGGGFFFFFLFFSILGWPKKGKAVFFP

SEQ ID NO: 940289 - protein, 167 aa, Homo sapiens
  misc_feature (30)..(30): Xaa can be any naturally occurring amino acid
FCAPVAAGPPPPVFAPYKTPGRPTPGFFCXAGGYIFFPGGTVSPWALFGALITQFFSKNRVGPGPDFPGFFYPPGPPWGFRFLGVSKNRGGPGGRAKKFFPPWGGRGFFGAPPPGPGGGPPRGSFFWGGKPPFFPPPGPPGGPPFFFPPGVFFLGGWVLGPTPWGPL

SEQ ID NO: 940290 - protein, 90 aa, Homo sapiens
  misc_feature (11)..(11): Xaa can be any naturally occurring amino acid
  misc_feature (25)..(25): Xaa can be any naturally occurring amino acid
LPLMREKLTQXRHDWERQNNEFQVXLGIKTTVEKEITTSRRLLEGESEGPREESKSSMKVFATPKIKAITQEPINGRLVFCQVNEIQKPA

SEQ ID NO: 940291 - protein, 131 aa, Homo sapiens
AQKNTFPLPREIFLPWGAPKKGGLDTPWEECGGRPFAPPPLGGPFFYTPWVFVEQLICPRPHPRVLLPFTHGGFFERDLFFLSLGPREGKTPAYRGVKSPPLFSPPIWGGLFRPPPQNGVFFREIGGPPFF

SEQ ID NO: 940292 - protein, 106 aa, Homo sapiens
GLRPALICGATFLPTEDWVGGGPGPSPAGKGAGPFPPGHSLFQCCLPPGLPRAPPPSPRGGRVGFHPERAKFPPGVKRQDWMELFIYPFKLVPRDIVGDPETPLAL

SEQ ID NO: 940293 - protein, 116 aa, Homo sapiens
GGSPPPPKKVFLGKPPPPLGGVPRGFFPKKNRGPPRGGPGGGGDPPLFPPPEKGVFFFFGPPPPPRGFGGFHPRGLFFQKGLKGRGAPPFLGGPKPRAFFFWGPPPQKKKRRGFSF

SEQ ID NO: 940294 - protein, 144 aa, Homo sapiens
CVNPNTGNYPGSPHHRGGPQVSFFLQLTAEGSRGAHPTDTVDRNQPVLGALAPRPFSNTGKKRKVLWVVGAGGFSSFDTRIYIWKKTSPELGPSPAFFFPDANATPAPFFFPRGRKGVVVGELGYRFGEGEKKFFFFNPCVPFA

SEQ ID NO: 940295 - protein, 109 aa, Homo sapiens
TPALFSSPFQGSPGENSLPCIPGFGFRVQGPALPPPSCFNQKNGGANRVFWVPKTQAPRRDFSGQEGRAPPPSLTGVGVQVPPLPLWENPCFNKMGQGPPGFPRPCLFG

SEQ ID NO: 940296 - protein, 114 aa, Homo sapiens
GPGPGLWGFKGPCSLRPLAPKRVGPRGRGSGWGFSKGKGPKKGGGEFLLGAPPPPPRGGFSPPPALGGGRLGFFLFLGAFFNALGLFKVFFFLFRGVFLGEKGYPLLKGKVSPP

SEQ ID NO: 940297 - protein, 144 aa, Homo sapiens
  misc_feature (35)..(35): Xaa can be any naturally occurring amino acid
MRIYKKGDIVALKGMGPVQKGMPPKCFHGKTGKVXNVPHHAVGIVVNKQVKGKILPKKINGGFEPLNPFKSRKSFLKRVKENVPKKKKPKKKGSWVQLKAPPAPPKKAPFLKTNGKEPELLEPIPYEFMAKKGLKKKKKALWAP

SEQ ID NO: 940298 - protein, 104 aa, Homo sapiens
GGGYYFSRGKARPFGLFGAPLARLCPKPGVAGRGFRGIVHPRAVLKKWAAPPQGVPKLRGIPGPLRLFSPPFPGGGAREWGFCFPPPPPCPLGFSLWRGGGWII

SEQ ID NO: 940299 - protein, 119 aa, Homo sapiens
  misc_feature (8)..(8): Xaa can be any naturally occurring amino acid
  misc_feature (49)..(49): Xaa can be any naturally occurring amino acid
LSGPFVEXFFQAKGAAAAPRVVPLAPSGGGFSQNPGSFPCLVQGFFSHXLPCGWGGNGPPGKNFKTPPSVLGSGGSFFFFCQPPVGKSGGAPGGVFFFSFLGGGLPPPSPPKGLFLFPG

SEQ ID NO: 940300 - protein, 95 aa, Homo sapiens
FSSDTHSSPFGGGGGIALNDPFVKLISWFANEFGSTNRVVALLAPLASKELDPWPPPPSKSPKGKKSPSLLGGPCPPQSPPPLIFPSSRLPCSPL

SEQ ID NO: 940301 - protein, 79 aa, Homo sapiens
RRLSANEVRSAPFCMGTSQRFPLGLALLLYPPLGPELAFSGSANFGDVGLSAGMQASDLPSRASLPTKGDLLFSTQPGR

SEQ ID NO: 940302 - protein, 87 aa, Homo sapiens
RTNLTLGPCAKFVCRTSHILNGQVFASSGRLLAAPVIVSLCRPPRMGGMALAAKCPQHPGMTCHLCFHTGASYLSCACHSINSVCAP

SEQ ID NO: 940303 - protein, 126 aa, Homo sapiens
KFPKPGFLFSFQGSTLPRQQGEQNWMENELTEVGFRGWVVTDSSKLKEQVLTQCKEAKNLEKGLQELLTRITSLEKNIYDLMELKNTARELRDAYISISSRIDQAEKRISEIEDQLNEIKREDKIR

SEQ ID NO: 940304 - protein, 141 aa, Homo sapiens
GVLPFSPAFEGSGLNECVTLTCLAPGFNPKGGVGFLVAGVPGISPQKVLFLGIPAGAQPGPPPFFFYQNFGGGTQGLEKGGPFFLVGGPQGPSVGFSPKDLCPFGGLTPPCQFFFFFGGGGGAFFFSRPLVPPLYLISCFP

SEQ ID NO: 940305 - protein, 96 aa, Homo sapiens
  misc_feature (34)..(34): Xaa can be any naturally occurring amino acid
  misc_feature (55)..(55): Xaa can be any naturally occurring amino acid
LLKVKLGELPNWIFMRDFSPEGIFGGFQKGFSRXFHQYLHVKKGSISGITMGVAXYGLFRYSFFYKHFKHERVRKYPLKGPPLPPPPPRPWAEPLC

SEQ ID NO: 940306 - protein, 51 aa, Homo sapiens
MVQTQTSATSPRATCMTAHGRLLNWSLFSAKIACACLDLNRKNNKTCWSKL

SEQ ID NO: 940307 - protein, 98 aa, Homo sapiens
  misc_feature (59)..(59): Xaa can be any naturally occurring amino acid
DRSFDILKNPSRPPTLLVAGRLSHMLNGGDEVSPTCMGIDQVGDLDISYINIEGIPAPXSPESKGCPLWPQSSKPPLPSETSPRGGPLSENVEGAAPP

SEQ ID NO: 940308 - protein, 108 aa, Homo sapiens
PGLFGPGGPGGGKNGPGGTGRGNRWGPHSGGLFGKGPFGIWTLKGGGSARGGEGGGGLETKVEGILAFEEGEIGALGGEGKTPWVNGRGGGETPGIEKKGFFPFPSQN

SEQ ID NO: 940309 - protein, 100 aa, Homo sapiens
LPFSTSPLKNCQVIPLWVPSLFLLMVGFKQVLQPPQMPQQGQMLILEAVGRPIMLLLHQLPTPPEQSRAASCPGKTPRFLSVPQPPWSRLEKIFKKEKNP

SEQ ID NO: 940310 - protein, 201 aa, Homo sapiens
  misc_feature (43)..(43): Xaa can be any naturally occurring amino acid
MVGIETSNGALTGRYRVVDALATLAFDYAPRAAYFRGELEQFXLLAREAHVDPLKATGSYAGAMGAGQFMPSSYRSYARDGDGEGRIDLWTSWPDIAESVAHYFVAKGWRGHEPLVAPATLVDPDVEDLPANRLEPPDTVGSLRARGVEIAAPADDATHAWFVALRDADAPSYRVGFHNFWVITRYNRSVMYALAATELAA

SEQ ID NO: 940311 - protein, 109 aa, Homo sapiens
KCPSTVEATVKSQGEYYCTATNMNENIAMHSNMDKFHRHEVKQKRSDVLIIKREIHEYDLSFLQKSTEIEHNMIHWCVEDQVEQCNSGSGLLREAAYLDVLCLTSICGV

SEQ ID NO: 940312 - protein, 122 aa, Homo sapiens
  misc_feature (70)..(70): Xaa can be any naturally occurring amino acid
HSKRVFGAPPPWGRGFALTPPKRFFLTLGGILEARKDSIVKIPFSLGRWGPGPPFPLGRKKRGYLKGGVXPPFFFFPKKGGLPPKPPPLGPGAPPLFFFFPPPGGALPPFFFRFWPFWDPGF

SEQ ID NO: 940313 - protein, 182 aa, Homo sapiens
  misc_feature (13)..(14): Xaa can be any naturally occurring amino acid
AALSIFPGGHSRXXGVGGGPPPPAFGKKGRGGPSPKPLSLGQAGDPLPLKVFGLGPATTPAPFGTSPLGRAPEIPPGGFKGALGPNYPPPPGGQSSGSNPPLNPGAPPAKNPNFPPGPKKGFFSKLVSPFPKRGRGGGGAPPISKKPPGGGVPIFGKRPPKGLKRGRPAKKKGFFPNLFLKV

SEQ ID NO: 940314 - protein, 154 aa, Homo sapiens
SDDHALPCPALPCPALPSTFRALCRRLGTGRPICVSVSTQELLGTVPEWSGLLCHLPTVYYEGLQDKLAQIRDARGALSALREEHREKLRRAAEEAERQRQIQLAQKLEIMRQKKQGPLSAATAKGGGFRLQLLCFSAAISSAPEWYSDNKMYF

SEQ ID NO: 940315 - protein, 61 aa, Homo sapiens
VLGPRSIKNPPPLARWKGFFVPPPNCPPWGRWPGPPPGFGAGPGGPGWGLRLGGYKNRPPP

SEQ ID NO: 940316 - protein, 109 aa, Homo sapiens
SLAPPKTFKQQKVRMANEGFDPSPLFDPLYVLDQAVGAYLPLPTARYRALLAGNLGILELPPLRPLKKELCGVGAVAGVLGCQGFFLYQNCGPYFVINVAGADPPVFAP

SEQ ID NO: 940317 - protein, 76 aa, Homo sapiens
  misc_feature (2)..(2): Xaa can be any naturally occurring amino acid
NXAEIWVGLNDMAAEGPWVDMTGARIAFKKWEAEIPAQPDGGKTQNWAVLSGAANGKWFDKRCPDQLPYICQFGVV

SEQ ID NO: 940318 - protein, 108 aa, Homo sapiens
AGRGFFLSLLHLPKDKSSKGNSIIMNPNPKYFISQGRVSGIPGKDVGSDPIPNRLLPLFLRGAPDNIYYPKDLLFENQPSFIQDPLFAFPFPLPGPPPCKSPKPPFFR

SEQ ID NO: 940319 - protein, 52 aa, Homo sapiens
GPYLVLLTTESTVVNSGKRMDSPYPSQRNAPTFRVMGHCSKIKLYQIKAKNP

SEQ ID NO: 940320 - protein, 97 aa, Homo sapiens
IIQLVGIPGLGARGWIAALSTLDNHSLAISVIMMVVAGFFTLWAVLSVFLLQGVHSLYRRTGASFQQAQEEFSQGIFTSRTFPRVVLFVAQGAFQGN

SEQ ID NO: 940321 - protein, 154 aa, Homo sapiens
AGEGGGGAKTNPFSPGFLFWGPHQEGPPFFFPQPFYFRLSRKWAPPPPFGIGPPPGLVHLRFPEGPQMVLSFFGFFFPPPQPHFSSGSLSPLTFGSPSLMFCPLPILPGPWVSPRSPFFKQGPGGGGPGVGPSPPTAPPPPLFGLFYKKMGGLP

SEQ ID NO: 940322 - protein, 112 aa, Homo sapiens
LLSFFFLKKPMGGLMWARCPLFKKLSLTPLFGFGPGPPYIREMPPPWYPPGPRPYRPIAGEKPKGKGSKTPVVGNRVFKGSPWAPKKAGGGNQGNLVPPPPPLNQSGGSLGL

SEQ ID NO: 940323 - protein, 108 aa, Homo sapiens
MSNAHSCTHHARAHTQLLTVGPTPSSQRGNYGSGRTVIGQPIPHRGPTANGWPLSPGPAPTERVARDGGTDHAGSDPARPPACARGRPPSAAPLPAQSGLGSVSRQRP

SEQ ID NO: 940324 - protein, 101 aa, Homo sapiens
GPGGLVPPIFFYPKKSGEGGAPPPPLPFILFFPPRGVGGENFPLLFFSPPKRGFVGVGGGGPLNPPRPLLAPFYKVWCSRGGGGDGGALENKTFPPPFGVL

SEQ ID NO: 940325 - protein, 101 aa, Homo sapiens
LQLQLRKNKRPSNSSHATGEADNGPFCWEPLNRPLRDFDCCFAETAPPVSRKQLRSVFVLILILILMAVRCISLEGAMRQPGGKGSPEKLQPAHWEECALG

SEQ ID NO: 940326 - protein, 231 aa, Homo sapiens
PNRGPVPELARMPLGLFPPPKGRGKSRPPKLVVQKAGVGPSFEKNPSKMWEGQGFLLPLPSKIGVFFPNLPPKTRRVGAWQETPNGFPRGNIGVGKTKPFFWEGKFPGGTPPKPGGGGALEETPHGFPRGNIGVGKKKPFLWEGEFPGGNGPTFFFPSKFLKWNPPSPLRGFGRSPHPPKKNFRGLFFGQNGVRGFFGPPSPPQFWGSPFLFGQTLFGPPLGEKKKIPGFG

SEQ ID NO: 940327 - protein, 138 aa, Homo sapiens
  misc_feature (79)..(79): Xaa can be any naturally occurring amino acid
HVPKGLAVGVGFGAIKKTASATFERARNLAIGIGIQNFPEGLAVSLPLRGAGFSTWKTFWYGQLNGMVEPPAGVFGAFXVGLGEPILPYALAFSAGAMVYVVMGDIIPEAQISGNGKLASWAPILGFVMKKSLDVGLG

SEQ ID NO: 940328 - protein, 66 aa, Homo sapiens
GLAPKRQSHVVIRINPRFPICRMGLGKKPQTGVGEQGLPPGLGPRSPRGKPKTGASNGPDQSPVAS

SEQ ID NO: 940329 - protein, 104 aa, Homo sapiens
  misc_feature (8)..(8): Xaa can be any naturally occurring amino acid
GQVRTQVXQASSSLPSMQSASASQRKRRRMQWPLLHWNWSMSQRGVQSFSSEPSAQSWSPSHFQRPAMQRPLAQENSLSEQGRGAGKDRGRQAQEGGHKDSRPQ

SEQ ID NO: 940330 - protein, 120 aa, Homo sapiens
VSNLNGTPVLEITQGLGFPAFCILGRGVLIIFSQDLGFFSPTWKNRFLPDFGVLIVPMGAPLTIWGSFIPLELLGGIIFGGGVLDQINRRRACYARLPFLKILEKFLDISLESEYNPALS

SEQ ID NO: 940331 - protein, 177 aa, Homo sapiens
APSVMKSKILSASNARKRPAEVSHILEVTGVVATVFVLHVNANDVARIVVEKWIYLWQQDLDRGVLSFKEGRIRGSQMNIRVSKQPRGETSHLPLSTDVRSWSQNNQQVHFSCLIQEGNEVPAAIKVIDPRLWLMVVPRHIKLHSVEAAQLHLEKPVGPQNRRYSKVVQAARNIAEG

SEQ ID NO: 940332 - protein, 119 aa, Homo sapiens
MPPSWAYKNPETLSKAPPSAESCFHSITLRTDSPSPGVIRFFWYTQARTQEQTALCPFDNYEGLIDLVNTSCLQTAKLKEHPGTHAHWGFSCKHSPLDTAMGLEPACLYAPLEVWAAGH

SEQ ID NO: 940333 - protein, 217 aa, Homo sapiens
RPPRGARAPFFPSGGVSPKLFFGAPREARPPPRGFNSSRGQKFGVGWRFSPPPRGALFLKKPPGFFQKRGVCCGGYNPGFSPPPLWGPPKNFFGFPPPAGPPQFSPKKKKFFFGGPPPVSPRFSGGGGPPGKKKGGGGPLGGFNPPPRGGPPLFCFYPFFPPPGGGPGNPGGGGGGPPPPFGGPPSPPFFFFGGVFFGGGGVWGPLFFFFPAFFFGP

SEQ ID NO: 940334 - protein, 147 aa, Homo sapiens
MGLLWFVPSTATELLLCCTRLYLKQKLLELQGETDKSIMIVGDFNTHFSIIEQMSREKISKDIENTIVLKNTIHEVDPIDRYRDFKAAGWVAYPVHTEHLLRYARKKLRKKKATHKICSLTKWASLRNYNKGFSETAKYQIIKDTFL

SEQ ID NO: 940335 - protein, 145 aa, Homo sapiens
  misc_feature (11)..(11): Xaa can be any naturally occurring amino acid
  misc_feature (20)..(20): Xaa can be any naturally occurring amino acid
GFTTRGVKSQXVEPGKQRGXLPPRPRFGFHRAHCGLPPGLVPTKVRAGPGFNLEELRVAGIPKKVARTLGIFVDPRRGNKSPESLQANVQRVKEARSQLFLFPRKPPAPKKGDSFFEKFKLAPPLAGPVLPVRNVFKKEKARVLP

SEQ ID NO: 940336 - protein, 149 aa, Homo sapiens
MPLIMACEAGWFQKDRVVLNIKNDLGLHVDLTVHCKSADDDLGVHLVPYLGKYSFRFRPNFAGSTSYTCRFSWRRESHSLNIYDAGRSSETVCRGGGDCNWSIRADAAYWLDPSPKHNDKRFTWAGTNVCVFFFSFYEKKKNLTILCDQ

SEQ ID NO: 940337 - protein, 160 aa, Homo sapiens
  misc_feature (46)..(46): Xaa can be any naturally occurring amino acid
  misc_feature (73)..(73): Xaa can be any naturally occurring amino acid
PRAPRWVPFGPSWVPPVLCSQKGAPRPGFNLEELRVAGISKKVARXLGIFLDPRRGNKSPESLQAKFNGLRRXPPNFSFFPGSPRPPKKETVFFKNLNWPPHLPGRFFPSGTFFKKKKPRFSLRKRKNFKTFPCFRLARANPRFFGIRAKKTKETPKPDF

SEQ ID NO: 940338 - protein, 107 aa, Homo sapiens
EEEEPSVAPQGGEQRPLLSSQEAPPGGFPPPHFFAAASPGVGGTRSPPPPRALNWKRPPSNITHYPSLYPYLLPNSNFTAYPRNRGRLNPSLGFPPFSKPLPARPPI

SEQ ID NO: 940339 - protein, 143 aa, Homo sapiens
FWAPKRAPLRAKLFMPAPGRPPEEAARDPAFIASQLFRGVQGPLPPGKKNWGQCRYFPGGQAFVSPFWPPAWRIWQPPPWPWGVQGAPFLPNRRGWGGSHKGRAIPFPPLPNKPPPPWVFLFPPSPGGFGLPQMVLVFLFLLG

SEQ ID NO: 940340 - protein, 96 aa, Homo sapiens
MGGWGGRGGFFMPNSFCSLLVPWVARPRCFSFFEAPGAVPGPGILGLVAGGVGLFPRFPLFPFGPFWLLFWPRLSRLAGWARWGLSGVSWAPGSPE

SEQ ID NO: 940341 - protein, 97 aa, Homo sapiens
LLGSGVHSRLGAGKPAKLICIYSHSPSLALPPELRLLSHQRWALDSHSSTSPIVNCTHEGCRLHAPYENLMPDDLSLSPVTPRWGCLVAGKQAQGSH

SEQ ID NO: 940342 - protein, 59 aa, Homo sapiens
PPRKMIKRLSLRPAPRQFRPPWPWQIHNEVIDDQGRAGASTAARVSSPRVYFLPFGLEM

SEQ ID NO: 940343 - protein, 47 aa, Homo sapiens
  misc_feature (25)..(25): Xaa can be any naturally occurring amino acid
  misc_feature (40)..(40): Xaa can be any naturally occurring amino acid
GSPKGGKRASLVKKLGFDPRAIIPXCPPWAPPWVDDDKKXSGPWALS

SEQ ID NO: 940344 - protein, 104 aa, Homo sapiens
FRGFFSPRGPWGGPPPRVWGGGPPPPPAFWGPPPWGGGSLGFGGRAPGPPLVFPPTPGGLVGGPGGALFFPPGPPAGPPGFVGGFLGRGLFSPLVFFFFFSPPG

SEQ ID NO: 940345 - protein, 98 aa, Homo sapiens
ALFAPMGPLGAFGPPLTGGGGPPNPMGLPPGWLGPSPPGCFWEGVFTPSFWVGVSGGPPPPLFSVKGPFLWGCPPPKGLWVLVSFRGLPPPPPRLGCF

SEQ ID NO: 940346 - protein, 285 aa, Homo sapiens
  misc_feature (66)..(66): Xaa can be any naturally occurring amino acid
  misc_feature (82)..(82): Xaa can be any naturally occurring amino acid
PFSPKDGAVSPVVGGGGLIPRAPFPWLFVPYTSCQKGWAGRIPGYGPGCGPSGEGPPPPPVGFVGXFFSPHPSWGVGFPGEXPGGAPPPLGGGGPSHIRVVGNIPPEEGCTLPAGGPPPPNPQLGGGGPFLFPPPQIFLALGGFCLGGFFPRGAPFFPSRGGKGGPPPPPKNFLKGVGFPFFGPPGGPPPNFPPPGGARPPQEKGPPGGVPPPPGFSFFSPPPGGGGGFFFPPPPSPPPGGGPGGFPGPPGGFFFFFPPAGPGGAPEPPPPLLGFFFFFYPVPGF

SEQ ID NO: 940347 - protein, 220 aa, Homo sapiens
  misc_feature (64)..(64): Xaa can be any naturally occurring amino acid
FSGGATPRIYSPPFPRVGVFGPPPKGGGEGFFSPGFFQFPPPPLPLCGVCLVAPKPGVFSIFVXTPPPSPQKGGGGWGGGGFLNNTPFFTPATAGGPPPLFFFPHKKPRGPPPPLFFFWGGGGDFFSPETPFSLLALFWAPLKPFFSKKRGGARPVFPGFFSPPPPPPPPGFKAPKKKVFFFFFFFFKGGVFFFFPLFWVFWTPFFPPQPRFFFFFFFFP

SEQ ID NO: 940348 - protein, 67 aa, Homo sapiens
GLSVCDVSFMEQAKPDVWEDRELKESDSPTQAGGPRTPLRPPLRVPALVPPQPESTVWTAKRVGTGG

SEQ ID NO: 940349 - protein, 144 aa, Homo sapiens
  misc_feature (116)..(116): Xaa can be any naturally occurring amino acid
ELMCFPNHVVAIAVDWQYLFTIHNDWKAAVDTLFLLAAQEWKWVPVLMINTEKGELLVASGKNFLKPKKEAEQEMLLLLLDIALSEKEALQLGSSDCQLRVKLHCDAVSRLRIVVXLNAEFPFPPSLLRWTFGECEPQNIANRR

SEQ ID NO: 940350 - protein, 110 aa, Homo sapiens
RCGGGKRRRQQRQKAAGAKSGGNSGGGKKPRRGKSRCGGGAKSRDSGGQKAAAGKTPWRVKSRGDKKPRRAKSHGGGGAKSSGSRKPRRQKATAARVQKAVSAVGQKAWS

SEQ ID NO: 940351 - protein, 186 aa, Homo sapiens
  misc_feature (33)..(33): Xaa can be any naturally occurring amino acid
  misc_feature (66)..(66): Xaa can be any naturally occurring amino acid
  misc_feature (68)..(68): Xaa can be any naturally occurring amino acid
KGTGHTLGGALLGLTDTGGLRLRALPGWPRRWXTAWPLAAFKGFWRRRGWIPVWPQPCAREVPQKXGXFFLGPGSRRNFWGPQMAPWNWSGAFPWGWFCTSLGPGATPLGNPSPWGGGQKFWFTWVKGWPGGPPGSGGPGGAPRSRGPKTGPRRGGLFFPAGGPFPPPRPLQGLFCPPPNKGPFPR

SEQ ID NO: 940352 - protein, 98 aa, Homo sapiens
AGAPPNPEAPETDGAGGRQRSFNSKPPPLGSKTVGDMIFVTASARSPPPGVFPGPHLFLSGQNYARLPYTLGGFALGHAPPFFHYGKNLPSGPDPFLF

SEQ ID NO: 940353 - protein, 179 aa, Homo sapiens
EECQSSQKTMKSFIQEGSPPDLVCPCAALTITLPGLAPPPPPGPRDKPSRLLSILTPRSSRTICGLAAGWRLLSMCCWKVLTKDYLQQLIFMVLFSASSGQPGGWRGSAGPGGCKLVPVPWTPAGALPGPVGCCPDLHRLQRLAQECALDVTCGNVTCICFHEMLATMLHFSFLYKVVW

SEQ ID NO: 940354 - protein, 231 aa, Homo sapiens
  misc_feature (23)..(23): Xaa can be any naturally occurring amino acid
  misc_feature (35)..(35): Xaa can be any naturally occurring amino acid
  misc_feature (53)..(53): Xaa can be any naturally occurring amino acid
  misc_feature (66)..(66): Xaa can be any naturally occurring amino acid
  misc_feature (185)..(185): Xaa can be any naturally occurring amino acid
  misc_feature (188)..(188): Xaa can be any naturally occurring amino acid
  misc_feature (190)..(190): Xaa can be any naturally occurring amino acid
  misc_feature (199)..(199): Xaa can be any naturally occurring amino acid
  misc_feature (201)..(201): Xaa can be any naturally occurring amino acid
  misc_feature (209)..(209): Xaa can be any naturally occurring amino acid
  misc_feature (213)..(214): Xaa can be any naturally occurring amino acid
MSARTLGRRGGQSFRLWNKTAIXASQPEDQILYQXDRYNERPLANEVPIKEEXDYVLVLKFAEVYXAQSQQKVFDVRLNGHVVVRDLDIFDRVGHSTAHDEIIPMSIRKGKLSVQGEVSTFTGKLYIEFVKGYYDNPKVCALYIMAGTVDDVPKLQPHPGLEKKEEEEEEEEYDEGSNLKKRTIXNGXRXGPGTPNLLXAXTTILIFPXGGLXXFSSNPLLPLPVVRTNDY

SEQ ID NO: 940355 - protein, 126 aa, Homo sapiens
NENLQGDINDWANTKILAQCNEIIPRLYKTPPPQKEIFYLHKKRWEKFAPPFSPNFTKVQEASPEKILGDFLGGEPPPLVGLPQGPPFKRFIKPPKCECSLFPPLLNLLRALIWNKFWGRFKKLNR

SEQ ID NO: 940356 - protein, 127 aa, Homo sapiens
APPRLKPHYAPTSHIGKQFGPGVHLFPPPWEELALNELVTLRCLARGFSPKDVLVRWLQGSQELPREKYLIWASRQEPSQGPPPFVVTSILGVATKDWKKGGHLFLQGGPRGPAVGFHTKDLGPLGG

SEQ ID NO: 940357 - protein, 149 aa, Homo sapiens
  misc_feature (22)..(22): Xaa can be any naturally occurring amino acid
  misc_feature (116)..(116): Xaa can be any naturally occurring amino acid
VDAAKQQQHVVVGVHGPRTPFXKILVKHVGNRLYSVSYLLKDKGEYPLVCKWGDKPIPGSPYRVLVPLVWGPCQPAAPKLAPLPKKPRPFSLNPGPWAPLAAPLSFQPPLPFAVLXLPSLPNQPLTFWFLLGQKEPFGGPAFFFWFWEG

SEQ ID NO: 940358 - protein, 110 aa, Homo sapiens
FTSRGFPISPPFPPKGGFFGPQNHGAFPNFVTTPPPFPQLGGGGFRWGFFLTKPFFLTRRFPWSAPPPFFSLLRRPRGGFHPRVFSLGPGGVTFFPREPLFPFGPFWVPF

SEQ ID NO: 940359 - protein, 103 aa, Homo sapiens
LSLVNWIWLSRAFPGNPCLGFCGFGGKRALFLNVTRKLSQGPRGLAFVRVWKMVAPLSPLVLPTSPRVLRGWFNPPPPPVLKKAPLPLSKKKGGQAPRPLGFW

SEQ ID NO: 940360 - protein, 74 aa, Homo sapiens
  misc_feature (23)..(23): Xaa can be any naturally occurring amino acid
  misc_feature (33)..(33): Xaa can be any naturally occurring amino acid
SLGCSSRARRDPRVSGAKYFIQXEYLRISSAGXDGRHYCSPHFTCAVGAENIPRVFNDCRDFIQRMHLRQYELL

SEQ ID NO: 940361 - protein, 232 aa, Homo sapiens
GGFIQFPEGQGGGSRGAPPFSGRALPRKPPYWCIFSFFIPLPPGGGGEGFFFSFLSVFVVPSGVKKTFFVGEGFPFFSGSPPWGGKHPPFYVFGLGGAFPPIPFFFSPRKGGKGPPWGPPPPFGGGGVAPGGGFKNQGFPFFFNPPGGPGFGPGKKKTGPLGGGVFPPGVFISPPPFGVSPPLARPKGGVSPGAQKGGAPGFGVGGAPPPPPPGAPPRSPPPGGFFFLGGGF

SEQ ID NO: 940362 - protein, 114 aa, Homo sapiens
KIGKHFRAEVHLFPPPLEELALNKLVTLTCLARGFSPKEVLVFWLQGLQEFPPEKFFFLAFRQEPNQGPPTFFFPSILGVATKDWKKGDPFFCMVGPKALPLAFTQKTIDRFGG

SEQ ID NO: 940363 - protein, 137 aa, Homo sapiens
RSVSPAPLGGFLFVFRGKPPGDGASWGPGGVALNLLFFLVPPGAKVGPGGPPPPPPKKKRGPKRPPRGFSPPLSQKKGSRVLPFWGGRKNPFLPGGGPGPPPPAPVFFFKGFWGPPPGGVFFGGPKVCPPKLNSGGP

SEQ ID NO: 940364 - protein, 185 aa, Homo sapiens
  misc_feature (7)..(7): Xaa can be any naturally occurring amino acid
  misc_feature (74)..(74): Xaa can be any naturally occurring amino acid
ELEREEXGILVGCTTAACVRVPKGFTFSWFDGYRLDITRMACVDINECDEAKAASPLWVNARCLNTDGSFRWIXRPGFAPPPQPPPVGPQGPGPEPWHPLAGHPGPPLGAPSGNPTARFWVCARGRPPGPGKGASGRLGGGGPCTGAASPRPSPLCWGPGPGPGAPFQALSLLKNFPLKTPYFLS

SEQ ID NO: 940365 - protein, 73 aa, Homo sapiens
ANHTSISSLFESSCQQFDKLRKRDAFLEQFRKEDMFKDNFDEMDRSREVVQELIDEYHAATQPDYISWGTQEQ

SEQ ID NO: 940366 - protein, 151 aa, Homo sapiens
  misc_feature (72)..(72): Xaa can be any naturally occurring amino acid
TSPYRNFAGAGQRLGPPAGPTGPGGIENGASTEIFPCPRGGPPDLGDESSNPGRVGSPDQLPLACSPHYLRXCFLHADARPDCSPNPGTPLDLGTWTPSWLPRRGPWHGLKNPYPKKGPSLFLAGHQGDLRLERRDFLGVGLGVINPAGSG

SEQ ID NO: 940367 - protein, 79 aa, Homo sapiens
AHGQGGIRGFGGPWGPRAGSISRLLGYQKRSYASKKMQDKGGVDMRAPRMPTQNPAVQRSLFREIEVCRQKQPGRWQQG

SEQ ID NO: 940368 - protein, 89 aa, Homo sapiens
IRTDSKAIPQSWMDYRTSGVLPVGHVQVAQVQPGSHSRSDFLLFTVKIRSKVVGSQEGLSGRYLDRGPKVASEGRPPTASSRSASFSCL

SEQ ID NO: 940369 - protein, 79 aa, Homo sapiens
  misc_feature (69)..(69): Xaa can be any naturally occurring amino acid
SWRDLEKARGQKAAFEPPPEESLAEVLKKDPLENFRIMVELNPYAKALGRDPLFCPGRDSQPRGGKAGXAATALPTQSN

SEQ ID NO: 940370 - protein, 147 aa, Homo sapiens
  misc_feature (8)..(8): Xaa can be any naturally occurring amino acid
YQTLQLGXIALPNFIIGFPFGPPMVPTCGLAKPHGPRTLYFALLVLTSPATPLLGSLFLWRELQEAPLSLAKGWQLFLAALAQGVLEPPPYGALLFPLLSLGLYTLLGAFLECALLEMKSARPGWDKNPPRTPFSPLLGKKIRVCFT

SEQ ID NO: 940371 - protein, 141 aa, Homo sapiens
  misc_feature (107)..(107): Xaa can be any naturally occurring amino acid
EEKAKKGLMLPPPPALEDDMEFQLDGSLISRRAVYVLPGHKQKQNQGRPFRPRPEHAGLRFQTGWTCLFGRHWNGTLPPPFFGLGRRWNSTLDFFPSLGVHGEPGEXNNGDPKRTPAPKKLVLGPTFPWARDTQELIKALE

SEQ ID NO: 940372 - protein, 103 aa, Homo sapiens
RLSDCSFPDLLSLAAEDCCCLIALEAPWTITDAELWITLTVEDSQLYEDTLAGRSVLIKNLTPQTLQPRWTGPYLVIYSTPTAVRLQDPPHWVHRSRIKLCPS

SEQ ID NO: 940373 - protein, 118 aa, Homo sapiens
  misc_feature (60)..(60): Xaa can be any naturally occurring amino acid
HQFLRMIPKNVMGSLLPWFSLGPNDSFSQNPLLLLGPGCFGEMKVPRIQKNALLGPNRGXPQPPGFAGSGLGQAPRKLKICREPPCLPSAVNPCLSGGDPPNPRIHTDRFNKWPSLKS

SEQ ID NO: 940374 - protein, 105 aa, Homo sapiens
NFYYAVCWPWVILPFYKEKSFQQKESEAFILDSQGFFFPFSPSRKTTVSFVGFWCSPQGLQTFDLVSLLTLKNLRRAASLTLGNPASPAHFFILFCSMRGACRTF

SEQ ID NO: 940375 - protein, 144 aa, Homo sapiens
  misc_feature (25)..(25): Xaa can be any naturally occurring amino acid
WGKLEIQQKYPWAGKISPFVVVTAXRPQEKEETKVPGLRFYPGKIDVHWTRAGEVQEPELRGDVLHNGNGTYQSWVVVAVPPQDTAPYSCHVQHSSLAQPLVVPWEASRKQGLEAMWDLRPSSCPSCLMWELNHRNHSQWIHKA

SEQ ID NO: 940376 - protein, 56 aa, Homo sapiens
VFSVGRGGKRVGPGNQFSKVVGPIGGHKPLTPKRCQPKLTCDLLGVYAIKTNVGAR

SEQ ID NO: 940377 - protein, 152 aa, Homo sapiens
  misc_feature (63)..(63): Xaa can be any naturally occurring amino acid
  misc_feature (113)..(113): Xaa can be any naturally occurring amino acid
RQREGPEPGGVPRPPSPREIPKPRQALPAWLKVFFPPTFPWGGRAMGAGGTIQRPPLPWLGSXGSFFLLNKLPVDKNRWQQGEVFFWSVKDGGLANPFTAKEPFPVPGLISWXGGKPPLPGVFGLPGDVWAVPRFYFFPGPRMGIKPPPLPW

SEQ ID NO: 940378 - protein, 136 aa, Homo sapiens
GVPPGAPGGGGNLFFFVPPLGGGPVKFSGKTPYFLGPGGGKGFRDSPQNPRGGLIWVFFFSPRGGFWSPPPPIGFRPPQRGFGVPQLTGPPLLGPKSGPPFPPLGSAPLPPPFLVFGGTKFFPPAPFFFKLFFGVG

SEQ ID NO: 940379 - protein, 181 aa, Homo sapiens
  misc_feature (124)..(124): Xaa can be any naturally occurring amino acid
GVWGPWVKWASCSKPCGVGVQRRSRTCQLLTVELHRSLPLPPGPPRHPEAFLPRGQGPRPQISPETLPLYRTQFRGRGGPFRGPVSPLGREEPQEFRAARGSRFRAPIKPGMLGYGRVPFALPXHGNRGPPGGPPSFELSLFFFRGEGVFRSPTPRAEPFSAKGGPQIGLPPPELFFPPLP

SEQ ID NO: 940380 - protein, 127 aa, Homo sapiens
NLEAPDAFDSRVGDSDADPSSWAPPPRSPSVTQALWTHPGFLRRGLALKIPVPGPRPFRGEPTWAPGAAGDPPEPLLPVFPSPHGFRGGLFSVFEEFLFWGLSFLCSCFEWRFPFLFICPLKFIIEY

SEQ ID NO: 940381 - protein, 136 aa, Homo sapiens
GDRSVPHRGVKTNFRLENKGKPGEAQKPKGPPPPPFPPPGGIVGKGGPGGNRGKKRGPMDCGGPGGNFKGGPGGNKSGFPGGRGKDQGGFGEEKKGGPGGPPGPFMEQMGGKKGGRGGPGKMEKGGPPQEGKDGPL

SEQ ID NO: 940382 - protein, 165 aa, Homo sapiens
ILKALENAKKKRKEGGKFGFAESIANQRIQAFKMEKAPIDTSDVEEKAEEIIAEAEPPSEVVFTPVLWTPGTAQIGKGVENSWGVLEDFEKENDEGGGDQAIIFDGIKMAPGVEVFDIGSQNAPIILSDKEEEEMIFLEPAKNPKKIRTQPPSAKQKKAPSKKPV

SEQ ID NO: 940383 - protein, 102 aa, Homo sapiens
  misc_feature (35)..(35): Xaa can be any naturally occurring amino acid
GAPLGERAPPLCSVTGSQIKPGVPPRAPRAPLATXFQLSPPSLPSGVPPGQKFPQQSPQRPGLGFPPPLSPVGAKCMPKNPRGPPGFVFNAWPTFWICQGGF

SEQ ID NO: 940384 - protein, 107 aa, Homo sapiens
AGGGKKGAFPPPPPPWGFGGPGPPPPRGAPPPGPLFFFFFFLGGGPGKNPPRGGGFWGGGGFFFFFKILGRGGPPPFFPLLGLFFPLLGEIFLGGGLFFFLFTPAPP

SEQ ID NO: 940385 - protein, 111 aa, Homo sapiens
QAQLSPIPSFLKLYPPLPVAKLGGFLDLTEQEFRIQLLVFKHKMKNLVWTSGISALDGEFQSASEVDFYIDKDMIPIADTKVARGYGDFFIRQIPKFEELYRTLKKMGQSP

SEQ ID NO: 940386 - protein, 89 aa, Homo sapiens
  misc_feature (47)..(47): Xaa can be any naturally occurring amino acid
GLSSYRFVQNVTRALQLAAEFAAKAASEQQANTSGGDSPKVLSPPGXVVHLVTQDRAIMTRRGRHKQPRACGGVLKVVSAHRERNPSWR

SEQ ID NO: 940387 - protein, 72 aa, Homo sapiens
  misc_feature (16)..(16): Xaa can be any naturally occurring amino acid
  misc_feature (33)..(33): Xaa can be any naturally occurring amino acid
SRGRRITRGQQVHTSXGNTARHRIYRKNFKISXAWWCVPVGLAAQEAEAGGSLEPEFNTAVSYGGTTALQPG

SEQ ID NO: 940388 - protein, 142 aa, Homo sapiens
GTDRAGVRRLQPPPSLWPAPCWSLKCSSPSFWCFGPNSPSSLFSWGGYMTPGPETSRIRLGRGIPFQPQFSVAALVLPAWIWAPAHLLPRVPVFPQKGSLRVWARDLFFLALFQGPAMLSKPLFAAFFGSSSPASLNKPCPP

SEQ ID NO: 940389 - protein, 124 aa, Homo sapiens
YIGFFPRPQSSFSLGLPLAPGGGANRAPARGLFFPPLLFLQMWGGGGPAPVFFPTPFPLPWGPRIFPFNQGPAFSPPPFSGGPLVPSPPPPPAPGLEYWWEEGERGGPPPSPPFKGPPFLGPPP

SEQ ID NO: 940390 - protein, 114 aa, Homo sapiens
GFRPKKNPPSAVCRKPHVVLPRSALGGSPFPAQIIPCGQKAADPTDLLLEVVDVLNRKLPGVQPWGHFLMYVNPQTECERCWPRALSLSRSLWNVRGVLFGFGALKTRNKGPCP

SEQ ID NO: 940391 - protein, 141 aa, Homo sapiens
  misc_feature (31)..(31): Xaa can be any naturally occurring amino acid
GGGGLPPGGERPPSFGKGGPPRGFGGLSNVXGGVGGGAPLSFSRGGGSKCGFPRAGTTIIFVGGGAPPPRVPPPGGGGVFLGGFKGGGPPPPLSWGGGGGGGVFFFSPPRVGGGAPGGGPFFFSPPPPGGGPPPFGFFFWG

SEQ ID NO: 940392 - protein, 150 aa, Homo sapiens
PHPPEGFLIFRLVFKGQFGGAPEVTQPPYFQGFWDQVAQMYKGFQALRDAASFGFLYPPPMESGLGYSPRSPNPKEEFFIGGKMQDGFLPIPTRSFVGPWNSLSLVQGRGFPKTYPVGCEESPGFSCFSLPRKMQRGPHCLWGGQLLQGF

SEQ ID NO: 940393 - protein, 128 aa, Homo sapiens
  misc_feature (47)..(47): Xaa can be any naturally occurring amino acid
GKPPTVPFKVTGPFGFVVGPLIPAPRGPGIVSPPVPKKLLIKGGIDXFYPPTRGCPAPLGKFSQGPPFALFKTHNYLTPPLWKETGFPQFPHQGVPGPPVQTPPKVSGQGDQGPPGGPPKGFFPKKKK

SEQ ID NO: 940394 - protein, 110 aa, Homo sapiens
PQKPIWLWEGPVFFGGGPNFFQKSIFRAHQGAGPPFGPLPLWVLLGHSPLGSWWFVLIGILGPFPRGPGVWGFCPPFGSLGPPGRVFGPPPGPGFGGFFLFPLNPLGAFL

SEQ ID NO: 940395 - protein, 70 aa, Homo sapiens
  misc_feature (26)..(26): Xaa can be any naturally occurring amino acid
  misc_feature (29)..(29): Xaa can be any naturally occurring amino acid
RPRSPSPALTKDVKAAANQMGNFLVXTPXPLRLEPGKKNLIMGLDGAPYDPKGPPQDLLDSKNWIEEMPF

SEQ ID NO: 940396 - protein, 106 aa, Homo sapiens
  misc_feature (30)..(30): Xaa can be any naturally occurring amino acid
  misc_feature (74)..(74): Xaa can be any naturally occurring amino acid
SRPVPEGPVPPTAGPDPALTAKEWLGGRDXGPLLISLKDGYVPPKNREFRVNRGLDTGRRRAAPKASGTPSSDXVFRLEKKIRKLQAPVQELQKRLDRLEETVQAK

SEQ ID NO: 940397 - protein, 174 aa, Homo sapiens
  misc_feature (44)..(44): Xaa can be any naturally occurring amino acid
PPKALRIFGEVCPTGHNFVNVLPGGGDPYLSFYCKYLDLSLLLXVLKQKHYLFGKGGSWGNSNFSPVLMVSSLLCRELLGPPSPSCSFWYSPRDRSRLEVRPLSPQSLIKCLPSWIHYSLIKITPQIPAPVWHWHCPCASHLRLTGGPSSLKRCMLALSVLTHGSTCGCGAPCV

SEQ ID NO: 940398 - protein, 205 aa, Homo sapiens
  misc_feature (61)..(61): Xaa can be any naturally occurring amino acid
GVLCHRTLELPRETVFCWCGSPTVYPLFNLPGNCGPVGPKTHGPFPLGGSLPVSPRAGFGXPALPGSGGFPGIPFWGGEAGPPLKPIGPARQKGKRVFFFFWAPLTRNPPALKSPLWERGVQKNWFLRTPGLGGGAQAFGGIPLKAKFGRGGPLLVFWPPPPIFGPHKFFKGGKKFGFLVWTQGGSGFWFPLEGPRGWLPPAFWF

SEQ ID NO: 940399 - protein, 105 aa, Homo sapiens
WGGFVFWFLVFLNPKIFPGVWGPVGGKKKIGPAPGQFFRGFPPGAFSKNYMGGPFRGGGLGPFLVFFGAQKGPPWGALSPWPPGAPFFFLKARPSPPYKKAPGFG

SEQ ID NO: 940400 - protein, 66 aa, Homo sapiens
QAWGPPGGPWGAKPPHFALMQQSFNPFKYYSPFFFKVVAQLVNPGYPPPLEDFFLGLNFHHYFPDA

SEQ ID NO: 940401 - protein, 138 aa, Homo sapiens
PTFKPPVPYFGRLQGGLQARRTIIIKGYVPPTGKSFAINFKVGSSGDIALHINPRMGNGTVVRNSLLNGSWGSEEKKIPPNPFGSGQFFDLSIRCGLDRFKVYANGQPLFDFAHRLSAFQRVDPLEIQGDVPLSYVQI

SEQ ID NO: 940402 - protein, 112 aa, Homo sapiens
SVWKTGFVGPPAPPPAILYSSSSGFSLLFFATFYTKLCCDPAVGLGLAKRIQMKPLLSLSVPQLCRALCPLTPFPLLYLILKSVYCKEAGCQINTIFNWAVIEDVIKPFALR

SEQ ID NO: 940403 - protein, 103 aa, Homo sapiens
  misc_feature (33)..(33): Xaa can be any naturally occurring amino acid
LTPGGVVPPPGGGFLFWDPGGSPLLTPPLSPRXPKGGGGGGGLPPKNPPGFGGKKPPGPPPFFFWGGGGGFLPPFWVFFPPVGPGVFGGPPFWGLGKFNPFFP

SEQ ID NO: 940404 - protein, 72 aa, Homo sapiens
TGPGFLSMANQGQNTNNSQFVIPLKKPDPLAFKHVVFGFVKDGMDPVKKIESFGSPKGSVCRKITIPECGQI

SEQ ID NO: 940405 - protein, 188 aa, Homo sapiens
  misc_feature (50)..(50): Xaa can be any naturally occurring amino acid
CPTGSSPRAWVFPVWGAPFPISPPRGGVVWGPPPTLKIVFKRAGFSPFKXAPFRGGGFSPPQKKSQANRLFPGNPLEGVFFLEPKTGPGNPGPPKLLGRFSPPPRPRGAKNPFGGVPPPPGPPPRGFFGPKGGFRPNQRVWGGKTPPGGPVFPPPLFPLGVGQIFSPPCPLKKRGGPFLSPKKKFFFL

SEQ ID NO: 940406 - protein, 71 aa, Homo sapiens
GVKGWVAPSQPPPMDKQTSEPKWTSLGPPRDQKQSLCRTQQMGTWDPLHPGPCPKRAKARPKGKASPLCQT

SEQ ID NO: 940407 - protein, 87 aa, Homo sapiens
NPVGALQKLVVQKGWRLPEYPVTQEFGPAPPKKFPMTCRVERFFRLVTGQKGVFPTPLPQHFGPNQGPQSLSQPRIRPLFFGDYEWE

SEQ ID NO: 940408 - protein, 133 aa, Homo sapiens
RAWSRRCVRFSQARPRAGQGFQVGPTSFWGSGHLGKPRLPRRPPKGSAGFCLGPRPCLCLKLWGLGQGSSSSAFNCGCHPWGFPSAFQDPPSLKGRFTIPFALQSQPPRLTSGLEPPLDELPPAPAPLKTRKP

SEQ ID NO: 940409 - protein, 83 aa, Homo sapiens
TFYAGGGIALNAPFSSSFSGMKRIWVQQQGGGPHGPHGLQGVRPLGPQPQQEPKRKKKTLPFGESLPHSVPPPPEFPLLPVAM

SEQ ID NO: 940410 - protein, 122 aa, Homo sapiens
GLPIQHCRCPLAHLLLVPPSVHLAGVPGPNRNSQAITQGSQGCPPPQRCQGAAIRALAGGPKGPPRICGPVTFPRFCFPVPPPSGFEIPDLGYIKNAELVFRSPASFIFLVFQKKTLKTGKE

SEQ ID NO: 940411 - protein, 114 aa, Homo sapiens
  misc_feature (63)..(63): Xaa can be any naturally occurring amino acid
KEGQPTSPRGYWSFWAFGTLGQGGFLLRANFFPGGKKETRVVPNPCLLPQHFQNKAFKKAVSXQRPQAIQAFFWSIPLPPILPHTWDGARKNFPPLVGQPGGPPGMDNKNSKEL

SEQ ID NO: 940412 - protein, 150 aa, Homo sapiens
  misc_feature (5)..(5): Xaa can be any naturally occurring amino acid
  misc_feature (51)..(52): Xaa can be any naturally occurring amino acid
  misc_feature (76)..(76): Xaa can be any naturally occurring amino acid
HPLVXANTCRDSCLAAPSCLDLALLTELCQRVSFCTDMDPEPQTFHPVLSXXSFLFKAPLVPPGSPVVNALFRQRXCIENILRAWVGLPPQNHMFLEHKMERPGPSLKRVGPVAAPYPLLNKKGPVPPAPNGCPGDANGHLQKEPPMPPP

SEQ ID NO: 940413 - protein, 82 aa, Homo sapiens
SNQQCWRQTHQCDPPPEYYVGEVKQIVSPLLGDHYVQLPATYMNLGPSTSHEMNVRPEQPQFSPMPGNVRRPRPLSKPPRPT

SEQ ID NO: 940414 - protein, 224 aa, Homo sapiens
VLWRLRPVPAGVWGLPGAARFQPFRSPFVWVGGGPCRPPLTLPGLGELVSPLPAGSRKSLLVPGAEAGAGLPTLSLAVKPKWGTPRFKGWLGIAKNHPLCPPGLPPGRKRGCRAFGRVLPRFGFLGGGALPPVGGSPFHPFGRPGVAFKVGPPLPPALVFLRVLGGFAPFVTRGFDPPPLGGPVGLWGWGLPFACGEIYLWGPLVGGRGPAPPWGFNLGAFSPL

SEQ ID NO: 940415 - protein, 123 aa, Homo sapiens
  misc_feature (9)..(9): Xaa can be any naturally occurring amino acid
LVKGFYSNXIPLEWGNHWAPGKKFKTPPPLLGSRGSFFLFNKLPVGKKRWAQGEVFFFSLMDEGLPHPLPPKKPFPFFGVISWAGGQPPLPRLLGLGGEVLGGPRVHFFRGPRIEIKPPPLPL

SEQ ID NO: 940416 - protein, 231 aa, Homo sapiens
  misc_feature (13)..(13): Xaa can be any naturally occurring amino acid
  misc_feature (37)..(37): Xaa can be any naturally occurring amino acid
  misc_feature (42)..(42): Xaa can be any naturally occurring amino acid
  misc_feature (44)..(44): Xaa can be any naturally occurring amino acid
  misc_feature (46)..(46): Xaa can be any naturally occurring amino acid
  misc_feature (50)..(51): Xaa can be any naturally occurring amino acid
  misc_feature (57)..(57): Xaa can be any naturally occurring amino acid
PKLLTQYYLVLWXSFLVQGDWETGGLGARKLPVKPSXNLYDXKXEXQHFXXPSTTSXTTTKSGTSCASRFEYVDNVHPAELISGDPQVISHVSPPKSSSFFAEFGMDSGFPKKGSSNSSKVQIQETDEARKKFTNAKSISSAQYFGDQNKADADAQVSLQKFSGSSAISSADLFGHSDDQTIDLAASDLINRISFQAQQDISSLKNIAGETGKKLSSFASTFMNDLQDRIL

SEQ ID NO: 940417 - protein, 83 aa, Homo sapiens
PPRGGGPFGPPPPPGVYPLPPPPPPGPQGGGGPPFLGGVFPPFFPPPKVFPPPPGLFFAPLWGGGGGGAPPFFFPPFGALGFP

SEQ ID NO: 940418 - protein, 133 aa, Homo sapiens
GGLQMLRVIQRQSPRFPRGALTLEVHRRFLDLEKGGYKHKDIPAPSCPPVEAPPTRPPRDRAGFSVFVQNNREEPGGPPPRGALFKSGLSPVALPACKKSVKKLNGLGASYPAPSTVGPGAGGPAHPKTGSKK

SEQ ID NO: 940419 - protein, 154 aa, Homo sapiens
  misc_feature (33)..(33): Xaa can be any naturally occurring amino acid
GHKNLGLWVKRVFVLLIHSPSIFIIIIQVKRLXWSLFTNLVRTLKWVDPNPKILWQIATNIINVQTPFFGCLFNHWGPFFPYGYTFKPRSFVWLFRKPGPFIFFLKKSFKFFPKNVDPFPGKLIGQIRNNKIQCYLDFKLHSWYAPKLGFNSPP

SEQ ID NO: 940420 - protein, 108 aa, Homo sapiens
VPGFFYWVLKTLSLHPWGGFAGGGGGNVPASGPVFPNGAPPRSPPRPGFLLNPFPPGAGGGVSSPPGGAPSSSRAPAFPAPFPPLFFLPPPPPKFIFVFPGGPLSPSC

SEQ ID NO: 940421 - protein, 84 aa, Homo sapiens
SGDIQKLLKNGSPGFRLSLGILALLTLLGALGIANSFLDENLGLNIAKKLRGQFKLFFFPLKLAETVPPMKVIWDHLLNKNKVF

SEQ ID NO: 940422 - protein, 74 aa, Homo sapiens
NSLLLLNVPKPISSVRRLTNVLCRGDQTQCMALLFSFPYQYVSISQIVIDVGPKRQGLAWLNTSEFILTLTDGD

SEQ ID NO: 940423 - protein, 101 aa, Homo sapiens
NPSGIRKRWILAKGPCALPTHPWFGPLLALALYPKHHPHRLGTSPLACLCFSPNPLKWGRKRRKREGACPPLRHLGGPRPQGLYPSLRGLSPTHLLKSNLN

SEQ ID NO: 940424 - protein, 91 aa, Homo sapiens
  misc_feature (26)..(26): Xaa can be any naturally occurring amino acid
CSGGALENLVVETPDLTNLMGTWRTXVSSSGIVNAPINDLSKQATRLYQISRMWVGPDKRIKAGCPSQHWQLARVPFHAVGALFFAINLAT

SEQ ID NO: 940425 - protein, 62 aa, Homo sapiens
PDSAEAERAELQPAWKGRLGRPIPLDGGEVSSVRKKAQRRGADRLANMPALYLLGGGGGSVN

SEQ ID NO: 940426 - protein, 147 aa, Homo sapiens
  misc_feature (97)..(97): Xaa can be any naturally occurring amino acid
  misc_feature (99)..(99): Xaa can be any naturally occurring amino acid
  misc_feature (107)..(107): Xaa can be any naturally occurring amino acid
  misc_feature (109)..(109): Xaa can be any naturally occurring amino acid
  misc_feature (114)..(114): Xaa can be any naturally occurring amino acid
ETWLSAILPLPWGPSPWYCLHSPQSPPQERRLPPPPHLRWFNRSACPQPSPIFMAKLILKQNETANLVCLNSPQGCHSIPPPRGLVREQTKTPKQGXVXLQTQMVGXYXNQTTXLDPKHGLHPRFLAHLPPPHPVYLEISLIKRIIS

SEQ ID NO: 940427 - protein, 64 aa, Homo sapiens
SGKGKGIAGREKMTANPGYVSGYKGFGPSDKKTKKEELHFSLLPPDPACLTPGSLENNKHLCVQ

SEQ ID NO: 940428 - protein, 82 aa, Homo sapiens
PGGIACEKPAAGMGQAPAYSATSVDVPTPVQGAHGDRHLGMSSLEQLEQNLAAAEEGPLEPAVVDALIKLAFELLRMSQYFR

SEQ ID NO: 940429 - protein, 39 aa, Homo sapiens
MAGTFWTGLPLLGQSKRCQEEHGCGSPVSQEIKVYLRAA

SEQ ID NO: 940430 - protein, 152 aa, Homo sapiens
  misc_feature (24)..(24): Xaa can be any naturally occurring amino acid
  misc_feature (42)..(42): Xaa can be any naturally occurring amino acid
  misc_feature (68)..(68): Xaa can be any naturally occurring amino acid
PPPLPKKGVCPPKKKMGGAGGGAXGDPPKKAPILRARGAPPXCVCCWPACCGCPVSSKSCCRPPGTVXAESERSASCAPRRPRKGVLSAASAPSASSASSSDAEAEPPPEPLLSDSESLAARARCAASPLRRERRQRRGPADVLRDAPRARG

SEQ ID NO: 940431 - protein, 72 aa, Homo sapiens
  misc_feature (29)..(29): Xaa can be any naturally occurring amino acid
MCSYCSTDLYSLWSAVGCFPEASIRLFAXELVLVLCYLHDLGIMHRDVKLDCAAAETTPLHSSSQGDSESPS

SEQ ID NO: 940432 - protein, 68 aa, Homo sapiens
SSVMLSTFYLHTVCNPSPEAFSSCKIETGPIKQQLPICPPPAPGNRLFASFSMDVTVLGTSYKSNPPV

SEQ ID NO: 940433 - protein, 94 aa, Homo sapiens
SFCTAKETTIRVNRQPTEWEKIFAIYSSDKGLISPIYKELKQIYKKKTNSPINKWAKDMNRHFSKEDIYANLDTSCFCLPHPTLFYIFYKCAKL

SEQ ID NO: 940434 - protein, 106 aa, Homo sapiens
KFPEPVLNRGRARGVFFPPKKPPGKIFLLKKNGGEIGSPKFFFFWAKTPPPPRICPPRVLVFFVSEKRNQRGPKINFFKKPKGFGVWDLGAPILKAPPSQKKFFPP

SEQ ID NO: 940435 - protein, 173 aa, Homo sapiens
KNRGCVSDQRLKVFSGALQEALTEHYKHHWFPEKPSKGSGYRCIRINHKMDPIISRVASQIGLSQPQLHQLLPSELTLWVDPYEVSYRIGEDGSICVLYEEAPLAASCGLLTCKNQVLLGRSSPSKNYVMAVSSSGPSAPALGAERPLQELRDGSLQLGPSAPALGAAVLMLP

SEQ ID NO: 940436 - protein, 116 aa, Homo sapiens
GAGTPVQISKDSGRDGPGQAQPPGAAGEPGAGQNRVQGQEARNLSVRGRWTPGTRYRWGRDRVSHEGRLLLPAEQQDPQPDSVPTGLQPLLGKAGRPPIQDTGGRSVIFWAGQSWG

SEQ ID NO: 940437 - protein, 101 aa, Homo sapiens
PPPPPVSQKKRGGFHNLAFPLKGPFLGGSPLGEFSPGFPRGGFKVKGFYRGFPPSKSRGGKFWGFPGVFCQNPGLGLGKGGKPGPLNPKTRGLTKGGGGLF

SEQ ID NO: 940438 - protein, 106 aa, Homo sapiens
PSVFSGVVEDTGPPAQPFAPPSPAICAPQPLWSFFLVLSPLPQSFCPKLPFERVFFIFHTSPKLSSSPFPGLSPAVLSVSWAKKRKWGWEGLSLCWVFPPINWGFL

SEQ ID NO: 940439 - protein, 81 aa, Homo sapiens
VGGPPPGGNGFGRGQNPNVQGFPPYRREAAGPRSLHGPDPGFPTCELVTIPNLAAKWRLNLGGGGGGRAPGFWNGCGCRLD

SEQ ID NO: 940440 - protein, 92 aa, Homo sapiens
MEEERKESSIKKEREKKSRRKEEEEKKEEEERKEDEEKRKGKKKEEEEEERRRKNKKDEAEEERRKEERKKEEERKEEDKPKKEAEEEGDSK

SEQ ID NO: 940441 - protein, 145 aa, Homo sapiens
  misc_feature (62)..(62): Xaa can be any naturally occurring amino acid
  misc_feature (73)..(73): Xaa can be any naturally occurring amino acid
  misc_feature (99)..(99): Xaa can be any naturally occurring amino acid
  misc_feature (127)..(127): Xaa can be any naturally occurring amino acid
  misc_feature (138)..(138): Xaa can be any naturally occurring amino acid
  misc_feature (142)..(142): Xaa can be any naturally occurring amino acid
KLQELRLFTSSALLPEPVPTLFFTNRRAGERDLTFGLPAWLFGSALAVFGFFIFYRSLLCSXPPTKTVFYHYXLPFTQGKGYGREMENSLSYFNPKGRXIRCSGFSQTSHLLVQGDLLQLSTQGSIXIYLKKMKFSSXPRSXIGM

SEQ ID NO: 940442 - protein, 45 aa, Homo sapiens
  misc_feature (3)..(4): Xaa can be any naturally occurring amino acid
  misc_feature (12)..(12): Xaa can be any naturally occurring amino acid
LRXXKYPVVYLXCWGRCEEPECLLCGNIMSIAAGGAGCAPAKRPG

SEQ ID NO: 940443 - protein, 110 aa, Homo sapiens
  misc_feature (38)..(39): Xaa can be any naturally occurring amino acid
FLKKPPPPPPPKEKPGFFLGVFPPPDKKFIPKRSVCFXXTLFFFLFLPKRRWCFPPPPPKGVRWDPQKGCFTPPIPAYPHESLILVFIGIAFINNAFIIIKTLVLVLSLR

SEQ ID NO: 940444 - protein, 67 aa, Homo sapiens
DPDHLFETISQTMLNAVGRDAVSGMGVIVPIIEKGKIPPRALKGRMGYTLFPEPPFFSFFEIKKPVF

SEQ ID NO: 940445 - protein, 148 aa, Homo sapiens
  misc_feature (12)..(12): Xaa can be any naturally occurring amino acid
  misc_feature (67)..(67): Xaa can be any naturally occurring amino acid
  misc_feature (104)..(104): Xaa can be any naturally occurring amino acid
GVGGGPQRAPPXPEFGALIWWGEHPPAVFRPVFPYFKEAPGGFFLPPWGGPSPIWGKKVVVLAPPPXKTPPLFFCLLGGFPPPKRGGVKGPPRGGGVPLFPKKXFLGGGGGETPPPWGAPPGGFFLGAFGKKNPLFFSPPPFLGGGGF

SEQ ID NO: 940446 - protein, 152 aa, Homo sapiens
QNPNATPAQGASSQSGYAGSGGGSSASHVSPRQPSSQWPHPYMTPRFLFRAPSQAISPPQYPQVQGSTPPQLGQGQPQPFFSFRQRQQQPKFHSHAALDWGKMAEQWLQEKEAERRKQKQRVTPWPSPSPMVESPPMSLAGDAPPLLDEMGR

SEQ ID NO: 940447 - protein, 135 aa, Homo sapiens
TFEDVAVYFTQNEWASLHPTQRALYREVMLENYANVTSLFSLLRTLRQCVKLVTPAMFQTAWRQMESCSIDRLECSGAILVHCTLPLWGSSDSPASASRVAGTTSTRPHTQLIFVFLVETRFPHVGQDGLDPLTS

SEQ ID NO: 940448 - protein, 132 aa, Homo sapiens
MGNPFGPGVPLFPPPSKELALNKLVTFRCLARGFSPKDVVVRWLQGSQELPPEKYLIWAFRQEPSQGPPPFVVTSILGVATKDWKKGAPFSCMVGPGALPLAFTQKTIARLGGKPTHVNVFVFMGGVGGPCF

SEQ ID NO: 940449 - protein, 105 aa, Homo sapiens
  misc_feature (69)..(69): Xaa can be any naturally occurring amino acid
TVLFSILASSTLIAYHQIAGVANSSSPQSFAGGKPPLSYASALGAPPKPRPPPEQAKKSNAPLSFFQEXSLGGSFGPQGFSSFFKKSLFFSPQGECFNFCLDPEN

SEQ ID NO: 940450 - protein, 112 aa, Homo sapiens
DEIFYTLIYLSGITLPLKAREKSQLPYRRGKGQVIWGKRSYTWSKVSSRLGNLSCAGATGPEPSQKPKGRHGSKRLSAAAFGDYMRMETSKEARLLELLPPISAWIIYVISE

SEQ ID NO: 940451 - protein, 140 aa, Homo sapiens
  misc_feature (55)..(55): Xaa can be any naturally occurring amino acid
  misc_feature (89)..(89): Xaa can be any naturally occurring amino acid
PSPGVTFPIRGVYPRAGGEQKTLFVNLGPRGDPPTTEMNLWGRGGHPPPFGVLLXVFGGTPKPRGVSPQIFGGAPPISMPPIFGAPFSXGGEGEKPPPPPTNWKGVSSPKKPRGGGFFLFPLKKGGFFFLPPAFLKASPR

SEQ ID NO: 940452 - protein, 93 aa, Homo sapiens
TITASSNLRFPGSSNPASASLAAGTLLSAPDASHQQRGRNFSPGATASCCYFKWLKTKRVAPCHCHQVGTLASVRKPFLLGKPMKFNTHFKTS

SEQ ID NO: 940453 - protein, 66 aa, Homo sapiens
  misc_feature (18)..(18): Xaa can be any naturally occurring amino acid
KIVRPASSTGQKTPLHNXSLALSTRLECNGAISAHCNLRLPVRGEASWTSWVEWGLGELFCLAKDL

SEQ ID NO: 940454 - protein, 66 aa, Homo sapiens
  misc_feature (27)..(27): Xaa can be any naturally occurring amino acid
  misc_feature (60)..(60): Xaa can be any naturally occurring amino acid
GVSFDDEMGTERKSDQQVQVYVRRDVXMDIQAGIVYDVASEAPLPGVLLYRSLCIYTDKXPNPMTC

SEQ ID NO: 940455 - protein, 76 aa, Homo sapiens
  misc_feature (9)..(9): Xaa can be any naturally occurring amino acid
EQSKRTHTXPNFKTKQQVIMIVWYWHKDRHIDQQNRIENPEINPHIHGQVIFNKDAKTIQLKYKNTLFNKWHWDNG

SEQ ID NO: 940456 - protein, 71 aa, Homo sapiens
QEIPLAHGSYWKVTGPRFNTMDPSGLPFHGHTHLEGHPHGLSISCKNTSIPSSPRQQIHRTFPLSFFWGFP

SEQ ID NO: 940457 - protein, 112 aa, Homo sapiens
  misc_feature (37)..(37): Xaa can be any naturally occurring amino acid
SYVQLPMGKPSRSPICFPKKTRALKGALPAAFFSMLXEERHQRQNNDPRGGGVPNWFGFLGVANRDAPQVGNFGKTTTPGGGASPIGLGRYGAANRDAPQVGSFGKAVPPPK

SEQ ID NO: 940458 - protein, 131 aa, Homo sapiens
GQVHVLQSRKIFVGPKESLYLVTHYARPLRSPVPLIKGNDTIQIYLEAGQISDFIKFDPGNLCMVTGGANLGKIGVIPHKKRPPGFFYVVPVKKANGNSFAPRLSHLFVFGKGHQPWIFFPPGKGIPLPLF

SEQ ID NO: 940459 - protein, 69 aa, Homo sapiens
  misc_feature (25)..(25): Xaa can be any naturally occurring amino acid
APPPPPPPLVWKAQNTWGWGNSLGXAFINSPGEKVAMPKLVRSVTVVYDHKDEDGNDLLPPPPVSGNPP

SEQ ID NO: 940460 - protein, 39 aa, Homo sapiens
KITKKEALGWFQQKYDGIILPGKEIPVFIQKSNKKFSVN

SEQ ID NO: 940461 - protein, 34 aa, Homo sapiens
ELSNVLAAMRKAGGKKPEPLQSPHPEIKNRSAFR

SEQ ID NO: 940462 - protein, 76 aa, Homo sapiens
SIGTASPIAGFLQKTKAGGMLPICLEVDNINAAVMGLKKKKIPRLSEGVKIGAHGNPVFFLPPKDWGGALVELEQA

SEQ ID NO: 940463 - protein, 130 aa, Homo sapiens
APMSGRRAPGNKTRTFISVAFSINYDRGEEEGYLNFIAPPKREFYLWTNGVSALLGSSMGNEQTRLGLEQLLTMETQLGFLEVEKVPIPEGPPPVAPPPPKLKFCYECSIAYTFTVWVAMGPNFGPFNNP

SEQ ID NO: 940464 - protein, 107 aa, Homo sapiens
PPFFFFKGGARGPGVLKIFHPGPRGGKNGAPPGSPPLFGGPLFPNGARGPPLFGGGKKTPPAGFPWGGPQIFPFGVSPVFFTPGGPPVSPPLGGGAPPFFFPLNFLF

SEQ ID NO: 940465 - protein, 96 aa, Homo sapiens
QGPQGLGQDRFQGQCTQVGVEFMADPSRSFIPNVKGPVGEGDVLPPFGVKAKSPEVALSLAARWVLDVGFAPLADGNGLSQFAPFFCPPPGTEMLL

SEQ ID NO: 940466 - protein, 74 aa, Homo sapiens
MGSSAVQSQLQFLLRVYSREDSQALPPSRVPRPPSRASFGACADWSCVQGQRGARAAAVKRLCSAETAVPIARL

SEQ ID NO: 940467 - protein, 80 aa, Homo sapiens
WSPQGLWGQGFRDQLNPGVPFFLGWGLGPNPGNKLKKFKGLGPPWGPFVFPPGVTVSRAFGTPVWVWPGPFGPWGFFLAL

SEQ ID NO: 940468 - protein, 76 aa, Homo sapiens
MAAEPLQSLKESLETVVTPFFTFARQEGRKDSLSVTEFKELVSQQFPLRPRMWALLIKIWTAWMFIRFRSSSSLSP

SEQ ID NO: 940469 - protein, 77 aa, Homo sapiens
QIGKKCRKRLCGGKPCACESCVKFKTKVEGLLQALTRKLETVSKRLAILENTVVLRLPVTPVASPRVLHKSPGALPF

SEQ ID NO: 940470 - protein, 141 aa, Homo sapiens
DRSSLCTVGHGRDDRVVDRRARRGRDPAGEIDRRVPDVAPGDRQVRQLGRAARRRERDSVRRVVIKAGRDGGVAADRDTDRTRIAARRLDRQTRRAGRDDSGIGPAELHRVVGRVRIEAAADNRDRRVRCALGRREVVDRR

SEQ ID NO: 940471 - protein, 106 aa, Homo sapiens
PEHLGPDFGHLHDHFAHHHPSVGCPGPTIDQEASFRPGASARDLYPTYSIFHSSPCPQRPGALPLTCIPLTPPSIPRPVPTTESCISPLSSHAFLQWHSIKCICFW

SEQ ID NO: 940472 - protein, 91 aa, Homo sapiens
PWWGKTTPPIMRENPELVEGRDLLRCPSFGPLTLGEMMSCPGPMAPRALQATLLCGQARIPGAGLRGVNGPSGAQVGVSTLSPPPQPPALK

SEQ ID NO: 940473 - protein, 84 aa, Homo sapiens
RSKIKNALAHFLPQGTPTPLIPILVIIETISLLIQPIALAERGAASMAAGRVLMHLIGGATLAISTMTLPSTRIIFTILILLTI

SEQ ID NO: 940474 - protein, 158 aa, Homo sapiens
  misc_feature (84)..(84): Xaa can be any naturally occurring amino acid
  misc_feature (102)..(102): Xaa can be any naturally occurring amino acid
LCAPYGRAVIMFGVPYVYTQNRIFKGRLENLRGQFQICEKDFFSFDSMRPPAQCVGRAIKGKTEYGLMVFSHKRFARGDKRGKXPPWIQEHLTNSNLHLSVXEGVQVAKYFLRQMAQPFPREDQLGLSLLNLEQLKSKETLKRIKQISQQLLMGRVGP

SEQ ID NO: 940475 - protein, 124 aa, Homo sapiens
GRPKVKVEYPIMSSTDPENGLILDCIQRSHQNTWKVEHAILIFRADGGVKHPRIAYGLGLAWTVGRVLYAYGYYTGELSKRSRGALGSIALLGLVGTTVCFAFQILVGLKVAWAVDPNAAIKEL

SEQ ID NO: 940476 - protein, 64 aa, Homo sapiens
SPPSFAPPLPPMDPRKVNELGAFVKMCKQDPSVLPPEEMRFLREWVESMGGKVPPAPQKAKKTK

SEQ ID NO: 940477 - protein, 167 aa, Homo sapiens
PQRPKNLARGKVVYFAPRSPGPGASLGTGYDPKDYFKGQTQGDPTTTNPPQHPPPPRELEGAPGHPGCSLASEASPPPKTRKPPRWIGAASPTTPGFSGRAVDFGAQGPTCMDFKPPPFGARGLGDPQYLTPPSSPIGPLPPCSRWAGAGSPGRGPLYFSIKAFRFA

SEQ ID NO: 940478 - protein, 62 aa, Homo sapiens
MVSVRQDPGSTFGMVLSMATTICDYITLKSNPAAKIRSPELGGSKPVPLSARPPPSRPAREG

SEQ ID NO: 940479 - protein, 70 aa, Homo sapiens
  misc_feature (15)..(15): Xaa can be any naturally occurring amino acid
  misc_feature (17)..(17): Xaa can be any naturally occurring amino acid
  misc_feature (19)..(19): Xaa can be any naturally occurring amino acid
  misc_feature (26)..(26): Xaa can be any naturally occurring amino acid
  misc_feature (30)..(30): Xaa can be any naturally occurring amino acid
  misc_feature (33)..(33): Xaa can be any naturally occurring amino acid
MSNPGIQNGENKALXFXNXKNLGTNXTMCXTPXSCGVRTGQDDDAAMCPIHLAQRHSAEDGGVQTATRVN

SEQ ID NO: 940480 - protein, 139 aa, Homo sapiens
LKGTILTLQDRFSHSNFIIQTLILLEGFVWMVSNCPPKVLETSLNIATVLTSIQLVMSEPNPDDPVMGDISSEFKYNKPAFLKNARQWAKKHARQKQKGDEEKMLDNLPKGGDSKGPNSTQKRKASQLVGIKKKFHPYV

SEQ ID NO: 940481 - protein, 74 aa, Homo sapiens
GAFSGPANGPISTHFFPAEVHKNPGLSQSSAENSQRMKMVETRGQDDQLQRAVPSLLIAGDGGVTSYREEYLLR

SEQ ID NO: 940482 - protein, 49 aa, Homo sapiens
  misc_feature (45)..(45): Xaa can be any naturally occurring amino acid
NVFAPPPPARDTGAVPYIHVIYLCPDSLCPVQIKNPKVRAPGPRXLRVG

SEQ ID NO: 940483 - protein, 68 aa, Homo sapiens
SGTHSRKLLKEMVDLIGSMSESSAGPVGGSPGQSGPVEGPWIGFKEEEALGKQEGGSVLSGVNPISDG

SEQ ID NO: 940484 - protein, 186 aa, Homo sapiens
  misc_feature (23)..(23): Xaa can be any naturally occurring amino acid
TIGGNPRGSRTAINESSVRNSNXSSAFGFCQNTCNCFDDIVSRRSGNAVKNRFRIRCGGKDCTFAFEFPTPYIRERQISIMADCQLAMLADEENGCTSFIVLRPAVEYRVWPMAEFPLSFAESFFIKNIGYQPNRTKLMQFISIGRNNAASLLPAVLQCKKTELCKCGSLRMAKNPENPTLFFELI

SEQ ID NO: 940485 - protein, 109 aa, Homo sapiens
EQPENAHQVESPLAFSCFRNIVDHLLNVKIRKMKAFMMIYFHFNKCTYPCACNILVDAVNVRSKSRRNAKAQSNKKMNGTLSGGYKEDFSQKHNPAPNITTSRLPPLKI

SEQ ID NO: 940486 - protein, 115 aa, Homo sapiens
MFFAGPRFDLKLLGACCHWVLPLQRLLRFPGAPQDPGSQILFGDVHFWPPALQSFSPGEEQWLFKAWGNQKKAGVYFCVGFGVFLSPRDCFVFLSPPAFFFVSLPPLNKLWVLFP

SEQ ID NO: 940487 - protein, 68 aa, Homo sapiens
PKGEFGVYLVFDGSTRPYQCKIKAPGFAHLAGLDKMFKGHMLADVVAIIGTQNIVFGKVDLVSRGTSV

SEQ ID NO: 940488 - protein, 93 aa, Homo sapiens
GPPPQFFFPILGFSPGPPGYGKNPQILGRGPPVWFPPQKISGFWFWFPLTKGPPKGFFFWGFGEKTLWGFLGNPFPPPPQNGSLAKGNFGLNF

SEQ ID NO: 940489 - protein, 111 aa, Homo sapiens
  misc_feature (96)..(96): Xaa can be any naturally occurring amino acid
  misc_feature (99)..(99): Xaa can be any naturally occurring amino acid
RGGRHASVPTTPQDLRSALQGRAGGQQGPGTAFPLRPRHSARGLLTCKPGRSPSGRAWRKGGGLHALYVETTGPARAFVLRRAPQRRPRPRRRPAXGCXDQAPDPAMHAAP

SEQ ID NO: 940490 - protein, 172 aa, Homo sapiens
MLAPLVECLPLRPPGRRSRSPVIPGVDIVMYPPPQGTSFPKEASQKFLKDFMESIQGELEEPRPERVNPFLAGGAEPIKPLLAYFQNSPFFFGENLNPNGMGAFLGPREDGVPPYMIFFKDGLKMGKCFPKGPIFLGLSPVLITGFCLSSPPPPGFRPMGLMSFWAFPFFWL

SEQ ID NO: 940491 - protein, 109 aa, Homo sapiens
MEQETGVEEGSSSHRVQATSEPGNASSQRAKRVHALKRLRDSANANDVETVQQLLEDGADPCAADDKGRTALHFASCNGNDQIVQPCSHLDWLSEANFIILADFRTLTA

SEQ ID NO: 940492 - protein, 81 aa, Homo sapiens
ASVCVCWGYSGNALPSLPCACDEEGCQAVVCGWGGGGGAEEPLLLQGRPLLSLPNAGSRGPATFHRPRWKSPPAEGVGGGG

SEQ ID NO: 940493 - protein, 75 aa, Homo sapiens
KRAVRGWNRLAGPTYRGVYGTNLLRHAKVVWEMLKFEMALRLETLAMRLTALLGCVLVPLNLVPPTEELYQYLET

SEQ ID NO: 940494 - protein, 109 aa, Homo sapiens
GGPPPFFGDFGGFPPPGVFPPFSPTWGGGAGAGAPPFFFFGGGGFGPPISPGGFFNVFPPPKFMFSFPPRGFGRGAQPPFSPPGAPPFFFGGGPLSGGAPIFFGAPPVL

SEQ ID NO: 940495 - protein, 114 aa, Homo sapiens
MGGGGGRWGVFFTQPCFFYRPVAWGGPPPCFFLLLKPGGGSGPRPFVLAGGGVAFFPRKRFILFWRFLGAPLIPVWFKKRGGGGPGFPGCCCPPGPLCGGGRGLGPPPPPGFLC

SEQ ID NO: 940496 - protein, 126 aa, Homo sapiens
GTGWCRASLSQCWCWWPAVAAELSSCTPLSCRAPSSGTDLDPGCHPLRSRAAQLFALAPRPEPRAARGAGAYPERLEAQLAAQLPAHRPQPLLSHPEAQRLNQPTLGWAQVPGPKPLGIKNPLSRP

SEQ ID NO: 940497 - protein, 154 aa, Homo sapiens
FRPIPASSPCPRAPGRRPGPWGVTQRKDGGDLRGLEIRTVQGLECRDEWGEREPSELVPGLCQSVGPGWGGREEDQIRRPGQGGRSHGCGGARWGFDLAALTQAPPRPGLRVWEIEGTAGPAALELGDRENPLPGSLETVPTPHHYIPSARVSE

SEQ ID NO: 940498 - protein, 158 aa, Homo sapiens
  misc_feature (27)..(27): Xaa can be any naturally occurring amino acid
IYSPDTIIGGVPFFPFSKRGGLPLCGXENFNRKVWEALKPPRAGFLVGENTRVNCLGGIYNGMVLGTGFWESFPKFWNKPPGRVGPMGMGSPFPFGGVSPGGNSYPPGLRGAPPPPPQNFKRGRFFFLPFLLKPRAQFPLKKKFFGGKIKKIGLSFRG

SEQ ID NO: 940499 - protein, 95 aa, Homo sapiens
  misc_feature (37)..(37): Xaa can be any naturally occurring amino acid
ESSFGSQECVHLFLSGLCRVCRHSTRPGSFRYTGGPXSSNLESRRTLQLECIFLRIPCISTSPSDLLFPLQSRALQPNSCTGLKVLKLRRKIFYQ

SEQ ID NO: 940500 - protein, 119 aa, Homo sapiens
TPKPCGWRAGVGGVYLFGFSHGLGQSSGQTGVRHPGAKFLFWPLQYPKKLGGPFTSAAPRVVEKTVKSPPTSTRTPGFSCDLGPSFCPLGLYFPPCKWGCQPWLCLLHYGFGRLAQVVE

SEQ ID NO: 940501 - protein, 90 aa, Homo sapiens
ATGDARRQQLLKRQPLLEAFDPLRRGLTAPGINIKDKNKFHIPVGTFGSKDKKPKINGLRMEPNHEPAPDKTPPCFSGARLYVKTSRRGW

SEQ ID NO: 940502 - protein, 87 aa, Homo sapiens
MNDDETILDGPPVGLTFPWPPAEELSIAKAGLLTPGLVILGPSSIPRGLGFPPFLPRSGQCSALLGIQNTPSSKLNNNLGLGLAIAL

SEQ ID NO: 940503 - protein, 94 aa, Homo sapiens
ENGIPMLQDSINWGYMRDDTIFQDEDVKEAIRRLPENPYNDRMFPIKRALGLNFKPQILPKEQWPQYEEENFSPEPYLKKVIREKKKREEWAKK

SEQ ID NO: 940504 - protein, 146 aa, Homo sapiens
  misc_feature (2)..(3): Xaa can be any naturally occurring amino acid
MXXCVFPPRTARFGFALVPPGNPQLRKKVFEKDFGPINPEGPCPPCQKPNRAFLPAFLPSDNTAALPPPPVPNIAYQLQFISPVRPSIVEKRFPAFGGDFMGPMYGGPPLCPPWAPAPLAPVGIPLGCPGLGKGRGEGREGGGGKN

SEQ ID NO: 940505 - protein, 163 aa, Homo sapiens
  misc_feature (17)..(17): Xaa can be any naturally occurring amino acid
  misc_feature (32)..(32): Xaa can be any naturally occurring amino acid
  misc_feature (110)..(110): Xaa can be any naturally occurring amino acid
  misc_feature (121)..(121): Xaa can be any naturally occurring amino acid
  misc_feature (126)..(126): Xaa can be any naturally occurring amino acid
PTPVWHSWAGTLPTSSXERTALCRRTPSRSPXPSSPLCWTLGRCPSRRACLSSSSVRMRSPAAPSRFPALGISPRRWPTREAPARGLPAPFPDLRRRNCVRRPQHPQPRXAGSANPPGPGXRGPIXAPKTPDRPMHSPVFAPGGLSAGRWQWKLPCATVPAAS

SEQ ID NO: 940506 - protein, 114 aa, Homo sapiens
FIFFCPFKNQGGVLLAPYLESIKKGFFFPPKGMGPVPKGMPPQCSHGKTGRVSNFSPPPVGLVVTKPVKGKIFPQKINGGFGPLKPFKTRDSFLKRVKENVPKKKKPQKKGPWV

SEQ ID NO: 940507 - protein, 86 aa, Homo sapiens
FIILTLTSIGFLLDQRPKAAIMETLRCLMFLMLYRFGHLKPLVPSLSSAFESYSVISEIGLQAKENFGELLSLSDCLTAGNHPKVH

SEQ ID NO: 940508 - protein, 124 aa, Homo sapiens
VGGPCLASGWGGGNQIFFRFPVVSSVWASKSWLMLRPKKPSSKRGRPSILCVGPLEGGNPPWVGLSGGPLMCNGVLQGVPSWGSVPWGAPNKPSVPARVFFYVKWVQAPLPGLSLTPSPVPYPQ

SEQ ID NO: 940509 - protein, 104 aa, Homo sapiens
  misc_feature (9)..(9): Xaa can be any naturally occurring amino acid
KNPLPVTPXNVVFRLEGSGLQRPKILNVGDIGGNKTVTLPQLFVPVRPGPPQLIASLDSPQLSQVHGVIQVDVAPAPGDGGFFSNAGGDSPLGKTIPMASRGGA

SEQ ID NO: 940510 - protein, 84 aa, Homo sapiens
  misc_feature (22)..(22): Xaa can be any naturally occurring amino acid
VEPSQGQEELCEAQEPKARDVXLEMAEPPDPPQSSKQETWRHVGSMPRFLADSALISVVLKKNLMFLVVFFWGGEGWAKTWGEF

SEQ ID NO: 940511 - protein, 101 aa, Homo sapiens
RGAPPIYLGLPPPLGPPAFPFLLPARFLGGIGGGKPFSPGNPFCLVSDFLPPPLGDLAPRAQNLAQGGWGGGPPPFPPFFLVFTPWGPPPPFFFVYPRGFF

SEQ ID NO: 940512 - protein, 73 aa, Homo sapiens
MAVKTAFQRVLKAALFPDGLAGGICEAAKALGKGQALFCGLASPCIGPMFAQLGEALWAERLIPLIKVGAPKN

SEQ ID NO: 940513 - protein, 82 aa, Homo sapiens
PLFGCFFVWPGGGLVNTPPPFPVAPLGPCAPVFWGSPFVGTPFPPCGVYPPPPHPPGPRFCGGDEKGPLPHPPPPRVGGFFI

SEQ ID NO: 940514 - protein, 172 aa, Homo sapiens
ADSTDAMHLNVEVTGIRVRSSFSAVMFGFMAGSDYIDGTVTFTDADNHPVDHFKVSASYALGGIAGVDSIRMDWLYEKFTEKTLRDARSGDRGAAGQRSIGSLEEAVKTRCPTERRCAARRAMAADPMSPPTSGLASREPTSCNARVNALCSQLAAAALLFRWPSRLASERG

SEQ ID NO: 940515 - protein, 108 aa, Homo sapiens
  misc_feature (19)..(19): Xaa can be any naturally occurring amino acid
GPWLNFGERLGLWALYHLXCPAPPGGPPPLLCFPRNFKDKPSCGALGRSPHPVLSQNKHEPPAWNNQLFWLLVKGRGGFSNRCGFPRGPKVAPWAYSPGYSFVPQERL

SEQ ID NO: 940516 - protein, 77 aa, Homo sapiens
  misc_feature (44)..(44): Xaa can be any naturally occurring amino acid
SVTCNNSSKNEFSLILEKNPLVEYVEELPTPPFGGTFGGERREXLSSCATATCSVGLSEVPWKWFIWRLMLHSCKTD

SEQ ID NO: 940517 - protein, 230 aa, Homo sapiens
  misc_feature (13)..(13): Xaa can be any naturally occurring amino acid
  misc_feature (24)..(24): Xaa can be any naturally occurring amino acid
  misc_feature (57)..(57): Xaa can be any naturally occurring amino acid
  misc_feature (60)..(60): Xaa can be any naturally occurring amino acid
  misc_feature (70)..(70): Xaa can be any naturally occurring amino acid
  misc_feature (80)..(80): Xaa can be any naturally occurring amino acid
  misc_feature (88)..(88): Xaa can be any naturally occurring amino acid
  misc_feature (91)..(91): Xaa can be any naturally occurring amino acid
RVSFRVVMYEGKXIMADSGPIYDXTYAGGRIGVLSFSQEMVFFSDLNRNVEILNHQXVMXKTDHKPMLVXHFLELWASEXPRDHFSWXSFXSVLASVWTPRTCDLPQENAVFKNRLSIQPPMNKTSSKHINNCFGFLLKKHLLASVRKVPIPLCLCHRAGCYCEAISEQWTQKHFQACQRREDSLELANKTTLTSSFRNTGSRGPNPKGKGHTPADCIKKIWRNWYMVGT

SEQ ID NO: 940518 - protein, 161 aa, Homo sapiens
GLVAHRAERIFVRFEPSVNSRTVSGLPIVPRTSASVEFADLQPLEQQRRGLDRGEEVPDALHVEIALLVIAAGQRQRGGQHRHGKQPETKNHRKKCAWRKHAARIPAQRQKRETGARPVSCSMRRFGFRFGVGHAARRLRRTRHGRRRADAAARAHEFGQL

SEQ ID NO: 940519 - protein, 101 aa, Homo sapiens
VKASKIEWDTDQWKTENYINESTEAQSEQKEKSLEFTKELPGYGYTKKTHLGVNCDWNTNDFDYILCLIEICCHRRSLQEDEEGFSRDSEAPTEEESEALP

SEQ ID NO: 940520 - protein, 118 aa, Homo sapiens
EEDFANQLKQYRQAKETSNIALGSSFSKESGKKQRMKGVQQGIEQRVKSFNVGRGRGLPKKIKRKERGGRTNKGPNVFSVSDDFQEGPKNLCIRRGGAFSSFNLFDGKESIVILMILL

SEQ ID NO: 940521 - protein, 139 aa, Homo sapiens
VVKNSKTHFLRSHFQESFETGYTSPLPALLPSLCQALEVHPSIISLVGPSLFVSQPAAFFFLNSNQSARLRTDWCCCISSLFSPPWLGVLRAGTVFCAWKARVQQLLTGWACTGPFLQIQKPLQGWPGSTQMLLTLLVI

SEQ ID NO: 940522 - protein, 177 aa, Homo sapiens
PPQMHTAPLFRMGIFAPNHVVAQCRFWAFGFQFKKMKKFSGGIVSCGPVFEKSPPRGKNFGVWVGFFFRSGPPHMVRENRGLSPPGGVSPCFPNMGGRPRAPAPSLSIIKVGGVSAPKFPRPGVKQFPDSQIKFPLPPRVLGRQPQPRFPPQRAPPFFLGPGPCPGVPPINSGTPRL

SEQ ID NO: 940523 - protein, 180 aa, Homo sapiens
AFDGAHGLGGWQWLFLLEALPSVLLGFAVLRWLPNSIESAQWLNADEKRTLRANLDADPSGNKSHALGKAFSDPKVWALGLIDLCVLLGLYAVSFWLPTILRDTGVKDAYHIGWLMVIPNAAAVLATLYCGASSDRARERRWHIVVPFMVSAVAQAVAASSSHGTLRTILLFSLINAGAA

SEQ ID NO: 940524 - protein, 71 aa, Homo sapiens
LHSVPYNVTAPYVSCFVLIKCAHRGCAVVVAPASQEQLLTGRTNRLRSLAPGCVGTVVTFLQTSFHFIFSS

SEQ ID NO: 940525 - protein, 74 aa, Homo sapiens
FFTSTLVVDLTIRGPIGGWAKALLSSFKFLKPAHKNQGKMGQFSGFNLGGRLLPPPRNFAKTKKKPPPPPLGPQ

SEQ ID NO: 940526 - protein, 139 aa, Homo sapiens
YLGGSPKGDVDPFYYDYETVCNGGLIFAGLAFIVGVLILLNKKFPCGGNKKAGKSIKISRNNNLGGAPPCPGANWETKHGPAFGASPFSLGFKPLSPSLPALGVKEAPNSIGPPGGIANSCLGPPHAYNKTGVKDPCFP

SEQ ID NO: 940527 - protein, 151 aa, Homo sapiens
PRPDVGSALSAALYITHLVEFDYPEKFVSTQVGHTYAATTAIYTGVSDEYRNRLLRRALDRHPDLWEQPVNKKMTYRWNLRQLMATRGMFATTDLVPLLAERGIHLSREQVFRLVTTTPQRLSLDTLAALCDILDVGVEDLIDITAADHQV

SEQ ID NO: 940528 - protein, 154 aa, Homo sapiens
ADDSTDAALEILRDSGVSPPGPARLVRAYHRSPRPGSEPPMPTPSVPAAPRLRLKPSPLPPTGFVDGGWWPASADLAAEVPALAAALAERIGPVWRVAFAVAAWLPAEPAIVSQGRLVRLEGFRSQDPHVVHVTGGSMRRLTLLVVPAGTPLAV

SEQ ID NO: 940529 - protein, 100 aa, Homo sapiens
GGPGPPKIWVTKGGGGWAPIPPPPPLGPPPPGVGGGGGFPPPFGPRGLGGGGPPPPGPLPGFGGPLGFPPTGGGFFKIFPGGGGPFWVPPPPPPPGGAPP

SEQ ID NO: 940530 - protein, 90 aa, Homo sapiens
RPALGPRPPSLGTKLHPLILPPTVQVTQQQSLLQTAPYTLGFPLPCGVWVRSIWVFYFTGAGPPPLPLYGVPSRGFPPLLPSLGLLTLAF

SEQ ID NO: 940531 - protein, 181 aa, Homo sapiens
LVLRGFLLLLLVARGVVRPLLRLLPSLLVRLVELVLEIRLLLVVCLLARRVLRPFRAALRLLQCILLLLVAECSRVCRLVRRALRRFLRILCLLQRLLLVALLRAHRTLLVVERELLLANARPLVAHLFTRLAEAGIDEELAVAIVLGHRITIIVFGGALIEHFLTGVEIRCGRGCNGGGR

SEQ ID NO: 940532 - protein, 140 aa, Homo sapiens
CKCPSSKGPLDPDRRDGHVTEGSVAVMVSCKGLASGPPSLDKQEMPLPVNSPLGSDPRKMVYQESPQDPSSWPLGGMASLPEASGSEAPFVPGGPNNMPSHVGFPQNRLMMAGPKPGPWPLSATQGGTPQQPPVNSLASF

SEQ ID NO: 940533 - protein, 101 aa, Homo sapiens
  misc_feature (50)..(50): Xaa can be any naturally occurring amino acid
QFYEGVHLVFMPPNTTQMSLVKKVRTLRMHLFTALQLFCLALFWAVMSTXASLAFPFILILTVPLRMVGLPRFFPAQKMKCLDANKAKPVFYEREGVDEYN

SEQ ID NO: 940534 - protein, 177 aa, Homo sapiens
  misc_feature (63)..(63): Xaa can be any naturally occurring amino acid
VCVLGRKAQLTIAFGSLWAPCLGGISLSAWRKSLEPVASWAGPQGNMPPFFSPTLGPKRPVLXCPPGPKRFFPPPPKLWLGWGVGGAQFHNPFLGVAGGPPNFRQKGTFGPGFGGGPLFLWGPLFGGAPPRPLGSPPPSPKMPLLAPKWVFFFPPGLGVSGGPNFCRGKRTCFWGPL

SEQ ID NO: 940535 - protein, 102 aa, Homo sapiens
  misc_feature (6)..(6): Xaa can be any naturally occurring amino acid
  misc_feature (34)..(34): Xaa can be any naturally occurring amino acid
GTSARXAVPPARRRSLARPPRRAADRSMLPRVGXPALPLPPPPLLPLLPLLLLLLGASGGGGGARAEVLFRCRPDTLSAWPLRAPAGCAAAAVAAVAGGARM

SEQ ID NO: 940536 - protein, 119 aa, Homo sapiens
  misc_feature (61)..(61): Xaa can be any naturally occurring amino acid
GTSRSPPGVGGLVFLACLGNSGIGGIAGVGTPAAAAAAAAAAKAAKYGAAAGLVPGGQALXGSSWCPRSWRSGVGVPRSWDSSCPRCWDPRCCGSGVVSPEQLLRQLQRQQIRGQARSR

SEQ ID NO: 940537 - protein, 82 aa, Homo sapiens
  misc_feature (32)..(32): Xaa can be any naturally occurring amino acid
  misc_feature (35)..(35): Xaa can be any naturally occurring amino acid
  misc_feature (76)..(76): Xaa can be any naturally occurring amino acid
LRNSDEDHLDQLGSSSNGPVGPTTPFHPEAFXPLXLQHQVDQQHQQDQQNPLGQQDLTYHVHQGFPRTKQDQQDQXPQLRPV

SEQ ID NO: 940538 - protein, 143 aa, Homo sapiens
  misc_feature (84)..(84): Xaa can be any naturally occurring amino acid
  misc_feature (120)..(120): Xaa can be any naturally occurring amino acid
  misc_feature (140)..(141): Xaa can be any naturally occurring amino acid
HEAPPGPGVHWHDGGMDLASLRAAYRRIAPHTHRTPLLTSRLLDELLGKRLLLKAEHLQKTGSFKARGALAKALTLESPKGLLXVFSGNHAQGVAYAARVLGVRALLVIPEEASPLKKAXARAYGAEVVERGVPPSPPPXXAR

SEQ ID NO: 940539 - protein, 33 aa, Homo sapiens
THMAAEHCQVTCKCNKKLEKRLLKKHEETECPL

SEQ ID NO: 940540 - protein, 152 aa, Homo sapiens
PAPALSEVRVFKVQSAKCTETIPERADSTQMCTHRGQTLVYVMEVGLGNSPQAFFDGASVPRISTTAVCQVGSISQPCSGAGTLMGYIYTFQLDNVEAGGTFQYSNTSINPPRNQLVTTLGIADRHPSIALNAHKLRKSDRYDGDFSERRDC

SEQ ID NO: 940541 - protein, 137 aa, Homo sapiens
HEAPIIKPPPGVSSTSRSGSPVIINQVLRAADVLFHQVQQIGATGDKPRRRADQVHRLLHVGRLAVMEGDSLLTSLHAARRQGFFDGIADVVVGAAAAKVAAHQFLDLRGVVGTAFTGQAHRRADLPRRAVATLEGI

SEQ ID NO: 940542 - protein, 104 aa, Homo sapiens
  misc_feature (5)..(6): Xaa can be any naturally occurring amino acid
  misc_feature (10)..(10): Xaa can be any naturally occurring amino acid
ARAGXXYQFXRDQGLRVDLFEVENQLRQILDRVDVVVRRWRNQGHARHCITQLGDQAVDLAAWQLSAFARLGALGNLDLQHFGVDQVFRGYTKTASGDLLDFRA

SEQ ID NO: 940543 - protein, 140 aa, Homo sapiens
ARGDPHHFAVLIGFGASAVYPFLAYEVLGDLIRTGEVLGDLYEVFKNYRKGITKGLLKILSKMGISTVTSYRGAQLFEAIGLSEEVCEMSFRGVPSRIKGARFVDIEAEQKALAAEAWSARKPIQQGGLLKFVHGGEYHA

SEQ ID NO: 940544 - protein, 134 aa, Homo sapiens
  misc_feature (56)..(56): Xaa can be any naturally occurring amino acid
  misc_feature (101)..(101): Xaa can be any naturally occurring amino acid
HEHGAEVVEHGTLGVRAAPVGRQVAPGQQQRHAGQRHVDEENGWPAEVRISRPPIXGPSVVPTADMVPSRPMALPVLALGTVLPTKAMVSAIMTEAAQALXGARGNQQPQGGRQRAQDGGKGKQRNAGQQQAAP

SEQ ID NO: 940545 - protein, 131 aa, Homo sapiens
MRKLTSLFHDIYYSSPTYFYRVYPKDQKQNWRELAGIRVEYALPAGKLDPEEARNTTRERITDTFSIGNVNFPTLWTRATPPDVRITLGGNNAGFVSLQAALAYLEAHPQQTVWVMNWDAPSRPKTMQINE

SEQ ID NO: 940546 - protein, 120 aa, Homo sapiens
  misc_feature (10)..(10): Xaa can be any naturally occurring amino acid
MAEVRPSALXCVAREENSHCWRGHDGIHHIYDMSPVINRKGPAPELQGVEVALAPEKLELDPMAMTPKYEEHVREQQAQVKKEGFSDMVGEPAAQQKQKKRKGQPPGNRGGSKKYKEFKF

SEQ ID NO: 940547 - protein, 130 aa, Homo sapiens
  misc_feature (7)..(7): Xaa can be any naturally occurring amino acid
  misc_feature (19)..(19): Xaa can be any naturally occurring amino acid
VSFLPRXNLASGAGVGCIXNKKNLFVSFFFPAGFSSKQHVLGALLATQRLFPGKALSFPKVSEAHFCNTWLARAFFFLIYARAWVAGLDRALCFLSFTPPGCFSSGLGFHTDVNFERKVKGASALYCVYI

SEQ ID NO: 940548 - protein, 96 aa, Homo sapiens
AFISAQDTPALPPKKPDPPRHKPPSGKSTPVSQLGSADFPEAPDPFQPLGADSGDPFQSKKGFGDPFSGKDPFVPSSAAKPYKASASGFAVFTSVS

SEQ ID NO: 940549 - protein, 89 aa, Homo sapiens
  misc_feature (17)..(17): Xaa can be any naturally occurring amino acid
GKNSKKSPSFPPMNRAXRRIIHDLAQVYGLESVSYDSEPKRNVVVPALQGEVRLSSYPPDRCALKGNAGPASPPDSSSQTSVRQKFWEQ

SEQ ID NO: 940550 - protein, 73 aa, Homo sapiens
SFHELPLFRGLFSPPGGVGVPPDKGWGPLDLVECPVFFPPGLWVSPCREIFGWVKKFFSGSKGPPPLRGCKKN

SEQ ID NO: 940551 - protein, 55 aa, Homo sapiens
MAQVTPPLVHIMEEVEENRTQDGKPERIAQLTWNKAYNPNFFFLINSLLEASFYF

SEQ ID NO: 940552 - protein, 55 aa, Homo sapiens
MAQVTPPLVPIPEEVEKNRPKMASLKKLPSCLELGLNHNFLFLINSLLKAPFYSL

SEQ ID NO: 940553 - protein, 93 aa, Homo sapiens
MSMQGEIKIGKRQVFFPVRKMKTTASKFVTELTMAIWALRSIKTVAGGDLEVQYHFSCPVMSAIRRLKELNDQYDRLYFIENISWPIMNGLIF

SEQ ID NO: 940554 - protein, 101 aa, Homo sapiens
NFNQSKWVFPVVIKSPFPHIQRARPPFGIQKYHILKLGSLENSGLGKTPFITKKASKNAFKTFRFINSSLISPFRSQNLATFGQYFLPSPPAHFFVGVFGP

SEQ ID NO: 940555 - protein, 94 aa, Homo sapiens
PLGNVFAQIAYFKISQRWNFPSPFFRLHFKIPQTHGVCGHFYAGPSDMTPVAQMPPYVKPPWTCVPAPVLCSVAGSPFLSSGVQWGREGGKASS

SEQ ID NO: 940556 - protein, 136 aa, Homo sapiens
MSLSAGKAFRQGLDASVIVSVMRFLLSDMDDKNGANGGISSVEQMTSTTEGPPWAIAACMAASKSATVSAERHIRLGNIAAIPAAICEGVNRLKLYFPPVIQLLTGDAHGMCVVVDNDECHRQPVLDRRVNLHAVH

SEQ ID NO: 940557 - protein, 104 aa, Homo sapiens
  misc_feature (3)..(4): Xaa can be any naturally occurring amino acid
NFXXNSLSHGWPTPPRPPGPKPGVVAEGRNVTFPFGQKILPKKGKVVWVKGQEPLEFSYPGYLALGEGALSIIANPGNEGPYPWGGGRQQGGLTPYSWGGRGGG

SEQ ID NO: 940558 - protein, 104 aa, Homo sapiens
  misc_feature (30)..(30): Xaa can be any naturally occurring amino acid
  misc_feature (43)..(43): Xaa can be any naturally occurring amino acid
PGPSGNGALPCSHMAPSQLGKPGELFPLGXGLCPSQTRPLFPXKGALVFSPPRSPPPEMPRGPWALPRPWAFAGRGLSGFVPCGTPMPPPLPAPYGGPINPCRA

SEQ ID NO: 940559 - protein, 104 aa, Homo sapiens
VGGGPGGDSKLSPPKVQGRLEAGAGPGSKQGPPSFFDSSNRSNDLGPDVKFPPAGSKQPESIPGKAKKPQVKKKEKGKKEKGKKKGGPPLRALGRGHLTFLFAF

SEQ ID NO: 940560 - protein, 147 aa, Homo sapiens
MTGGLAPACGDYPIRVVQEGSHLGSQQAPFFLAGPLDQGPFPDVNCVGWDPQEPGVLASLSDDGGGPFGRINGLKGFWVPRLWAEEWLPRKRYFRLFPALGGPGGGSLAFLLLGSLFFRLGGKGRAPELVSFPAFYMGPSVKGFRTW

SEQ ID NO: 940561 - protein, 68 aa, Homo sapiens
GIINKGEKYQFLKEIGFKETSEKGIRSGKLSLLGFVYKLEGNMNEALEYYERALRLAADFENSVRQGP

SEQ ID NO: 940562 - protein, 127 aa, Homo sapiens
MSPVVQKWLYHQDLDVQYRSGGAPQTWACPFKPHHHPGKDCQTVGRHFPLDLNLKSPSLPWVDPGKPFALSSGPNPTNLLCDLRPMCRPFLGPSFSSYENSYLPKLCETKKKNWRKAVGQRESSCYY

SEQ ID NO: 940563 - protein, 177 aa, Homo sapiens
TLAQRPSPTGWGDANNFSPPPKDRPSKWRSAVPQISLGWPAPKGCCQHVPDLPKSFSPRARPGLALQGMAPVKDPFQACPLPICCERGASLPWGLSPGFALFLRGKRTLPLPRPGATLLPFPRTEAFGPSDPIPLNQVSFCVWGEEGMISVWFHVLFLSSVSGWVSVCIKWNKLPPP

SEQ ID NO: 940564 - protein, 80 aa, Homo sapiens
QAKTSPKPAVVETVSTAKPQQIQALMDEVPKQGTIVRELKAQKAAKNEVAAEGAKLLDLKKQLAVAEGKPPEAPKGKKKK

SEQ ID NO: 940565 - protein, 171 aa, Homo sapiens
QDTCNLDRESESKTEIKEMNVQKAKLVTELTNLIKICTSMHIQKVDLILQKATVISEKIALESDYMAASSQLRLQKHIFIELDENRQRLLQKCKELMKRARQVCNLGAEQTLPQEYQTQVPTIPNGHNSSLPMVFQDLPNTLNEIDALLTEERSKNSPFTGLNPTIVREYA

SEQ ID NO: 940566 - protein, 137 aa, Homo sapiens
LTQAETNHIGHTGYLNTVTVSPNGSLCAFGGKDGQALLWGLHEGKPPYTLDGGDIINALWFSPNRYWLCVATGPSIKIWDLKGKILVDELKPKVFSPRSKAEPPPCPPLAWFADGPTLFAGYPGNLGRVWQVTLGPP

SEQ ID NO: 940567 - protein, 60 aa, Homo sapiens
MLRYVTLRYVTLRYVTLRYVTLLFENKSRSVAEAGGFGVTLAHCNLRLPDSGGSPASLPQ

SEQ ID NO: 940568 - protein, 154 aa, Homo sapiens
LGKIRPRTVPDQNFAAHAAPLTDDAGTRRQHEPARRRVVRARAPRLAVGTSPQHARVSVHAAHGGARTARAVLAAPIAHVDEVVSVHARQQVHGRELHDVCTWRIRRTRGRTHVLDGDDGPPPVAARSACPGVGWPGLLTGMPLHGRPGVCPHP

SEQ ID NO: 940569 - protein, 179 aa, Homo sapiens
EHAIKARGRYEEYKVVGLCLPTPKCHTPPIYGMWIFEPNHVVAKSRFWYFVSQLKKIKKSSGEIVYCGQVFEKSPPRVKIFGIWLFYDYRSGTPNMYREYLDLTTASCVTQCYGNMFAGTRARVHSIQIMKVEEISASKFRRPAVKQFLDSKNQFPLPPRVLGRQPKPRFPTKRANTFF

SEQ ID NO: 940570 - protein, 89 aa, Homo sapiens
  misc_feature (6)..(6): Xaa can be any naturally occurring amino acid
APPRLXAPPPLLCFPRNFKDKPSCGSLGRSPPPVFSPNKHEPPAWNHQLFWFLVKGRGGFSSRCGFPRGPKVAPWAYSPGFSFVPPERF

SEQ ID NO: 940571 - protein, 126 aa, Homo sapiens
KNPLLNLFWPEVDEGAVLGISPLSRPLPFACSNGENWWWVPVVAPLLGAYLGGIIYLVFIGSPIPRGPLKLGDFGGYKDPGKTVLPKRGFYEPRIFPLTPVFVSPANRFSVPPAAFLHESRALEHF

SEQ ID NO: 940572 - protein, 119 aa, Homo sapiens
MGGNLTFFPPPFLGPSGKPRGFLGSPEGNPPKNILSLGGAFLFLTPGKLKIFLILKAFASKGKVLKGKDPPLNRGGVKGGPPPPPPFEEPGYIKFRQKRKGSAPPKGGSSPPPGPPGFF

SEQ ID NO: 940573 - protein, 67 aa, Homo sapiens
  misc_feature (10)..(10): Xaa can be any naturally occurring amino acid
ASFAFTQNLXDVPPRLLCAHPQDVYPVVVGAEIHVELYQELAYLKTKTESLAHFFVFVPQAKIKNKV

SEQ ID NO: 940574 - protein, 58 aa, Homo sapiens
PSTGDTENEQHTVLALMELSVWWGRQTRKQSKRSVYGDTWPQPALSQRRSRVIQYSVV

SEQ ID NO: 940575 - protein, 114 aa, Homo sapiens
  misc_feature (47)..(47): Xaa can be any naturally occurring amino acid
  misc_feature (82)..(82): Xaa can be any naturally occurring amino acid
  misc_feature (99)..(99): Xaa can be any naturally occurring amino acid
  misc_feature (107)..(107): Xaa can be any naturally occurring amino acid
VRHPFLISKGCSFAGKLLKDGCNLSENIIKRECTLHMVSVFRGKMKXYLKKLTGKSITVEVKPSYTIENVKAKIQDKEGIPXEQQRLIFDGKQMEDGRXLFEYNIQXGSSGRSA

SEQ ID NO: 940576 - protein, 127 aa, Homo sapiens
  misc_feature (15)..(15): Xaa can be any naturally occurring amino acid
LLKASPASLSFISTXLVASVPNPVRVWMVKQGYGLFVRGDPGRPNFLLVGDSKQIKGHTFCVLGAGAPWLVQGLIPPFGGGFKEGIQGFSHQLWGGGVAFLPPPRGCCFGFFLVECWAFKGVLPPFP

SEQ ID NO: 940577 - protein, 109 aa, Homo sapiens
MGQEELPRGQVLPPSCPAVDPSATVSIRGGEGDLTAHRVHGAAAQGDLISVSALIFSYFSYYFLYLLKSLCKEFMVSGETHCDKCRKTKAFFQGAEACGSSQALVMLLC

SEQ ID NO: 940578 - protein, 138 aa, Homo sapiens
RRVSLPLVMPALVSGTVLAFARSLGEFGATLTFAGSRQGVTRTLPLEIYLQRESDAQSAVALSLLLVAVAAVVLAVVGARAWRRDVVAAMSELRFEAGHSGRGVHAAFTVAPGETLAIVGPNGAGKSTLLGLIAGLLK

SEQ ID NO: 940579 - protein, 98 aa, Homo sapiens
GIPFLFGGQSEEEGSFTLNAINKGPLLKPWALPFSKGRALQAFALKAWGGKKETLKVGQGGFVKRALVRIGRRWAGGLGGWDSEKSPFPSPPFPPLGP

SEQ ID NO: 940580 - protein, 58 aa, Homo sapiens
METAYPLSLRHPFAAAYTKADDAFTVRADAWTPDAIARGGTQDVLQASRLALLSAVAL

SEQ ID NO: 940581 - protein, 104 aa, Homo sapiens
FQCYRISDLGHNTLDLAPEINWPALVTIIDNTKGQLVVHPEALKILSAITQPVVVVAIVGLYRTGKSYLMNKLAGKKNGFSLGSTVKSHTKGIWMWCVPHPKKP

SEQ ID NO: 940582 - protein, 106 aa, Homo sapiens
  misc_feature (34)..(34): Xaa can be any naturally occurring amino acid
  misc_feature (45)..(45): Xaa can be any naturally occurring amino acid
PPRVFFGFGVPPPPPACFLVKNPFGNGATQGVFXFPPFFLPGVRXPPGAGVHPPPLVRACLGMAFPPQPVRPPMVFIRVGTKPPKKFFPPPPFPYAGGPRLIFRPK

SEQ ID NO: 940583 - protein, 44 aa, Homo sapiens
MQTTYYQAITVYTGELELTYKDQRTYREGSLVRGPWLTLPAFDP

SEQ ID NO: 940584 - protein, 58 aa, Homo sapiens
  misc_feature (5)..(5): Xaa can be any naturally occurring amino acid
SISSXASEASFSYKENLSGALLAIFGHLVCSIALNLEKYCHIRLAGSKDPRTYFKTKT

SEQ ID NO: 940585 - protein, 147 aa, Homo sapiens
PQGRLYTSSFEFAQPCVFVKQLPGPILCASDCYEDPLSRSYGVNLPSSLTMNLSTPQYILPDHVCPFAVRVAVTLSLADFLGSMITCTQRFPKEVLYFRVSAQVVDLPATLITYALKALFRQCVAVSLLRLHITDTASCGILTASAI

SEQ ID NO: 940586 - protein, 83 aa, Homo sapiens
EAETGEITRAQKFQTSLGYTAKLYLYKNTKIGWEPVARACSTSYSESCDGRIARAQEAEAAVSQDCVTVLQPVLKEKKKKKRN

SEQ ID NO: 940587 - protein, 113 aa, Homo sapiens
GIYILGRRFRSLDYSWLQLTSFLYSFCQQSRRQGIIQRNRTERLSDLLDWKNLGRVGPPLSYPFLANQQVLAKGFWCRGQGLILLGTGAVPLNNEPGRSRWWVMVVIPALWEA

SEQ ID NO: 940588 - protein, 117 aa, Homo sapiens
PGGGPQGGRPRGCGRAGLLTMVANACCLPPGLSLALEKSRCPLQLVEGLCGLHLLSVERSTLAIPAPRALACDYSLVSLEPAGTVPRCVLVQIIRVARLRARSLSPPSVQIKASQII

SEQ ID NO: 940589 - protein, 90 aa, Homo sapiens
  misc_feature (13)..(13): Xaa can be any naturally occurring amino acid
GKGSTDESSPYVXMLAAQDVAQRCKELGIPPLHIKLRATGGNRTKTPGPGAQSALKALARSGIKIGRIEDVPPIPFDSTRRKGGPRGPRL

SEQ ID NO: 940590 - protein, 59 aa, Homo sapiens
MPRKMPTKVTQSSSTHTSSTGQPPTPTIQLAGQPPRVPPVDVVHLAMVGGYPCHEVGVG

SEQ ID NO: 940591 - protein, 83 aa, Homo sapiens
PGKKYLIMGLDGAPYALEGPPQYLLDLKSWIEEMPFEPLCRSPPQGAACAQFNDFLQEYGTQGGQVLGLPSPLPWEEPEPGNH

SEQ ID NO: 940592 - protein, 140 aa, Homo sapiens
QELAASLTRTLDLQEQLQSLRRELEQVAQKGRARRSQSAELNRDLCKAHSALVLAFRGAHRKQEEQRRKLEQQWQLMEAQQAEEVVVLEATARALGKPRPPLPASPSLGSTFLVVPPYPSHVLDNAKTAARHCHITCSWK

SEQ ID NO: 940593 - protein, 36 aa, Homo sapiens
GSAPSLEAGEPAALQPAVGPAATEAEHRCGAPGGPA

SEQ ID NO: 940594 - protein, 77 aa, Homo sapiens
SSVLIFWAFRKASSSGMLGQSIRRFPTFVVRRSPYEEGPGKNLPFSVENKWSLPAKKGLYFGSAFATPFLVVRPPLL

SEQ ID NO: 940595 - protein, 208 aa, Homo sapiens
  misc_feature (52)..(52): Xaa can be any naturally occurring amino acid
  misc_feature (64)..(64): Xaa can be any naturally occurring amino acid
  misc_feature (152)..(152): Xaa can be any naturally occurring amino acid
KGFPGHAADYSGAPHYAHMRGQRPNMPPLGMIPRQGFALGKIPPGAMPRQQXMPGQMPPAQPLXENPPNHILFLTNLPEETKEFMLSMLFNQFPGFKEVRLVPGRHNIPFVEFDNKVQAGAARNALQGFKITQNNAMKISFAKKKHLFPPCXPLPLFWGHPFPPWLSPLKVSPPLGAFLDPCVSEWSPHSIVPKVCPQTLHRGLLGRN

SEQ ID NO: 940596 - protein, 84 aa, Homo sapiens
  misc_feature (6)..(6): Xaa can be any naturally occurring amino acid
LPLNLXALQAHLAQENRVVAFFSLALLLAPLVETLILLDRLLYLQEQGFHAEVLPIFSPELFPKNLVLVATKMPLGTGFFCFGN

SEQ ID NO: 940597 - protein, 171 aa, Homo sapiens
SSSIPDGVYAVNGLVEHLAHVCLVVVLHRDALVLVVTLKMVGKLAETLIKAVMHKASSMSLREAVIRTAQVQKLQDFHRATLIVEWAYAGSAPRFRAVRDASTQGKDEPHGGRLFVAQLRAGSCKRFVSSFEEEDLRGARLAAERAGRQGQGAVALGPLQGGAALVLIHHG

SEQ ID NO: 940598 - protein, 109 aa, Homo sapiens
REKSLWLGLVFSLPKGFYCSRVAPGQAGAPLCLRPGKGDPCHFPAALVCSCPPGIKWRELQKLSFPKAVSVVETDWIFVLPLPPCPSLREGSYVRTPPSGIRVACASFF

SEQ ID NO: 940599 - protein, 74 aa, Homo sapiens
SLGTPPPLFFPPLETPGPVPPPGFFLGPGGGFLFSPGTPFAPWAFLGAPFNPFFPKNRVGPGRGFPGFFAPPGP

SEQ ID NO: 940600 - protein, 140 aa, Homo sapiens
KKSPGGISLWAGVFEVPPAGENFGFWVRFFSRVGPPSLSRGYRGLAPAGAVPPCYRDLGARPRARAPSFLFLRVGEFSARRCRRPAVLQFPGSWLGFPLPPRVLRRQPQPRFSSEGPPPFFLVPGPCPGVPQIKSGTPRL

SEQ ID NO: 940601 - protein, 139 aa, Homo sapiens
SLNKFKKIEIIASTLSDHSGIKLEISSKRNPQNQARTWKLNDLLLNDHWVPYEIKMEMKKSFELSGNNDTSYQNLWDTGKAMLRGKFIALNAYIKKSERAQIDNLSSHLKELEKEEQTKPKPSRRKEIAKIREEVKAIE

SEQ ID NO: 940602 - protein, 84 aa, Homo sapiens
NYKLRSVAHLPEKAFAYKAFNTFMNDVFAFIISMPTSLRLACFRDNVVYLVYLYERWLYPVHKRRVNEFGESYEKKATRAPHSD

SEQ ID NO: 940603 - protein, 110 aa, Homo sapiens
  misc_feature (61)..(61): Xaa can be any naturally occurring amino acid
RAPPSGPSEANTCPPPGPGAFPLQLGKRGLEFPFSFFRASAPPKGAALPDIPPGWAASRGXEGGPPPPPPPPPPPLNFGLGWAGPAPLRGIRLVPIIYFFNFFFNYWNKG

SEQ ID NO: 940604 - protein, 101 aa, Homo sapiens
LPHLLPALGFKNKTVPKKRCKDCYLVKRRGRWYVYCKTHPRHKQRQMETLSLQSHAHTRHRITWENGWILRKELSHQGVRGKWLETNALKVTPPGSGEMRN

SEQ ID NO: 940605 - protein, 220 aa, Homo sapiens
PPALRPPPRVCLVQGGGRAKKQVESPKLRTNGSKRVFQTKIQKFRKAFYTSTGFQIDITTEKQFRLTSLYAEHPGDCLIFKAPSPSGFKMQLLETKFSHPVGELIEVPLRGQDSIPAFLRLVTLELFNRQNRGVTCRLGGITGTPLVGLTCRFPAPPTTGWGARSAFPAPQGNSMTYKPAGTYVGVPAGAASPLSPGRPHGSRSLGCGGRPPAWVPPLVK

SEQ ID NO: 940606 - protein, 103 aa, Homo sapiens
  misc_feature (23)..(23): Xaa can be any naturally occurring amino acid
  misc_feature (42)..(43): Xaa can be any naturally occurring amino acid
PLPGFGVPPDRDFGGACPPQDPXIQGVGEGINVFLGPGPSSXXCPPQGFLSRIPPINCFRERGFLPQLDGTPGEWGGGSFFQGPPLFPPQLKRALFWPPGLVF

SEQ ID NO: 940607 - protein, 88 aa, Homo sapiens
  misc_feature (34)..(34): Xaa can be any naturally occurring amino acid
TEVWFGGHETKPRARKRTTMDVLGPFFSQVLVKXLVESAMARFVISAGHPVRVCEQYSEGAFMYCEENACGHNNILFDVREVFCFCYK

SEQ ID NO: 940608 - protein, 33 aa, Homo sapiens
KTDEMHTALMEACMDGHVEVARLLLDSGAQVNM

SEQ ID NO: 940609 - protein, 74 aa, Homo sapiens
MASHGLHPGHLVRDTAVSGLDWCSSQQLLLSPSMGQPHTARGAPAGAQSLCAPSLEHVRDLWFISNEVENGKSK

SEQ ID NO: 940610 - protein, 125 aa, Homo sapiens
HNRPTIIVMHRLLTGMHSEKCIVGRLHYCVNITGCTCTGLDGVPYPTPGLQTCTARYYAEYLKTTVTQCSVFVYLNIHRKGRVKIQYCNIMGPLSYMQPVFDQNIIMRHMIAYDHILVKCPEKVK

SEQ ID NO: 940611 - protein, 161 aa, Homo sapiens
VPSLRRVELHRAARAQALPAVRDTPKARMGAELRERHLQGAPGAEAAAGGAGAGAAGGDAGSREGPAGQAGAGGGPRPELAGEGGKGGPGGDRKPRERARERRVPAALTEPGRRGGGGRRAALSRGPLPRPPGLRSSLAVSGGPDSCVAALEGRVRLQPAT

SEQ ID NO: 940612 - protein, 113 aa, Homo sapiens
DGNTIIVRDFNTPLTALDRSLRQNVNKGTMDLNYTLEQMDLTDIYRTFYPTTEEYIFFSSARGTFSKIDHMIGHKTILNKFKKIEIISSIFSDHSGIKLEINSKRNSQNNADT

SEQ ID NO: 940613 - protein, 115 aa, Homo sapiens
  misc_feature (3)..(3): Xaa can be any naturally occurring amino acid
  misc_feature (43)..(43): Xaa can be any naturally occurring amino acid
TPXRGQFPSFSTKECFEHPQGQDVFDYNSCLLLRELDAEGWKXVQQTVGSRLQALRGEEVQEHAELTAGPERRSSLHGDPSVFPSPRELEGGCHGRSPRPHTTPSRLSQIVPGQE

SEQ ID NO: 940614 - protein, 96 aa, Homo sapiens
DLEGQLLSGHLTQDQVREVKRHITVRLDWGNEHLGLDLVPRKDFEVVDSDQISVSDLYKMGEIYVFGKEMETSTATTILLTHVNGAIQQMSVVPYL

SEQ ID NO: 940615 - protein, 117 aa, Homo sapiens
  misc_feature (34)..(34): Xaa can be any naturally occurring amino acid
CSLQGLLPPRWLANTRTPNTTGFRDSDRSLALPXYYRILRCLSQVKLNKKTKQKLKAISRNTKQAVSKDQKGDQKRALREVVYIPEGRILSGGWCSTAGRPWKISGEVKLLLSETFR

SEQ ID NO: 940616 - protein, 94 aa, Homo sapiens
  misc_feature (41)..(41): Xaa can be any naturally occurring amino acid
GHHVGAELNLPTCCLQDQHLEKVCGHCHVVLADDLVLYVGXSHQASVLWADPRAQRGQGGLDRTQSPPSFQSSPSPDRVLLTSVHTCKDHRPQL

SEQ ID NO: 940617 - protein, 112 aa, Homo sapiens
PPGKRGPPPFPPWGGGWANPSGGQGPPKRRVGWTPLFAPGGGRFLGGEGFPPCGPPPALRDLLKPRGPPVSPRVFRLKGAPRPPGPVFPLKARPPFGGFPGPLPPPLPGGAK

SEQ ID NO: 940618 - protein, 107 aa, Homo sapiens
MLGFGKDGGAQRLFPIGPFPVPLGGQQVPLRVSPYVNGEIPKAEIRLQPVPRSVLVLNIPDILDGPELHYVLEIPFQKPPRGGGEVKALTVVPQGQQGLAVFPFESG

SEQ ID NO: 940619 - protein, 81 aa, Homo sapiens
ARVPFPFEGRKEGLKRDLASSDIKLVHPCPIPGNTKEFRQMAANREVPRPLSPLPMFNVHTGERLPPRVGSAQVPLILGQH

SEQ ID NO: 940620 - protein, 116 aa, Homo sapiens
  misc_feature (101)..(101): Xaa can be any naturally occurring amino acid
  misc_feature (107)..(107): Xaa can be any naturally occurring amino acid
MIHAKTKRSLEVASGGGAARARARAERPVAAAAPPTRHAALPGAARPAAWEPRSAAAGPALPLLAPPLPPPEPPPPPRLFFRRLAPRLASAGLIALLTQGXKSGRGXRSRRRRAGK

SEQ ID NO: 940621 - protein, 83 aa, Homo sapiens
AAALFKGCASCIGYPHEVIKEGFREKGTKYKSFVQTARLVFREKGYLAFYKGLFAQLIRQIPKTAIVLFTYELIGDLLKDRTQ

SEQ ID NO: 940622 - protein, 95 aa, Homo sapiens
  misc_feature (13)..(13): Xaa can be any naturally occurring amino acid
WPTLVVPLPPALXAPGFAGPPNAWVRHASGLSCPHLFPAPEVGPAANSSLGPRQVTNTAASPNSNGMGSASPGFNRVSPSQELPPGMDNKDTKEL

SEQ ID NO: 940623 - protein, 70 aa, Homo sapiens
TFCGTRQKPIRSTRAVFLLRLQVGEKVWLAVNNYYNMVGIQGFDRVFSGFLLFPDYGGQMRSSPTGLPPP

SEQ ID NO: 940624 - protein, 122 aa, Homo sapiens
  misc_feature (20)..(20): Xaa can be any naturally occurring amino acid
  misc_feature (72)..(72): Xaa can be any naturally occurring amino acid
EEWSQFAPWGGPTGLCLSRXRRRPHGWVSHAPRVFPLRPLKGKGKGGFPKRPFKWGVFAQKGFLKTWGFPKXLPGPRYFGGPFCLFRWGFFPPPRTLFWVFLGLKKPAGVSPKVMGRGFESP

SEQ ID NO: 940625 - protein, 121 aa, Homo sapiens
  misc_feature (10)..(10): Xaa can be any naturally occurring amino acid
PAPKLSLPPXGPPDLGDGSSTPGRVGSPDQLPLACSPHDLRPCFLPADARPDCSPSPGAPLDLGTWTPSWLPRRGPWHGLKNPSPQKGPSLFLAGQQGGLRLERRAFLGVGLGVINPGGNG

SEQ ID NO: 940626 - protein, 62 aa, Homo sapiens
LGGPPPRIKAELTSSAPACYALAVSPDAKVCFSFLANGFTPSPAACGGRWAGAPGGNKMFFS

SEQ ID NO: 940627 - protein, 104 aa, Homo sapiens
  misc_feature (57)..(57): Xaa can be any naturally occurring amino acid
TVGAGRIPLGGAAPGDAAAGLPGSGAVERGLGGFRVPQRAAQTAGPGGPEQHAFREXAVLLGGRPVTRPAGLLAVPPWTETNWALLSPLGGGKEKPSGILFFLG

SEQ ID NO: 940628 - protein, 67 aa, Homo sapiens
GFPKGGGAPPPAPFLALGAGGTRFAPPPLGFFSFPPGGPPFPPPRPPVFPPFSLGAPNPNIITGFSS

SEQ ID NO: 940629 - protein, 135 aa, Homo sapiens
MSCTTARSVPFRHDRIMKLPGRYNYTAVVVWAITDDVRVQEGPKLKVCALRVTNRARIRILKAGGKILTFGQLALDSPKGCGTVMLSGPRKGREVFRHFGKAPGSPYNLSKPYVRSKGRKFKRAKGRRASLGHKN

SEQ ID NO: 940630 - protein, 123 aa, Homo sapiens
LPVPTIYHALGPGPAPPLVYSVSQQPLRGAGPQGVRRFRALAGKAKDPHPIFSIQPQAMGPASSPKDPADLRASCRLGHWCPPPHAWGPRFSSKKMQYFLFPFFPFFFLRNQYFHMLSVCPML

SEQ ID NO: 940631 - protein, 117 aa, Homo sapiens
  misc_feature (42)..(43): Xaa can be any naturally occurring amino acid
  misc_feature (58)..(58): Xaa can be any naturally occurring amino acid
  misc_feature (76)..(76): Xaa can be any naturally occurring amino acid
MQGRLKMQMERRLKMLPQSCSKMMIPMRSCLMRRKIPVRSCXXILIKGGLWVVLGVLXKGPYPLAAALFSGAMMMXMIFNPLNLLFRESPPFTFAWASGELLVGLHEHGHSGRMPSD

SEQ ID NO: 940632 - protein, 112 aa, Homo sapiens
GEPIWGRVPLFSRVWRELALNKLVLLTCLARGFSPREVLVRWFRGSQNLPPKKYFIWAFGQGPSRGPPPFVLPGFLGVAPGDWKKGAPFFCLVGPGALPLAFTQKTLARLGG

SEQ ID NO: 940633 - protein, 138 aa, Homo sapiens
  misc_feature (8)..(8): Xaa can be any naturally occurring amino acid
MRHTLLWXSIFLGALYKDGWSLWYSEYRFPEELPQTFMSCNFIPGMFQRLAQLRKNAFASVILFGTHNNSSIFGVWVFRGQELAFPLSPDWQVGFESYTWRKLDSGNEETQTLVRKYFFWEGAFQHVGKAFHQGKIFK

SEQ ID NO: 940634 - protein, 83 aa, Homo sapiens
QKKQLSARGKAPGLQGLSFFFQTQIPKKVALDLESGGGVQESRSSTPGSKVKNQLVGWTSIKLKVQPKRGPPGSPPIRGKAVF

SEQ ID NO: 940635 - protein, 153 aa, Homo sapiens
GPHIVFGVPPPHFGPQECLFPTKPGGGLWFSFYPGSPGEGGPLPPPFFFFWAREKLNPPGFSWVIFFGGFGGGGNPNGIWGGGDPFGFPPLGVGAGGGGPPFFPKFPRGFFWGGGAGGFLKGFLKERAGVGNFWAPLSPPGGGTPPPPPFFFF

SEQ ID NO: 940636 - protein, 126 aa, Homo sapiens
GERKVAQTMFPGSSLPLARLPYSLLWEEVISLPCPSLFLASRFHCFIRRGQVKSESFSLLRKKSKAFQKWLLPPWESLGQKQGQSICVLISKQNIYGSSSFMLGSVLRGKWLYWISQLCCPCFAAC

SEQ ID NO: 940637 - protein, 147 aa, Homo sapiens
GWAWIFLSPRGPGPGGGGDPPPSGAPPGGVPRGGARGAPSPPRGPLSLGKPVFRKPKVSAGGVPPRGGGSPPPKSFPRGGVLGGGGPPLSFWFGGPPPPPWGGAPFFPGGPPPLGGPRAFFPPPPPPPLGFFFFLGGGGGFIKGFFS

SEQ ID NO: 940638 - protein, 73 aa, Homo sapiens
  misc_feature (13)..(13): Xaa can be any naturally occurring amino acid
  misc_feature (57)..(57): Xaa can be any naturally occurring amino acid
PSPMGEEWVGLFXNRGGGGCSPKFVPPRRAPGCVFGAGGVLSPRVAPPFSPKGGALXGVSPQGGGCGGGGCFS

SEQ ID NO: 940639 - protein, 108 aa, Homo sapiens
KREARKPNFYPLPPSRGNYPKKRVALPWLVKGFFSQQFPVGWGDNGGPGKNSKTPPPGLDSGGFFFFLKKFPVAKKRGARGKFFFFSVREGGLATPKKKKTFSFFPGK

SEQ ID NO: 940640 - protein, 73 aa, Homo sapiens
TSFKFGLSGSETAIFWKRISGKSERSSSGLVEWESKNDALETLGFLNHYQMKNPNGPNPYPLKLCFSPGQPPS

SEQ ID NO: 940641 - protein, 116 aa, Homo sapiens
LDGQWHSLTSLQPSFQDITYPCKNSIAYMDQASGNVKKALKLMGSNEGEFKAEGNSKFPYTVLEDGCTKPTGEWSKTVFEYRTRKAVRLPIVDIAPYDIGGPDQEFGVDVGPVCFL

SEQ ID NO: 940642 - protein, 110 aa, Homo sapiens
  misc_feature (25)..(25): Xaa can be any naturally occurring amino acid
RKVYGMAFRVPNAKVVMVHLTCRLXKLAKYDDFKKVVKQGWEGPLKGILGYIEHQVVSFDFKRDTHSSPFEVGGGIALNDHFVKFIFWYDNEFGYSNRVVDLMAHMAFKE

SEQ ID NO: 940643 - protein, 198 aa, Homo sapiens
ATPKWPPHPRSPQRVDLFWPLGPTLSASKAKKEKEAGPGAPFLETVPHTGNKKDVRGFPAPATPPPCFRAPMGPFLKKKKKPFGPALISFIWGGGPSLGGPPPPPGPFHCFPFPGPIKVFVLSKGGSPPAPPPQHFSKGPGVRGRAKVPRGVSQGVGGGPPPRGRLLSRGFVFPVCLRVGFFFWPPPKFFPKKISKAP

SEQ ID NO: 940644 - protein, 119 aa, Homo sapiens
  misc_feature (27)..(27): Xaa can be any naturally occurring amino acid
ILGTHLGEVASILSNEEFKTYNYPKYXAEALLSHAPRLDRDGADLLTKLLQFEGRNRISAEDAMKHPFFLSLGERIHKLPDTTSIFALKEIQLQKEASLRFLSMPDSGRPAFRVVDPEF

SEQ ID NO: 940645 - protein, 82 aa, Homo sapiens
LGVFILLTVEISVRIVSPAQSKGDNAFRQHPSWHNKATQKCPSSVHDKCFPMNIGFMCPTGSASGGNIIQPLMTKVQNYILT

SEQ ID NO: 940646 - protein, 107 aa, Homo sapiens
  misc_feature (37)..(37): Xaa can be any naturally occurring amino acid
  misc_feature (60)..(60): Xaa can be any naturally occurring amino acid
  misc_feature (64)..(64): Xaa can be any naturally occurring amino acid
  misc_feature (98)..(98): Xaa can be any naturally occurring amino acid
  misc_feature (100)..(100): Xaa can be any naturally occurring amino acid
  misc_feature (107)..(107): Xaa can be any naturally occurring amino acid
CLLEGGLGSLLWLTSACVVTAKHQAPSLPVTWPGLTXTPSPGTLLASRWVFKKLCLPHSXVQKXGPEGFKCGEAAEAPRKATVGFPFFPAPLCVLKIXNXNPTFIIX

SEQ ID NO: 940647 - protein, 107 aa, Homo sapiens
MSEFMGLIQGHYEAKQGGFLPGGEESTSTMTPHGPDADCFEKASKVKLAPERIADGTMAFMFESSLSLAVTKWGLKASRCLDENYHKCWEPLKSHFTPNSRNPAEPN

SEQ ID NO: 940648 - protein, 102 aa, Homo sapiens
  misc_feature (53)..(53): Xaa can be any naturally occurring amino acid
PKNLFLYNFGGGIYFFPHNFLGGLSERPGGIGVPEGNPPRKHLFFWEGHSFLXQQVKINNFHDLKSLRFEGKSPNSRRTPHKPGGVIWMPPPPPPHLKNPYT

SEQ ID NO: 940649 - protein, 86 aa, Homo sapiens
ASHRGDAGFQMRVGCSWGPVGQAVVKLGPDGGFGCWEDTGCGGFSPALDLRTPLFFRQGEGDEGLQRRLAPPFKNASFVYKALKKQ

SEQ ID NO: 940650 - protein, 95 aa, Homo sapiens
  misc_feature (41)..(41): Xaa can be any naturally occurring amino acid
  misc_feature (67)..(67): Xaa can be any naturally occurring amino acid
TKIRGVRRALIQVPGYQFDFPRGNQYGLPWVYAEHPGDGLXLRATGPWGSKMRLLEKGFSHPVGGFXGVPLGGQERIPAFLGWFPLGFLTRQPGG

SEQ ID NO: 940651 - protein, 132 aa, Homo sapiens
IGKPFRPGVHLFPPLLEELALNELVTLTCLARGFSPKDVLVRWLQGSQELPREKFLIWASRQEPSQGPPPFVVTSILGVATKDWKKGDPFSCMVGHGALPLAFTQKTIDRLGGKPPHVNVFVFMGEVGGPCF

SEQ ID NO: 940652 - protein, 189 aa, Homo sapiens
LQRWISEERRRHLRPSASPYSEVNIRWVGLASLHSRLLPAGKGSALYSLEVSHQPCRHPSRQLAQLLNPRRSRAARTRPPPLQDFSSILHRKFFFPADLAPHGLFKKRLPDCTDDVKHGQSVTLVGFSELAERQSELQQQTSELPSILSAQTDLLIGFDSSVASQIQSFSHGPKPPIKAISTELFVHRL

SEQ ID NO: 940653 - protein, 104 aa, Homo sapiens
PPAFLQGLGPSPGTFSPGGSRDQGDRSQANITTATVLIRSPMQRNLVVIPKSVTPERIAENFKVFDFELSSQDMTPLLSYNRNWRVCALLSWTSPKDYPFHEEF

SEQ ID NO: 940654 - protein, 33 aa, Homo sapiens
MHFVLPCNSFYAYSYYSTPVVHFAACQNKLKFP

SEQ ID NO: 940655 - protein, 68 aa, Homo sapiens
  misc_feature (45)..(45): Xaa can be any naturally occurring amino acid
  misc_feature (53)..(53): Xaa can be any naturally occurring amino acid
RSKPNPLLKWLKKPEQNPSGAKEKDQDKNIEVVYSKAASVPKVEXVKSDNKDXAIDIDAIERDGCHLA

SEQ ID NO: 940656 - protein, 113 aa, Homo sapiens
GVFFKMEANFKNLSRGLVKVAAKLTPNKNVRDLFVALCGKVCGTLPLRPLAIKGGGVFPESDIKGLSTPSMASDTRPFGTAKWAPSGVASWACLMIEVPPNAPPTLTIKLLWV

SEQ ID NO: 940657 - protein, 91 aa, Homo sapiens
TNISYHTLYIDFESCHERIFAIDSRQFFSTLAHLRYVCTIFSLHTLPAHQSPHYWQQVASESHKSGPLLQAPYRCTIYSGINLLSYLRGFG

SEQ ID NO: 940658 - protein, 116 aa, Homo sapiens
GPSGLWDILSSTLSLDQFVRVPVNIVYTMPSIYKYTQMYTQMYTWSSPSFANLHLHPSLGPCWVWLKRSSSNPAFVPFPTHCLSLLSRPGTLGAPVCGPLSPRHSPPPMDFRVHYQ

SEQ ID NO: 940659 - protein, 110 aa, Homo sapiens
  misc_feature (71)..(71): Xaa can be any naturally occurring amino acid
  misc_feature (103)..(103): Xaa can be any naturally occurring amino acid
NNPKLFFGSGDRGGERIKFIGDRPEGGARRKPKFLFVSHGGGNGEKKVLHKSGHSMPKQNVVPTVLALGKXVNMNVLTTLSLGARPPVFHEKDYDSLGQPGFXDRLIRWI

SEQ ID NO: 940660 - protein, 138 aa, Homo sapiens
RGPHMVLRGLDTLFLLEEVSGGSLRAPVSFIWGVFFPFYHPPSGGEHVGGPPVSGGSLRGLGGNKKGAPPPPNLVPGGPGQIFVGTHGNPAFFGPHFNGRGGMVWFFGGGPPSPTLLFGGETKFFFFFWGGGHLKGFF

SEQ ID NO: 940661 - protein, 84 aa, Homo sapiens
KRTVLGWAPTWSPDAPPTWTKATLLPTPVVAGGAEQRALGSSDCGPPFSFLGVDHPPSHWAPPNTVSCPPGPGSRKTRLPSFPA

SEQ ID NO: 940662 - protein, 133 aa, Homo sapiens
VFKENTGPLSSSPSGGPPYLDMVIAEPLGMSPPAFRFTRKAVQDCEVLGQGIPAGAVLKMAVGALHHDPEHWPSPETFNPERFTVEARQQHRPFKYLPFGAGPRNCLGVGLGLLEVKLTLLHVLPKFRFQACP

SEQ ID NO: 940663 - protein, 184 aa, Homo sapiens
CPELNFDGEDGTKSCHLLCTAEPQLALVIRSRGINGVAPKVRKVSQLLRLRQSLNGTFVKLNQASINMLRIVEPYIAWGSPNLKSVNELISQRGYGQIHKKRIALTDNALIARSLGKYGIICMEDLIHEIYTVGKRFKEAKNFLWPFKLFSPRGGMKKKPPPFVEGGDAGNREDQIHRLIRRMN

SEQ ID NO: 940664 - protein, 199 aa, Homo sapiens
  misc_feature (1)..(1): Xaa can be any naturally occurring amino acid
XFRSVRRGRRLFFLLFTPHPRSVCFNPPPPLGGERGFLPAPPGCWGGWVFLLQRALIFFCPLWPPLGGEKPSPLFFSPPPLPPKAGVSSLFFFFFKKKPGGGGGGFFLFSPPFWGPGGGVSRGWGFAPFWVSRGTPLFFLKNPKFFGGGGAGLFFPLFWGGGGGKGVPPGGGGFLFPRFWGPPPPGGGGGAPLFQNLFF

SEQ ID NO: 940665 - protein, 67 aa, Homo sapiens
MATVMAATAAERAVLEEEFRWLLTNRGTLCGNNWRTFLREAFLRLILPGSGTEGPAKQENFILGSCG

SEQ ID NO: 940666 - protein, 124 aa, Homo sapiens
  misc_feature (56)..(56): Xaa can be any naturally occurring amino acid
  misc_feature (86)..(86): Xaa can be any naturally occurring amino acid
TPAKVATVINNGSPTILGKRSYEQHNGVDGLANHGQTRHMGPSRNLLLNGKFLPHXKCALIPGGTPCPQVQADGGLNWDRRPRDDXVLHGTTERDQRRSDKTALHTSRNQKRCWPDRAIQKPIR

SEQ ID NO: 940667 - protein, 47 aa, Homo sapiens
TRGPSISAVLDVDGDMSSNRSSLTLDERLYDEFIRLGGLADGYREST

SEQ ID NO: 940668 - protein, 129 aa, Homo sapiens
  misc_feature (9)..(9): Xaa can be any naturally occurring amino acid
  misc_feature (57)..(57): Xaa can be any naturally occurring amino acid
  misc_feature (64)..(64): Xaa can be any naturally occurring amino acid
  misc_feature (67)..(67): Xaa can be any naturally occurring amino acid
PPKTPGGFXGALRARGPNPHCVGAHTRPLFVNAVAFFQGLGAPHDPALEGPPPRGPXGPRGGAXGPXRPRGSGPACTQGFPAVVKGGASSVFAVLNPPPLGVGHGMWVVFSFGGGCREGGLGWPIKKAP

SEQ ID NO: 940669 - protein, 103 aa, Homo sapiens
FFSPGVGHGEGRTFSQGKPPPLWVMVCERGQEWGPSPPKQPGPFGRPVKWLWGLGGAWGSLCRGLFRHPQPRGGGSGFQFFCFSAAISGAPEGARDNKMFFRK

SEQ ID NO: 940670 - protein, 37 aa, Homo sapiens
MGLPFCRGPFFLGQRSPPPAFPNSLGVPFNPVPPPPP

SEQ ID NO: 940671 - protein, 174 aa, Homo sapiens
  misc_feature (44)..(44): Xaa can be any naturally occurring amino acid
  misc_feature (69)..(69): Xaa can be any naturally occurring amino acid
MRNTFGQVLERGVKLPDLHQRLAPLLDISSTFHKTTQTLAQKKXWENIRSRICVGLVVVGVPLIILIVXLVVFPPQSSDTSSAPRTQDAGIASGPGKLTPLVLKEKPNGCIGRFWFPEDPGVCSPLTPPSECQRAAPTCAPLLFLSCPRLALEGTPLYWPCWAPPPWSSVKTAV

SEQ ID NO: 940672 - protein, 97 aa, Homo sapiens
KREKHVAPPVAYFYISFSRWPKGTGFPPTPEVPVNRPGRNGCFYMEDPLPGKTGEEIFGPIGMGPHAKNNRDLGFPLDLDFKGQLGELSCSPDYRMG

SEQ ID NO: 940673 - protein, 117 aa, Homo sapiens
QIHLNCNSQRRRWGLVGNDWIMGAVFHAFHGGSFSCFTTIPLGAIVLKVSFHMIGLFKRLGHPFCFFGPAPAMENTGSRFAVPHDCVFPKASPKKQKLLCFLYSLQNHEPIKPVLKS

SEQ ID NO: 940674 - protein, 104 aa, Homo sapiens
  misc_feature (71)..(71): Xaa can be any naturally occurring amino acid
FESFWFAVAGAPSPFFPLKNPGPPASGSCLAPGGFHFPRARFLLWAFLGAHLSKLFKNGVGSVRIFRVCLXPGAGGPSPIKANRVSPPPPSGGGGSPRFLDPHF

SEQ ID NO: 940675 - protein, 96 aa, Homo sapiens
GEKGALSPPGVHQKIFKIGPGAPFKGGEVVKNKAPPGFFPFSQRPHPLGGFGPYGEGAQNFFLFKGWGGGTQKGGVPPPQALLGAKKRGGLGKIFP

SEQ ID NO: 940676 - protein, 102 aa, Homo sapiens
DMGPGQALCVGSFSTIPPLGCFSVCFLTHPFRGGFSKPWAKRVVGLGRAPSLPQKPQRVNLFFPLNPPPPFFSGGGGRVPNRFFPLAPLVLGVSRVIIPKPW

SEQ ID NO: 940677 - protein, 228 aa, Homo sapiens
  misc_feature (52)..(52): Xaa can be any naturally occurring amino acid
  misc_feature (66)..(66): Xaa can be any naturally occurring amino acid
GAPPPPPFFPPRASSWWGQKGAVDSPILGGCLPTQKKKLDLGRFAPSPPPPXRAVVCYKKIGLARXPLQARGNGAPPCPFLGGPPGPFTPLPGGVFSRLSFLGGAPPQGGLGPFSAPFGLLGGGPPPPLPPGARGGAPPFFVPPPPGAGPQSGLFFFPPPPGPPRGGGNPPGGPPPREIFFFPPPPPGAFSGGGGRAPGGRGGPPPLGGGGGPLFSKGAGEKKTGFFF

SEQ ID NO: 940678 - protein, 167 aa, Homo sapiens
APAKNLQSARGKLRASITPGTILFILPGRHRGKRVVFLKQLGSGLLLGAGPLVLNRVPLRRTPQKFVFAPSTKMDISNGKIPKPFFDAFFKKKKLRKPRPQEGGFFAPEKEKFGISGQGKIGQKAGGSPIFPKNQRFSSAPGVPAIWVCFDEWDFSPQIGVLNVLRP

SEQ ID NO: 940679 - protein, 215 aa, Homo sapiens
  misc_feature (92)..(92): Xaa can be any naturally occurring amino acid
  misc_feature (151)..(151): Xaa can be any naturally occurring amino acid
  misc_feature (159)..(159): Xaa can be any naturally occurring amino acid
MRSPPGFFFPGSSKPFLGPFCGFRPNIGGAKITGPFNRHPFPPLGFACRVPAISLGRGHLGLEKPSLFLFLGAHPPPRLFGDSPCFPKNQEXTQIGFGPRGALPLGGKGGGDPLPGFFHPPGSPPPLFFGFFKKAPPAPGGIFPVPPMGVXPGAPPGWXWEGFPPRKKGLKKSPFFKGTILPPPGAPVKKTPPLVFLGFPVFFFPPKKKKSRGFF

SEQ ID NO: 940680 - protein, 135 aa, Homo sapiens
GGLFPPSFQNWVWRGRFSAPPGPFPLTWNAFCLFGLPPAPGPKTPGATVFPACPGQALPPNLFFSRGRLGGGGPPFPPNCPLPPPSSQPRVFLKPPPPPGPLGGWVPPFLLGPGKGGVFFRAGGVFPLKKPPAPL

SEQ ID NO: 940681 - protein, 109 aa, Homo sapiens [sequence omitted]

SEQ ID NO: 940682 - protein, 159 aa, Homo sapiens
  misc_feature (30)..(30): Xaa can be any naturally occurring amino acid
  misc_feature (34)..(34): Xaa can be any naturally occurring amino acid
  misc_feature (44)..(44): Xaa can be any naturally occurring amino acid
SESGASGSSFEELDLEGEGPWGVTAGPWKXSFGXGAPPPPLGDXPSGSGSPLPLRRARSNPWPAPSCSAVAEELSRLSSRLSNPLPPSSGGGGVPEGPDFPCSRPLAKPSPHCPLGSQGQRSQGLFSAPAPRAAAPVVSFFQTHSGASRTQNKANDLLV

SEQ ID NO: 940683 - protein, 181 aa, Homo sapiens
DRFKNRLEQIVLHLQRRLIDDQTRADVHDVFDLDQIVRAQRAAAAHQIDDGIRQTDQRRQFHRAVQLDQVDVDALGGKMFARGVHILGRHLQARATAHRLFVVEAAGHRDAQPAARDVQVDGLVQPGTAMFQQHVLAGDAQIGGAVLHIGRRIGRAHYDQAHVRPVGADDELARRLRVVGR

SEQ ID NO: 940684 - protein, 70 aa, Homo sapiens
LTIMAEGKRHVSHGGRQEKRACAGKVPFLKPSDLMRLIHYHENSMGKTRPHDLSPIGFLPQHMGTMGATR

SEQ ID NO: 940685 - protein, 210 aa, Homo sapiens
  misc_feature (15)..(15): Xaa can be any naturally occurring amino acid
  misc_feature (98)..(99): Xaa can be any naturally occurring amino acid
  misc_feature (103)..(103): Xaa can be any naturally occurring amino acid
  misc_feature (140)..(140): Xaa can be any naturally occurring amino acid
  misc_feature (190)..(190): Xaa can be any naturally occurring amino acid
EKFSGAGHILENTKXVGMTRNGMQRYALPFNFSLLARMRAVHERLQLLYWKHRLQHKKKLKKSCTRGSGVSDLLSQRLGSQSFFFGDAPASLDAFVFXXLALXLQAKLPSGKLQATCVGCTTSVPIVPTFSVFTSPGMEXRYPRNARHQQAQRFEEEPYRRRNQILFVLAGMATMVGYALFSGIVSIQRXNLVGAPGTRTLGMVEEDEKE

SEQ ID NO: 940686 - protein, 87 aa, Homo sapiens
GGPPPLFFFINGLLKGGAPCKFFPPRALEGGPGVGAPGGVFFPPPPLPPSKQCKFDFGGVGPFAFLKWWEARGPPFRPLGVFPSGAQ

SEQ ID NO: 940687 - protein, 54 aa, Homo sapiens
  misc_feature (16)..(16): Xaa can be any naturally occurring amino acid
  misc_feature (23)..(23): Xaa can be any naturally occurring amino acid
VRQWPWEFITIVSLLXLLAEMEXKKISGPRIKSGRDSWLVPAWVQVWQKLADAS

SEQ ID NO: 940688 - protein, 114 aa, Homo sapiens
  misc_feature (33)..(33): Xaa can be any naturally occurring amino acid
KIGKIFGAGVPLLPPPWKELPLKKLVTFKCLAXGLTPKKGLVFWLKGLKKLPRKKYFFWVFRGEPSRGPPPFFLTRILGVAPKDLKKGDPFFWMGGPRALPVGFLKKTIGRLGG

SEQ ID NO: 940689 - protein, 138 aa, Homo sapiens
  misc_feature (70)..(70): Xaa can be any naturally occurring amino acid
  misc_feature (78)..(78): Xaa can be any naturally occurring amino acid
RPLLASLNYRLTPHSAPHSRRSAPPSCGHPTPPRGSPGPPPVLGTIPPNNPSGGCSPPRRRPTGSLSLSXRVERGGPXGPPKPPEFPSRPSKNWGPLGDPPVGGGAPPSPPPGFWGFGGGPPPLRGEPPPPQGFFPWF

SEQ ID NO: 940690 - protein, 101 aa, Homo sapiens
PPLFFPKFPFWGGGVPKKILKRGFFPPPKTQPGDLPILGLKVFAPFPPKKPKKGPPIFMGTPGIFFAAQFFPGGGPPFFYCKGPGAPLFFGYPFPPPKKGN

SEQ ID NO: 940691 - protein, 156 aa, Homo sapiens
  misc_feature (111)..(111): Xaa can be any naturally occurring amino acid
GDPGFTLIGGGLQEKCPLLQASPQGFAQDVGGMFKQFNKLIGGKAKGQSIMGLQGFFKRGMNEAFGDPKFFVGVVEPPPISLPGVGLSSQEMFGGPGDGPLGWSPHGKPSXVLFFVRSPHPPSPGGLIPPPGGPPPPVPPEMVFIFGGLIKTSPVP

SEQ ID NO: 940692 - protein, 138 aa, Homo sapiens
ALVSPFLPVWGRWDPYRTDIGPQPAPSSYSISGLEGGPAIVQKSAAAPVSLHPALAHQVLGACGSKIGGERPRDVRESQRQRQRERERDTERGRERASERAAAAGRGPLPFCWGMLTERDLCFCFFSKKISSSTHVCG

SEQ ID NO: 940693 - protein, 113 aa, Homo sapiens
  misc_feature (110)..(110): Xaa can be any naturally occurring amino acid
APRPPTTPPQLVQRPPRNHVYGAPRLLAPNNKQAGTPDPLSSRCSPFHFLEGRAVAAYAVRQPPTPSGPMNSWLGIVPLHTLITSSTHHLESQGGGIPTPAQPCWCEDWXAPG

SEQ ID NO: 940694 - protein, 75 aa, Homo sapiens
PGLRAFLGPVARFPKLVASSWGRRFWRNPWQLRFRRLEFLCSGDVAGVCLTVEARNCNSEIHCYVAASTFNIGPP

SEQ ID NO: 940695 - protein, 126 aa, Homo sapiens
SPSCQSVTPQGRPPNARKFLGASPGTPNPGIPRGGPFPPLFPPPKPQPFAPAPPRMFFLLLGPGPLLFGPKGAPSPPPWALWKGFFGQAPLFQRGARVWGSLFFFFFGGPLGPRLGGGRWGLRGGL

SEQ ID NO: 940696 - protein, 76 aa, Homo sapiens
MYNKNFNNCIYAFADFPLKIITCVFDSQYSIWYQFTSLLIHVTRIVSQTENMYSSIKIWPNKCSVSTLINGYSLKK

SEQ ID NO: 940697 - protein, 164 aa, Homo sapiens
  misc_feature (16)..(16): Xaa can be any naturally occurring amino acid
LKVPGVPGPEFVRKLXDKGAKSYIRSRPQTPRKDFIQLFPGASPQVGALLEKMLGLKVDKGLRAGGALPHPFFEPFRGPGEKRGAHHPFDVSLEPEKLPGDEWKRPFSKGFVNFSPLCREGLRGPGGDKVVGIFFGGPPGPDPAQGPVFVPPKLSPFWKTPFQA

SEQ ID NO: 940698 - protein, 111 aa, Homo sapiens
  misc_feature (79)..(79): Xaa can be any naturally occurring amino acid
HQHPAQEPAKRGARGIKIRGSPRLLIEHPPPINAQQLERGTKLRRQTHSCLPTSGKSDRLKNRRDETLQRKRGIMSSNXSSARQWNVVQGRHVLHRCSMRDISQTIQSPSS

SEQ ID NO: 940699 - protein, 151 aa, Homo sapiens
  misc_feature (15)..(15): Xaa can be any naturally occurring amino acid
GPPKPQVLSLLPFPXGDFPKTRSPFSSLGKGFFSPPLPLGWGGIGGPGKNSKTPPPGWGSGGPFFFFKNPPGGKKGGARGGFFFFPFLVWGLAPPPPRKGLSFFPGFLVGGGAPPPPPGFLGGGGVFWGAPLFIFFRGPGGGFWPPPPPWG

SEQ ID NO: 940700 - protein, 105 aa, Homo sapiens
  misc_feature (8)..(8): Xaa can be any naturally occurring amino acid
LRGPGGFXKVSPLGALLIVAHPFKGGSASPPPLPSLSLDFRDLVGLPLTLCSCYKVKCPSGRERAPRVSSVRGHGQTPQSLHPPLLPTPPPFGGLFLKSKVFRGS

SEQ ID NO: 940701 - protein, 139 aa, Homo sapiens
HIKEGAPYLLPYQRDGKLMSQVPGAGLLTGLVFFLDVRNIILGKSHYVLYGLVAPMQPQMLVTFNKELRPLPVSVRVGQAVNVVGQVGNPKIITGFQRHTTPVLLAHGEREKLAPKEFFPVPPILEGFVILGKTPNYDF

SEQ ID NO: 940702 - protein, 102 aa, Homo sapiens
RVFFPPPPPARGGGGILGPPFPPPPPPGGVNPTPPPPPPRGGFFFFPPGAPGLPKGPGGPGGVLNSLPGFKPPPRGHTPGFFLSPGPFFPFFFFVFFFFFSV

SEQ ID NO: 940703 - protein, 107 aa, Homo sapiens
  misc_feature (85)..(85): Xaa can be any naturally occurring amino acid
  misc_feature (90)..(90): Xaa can be any naturally occurring amino acid
WCAYFVPNPPAPCIVGVQIPLFPGRAGGALWFSLIRGPPPGEVVPLPRSPPGVFPGWWAPVPPFSPVFLGQGEGAVPFRAPGVFXKGDEXGPWGPPVFFWVGGAPPH

SEQ ID NO: 940704 - protein, 141 aa, Homo sapiens
  misc_feature (51)..(51): Xaa can be any naturally occurring amino acid
GQWAAGQGGFPPVFFPPPLAKKTRVKCPPGPPRVIFPPPKNWVGLGGGGGXISQPLFWGGGGGPPIFAKKELFAPGRGGGPYLLGGPLFGGGPPPPLGGPPPSPEGPPLAPKGVFFFPPRLGFSGGPPFCRGKKTLFWGPL

SEQ ID NO: 940705 - protein, 155 aa, Homo sapiens
  misc_feature (49)..(49): Xaa can be any naturally occurring amino acid
  misc_feature (79)..(79): Xaa can be any naturally occurring amino acid
CPSCGGQLGGGHQVIKPGWKAPGPLMFSSNDKVIKKIIAKTSSGGVAAXNVIVHIPLHFLPFGGVGKKGMGSSHGKKRXEIFFPPRFCLVRPFMNNKGLKVKSPPSPAQISPALRRGCSAWPGQIGSHGGGAPPHGFFGPWENGSCSPSPAPFFC

SEQ ID NO: 940706 - protein, 43 aa, Homo sapiens
RPRAPAFTFGARFPTQQTTDIPGPGDLVPARMTVRGTDGAPAY

SEQ ID NO: 940707 - protein, 192 aa, Homo sapiens
  misc_feature (111)..(112): Xaa can be any naturally occurring amino acid
  misc_feature (124)..(124): Xaa can be any naturally occurring amino acid
  misc_feature (132)..(132): Xaa can be any naturally occurring amino acid
  misc_feature (152)..(152): Xaa can be any naturally occurring amino acid
  misc_feature (172)..(172): Xaa can be any naturally occurring amino acid
GAVGALEGLAAGVQVHVAQQVVHAVHALPAHPASEWLHGRVYNHVGLESLLLYKGLEADVALVGPDAGVDQHVPLHVRLEGELPATHLALELLHALVAPPALPSVVNLAEXXAAFSAHEGSQVXVVEHVVLXLAAVVEGLVTLEALVEGGAXVGKIESLYFLLGLEKIQAAXDADMAAATLMLHFVGLELAG

SEQ ID NO: 940708 - protein, 161 aa, Homo sapiens
  misc_feature (108)..(108): Xaa can be any naturally occurring amino acid
  misc_feature (118)..(118): Xaa can be any naturally occurring amino acid
  misc_feature (120)..(120): Xaa can be any naturally occurring amino acid
  misc_feature (124)..(124): Xaa can be any naturally occurring amino acid
VVGGICGQGRGVQARFVRDRAHGQAARHGGTVAGVVHHLFVGLEVHFVGLVVVVAVVVLLLRGHEVVDGERVVEGVVVFRLQVGLRRQARVVGRAQQVGRGLLLLPGXGRRLWGAQRXSXRPLXLSRKKNKAKLVMGRARVRRLGARRSLGGRPGGLPELS

SEQ ID NO: 940709 - protein, 265 aa, Homo sapiens
PTDTLRAPADTTVTGCPEDRQQIAVRAGPTNIVPTQVRTGASPLTGKNRCVTKTPGKDSVTPAPPPALIEDALHLRDPPREEFWWPPRGDKHGTTPWRQHAHLRGGPHPPWHRDNACGSANPTFFFCLCGPLPQFSPFQRRHSGVLLDSPLASDPSLGVPPPRTPSGVSLLSVPPPPAAAVCLSVVAVLLRLPPPAEEVPPRAHSSRPPKDTPGWRACERGPAGQPSVARRTTALLVGYTYRDERKCSLPKEKERKGHNAPTMSE

SEQ ID NO: 940710 - protein, 142 aa, Homo sapiens
PPSCHEGHAVFQVPRLVKDRFAGRHFYWALTNEGIRYLRDYLHLPPEMGLPPYAVAVQRLAGLGLKVWRVSALRDSQEGKLTEIPPDGVLSPLVPPKKPRLGLGQHPNSSLEADLVVDGVTPPGKIGGDSFALNKLPAQNPL

SEQ ID NO: 940711 - protein, 152 aa, Homo sapiens
EENTSRILRMRWEEEGVEMSRAAYTGVTCFGLRTSLRYAIQLITVASLVCRKRKGTEVQVDDIKRVYSLFLDESRSTQYMKEYQDAFLFNELKGETMAPPELDVIPRPPPVFPQSSDPVTLYKMVGKLPPPWVWVVALSPQKDPARVRIEKP

SEQ ID NO: 940712 - protein, 140 aa, Homo sapiens
RAPPPPGSFLGGGGGGPSFFSTPQRGPPALASGFGGVCQFFLKPPAPNPPLWGGGPCAPSKFLGPGPHFKGGPPPPPGGFFFGGAGGGGAPPFFFPPPQRGDPPPGSGPWGGGFFFSPRAFPGPGGGFFFPFTLFPPFCF

SEQ ID NO: 940713 - protein, 108 aa, Homo sapiens
PPGAGGGPKAPGALLWGGARPALFFPAGGGPPGRGPPFFFPLSRGAPTGAGGFPFWVGGRSPLGVWALPPPGWAYGFFLARGFGPRGPPPPLSGGVPPPPLFFFLGGG

SEQ ID NO: 940714 - protein, 181 aa, Homo sapiens
CQSSSPRLWAASKKGSGVSLAGLKKALAAAGYDVEKTHSRIKLGLKSLVSKGTLVQTKGTGVFGSFKLNKKAASGEAKPKVKKGGGTKLKKPVGAAKKPKKAAGGAILKKSAKKPPKKGKKAGPGPLYTKKVVKSPKKAKVGKPKKAAKSVAKAVKPKAVKPKVVKPKKGGPKKKKGNAYF

SEQ ID NO: 940715 - protein, 112 aa, Homo sapiens
GDPFSPPPFGFPGSLGGRPFFPPVARPPWGKFPEVGRNIGVLKILPPPGGGGPQGKFFPPFFFNLRKTPPLSLEGAREIPKGGTPGGLSLFPAPPLLKPAPFFFPFEIPQGP

SEQ ID NO: 940716 - protein, 99 aa, Homo sapiens
ITPCPPGPPPGPPPGQPTKVQLPRRGLLMPPPHAPPPYPPQKGVNKPGGPPGGGQGPPLQPPPPPRGQFFKRGAGGISPPLGGQNPPKAPPFKRAPGQG

SEQ ID NO: 940717 - protein, 80 aa, Homo sapiens
CASFRSSSAPMCDEPDMAEIENSDKSQLEEDINAREIIRCLPKKRLHSRSEQANRNEACAANMHCTFHKHCLVILLLLAV

SEQ ID NO: 940718 - protein, 104 aa, Homo sapiens
MTAGPHRTSWEDWLCCWRRAGEGNGMLPLCQSLEVAVQVMVGAAPPAGRPGVYYHGALCLRFQAQHIAVAVLYLALQVYGVEVPAEVEAEKPWWQIYTMDTEIP

SEQ ID NO: 940719 - protein, 91 aa, Homo sapiens
PNNVRQPFVTPPRGLKMAVTFIGNSTAIQELFKRISEQFTAMFRRKAFLPWYTGEGMDEMEFPQAESNMNDLVFEYQQFQDAPAEEKEDFG

SEQ ID NO: 940720 - protein, 134 aa, Homo sapiens
MSKPPSLGQYYLPQYSKTRRVWYNTPPIHSQPPDKTHSLPLPWTIPMRHNYNKLHLPTTNRPKIGHWILFNQPHSPCSNSHFHPNPLKVHRGSHFHNRPRGYILITILPSKLKLRTHSQLHHNPLSRASNSLPP

SEQ ID NO: 940721 - protein, 169 aa, Homo sapiens
MRPLVEFDKNKLISVQDGISRGSYKKEKFEDRSPTAECLSEKETQELMACIKNVLGSRVTNVKVTLRLDTHPAMVTVLKMGVARHFLRMQQLAKTQKERAQLLQPTLEINPRHALIKKLNQLRASEPGLAQLLVDQIYENPMIAAGLVDAPRAMVGRLNELLVKALERH

SEQ ID NO: 940722 - protein, 108 aa, Homo sapiens
TVPKTEIREKLAQMDQTPPDVIFVFGFRTPFGGGQTTGFGMIYDSLGYAKKKNPNIALPDMACIKKKRPPESHERDARTELKKSGGLPRPMLGLAKKSELEIGSPPKE

SEQ ID NO: 940723 - protein, 94 aa, Homo sapiens
  misc_feature (58)..(58): Xaa can be any naturally occurring amino acid
TFFGGLFIILLWRTLKYLWTVCCPCGGKTKAPPFGSPGNSPNSAELERESALGPGFDXEGFPWRSRGVNVVGFNYFWGKRPPALRLATPSMYGC

SEQ ID NO: 940724 - protein, 68 aa, Homo sapiens
  misc_feature (60)..(60): Xaa can be any naturally occurring amino acid
MKKRGTLLLSGGPRGPCRWPSTQKTIDRLAGKPTHVNVSVVMAEVDGTCYEAARLFPTLXKTPVSPKQ

SEQ ID NO: 940725 - protein, 104 aa, Homo sapiens
  misc_feature (78)..(78): Xaa can be any naturally occurring amino acid
  misc_feature (85)..(86): Xaa can be any naturally occurring amino acid
  misc_feature (91)..(92): Xaa can be any naturally occurring amino acid
  misc_feature (99)..(99): Xaa can be any naturally occurring amino acid
  misc_feature (104)..(104): Xaa can be any naturally occurring amino acid
ATQALEKYNIEKDIAAHIKKEFDKKYNPTWHCIVGRNFGSYVTHETKHFIYFYLAKWPFFCSNLVKSMDCATHPCILXKTGMQPXXPKTRXXFSTLLKXTLQVX

SEQ ID NO: 940726 - protein, 33 aa, Homo sapiens
MGNGSVIGKETETVTESESENEIRNESESGTER

SEQ ID NO: 940727 - protein, 67 aa, Homo sapiens
EHPQHTEHIVDDCSECKTDRPGRQHLDVKDVRQQQKRAGIDNRGDRSHHEIPEHLQEPVLCAVDHQS

SEQ ID NO: 940728 - protein, 98 aa, Homo sapiens
PGGEGFPMTLVESFRVGTPSVVTNSLGIADDCIQYGAAEVTDGSASSMADAVIRILTDKQHAQALVRNALSYLSKMKTLWPWDAKCRAIASPMPLAPP

SEQ ID NO: 940729 - protein, 37 aa, Homo sapiens
RSRVPLAASSFLKFMITSNTLKMGSRISWQKVRGGTE

SEQ ID NO: 940730 - protein, 69 aa, Homo sapiens
SPGVEPRFFLVSHAEDLPLGTSKPEARSPQSPAAPRCIKGVPHSESTSISSSLTLRMGGCPFFSFRGIY

SEQ ID NO: 940731 - protein, 43 aa, Homo sapiens
AHLQWGAKRGIISAPSADAAMFAMGVNHEKSDNSLKIVSHASL

SEQ ID NO: 940732 - protein, 102 aa, Homo sapiens
SLPRPRLKKTNEPGAVAHACNPSTLGGRGGRITSQEIKTILANMVKPPSLLKTHHAWLIFVFLVETGFHHVGQAGLQFPTSGDPPSSASESAVLQPGRRRLR

SEQ ID NO: 940733 - protein, 94 aa, Homo sapiens
  misc_feature (2)..(2): Xaa can be any naturally occurring amino acid
MXVDPKHHRHFVIRRGQVLREIAEEYGGVMVSFPRFGTQSDKVTLKGAKDCVEAAKKRIQEIIEDLVGTWVFGEGFSPPSGHSPKPCMSVRSPL

SEQ ID NO: 940734 - protein, 47 aa, Homo sapiens
  misc_feature (15)..(15): Xaa can be any naturally occurring amino acid
  misc_feature (32)..(32): Xaa can be any naturally occurring amino acid
QAATKYTDGGPGGKXHTIPARSTHLKTPASGXQTPTSTPAPGFATRT

SEQ ID NO: 940735 - protein, 122 aa, Homo sapiens
  misc_feature (11)..(11): Xaa can be any naturally occurring amino acid
WPPEYLASGGXIFTSSYFPPFFLEPGDLGFLEVANGVVFPFEAPFCLIITSQGVWHSWGVPPLGLKTDAIPGGFNQTLFPANRPGVYSGQCFEIWGANPSFMPLVLELIPLKIFEMGAVFTL

SEQ ID NO: 940736 - protein, 121 aa, Homo sapiens
LGKVMRMLGYNTTPEEVQKMINQVHEARSGAVDFDEFLVMMVWCMKDDSKGKFKEELFDFFRMFDKNGDGYIDLDELKIMLQGTGETISEDDIEEFMKDGDKNIAGRIDYDKFLEFMKGVE

SEQ ID NO: 940737 - protein, 88 aa, Homo sapiens
  misc_feature (34)..(34): Xaa can be any naturally occurring amino acid
  misc_feature (37)..(37): Xaa can be any naturally occurring amino acid
PARGETPKNPIKKGLLSPGGGFVLIKRASDSEGXWGXSFYHTPTFFGPKLWGFFKKGKSKKEPLGFLVWEKLGFKFFHFGKNHGGGFC

SEQ ID NO: 940738 - protein, 106 aa, Homo sapiens
IGEGTRVGTPVLAASSIRASVYPLVKQTPQFVSSFVGVCVPLRTGYCFPRGPVGFWVPTFSPNWGSRGSRPGRRGATGHSWLCLGPCTAPQPVAPPPVPKEYGPPE

SEQ ID NO: 940739 - protein, 76 aa, Homo sapiens
ASHYLHFLGVPWTHTTHQETKEHLSSHSHSQTCPCCTPHHGQPRSLWVTAKQLPPRFSVLTTSTRGPNKDVKPEKK

SEQ ID NO: 940740 - protein, 122 aa, Homo sapiens
  misc_feature (68)..(68): Xaa can be any naturally occurring amino acid
  misc_feature (81)..(81): Xaa can be any naturally occurring amino acid
FPIPASPLPPFRRGVAPNRFLPVYSPRSPIPKHIRIFRIRGIIPLGSPLFNRNPPNPNNSSPAFSNFXGFFFSPPTTLRGXGVSLPHFRGHLGVNFFCTPRFPRTSGHYGVNFPPNLVFSPK

SEQ ID NO: 940741 - protein, 86 aa, Homo sapiens
GKDDRRLGEKVEEGPKFLKSGDAAMVNMVPGKPMCVEGFSDNPPLGRFAVCDITQTVPVGVIKPVDKKAGGGGKVPKFAQKGQKGK

SEQ ID NO: 940742 - protein, 139 aa, Homo sapiens
  misc_feature (11)..(11): Xaa can be any naturally occurring amino acid
SMHRGGSSKAXVLWFWFSHKRVNGCLAGAPREDPQFPKGQWPPREICFACHNERLDGPVWEVEATLNFLKGHFSPRKIILDFPAGGSAARRDVQNVAAAPKVGMGALEVESRNLILDPGKPEMMKSPPNTNPMASMIFL

SEQ ID NO: 940743 - protein, 176 aa, Homo sapiens
VLSVCQSHSTPDIKSHYAFRIFDFDDDGTLNKEDLSRLVNSLTGKGEDTRLSAFEMKQLIDNILEEFDIDRDGTIPLFEFQQVISRFPDFASSFKIVLDNSPRVCPGPLSKNLFIVELWPRSSLCCQGGPNCPTPEVGLLHPPPGQGGPLLSGPFLTGVVIAPFGFVLTSKKGLKV

SEQ ID NO: 940744 - protein, 71 aa, Homo sapiens
KEVKNRWDYHNLVQNLMREKAKNTDKLGGEAVVQSISPQQEKETIAKCIAALKLLAKKVKPSQLCKWIYPN

SEQ ID NO: 940745 - protein, 104 aa, Homo sapiens
GAPKIRVNHVPSPLVMRFMGQAPCSAPPKAKVMLNRFPLGKFVWVGDVVNAILFLGRGPRGMPRGSLLPVEGGFWACWGPSTPLKPHAGVFLPPIPPINLFLLP

SEQ ID NO: 940746 - protein, 94 aa, Homo sapiens
GAISQIFVLCQQQSGGVGAHYYTPRWRLFLEALVDSVAQGIPFQQHQFDKNVFQLEQAFVFSKQRYPSQPRGDTVDLAKKIFLKYYPGWVAGFW

SEQ ID NO: 940747 - protein, 74 aa, Homo sapiens
  misc_feature (33)..(33): Xaa can be any naturally occurring amino acid
FGLNLFSEVEESAIEKHFLDCGSIMAVRIVRDXMTGIGTGFGYVLFEVWETNALSLSFEVPWEALTLLHVIIET

SEQ ID NO: 940748 - protein, 124 aa, Homo sapiens
  misc_feature (23)..(23): Xaa can be any naturally occurring amino acid
  misc_feature (68)..(69): Xaa can be any naturally occurring amino acid
SLGFGCVAKMLPGILKISWGAPXGGPYAGTPPVSSPLNWGLTLNPFFFKGPVVLGGPLLPRVFGNYKXXFSGGFSFIRGFPLNPRGGTPFFSKKTPPKRGGGLFVPVFSQPRGVFPPNKGRGVG

SEQ ID NO: 940749 - protein, 104 aa, Homo sapiens
PLSQPLLLGIARNETSAGRARAEFYVQCSLTFEQVRKPSLSGGPEAPEFPGIFFVETQNGRRLPQMEMWGELCPSAKGAIILYTRVQGSPPGGALGSPPPPPPL

SEQ ID NO: 940750 - protein, 203 aa, Homo sapiens
  misc_feature (52)..(53): Xaa can be any naturally occurring amino acid
PSVFPPGSLRLGPFFLGPPPPKAPPPAVWGFFLWSPRAPPSPPPGLLSFPTXXVGQGGGFFGPPTGGFGAPFFVFTPQIKTPGGPRGFPPGGGFLPPPPGVFFPFFGAFSPSGPPGAPGVLGVFFPPRPPLFGGFFPPPGGGGGALFFFPPPPGPLFFFFWAGGVFFPRGPFPWAPPPPAPPVSRFGARGFSGVSLWGFLGPR

SEQ ID NO: 940751 - protein, 122 aa, Homo sapiens
KAGAVGGEVRMYAKAPLVVGVLQRQAAAQHLHEHPPKLLRGHRVQERVDDRAEVEKRLREGEEDHVRPEVGPRPVVLGFGRSHDPPNLVGHPAYGQCPNNQPWADPSRRESQRKKKPSMRTQ

SEQ ID NO: 940752 - protein, 113 aa, Homo sapiens
  misc_feature (4)..(4): Xaa can be any naturally occurring amino acid
  misc_feature (50)..(50): Xaa can be any naturally occurring amino acid
KLFXLPNPQGGRIFPPGSQKPNCFGWEGGVNSIGWAFPFGKNFYPSLLGXAQMGPCKNCPPFWGFFLTPFLNWGGETPQKLGGPVAPFGQMGGAQFGLGGIFFFQAPLGGRGY

SEQ ID NO: 940753 - protein, 97 aa, Homo sapiens
  misc_feature (48)..(48): Xaa can be any naturally occurring amino acid
SCAKSPPRNKLPQEWENTKNALLTYLEQVRMGIAGVVRDKDTELGISXPVIPVDGINHNVTPAWGGDYWGFLTPGDYMVTASAEGSHSVTRNCGVPF

SEQ ID NO: 940754 - protein, 125 aa, Homo sapiens
GQASWVVVGWSPVAPGTGPGRQPGAGKAVRAGGGLNAQNSPRQRRPGRVGGWEQRIKAFFFSSAINLSGNWGGNNRHSGTLLSQAIGGCALKGPTALWGRVAWVWVRVGKGLGLLPSGQLCSPLF

SEQ ID NO: 940755 - protein, 113 aa, Homo sapiens
  misc_feature (105)..(105): Xaa can be any naturally occurring amino acid
FPGKPSVRPNHFVAARGVPRFLNYRSPPWGSPYSVSVVETHFDPYAFLFNQGNKGPGGDFRMAPLFSQNPDPQGWVKGEIPPLLQGPGVPKGYPCFFAPNRLGHXGPIGLPRG

SEQ ID NO: 940756 - protein, 78 aa, Homo sapiens
  misc_feature (14)..(14): Xaa can be any naturally occurring amino acid
MSGFPRSEHHPGTXGGPLGGALVPPFPNPFRPGVPIGVWGGGQQARLGVPFLSPYLNPFGPGFFPCLKPVPNKELIIP

SEQ ID NO: 940757 - protein, 96 aa, Homo sapiens
  misc_feature (18)..(18): Xaa can be any naturally occurring amino acid
  misc_feature (22)..(22): Xaa can be any naturally occurring amino acid
GVVAAINPQNVVTFNKEXGPFXVFVRVGQQVNVVGQVGNPKIFPGFQRKTTPGLLAPGEGEKLAPEGFFPVPPIWGGFVSLGKNPNKDFLGAPRGF

SEQ ID NO: 940758 - protein, 115 aa, Homo sapiens
KIPPQGQGLFGKSPQGEFPQVPFRQEGGGGEGLRPPGGPPGDKKGPPPLFLAPQGGGPAGAPAHALGAFPRHFIGPPCNPVGGGTPKIRGAPPRGRVPWPVGVGWGPPPRGPLGE

SEQ ID NO: 940759 - protein, 70 aa, Homo sapiens
  misc_feature (41)..(42): Xaa can be any naturally occurring amino acid
EGFDSPLLQGRGEYKGGHGPLPQRPPEGPVVPAKGNGGVPXXPFRLPHRPGFPLLTRAKEPVGKWVCWAR

SEQ ID NO: 940760 - protein, 80 aa, Homo sapiens
APGFVPQKVRAPPGFNLEEFRVAGFPKKVARPLGFFLVPRRGNKSPESLQANVQGVKEARSKFFLFPRKPSAPQKGDIFF

SEQ ID NO: 940761 - protein, 121 aa, Homo sapiens
MQPSCPSAHEWVNKTCPSRQWTLDSRENERDAGTGYSTKELCGRHAAGPCLILSWEVSGVPRSVETERRMAGARLGRGLQFGRTLETGGEGGRTAVGMRFVRRTLKDGENGNFMYYFTTIK

SEQ ID NO: 940762 - protein, 145 aa, Homo sapiens
GKRREKALNFLSLGEPPMVIRVPGRPRGVKAFPTIPPWGGFRVGKLNQPVGGGFSKPGAKRVVGVGRVPSLPRKVQRVKGIFPLNPPPPFLTGGGGRVPNRLVPLAPLGLGGKAGLLKPRLGNPSQGKGNVLGAPLGFFFGGGRF

SEQ ID NO: 940763 - protein, 94 aa, Homo sapiens
PPGGKGFKTHPPPPPPNWAEGGLGKFPPPFFKKQRERSFGPPPLKVVGPPDLGFGALGPPFLGTPGSGAPGNQTGFRLKFFSPPPGGAPVGVFV

SEQ ID NO: 940764 - protein, 77 aa, Homo sapiens
  misc_feature (43)..(43): Xaa can be any naturally occurring amino acid
ITLSPKGQSQWKVDNPLPSGYSPEGVPERGSKGSPFSPRSPLXLSKADFEKPKVFAWEVPPQGLGSPVPKSFPRGEC

SEQ ID NO: 940765 - protein, 135 aa, Homo sapiens
  misc_feature (9)..(9): Xaa can be any naturally occurring amino acid
VAALETRGXPQHSGNLGGLGFGFDGSGNNKWPAICPKVEAMNKRLGSLVDEFKELVYPQIPILKGKFPEKTDNEGFGSKRPKVEYSKEELKPPISKGTLGKFPVPILKKASRASGLKSGLKKQELLEALPKPFQD

SEQ ID NO: 940766 - protein, 78 aa, Homo sapiens
  misc_feature (62)..(62): Xaa can be any naturally occurring amino acid
AQPSGASHVRRVLSACVKMPTDAYLVCYDMHNLSAMCAASYRRIYRGQPVEECPLSGACYSXEFKGHICRVSAVTAIG

SEQ ID NO: 940767 - protein, 105 aa, Homo sapiens
FTLPPLSPNGGGGGAGGGFFYPGFFFFPPVSLGTPPPLFFPPFKTPGPFPPPGFFFGPGGGSLFSPGTPFALWAFLGPLLNRFFPKTGGGPGRVFRGFFAPRGPP

SEQ ID NO: 940768 - protein, 104 aa, Homo sapiens
PKPQQKGPFPQGFFLGGGPPAGGANLGFGGGKPPRNPGGGPFPPPPPLFEGGGGAPGGPLFPPPRGGGGPLGGGGPPPPPPPPKVFFFFFFGGFFFFFTLTPFP

SEQ ID NO: 940769 - protein, 151 aa, Homo sapiens
MGLPKLNARLKDETLQPFFEGLLPRDNPRNTRFAINFFTSIGLGGLTDELREHLKNTPKVIVAQKPDVEQNKSSPSSSSSASSSQEFDSSAFYFDNSETSSESSSEKSASSSTSSHSSASANDVKKKGHGKPKSKKVDKLLRNQPPNDRAP

SEQ ID NO: 940770 - protein, 111 aa, Homo sapiens
  misc_feature (99)..(99): Xaa can be any naturally occurring amino acid
MGVPPQGQPRGPSATSCLQQARRISGLSSVMMRSSGSDLPRASRVHVGRPWGVPRVDCRSHSSRRRCSPGGTPLLPEYPRARRALSTPTPTATADGVRXGHEMDRPGRPLG

SEQ ID NO: 940771 - protein, 106 aa, Homo sapiens
LRFLVKLTPFAKPLGRNPFFRQARIPKLRVVKAVFAAGALQANSNKKAAVAGKKPLVGKKGKKAPVGVKNPKKPLVGKKAAASKNPAPEKKPAEKNPSPEEKKPAA

SEQ ID NO: 940772 - protein, 70 aa, Homo sapiens
  misc_feature (13)..(13): Xaa can be any naturally occurring amino acid
MGEVEVVFTAPVXARHPQITTVFFPDGTIVQNSLRVLRNADGAEIVFTLFQHPGVSDEAFEADATAVAAD

SEQ ID NO: 940773 - protein, 126 aa, Homo sapiens
  misc_feature (23)..(23): Xaa can be any naturally occurring amino acid
GPFKPGLGQKTGGARAGISRVFXTPGAGSFLGGPPQKMGGGGGVGLGVFYPRVPPPGPRGGLGFPPGALLGDPNLFLGLGAPSFPGPLSPGGGGAPPPPGGPPFPRGFLFPPPLFPGPFFWALSGF

SEQ ID NO: 940774 - protein, 76 aa, Homo sapiens
MTVRRRLPAVEHPLINALARDASPAELGGRLSHAIAEATLISRAEAARRVHTAADLGPRVGLTGEPIAPALAATAA

SEQ ID NO: 940775 - protein, 87 aa, Homo sapiens
KEIIPFRGPAGASAVVAVAFGMSSCPNIKMIFPSSSCHDPIRYILLPRIIEAKYLDVMDAEHRPGLADPAHAPFASPPGPPRLALKL

SEQ ID NO: 940776 - protein, 117 aa, Homo sapiens
KVGSQRFPRILVLHLNRFFASRGSIKKVQYGVDSPLQRLSLGDFASDKAGSPVYQLYALCNHSGSVHYGPYPALCRCQTGWHVYNDFCVSPVSENQVASSEGYVLFFQLMQEPPRCL

SEQ ID NO: 940777 - protein, 105 aa, Homo sapiens
AWVLPLPIMGGQRPFFRGPLFRKKLFPFFNNFPPKFLYFYLSRPRAYYFFFFFWNPPFSPLGVFSPVGGPGRKAGGGGKLFFFPPGGGPFPTSWAYFPFPPPGGP

SEQ ID NO: 940778 - protein, 98 aa, Homo sapiens
GCPCLRVIFLPGEGPPPLPFGSSPLRPARDLLELEQALGAKVPDDRQRGRGPPPPPPPCNSSCPSISSCFQWLPGVLFGGSPPLESGQGGDLTAPLLP

SEQ ID NO: 940779 - protein, 101 aa, Homo sapiens
PPFSPIGGWGVPGGGFFNQAFFFCPPVSLGPPPPFFFPPLKPPGPFPPPAFSLGPGGVSLFPRGPLLPFGPFLGPFLTSFVQKTGGGRAGVFRVFFPPRAP

SEQ ID NO: 940780 - protein, 90 aa, Homo sapiens
RAFPRACEPRFGEGDRAHLKNPMDFSPMRERLLRERSTAKEEFAVDALLVFRNCQTFNEDDFKVGKAGPIMRRFFESRWEEFYQGNQANL

SEQ ID NO: 940781 - protein, 96 aa, Homo sapiens
LNFLRPWGKKRLQEFPHKGPGRSEMWMLLLPLTGAFESSSPQNEVQPPRKSFARPQVTRAQPPGPQIRPAFPRFGSCPLTLGFAGHGKNKIAPACN

SEQ ID NO: 940782 - protein, 72 aa, Homo sapiens
MFNFYEIEDEPGIYGDKKYDSPAQWLTPVIPALWEAEAGGSGGQEIETILANPVKPRLYYKIQKISYSETPS

SEQ ID NO: 940783 - protein, 134 aa, Homo sapiens
GGASFFHPCQPHKIPDGPVPSSVVEEVFKPPAPGEKGAPQKPEKGASNSFKQEMDSLQGQMEEHALRVQKFLSLWKPLEPANASPVPPGGYAGPGGTHKNTVKAGFPKKGRESDCCGFASGGRCPKRFLSRLFI

SEQ ID NO: 940784 - protein, 102 aa, Homo sapiens
MGQVFSKSFFEWTNCEVPQLQPRTRFPHSQCPKIPLCPMITPSDGMPAMCLCVSISIYCFVVSFYMQFYVFPLCNFMFFQTWRILLHVWNLWTSKILAYCIT

SEQ ID NO: 940785 - protein, 148 aa, Homo sapiens
TYIPKDFATLYQGWGVNGPGLEHKGTLRTQARPGEFVCLELRKKLPPARPPQGPHAGPLRGETLLTQVPSRQCLLEREPKGVFPTPPRSPERPLAVPPRCPRSLPPVTWPLHGRTAGELLSRPPPSPAPALEWKLKADAPPCLTFRNK

SEQ ID NO: 940786 - protein, 106 aa, Homo sapiens
  misc_feature (25)..(25): Xaa can be any naturally occurring amino acid
MRIPKGDLFGKQEQQHPKIQAQEAXELLGAPPTNPEGMPMVKIPEMARTLDQICRGTKAKPPKDTKLVLSDEDPNAEAKDQAAEDEKKKVENEKEVLDEAEAAFLG

SEQ ID NO: 940787 - protein, 114 aa, Homo sapiens
  misc_feature (55)..(55): Xaa can be any naturally occurring amino acid
  misc_feature (71)..(71): Xaa can be any naturally occurring amino acid
WCQVDYSAAEGLALPLLGDLILAMLGAQFMVGEKICGAVVSVPFQEDIISIWNKXASDQATTARIRDTLRXVLNLPPNPIMEYKTPPASIKMPGRLGPQRLLFQNLWKPRLNVP

SEQ ID NO: 940788 - protein, 130 aa, Homo sapiens
MNDPGTIRTRKFMANRLLQRKQMVIDVLHPGKAAVPKTEIREKLAKMSQATPDVIFVFGFRTHFGGGKTTGFGMIYDSLDYAKKNEPQHSLARHGLYEKKKPSRKPRKGRKTRIKKVRGAAKANVGAGKK

SEQ ID NO: 940789 - protein, 116 aa, Homo sapiens
GFFVRGGVFLPRARLGTPPLVFGPPSGVLGPPWRRGVRFGPGGFAFFPGGGAFFPRGFVVALWPLLGPLLGGVGGRSWLGLVGPSGGVVFPPARVVFFPPPPLFFPPLPFLRKCLI

SEQ ID NO: 940790 - protein, 67 aa, Homo sapiens
  misc_feature (21)..(21): Xaa can be any naturally occurring amino acid
SQVGHRGPMGQQGILGISGPXGPMGQPGKVAPFVSLDCFGPSQWSTSPPPHKPMKGPFGGNSPPPFG

SEQ ID NO: 940791 - protein, 165 aa, Homo sapiens
  misc_feature (40)..(40): Xaa can be any naturally occurring amino acid
  misc_feature (98)..(98): Xaa can be any naturally occurring amino acid
  misc_feature (105)..(105): Xaa can be any naturally occurring amino acid
GETGGKKKETRFWLPWGAQSVGSPPGVCEEREEGDFLGGXYFQGPRAWAPKKVARSRPFFSLFKEMDGRPFVVRKPFNKKGETPWGPSPPNLGFCFPXGSCGPNXGGFVFKNPGPQKNKKGGAEFVYLLAQRMKGGKGRAPGPIGEGRRLSPLGGFSFRFGPRPK

SEQ ID NO: 940792 - protein, 71 aa, Homo sapiens
  misc_feature (13)..(13): Xaa can be any naturally occurring amino acid
KRVTPGGDYTAQXILGSLFGRDERLFCPFYTRGRGVRDPKGGGRVVSRGFFYFPPHSTKGGVFAPTKQGVF

SEQ ID NO: 940793 - protein, 94 aa, Homo sapiens
QSLFFAKPSPFRAFKAFWEHSLPMSAEGLPSPGYQREGWTKRSSPRVKATCNDPCFEYQQYQECPPTKGGGFWLGGPKGGLKAKPPSPQGFQFP

SEQ ID NO: 940794 - protein, 98 aa, Homo sapiens
PPFFFPPPPPGDPPPRVFSPQKNPGGAPPPPFFLGGGGGGPFSPGAPLPPPAPFGAPFYPVWAKKRGGGGGGFPGVFFPPPPRGNFFGGGVFFPPPLF

SEQ ID NO: 940795 - protein, 143 aa, Homo sapiens
  misc_feature (13)..(13): Xaa can be any naturally occurring amino acid
GFSPGFSILPPPXGQGGVFLAPKTTGLFKILLPPPPLSHNGGGGCPVGGFFYPGFFFYPPIPPGPPPPFFFPPLKPPGPFPPPGFFFGPGGVSFFPPGNPFSPLAFFGAPFNPVFSKKPGGARPGFSRFFFPPRPPGGGGGGG

SEQ ID NO: 940796 - protein, 70 aa, Homo sapiens
EPNGHSAFRFRPAGPIGVLGPQPGPSRKMTLYKSFPSPSPQRHGQGRPPPPLFSVSTVFDFGTPEPPRDP

SEQ ID NO: 940797 - protein, 47 aa, Homo sapiens
KEHGAKSRQAGKAPKGSWGWKGYVASGPKTTQLLPVVKPSKIGIFLA

SEQ ID NO: 940798 - protein, 95 aa, Homo sapiens
ATWPSPKAQGPLVSAVCTSSVRRQDSRSMKRAGQKTPTLAGRHVPLKIKKEAIWEQCSSYVRPGHFLFTGDYKTFVLSSLDVDAILGLSPPAPRH

SEQ ID NO: 940799 - protein, 182 aa, Homo sapiens
  misc_feature (66)..(66): Xaa can be any naturally occurring amino acid
VPQHPPGPGQGGLIWGMASRSCTLFFGRGGQKGPHSRPEIHKKIYKIGRGSLFKGGKVFKNNASPXFALFDKGITPLGGFVPYGEGPQHFVMLKGWGGGTKKGGVPPPKSFLGQKKGGGLEKIALKFFDPPPQCGPGRFPAHGGEKSIFGAPEKRPNCKGRGGLMPGTDFAGGGGSKKVFFP

SEQ ID NO: 940800 - protein, 104 aa, Homo sapiens
MLIHFLLGRGGGAVFKLVGNSFFAGIQDLKNICFTESRPAELRLLLPFPPLISKRQESPPCYVSGAPQDAVILVKVSSLSVKNMDVNVLYSLSGFRAILMEDVR

SEQ ID NO: 940801 - protein, 75 aa, Homo sapiens
KNAWDKEPVLVVSFVVGGLAVILPPLGPYFKYSVMINKATPYNYPVPVRDDGKMPEVPSHPQDPQGPSLEWLKKL

SEQ ID NO: 940802 - protein, 163 aa, Homo sapiens
SSVGDAKTSPRRRKSSRREAEPYLSSPPPDPVLAQICAEESPPFDRGGSGIAFFRNDPNGGNVFRLFNITWRKPMKVSAIALLTAFGFATAAMAAEDRGASSKAPGHEMQQDQGRMQGSPNAAGFGKKDGAGDTTGSTGSTTSGSSGSGSSSTGTAKPQLIAA

SEQ ID NO: 940803 - protein, 141 aa, Homo sapiens
QLPKPGPVFQFGQGMPGVGIMPTVGQLRAQFQGVLAKNPQLRHLSPQQQQQLQALFMQRQLQQSQAVGQTPPYQELGTQTFPFQGFLGCQPQLGGFPGPQTGPLQELGAGLRLQGPPRLLAPPGALFTGPVLGPVAPTSTL

SEQ ID NO: 940804 - protein, 103 aa, Homo sapiens
PPLKPPQKEKRGGGPHEGIGKLGGTQVRGPRAGGAQPNWGGLPSNQGGGGGGQAGWGPGGSPRFGLPPQTRRAGLRPPLGKAGVAPGKGGGGGGRAGGEGPAV

SEQ ID NO: 940805 - protein, 195 aa, Homo sapiens
  misc_feature (30)..(30): Xaa can be any naturally occurring amino acid
GSHHSPGEEVPRASVGAQSLGFSTTRIRMXMTCSFPPTAPMQQGRGTPLSTPWARAPFVGGPAGSPPTRHLPRAQEPRWGDPFPWGFLPPGSRSLAAPPGWGAGGGAASGTIWSPAPPFWGNPAPEPKAPKIAASCILGPPRAGGGGEASGVPPPSSPPPAPPVMGGGLKPKKKNPLGFFFWIFFFKKRYFFQGV

SEQ ID NO: 940806 - protein, 120 aa, Homo sapiens
  misc_feature (51)..(51): Xaa can be any naturally occurring amino acid
  misc_feature (73)..(73): Xaa can be any naturally occurring amino acid
QLVNERQPKARVVVLGLLPRGPTSQPTSGEEPTGERAGTGGTGWHPRAHFXDADLGFVHSDGTISHHDMYDYXHLSRWGYTPVCRGSALPGFCVGGPKTGAKGSPGGSRPLSILVPFPNI

SEQ ID NO: 940807 - protein, 89 aa, Homo sapiens
LPINSGLDKENVVHINHGVLGSHKKNKIMSFAASHMDAAGSHNLSKLRTENQVLHVLTNEELNIEYLRMQRWEQQTLQTGTLWVRRAEG

SEQ ID NO: 940808 - protein, 118 aa, Homo sapiens
SFAKLAKSPPRWARVFRAPPKRPSQMEHPMETMMFPFPKFGGDKGYFQKEALRVLMEKEFPGFLENQKAPLAVAKIMKALAQGKDGKVGFQRFFSLIGGLPIAGNDYFVGPMKQKGKK

SEQ ID NO: 940809 - protein, 74 aa, Homo sapiens
AFGARAFGALKVGGARLVGQLVNWVGTRNKEGAGWGKKAIRALERKPQKKFKRARVRGQTGLDFVRFPTAASQQ

SEQ ID NO: 940810 - protein, 103 aa, Homo sapiens
  misc_feature (2)..(2): Xaa can be any naturally occurring amino acid
LXPIGGVGGRGGGFFYPALFFYPPVSLGAPPPFFFPPLKARGPFPPPVFFLGPGGVSFFPRGPLFPFGPFLGPLFTRFFPKTGGGRGRVFRVFFAPRAPPRAP

SEQ ID NO: 940811 - protein, 98 aa, Homo sapiens
MGGGGGRGGGFLNQAPFVDPPVARGPPPPCFCPPEGPGAGPPPGLLPGPRGGVPFPPGDPFAPLGPFGGPLDPGWAKKPGGAGPGFPGVWRPPGPPSS

SEQ ID NO: 940812 - protein, 103 aa, Homo sapiens
LHTMIPSTTCFKLSQVGHGVLQKNFGFVFPSVFLLLTEGRALLVRVAMESTHWDACCTVLTRWLKGSFHVLVARPMGVPFRIYFRRFITYVGFSFPSVYLFST

SEQ ID NO: 940813 - protein, 67 aa, Homo sapiens
PPPKRGPPRGGEKKNPPGAPFPPPPLGFGAPPFLVPPNQTPFSPGGGGPPPPPFFSGFLGPPPPGPL

SEQ ID NO: 940814 - protein, 100 aa, Homo sapiens
GGFHLMGPPPVLKGGMSPALPLKGGGWALAMVPRWGAGGPGDPNFPGGLGGPPHGTGPLGFSRVGTRPKIGLEAVLPWGGGPVFRAVLVPPGVGLGGGPL

SEQ ID NO: 940815 - protein, 77 aa, Homo sapiens
KGGDGPQFLKFGEAALVYMVPGKPLCVESFSTNPPLGRFAVRKIPHPLLVGVIQPVAQKAGGAGKVPQFAPKGQRGK

SEQ ID NO: 940816 - protein, 106 aa, Homo sapiens
VHSSPWGAWLSARLCKWLQSPSSCRLGLAVLLGGAFVFWAGWTGGGRSPLWRSGVSGSAGPTLEGNLVGLPAFLWLEGVLLSYVRFPVVAGGVGGSTMFGGITFAF

SEQ ID NO: 940817 - protein, 95 aa, Homo sapiens
GAEEAMGRLAVGPAVEVAEVPQQLQAGPGPAAGGRAPVLGAAPQAVVGGRCVGRGLTASAGPPSVGPLVKGVCILGAGGPASFLREVSCTSPASF

SEQ ID NO: 940818 - protein, 199 aa, Homo sapiens
DFRPAGSSQGKGLEVYARPDTTRGRHRARFSAYVAMGGSHGPVGLGVKCSKKVTTAIRGAIILGQLSIVPVGKGYWGNKIGQPPTVPCKVAGPSGSVLGPLIPAPRGPGIVSAPVPKKLLMMAGIDDCYPSARGCPAPLGNFAKAPFDALFKTCRDLAPRLWKEAVFPKSPYQEFPGPLVKTPPRVSVQRTQAPAVGPT

SEQ ID NO: 940819 - protein, 103 aa, Homo sapiens
  misc_feature (74)..(74): Xaa can be any naturally occurring amino acid
QPLRRSLGPLEGFFASGFNRAFKIKGFANTIPGHGGIMDRFARQYLMATFVNVYIASFIKGPNPSKLIQQFLTXRPDQQLHIFNTLGFHLIDKGMLTSPPKDE

SEQ ID NO: 940820 - protein, 101 aa, Homo sapiens
LSLGAGPTGSPQGCPATQGGPPFFPQPRARPPWPPACHCNRPCPGPGWGPLPPQPTADLSGFPWAKGALWGGCLFFLVLGGGRDGGPGPPPPLVFFSRPGE

SEQ ID NO: 940821 - protein, 100 aa, Homo sapiens
MGPPPLGPGQEGPCPCPPYRPGVGGWGNSSPLSRGPGPWGPALPPRVGSSRGPPCGNKKGMDIGEKEEQEALFLFLPGGWGPPPLEGRGQGGGTPGGGFF

SEQ ID NO: 940822 - protein, 84 aa, Homo sapiens
VGRMPAAQGTVQTWGHPRAKDKSREEEAERTKDFFLVGKNRVLKILWDARESWALISGGIKESPSIILGINTELGLGGVFGSYL

SEQ ID NO: 940823 - protein, 35 aa, Homo sapiens
PRMTWQRKKAAPLQSKASYFSKTRPPRGPRIKVFS

SEQ ID NO: 940824 - protein, 84 aa, Homo sapiens
GPAGFKLGPKRFRKGFRQFRYQNGGGPREVFRQLGEFSPQWLGLNIRPKDQFVKMLVQKQLFPFLPRGVGARGFPPRRNVGFIG

SEQ ID NO: 940825 - protein, 128 aa, Homo sapiens
  misc_feature (52)..(52): Xaa can be any naturally occurring amino acid
AHPPQRLPTMGLPSVRPPTPLPGGQPLLDQAQNGPPRGSPDAGSGLSSTLPXHFGQRESATRPPPPSLRVRDRPATLYRTSTPRARARAFPVRPVRSRALPLRPQGAGAHRPTPTSLVYAVVMPKGMS

SEQ ID NO: 940826 - protein, 133 aa, Homo sapiens
RFGFFSPPKSVLGFHVLQKKGAAPPPLTVTRGSVDGPKVGTAGPPVPSGGELSPTFTGVPQLPDWPPPGGTTGALLGTWAGGRFLTLPAWEAQVNGPRGPVLPVSSRFWNPVQPKVGGFPVADSFPCFGLFEI

SEQ ID NO: 940827 - protein, 103 aa, Homo sapiens
TEQEATAWAPELTSSPCTDEERSHETSAQSGNRALFVTSCLSGGPVMKALPDWAQGIQKGQLVFAIVCCFSITSSPKQHWMNASRGSHNSFQDLVTIVSVPVQ

SEQ ID NO: 940828 - protein, 223 aa, Homo sapiens
QTKYAEMWARTPKPMFGYAGSTASPPTLTPLVKPDQTTNPGRDQSGAVAQATGTAAGSTRNAVAQQPFSAVPNMLTRTAVGPTAVDPSVTDVLGVESDLITVFLNGPASVAGLGVVTPFGATTLPFNIAGALTGFHTDDIVSGWAGVQSWPGAGAVPPSPFPVITNPAGGFGTLASAGLGEANTVGGLSVPPGWTAAAPAIRPAALALPATSAGAAAEAAAAA

SEQ ID NO: 940829 - protein, 97 aa, Homo sapiens
TWLLPSLPGFETSSDPQTQALPMGGDDDGLARLVGVCHSIPEQAPGHGVHASGWLIQEDEGRLSNQGDQCQCSTSACYHHRGWKGEGWVTAMVSLQQ

SEQ ID NO: 940830 - protein, 111 aa, Homo sapiens
PLHKCCLHPYGKSSTSGGEMVRPVPITSTPSTLNLSLRLKKLDLLPGVVGHACNPPPFFFKAGGSPEVRGLRPPCPPWRTLVFPKNTKISPAWWPPPIVPPPPGVEAGESL

SEQ ID NO: 940831 - protein, 154 aa, Homo sapiens
  misc_feature (55)..(55): Xaa can be any naturally occurring amino acid
VLSKSALPFPKASKTLLCLGVQRRRNSPGSVVWNATGWTFPKVDRGFVGHWGTVXSQWSVGWNPKHPNTLRVAGKKTVLPFHPVLQRPIQCAKAEAGEGVGPTPITWNCGWSKAKGTSRTQRLSSRPRFCEGPPALPVTHRAVGVSVVCPCENM

SEQ ID NO: 940832 - protein, 107 aa, Homo sapiens
MRFLPRIGHSLQQHSKRTLGNTAVDAHQRSRGEARLARRKKSAAVTISSGWPLRFNAAVGLSLCSSLQALETSVRKRPGEIVFTRTLGPYSKANASVSALSAALAPA

SEQ ID NO: 940833 - protein, 149 aa, Homo sapiens
  misc_feature (13)..(13): Xaa can be any naturally occurring amino acid
KSDNFVNKQTRPXFPPLIGASAFGEIEPVRFLLEWGADPTILAKERESALSLASTGGYTDIVGLLLERDVDINIYDWNGGTPLLYAVRGNHVKCVEALLDRGADLTTEADSGYTPMDLAMACGYRKVQQVIETHIVKIFQSKLVPGAPE

SEQ ID NO: 940834 - protein, 43 aa, Homo sapiens
FPFGPFLGPLLTQFFPKSGVGPVRVFRGFFCPRVRPRVPPRVR

SEQ ID NO: 940835 - protein, 118 aa, Homo sapiens
VPFTDFPYFKGTPLDQTLRQNPFSYKIYGGKFNFFPPTLFGPIRKAPRLLGLPPSKHHMKHPIIGRVIHFFNSRKIKNFHDLRSLRFEAKSPKSKRTLHKPGVIKWMPPPPTTHLKNP

SEQ ID NO: 940836 - protein, 108 aa, Homo sapiens
TLTPAESEEAGWHIPTLCPPGWDDTGGPRMFGDPGLTAAGWAIQHGSYYQEHRWGPHLHVTVTKTDKTLVLLMGQEGVHGGLIKQRWYENALHLRRSHTDLVCPFPSP

SEQ ID NO: 940837 - protein, 148 aa, Homo sapiens
GGGGRFTGSGFETWGAGGEYQFSARRTAVAVGAIGGALKDEGGSKKGGGAGGGFAGDGGPGGSGGTFWEGSQGFLVEWHLSGGGDSAYRGGPYAPLAFLPQHNGGHSRPPIYNMKTLIPPGKPPPGSYPYSPIFLLSLNPDIITGVSF

SEQ ID NO: 940838 - protein, 31 aa, Homo sapiens
MAPGSPPPGFPVVFGFVVIVPLQNKNCSGLP

SEQ ID NO: 940839 - protein, 80 aa, Homo sapiens
SSGNFSGWTIFMASILRMTWGPFRQDMRRPGQPLPASGPGSEGIRLSPVRLDVRVGGGVVWGWGAGDRAASWSRQAWGGP

SEQ ID NO: 940840 - protein, 69 aa, Homo sapiens
  misc_feature (47)..(47): Xaa can be any naturally occurring amino acid
PSLQARAHGGPPASSLEAKPRMVAGQVWGASTLSWSACKMVSVKRKXWTGGPCAPQGWLRGLSTSPLHL

SEQ ID NO: 940841 - protein, 36 aa, Homo sapiens
AGLLNGFISDLVDFSTKPMSCIIHRLYSQQSINKNP

SEQ ID NO: 940842 - protein, 75 aa, Homo sapiens
PPGFFGPPPPPFGGAPFVGGGGFSPPPPPLGGKITPGGPNWGGGKGPFFCPPPFPLGLFGGGQGGPRNFFSGGPI

SEQ ID NO: 940843 - protein, 118 aa, Homo sapiens
RIAFLNPIGEVFGLEKGPALGAGASARSPWDPRWVFPSHGQGPGLKGPHPPPPGWWWGLGPSFFKKSPFLRGFPATLCGKTRPCPPSGPFGGLEIFPWGAGPRVGLPCPPPGGAKVDH

SEQ ID NO: 940844 - protein, 162 aa, Homo sapiens
PLPLCPIKESWIGHHRRVHSLISPIFRGPPRPNLRQNPFPYHIHRGKFNFFPPTLFRPIRNAPTFLGLPRCIPPMKHPIIGGVLPFFNSGNFNNFPDLRSLRFEAKSPKVEEPSLNLEGLYGGPPPSPPFEEPGYIKFRQKRKGSDPPKVVSSPPPGPPGFF

SEQ ID NO: 940845 - protein, 76 aa, Homo sapiens
RLFCGGFFKNRTNQNGGPFCSAPPGPPIRKKMMEILTPEGAANTFKKVGHEFIPARLGKDIEKACPSFFPPPDVFG

SEQ ID NO: 940846 - protein, 101 aa, Homo sapiens
  misc_feature (10)..(10): Xaa can be any naturally occurring amino acid
MCAMTPSEPXKITVFEVRLRTGPFLGDTSKVIARTEEKGVPKNVILKFDACAAINSKQHGIRCSSLDWKKSYTAENKYICQKSYLCEDVSSTGTCVIRSYL

SEQ ID NO: 940847 - protein, 89 aa, Homo sapiens
  misc_feature (13)..(13): Xaa can be any naturally occurring amino acid
  misc_feature (32)..(32): Xaa can be any naturally occurring amino acid
MAGVDNGSIYKPXEAYITEGTLGISLLEGVRXCCKCLSADWLPKLLLSTPIYINGYNEILALSVETDYTFSPAEKVKAFLADPSAFVAA

SEQ ID NO: 940848 - protein, 112 aa, Homo sapiens
  misc_feature (19)..(19): Xaa can be any naturally occurring amino acid
PGGIGFPGPRGTFGLFFPXDWGPRVPPAAKKFGVVGGFLPPPLSRAPPLLQNRTALQTFPPSRGFGPWDPPAGPAAGKGGGGASGGEIQRLPLDPLPFANPNKGLNPPPGEG

SEQ ID NO: 940849 - protein, 79 aa, Homo sapiens
RAPTPPPRGGGGGWARPSLENALFPGDFLVLYGGRPGPGPLWAPLGGREFCRGGPGPGWACPGPRPGGAKGAINPFQGG

SEQ ID NO: 940850 - protein, 118 aa, Homo sapiens
LPVRDFVAPLLAQPAWSQSPPPGSNALAFIRWEFPNFNSRSKDLLGRFVLAPRHIVAAGFLIVAVPFFEWLALQFEWLEGAFLKDLLRQPVALALAQCLVPAAWAACLSPGGLSVGGP

SEQ ID NO: 940851 - protein, 109 aa, Homo sapiens
PGKTLIFWGPGGGKGCGDSPKNPRGGFFWVFFFPPRGGFGPPPPQIGFRPPKGGFGVPRLPGPPPRGPQSPPPFPPLGSGLLPPVFLFLGGTKLFPAAPFFFKLFFGVF

SEQ ID NO: 940852 - protein, 131 aa, Homo sapiens
MSPPAGELLEAEESRLQSGMQHISIRTKTTNGYAGGLSSPYGGLTSRGLSYSVGSSFGSGRGSSSFSRTSSSRAVGVKKIKTRDGKMVFQSSGVLAECQLGLPLPAFPSCVAPELGKEAALHGSFGNSSPP

SEQ ID NO: 940853 - protein, 118 aa, Homo sapiens
MKIHDMMLVLQGQWKRLCPVPRRCEVARGKNILRNALVFHLDGTTPVCEDIGRSLLTYGRRIPLGEWESRIAEVDASVVREICSKYIYDQCPAVGGYGPIEQVPDYNRIRNGMFWVRF

SEQ ID NO: 940854 - protein, 73 aa, Homo sapiens
VDKGPRETPCVESVSHNPPLGRFAVCDIRHTVAVGVIKAVDKKAAGAGKVSQFAQKGQKGEMNIIPKTRPPPF

SEQ ID NO: 940855 - protein, 107 aa, Homo sapiens
FFLGPAGGHRGFDPDPCPLPEEVVPPYSSPQEFAQDVGRMFKQFTKLTEAKAEVQSIMGLQGFFKRGMKGALGDPKFFVVLVGPPPMSLPGVGLSSQELFGGPGDGP

SEQ ID NO: 940856 - protein, 73 aa, Homo sapiens
FWGPRGKGKKPPPGPGPPGPGGGPPFLWGFLFPPPGVLFRPWGVFGEGFPPPVPGGAGGPPPISGGPPPLGDF

SEQ ID NO: 940857 - protein, 105 aa, Homo sapiens
  misc_feature (4)..(4): Xaa can be any naturally occurring amino acid
LPLXVELSKSHIPHHWASCWPGCSGCPSCPGSCGHRYKCVGGRAQVEKEGAALRLRAATVPRALMSLSSLVKPETAACVGLRSRIFSPLSFVTSRASGISFCKGP

SEQ ID NO: 940858 - protein, 195 aa, Homo sapiens
  misc_feature (7)..(7): Xaa can be any naturally occurring amino acid
LTPMTVXLHEVPHEVGDFAILVQSGCSKKQAMRLQLLTAVGALAGTACALLTEGGAVGSEIAGGAGPGWVLPFTAGGFIYVATVSVLPELLGRLRQENHLNPGAEGCSELEIMPLHSSLDDKSKTLSQEKKKKKNSIVLVCSHTAIKNCISFIAQCFGFALLKSSIFKKCTRKWQYLGSLQPPPPEAGEPLEPRS

SEQ ID NO: 940859 - protein, 168 aa, Homo sapiens
KYLGFPWGFSVLGKNAGGRAFVKDVPVFENPMGNNNEAWGRDLKLADFALLCLHGKRKPVTEAEKLPSSMAPNHPVVSRMDKVERLKQGLLHQQAKFGRNGFACPAKFCLFQFETKNLLFNDNTEGWARLHGKTTYEKYLGPQYVAGIFNLKKGSTSPLLEACEFLRK

SEQ ID NO: 940860 - protein, 113 aa, Homo sapiens
SLSPGRREQVFGQGKQQQTTAGKPFSLHPPCSNPGQALRRNSGRECPKISCPWMENRSRLDFFFFFFPGVGKYFFISQTGFNSTQVGNGVPVPPQAQSPKMRPFTWGVSGLVF

SEQ ID NO: 940861 - protein, 122 aa, Homo sapiens
  misc_feature (15)..(15): Xaa can be any naturally occurring amino acid
GRKADMGGAVVWVQXFYNVTLALDLSFPPTGKFLGGEESGVEFGMQNMGFHRKPPPGYAGGLSSAYGGLPSPGLRYSLGSNFGFGGGSSSFNRPSSSRAVVVKKIKTRDGKLGFGSFEVLPK

SEQ ID NO: 940862 - protein, 67 aa, Homo sapiens
AIVGMVPGKPMCVERFSDYPPLGRFGCWEIEQTGWVGVIKTVDKKAAGVGKVPKFAQKGQKGNEYYP

SEQ ID NO: 940863 - protein, 101 aa, Homo sapiens
DIAKFNHSIMTAHVMTTQRGSNSLQVVSQKKHVSLGPHMSLLRKDFSFYCVRLSKTQNLSSANFPKRMTGPREIETLNVGHSYQKSLPSCPKGLFDFLSFP

SEQ ID NO: 940864 - protein, 114 aa, Homo sapiens
PKTPGLFQILVPPPPLFPNGGGGGSGGGFFLPGSFFFPSVSPGAPPPLFFPPLKTPGPVPPPGFFLGRGGGYHFPPGHPFALWPFLGPLFAPFFPKSRVGPGRVFRGFFAPRGP

SEQ ID NO: 940865 - protein, 70 aa, Homo sapiens
QRSKSPSSPSQKVPCRVLKKNPLENFRILVELNPYAKALGRDPIFCQGRNPQLRGGKAAAAATALPTQSN

SEQ ID NO: 940866 - protein, 67 aa, Homo sapiens
CPRDPSPACCHVPFSKQVPGPPGKIEAGPDPYEPPGLRKRVFQACVDPPCPYGVPPFELLFGRHPWF

SEQ ID NO: 940867 - protein, 184 aa, Homo sapiens
  misc_feature (69)..(69): Xaa can be any naturally occurring amino acid
ARPEKGRVSVESLEEGSFKASCLKAQLLRFEDGASTLYESNPLWGHLAGTCGLYGKDHQEAALVHMVNXGVEDLRGKKVSLISTNYEGGKDDYVKALPGQLNPFETLLSQNQGGKPFIVGDQISFADYTLLDLLLIHGVLAPGGREGFPLLSANVGGLSARPKFKAFLASPEEVHLPINGNGKQ

SEQ ID NO: 940868 - protein, 111 aa, Homo sapiens
PHAHPIIVPQRLLQTRMPEASLDPQFSHVSVEPPPMSPLGLARVPTSSLVALIMAPNRCSLHGQPSLVLFYVLLPHPHSPAWLDSHSMVAPSPSSSRHGFHFRGFNKNFTS

SEQ ID NO: 940869 - protein, 78 aa, Homo sapiens
  misc_feature (50)..(50): Xaa can be any naturally occurring amino acid
EPLSSVWGPAPSFAVAASGNPFPWEVDPPVFEVPNGYRVLGMEGNEPLRXEGNDLLQFAIQQEEEDLQRFLQLSLLEH

SEQ ID NO: 940870 - protein, 151 aa, Homo sapiens
  misc_feature (38)..(38): Xaa can be any naturally occurring amino acid
  misc_feature (89)..(89): Xaa can be any naturally occurring amino acid
RWLSPAGGMGMVPVVLLMSPIILSASFRGWGMCSILSXCWACSANSSIRVFWFPHGDILASGSQIINSGVLEWANREKGWDLGPVPPWXPFWALLGMCLGLGAPWSMAFPPGFYTALTGRSPSPLPFFPQMGAPGSKGKNPCQMSQIWGGA

SEQ ID NO: 940871 - protein, 172 aa, Homo sapiens
  misc_feature (94)..(94): Xaa can be any naturally occurring amino acid
GPCGQGPVVVTRIIVWDIMAFNGIIHVLDKPPLGTPTAPSCWLPKAPPVSAGVGAVLSPETLLGLVAGAFYLRAQGKPTGFGFFAFQAENDVYXDFSPWQKGTNPPLVFVPNPFFGNDPFFEPFDDSLLEEDFPYPQRFLPFNLRGWGLKQNACPGRSPLFFLFWVDGAEGV

SEQ ID NO: 940872 - protein, 107 aa, Homo sapiens
  misc_feature (53)..(53): Xaa can be any naturally occurring amino acid
PQEVGLAIQAPRVQFFPLPPPGSFLLDNAGGEKPPPLPLVPPILGPRVPPDRXGFPRPHYWVEFFPEKGSPFAGRNTVPRVRGGSVFNRPRVPPLGPPPPPPLVGFT

SEQ ID NO: 940873 - protein, 88 aa, Homo sapiens
HTYVVLCIPGGIMFQALLGIGSFAAVICMRDDFGRLPLGSRGLPVVNGMTGEMCAVLCVAGYVGHKHRRCLSGLSLPGNPVVQPHGSI

SEQ ID NO: 940874 - protein, 187 aa, Homo sapiens
PGGSTSPVYRRGGGGSSFFPGTRFASRPFVGPLYTSFAQKRGGAGSGFSGYFFTPGPGFRGGPQKRVFFFPPPPKGVWGFFPPHQKRPPKKGGAPRGFWGLGPPPFPLPGGVGARPPPVGFFPWGVPGPPPGGFPFSPGLRGGPFWFPPPRGALFPRGPPGGGGGAPPPGFFFFWGAPPQFFKGFFL

SEQ ID NO: 940875 - protein, 151 aa, Homo sapiens
  misc_feature (23)..(23): Xaa can be any naturally occurring amino acid
LFACCVKDSPPQVLLQWGIPLAXAVSQASPREFKTNIPQGLGPWEVRCGVRFPPGQNKAELQETRFPFLTGPAKPNGFPAGHAPQVLKGPKAPPEARDKGSLFAPQQVLPPRPDCINCQRNFVWGKVPFFFPPRLWPLREMFFFALGGFFP

SEQ ID NO: 940876 - protein, 103 aa, Homo sapiens
PPPGLLVQVPHGGRPRVGGGAKGSRVGAVPLPKPCTFNQASPVLGSRGLPGNSPRGPLGFEVPALLPSALVPSSLLPGWCEWGGVWAELFFYFANINKGRRFS

SEQ ID NO: 940877 - protein, 157 aa, Homo sapiens
  misc_feature (39)..(39): Xaa can be any naturally occurring amino acid
  misc_feature (98)..(98): Xaa can be any naturally occurring amino acid
  misc_feature (119)..(119): Xaa can be any naturally occurring amino acid
QPPLSLGPAQTHKETIQPLPPKDPGPPPNKFWFWPKRCXGIPHSPPWEIRGSPCVFPVFLELGAPPPKTKPPVPPIIGFPLGFGEIFKFWEPPHPQGXGFVAGIPLKPFLEFGPNGPPXGFWGSHPPMGILGGPFWVPPPIKGPLFFFPKKHKILGG

SEQ ID NO: 940878 - protein, 128 aa, Homo sapiens
GGPLGLGPRGFPHGGGGGGRNTQIGVWRCPYPPGRKITFLWRNESPQCRAPHPNGPGGGQWVLPWGGTTGNIFLVAKRAIIKGAPGARGGPLGVSKGAGGGGKKGALPPPKWFPGGGPTRFPGGGRFY

SEQ ID NO: 940879 - protein, 133 aa, Homo sapiens
IPGPKDRRFAYPPPGFDLLPFGFLGFGFADFVLSPPFSFVPITPIVFQILPLLKWGPPEKPTPGFAPPPNLAPVFYILKAFCPTPPPCSPLGPFPYNLRGGFPLAPRVPNSQGYFPYYCNGKICGLEEKGFSN

SEQ ID NO: 940880 - protein, 165 aa, Homo sapiens
  misc_feature (23)..(23): Xaa can be any naturally occurring amino acid
TESWVIAGLSDLGQVGAHEATVXNKLNIPPFSFGVVIQQVFANGSIYTPEGLDIQEETLHSRFLEGVRNVASVCLQIGYPTVASVPHFIINGYKRVLALFVETDYPFPLAEKVKAFLGDPSAFVVGPPVGVPPQGAPVVAAAPAKVEPKEKSEESDEEMGFGLFD

SEQ ID NO: 940881 - protein, 140 aa, Homo sapiens
  misc_feature (15)..(15): Xaa can be any naturally occurring amino acid
  misc_feature (86)..(86): Xaa can be any naturally occurring amino acid
  misc_feature (139)..(140): Xaa can be any naturally occurring amino acid
PSLSKKMRTSLADPXRRLHVTGQPPEATSQLEPFDLINHLLQVKMRKRYSVGKFSATPGYRSTKRGWTSQSWRGKWENHSSRIKVXTLRWEQFSTKHPLPGFGLPPDRDFGGACPPQDPDMQGLAEGISVFLGPVPLSXX

SEQ ID NO: 940882 - protein, 115 aa, Homo sapiens
  misc_feature (8)..(8): Xaa can be any naturally occurring amino acid
GGPLGGGXPPFPFFGGPGPPGGQVTPPRVFWGPPPPFPGGGPPFGGWGGALPPGGIGYFLKPVLGGGPPPPPLGGGFLPPGPPGFFFGGNPARGEKKVFFFFFFLGVFFLNPFFF

SEQ ID NO: 940883 - protein, 152 aa, Homo sapiens
MGRGIDTFELLPMFGSPEFFRSKVDEAVAVFPGPHAKKKAAPKGGAVVVVPFFDKGKPVPKPNNPFWDSTQGLKASWVVLWAPPPGVSNCQFYGAFWVQGAILGALGFFHYTDMVFGVWWGPAGGNFFFFGGFGFFPPKLGFFGGPRFLVFP

SEQ ID NO: 940884 - protein, 119 aa, Homo sapiens
GFSPESVPKQGRKGGPFRLPGPLRCGKTGFEKPKVFALGVPPQGLGLPVPKSFPRGGGLGGKGPPPVPGFRLAPPPPLGFGPFFPGGPPPFGGPRVFFSPPPPPPLGFFFGNVGGGWIN

SEQ ID NO: 940885 - protein, 145 aa, Homo sapiens
  misc_feature (23)..(23): Xaa can be any naturally occurring amino acid
  misc_feature (107)..(107): Xaa can be any naturally occurring amino acid
  misc_feature (119)..(119): Xaa can be any naturally occurring amino acid
  misc_feature (141)..(141): Xaa can be any naturally occurring amino acid
AKALNVEDFPDPVAPASAMTVWXPPIRQRRSARSTTARARATTSSGIYPSDRSTARVSRSIRSARSTRCRLIVPPDEARDPERPPVQRPQRQGPACSLVTALFWQAXVPRLRDPDNGFXSSPDHCETLAHLELKSWLGEVXAGSH

SEQ ID NO: 940886 - protein, 84 aa, Homo sapiens
  misc_feature (20)..(20): Xaa can be any naturally occurring amino acid
LMEPNPKRQGSFLWWDKKGXFYVPLGYKKPQKQFPPWGLPKGEPPPRGFGGEGGFRAFFGFGNKLGGKKKGGGPPPPPPQAGDF

SEQ ID NO: 940887 - protein, 116 aa, Homo sapiens
DATVVPSVRWVPPSFGGVQASKAPLVRSKRLFYRGPVLVAWKANNPPLGGGGAPPPPPNKGTKGGGAAVFWAWGLGGGGPPKGPGAGFGIKGAPGGRQGPPQKVFGFSPPPPPPGG

SEQ ID NO: 940888 - protein, 103 aa, Homo sapiens
HTEPTGLEHSKIRELLLGAGPQSRSCSLWKSKTMTTSEESLGLLQMTLSVCTKRRHGYTLVEKNRKLSKVALETWDATNGETEVQSVRQAQLRDPWAASTNVS

SEQ ID NO: 940889 - protein, 36 aa, Homo sapiens
  misc_feature (11)..(11): Xaa can be any naturally occurring amino acid
MIPPLMPCLPXPFQNDGPAVAAPVGRSPTAFNPDVE

SEQ ID NO: 940890 - protein, 52 aa, Homo sapiens
MADLTASKADRVVLGPSLPVLYQALSRAARPLLGSNASVVLSKLDPPTQAEA

SEQ ID NO: 940891 - protein, 86 aa, Homo sapiens
GDPGGPLVCKDVPPGIFSYGTKKGPPPGVYIKVSPFLPWIKRPMKPLYPQAGDYPSFGPAPFWAKGQNPPGGARRGCRPVINGFLG

SEQ ID NO: 940892 - protein, 98 aa, Homo sapiens
LRYDVPDTRQLFLEGGRDADVFYRKCWSHDKVVRSIHGVNCTGSCSWKIYVKEGIITWESQQTDYPSTGPDMPDYEPRGCPRGASFSWYEYSQVVAGA

SEQ ID NO: 940893 - protein, 60 aa, Homo sapiens
MGGALAVTGGNACAERIATYIPTHYNWYDMDVTTQDWHIDPDNHFSNNPDFVDSWPPHGV

SEQ ID NO: 940894 - protein, 37 aa, Homo sapiens
SSSGLLMTSKPASITSTNSSRLSPSQEKPDFSSSSID

SEQ ID NO: 940895 - protein, 59 aa, Homo sapiens
TSVYSLLPSWEEMTKISVSLLCLVKGFFPNDFSVEWENNGQPGNKIKPHAFHGGFRGVL

SEQ ID NO: 940896 - protein, 105 aa, Homo sapiens
  misc_feature (32)..(32): Xaa can be any naturally occurring amino acid
MLMLLTILTQRYRCSLFHSKQMTLTEMINNWXCILVTLSIYYVDENAPEFSMQGLTAGVIAVIVVVVIADVAGIAVCVISRKKRMAKYEKAEIKEMGEMHRELHA

SEQ ID NO: 940897 - protein, 127 aa, Homo sapiens
GGCLWRVFCSVVVGVFCRGYVLWVFVGDVGARVSRLASWERVKGHEALWGVFMGACRGAGFGLVAGYVVRGGGGGGPPLSCVGFSQGGGRELLWAWGWAVGVPQKVRVAGLGLGGARGKNRGPPGGV

SEQ ID NO: 940898 - protein, 81 aa, Homo sapiens
MAPSQNTGQRLTGPKEGMFLNRLEEILDGFDPSRICEDHGTLFPAVGKCVPATLSVGDRALLLDRDPPGLIRATHEILPFF

SEQ ID NO: 940899 - protein, 76 aa, Homo sapiens
  misc_feature (27)..(27): Xaa can be any naturally occurring amino acid
  misc_feature (73)..(73): Xaa can be any naturally occurring amino acid
RKGQEESGRAGGPGSTPRGAAHCSWPXPTCGRANPLGLSLTWQELHDRNHSNKWQTLRTGHPSPPTPLVVLVXMPM

SEQ ID NO: 940900 - protein, 46 aa, Homo sapiens
VVLVVMATATCRGSAGVQQGYVEHMAAAATEQGIEGSQETSSQEAA

SEQ ID NO: 940901 - protein, 71 aa, Homo sapiens
SGVGGDAKTVVLDMNSKFLFKESICQYGQSLPFTFKLNFLVKQPFSITCSTLTHFNHLLHPDSFRFPSPPT

SEQ ID NO: 940902 - protein, 131 aa, Homo sapiens
  misc_feature (1)..(1): Xaa can be any naturally occurring amino acid
  misc_feature (26)..(26): Xaa can be any naturally occurring amino acid
  misc_feature (29)..(29): Xaa can be any naturally occurring amino acid
XPPAFDSRGSPVVLVVMTEEKLHQLXQDXGANRRQLDELMQQLSATMRQFEQPFSEAQSALDQADARSSELHQQLGTEFEQHEQAHKDALAALPGCMRFSPHAKAPLSLAEALESVQEDARRNRAEQGHRI

SEQ ID NO: 940903 - protein, 133 aa, Homo sapiens
  misc_feature (133)..(133): Xaa can be any naturally occurring amino acid
MTDQWDAGRLDSDLEGVGFDTLAVRAGQNRTPEGEHSEALFLTSSYVFRTAADAAARFAGETPGNVYSRYTNPSVRAFEERLAAMEGAEQAVGTSTGMAAILAVVMSLCSAGDHVLVSQSVFGSTIKLVREVX

SEQ ID NO: 940904 - protein, 82 aa, Homo sapiens
  misc_feature (29)..(29): Xaa can be any naturally occurring amino acid
  misc_feature (40)..(40): Xaa can be any naturally occurring amino acid
GSSVCQVTAIGVTVIWLYTSRACNNLFIXSFLRQEESIFXYPPTHNTTLSKGVTLTRDSWYPRGIGSRTPENTKIWMLKSLI

SEQ ID NO: 940905 - protein, 117 aa, Homo sapiens
MPQTPAVTQVTDTIDTTTATLTASPSVTEGGVITYTVTLSNPAQTPVTVTLSNGQTITVEAGKTQGSVDFQTPANDVYNNGSTVSVTIETATGGNFEQLTPNPTPAQTTINDSVDTT

SEQ ID NO: 940906 - protein, 83 aa, Homo sapiens
LTERRYSPCDVFDVVYEQKVMDGKVVGTGNILSARFTNRGKTYTAVLYTNKQGNSTYYTADGNSLRKAFIRTPVDFARISSRF

SEQ ID NO: 940907 - protein, 44 aa, Homo sapiens
MNSKACPVGSRRLIGSQRANEEVFNPPFANGLSLSGLLKPQKKR

SEQ ID NO: 940908 - protein, 176 aa, Homo sapiens
SPLTIVGEVTARGLAALLASARSPFPVIGEVAWVGFLGAAALAVSLLVLRHVVSPCDGVAGRMNLCHAYASEPLNDESAQWLCRQLTNGTKLRHAHSTERPPPRSAFRQWHQSARSPLPRVALESADRPSGSVAHPAPRLPPRYRSVTICAESRKSKSRLIAYSGIREWSTEPCEG

SEQ ID NO: 940909 - protein, 34 aa, Homo sapiens
LVRPSSGRARGPDSNVLLLRLPEKVPSAPPQEVT

SEQ ID NO: 940910 - protein, 40 aa, Homo sapiens
HRPRHRFAGFGIRQGKYPAAELAVLKCLAVALFQLAANLR

SEQ ID NO: 940911 - protein, 147 aa, Homo sapiens
FRRGPGRVWNSESILAHCANEHEFGGRSLPICSNNRRGFGHKRRVHSLISPIFGVPPRPNLRQNPFHFYIYGGKFNFFPPTFFGPIRNAPRLLGIPRGKPPMKHPFIGGVILFFNSGKIKNFHDLKSLCFEGKSLNSKRTPHKTGGG

SEQ ID NO: 940912 - protein, 169 aa, Homo sapiens
QLIDHLRVAAFRVGVLHRPTLQGYHVQTRVSQLLGHDRAGPAEADDHGIHFVQHSRHASSPLAGNRYSRKRVRLVALDPVHEVGAGAGETDLGPADHAFVATMDRVAEEPFTGVLHQQAEEHLGRNGIEHQLACLDLAENTVSGSAILRSKRLPAVGFAPAVHGSDAQA

SEQ ID NO: 940913 - protein, 94 aa, Homo sapiens
MKLALVVGRVAQQVGNTEVHAAAPSEHLLANRTAMAVGIIRCMLFGKVDADLIGPPVCTGFSPPNKFLPNGTRAMTSSYSSLNCFSLRTACKRC

SEQ ID NO: 940914 - protein, 52 aa, Homo sapiens
PNFTPSLRAASSVVPGMIELGAIKSPSSASGALVTLLNAAWNAALRLAYQPA

SEQ ID NO: 940915 - protein, 35 aa, Homo sapiens
SSTQGNGENSTEAKAVDSNNQSKSPLEKFMVKLCT

SEQ ID NO: 940916 - protein, 106 aa, Homo sapiens
  misc_feature (24)..(24): Xaa can be any naturally occurring amino acid
  misc_feature (28)..(28): Xaa can be any naturally occurring amino acid
PQRLRKRVGYPGGLVSFIGTPPRXKKGXGQGQLLDSWKLWAHKDQEIQTLKSQIGGPPKALEVSKGEEIQQKVQDLETRNSELEHQLRAMEPSLEKARAKRERGRV

SEQ ID NO: 940917 - protein, 210 aa, Homo sapiens
  misc_feature (83)..(83): Xaa can be any naturally occurring amino acid
MDGAPKRLHTEVLWNQWCGADEMIAFIGVPQAKGYKGVTSGWHHRELPRQPPPGRRKGGLEWGTAFRLGALFVHAGGQEGSPXRLEINKKIYKIGPGSLIKGGEVVKNKASPGYGLFDKGINPLGGFVPYGEGTKDFVMVKGWGGGTKKGGVPPRKSLLGQKKGGGLEKIALKVIDPPPKVGHGRFQTMEEKKAFLGPLKKGRIAKGEGG

SEQ ID NO: 940918 - protein, 69 aa, Homo sapiens
YRRHADEFTPTMTALVKMKTRGGEQEVRVFSLRGAICFGMFARTERAKAFRRKVLDVLDEQARQGQSLG

SEQ ID NO: 940919 - protein, 113 aa, Homo sapiens
IRLLIVVIPPLFPRVCGTSRGVFGHTWGPRVLCPGFHVIWLSGSFPGNALLGVLGVWVEEGPSALMYPLFFPKAPRAWFVEGFDQWGPPWPCLCCQNVPGGWGGVSPGPPPFF

SEQ ID NO: 940920 - protein, 59 aa, Homo sapiens
MAGLMDSVNQRTQLVGQNRLELLLFRLEGPQLYGINVFKVEEKVLQCPNLTIMPKSSQV

SEQ ID NO: 940921 - protein, 41 aa, Homo sapiens
MRIASAICDRHELPVQSTKTRFMRCIEPLSWVPGAIVLKTV

SEQ ID NO: 940922 - protein, 54 aa, Homo sapiens
PAVSLTSSPPSRPHFFGVNGIGLKVVANAGAGFSWRDPDPGGLNSQTWWDLAVH

SEQ ID NO: 940923 - protein, 118 aa, Homo sapiens
RPPVFFIRGPPGWDCGFCPTKRALPGGVPVGGPQRESILCPKASPLMGAAPAWVFGVEGKKGPLPLFSNKGSWAQREKGGGALDVFPAFLKELVPFPFFFFRDPGRGPSPLAQTWGAL

SEQ ID NO: 940924 - protein, 77 aa, Homo sapiens
  misc_feature (18)..(18): Xaa can be any naturally occurring amino acid
  misc_feature (27)..(27): Xaa can be any naturally occurring amino acid
VPLYETCGKKYVSPTLAXELANAITDXSERPPHEKLSDREYQTLVMIASGKTLTQIGEELNLSVKTVSVYRARLLEK

SEQ ID NO: 940925 - protein, 39 aa, Homo sapiens
  misc_feature (16)..(16): Xaa can be any naturally occurring amino acid
GNQVVSVSAQGGLTVXTDRVEQETKVGTSDLTVACGCAV

SEQ ID NO: 940926 - protein, 118 aa, Homo sapiens
KGGGGGGGPPVAPQGPGGERKFSPKPPPPPFKKGGGGGSQPGGFHGPLRFGGKKGGKKTPGGVPPPRGGGRFGGPPGVFFWGGGGLGNGVLKPGLFRGAPRPQNWARDLGPPQKGERG

SEQ ID NO: 940927 - protein, 146 aa, Homo sapiens
MVQALLVHPVGDAVLLVLQATLTIAETKAVSGTLPLQPERQDLLVEGIGVGLHGPGLFGQPALLIGRQHRELGISVLLRLDHGSAGIRDFLVKLDALLGAGTAAPLGLLQCRDLGLVAFVTSAFCCSMIAARWAAYDSCEIKPAFC

SEQ ID NO: 940928 - protein, 68 aa, Homo sapiens
LSRAFLNVLDNAAKWSPENGTVTMTMQQIDDDRVEITVDDEGPGIPADERELVFERFCRSVESRAMPG

SEQ ID NO: 940929 - protein, 112 aa, Homo sapiens
MKAASGGFQGTGGANHFWPCCGGVTEAVPATKDMLLRVLGKQKAGDVNPVSVGFGWGGAGGHGGARGRGWPEGRGSTRSGSGRGSHVMKSRHPPPCRWESQGICHMQSKSGR

SEQ ID NO: 940930 - protein, 84 aa, Homo sapiens
  misc_feature (50)..(50): Xaa can be any naturally occurring amino acid
  misc_feature (69)..(69): Xaa can be any naturally occurring amino acid
MNKSDQSYTVTPDTAATLRVDLTDAAAARGDVACASHIGLRHETNQDAAXLGIDGSGHHVVLVVADGVXSTEGAEECARVASHT

SEQ ID NO: 940931 - protein, 89 aa, Homo sapiens
VLFTLPSRYSSTIGHQGVFRLDGWSRQIHAKFHESHATRGNPTPVPRLQLQDSHPLRYAFPDASPSRNISHWPILRQQNHKAPTTPHMQ

SEQ ID NO: 940932 - protein, 79 aa, Homo sapiens
  misc_feature (26)..(26): Xaa can be any naturally occurring amino acid
  misc_feature (67)..(67): Xaa can be any naturally occurring amino acid
  misc_feature (75)..(76): Xaa can be any naturally occurring amino acid
MTAPAIRIEHLVKTYPAGSGQTKRAXNDATFDIPAGQIVSFLGPNGAGKTTTLRMILGLARPTCGSXQNLGHDRXXLEH

SEQ ID NO: 940933 - protein, 34 aa, Homo sapiens
  misc_feature (18)..(18): Xaa can be any naturally occurring amino acid
SSPDLSLDENDGMSSHSXCSASPRNVFMGDSSSI

SEQ ID NO: 940934 - protein, 69 aa, Homo sapiens
RITKRIISDQVLAIYLSLCILAEFPTRELGQQRYSKAQKPLSMKDQRYLQDAEVPSPELKSQQLTLDKS

SEQ ID NO: 940935 - protein, 42 aa, Homo sapiens
PGQVLAKFDVETRQVVVLFECVRRIISLYGNAQFAPVGDFVD

SEQ ID NO: 940936 - protein, 38 aa, Homo sapiens
DGQPSEFGYVIVWFVRTFGSYHLHHRNLADAQIAWVLY

SEQ ID NO: 940937 - protein, 90 aa, Homo sapiens
FSTLRLTDGWKRSPPLYGPMALLIWMRYTAIDLHLALVIDPGHAEQYSALGLDHALEDAGLQVVRVGFKEWPQGAQHLFHRLVEFRLARV

SEQ ID NO: 940938 - protein, 46 aa, Homo sapiens
GVKDLPAPATEIEAAFEQFWKLYPKKKSRKDAQKAWVKLSPDADLQ

SEQ ID NO: 940939 - protein, 41 aa, Homo sapiens
CKEIVDRFDHGRHLTEEFGLIGFSRMFKEPIAPNEGEMSFF

SEQ ID NO: 940940 - protein, 30 aa, Homo sapiens
GHYRFSEEELMARQWPCTLKKFLTSPTISG

SEQ ID NO: 940941 - protein, 132 aa, Homo sapiens
AFAEHELASSIVASRVSGAYLLGKVVIRIFDLLSKQALGVVQGVGDQGALGSLEQRGIQLNNADQGGEAQLTGLEDDVPGVHPLEVVDLLLRHPEADLLALLVRDEVQVVQSPEPVPGAVHVLGLHGQASFR

SEQ ID NO: 940942 - protein, 31 aa, Homo sapiens
GRFGKQDFIYMAVSDEFDAPGQMLTRCVPQW

SEQ ID NO: 940943 - protein, 151 aa, Homo sapiens
LLTSFVLWYIPCRYIALYQEFPLFSTNNLELGNRELSKVMRCFCRLAVAHRYTKGMPQMSQEIERYLQAGTRANTRRSYQQALEHFEVTWGGFLPATSDTVVRYLVDHAATLSSNTFEDAPRGGGAVALQAKAFPIRTKIRLSPDSQGHSY

SEQ ID NO: 940944 - protein, 103 aa, Homo sapiens
LTVVADRGYYKGPFDGHKRPGSGTVGYNVQTAVDDKRHLIIAHEVTNVRNDRGQLSNMANQAREEIGAEALTVVADRGYYKGPEILACEQAGITTFVPKPLTS

SEQ ID NO: 940945 - protein, 115 aa, Homo sapiens
GLGVGANTRPLAHSRTVGVAWEEAAVVRVLATATVQVDTPQGLGIDTKTNGAFGEAGDVVELEALTRFAVVCTAVTVVVVEVHGARAERQFAVFNETGSACLLRENPQCHGQSQG

SEQ ID NO: 940946 - protein, 39 aa, Homo sapiens
AQDQVVVDGFFLTPALLKTELDTDENSMVTAEIPGGRLA

SEQ ID NO: 940947 - protein, 124 aa, Homo sapiens
MQLSRLSRNASSVRMRALRSSRQAVVISPHCAAVSLLLGAERLNACLMFSSGIPVRCATLIIASVRSTSEEVAALVARRTDAGDQPLGFVEMQRRHRHATAFAHSATGSFLRVVNAMRVDLMSS

SEQ ID NO: 940948 - protein, 136 aa, Homo sapiens
STQVTDEPGTPGNEGDIVKVTITADQVSVAENVKPTFTVHVNQPLDHDLVVTLSNNATVTIKAGETSAPYEHAAQGDDVYQDAGEISLGIKSAVDATGATFENLQLGGDASVKVTDTIDEVVAKLTATPSVTRGGE

SEQ ID NO: 940949 - protein, 42 aa, Homo sapiens
RKLRLNNRLRGLIDNALASHQLLSDNSDTHLNTTQQALEIQA

SEQ ID NO: 940950 - protein, 112 aa, Homo sapiens
ADAILTQAANLAWATCGIELTPMNSPSFPKHVEGLLLAVVSHSPPGQDQPSESNFRPSGRNSPFGETCRYNVCRVTPNSSHRSPTTGSGCPIAAMAIAVSLRHLERPPAVSA

SEQ ID NO: 940951 - protein, 32 aa, Homo sapiens
MGGHKRCQLCCTLAPITATSTVGSAQKRSQCH

SEQ ID NO: 940952 - protein, 59 aa, Homo sapiens
MIELYWFIRPMYWTPASDSACPFLSCGATERRAEFCVYIPGCVRLRLSKGEVLVLAILA

SEQ ID NO: 940953 - protein, 145 aa, Homo sapiens
GSPLTTPIFRLYWVFTSNGECNYPDHYSSTDWSELATRFPKGWRDHDYYQWLHRSHISKVFEPDDPYSDYVEYEDEEAGCLEQRLSGLLARLQTKSGQTVEEFRHWMFSAVWVDVPALRIVESCWRVLMIIMKKGAMGALIHYAL

SEQ ID NO: 940954 - protein, 64 aa, Homo sapiens
NVGDNEEISGETPIQIMYELHEQDAQVYENIFKAIPEGLHLYGRELPHRCATLQLFRLTFRLSD

SEQ ID NO: 940955 - protein, 130 aa, Homo sapiens
RSTLVGDGAERTVTSRIRGLRHADLALSRARAVVLNGVEVHVDEGDAGEHHDHDGDEHPVLNACGREHALIAFVCTLPTGLEPFLRDDRHEGQCEYPAGYQYRPDAVVDDPGNQGQVVLQVVGREKRHGS

SEQ ID NO: 940956 - protein, 33 aa, Homo sapiens
RPRRLGGRKDKEDSSDELEEGRRGVSEGEPDPA

SEQ ID NO: 940957 - protein, 30 aa, Homo sapiens
NKKRPGRRISLLWNVLRRARKHNKLRFLFA

SEQ ID NO: 940958 - protein, 90 aa, Homo sapiens
TRSSIKHLYGNLQNLLDCKDIGEPGIIRVNRDLKRYAAVLGDLGINVETNLDKPRKPHQDREKEILLAAAAIEKGRSKIGETKVSISAVA

SEQ ID NO: 940959 - protein, 37 aa, Homo sapiens
RKLKIRNGFEHLLGMQRYNGSFGLWSSDSEEEYWLTA

SEQ ID NO: 940960 - protein, 53 aa, Homo sapiens
MLAVGHCVTYSSVLVHVFQHVAANESQPQRRSALVGEQVQPHSQTNGAQACHI

SEQ ID NO: 940961 - protein, 47 aa, Homo sapiens
PKPPPPPMLKKPPPPLLEPEEPGDDDNITRGAVMKCVLSHTDSPSLY

SEQ ID NO: 940962 - protein, 109 aa, Homo sapiens
GNAQESAARQDVDLIKRELEAAIASDVEMASGAYENFRIATEGAEAMAQNEAQMQRAYELGEADLQSLLLSRRQAVTSASNALQAHVDTLRTHLSLLIDAHWIWGLDES

SEQ ID NO: 940963 - protein, 33 aa, Homo sapiens
  misc_feature (12)..(12): Xaa can be any naturally occurring amino acid
QAKSLPVWMLDXPVGSCFKGFHCKTLKIQEGLH

SEQ ID NO: 940964 - protein, 39 aa, Homo sapiens
DPAQANTLLIISVVIGAPFFVFFGWLSDRIGRKPILMLG

SEQ ID NO: 940965 - protein, 100 aa, Homo sapiens
  misc_feature (51)..(51): Xaa can be any naturally occurring amino acid
  misc_feature (94)..(94): Xaa can be any naturally occurring amino acid
ARDQLSDWIDRNFGSCLFCVFGGVCLICGYRVAGLLMDSGELSITGDESLXFFGHGQGRQQQGRQDEDAGNTHTVGHLKLPSCGASANEDGGKXSPFNAT

SEQ ID NO: 940966 - protein, 69 aa, Homo sapiens
PVRRSGLSDGGEESALSLLCFGSVGGTCSLAGRIFKACANQRVEVLERLGADQQRKLEGASGGEVPFDG

SEQ ID NO: 940967 - protein, 64 aa, Homo sapiens
LLMEMKLSFRRDELRFSGGTHICTLTGYLVLCHELDLGVDVPQVGDFILGHREADEEDLISRDR

SEQ ID NO: 940968 - protein, 60 aa, Homo sapiens
DQRYTEHAGHHHCRRPLAQEQRHDPDHQGHCDHQGQFHFVQRGADGLGAVLQHRHLDRGR

SEQ ID NO: 940969 - protein, 110 aa, Homo sapiens
MALTIPPPTEWSKPNGEPMASTHSPTLSFSHITQLHDRQVLALDLQQGHVGTRVGADQFGLQLAADRQADDDLVGVRDHRVVGQHVAFLANDKPEPRDCASRWTTPCGEL

SEQ ID NO: 940970 - protein, 40 aa, Homo sapiens
EEPMDVLHHHDGIIHHEAHRDDDGHQGEVVQAETQYVHQR

SEQ ID NO: 940971 - protein, 100 aa, Homo sapiens
EERQLAADRGKNRPLIKHGQHDDRPAPVTQEAVDMLQQPEDRLGDEPQEAVVDGQFQAWGQLFQLGLNLRAGVQHGAGFDLAASRHADYGAGVANDVVTL

SEQ ID NO: 940972 - protein, 137 aa, Homo sapiens
GLEGLAFELLGNEGPVDQVPERLDVLRTQVAVVDVVGVFPDVAGQQRGIAAGQRAAGADGAGQGQGTVSFLDQPAPAGTEVANRSLGEFFLELVEGTESGVDGVCQGTGRLDTGVRGQAVPVEGVVPDLSGVVEDAA

SEQ ID NO: 940973 - protein, 93 aa, Homo sapiens
  misc_feature (62)..(62): Xaa can be any naturally occurring amino acid
MPMRGRQKIAIVGAGLGGAAAATLLQQAGFDVEVFEQAPEFTRLGAGIHIGPNVMKIFRRMXPEQKLELMGSHPDFLVSRDGHSGDYLSRIPL

SEQ ID NO: 940974 - protein, 103 aa, Homo sapiens
MVLFRGNIPPMNYSVAGDVRNIRRRSQLGIGGLFMLAQLPPALQSLHLPLRLKLWDGNQFDLGPSPQVTILVKEPQLISQLTHPSMDQLGTAFVEGKLELEGD

SEQ ID NO: 940975 - protein, 77 aa, Homo sapiens
VTGLVMVGMAERYRIGSRRFMFGEAMSILARSTRSPSLNSPAFMRANRSRFSSTLRSRNGLFLPGSLRVPRYSLSYS

SEQ ID NO: 940976 - protein, 37 aa, Homo sapiens
LLRARDQGYGVPAEALKKASERLLRYLQERNLIEVDY

SEQ ID NO: 940977 - protein, 78 aa, Homo sapiens
WYQPLRRLKATRHQLSALESRICLRFQPTTLNLDNQRQAWLTFSVPPSNNWEYRNIKPVSIDYAFQPRLRDRLTLRRI

SEQ ID NO: 940978 - protein, 57 aa, Homo sapiens
GAGEADEGTGDDKHRDVQTKSGEGSCPTGVAVQHRNDDWHIRATDSGDEVEAEEQRG

SEQ ID NO: 940979 - protein, 81 aa, Homo sapiens
  misc_feature (49)..(49): Xaa can be any naturally occurring amino acid
VAGLAAQNSPEVPDTKHPTCPLHRLPLNPGPSPLTFPPRTLRALVLHLXSPWLHSPVRNTRLAPAQPSFSTASSGVSPEDA

SEQ ID NO: 940980 - protein, 87 aa, Homo sapiens
FVWHEDGTSRAHVLKREYTPRYYDMMKALEDLTGNGVSLNTSLNRRGEPMICSPTDALNMFFGSDLQYLIMEDILVVKDGAAAYDQP

SEQ ID NO: 940981 - protein, 58 aa, Homo sapiens
  misc_feature (1)..(1): Xaa can be any naturally occurring amino acid
XDDFERILQEPHASLTEQYQPPLKTEGLNIAFQADGIKRLAEIAYQVNEKTENIGGAI

SEQ ID NO: 940982 - protein, 38 aa, Homo sapiens
  misc_feature (16)..(16): Xaa can be any naturally occurring amino acid
TSTCLACPFSVKVTRXGRVKESITRRRRAPLVGNVGSH

SEQ ID NO: 940983 - protein, 74 aa, Homo sapiens
MFVASADDKGFDLKLSSEVQDITRNKDGFWHVEYKNLKDGTESATDAKFLFIGAGGGALKLLQKSAIPEAKEYA

SEQ ID NO: 940984 - protein, 78 aa, Homo sapiens
  misc_feature (2)..(2): Xaa can be any naturally occurring amino acid
  misc_feature (24)..(24): Xaa can be any naturally occurring amino acid
FXRKAAAIAEQYQAVIANWIARQXGSTQAKAGFEASISIKALHEACALPSRSQGELLPSTAGRLSIARRRPLGVIGVI

SEQ ID NO: 940985 - protein, 79 aa, Homo sapiens
KIDTPPIRGLPDDPHDAAIARAIIALGRSMQLTIIAEGVENQAQQRFLAAEGCEQIQGYIVSLPLPPDEFAAAVLRIAL

SEQ ID NO: 940986 - protein, 53 aa, Homo sapiens
MSTTPATPKVGFVSLARPKALVDSERILTQLRMEGYEVVPTYEDADVVVVNTR

SEQ ID NO: 940987 - protein, 34 aa, Homo sapiens
KADGYIDDLLAEISKCVKKKNRVLVTTLTKVSAE

SEQ ID NO: 940988 - protein, 112 aa, Homo sapiens
SADHHFDDVGLLVDHRAPGPSHHHQAVAEQEGNDAGHHRHPPLRDNRVQLVAWVAPLAKVPKTMVTAAEKVMVSCGTTAARPAKPPASRVSVPLMFALLGGGDGHRHPRCGY

SEQ ID NO: 940989 - protein, 115 aa, Homo sapiens
RARGAFMNNRTLFGLSLLTLSVSTGQAAMAAGEKGYGFIEGSSLTILNRNLYFNRDFRKRQSSSSRRGYSEERAHGAIGRFESGFTEGTIGFGADAFAMLGLKLDTGDGRTAAGG

SEQ ID NO: 940990 - protein, 93 aa, Homo sapiens
PLHPGKCDLLVSPCRRPSDGRDPAKDALAYIPDTVWRNRVEFPRGRAEVQAVLTRKWNHELEYRLIKELWAFTGNRIAVRYAYEYHDDSGQWF

SEQ ID NO: 940991 - protein, 74 aa, Homo sapiens
DGAVTSRFSDYQGELLDAAAEACKGRRARSHIVSYAEDGALLTELFTRGGGGTLVSQEQFEVVREASIEDVGGL

SEQ ID NO: 940992 - protein, 105 aa, Homo sapiens
GLDDRYRGVRGQREVLFANEADIIRLGFQPGQKVDIVSLWGDEHVRRVQGFTLLPFDIPAGQAAAYYPEVNPLVPLESIGDGSHTPTSKFIAIKLERARDDGRIL

SEQ ID NO: 940993 - protein, 87 aa, Homo sapiens
  misc_feature (19)..(19): Xaa can be any naturally occurring amino acid
NFFRHLLKKQQVFFAILAXPHAYLQVKGLSLRQGTIVDATIIHAPSLTKNEEGKRDPEMHQTKKGNQYYFGMKAHICADAESVLGHY

SEQ ID NO: 940994 - protein, 48 aa, Homo sapiens
SLGDTLFEHKLWNESLIAQVRSGELEPHYYWQLEQQLLVTGAEKVIFG

SEQ ID NO: 940995 - protein, 92 aa, Homo sapiens
NVAQGSAEWHALRAKYFTASEAPAMMGVSKYQTRTELLHQKKTGIAQEVTAAQQATFDRGHATEELARPIVERMIGGDLFPVVGTEDNLLAS

SEQ ID NO: 940996 - protein, 103 aa, Homo sapiens
MDLDGHADRGSAFEFSFTPGAMGAIVGERFVRAANYALEHRCPMVCFSASGGARMQEALISLMQMAKTSAVLARLREEGIPYISGLTDPVFGGVSASLAMLGD

SEQ ID NO: 940997 - protein, 44 aa, Homo sapiens
VLAAWVFAHWGWVAVCGLGMAISAVALGYWLWLQRARAAEAALP

SEQ ID NO: 940998 - protein, 70 aa, Homo sapiens
VAKGLRNPAGPGSGTTGSFPGQAAHPSMRRLPTAGTQHANGGCAAVGSRRVELVEDHVHARQQRVVAQPH

SEQ ID NO: 940999 - protein, 78 aa, Homo sapiens
RPRFYEPDVHTMAAPLQALFDAVNVRFVQGTACHIDEGARRVSYRTPSGTLCALPYDRLIMACGSELNRPDRVGIEHA

SEQ ID NO: 941000 - protein, 118 aa, Homo sapiens
  misc_feature (26)..(26): Xaa can be any naturally occurring amino acid
IRSQGVRDAAIIALLYGTGMRPPESXDIDLDQVDFQARSLQVVGKDNHQLVKYAPPWAFEKMQACLDLRRQDLSAGAEDDPFLFNSIRRGRHITRARITKRAIYYIFPQRCALVGVYI

SEQ ID NO: 941001 - protein, 41 aa, Homo sapiens
MKQILIIGAGFAGLWSALSAIRQLDLNGSKDVEVTLLAPQA

SEQ ID NO: 941002 - protein, 86 aa, Homo sapiens
PRPPCNCMIDLRIASPKLVPPSNRERPAPTRENRSNKRDWCSAAIPGPRFSTASRTSLPARSIRRSTGSPSGLCRMALLNRFDSAR

SEQ ID NO: 941003 - protein, 123 aa, Homo sapiens
MTPYIEGGDVVEPLGERVLGRVIARDVFKPGTEDVIVPAGTLVDEQWVEFIELNSIDEVIVRSPINCETRYGICAKCYGRDLARGHHVNIGELSAVSLRSDLVSRYPAAMLRSNRWVAADLEG

SEQ ID NO: 941004 - protein, 166 aa, Homo sapiens
MQPEMPKPRISLRTYCHPCRNVWLDAITSGLRGPTGLQFDKATFGPGLNALFLLLLIPPLTELVVQGKDSGVKLFAAYHRWERSRYSVIADGAIGAGAPIMPTYCRDLTDMPVGLQDLRDHIVDLRRILGTQPEALMLSSAFSRSLARPNPYPSDMPLLLFRGGLG

SEQ ID NO: 941005 - protein, 107 aa, Homo sapiens
LMNSLLPKAVRRALTDVQERQRRRRAEEALADVEARAWIAIDAAGMGTWYLRPQEGLLCWDDRCKTLFGLPTSTEMSLEVSSVVYPDDLAMVRDAVEYAMRPESEGQ

SEQ ID NO: 941006 - protein, 169 aa, Homo sapiens
VIVLIWVLGKVVTAEPKAASWQAVKQFTRSRPSWSSAYIFPSMMLLASVFTPTVLPSGSTGSMLLPFTGTQPAASGFTFFFCRVRLPKRSFLPFVSSITADPLPAEISVSLKNGSSTSSGPSGVWSSQTSIGSSTTSADLDRWGVGESGKSFISLGLTSVGSKERTDAN

SEQ ID NO: 941007 - protein, 85 aa, Homo sapiens
  misc_feature (4)..(4): Xaa can be any naturally occurring amino acid
MALXTPFRRSSLSEAYINPHSTSSSSSPLRWAVGRPILWQMLRALSQDSPSRLCPVASRQTTSLPNTPPKPLQGTSNEAPCPFRL

SEQ ID NO: 941008 - protein, 77 aa, Homo sapiens
LVAKADHVHPRVDIDVDLGLAVAQSGRAVDAGLGVDVDVPDRGVDQQVVGDHVVHAQLAGDPDRVLQFQVAEALLLA

SEQ ID NO: 941009 - protein, 120 aa, Homo sapiens
PDEVSDQRRLAAEQACEKGAAHFLQAMQRSAQPVAAVIGMLHISAYLREPGWLVELFAGQVARYRPSAHADVEVQEAAAPLLVKYGLTPLLELPQSLPAGLGARLHEQGESARDYWLRHA

SEQ ID NO: 941010 - protein, 94 aa, Homo sapiens
  misc_feature (4)..(4): Xaa can be any naturally occurring amino acid
  misc_feature (26)..(26): Xaa can be any naturally occurring amino acid
DPSXVGQAAAWLIVTYSRTLKAPPYXRVGDNEGTVTEVGMFNTTIRTGLGEVLTLSNLMITGSVTRNYSRVVQGQGYICDTVGTIGFDTPLRQG

SEQ ID NO: 941011 - protein, 69 aa, Homo sapiens
PGLFFTENVTETAQLSHCLQDEGCGDVQEAAWGTVAGSRRVGWTQCQGQDAPSLPCSTCSEPLLFPLSE

SEQ ID NO: 941012 - protein, 101 aa, Homo sapiens
MTPCAFDFSTISRNGVMYLDWERPPFWLWLKRLESERFKTSPDATDEAIVLTVQELNWLLDWFDLWRNSPASGFDAAIRRLIRIIRGMISMPEDLADDPVE

SEQ ID NO: 941013 - protein, 73 aa, Homo sapiens
MTSTQAAAERHHPGHYCAPTELPAPAGNSRERNENSVPTAVLTIMPKMIRHITSPSSGDTSLAIDSIGMGRSA

SEQ ID NO: 941014 - protein, 34 aa, Homo sapiens
MGWIYVVVAVASGAVFIGEAAQLLRRANSGLRDA

SEQ ID NO: 941015 - protein, 53 aa, Homo sapiens
  misc_feature (10)..(10): Xaa can be any naturally occurring amino acid
  misc_feature (27)..(27): Xaa can be any naturally occurring amino acid
  misc_feature (39)..(39): Xaa can be any naturally occurring amino acid
  misc_feature (42)..(42): Xaa can be any naturally occurring amino acid
MELLTLTFGXDGALTRMMTIFTKAALXTFAGHTAVLPYXYQXAVGHYGWLTPT

SEQ ID NO: 941016 - protein, 38 aa, Homo sapiens
NRRRDSFGLGPHCGENENNGGPQKPSTPRNLTTYNGTT

SEQ ID NO: 941017 - protein, 80 aa, Homo sapiens
  misc_feature (40)..(40): Xaa can be any naturally occurring amino acid
QACACQPHTAHSTLLAMKQQNPIFLLPGRREPMHQAASTXITMAGHSSNPIQYSMKTFQLIMGYLKLITCQRPERWQVIA

SEQ ID NO: 941018 - protein, 53 aa, Homo sapiens
IEHLVSQERGVVFFQNSHIPPVHELKRDSDTWENRTVKATPAIQRDRRLQLIV

SEQ ID NO: 941019 - protein, 53 aa, Homo sapiens
  misc_feature (1)..(1): Xaa can be any naturally occurring amino acid
  misc_feature (25)..(25): Xaa can be any naturally occurring amino acid
  misc_feature (31)..(31): Xaa can be any naturally occurring amino acid
  misc_feature (39)..(39): Xaa can be any naturally occurring amino acid
XTNCRRHTDHQCGNYSTGQGVTDRXCRRTAXRLNLRHGXFSAMDRPGQHYRAD

SEQ ID NO: 941020 - protein, 35 aa, Homo sapiens
  misc_feature (15)..(15): Xaa can be any naturally occurring amino acid
  misc_feature (25)..(25): Xaa can be any naturally occurring amino acid
YGDNILAIMAKRQKXKTIMEQVMPXSLAITMPRLL

SEQ ID NO: 941021 - protein, 120 aa, Homo sapiens
  misc_feature (91)..(91): Xaa can be any naturally occurring amino acid
  misc_feature (108)..(108): Xaa can be any naturally occurring amino acid
SYGDLRDELGRWNLFFLVLMVRSTKSQFQIGIDGDGKVDGFVKMVREEFFSVRNASLFKTVTGKFVVNGTIAVEECIRTGVVLDNHAQIRXRNLRKDVGPASLKALEXSISALKGPSSDF

SEQ ID NO: 941022 - protein, 88 aa, Homo sapiens
  misc_feature (21)..(21): Xaa can be any naturally occurring amino acid
  misc_feature (46)..(46): Xaa can be any naturally occurring amino acid
  misc_feature (48)..(48): Xaa can be any naturally occurring amino acid
  misc_feature (74)..(74): Xaa can be any naturally occurring amino acid
  misc_feature (80)..(80): Xaa can be any naturally occurring amino acid
VLAELPKDYRVTVDHHGLAFXLYQAALFEVLEDAADHFPRATDDTXDXLRVILICMPSGMVMGSGCLPVSSRQXVLERHXKNASCPTF

SEQ ID NO: 941023 - protein, 90 aa, Homo sapiens
DLQLPVRDQTLFQRADNIENGWRAAQPFIDAWAQGGDVHGYPAGEDGPEAGNELLARDKREWHRLGKDFCKFCAGPFAAKAAPTGIPLPL

SEQ ID NO: 941024 - protein, 162 aa, Homo sapiens
  misc_feature (114)..(114): Xaa can be any naturally occurring amino acid
  misc_feature (121)..(121): Xaa can be any naturally occurring amino acid
  misc_feature (147)..(147): Xaa can be any naturally occurring amino acid
  misc_feature (151)..(151): Xaa can be any naturally occurring amino acid
CSGTDKNIIAGGTGTMNALNYEVLRNTEKLYYKDQYQAGANTQVTRVHSDGIELQSTVAYPEGGGQEADMGTIELPIGTVRFIWVKKLYGSPIRLEGFKGGKLGGIIIHSLHPXDLHLLDXVTAGMPGPVTIDIERCERLTLSHSAXHFLXAAGIGLARRVE

SEQ ID NO: 941025 - protein, 94 aa, Homo sapiens
HRAMFHSDNAYYLVDATVHAHRCKTNTASNTAYRGFGGPQGMVAIEQVMDHIARHLGRDPLAVRKANYYGKTERNVTHCYQTVEHNMLDEMTAE

SEQ ID NO: 941026 - protein, 138 aa, Homo sapiens
  misc_feature (7)..(7): Xaa can be any naturally occurring amino acid
  misc_feature (67)..(67): Xaa can be any naturally occurring amino acid
QAAAPLXGQYLLAQAGDIPALLCFIDKCLQQRLMLRAAGEVLPLVRVAAQVIELAGVILAVHELVRXAADHHQRADGAFGHVFADHFIVTALPLQMADKRAAVQVQAFIQQTRRQFDQGCSRSQVDTEELTRPAAKRL

SEQ ID NO: 941027 - protein, 70 aa, Homo sapiens
  misc_feature (50)..(50): Xaa can be any naturally occurring amino acid
  misc_feature (70)..(70): Xaa can be any naturally occurring amino acid
QGLEWLGGIIPMFGPANYAQTLQDRLTITADESTKTVYMELSSLRPGDTXRFFCAKHDYYDTSGEFPLDX

SEQ ID NO: 941028 - protein, 46 aa, Homo sapiens
LGLLHQESWALLPRTLIDGPGFSSPGFSSPGFSGLGPLGLWLHPGL

SEQ ID NO: 941029 - protein, 53 aa, Homo sapiens
WADELKDMIRHSEDFRPWSLYYMPPETMSWKPVAGLTLAGDAAHVATPNGEGV

SEQ ID NO: 941030 - protein, 129 aa, Homo sapiens
  misc_feature (88)..(88): Xaa can be any naturally occurring amino acid
VCCPQQRFCKAEGGFGPGALEEDFWERGWRNGHLGAVGRGLDQRQAAEPEAWEVGLRALCPHTLRASEWELAAVSLLIAASRFVLTGXQNLKEKVPGPKGWALACLGPRTLWGILKSDLKHQLGLAAFT

SEQ ID NO: 941031 - protein, 80 aa, Homo sapiens
VWPVALSGRLPVVALVSHYLTNKLIGRGLILHRRSFPTSKMPWRLVSGIRPRFQGLSQSEGQIAHVLLTRSPLIPSRRRF

SEQ ID NO: 941032 - protein, 49 aa, Homo sapiens
MEGLVLKGQALPLTLVHPWLPKKNGRSINLRGALTLDGHLRPHGDAWEG

SEQ ID NO: 941033 - protein, 95 aa, Homo sapiens
CACQSEPGVVVYACQSEPGVVVYACQSEPGVVVYACQSEPGVVVCACQSEPGVVVYACQSEPGVVVCACQSEPGVVVCICQSEPGVVVCAWIPGY

SEQ ID NO: 941034 - protein, 68 aa, Homo sapiens
QTTHQALSLNRITVHSEMNQNNQSGISPTTPPPLAWPHQRLPPILHKPSQSPIPNYSKGPGVFPSCCA

SEQ ID NO: 941035 - protein, 77 aa, Homo sapiens
DQGTLVVTRVSWPQQILATMGELKLFGMKAANDEIIKVAVKRTHEPQQIVGDLLQAEISEKQARSIRYQMTIAKLPW

SEQ ID NO: 941036 - protein, 134 aa, Homo sapiens
  misc_feature (83)..(83): Xaa can be any naturally occurring amino acid
  misc_feature (128)..(128): Xaa can be any naturally occurring amino acid
PKTVTLDVQNMTCGLCPITVKKSLEKVSGVSDVQVNFDQKTATVTYDPDKAQPEALTEARAKARVDQWIEWIHEPHLLKDRAXAYRGISGEQFHGSKASKSETDERIRQALKYVAQPRIGLLAVDLGXSTKLDI

SEQ ID NO: 941037 - protein, 158 aa, Homo sapiens
  misc_feature (22)..(22): Xaa can be any naturally occurring amino acid
  misc_feature (30)..(30): Xaa can be any naturally occurring amino acid
  misc_feature (62)..(62): Xaa can be any naturally occurring amino acid
  misc_feature (109)..(109): Xaa can be any naturally occurring amino acid
  misc_feature (141)..(141): Xaa can be any naturally occurring amino acid
  misc_feature (157)..(157): Xaa can be any naturally occurring amino acid
HTVLVGLQRNNGDDDFDYLRQXDSIYLDNXIQYSDFNSPKEKSWQVRYDLDMESFGVPGLSXMTRYAQGWDADYSKANEVYMRRDDNGDPLTNQKRWERDIEAKYVCAXLDALKDMSFRGRQMTTSRERLRSRIWMKSADXEVPPGKSLTLGKPGRXE

SEQ ID NO: 941038 - protein, 101 aa, Homo sapiens
  misc_feature (72)..(72): Xaa can be any naturally occurring amino acid
  misc_feature (78)..(78): Xaa can be any naturally occurring amino acid
  misc_feature (85)..(85): Xaa can be any naturally occurring amino acid
IGGKNIGETVEGLARYPINVRYPREIRDSLEALRNLPVVTESGQQIILSSVANIQITDGPPMLKRKIPALVXGSILMXKDRDLAXVVQDLKHTIDSQVKLS

SEQ ID NO: 941039 - protein, 96 aa, Homo sapiens
MTLVLAAVDWLRPGIALACCTAPDSAQHRRVRKIDAKAFCLYRHAGQIGKLRKPAVKQRIDHEAFVGVAGTDGIEAQPSALVILHEAGTATLVDCV

SEQ ID NO: 941040 - protein, 120 aa, Homo sapiens
PLSGPPRKPTGVRYTQNDIDTWANVVARSIRAGGGRKGDKVHVSYGYGLFTGGLGAHYGAERLGCTVIPMSGGQTEKQVQLIRDFQRDIIMVTPSYMLNLANEIKRQCTDPHELSCAWHF

SEQ ID NO: 941041 - protein, 124 aa, Homo sapiens
QRHWPQFCRGGWILMNRTGRALTLCCLLLLQPLLGLAEGGNSVLIPATCRCTLNVQPEDLANALKACEQTATAGDAQAQFELCEYHYTQTPKKLDIALDWIQMASLQGQADAQYRLSAMFFHGE

SEQ ID NO: 941042 - protein, 35 aa, Homo sapiens
  misc_feature (27)..(27): Xaa can be any naturally occurring amino acid
LVAGCRTGGAMIDVDALVSRGIDGLEXPNGHANHP

SEQ ID NO: 941043 - protein, 34 aa, Homo sapiens
MIGADRRGTKGIGEVRGCQGQAVTEMMLATGVVA

SEQ ID NO: 941044 - protein, 30 aa, Homo sapiens
NADFAAPVCVLLNVLDFRNTPKRRHRGRNF

SEQ ID NO: 941045 - protein, 54 aa, Homo sapiens
MLVAPRDVKIHRSYYPVGTCCRYPLGVGYSASIDRCVHRPHQGQYSVSVGFRDL

SEQ ID NO: 941046 - protein, 53 aa, Homo sapiens
  misc_feature (6)..(6): Xaa can be any naturally occurring amino acid
  misc_feature (35)..(35): Xaa can be any naturally occurring amino acid
  misc_feature (53)..(53): Xaa can be any naturally occurring amino acid
ALRAFXHHHEIHLGPNGWIIAIHPQHPHHGTDHEXKEAVPRIGAVTGTEHVDX

SEQ ID NO: 941047 - protein, 69 aa, Homo sapiens
MPGQAGYRDNSAGYNYDPEAAKKGLDEAGWKKQGGHRVKDGKTLTINYAKLTGVPTSENEGALFKQDMS

SEQ ID NO: 941048 - protein, 91 aa, Homo sapiens
KSFMQVEAQRLRVLFDDVQVLGIQFVDGIAQQALANTLATAGRCDEQHVHPPVGDPGETADPLAVLAANQHHCVEVAAQHVFAQQQDVALW

SEQ ID NO: 941049 - protein, 45 aa, Homo sapiens
NNLNWIIRVVFSSGVLPVMIPLGVIGSKKNSLAVLIINDASLNVV

SEQ ID NO: 941050 - protein, 130 aa, Homo sapiens
RKGCRVEVPTGTNILELAHDHHIEMESACGGVKACTTCHCIVRKGFDSLEEADELEEDMLDKAWGLEAQSRLGCQVVVADEDLTIEIPKYSLTTLPKHGTEDLYMSLKWVDVLEIAIQLAESKPVVDPES

SEQ ID NO: 941051 - protein, 142 aa, Homo sapiens
AEERSIIQIGHAQGFSLRGIACLINRSPSTISRELRRNRDACGGYSARVAQQQMQARRQVCRPKQKLLPGSERFELVAHMLRERLSPEQIAGKLRSMNIPSLRDAYVCRETIYNAIYALPVGELRKELIICLRQSKTMRRPG

SEQ ID NO: 941052 - protein, 54 aa, Homo sapiens
IASTPCLLYPRLPAYALLASFLRKRYVNSLLSYSNKDEQSQQRYARMTPFGPQY

SEQ ID NO: 941053 - protein, 104 aa, Homo sapiens
YLDAHGGLARRHARRMQQRLNLKYAVDIDIGAHIAPGLRIAHLPGVVITRHVRIGRNFFIRQNCSIGIKTLGLEEYALRIGDNVSMGANSCIVADRIDIGDDVV

SEQ ID NO: 941054 - protein, 93 aa, Homo sapiens
YISGDQFETWGWRLPFLLSIVLLAISTWIRMSMHESPAFAKMKAQGKISKSPIRESFTSWPNLRVVLTALFSINAGQAVTFYTAQFYVLFFMT

SEQ ID NO: 941055 - protein, 106 aa, Homo sapiens
LVRKVVEVGVVGPHDGGVQVDPAITGTVPVTVFVIVVGQLVVARVEHPAARIDHTTVQASNGHRRLDGRTRWVQAAQHAVEQRPVYRVAQFGIGLEADAGNEQVGV

SEQ ID NO: 941056 - protein, 72 aa, Homo sapiens
  misc_feature (3)..(3): Xaa can be any naturally occurring amino acid
MPXPAVRPLSDNADGVPPQLRTDLLKLHQLADEVIQVRIREHVIATNDMRLFGLHLLGQASLRMEQALWPEE

SEQ ID NO: 941057 - protein, 85 aa, Homo sapiens
LNAYKRGTAPAHRFEGLDLTQARNNPELLGIAMTPDNLQIDKEVLEYAQHGCSPIDSAHGFHSRWLRRFALKGYLGNAMNRHTLN

SEQ ID NO: 941058 - protein, 119 aa, Homo sapiens
  misc_feature (5)..(5): Xaa can be any naturally occurring amino acid
  misc_feature (92)..(92): Xaa can be any naturally occurring amino acid
  misc_feature (113)..(113): Xaa can be any naturally occurring amino acid
CGESXRFYDGALEYRNIAQHRFPQVLDWGLTYPVTLSFGTEYRYEQWNQSLAFLASYNGMTGGAQGFAGFSPLNTVHANRNNYALYAGLEWXSSVSICSAGIGRAVQALLLIXGNQTSG

SEQ ID NO: 941059 - protein, 48 aa, Homo sapiens
MIFYEPSDGLPAYRPEKCVNENHDIPSSFLNIDTDRYGSAWLAFSSDP

SEQ ID NO: 941060 - protein, 64 aa, Homo sapiens
  misc_feature (28)..(28): Xaa can be any naturally occurring amino acid
  misc_feature (51)..(51): Xaa can be any naturally occurring amino acid
AINDNAIRARSPPEIHPPVQRHDLKENXIYPKSRVWIGLVLAAQGYGNDQXAIVPRAVIQPCAV

SEQ ID NO: 941061 - protein, 112 aa, Homo sapiens
  misc_feature (17)..(17): Xaa can be any naturally occurring amino acid
MIGGHCPIMMPQCNHDXDSGPVTVGIMIGIPFKDDSIVAHSIYSFGSFNDDFIHVDLVIPFDFFDDDSLSSLDDSIQIPFEMIPFKPIQTFHSILFNDDSIHVDLVIPFDFI

SEQ ID NO: 941062 - protein, 87 aa, Homo sapiens
MLKALCQSLCLALSLTASAQPASVVFLNPGLSTETFWTSYTRFMQAAADELCMTLRVEYSERRADLALSHARAILGETQTPDYLVLP

SEQ ID NO: 941063 - protein, 46 aa, Homo sapiens
ASRRHHAGVIPVHFDPGLPIQAPNAQCVLAGGRNGGLALKRRQIEL

SEQ ID NO: 941064 - protein, 42 aa, Homo sapiens
KALTALISFVYRETVWDTPERFAKRQHHCDVASARGRRRGTG

SEQ ID NO: 941065 - protein, 46 aa, Homo sapiens
PRATVGIMIGGHCRPSGPALRSGDIGVTSSYQAKANVHQPVSPPGV

SEQ ID NO: 941066 - protein, 45 aa, Homo sapiens
  misc_feature (44)..(44): Xaa can be any naturally occurring amino acid
MPALVRAASLTNYLEVSRHLGLNPHALLAQVGLNAALLDDPNRXI

SEQ ID NO: 941067 - protein, 53 aa, Homo sapiens
  misc_feature (47)..(47): Xaa can be any naturally occurring amino acid
MRVSTLMIAGCGCSHLALATIPAYRHTYCAVNYGSPAPCYLLFPPPXATFPAT

SEQ ID NO: 941068 - protein, 108 aa, Homo sapiens
TFALEPQCCGRCNNIDSIKCANLNKAFLKITQNTKIPSKLPPDSSSHFESSRPSFSTTAIAHMTDSFYGYDVIVIGAGHAGSEAALAAARNGAHTLLLTHNIENHPVQ

SEQ ID NO: 941069 - protein, 127 aa, Homo sapiens
KAVKIRRFCQLFRYIERLFNNDGHMASFKSKSMQEGEAHNTIRSASRAWRLTGVPAFPSKLLRPARHRQGAFHAVTEYVDRHSRCQRIRPVGHPGPVHGPYRTLRSPPDGHGYRRDPGHLDARRGGV

SEQ ID NO: 941070 - protein, 143 aa, Homo sapiens
  misc_feature (48)..(48): Xaa can be any naturally occurring amino acid
  misc_feature (101)..(101): Xaa can be any naturally occurring amino acid
  misc_feature (111)..(111): Xaa can be any naturally occurring amino acid
  misc_feature (116)..(116): Xaa can be any naturally occurring amino acid
  misc_feature (122)..(122): Xaa can be any naturally occurring amino acid
MTKATAWFRRVPAQAEKLPQRLLIECREAHVPLTSHLVEPSAYADSFXCVGTVRNTSRIIEEMKGITMIANTKPALSVADSERWSLKQRAISGRIADVDHXGNGVECYSGXHRVTXTNSPHXAGKKLNGIPPTNSNCIANGAC

SEQ ID NO: 941071 - protein, 101 aa, Homo sapiens
MNAVLLGYRDEPIHHTTYTPPMSQRFRGYLPVVVDVETGGFNWNHHALLEIACIPIEMDDTGRLYPGEVTSTHVIPAPGYRYRPKSLEVTGIILDHPFRFA

SEQ ID NO: 941072 - protein, 67 aa, Homo sapiens
ELLTYMMEDDRNITPCIHLLFMAKNLERIGDHATNIAENVLFLLNGEQMLPPREKCDNTSNVNQIEF

SEQ ID NO: 941073 - protein, 103 aa, Homo sapiens
  misc_feature (38)..(38): Xaa can be any naturally occurring amino acid
  misc_feature (87)..(87): Xaa can be any naturally occurring amino acid
LLKLNVVPEPSERCTMLILVSGRCNPGLALMIAASFHXLIFPRKISASSGPVRRSLPGSMLSRLTTGTTPPMADGNCPRPLGSVRCXQVGLSERTKIDWLGGF

SEQ ID NO: 941074 - protein, 98 aa, Homo sapiens
ETGRSIQCPDLGLDAPVRFQALNQFGARRLHVAAHQGFVATFAHGIDQFRRQALAHQVGLDGLRTLPRNLQVALAVANLVGMAVITILPTLGVLSKLV

SEQ ID NO: 941075 - protein, 57 aa, Homo sapiens
MSGQCSPQPLEPPSIPRLLPSTPNSLFLCWACCTDALKADLMLPVECEPRCQYQGGG

SEQ ID NO: 941076 - protein, 107 aa, Homo sapiens
MAYWSVEWIVQFHKYSGPKVSWGQEWLPINGWLLALQRNLVAMIRIANRERVAIGAFLLVRTCARVDGKVYIYAYVSQYGYQRTLHSAQRSRKRCACLELAVDINTH

SEQ ID NO: 941077 - protein, 35 aa, Homo sapiens
IAPVRSLVTRFPNQYLGVLKILNGGQLRSLEERFA

SEQ ID NO: 941078 - protein, 105 aa, Homo sapiens
  misc_feature (67)..(67): Xaa can be any naturally occurring amino acid
  misc_feature (77)..(77): Xaa can be any naturally occurring amino acid
  misc_feature (82)..(82): Xaa can be any naturally occurring amino acid
  misc_feature (84)..(84): Xaa can be any naturally occurring amino acid
  misc_feature (88)..(88): Xaa can be any naturally occurring amino acid
  misc_feature (100)..(100): Xaa can be any naturally occurring amino acid
RVAAAEEELRDLGAVDAEGPDYGEGAVTLPRFPLTQSGKGFDRRCRIVGSRRCAEIAAMLAWKTAGXTFVGKWASIXDRGRXPXLVNXPPLNLNGLARLXTKVPL

SEQ ID NO: 941079 - protein, 67 aa, Homo sapiens
QVTAAPFDRKLVRQARDDAAAFVASDGLIRGARLEAALDSLRHNCARHSVGDLELAEAILCPITTPD

SEQ ID NO: 941080 - protein, 78 aa, Homo sapiens
IKLFSSILLGFLRNPKLGSAISNDYVISRMATCDADNLCDYQSVLTSTHTNCLIRFVKERLVKSFSSQPRRAFYAFLR

SEQ ID NO: 941081 - protein, 75 aa, Homo sapiens
CSQRGDDGIIQSLLTLAFGAGGHSVNEGHGDLIILQAAAFLLVLGEGSCLALRVLFIELSLKPGGGAAMAMFKER

SEQ ID NO: 941082 - protein, 37 aa, Homo sapiens
  misc_feature (25)..(25): Xaa can be any naturally occurring amino acid
  misc_feature (33)..(33): Xaa can be any naturally occurring amino acid
AAVCTVDGPCIGFNKERTSFKERKXEDPHTTLXKTPT

SEQ ID NO: 941083 - protein, 40 aa, Homo sapiens
  misc_feature (24)..(24): Xaa can be any naturally occurring amino acid
  misc_feature (28)..(28): Xaa can be any naturally occurring amino acid
  misc_feature (31)..(31): Xaa can be any naturally occurring amino acid
SSTSQSLGTSESGSAQAGVDLLAXGDPXTPXSQSAGIIGM

SEQ ID NO: 941084 - protein, 123 aa, Homo sapiens
  misc_feature (31)..(31): Xaa can be any naturally occurring amino acid
  misc_feature (58)..(58): Xaa can be any naturally occurring amino acid
  misc_feature (64)..(65): Xaa can be any naturally occurring amino acid
  misc_feature (76)..(76): Xaa can be any naturally occurring amino acid
  misc_feature (83)..(83): Xaa can be any naturally occurring amino acid
  misc_feature (116)..(116): Xaa can be any naturally occurring amino acid
ICQEMVMLQGLCTWRCLPLECGLPALSMVVXFSSLGFRKRPFSETALSNTSPSIGSLXEVFEAXXLFERSGLIIKXMKGPTSXGIYQKPGEQDLAGWSWFSLPDWDMQGPGLKIKXAGRITLL

SEQ ID NO: 941085 - protein, 70 aa, Homo sapiens
  misc_feature (56)..(56): Xaa can be any naturally occurring amino acid
  misc_feature (70)..(70): Xaa can be any naturally occurring amino acid
LNRFRTWMFAVAAAIVGVTVAVCGVVGFIGLVMPHITRLCVGADHRRTLPIGLLLXAIFTVLADLAPEWX

SEQ ID NO: 941086 - protein, 73 aa, Homo sapiens
ISLLPLAIQTYVSGKMTGSYRISNTISSHALNLTGAHFKFDTSRYAYMTFISISNCKHTDIFMKSTARVKMRN

SEQ ID NO: 941087 - protein, 199 aa, Homo sapiens
ILTVSRALYGMLEGTAVTMFMVVSDSNTNDTLMCDPATVLQLEECASSLRHIHRCSGQELGLTIQVSNDGCADSEDDMADIDEDSGPDLANLHYLGHCDVLIWLRLIQNRGLGEASSYHLVQQHFTGPVRARPDEETLQESLYRLARRQSAEHMLLVNGYRQTPYLPEDYLITTHAELVVELCKMSGMPKRSALQVSQQ

SEQ ID NO: 941088 - protein, 70 aa, Homo sapiens
ISLLPLAVKSTIYVKRKTYLSNTITQILSVMAHRYHGGGVHTIDASKSEEHDHPHALQFLRKDCTNVNGE

SEQ ID NO: 941089 - protein, 45 aa, Homo sapiens
MRHSVSVMTDQELLEMDTDPSITHENMDAYLMRGKIGRGTRHRGN

SEQ ID NO: 941090 - protein, 35 aa, Homo sapiens
PRLVLLLVRNNSEKLLLIPYDDVSPKIYRPRMSPR

SEQ ID NO: 941091 - protein, 118 aa, Homo sapiens
LVLPGFSAELDRTSHDPDHTTPAGLTCHRFSLIRFRSPLLTESRLFSLPVGTEMFHFPTFPPHALCVQTRVTPHDWCGVTPFGNPRINARLTAPRGLSQPPTSFIGSWCQGIQGALSE

SEQ ID NO: 941092 - protein, 91 aa, Homo sapiens
LGEHGDPVPRLLPMPDRAIARRLDRLRREGIVSRLQFLQADDVGAVLGQILDQPVEPGLDAVDVVGDDLHGHRCRAKRPYGNTVRAERSPG

SEQ ID NO: 941093 - protein, 68 aa, Homo sapiens
ILVELHMRCCSVPRGIALHALSTLETELEGGGESGFQKRGQLMGNLLSFPLLCLVNYITFKFCVPIEH

SEQ ID NO: 941094 - protein, 81 aa, Homo sapiens
LVLPGFEAYTGARLDAQLDDQARAFLLKSPEKNRVDVATRTVYLGPIFVEFRDYINDFGGSEAAVGKYVRAGSTNEVQGAL

SEQ ID NO: 941095 - protein, 32 aa, Homo sapiens
MVNPCGEAVAKASPNRAISSRTPKTRSRVIYP

SEQ ID NO: 941096 - protein, 68 aa, Homo sapiens
FRASASVLVQLAAFATGVLANIYEFHLYTRSSTNLYQTQAKQYEGNSVVEPQAFTPDLNGRLRALYAQ

SEQ ID NO: 941097 - protein, 130 aa, Homo sapiens
  misc_feature (1)..(1): Xaa can be any naturally occurring amino acid
  misc_feature (3)..(3): Xaa can be any naturally occurring amino acid
  misc_feature (8)..(8): Xaa can be any naturally occurring amino acid
  misc_feature (33)..(33): Xaa can be any naturally occurring amino acid
XTXSSPAXGNLEDPPQISFHSSFADLGVREDIXQALEGVGIVSPFPIQAMSIPIAVEGTGSYWQARTGTGKTLAFGITILQRITLPGDEGWEELTTKGKPQALVMCPTRELALQVSKDISTAASVRGTRV

SEQ ID NO: 941098 - protein, 126 aa, Homo sapiens
  misc_feature (1)..(1): Xaa can be any naturally occurring amino acid
  misc_feature (26)..(26): Xaa can be any naturally occurring amino acid
  misc_feature (121)..(121): Xaa can be any naturally occurring amino acid
  misc_feature (123)..(123): Xaa can be any naturally occurring amino acid
XGNLQDPPQISFHSFRVGESSVTLSXFDDGYRAILTGPAVILAAGKVNLPMDERAEHALVNLSGTVLLHLARWHWGREDGYRVSEIEQIDNEREDALKNNNGFSEDQSDYDGDQFDLDARXSXTRV

SEQ ID NO: 941099 - protein, 75 aa, Homo sapiens
MGLANTLTGVAIPGRVGAINVLLMATAVRAVPPSVLDAATVDGAEHVVEDSPHRMANIKGSGSVVAVFSFIGAWD

SEQ ID NO: 941100 - protein, 35 aa, Homo sapiens
RKFPSTRSHLARSRRHVAVVSVLSEAPAPSCFELD

SEQ ID NO: 941101 - protein, 76 aa, Homo sapiens
  misc_feature (14)..(14): Xaa can be any naturally occurring amino acid
  misc_feature (72)..(72): Xaa can be any naturally occurring amino acid
MSPGITALRRDPSXLGRHAITMLMGILGGDDVEDVTEQPPELIVRGSTVQAQYRGDATVVSTLDPATLNTAXEHLL

SEQ ID NO: 941102 - protein, 76 aa, Homo sapiens
  misc_feature (6)..(6): Xaa can be any naturally occurring amino acid
  misc_feature (8)..(8): Xaa can be any naturally occurring amino acid
  misc_feature (21)..(21): Xaa can be any naturally occurring amino acid
  misc_feature (27)..(27): Xaa can be any naturally occurring amino acid
  misc_feature (48)..(48): Xaa can be any naturally occurring amino acid
  misc_feature (61)..(61): Xaa can be any naturally occurring amino acid
  misc_feature (69)..(69): Xaa can be any naturally occurring amino acid
  misc_feature (74)..(74): Xaa can be any naturally occurring amino acid
GTLILXLXYPGTHLLSLSSIXYCTEWXALCYPGTHLLSLSSIVTVQNXSALCYPGTHLLSXSSIATVQXGVPLXYP

SEQ ID NO: 941103 - protein, 155 aa, Homo sapiens
  misc_feature (29)..(29): Xaa can be any naturally occurring amino acid
  misc_feature (155)..(155): Xaa can be any naturally occurring amino acid
SSWACVISGQTVDVSDRNFFMAAAKGKNXVAEPLVSRLDGAFVLVFAVPIYDDNHAIIGVLLASVEASALSHDIEDIIVGKTGYCYILGLTGTTIAAKDFARVKAMENVIKMAETDKSLASLAAFEKMAREIDEPSISFYTYKGIHKIASYATMX

SEQ ID NO: 941104 - protein, 147 aa, Homo sapiens
LGLCYLTLGLCYLSRRLECIGTILAQCNFCLPGFKRFSCLSLQGSWDYRHVPPCLANFCIFFVLQFLPLMFPGSGESAGPRASLDTQKSTHLMEKWSDCSPHSFQSSILLTGQGCLTWDARKTILPLHDHFNQKQLGSLAGCGASCL

SEQ ID NO: 941105 - protein, 110 aa, Homo sapiens
SSWACVIPNKEVKVGVTIGTELDLAALNIGDSLSDIHGDSTGLRVRHQATRTEHASQTANFAHHVRGSNHGVEVQVPALDLGDEIVVTDLVGARLAGSLGLLTGDNTGPR

SEQ ID NO: 941106 - protein, 152 aa, Homo sapiens
ILGLCYPTAAQPAVSQVSLGFARLSPAVDFNGPDGPADLIFMIAASEDGGADHMKLLTKLARALVNPEFVEQLRQAPDAQTVVDLIGGVVEPKEEASTSSATALPAPGHAAVTNAASDTPRIVAITACPTGIAHTYMAADYLRAAGKNWVLR

SEQ ID NO: 941107 - protein, 180 aa, Homo sapiens
SSWACVIEGDDSRYGHDPDGATKSSTDELAPGKSGLLRADTPLLGEFLTISGIRIDRMPLLDDLFVTHNLFGPVDARDAMNSTASPAHSPSAKVATGSRSRLGTQVSEGDDSRYGHDPDGATKSSTDELAPGKSGLLRADTPLLGEFLTISGIRIDLDAALDDLFVTHNLFGPMDARDAR

SEQ ID NO: 941108 - protein, 94 aa, Homo sapiens
RIGSNTRIRHSHTGNNLGNAHSLRTGHGYRLGSTESRRSGPRRKIAIHIHAMINISDLTIQRLERCTHTAVTTALYLIHRRNQHPLRTYCRTTA

SEQ ID NO: 941109 - protein, 62 aa, Homo sapiens
  misc_feature (21)..(21): Xaa can be any naturally occurring amino acid
  misc_feature (35)..(35): Xaa can be any naturally occurring amino acid
  misc_feature (40)..(40): Xaa can be any naturally occurring amino acid
  misc_feature (50)..(50): Xaa can be any naturally occurring amino acid
RTPRRTELSAPFQPQPPRLGXASTWQKSSALQRLXRGIEXLDAAFKSMLXKDGFNSLFSRKS

SEQ ID NO: 941110 - protein, 31 aa, Homo sapiens
  misc_feature (7)..(7): Xaa can be any naturally occurring amino acid
  misc_feature (9)..(9): Xaa can be any naturally occurring amino acid
WGRRVRXAXSEHKQDDDTAGSGDQVVEHVPH

SEQ ID NO: 941111 - protein, 32 aa, Homo sapiens
FDKTHKSETDTREVNSGFFYKSAEREKLIKAE

SEQ ID NO: 941112 - protein, 110 aa, Homo sapiens
  misc_feature (90)..(90): Xaa can be any naturally occurring amino acid
KVTVRLWRTWRFRAVESSQQNGAKEEDGDEVLPSKSKAPGSPLSSEGATGEGVRTLGPAEKPPLRRSPSRTKKQEGDRATEEAQNGEKGXPESKEVDGPQPGPKGGPGIA

SEQ ID NO: 941113 - protein, 32 aa, Homo sapiens
DGCCKIILPLREVVSIEKMEDTSLLPHPIIVS

SEQ ID NO: 941114 - protein, 31 aa, Homo sapiens
MKSKDLALFCTSLYRSPQQEPESAGFSPAPI

SEQ ID NO: 941115 - protein, 37 aa, Homo sapiens
  misc_feature (21)..(21): Xaa can be any naturally occurring amino acid
  misc_feature (23)..(23): Xaa can be any naturally occurring amino acid
EQHMTHSSPELYTTNFVTRNXTXGLLVLNEFERDTPD

SEQ ID NO: 941116 - protein, 70 aa, Homo sapiens
VGRGGKAGAVTALGSPSSAPINTPCVHQTADGRSSALPTVQTSPKYRSKKVASLSSTVCFLAAWPLFLEN

SEQ ID NO: 941117 - protein, 108 aa, Homo sapiens
EGPTDRPTRSQPSRLSVIPIRRTAISLGNSIAAAAFMPAADERFEGEQDMDAITEGSPLSDPNKKPAALRSLLGRTSRDWWPEALSVDILHQKGVSGNPDGRRLRLSL

SEQ ID NO: 941118 - protein, 67 aa, Homo sapiens
SQHLSSARALAMDPGVMLFDEPTSALDPELVGEVLQVIKQLAHSGITMVIVTHEIGFAREVADNMDD

SEQ ID NO: 941119 - protein, 69 aa, Homo sapiens
  misc_feature (21)..(21): Xaa can be any naturally occurring amino acid
  misc_feature (51)..(51): Xaa can be any naturally occurring amino acid
  misc_feature (53)..(53): Xaa can be any naturally occurring amino acid
  misc_feature (66)..(66): Xaa can be any naturally occurring amino acid
IDSKNPDSVELGQLGDKHAHXGHRVGHKMDLVVLSVEAGEGKYSTMGVMVXNXREARELDPIIHLXQWG

SEQ ID NO: 941120 - protein, 30 aa, Homo sapiens
VRELFEMARTKKACLIFFDEIEAIGGARSD

SEQ ID NO: 941121 - protein, 34 aa, Homo sapiens
SAFPAAVDTCFQEVSIIDGIQTHARLLIPADPLS

SEQ ID NO: 941122 - protein, 35 aa, Homo sapiens
  misc_feature (31)..(31): Xaa can be any naturally occurring amino acid
FPYCLLLGNKCDMEAKRKVQKEQASIKARAXGSKE

SEQ ID NO: 941123 - protein, 47 aa, Homo sapiens
TRGSPDVLAPGPRDLGQLPPRPPQPLRRLGRPAFYPELGPYSSRDPE

SEQ ID NO: 941124 - protein, 42 aa, Homo sapiens
  misc_feature (8)..(8): Xaa can be any naturally occurring amino acid
  misc_feature (28)..(28): Xaa can be any naturally occurring amino acid
EDPDVCSXDRNISASYPAAHSLQTLGAXFYPELKPYSSRDPE

SEQ ID NO: 941125 - protein, 30 aa, Homo sapiens
  misc_feature (22)..(22): Xaa can be any naturally occurring amino acid
QLRDPKISAKLPPAASLSPPRXGSAPASTK

SEQ ID NO: 941126 - protein, 67 aa, Homo sapiens
  misc_feature (4)..(4): Xaa can be any naturally occurring amino acid
NGQXQCAKLCIALAGSDSKKDPPSSISKQAGFAAKNTGVVGENLPLKGQNWGKGKRLISTLVVIGTR

SEQ ID NO: 941127 - protein, 33 aa, Homo sapiens
ADDGAPRPQPRKQTRRARADRRGNRDRPTQGRN

SEQ ID NO: 941128 - protein, 37 aa, Homo sapiens
  misc_feature (5)..(5): Xaa can be any naturally occurring amino acid
  misc_feature (16)..(16): Xaa can be any naturally occurring amino acid
CRALXDSPEIFPTISXKTLSVWWIISLVSSSGIFLCG

SEQ ID NO: 941129 - protein, 60 aa, Homo sapiens
  misc_feature (42)..(42): Xaa can be any naturally occurring amino acid
  misc_feature (52)..(52): Xaa can be any naturally occurring amino acid
GPPDIAHAGGNLDDLPWLVMTRECEGGRMWQEGKSHYRKPVXFPFESRDTWXTLKAGVSP

SEQ ID NO: 941130 - protein, 192 aa, Homo sapiens
VCCLIMSVVHFTYLSQTLCRSLSDNHVMGPSPLPAEYIISCHPGGSDEEPLQFMDTGTATSATLTGLTRGATYNMIMEALKDQHWHKVLEEVVTGGNSVNEGLNQPTDDSCFDPYKFAIMPVEMSANECLNQALNCSAIAQALEVVIADVIHLYGAMTDGVNYKIVEKWDRQGENVQMMSCTCLVNGERHMR

SEQ ID NO: 941131 - protein, 44 aa, Homo sapiens
  misc_feature (32)..(32): Xaa can be any naturally occurring amino acid
  misc_feature (44)..(44): Xaa can be any naturally occurring amino acid
SRTSSWIRVSWSSCCRILGRDQKDGNSQEYQXCKELHGGDLKIX

SEQ ID NO: 941132 - protein, 57 aa, Homo sapiens
  misc_feature (4)..(4): Xaa can be any naturally occurring amino acid
SAYXSLSSWTSLSDSFNCAHVSFQQYQLPYGLLYCRLKSALLPLENPSGFFFCDGGY

SEQ ID NO: 941133 - protein, 33 aa, Homo sapiens
SAFSERAFGKYSTHKETVLGAIQSFQLLKVFPG

SEQ ID NO: 941134 - protein, 138 aa, Homo sapiens
  misc_feature (5)..(5): Xaa can be any naturally occurring amino acid
  misc_feature (35)..(35): Xaa can be any naturally occurring amino acid
  misc_feature (55)..(55): Xaa can be any naturally occurring amino acid
SSGCXSKVPRSRTQADHGGTPGSPRVALTAGLVGXEPLCPDGGFLPCGLLPGPRXEASYSCCRPLLDKWPTTLSRHLGGPCQVDAHCSAGPFLHLYRAQGLPVAAPSQRPWHAGMAITAAHGASTAVQTGDACFQRSG

SEQ ID NO: 941135 - protein, 240 aa, Homo sapiens
  misc_feature (11)..(11): Xaa can be any naturally occurring amino acid
  misc_feature (15)..(15): Xaa can be any naturally occurring amino acid
  misc_feature (19)..(19): Xaa can be any naturally occurring amino acid
  misc_feature (35)..(35): Xaa can be any naturally occurring amino acid
  misc_feature (51)..(51): Xaa can be any naturally occurring amino acid
  misc_feature (59)..(59): Xaa can be any naturally occurring amino acid
  misc_feature (95)..(95): Xaa can be any naturally occurring amino acid
DQPSDFVHFTXYSFXYGPXASHGDPGLQPDKNARXQQPKRNFLDRNSEPRXAKQDKTKXREERKEPKQQASHQHHIQAGAGKAAAAAERAQEAQXAEEKTHTPTRRAPTRQQKTTRQGTREHKKKASPARQQNRQKAPTPKKTTTQKGERNKQRGKQRRKTKNGPNQKHREKEKQKTKTNKKQQRKHKKKKPEEPKKEKQTQKKKTTEKTENNHKTRKNEKRTKENKEHRQNKQKKTRKT

SEQ ID NO: 941136 - protein, 35 aa, Homo sapiens
  misc_feature (21)..(21): Xaa can be any naturally occurring amino acid
FSIFQQRVCRQNTGVVKTTPXTPHGKGKDLYQHCR

SEQ ID NO: 941137 - protein, 53 aa, Homo sapiens
  misc_feature (40)..(40): Xaa can be any naturally occurring amino acid
  misc_feature (45)..(45): Xaa can be any naturally occurring amino acid
  misc_feature (53)..(53): Xaa can be any naturally occurring amino acid
MMELGSPSSPWLTSSSSLPLYSYSVSSFSPRFFRDRSMWXLSWMXTCRSVGWX

SEQ ID NO: 941138 - protein, 101 aa, Homo sapiens
  misc_feature (4)..(4): Xaa can be any naturally occurring amino acid
  misc_feature (40)..(40): Xaa can be any naturally occurring amino acid
  misc_feature (44)..(44): Xaa can be any naturally occurring amino acid
  misc_feature (47)..(47): Xaa can be any naturally occurring amino acid
  misc_feature (49)..(49): Xaa can be any naturally occurring amino acid
GFRXMTPLPYACSSTLRSTNHVPPPTLCRSLVILVSRERXIVEXGGXFXYLKSLPIKSYILNLNNIILYFFSLYFNFSKILYLFLTNFFFFFTLYFSTFLF

SEQ ID NO: 941139 - protein, 75 aa, Homo sapiens
  misc_feature (18)..(18): Xaa can be any naturally occurring amino acid
  misc_feature (46)..(46): Xaa can be any naturally occurring amino acid
  misc_feature (60)..(60): Xaa can be any naturally occurring amino acid
  misc_feature (63)..(63): Xaa can be any naturally occurring amino acid
  misc_feature (74)..(74): Xaa can be any naturally occurring amino acid
MKSGPTPRGEEGGFGVIXGRSFRFPSLNLNSACASGPFRLAGRSRXSSLHSKGPVNTRFXPPXIQGGINRQGKXN

SEQ ID NO: 941140 - protein, 113 aa, Homo sapiens
  misc_feature (5)..(5): Xaa can be any naturally occurring amino acid
  misc_feature (17)..(17): Xaa can be any naturally occurring amino acid
GFAFXEFSLMMYALRLXRITQPMCRSQTLGVTGKYKLSGRCGVRFLKVGLIQKRRPQTLPLGAKPKRATATAENSEKPPAQKARAAKGSWGPRPVSPGARYQAPQRAENRFFR

SEQ ID NO: 941141 - protein, 72 aa, Homo sapiens
  misc_feature (3)..(3): Xaa can be any naturally occurring amino acid
  misc_feature (33)..(33): Xaa can be any naturally occurring amino acid
  misc_feature (46)..(46): Xaa can be any naturally occurring amino acid
  misc_feature (49)..(49): Xaa can be any naturally occurring amino acid
  misc_feature (65)..(65): Xaa can be any naturally occurring amino acid
MLXTAVLSYTPLAYIGIVMESADGVTHNVPIYXGYALPHAILRLDXAGXGPDYYLMKILTELRLXASTYHWL

SEQ ID NO: 941142 - protein, 82 aa, Homo sapiens
  misc_feature (44)..(45): Xaa can be any naturally occurring amino acid
  misc_feature (72)..(73): Xaa can be any naturally occurring amino acid
PLLLQNEQTLLAFSSSSAASLQAGAAGFSGISSSGKMPPARSLXXFRIIFVETLSVLRRGALAGWPFQTALXXKLLVSTGKR

SEQ ID NO: 941143 - protein, 47 aa, Homo sapiens
QRKARSEAGTRTESQTSDEPLAQDGKADSKAERPDIHEMRNPPGRNT

SEQ ID NO: 941144 - protein, 86 aa, Homo sapiens
  misc_feature (11)..(11): Xaa can be any naturally occurring amino acid
  misc_feature (19)..(19): Xaa can be any naturally occurring amino acid
  misc_feature (62)..(62): Xaa can be any naturally occurring amino acid
  misc_feature (65)..(65): Xaa can be any naturally occurring amino acid
  misc_feature (84)..(84): Xaa can be any naturally occurring amino acid
MVSGDPVTTLXTSTRRYSXPHAILRLDLAGRDLTDYLMKILTERGYSFTTTAEREIVRDILXDEXCVYVVPGSFDAFDDGHGLXSK

SEQ ID NO: 941145 - protein, 145 aa, Homo sapiens
  misc_feature (15)..(16): Xaa can be any naturally occurring amino acid
RRNRGLLTADDTGMXXDSLGNPYALREEEGPRVISLPDHTGQTDQHVRRAVRAVEQEGQGEERPQQQDKNGAAHTVREAGDPKTTQDTENESMAKDAQGTNTQAAPGARQRQNSLQGAPSTNRQARAELAAEGNSDKLTPSHRHT

SEQ ID NO: 941146 - protein, 42 aa, Homo sapiens
  misc_feature (30)..(30): Xaa can be any naturally occurring amino acid
QRSANIRERHMRWERHMRWERHMRWELGMXWERHMRWERHMR

SEQ ID NO: 941147 - protein, 69 aa, Homo sapiens
  misc_feature (64)..(64): Xaa can be any naturally occurring amino acid
  misc_feature (69)..(69): Xaa can be any naturally occurring amino acid
LEDPPTHVPLPTHVPLPTMCRSQRMCRSQRMCRSQRMCRSQRMCRSQRMCRSQRMCRSQRMCRXQPGPX

SEQ ID NO: 941148 - protein, 37 aa, Homo sapiens
RHHSEHFSGRPREDRVPHSWNSITLSNLTLGTEYVGR

SEQ ID NO: 941149 - protein, 104 aa, Homo sapiens
DGADDTHHAHRFAGNQAKLVVRGRGDFVVDLVDGFGSPVDGLGRTWDVDAGGVADRLAHVQGFQQRQLFDVLAQQAAKRIKLGLALGRSQLRPDAGVEGVISAI

SEQ ID NO: 941150 - protein, 69 aa, Homo sapiens
  misc_feature (60)..(60): Xaa can be any naturally occurring amino acid
  misc_feature (63)..(63): Xaa can be any naturally occurring amino acid
RIPSDAQLTADPPEQELAGVFCGNRLERLRNGVIDPFQMIPYDCQCVLSDCDRFHYDVSXIRXGIRAKW

SEQ ID NO: 941151 - protein, 121 aa, Homo sapiens
  misc_feature (2)..(2): Xaa can be any naturally occurring amino acid
  misc_feature (6)..(6): Xaa can be any naturally occurring amino acid
VXLLAXLSTDDSCTDLDSVRIPHRMCRSLDLYGMITEVKAHHEEMAKCSSTEAEACDQTKIETLQAQAGKHGDDLRNTRNEISEMNRAMQRLQAEIDNIKNQRAKLEADIDEAEERSGTSV

SEQ ID NO: 941152 - protein, 158 aa, Homo sapiens
  misc_feature (128)..(128): Xaa can be any naturally occurring amino acid
  misc_feature (145)..(145): Xaa can be any naturally occurring amino acid
HCETDVAGYNRGGCTIIPGSCSNGLRSFPFWDGRQETCEWVGGEEDQGEEAECNQAQDAKDACAQGGWEGVGTYGDASGPSCQEQYPEEEGSFVGTPHGGRAVEGGSSEWEFSATYWTEKSLPRKALXEQCECASEQLKLHIAGXACNGIKPCGGLGA

SEQ ID NO: 941153 - protein, 105 aa, Homo sapiens
  misc_feature (12)..(12): Xaa can be any naturally occurring amino acid
  misc_feature (24)..(24): Xaa can be any naturally occurring amino acid
  misc_feature (47)..(47): Xaa can be any naturally occurring amino acid
  misc_feature (71)..(71): Xaa can be any naturally occurring amino acid
  misc_feature (74)..(74): Xaa can be any naturally occurring amino acid
MLQLTEGDRPGXLINNYTTRVNSXANWLTVIKTQKGAWETAKSTGNXKWVPPLPEANCFLGPPMQDGGKRXRCXAAGGRPCAHSSSPVLGPQIPSCMTQGPIGLA

SEQ ID NO: 941154 - protein, 47 aa, Homo sapiens
MPVVPLEDPDKPIDWLLDHILWVKVCNPEKDAKHCDRQEANLQIRYP

SEQ ID NO: 941155 - protein, 36 aa, Homo sapiens
TSLSAPWAPLTGPSVPPPSSERISEELQQPHLLADA

SEQ ID NO: 941156 - protein, 194 aa, Homo sapiens
  misc_feature (3)..(3): Xaa can be any naturally occurring amino acid
  misc_feature (145)..(146): Xaa can be any naturally occurring amino acid
  misc_feature (149)..(149): Xaa can be any naturally occurring amino acid
  misc_feature (156)..(156): Xaa can be any naturally occurring amino acid
  misc_feature (163)..(163): Xaa can be any naturally occurring amino acid
  misc_feature (167)..(167): Xaa can be any naturally occurring amino acid
  misc_feature (186)..(186): Xaa can be any naturally occurring amino acid
  misc_feature (194)..(194): Xaa can be any naturally occurring amino acid
MRXCTCVHVQTAYLCTCVCPGNICTCVSVEAALSVCVSRQHICVRVCVRTAYLCMRVCVRTACLRVCVTRQHICVCPGSISAPVHVCLEVCVQAAYLHVCACPDSISVHACVCVSRQYPACVCQGSIICVSGSILARVCPDTILXXCAXNRILCVXCVQQTFXGVPXYVKHMSWMSGCLSCAALAXFGPADIVX

SEQ ID NO: 941157 - protein, 55 aa, Homo sapiens
HNQSGVPYPAPYVNHEDGAPTKKCWDSFSQAGWHLGLLSGTRYFPCLNSMSPPGS

SEQ ID NO: 941158 - protein, 33 aa, Homo sapiens
DIQHVRLLPVVLQQGVDAGTIHSEVERASSWFK

SEQ ID NO: 941159 - protein, 122 aa, Homo sapiens
GFLYTEGIISSASDVKEIILHQCNQAEVILSEDVQVRDDAFDRHSFVAFSCGVCGKRSIEAVLDVMARSITQAQSRSDYQGLPTIWDKIDECFFLDLPERLRAKQANFDSTGGIHAAVYLIR

SEQ ID NO: 941160 - protein, 38 aa, Homo sapiens
  misc_feature (14)..(14): Xaa can be any naturally occurring amino acid
  misc_feature (24)..(24): Xaa can be any naturally occurring amino acid
  misc_feature (38)..(38): Xaa can be any naturally occurring amino acid
MYKRQTYVKGTDLXPACLDLGSQXGSGHLNSGPKQKHX

SEQ ID NO: 941161 - protein, 96 aa, Homo sapiens
SRYPSLCQFALLPPGPCTTVWKALKSVSVTSAFSGHTSILSTTLSASKSSWFTSPYARPVRVLLAGVRHHAVVVPTDRDSVIVCVVVACITLCFVD

SEQ ID NO: 941162 - protein, 41 aa, Homo sapiens
  misc_feature (11)..(11): Xaa can be any naturally occurring amino acid
  misc_feature (25)..(25): Xaa can be any naturally occurring amino acid
  misc_feature (29)..(29): Xaa can be any naturally occurring amino acid
  misc_feature (40)..(41): Xaa can be any naturally occurring amino acid
PLPTGIQESLXNPTPGDLEEIVKKXPETXQTDKEVAIWGXX

SEQ ID NO: 941163 - protein, 36 aa, Homo sapiens
  misc_feature (13)..(13): Xaa can be any naturally occurring amino acid
  misc_feature (21)..(21): Xaa can be any naturally occurring amino acid
  misc_feature (26)..(26): Xaa can be any naturally occurring amino acid
SSVYRGPAALATXTSCKCPLXDPDTXERAITACVYN

SEQ ID NO: 941164 - protein, 71 aa, Homo sapiens
  misc_feature (7)..(7): Xaa can be any naturally occurring amino acid
  misc_feature (54)..(54): Xaa can be any naturally occurring amino acid
  misc_feature (56)..(56): Xaa can be any naturally occurring amino acid
MRGIVGXCGKGKPNGPDPLTSRELLKSCLVGPQLLFLLLTVQMPPLSLAREMQXNXNVVWDPLRAIVPQFN

SEQ ID NO: 941165 - protein, 106 aa, Homo sapiens
RYPDGADDTFRLWNTYRLPGEWDKLLWVGAVNWNSKSTLQYARYNSHVTQDDYFVTSLMARYRINQNLAATLNVNNVFDKKYYAGMAGSYGHYVCTTQRYGVISAI

SEQ ID NO: 941166 - protein, 78 aa, Homo sapiens
IYPAYPLVAIQTSPNLNLPAHVECTWRPALQMKKFWPTRVLLSARQKSIHVKLESCSCWWPSHLIFFYIIYLVEGSQS

SEQ ID NO: 941167 - protein, 74 aa, Homo sapiens
MALMTPTAHGTRLGHARFDTAYPPVGLHIGGVPFVEHVFHVGVHLHLVAEAVAHARVGHGVAVDGIAFGVISAI

SEQ ID NO: 941168 - protein, 169 aa, Homo sapiens
  misc_feature (140)..(140): Xaa can be any naturally occurring amino acid
  misc_feature (165)..(166): Xaa can be any naturally occurring amino acid
MALMTPRGVLPDQGADGPQPFEYGLRPVVAGVETVNTLLLREPPRRRVSLSSRLLFLRVVSHVTYAFELRNTLEQGAFDAFFQGDVGLATALAATTELQHGNAVVNHVHQAHLAAWLARPGLISVLQVIIYTSLIGLSLXDIGTLAFGALMVNLTTIPLGGESNXXFFK

SEQ ID NO: 941169 - protein, 152 aa, Homo sapiens
  misc_feature (25)..(25): Xaa can be any naturally occurring amino acid
  misc_feature (140)..(140): Xaa can be any naturally occurring amino acid
MALMTPPCPVPAPCRCPRAAPAPLXGHSSGSRCRTSGHSRRCGTAAGRGAGRSRSVPERYRCSACRGAPVSARLRALRRWPATGVGTRPGSGRGTACAPTRCNMPAIIGKQLRLRISLFPPGGWSPGLCAPSVLNPDWNXVQGVISAIQGIL

SEQ ID NO: 941170 - protein, 78 aa, Homo sapiens
NPAKHYGTAISEPHRDAPLLLGEIYGHVFKNHMTLCRVYFCHRQGTLKEEGNREKWATMGRSYRQSWTTISSSYPKAN

SEQ ID NO: 941171 - protein, 80 aa, Homo sapiens
MALMTPCVIFKLCVTPPRDSFATYARKLAALITMNRSWQASTMSRSNPRYGLSMFLDLHVRLACEADLDALFALGVISAI

SEQ ID NO: 941172 - protein, 41 aa, Homo sapiens
  misc_feature (9)..(9): Xaa can be any naturally occurring amino acid
  misc_feature (40)..(40): Xaa can be any naturally occurring amino acid
PITNYWGDXRDNLRYFKPLWIRIGGDNRDNFKPLRFRIGXS

SEQ ID NO: 941173 - protein, 178 aa, Homo sapiens
  misc_feature (30)..(30): Xaa can be any naturally occurring amino acid
  misc_feature (124)..(124): Xaa can be any naturally occurring amino acid
  misc_feature (128)..(128): Xaa can be any naturally occurring amino acid
  misc_feature (144)..(144): Xaa can be any naturally occurring amino acid
  misc_feature (147)..(147): Xaa can be any naturally occurring amino acid
  misc_feature (149)..(149): Xaa can be any naturally occurring amino acid
  misc_feature (152)..(152): Xaa can be any naturally occurring amino acid
  misc_feature (156)..(156): Xaa can be any naturally occurring amino acid
  misc_feature (158)..(158): Xaa can be any naturally occurring amino acid
  misc_feature (169)..(170): Xaa can be any naturally occurring amino acid
  misc_feature (175)..(175): Xaa can be any naturally occurring amino acid
  misc_feature (177)..(177): Xaa can be any naturally occurring amino acid
PDGADDTGHRHGLDSSQYRNAARSVDILLXDYLPGWLEEGYQVLVTADHGMNNDRSHNGLLAEEREVPLFVFGDAFSLDPAAKPLQTELCGTICELLGAAHDKTVCRELLKMNGGARGRYLALXLLLXVAVLFVIFKSPRWLVXNNXLXSDXAGDXQXYKDSLQVYLRXXNETWXIXF

SEQ ID NO: 941174 - protein, 121 aa, Homo sapiens
MALMTPEAAAKKWIKDNPGKLDAWLAGVTTVDGKPGLEAAKAKLTNNEPRNSATSGQDRACPGLISIYAGGSSLIMLIDQKIPLGQYIASFVEWLTQNGANYFDAIAQGLEFMIHGVISAI

SEQ ID NO: 941175 - protein, 51 aa, Homo sapiens
  misc_feature (9)..(9): Xaa can be any naturally occurring amino acid
  misc_feature (14)..(14): Xaa can be any naturally occurring amino acid
  misc_feature (25)..(26): Xaa can be any naturally occurring amino acid
TIVTTKANXLKDSXTCSPGMVRLSXXKSTVHNSRPIKTGTTLPDDMITQRE

SEQ ID NO: 941176 - protein, 41 aa, Homo sapiens
FLVPLEDSGDGIGTALTPGAHLQPGLQTAAEAGLGARNGAG

SEQ ID NO: 941177 - protein, 60 aa, Homo sapiens
  misc_feature (19)..(19): Xaa can be any naturally occurring amino acid
  misc_feature (41)..(41): Xaa can be any naturally occurring amino acid
  misc_feature (44)..(44): Xaa can be any naturally occurring amino acid
  misc_feature (46)..(46): Xaa can be any naturally occurring amino acid
MRADCIRTVSSELRCRLAXYSVYCMVPYVLHCASGTHSAYXSLXGXFQYFFGRYNKAGPC

SEQ ID NO: 941178 - protein, 48 aa, Homo sapiens
HCSDSHLLTVLLKLFSYCGKVKVNRQQLAKLEMNTLNVMLVTLNLALV

SEQ ID NO: 941179 - protein, 62 aa, Homo sapiens
LLFQMLLKRFRASCRRVSWLSSRMTMFELLLATTEDDGMHIVEALDSLCGFIALATHTNCGG

SEQ ID NO: 941180 - protein, 36 aa, Homo sapiens
  misc_feature (35)..(35): Xaa can be any naturally occurring amino acid
DSRGSPYQLRRFRSKHIIDGPHGVSIFYIALIRLXN

SEQ ID NO: 941181 - protein, 58 aa, Homo sapiens
SCTRMVWNGGVREAGRRAWPVVGFGRGSTCGHSLSDVDPGAHNVIRRHGQDQLPIGVQ

SEQ ID NO: 941182 - protein, 31 aa, Homo sapiens
LSTEAIPKLTFYRQFCTFVEKCVTSLIRLSN

SEQ ID NO: 941183 - protein, 33 aa, Homo sapiens
MSRISLRLKTGHFIESLHGKDPASSLPTQSREQ

SEQ ID NO: 941184 - protein, 37 aa, Homo sapiens
LDKLDEGEAEAAKMLGEALSKNPGYIKLRKIRNASVD

SEQ ID NO: 941185 - protein, 74 aa, Homo sapiens
MRLCGAHEGAVKSAQLLLQVQHVAVALSVVCCLRLDELVEAVQVDHVSATDSLQQETGHFCLPIKLCLAHAELM

SEQ ID NO: 941186 - protein, 68 aa, Homo sapiens
KVHAADGYDGEGAAWHASEKPGLMLRPFRAHGGGLCGPIHSGRVRWEDRLAREDEAAVNSNPATALQV

SEQ ID NO: 941187 - protein, 46 aa, Homo sapiens
  misc_feature (5)..(5): Xaa can be any naturally occurring amino acid
  misc_feature (35)..(35): Xaa can be any naturally occurring amino acid
IRARXPYQLRRFRKRARREPAHALQIRYRRRIADXPQLIAGIASVD

SEQ ID NO: 941188 - protein, 67 aa, Homo sapiens
MPLSTEAIPYQLRRFRYQLRRFRCQLRRFRSNIFSRSAVISNVINPRSLLSLGPVKSSTFFSRSAIR

SEQ ID NO: 941189 - protein, 158 aa, Homo sapiens
  misc_feature (128)..(128): Xaa can be any naturally occurring amino acid
  misc_feature (135)..(135): Xaa can be any naturally occurring amino acid
  misc_feature (139)..(139): Xaa can be any naturally occurring amino acid
NNTGGVDQVQQVILLLVLGVREPGAFLCGTQHLLEHLNAPQLLAEARLPHRLLVMSHGSAQVGLPQLSALLIILQCGQGCQPLWHVVVELGQALLLVVQIRAWLTWWSMRRMASEVMGQGRVVVGLTXAKLAKSXGCSXYRRLAHGLRVAVGRPLHLK

SEQ ID NO: 941190 - protein, 34 aa, Homo sapiens
RIADLPKILLNDRNGRSEIVWLKATKSRESPQLI

SEQ ID NO: 941191 - protein, 197 aa, Homo sapiens
  misc_feature (166)..(166): Xaa can be any naturally occurring amino acid
  misc_feature (172)..(172): Xaa can be any naturally occurring amino acid
  misc_feature (180)..(180): Xaa can be any naturally occurring amino acid
  misc_feature (188)..(188): Xaa can be any naturally occurring amino acid
  misc_feature (193)..(193): Xaa can be any naturally occurring amino acid
FQHLISTDHFINNIGIVGVALLACLVISWALRKLPVLRDHLNEYSSFQVNKVWMALVSVVAPLVLLSLWITEIITVASKGYGEMPRNFVGIFGWGMSILVVVLAIVLSLIPWPHRSAIHHELTHEEELACENFQETEEGALSEHFSDHHDDQCDGHGVGRTNLRRXSRSFDXLNRTDVKXAMNPSRLXGRQIXLMEK

SEQ ID NO: 941192 - protein, 50 aa, Homo sapiens
PYRENYLWGRSVIATETNARWQGDRGIQPNSTTQAGGQNQPFQPESPQLI

SEQ ID NO: 941193 - protein, 33 aa, Homo sapiens
  misc_feature (6)..(6): Xaa can be any naturally occurring amino acid
  misc_feature (27)..(27): Xaa can be any naturally occurring amino acid
SRYSSXTSKGGKYRFIPPEIQGGLTPXKRNIVE

SEQ ID NO: 941194 - protein, 42 aa, Homo sapiens
  misc_feature (26)..(26): Xaa can be any naturally occurring amino acid
MREHGHTVTRVTARKPWTGKTHEALXVFLNTKPFQPESPQLI

SEQ ID NO: 941195 - protein, 35 aa, Homo sapiens
VLWCYRGVTYEAKVHLFGREVNQTAKPLVKKHHST

SEQ ID NO: 941196 - protein, 33 aa, Homo sapiens
  misc_feature (25)..(25): Xaa can be any naturally occurring amino acid
EFELGPPLDKLDEGYEENEEFLRTXHHPLLEML

SEQ ID NO: 941197 - protein, 39 aa, Homo sapiens
APLIRLSNGQHFQQRHDLHSLQPPSPGSKQFFPLIRLSN

SEQ ID NO: 941198 - protein, 85 aa, Homo sapiens
  misc_feature (24)..(24): Xaa can be any naturally occurring amino acid
  misc_feature (33)..(33): Xaa can be any naturally occurring amino acid
  misc_feature (38)..(38): Xaa can be any naturally occurring amino acid
  misc_feature (64)..(64): Xaa can be any naturally occurring amino acid
LSPWGFHKKPRGPVSRKLKQGHTXDGTSNMIQXRVVRXGEKASNYGQSEPPQVGIALIPDRACXSFVQCVLMEVEGLLGGTLPKA

SEQ ID NO: 941199 - protein, 47 aa, Homo sapiens
  misc_feature (24)..(24): Xaa can be any naturally occurring amino acid
  misc_feature (41)..(41): Xaa can be any naturally occurring amino acid
MFIWAGVRSVMSKKILLLLLVLEXGVPLRLGVKPSMAEGSXGVETYL

SEQ ID NO: 941200 - protein, 42 aa, Homo sapiens
  misc_feature (18)..(18): Xaa can be any naturally occurring amino acid
  misc_feature (22)..(22): Xaa can be any naturally occurring amino acid
QGLRSPDSGRAIAIKVRXLPLXFRVQCEGARYGFPKHSRFYR

SEQ ID NO: 941201 - protein, 79 aa, Homo sapiens
  misc_feature (21)..(21): Xaa can be any naturally occurring amino acid
  misc_feature (69)..(69): Xaa can be any naturally occurring amino acid
  misc_feature (79)..(79): Xaa can be any naturally occurring amino acid
KVTHSRLTEVKGAAWGSFREXEMQAQLPELESKILTHVAEMQASRQGKPRLLSLTAAERSVSLECVTLXGERTFLSSIX

SEQ ID NO: 941202 - protein, 39 aa, Homo sapiens
  misc_feature (4)..(5): Xaa can be any naturally occurring amino acid
  misc_feature (8)..(8): Xaa can be any naturally occurring amino acid
  misc_feature (24)..(24): Xaa can be any naturally occurring amino acid
  misc_feature (39)..(39): Xaa can be any naturally occurring amino acid
MIGXXRHXTHSKSDARLLNALAAXNAALFSFCCVLNLLX

SEQ ID NO: 941203 - protein, 36 aa, Homo sapiens
  misc_feature (2)..(2): Xaa can be any naturally occurring amino acid
  misc_feature (24)..(24): Xaa can be any naturally occurring amino acid
  misc_feature (30)..(30): Xaa can be any naturally occurring amino acid
MXSKTQLGDLSACPRGQDAGLFEXHVILAXEAYWWY

SEQ ID NO: 941204 - protein, 42 aa, Homo sapiens
  misc_feature (27)..(27): Xaa can be any naturally occurring amino acid
  misc_feature (33)..(33): Xaa can be any naturally occurring amino acid
  misc_feature (39)..(39): Xaa can be any naturally occurring amino acid
QAEALVSGISSFSSESRSAAAFVPTSXSLRRDXNAWLLXLLL

SEQ ID NO: 941205 - protein, 43 aa, Homo sapiens
RLRTLDSQAVLRCSASAAATPRWWSSVCPPPSPPPNAGSDLGL

SEQ ID NO: 941206 - protein, 44 aa, Homo sapiens
  misc_feature (19)..(19): Xaa can be any naturally occurring amino acid
APDTLPSAPLFPSPSGVSXCPTNGQDSSDLLLQTKEKVLWSLQS

SEQ ID NO: 941207 - protein, 209 aa, Homo sapiens
RFDVEKISRRFLNDSQAFNEAFARAWFKLTHRDMGPKSRYIGPEVPKEDLIWQDPLPQPIYNPTEQDIIDLKFAIADSGLSVSELVSVAWASASTFRGGDKRGGANGARLALMPQRDWDVNAAAVRALPVLEKIQKESGKASLADIIVLAGGVGVEKAASAAGLSIHVPFAPGRVDARQDQNCNWDVGALEAIVSVSEILALVGRFPPV

SEQ ID NO: 941208 - protein, 172 aa, Homo sapiens
MAICICNNQRHSGCVEIRLDGIATGQQCQRRSQPETTAEAGTRQRTAILRQLGRRLSSSPHQQYEDELRQNECTNAAFFTGNKTGRQPGATNAHQHPDRLRPQLPEMTPLTRNYTIRRVTDKRQRRCDCRQQQQQRQNRINTEISHGKLLRSPFLVQVAGSHFFAFSPSQEG

SEQ ID NO: 941209 - protein, 33 aa, Homo sapiens
RTLAEELFNSVGKTLWITEEALMDAVTAVSGSG

SEQ ID NO: 941210 - protein, 68 aa, Homo sapiens
  misc_feature (10)..(10): Xaa can be any naturally occurring amino acid
  misc_feature (59)..(59): Xaa can be any naturally occurring amino acid
STARLSRGMXYRTFPREPARSHENSTVHLHRPGRPTPGRDQGHRVWLTRATPPWICVGXPPCPQCTHE

SEQ ID NO: 941211 - protein, 136 aa, Homo sapiens
  misc_feature (4)..(4): Xaa can be any naturally occurring amino acid
  misc_feature (14)..(14): Xaa can be any naturally occurring amino acid
  misc_feature (26)..(26): Xaa can be any naturally occurring amino acid
  misc_feature (57)..(57): Xaa can be any naturally occurring amino acid
  misc_feature (61)..(61): Xaa can be any naturally occurring amino acid
  misc_feature (69)..(69): Xaa can be any naturally occurring amino acid
  misc_feature (128)..(128): Xaa can be any naturally occurring amino acid
QRYXPLMATASLCXVYIGHADTRESXDIKALNRDIARIVARQAELRKQIDAIVADLXRGAXDLSGQGRXDMIKPRAFFFGGIDREGVRQRSRQRLATCTLRAVSVISKKLFMPAAAYQKTLRNAAASXLDVVAVSL

SEQ ID NO: 941212 - protein, 161 aa, Homo sapiens
  misc_feature (4)..(4): Xaa can be any naturally occurring amino acid
  misc_feature (25)..(25): Xaa can be any naturally occurring amino acid
  misc_feature (60)..(60): Xaa can be any naturally occurring amino acid
  misc_feature (65)..(65): Xaa can be any naturally occurring amino acid
SDWXDVAILVVFNAVQGFLDVLDAXGDRLPLTVELGVKAGISLMVFTFSSALKRASNRGXSSFCXSLSIRAYSGSAARSASISTVSALNCFLKRCMGACNTVILLSSGERSPHRYVFVAIGELAARGCRKIRPIALCSPSACWRQLANSVICAWLSGASSQ

SEQ ID NO: 941213 - protein, 54 aa, Homo sapiens
MIELVHRVTDLSDAPALLVTGTGDLFDQAGHLLHLGHHVIHGLVCRIDQSELFF

SEQ ID NO: 941214 - protein, 35 aa, Homo sapiens
SLFHWGPLPWATYSFLSVAFAYFFFVRKMEVIRPS

SEQ ID NO: 941215 - protein, 145 aa, Homo sapiens
  misc_feature (145)..(145): Xaa can be any naturally occurring amino acid
DESQAAARLAEINSLQQRQSNISAAQIRIRHDLCMALSIDAEALPFAGELIQVRKEDARNWEGAAERLLHGFGLTLLVPDAHYKAVATWVNNQQLQGRLVYFHMRSRNTTHDAALHAQALVHKLIIKPELPHYTLLQQELQRSCX

SEQ ID NO: 941216 - protein, 73 aa, Homo sapiens
RYLDESQAAARLGETLLSRKSTLLAWIGEQEMTVRKAVAEPYPAVSEVFQHALGGHKLDCYSIYGLPKGTVTQ

SEQ ID NO: 941217 - protein, 93 aa, Homo sapiens
ESQAAARLVNGDGIVEVFFGCPHLQRHREALQHFVHTKANAVNTDNLLFRSNAHQLHAARLAVSGDGGIHRGERGFIHFHLIVAILLARLRFR

SEQ ID NO: 941218 - protein, 167 aa, Homo sapiens
  misc_feature (1)..(1): Xaa can be any naturally occurring amino acid
  misc_feature (3)..(3): Xaa can be any naturally occurring amino acid
  misc_feature (6)..(6): Xaa can be any naturally occurring amino acid
  misc_feature (11)..(11): Xaa can be any naturally occurring amino acid
  misc_feature (17)..(17): Xaa can be any naturally occurring amino acid
  misc_feature (21)..(21): Xaa can be any naturally occurring amino acid
  misc_feature (25)..(25): Xaa can be any naturally occurring amino acid
  misc_feature (45)..(45): Xaa can be any naturally occurring amino acid
  misc_feature (136)..(136): Xaa can be any naturally occurring amino acid
  misc_feature (162)..(162): Xaa can be any naturally occurring amino acid
XNXMTXFQVHXIWGARXRMDXKSMXIGSTTVSARELSDRAPAVKXRGLVDDHAQLLRLFGVSFGISIATGVDLDKRCANLCRSFDLLFIGVNKQRNLNPGICQTFAGIAHFVTLPCDIQAAFGCYFLTLFRYQAAXMWLRLNGDRQHLFGHRPSPDFMRVSXRLTQD

SEQ ID NO: 941219 - protein, 30 aa, Homo sapiens
  misc_feature (17)..(17): Xaa can be any naturally occurring amino acid
MKRNIYPAGFPTVYIAXLLRVSNWCYPPLY

SEQ ID NO: 941220 - protein, 176 aa, Homo sapiens
  misc_feature (8)..(9): Xaa can be any naturally occurring amino acid
  misc_feature (16)..(16): Xaa can be any naturally occurring amino acid
  misc_feature (22)..(22): Xaa can be any naturally occurring amino acid
  misc_feature (73)..(73): Xaa can be any naturally occurring amino acid
  misc_feature (88)..(88): Xaa can be any naturally occurring amino acid
  misc_feature (114)..(114): Xaa can be any naturally occurring amino acid
  misc_feature (130)..(130): Xaa can be any naturally occurring amino acid
  misc_feature (133)..(133): Xaa can be any naturally occurring amino acid
  misc_feature (152)..(152): Xaa can be any naturally occurring amino acid
  misc_feature (172)..(172): Xaa can be any naturally occurring amino acid
HASSGSPXXYDPPGDXTLSITXRPHANCATLKLVSVLPLPWCAKYSHLPPPYPTAADVVAVTMRCKMRSAAQXLIRPASPNNLRLALXTPQYLVSTLMQRTAWLNIRFALKLVXLGDRADFFASAHQMAXREXCLDALTSLLALVGLLLPHXPGAASVIYRHITWLILAHLXIRTK

SEQ ID NO: 941221 - protein, 160 aa, Homo sapiens
  misc_feature (10)..(10): Xaa can be any naturally occurring amino acid
  misc_feature (12)..(12): Xaa can be any naturally occurring amino acid
  misc_feature (39)..(39): Xaa can be any naturally occurring amino acid
  misc_feature (104)..(104): Xaa can be any naturally occurring amino acid
  misc_feature (107)..(107): Xaa can be any naturally occurring amino acid
  misc_feature (130)..(130): Xaa can be any naturally occurring amino acid
VPLSLLSLPXLXRLFGGMLNGHRINFRSSAGSTSPYGAXPCRLSAASTPEFLELVSWHLLRGFFVNKSELIEHIAQQADISKAAAGRALEAVIGWCAYHTEEGXAPXSLVGFGTFAVSTRVARTGRNPRXGDAIKIKKAKVPKFRPGQGTERPRALTVTK

SEQ ID NO: 941222 - protein, 169 aa, Homo sapiens
TVNGRVCVTVLRRLDAVLEGTKDAVLERKKFLDVHQVAEQDGALRMAAGQAFYNVSEFTLAKLKASAAGQLLRDDFIAYLDGFSLDVQEILTKFNFRNQIQKLVDSHVLGYLIEDFLDPEVNLAPLREGCRRRIKLPALDNHGMGTVFEELIRRFNEDNNERRGINSNE

SEQ ID NO: 941223 - protein, 35 aa, Homo sapiens
  misc_feature (11)..(11): Xaa can be any naturally occurring amino acid
  misc_feature (24)..(25): Xaa can be any naturally occurring amino acid
AQRPDRKGPCXVFIARPYRYKMPXXGGNRDFKSSV

SEQ ID NO: 941224 - protein, 82 aa, Homo sapiens
TSPNHTPLFVACQSLIVGGPYARAHVHTLQALDLVESCDVDTLYVLLKLGDLLLQQVCPHLDVLHHTLNLQLSDTVAHGHQL

SEQ ID NO: 941225 - protein, 32 aa, Homo sapiens
  misc_feature (16)..(16): Xaa can be any naturally occurring amino acid
  misc_feature (24)..(24): Xaa can be any naturally occurring amino acid
  misc_feature (28)..(28): Xaa can be any naturally occurring amino acid
MKGDKLLYERGSSVCXTYFPYHRXTHQXQKST

SEQ ID NO: 941226 - protein, 38 aa, Homo sapiens
SGHMWGTFRLERPDGSHFDVRTPSFFLESNKDESTTNS

SEQ ID NO: 941227 - protein, 34 aa, Homo sapiens
PALYGRCTLVGGALVTQAAFGDTTFDGQGCANVR

SEQ ID NO: 941228 - protein, 62 aa, Homo sapiens
SRTVFERKLRVKSSFVAPLEKSYGTRPRILTGNPRVDLQEINNWVQNRGKELLVGAVDVRAL

SEQ ID NO: 941229 - protein, 75 aa, Homo sapiens
MCRSRAKAVLVGYISYDAARYIERLPPLAVDDLQLPSMQFFVFDDVAIYDHQTDRLHLLAYADEGEVGEAERHIR

SEQ ID NO: 941230 - protein, 38 aa, Homo sapiens
MCRSRKNAVTVVPPRKCPLLPWLLSANKQTRGSERHIR

SEQ ID NO: 941231 - protein, 65 aa, Homo sapiens
MCRSEHNEFVLVHDGRQVQLLRCERSEPRRTPYVSHPALRGSSLNAPRTSGTSWVCIRIRERHMR

SEQ ID NO: 941232 - protein, 74 aa, Homo sapiens
NACAAPLFRDGLLLRRSLGDLAIALLRLPDSPGFSSLAASWIAAGQSPRKPPSPEPSEPRSRRRHRPSPERHIR

SEQ ID NO: 941233 - protein, 101 aa, Homo sapiens
TDVPAPVESKKSRLRELQIDEILVGNAKDLHDTGELLLLVLARKDREPVYISAMMHPSDHICEGEKSISFPQGHSRAHGSAYIDRHVVVLTQDDLGGAAMR

SEQ ID NO: 941234 - protein, 128 aa, Homo sapiens
  misc_feature (24)..(24): Xaa can be any naturally occurring amino acid
  misc_feature (28)..(28): Xaa can be any naturally occurring amino acid
  misc_feature (44)..(44): Xaa can be any naturally occurring amino acid
  misc_feature (55)..(55): Xaa can be any naturally occurring amino acid
  misc_feature (105)..(105): Xaa can be any naturally occurring amino acid
  misc_feature (112)..(112): Xaa can be any naturally occurring amino acid
  misc_feature (121)..(121): Xaa can be any naturally occurring amino acid
MTLSVPPRRCAVTSCSAVRGQGRXRAKXDAEVVPQLRNRVALKXKNNEARRATAXNTWQQLLEKTLGQLFELKTTNWLSFFKNDDQYRPEKLSGGPWERLRSYYXDRGYINXDIASTQVSXRQWGTEA

SEQ ID NO: 941235 - protein, 44 aa, Homo sapiens
PGRYSARSTPKWCAARNRVALKIKINEGTSPPSSTSTSWHNVSR

SEQ ID NO: 941236 - protein, 48 aa, Homo sapiens
  misc_feature (25)..(25): Xaa can be any naturally occurring amino acid
  misc_feature (28)..(28): Xaa can be any naturally occurring amino acid
  misc_feature (40)..(40): Xaa can be any naturally occurring amino acid
MCLLLNPNTDLIGPECEAVSDEPQXGWXETRMESFAARFXRTSVAAPG

SEQ ID NO: 941237 - protein, 54 aa, Homo sapiens
DVRSDHVFPTMIDLKKPSFLCLACGARLYRVDMGWWVYYCLVEIQSPFGSGTCV

SEQ ID NO: 941238 - protein, 58 aa, Homo sapiens
LATRSIIFTSVSVKFSPLVVVVTVLLLDGDIDAVVHEVVLVAVLIHWPVVHLVRERHM

SEQ ID NO: 941239 - protein, 121 aa, Homo sapiens
RIANLGETTQETLNAQQFAQQNGQQPMQQYQAQQSYATQQYAGQPVNNTQPVTRPVPVLPVNAPAPISADPCRTGESALESRQRVIAECKAAAWLLTTVDPDDLPPGTALSRGWCLMELNR

SEQ ID NO: 941240 - protein, 77 aa, Homo sapiens
RNGETTILAPVPQGREFELNARKEKRNARFGVCDKAFFVCVFGLHATRLDGHGCDRAWQVSPKLREKEIFAYRLSAK

SEQ ID NO: 941241 - protein, 76 aa, Homo sapiens
MHDMMPMQSQGGSGGSMGGGMMDDNMRMQQPNQPGQTGGTGGMQPQGSMGQGGASGQMGGMPPQGQSGSMGSGTAL

SEQ ID NO: 941242 - protein, 98 aa, Homo sapiens
PSIRQPELRQRTVQTYRRHTETKVDVKLERLRRREERDLGCTCTDEVSLRQRRLVVGQHGLGADEHNVSAIPLCPKRLRGPYPRDRRTDNRLRHSSST

SEQ ID NO: 941243 - protein, 122 aa, Homo sapiens
LFSSPGFWRGKKMYSPDSEAYLKNPAFWVKMNNGWDDYSIPKEVARAVIAMHVKRGDSIYFVTGRSQTKTETVSRTLQDDFQIPAANMNPVIFAGDKEGQNTKTQWLEKKNIKVVYGDSDND

SEQ ID NO: 941244 - protein, 113 aa, Homo sapiens
MPLVILTAPGQAGDAPMFPILMGHLRVAGSGPGRPRTRPDRVRGDKAYSSKAIRGLLRDRGITAVIPQPDDQVAHRKRRGSTGGRPPAFDAEDYKGRNVVDAAFNDQTIGRHR

SEQ ID NO: 941245 - protein, 108 aa, Homo sapiens
AHGEREVAYPDGSRKLVKSGVSTVQNGAGQKTTHLMALNTLALQVLATPVEADEVELRFCFTHDPVAPGSFEEQMIKAQIAGTCGQTGVEGDIPIWAHKIHRVQPLLC

SEQ ID NO: 941246 - protein, 101 aa, Homo sapiens
GDQDAIPIDDILGRVQGEQAADEAGRRVGQAGVVVQRDLGLPVRRIDEVEIRGEVLDGAEEDFSRGQLDLGANGHWSPYIGALRELCISDYSTTSVVTESR

SEQ ID NO: 941247 - protein, 139 aa, Homo sapiens
IDGMAALRFHIRKQIVAKKTALSIKSLEDDIHLQGQISSFYDCDDQAKISGHWNLFEDLNRFPEHGRLKFESRGMRSQRMIMFALSRYQKGTVNRCARRQTLIAIFGPQFTLSRLREINSTPRGPAFNGIAKRERGFPF

SEQ ID NO: 941248 - protein, 63 aa, Homo sapiens
MRCGNRSRTRSVLTTIGNTASTCYCPLRTREWSGAHHAHYGEEMAITTGTGVNRLLDGACTFG

SEQ ID NO: 941249 - protein, 108 aa, Homo sapiens
DDEDHEQPEEQATAAGECLDVLVLLRVVQLRGGGVCALAAEREEREDEEDEGEGEEHVAHEGERCDGGEHGRYAPFGLMRSDGCHPHSALEIMRNVREWCTGGLQHLL

SEQ ID NO: 941250 - protein, 54 aa, Homo sapiens
AVKVLVETFAKIVRPNIDVISTPICIGIQPFCAVVWKYVGIITYTVEVGVVPFA

SEQ ID NO: 941251 - protein, 51 aa, Homo sapiens
MAIRRVHCGSIAALPRGSRDHEDLSLIIHSSRFDRLVVRFIYRDGAVEQQH

SEQ ID NO: 941252 - protein, 67 aa, Homo sapiens
MLPWNPMIQPSVGAVTANAQAATYTFSVHDRFSVVTMSPITAMELILADGALGSGVEEGVGQRGDQL

SEQ ID NO: 941253 - protein, 52 aa, Homo sapiens
GGERREDAAASAQIEKFSLWICEEEDSGLEQVIADAVHPVARSAQEDVVVLD

SEQ ID NO: 941254 - protein, 68 aa, Homo sapiens
AGYAVVTSDEFEGDPASVVTEFDPYEAVSLAPGQVATCLSHERRCGGGSPTILVWTVSVSAYMHGLYG

SEQ ID NO: 941255 - protein, 101 aa, Homo sapiens
YLITAGTTKSEQHTWRNTRDRAIVGLFMVAGLKVSEVASLTVNCINLKDGPWINIRYPDSQISHRTRPVEWAVQLLKDWLAIMAAAGTDGDLTFSTDDASR

SEQ ID NO: 941256 - protein, 83 aa, Homo sapiens
MVVRTASSRPKPLCQIADRRSRDITHNLEHKIFWLLDRKRGLFVTPYADRILKADVTARRSNLIRRIFCWGRRRGHFIHRGNQ

SEQ ID NO: 941257 - protein, 129 aa, Homo sapiens
MLRAIRQTRKGAEILEGWEFSGEEAADGQDGGYVTWLGRRHARRVLREVASNGFALLVGFISQQHREMAGADNTSETEGQAADTGDEVTITPAPAPEALWKGSSSGQGQGGNRDMRSLQTDEIMPRLGT

SEQ ID NO: 941258 - protein, 82 aa, Homo sapiens
QVPVRIIRTSNTVAARFHSEEPVSLRNLQVHEKSRKYAPYGFHDGCDGGGVCLGAQAQSSGETAADRSRLTVGVGAATLPDY

SEQ ID NO: 941259 - protein, 164 aa, Homo sapiens
  misc_feature (16)..(16): Xaa can be any naturally occurring amino acid
  misc_feature (63)..(63): Xaa can be any naturally occurring amino acid
  misc_feature (130)..(130): Xaa can be any naturally occurring amino acid
  misc_feature (147)..(147): Xaa can be any naturally occurring amino acid
  misc_feature (163)..(163): Xaa can be any naturally occurring amino acid
GSEQPENKVLQAQLKXSLESERSVATLLDDAYASGRANAAIGLLASAEYRAYFRKSATLGSGXRSGCSTGKIPAAPVSLPQSDEAIDAELLDIFLTEADEVLAFVQHTLPLSREDADNQEHLTSLRRSFXTLKGSSVLVGLTVFGEXGWNIEQVMNLVVVQIXL

SEQ ID NO: 941260 - protein, 30 aa, Homo sapiens
  misc_feature (4)..(4): Xaa can be any naturally occurring amino acid
MYDXAAVFSGLTVTSLTPALLYLLARLGIN

SEQ ID NO: 941261 - protein, 96 aa, Homo sapiens
  misc_feature (2)..(2): Xaa can be any naturally occurring amino acid
RXLEDPPMNHPGEIAVLASVALPTVVLVNNAQREHQEFMQNVRAVAEENGAAIRALPADGIAVFPLADDYADLYLLARKGMAEKLLPVVQIRYCQR

SEQ ID NO: 941262 - protein, 63 aa, Homo sapiens
  misc_feature (59)..(59): Xaa can be any naturally occurring amino acid
NNRDKCFLITAIEGGMLETAQKTNVLLGDLGAMQGAMLMTMKANTEVTSANQVLKNNEXASKS

SEQ ID NO: 941263 - protein, 175 aa, Homo sapiens
  misc_feature (14)..(14): Xaa can be any naturally occurring amino acid
  misc_feature (159)..(159): Xaa can be any naturally occurring amino acid
LAVTDLTTGFTISXMGWIECQRQMDRAARRGNIRGEALMVFHVTGRQIITVFTFKLSEQILRHLAQRVDQHIQAATVCHTNHDLFDARSPARWMVSSIDRDKALSAFQRKAFLTNIFCMEIAFQSFSGCQAVQNVFFLFLQKKLVWNGWIPISCCIQRXFCRIADIHKFSTDRTG

SEQ ID NO: 941264 - protein, 92 aa, Homo sapiens
DNTHRTLHGALMDAELLAEVYINMTRGQDSLLIDSDASESGEGQGTQEVVAIDFSAFDLPVIKPTDDETEAFEKSLEAIDKASGGKTLWKSI

SEQ ID NO: 941265 - protein, 145 aa, Homo sapiens
  misc_feature (132)..(132): Xaa can be any naturally occurring amino acid
MFGWRANPHFGPFHILSNLLIFGGFIMLASAWRVLYLAQQQHRLATGGLYTRMRHPQYVAFVLIMLGFLLQWPTLLTLIMFPVLVWMYVHLALTEELRCAGRVRPGIRSVFERTPTFHPPLEQWCVEGVVSXDHRHPPVSNNPPA

SEQ ID NO: 941266 - protein, 42 aa, Homo sapiens
  misc_feature (21)..(21): Xaa can be any naturally occurring amino acid
MAVSSPWGPGIEEDADGLGRXIFEGHVQVAISGTAMDSNNPP

SEQ ID NO: 941267 - protein, 82 aa, Homo sapiens
  misc_feature (8)..(8): Xaa can be any naturally occurring amino acid
  misc_feature (29)..(29): Xaa can be any naturally occurring amino acid
  misc_feature (50)..(50): Xaa can be any naturally occurring amino acid
  misc_feature (58)..(58): Xaa can be any naturally occurring amino acid
  misc_feature (75)..(75): Xaa can be any naturally occurring amino acid
MYAKRTRXVDGSLPYRMATPDPARLESYXAPAKREQWWRERLERCYSRAXLLTSFCYXIEYVVSVDVTIVHGACXTYEPAHY

SEQ ID NO: 941268 - protein, 118 aa, Homo sapiens
  misc_feature (5)..(5): Xaa can be any naturally occurring amino acid
  misc_feature (13)..(13): Xaa can be any naturally occurring amino acid
  misc_feature (64)..(64): Xaa can be any naturally occurring amino acid
  misc_feature (73)..(73): Xaa can be any naturally occurring amino acid
  misc_feature (109)..(109): Xaa can be any naturally occurring amino acid
ALRAXPFSMMVTXILGWWVTTLFHFLILFVCLPTRLGTSHPPVMDFHHRNHRGHVSRHGDRFGXCSRAGGPRXTHRAVVPQVHDYKSGVPPLTNLPMDYLSTLCAASLXTVTLGCWAY

SEQ ID NO: 941269 - protein, 35 aa, Homo sapiens
  misc_feature (1)..(1): Xaa can be any naturally occurring amino acid
XSTLEDPLVSDDTVRYHNDLKAPLLCANVIDQPRM

SEQ ID NO: 941270 - protein, 102 aa, Homo sapiens
STLEDPDTVPDVSAIPSTVFLKCRKMVRWLQVRDELNHYRAHFVVKSFKHGFARCFGNVTRLIDRHIWNGGERQKSSRGFSRISGSRTQWIWEQCRHSPTKD

SEQ ID NO: 941271 - protein, 71 aa, Homo sapiens
  misc_feature (46)..(46): Xaa can be any naturally occurring amino acid
  misc_feature (49)..(49): Xaa can be any naturally occurring amino acid
MPMPNRSVAVEHLDDVDGAIDALDVFGHRRCRASMGVGIRERSQRXCKXVLRLQGFDGGTLLVLENAVTSL

SEQ ID NO: 941272 - protein, 49 aa, Homo sapiens
MAKKLEQIEADAQEIVIAAELIRLGARMQLLEAEVVLSRDRLMKLYKQV

SEQ ID NO: 941273 - protein, 126 aa, Homo sapiens
QNARGSTGSCGPRTCRPHGARCTHFHSGHASIGARLLVRHGDAAAVVPDRDGAILVEGDDHSVRVARHRLVHRVVDRLPGKVMESGNPGGAHVHSWPEARRHQALEGDDVFCTVLIFIGHLSMSRH

SEQ ID NO: 941274 - protein, 79 aa, Homo sapiens
RSPPVCPVLRRCRDARDADERDLLGTPQSGGHEVYLEVAALVTVFILLGRYLETRAKRQSGEALRALLELGAKDAVILR

SEQ ID NO: 941275 - protein, 53 aa, Homo sapiens
ITMEPLGPMVRHGDDQWFDIVKLARFAMLNAEESGVTQKNVDEMAKCRGLFDA

SEQ ID NO: 941276 - protein, 68 aa, Homo sapiens
RSSSVPSPYGFTTAITTSSSRFPRVLRRLTLRSHCYGFRGNHHWRILLCRLATNPGRDGVSRHCDRRL

SEQ ID NO: 941277 - protein, 103 aa, Homo sapiens
MRASQTALDAFLLGQQPGHVCRVRPAAGAVAGYNVADLRVGSSEKYFSSGKRVLTAGTSVFRAIQPPFVENPSIGGSGGTFQATEQATIGLESCTGTYASMTI

SEQ ID NO: 941278 - protein, 50 aa, Homo sapiens
CGDLCTYDKAKAKELYAKAGGYKGTLTIAVNGDGDHKSWSQAVCNSWKND

SEQ ID NO: 941279 - protein, 42 aa, Homo sapiens
GVKFHVINEDGTTSGGPMYYLRDGLASIGKPTLGRVLASLFA

SEQ ID NO: 941280 - protein, 45 aa, Homo sapiens
QPRSPGILIDLFDRERARRAHPVDGLELPPSECTSSEPSPLCTRS

SEQ ID NO: 941281 - protein, 47 aa, Homo sapiens
IPWRPIVICLPSAFGDCRFTDLGVPRSALAELCISSCTQSDWFWVSS

SEQ ID NO: 941282 - protein, 31 aa, Homo sapiens
MIVSVIPIAKQTMQLNLLQYHLYEVKLEQES

SEQ ID NO: 941283 - protein, 164 aa, Homo sapiens
  misc_feature (127)..(127): Xaa can be any naturally occurring amino acid
LADIGGGDHAAQHQHTQRHHEPENSSTMIATMTNRPARRQVSNGPSARHHASDNPPRDRAEGLIARPRHAPIVSPSDVCLVVRYPAILRLMRPAKMSENRSSTESSAISLMSSSCPSPAMTASIMAXDEAARSADPRMTSSRSRANPIPVCCGALMGARKRAHT

SEQ ID NO: 941284 - protein, 34 aa, Homo sapiens
RAIGIPFRPGPVRVQQQLTLVLSPCRFGDHLQRA

SEQ ID NO: 941285 - protein, 51 aa, Homo sapiens
SVYPGQAEALQLAATSLIGGGRNENNSSGEAKAARSTTTGSTVPKLETFTT

SEQ ID NO: 941286 - protein, 55 aa, Homo sapiens
FTSNNPRHLALAEKLSSVAETVYMMQECTTVFPGRVEDYYRKSPVMQDYFSRCHQ

SEQ ID NO: 941287 - protein, 80 aa, Homo sapiens
APCGPAQNRVLLHTNHEEVNVAREVDKASTGFSGQHAGLDLDMGMLISERLDDLVESFEGLVVHLFGVVTRNRHCEQLAA

SEQ ID NO: 941288 - protein, 113 aa, Homo sapiens
RGVVAGDRGPVTVPPVVVIIVDLEGGGRPRGVRGEQIRGDREVADDHVVVVSQTGTTDGADIHSRGTVCGVAGPLGAERIDVGVSTRRPLRREGLRGAGVSAEQEAHRCGATR

SEQ ID NO: 941289 - protein, 40 aa, Homo sapiens
RHPRCGEAGSAGAYHREGRAAADARLAGLVIFLSLNRVSF

SEQ ID NO: 941290 - protein, 41 aa, Homo sapiens
PQVARVIPNTTPQAAAGGRLMGSFRGVSYAFWAVAGAVISH

SEQ ID NO: 941291 - protein, 90 aa, Homo sapiens
PAVRRKAGRKVTSRPLTNAPAPPASSASCISVDPGNPSHYSLVLKNGTEALLVHEPLFSSADGSRAFHVDHPDLFVVSIYDPLIIWLKPD

SEQ ID NO: 941292 - protein, 61 aa, Homo sapiens
QGGDDPLDREPGGLDARLDRGVHVCPCRFLASVDLIRDYQRYRDALVAIGGAGQSLDSNGI

SEQ ID NO: 941293 - protein, 68 aa, Homo sapiens
RITTRRLVQPWRTATDCDPATAPPLAQLNTRLASPPNGSQITVPVQNNATGLTFQFYNVAGNKLTVST

SEQ ID NO: 941294 - protein, 51 aa, Homo sapiens
AIAHLEQAQHPAYNGIVMKPVNRKHTPLDIPHEEPKCSLEWLGVKTGVTTT

SEQ ID NO: 941295 - protein, 100 aa, Homo sapiens
  misc_feature (14)..(15): Xaa can be any naturally occurring amino acid
RVIRRDCLSIASLXXLIVSCSTSGFAAQGGDEIPTDKYQSRASLSILGRSRFGDVDLSAGPHGSDKSQLQLLARTVRAYNAVSDKPCAGISVLLCYTILG

SEQ ID NO: 941296 - protein, 48 aa, Homo sapiens
MRGTSYLSAWRHTVSELGLHALLAVEDGDGAVEHAKGALDLDREGHVT

SEQ ID NO: 941297 - protein, 144 aa, Homo sapiens
DAETGKTLSVGAGQGRHRLHRDHHDVRRHHEKANPSSAKLDRNGVPRSISSLLYDLGEEIDNALALAAKAVAGREEEGKVAEYYNDLTTPPYDDSAAPGDQPLIVLNSVPIDVRFFRTDLSKATRLANPFTPTRDCSVYRGAGF

SEQ ID NO: 941298 - protein, 70 aa, Homo sapiens
RRKLWKRQKMCRDAPANGNANEENGELEAANEVDVEEETVIRNRRLKRKREFTDSGDKAAGVRGGGRGAR

SEQ ID NO: 941299 - protein, 56 aa, Homo sapiens
  misc_feature (27)..(27): Xaa can be any naturally occurring amino acid
  misc_feature (52)..(52): Xaa can be any naturally occurring amino acid
PKANPTESPTSAHPTRPARNRKPDPPXTHGKAGGNHKATPEGNQNRRKADRXKPGR

SEQ ID NO: 941300 - protein, 43 aa, Homo sapiens
  misc_feature (30)..(30): Xaa can be any naturally occurring amino acid
  misc_feature (43)..(43): Xaa can be any naturally occurring amino acid
PANMLLHFGRGNSYNGFDYVFSLYPGGPTXFARKTLGPTEFLX

SEQ ID NO: 941301 - protein, 103 aa, Homo sapiens
  misc_feature (28)..(28): Xaa can be any naturally occurring amino acid
LGWNRQLLVGGLIHEDVGVAILIEVLHXATIDLSRFNLDVGVEGAINDFPAQHVLELGAHDSVALTRLMVLEPDDRPQLAVKVENGAVLNVIGGNNHRSGPFG

SEQ ID NO: 941302 - protein, 46 aa, Homo sapiens
  misc_feature (1)..(1): Xaa can be any naturally occurring amino acid
  misc_feature (16)..(16): Xaa can be any naturally occurring amino acid
  misc_feature (21)..(21): Xaa can be any naturally occurring amino acid
  misc_feature (39)..(39): Xaa can be any naturally occurring amino acid
XETDTLNGQFMVGFIXHIKGXSGPLNSNHGYCSVEIVSXQFHNIPP

SEQ ID NO: 941303 - protein, 109 aa, Homo sapiens
  misc_feature (41)..(41): Xaa can be any naturally occurring amino acid
  misc_feature (48)..(48): Xaa can be any naturally occurring amino acid
  misc_feature (51)..(51): Xaa can be any naturally occurring amino acid
  misc_feature (78)..(78): Xaa can be any naturally occurring amino acid
  misc_feature (80)..(80): Xaa can be any naturally occurring amino acid
  misc_feature (86)..(86): Xaa can be any naturally occurring amino acid
  misc_feature (103)..(103): Xaa can be any naturally occurring amino acid
TFCGTLAKNSTTSSVCRTVPVGLLGVHRKISRVRSVIAADXASEVVMXILXQRRRDRGGPGDLGQDWVGLEGTATERXSXTSAGEXMHELAGYLRDPTPTVTXLTFTPK

SEQ ID NO: 941304 - protein, 34 aa, Homo sapiens
  misc_feature (11)..(11): Xaa can be any naturally occurring amino acid
  misc_feature (24)..(24): Xaa can be any naturally occurring amino acid
  misc_feature (27)..(27): Xaa can be any naturally occurring amino acid
VSICSTLPDHXINNIGIVGVALLXCLXIFCALRK

SEQ ID NO: 941305 - protein, 65 aa, Homo sapiens
  misc_feature (1)..(1): Xaa can be any naturally occurring amino acid
  misc_feature (4)..(4): Xaa can be any naturally occurring amino acid
  misc_feature (43)..(43): Xaa can be any naturally occurring amino acid
  misc_feature (45)..(45): Xaa can be any naturally occurring amino acid
  misc_feature (54)..(54): Xaa can be any naturally occurring amino acid
  misc_feature (58)..(58): Xaa can be any naturally occurring amino acid
  misc_feature (63)..(63): Xaa can be any naturally occurring amino acid
XRGXPGWHYPTTTTKKKARGQEGQHPDGTAIAAGILVCGVSTXYXCLDSWALLXPSPXMQENXDQ

SEQ ID NO: 941306 - protein, 185 aa, Homo sapiens
  misc_feature (28)..(28): Xaa can be any naturally occurring amino acid
  misc_feature (90)..(90): Xaa can be any naturally occurring amino acid
  misc_feature (108)..(108): Xaa can be any naturally occurring amino acid
  misc_feature (111)..(111): Xaa can be any naturally occurring amino acid
  misc_feature (128)..(128): Xaa can be any naturally occurring amino acid
  misc_feature (146)..(146): Xaa can be any naturally occurring amino acid
  misc_feature (153)..(153): Xaa can be any naturally occurring amino acid
  misc_feature (164)..(164): Xaa can be any naturally occurring amino acid
  misc_feature (182)..(182): Xaa can be any naturally occurring amino acid
SFPACLVAAILRATLLMDSASATEDPPXFWTTRVIAPPACADTAVEPLLTDETGTTSPSTDIDGQNRVLPHGMFRHREQFGRTGLEPSAXSLTVSPGAPLVGAFSMPXFSXTWQRGIHAVNGDRTGDXFIMVDGRITAQITCEQLXPGLVGLXGGADPPQLTEXLHTFLMERVLTSCARRAXSAC

SEQ ID NO: 941307 - protein, 160 aa, Homo sapiens
  misc_feature (119)..(119): Xaa can be any naturally occurring amino acid
  misc_feature (153)..(153): Xaa can be any naturally occurring amino acid
  misc_feature (158)..(158): Xaa can be any naturally occurring amino acid
LGELGEWVIRDVASTPLIPGIRRSMRTTSAWGACLTAPSPSLASPTTSRSSAASRIWRTALRTSVSSSTSKTRTGSMATSYDVYRLQIRRGTTVVYWKRAGMIITARDVHMDVEQIVIXTVVKAAPSSSDTLGDPPKPPGMGTRPTSPSTDVXVRRPXVM

SEQ ID NO: 941308 - protein, 117 aa, Homo sapiens
NVKKYFFAERLIALIRLNPAAPRAAPRLFYISRISVMSRVKRGVTAHAKHKKVYKAAKGYYGRRKNTIRVAKQAVEKAGQYAFRDRKRKKRTLRALWIQRINAAVRPFGMTYSVFIN

SEQ ID NO: 941309 - protein, 103 aa, Homo sapiens
  misc_feature (51)..(51): Xaa can be any naturally occurring amino acid
  misc_feature (82)..(82): Xaa can be any naturally occurring amino acid
  misc_feature (85)..(85): Xaa can be any naturally occurring amino acid
  misc_feature (92)..(92): Xaa can be any naturally occurring amino acid
  misc_feature (100)..(100): Xaa can be any naturally occurring amino acid
MTDVMSGSPYAPTIGADPMLAVTAANGVWLQLHDGEHRHEVIDAMASWWWXIHGYRNPVLDEALNRQSSQFSHVMFGGRTHXAAXDAVIFLXRLAPGPLXRIL

SEQ ID NO: 941310 - protein, 73 aa, Homo sapiens
IFHKKFICEWGREGIVQRHFAQLDEGGIEDILARLVIPRIFIINHGVALVMIRGYRSVRMYGYLAASDRKHRM

SEQ ID NO: 941311 - protein, 118 aa, Homo sapiens
  misc_feature (28)..(29): Xaa can be any naturally occurring amino acid
  misc_feature (92)..(92): Xaa can be any naturally occurring amino acid
  misc_feature (101)..(102): Xaa can be any naturally occurring amino acid
ISQLQNPFLNALKLVTSSSNREHKEGIXXSSHRHFRLANAHGLNEDDVVASRLHDDHGLASRTGNATKVAPRGWGTHKRLVTISQIAHPGAXTKNRTTGSXXRGIDGKNRDLVAKLID

SEQ ID NO: 941312 - protein, 95 aa, Homo sapiens
  misc_feature (1)..(1): Xaa can be any naturally occurring amino acid
  misc_feature (48)..(48): Xaa can be any naturally occurring amino acid
  misc_feature (62)..(62): Xaa can be any naturally occurring amino acid
  misc_feature (72)..(72): Xaa can be any naturally occurring amino acid
  misc_feature (80)..(80): Xaa can be any naturally occurring amino acid
XTYDGKGFRGSRTEQDAAERAYFADRFHLMRVMPPEGGHAVGTAATRXEFAGSTVVGHVDTXSHNHAAETFXYSTVGAVXGPSSVVIAGAGIIGL

SEQ ID NO: 941313 - protein, 50 aa, Homo sapiens
  misc_feature (2)..(2): Xaa can be any naturally occurring amino acid
  misc_feature (14)..(14): Xaa can be any naturally occurring amino acid
  misc_feature (19)..(19): Xaa can be any naturally occurring amino acid
  misc_feature (46)..(46): Xaa can be any naturally occurring amino acid
LXILKSSWDNIQGXHRRSXFKTFSSLLQGKKGSSGTYNALFPRGPXNIKL

SEQ ID NO: 941314 - protein, 104 aa, Homo sapiens
KALCKNFEMLSHVDRNGKTSLLCSLCLTTSYKVKQGGLNCPSGPCSFCRRKLSEPCYYNKGDRTGYQFLQAQLLKQFQRQALRGASTELALMYNLFSGNLKLGL

SEQ ID NO: 941315 - protein, 37 aa, Homo sapiens
NIWYCDGWGVPDRIQVTTDLYQVLLPEGYQLECRGVV

SEQ ID NO: 941316 - protein, 64 aa, Homo sapiens
EKSFCSEGCVLLYKQDFTKKLCLCCINLTYLSQNFQRGSTQQLVGSTWVFFCEDLEYKNPLGYS

SEQ ID NO: 941317 - protein, 43 aa, Homo sapiens
ETPVFICATAGLKDLLSVFQAYQLPADDYTSLMPVGDPQSITI

SEQ ID NO: 941318 - protein, 34 aa, Homo sapiens
MRMVDARNGHRGGARSFLTPRATPAVAHIKTGVL

SEQ ID NO: 941319 - protein, 44 aa, Homo sapiens
  misc_feature (7)..(7): Xaa can be any naturally occurring amino acid
  misc_feature (10)..(10): Xaa can be any naturally occurring amino acid
  misc_feature (19)..(19): Xaa can be any naturally occurring amino acid
RYPGFGXLVXGILVSVCIXVCMKLNDVLMTLFAVNLCKIVLGFI

SEQ ID NO: 941320 - protein, 34 aa, Homo sapiens
MRTFRNSAPHPNPSSPGGIQGLRPVPGFRRLVPE

SEQ ID NO: 941321 - protein, 119 aa, Homo sapiens
GGVCWSHFWVGKFKSISIDEDKNSLCWPGTVAYPCNWPSFSCFRDEVSLCHPGWSSVVQSRPSLVGAPSGALPDPPGWRCVWESRLQGLRTQDKLGIGWLVSPSEKWAIWWVPSGAFLL

SEQ ID NO: 941322 - protein, 51 aa, Homo sapiens
TLDAYESGKLVNSAVSTTGKLADLSAQSAPIYVGGGFAGGEVGACYGTLRE

SEQ ID NO: 941323 - protein, 37 aa, Homo sapiens
  misc_feature (1)..(1): Xaa can be any naturally occurring amino acid
XISLGPWVLLAMETVVNLVLLVVSVLLVLEAQEVLVA

SEQ ID NO: 941324 - protein, 71 aa, Homo sapiens
MCQLSRQAESKDRPAPAFRVAVKMRDRRPDQDLPPWTRPSRPAGRARHTPRASTSAVEMKKLQQNALRAVE

SEQ ID NO: 941325 - protein, 76 aa, Homo sapiens
CKYAIAIDGGSEVREEFGAAFERDTDDKIVVNKNACKPDVVAHACNASTSGGQGGRITRGWEFETSLANTAKPCLY

SEQ ID NO: 941326 - protein, 106 aa, Homo sapiens
QADEGDASHLRVSPMDFGRGLAPPVPPSPVTNLRRDASVRFAEAVDELIRLAPDRLVEDVQAVIVGRVGDGCALSVEDETGGLDLLAELGALDAAQAFDHCVGGAR

SEQ ID NO: 941327 - protein, 47 aa, Homo sapiens
  misc_feature (17)..(17): Xaa can be any naturally occurring amino acid
HPAGQRRVRREIAKALXKSFTMHSLTIHMESPVDHYPDCLFCEDPAF

SEQ ID NO: 941328 - protein, 88 aa, Homo sapiens
VHGTELAPSRAAVHPLIHPFTPPPIHTPTHPSIHTSIHSPIHPHIHPSIHLSVHPSIQPPIHSPTYPSTHPSTYPPIYALIHRFIEPA

SEQ ID NO: 941329 - protein, 46 aa, Homo sapiens
RSPTVSREGLPTLNTTILYPNVRAGMSGSLPGGSVISRLLINAEPC

SEQ ID NO: 941330 - protein, 60 aa, Homo sapiens
WNWTCKDLLLQALKESQSYLVEDLEGTEAPFQQHSGQPLAIPPNHPEFDLFIPHIRKASL

SEQ ID NO: 941331 - protein, 139 aa, Homo sapiens
  misc_feature (69)..(69): Xaa can be any naturally occurring amino acid
MFWPLAQAADDLAGGRVVLALKEGHTLTAICDASKACVSALLSESCSPWMRQSCSKSPTSTQGPLEKVXEIQANPGLCQSFPAGLAGPSKGPNKVNPRRPKFLSPMAFLSVGAKQAQVSAAREHSPRPAKEPMEQEPAL

SEQ ID NO: 941332 - protein, 145 aa, Homo sapiens
MYTGAPHHPGDPECYFFFNKQQKAWGVTPQRKKKTQPSGGLGPLLPPPLQTPTEKEKGWVVGVGEFSQFYNRFFFFGKKTEPKVGPLPGLFFPRGKSHTCSFLLSPGKKRGCGREIGVQVWGGGKKIFIFEPLCPFCIKLKEGKV

SEQ ID NO: 941333 - protein, 47 aa, Homo sapiens
  misc_feature (15)..(15): Xaa can be any naturally occurring amino acid
  misc_feature (35)..(35): Xaa can be any naturally occurring amino acid
  misc_feature (43)..(44): Xaa can be any naturally occurring amino acid
AKPFLHFCAKTLPLXDQEFLNYAELVRATPFLLHXKLYPASCXXSLF

SEQ ID NO: 941334 - protein, 135 aa, Homo sapiens
YQFPHVPESPSLLEYRAGARRGRMLGWCSPVGANRGRLGWAYEGHGGGSCGEGNKRHWDFGRGWEKITPLYHREILLFKRCPFQSRGSNGMPSPSPVQAVGLYPPPASSPFSYLFSLLVAKRPWAVPCPSLPNSQ

SEQ ID NO: 941335 - protein, 46 aa, Homo sapiens
  misc_feature (11)..(11): Xaa can be any naturally occurring amino acid
  misc_feature (21)..(22): Xaa can be any naturally occurring amino acid
VISIVMPPSAXRATQTVSLRXXKPPAVNGRTQPGPAPPAISLPTAP

SEQ ID NO: 941336 - protein, 185 aa, Homo sapiens
  misc_feature (30)..(30): Xaa can be any naturally occurring amino acid
MEVDGLNSRTDRGGDSIGETRLLEPVKEIXGGMKHQLSQMGGSTPVLTPGKTPIGTPAMNMATPTPGHIMSMTPEQLQAWRWKKEINKRIRPLFDEELDVRFPEENRVLPPPAGKVPIGTPARKLTATPTPWGGMTGFHRQTKDRLMKSVNDQPLGIFPFLKPDDIQYFDKLLVDVDESTLSTRR

SEQ ID NO: 941337 - protein, 69 aa, Homo sapiens
  misc_feature (20)..(20): Xaa can be any naturally occurring amino acid
  misc_feature (40)..(40): Xaa can be any naturally occurring amino acid
SAPQAFMEMGSGAQQGQKNXGIQRSPPEPRRPGAQQQGSXPSERDPPLCTQQARSPLPGKNQTRNRCVL

SEQ ID NO: 941338 - protein, 81 aa, Homo sapiens
MWMFLLPPRGGFGPAPPQIRCRPPKRALAVPQETGPRLPGPKFGQPLPGLGPALLPPALLVLGRTKLVPPAPNSIKLFCGP

SEQ ID NO: 941339 - protein, 81 aa, Homo sapiens
PASASSSNPSSSHDDDSSKDSGFTIVSPLDIYHSAQSCPTGIQPPFSGPKARLRLIQWRTFLNHCFLPGMHFALVQPFETP

SEQ ID NO: 941340 - protein, 87 aa, Homo sapiens
RAGFSPSPRFPAPPWKQTGFFMEGHPPLKPGEEIFGPPGLGPHPQNHPGLGFPLDLGFQGPLCELSCPPPHRMRLGPAPPPPPSPGG

SEQ ID NO: 941341 - protein, 105 aa, Homo sapiens
  misc_feature (10)..(10): Xaa can be any naturally occurring amino acid
  misc_feature (56)..(56): Xaa can be any naturally occurring amino acid
LAKGNILAEXYTFFIDILLATIRDEIAGCIEKAYEKILFPEATRILFFNPPKKMPXFPKKRGWVLGPNNFYSFASQQQKPEDPPFPSPKLAKQVIEYARQLEMFV

SEQ ID NO: 941342 - protein, 57 aa, Homo sapiens
ENQIESKAAYVLFYQRQDVGRRLLSPAGLFGAPASPACSSPPSFEFMDVNLEPWVLP

SEQ ID NO: 941343 - protein, 54 aa, Homo sapiens
STSLAPTRPCFYDIDLDPKQNRRMDYSKQITIHLQEATLKVWPEFRKDPFVPMH

SEQ ID NO: 941344 - protein, 135 aa, Homo sapiens
TLALPSQSSQVGYDKVKAISSWLSIFPFRCRSSMCPSVTQQAGPLLSGTLSHSSHSGHRWSLEGSKPWGLQTSLERESPFSPPRKPRPAFVILFIFTFEPCKACRWGRSVPATRCQQRSAGPLVWPEPGEGTGHA

SEQ ID NO: 941345 - protein, 71 aa, Homo sapiens
LAFEGAPPPAPPPPPKSFRAKLNRFREGPFMPAKKALGPGKNWASGKKMFVLFSDYVTNPSKTSLLKAPSL

SEQ ID NO: 941346 - protein, 103 aa, Homo sapiens
KIGPLFPGPELPGEPRSPALFGNPQKGIVMGFPSSMSISPPARPFGVGAKLPGFPPRSWAGPCPFLWRPNQGLSPLLFETSRRAKTPPPFASFGFFNKKISWG

SEQ ID NO: 941347 - protein, 40 aa, Homo sapiens
AGKPPLPGVFGLPEDGWAGPRFKFFPGPRMEIKPPPLPWG

SEQ ID NO: 941348 - protein, 118 aa, Homo sapiens
MVIQRAFRRHLVQRFLKHASFHLPQQAGSGLSEEDAPEREGLIAYVMSETFLPDPLAHPSSSSISSTSFPPSYDSVTFFNFQNCTMTSRRGEESRKKEGRPDIKCQMLSEEIEPFSPS

SEQ ID NO: 941349 - protein, 147 aa, Homo sapiens
PGPPKAPPPRAGAPVGPIPEKAPVCGGGPPPPPPLPPLGGLFKKSGLCKRGGGLPLSVCLSLAHAPPPPGARGPKKSALRGWPTGPPPCLRFPLILGGGGPPLSRTGPGRGVGNPTKRVGWGLQWGPPSGPPGGPPPGGATPPAPFC

SEQ ID NO: 941350 - protein, 112 aa, Homo sapiens
SGGGQRPAPPGATTCVLFVYCCHAVSTVQRQTITQRRSREGSREPHAAWGATGSLTCAGALPDSVRLLAQECRNVVRVDALFLQCCHVSRRRLTRAAPHGGGVEVAVVRRGR

SEQ ID NO: 941351 - protein, 81 aa, Homo sapiens
TAKAVLNRKVYSYKHLHPKKKYLCKILNKILANQNQRHVKKLFILNKWDLSQACKNSSTYTNQCDRAYQHNEEQNPYDDFN

SEQ ID NO: 941352 - protein, 166 aa, Homo sapiens
ALQARLKAPRSPPPPIGMANKGPAYGLSRKVQQKIEKQYDADLEQILIQWIPTQCRKDVGRPQPGRENFQNWLKDGPVLCELINALYPEGQAPVKKIQASPMAFKQMEQIFQFLQAAERYGINPPDIFQTVDLWEGKNMACVHRTLINLGGLPPMVWGFRKISLFI

SEQ ID NO: 941353 - protein, 121 aa, Homo sapiens
PSSWRMRTKVCQLHFPHLPILGTYDLKSVLGQLGIPKVFNNGADLLGVTKEAPLKLSKAGHKGVLTLDEKGAEAAGAMFLKAIPMFIPPEGKFNKPFVFLMIGPKTQFPLFMGKVVNPPPK

SEQ ID NO: 941354 - protein, 82 aa, Homo sapiens
  misc_feature (3)..(4): Xaa can be any naturally occurring amino acid
  misc_feature (12)..(12): Xaa can be any naturally occurring amino acid
  misc_feature (48)..(48): Xaa can be any naturally occurring amino acid
  misc_feature (56)..(57): Xaa can be any naturally occurring amino acid
  misc_feature (60)..(60): Xaa can be any naturally occurring amino acid
  misc_feature (71)..(72): Xaa can be any naturally occurring amino acid
SQXXSLHIALTXTFMQLKVMNLTFWKSDFYTCMCDYADVFLVPLYTEXLLISCLVXXSVXYTMSVPLSLHXXSPHNPSQCNI

SEQ ID NO: 941355 - protein, 100 aa, Homo sapiens
GRVTIFPREPLLPFGPFWWPHWTRLAQKPAGSGSGFPGFRSQVLPFFFKPSGLLSIFWAFVFGLARRWGHFVSFFVLALILVFSLYCFLYFVNYKNPGQR

SEQ ID NO: 941356 - protein, 155 aa, Homo sapiens
  misc_feature (44)..(44): Xaa can be any naturally occurring amino acid
MVFPVGKPHAEEKQYYMWGHPGGFHTFKSEVPSGVTKGVVKLFXSDPITVTVPVKVSRKNPKFMEAVAEKTLQEYPKKPREELNLDVAFAPTGGIKSSSPQNEVQPPKKSFARSQVNRAQPSGPQIRPTFSRFGFCTLTLDFAGHGKKKIGPACN

SEQ ID NO: 941357 - protein, 66 aa, Homo sapiens
WALRPLAEPSLCSHPPQLLPRLQSGPGGTREGEKEMQEPRGSRFLGKRVPIGPLALDEPINQTLAP

SEQ ID NO: 941358 - protein, 114 aa, Homo sapiens
  misc_feature (114)..(114): Xaa can be any naturally occurring amino acid
GPGKAQEGYSPQFPPKCHRQGRIEFAYIGPPQVGKRARARIAKGLRLCRPKAKAKAKDQNQGPGCSPSFSFSSGSQTYPGPYKGFKVDIFANIRTKGLVRPPPPAPGVPFAWEX

SEQ ID NO: 941359 - protein, 71 aa, Homo sapiens
WLQPRILFPLGHAAMLGLKYVYWTQLNMVQTLKYLAILGSVTFLAGNRMLAQQAVKRTAHEFQKKDGNFEN

SEQ ID NO: 941360 - protein, 56 aa, Homo sapiens
PPFGPPGGHFSKGACKGVWDWASSSPALETKALYAPPYEALFPSYFPFPNKGSQVI

SEQ ID NO: 941361 - protein, 103 aa, Homo sapiens
PPSFGKRGFGKPKVLPWGVPPRGGGGPPPKGFPRGGGLGGGGPPPFPGFPPPPPPPWGVAPFFPGGPPPLGGPGVFFPPPPPPPWGFFFFLGGGGVFFWGFFS

SEQ ID NO: 941362 - protein, 154 aa, Homo sapiens
NSHMPPVSRTLFLGGPSVFFSPPKPRAPFLFSGPLRFHGWWWALTPKTLRLSFIWSWAGWGCIIPKQNPGGGRSTARSVWLGSFPFFPRAGLIARGSSARFSPKPFPPPFRKPFSKPKGSPGVFRLAEDVLAVPRFHSFPGPRLGIKPPPLPLG

SEQ ID NO: 941363 - protein, 112 aa, Homo sapiens
  misc_feature (83)..(83): Xaa can be any naturally occurring amino acid
GGPPPPPPPPSVWEKGFWETPGFPPGGPPPGGGGPPPQRFPPGGGFGGGGPPPPPRFPPAPPPPLGAGPLFPGGAPPFGGPRXFFFPPPPPPPGVFFFFLGGGGVFFGGFFP

SEQ ID NO: 941364 - protein, 39 aa, Homo sapiens
SSRKGTERCWREASAIRRRQGKSSGAFLYNTPFFLLFFK

SEQ ID NO: 941365 - protein, 68 aa, Homo sapiens
ASLNEKDTNYTLNPDSLDWALYDHLMDFLADRGVDNTFADELVELSTALEPQEYITFLEALKSFVKSQ

SEQ ID NO: 941366 - protein, 145 aa, Homo sapiens
LSGMFAWHRAGDSKIDPQMEAAGFTAQVIILNHPGQIGAGYAPVLDCHTAHIACKFAELKEKIDRRSGKKLEDGPKFLKSGDAAIVDMVPGKPMGVESFSDYPPLGRFAVRDMSQTVAGGVFQTGGQKGCWSWQGPQVCPESSEG

SEQ ID NO: 941367 - protein, 128 aa, Homo sapiens
  misc_feature (1)..(1): Xaa can be any naturally occurring amino acid
  misc_feature (33)..(33): Xaa can be any naturally occurring amino acid
  misc_feature (39)..(39): Xaa can be any naturally occurring amino acid
  misc_feature (80)..(80): Xaa can be any naturally occurring amino acid
XQGCVVAPNRGFSSVFPPPLSPIGVGGWGGFLXQSLFVXAVAGDAPRCFCPFKTPGPVPPPGFFLGRGGGTNFPPGTPFXLWAFLGPPLTPFFPKNRGGPGRVFPGFFAPRGPPRGPPRGPPRGPRFF

SEQ ID NO: 941368 - protein, 105 aa, Homo sapiens
  misc_feature (16)..(16): Xaa can be any naturally occurring amino acid
MGILFTGELWEFLSFXERAPAIIYNILLFGLTRALGQSFIFMTVGYFGPLTCSIIPTTRKFFPILASVILFANPISPMQWGGPGLGFLGFGLDAKFGKGAKKTSP

SEQ ID NO: 941369 - protein, 168 aa, Homo sapiens
  misc_feature (27)..(27): Xaa can be any naturally occurring amino acid
  misc_feature (36)..(36): Xaa can be any naturally occurring amino acid
  misc_feature (50)..(50): Xaa can be any naturally occurring amino acid
  misc_feature (55)..(55): Xaa can be any naturally occurring amino acid
  misc_feature (110)..(110): Xaa can be any naturally occurring amino acid
GLGNQIVPDAPKDHAFKWLRQVPKIEXGVPGTQRVXPTMFLSLLKSCSPXARPGXALQGMATVKDAFPACPLPICCERGASLPWGLSPGFAFFLRGERTLPLPRLGPTMXPFPRREVFGPWDPIPFSQVFFWVWGEEGMISVGFDVLFLSSVGGGVRVCMKWNKLPPA

SEQ ID NO: 941370 - protein, 113 aa, Homo sapiens
NLEHIRARGPLFAPPVGGVGPERVGNVNVLGTRFKPQGSVGSLVAGVTGIAPGKVPYLGIPAGAQPGPPPFCCDQNIGGGNQGLEKGGPLFLDGGPRGPAVGLHKEDLGPFGG

SEQ ID NO: 941371 - protein, 96 aa, Homo sapiens
  misc_feature (41)..(41): Xaa can be any naturally occurring amino acid
  misc_feature (45)..(45): Xaa can be any naturally occurring amino acid
LWNGSQQCQDTRLDIPPRGLKMAVTFIGNSPAIQELFKGIXEQFXAMFRRKAFLPWYTGEGMDKMEFPEVESNMNALVFEYHQYQDAPPKKEEDFG

SEQ ID NO: 941372 - protein, 102 aa, Homo sapiens
PPGGGGSPPFFRGKGGFPPPELGKNGFLWPFNVGGGGGAPLMGLGGAPPPPGGGGYPFTPLFVGGGGGAFFPPGRGFPRGGGVLGGGVLGPPPPPKKRPGGR

SEQ ID NO: 941373 - protein, 119 aa, Homo sapiens
GTGRGPIPDTAVARLYLGAVSPGRLETSMWSKQGLERGGLALTKKMRGVSAFPPWPQIKRLWGQEGVKHVQGRRPVQGPTLRPQNLTSSKAPPMEGCLGDSVPPPYNVWLKIKALSKVA

SEQ ID NO: 941374 - protein, 87 aa, Homo sapiens
LAKVQGLGNGKRKAKAPPRFPPDFKSKQLLLETERLLGKASSNWSQAKRVLQEVREFKNLYKQMDLQTPVSPLRQTPPPSQYRKSLI

SEQ ID NO: 941375 - protein, 103 aa, Homo sapiens
FWKEPKPLCLGGSQPPLTGRHWQNRPKTKGVFMVSSLDAKPNFWWIPKASCLGKGQDVLRPGTHISMCFFTKKGVFFLRVGQGGCTHRHKKGGEGFLGAKLRL

SEQ ID NO: 941376 - protein, 128 aa, Homo sapiens
GPPGAHRSPANSGGPEVAGLPRGPPGEPLQGFFKIGGGGLRSPGGGRDCMVCFESEVNAALVPWGHNLFCMECAVRFGRGRTQSVPFAPSQPRKPSEYFPKPRAPASGAPSTGPPLDLFSPKAFWKAV

SEQ ID NO: 941377 - protein, 70 aa, Homo sapiens
LPPRGGFGPAPPQIRCRPPKRGLAGPQETGPRLPGPQFRPAPPPFGSRPFTPGFAGPGEDQIGPARPLFH

SEQ ID NO: 941378 - protein, 111 aa, Homo sapiens
GGGKPPEKAPPLFFLGVPPPGPPPPRAFVFLGPWDPGGFPRAPKGPKGGPPWPLWGGTPGVGGKNPPQIFSGGGGGKISFLGGFFKKFGPPPGGIFGFFCFLKKAPPPFCF

SEQ ID NO: 941379 - protein, 129 aa, Homo sapiens
FPYVLSIGAGFALIEGFIPWFPLFSGYTLGQTYAKIHFTIIFMGVNLTFFPQPFLGLSGMPRGYWGYPDWIPPMKHPIIGRVIHFFNSRKINNFHDLRSLRFEGKSPNSRRTPHKPGGVIGRPPPLPPI

SEQ ID NO: 941380 - protein, 112 aa, Homo sapiens
MPLNKNGPPPGPQYFPRKNKKETHFLKNRLSRPFLRFFGGPKKIWNRNKLWFLPPAPPPRFRKRFPPYFGFQKIFGVETFLKGFLKPLKTAFFFPAGTPPPGFGSNKFLENP

SEQ ID NO: 941381 - protein, 221 aa, Homo sapiens
  misc_feature (80)..(80): Xaa can be any naturally occurring amino acid
GGGRPARFKFYGFWALGLAGQGHFPKTRGGRGLGFFCATYPSRTLARAQVESKTVGAPPSSSSPIYEPLNWTRSVVAREXLYPQEAQVQWKVGYSPSIGVSPESVPKQGSKGGPFSLSSPLAVSKAGFGKPKVFAWEVPPQGLGSPVPKRFPRGGGLRGKGPPLVLSSSLAPPPPLGFGPFSPGGPPLLGAPGSFFPPPPPPPRGFILVMLGGDGLIKGFF

SEQ ID NO: 941382 - protein, 89 aa, Homo sapiens
LECSGTILARCNWCLPGSSDSPASASQVAGIIAVHHHAWLIFVFLVETGFYHVGQSGLKLLTSGDLPASASQSTGITGMSHCAWHFFFF

SEQ ID NO: 941383 - protein, 129 aa, Homo sapiens
PPPPFVEDSFFFAPPPGGVLKFCPRGFFSPPGFWGGRRVVGFSPSPPRERFPPPPPPPPGGGGGGWVIEFVGDPPPGALFLEKDPPPRFFPGGLFFGGGGGGGPPGFSPPPPRTFTPPLFFFGGFFFSL

SEQ ID NO: 941384 - protein, 99 aa, Homo sapiens
PPRGGAGGFFFGVFLGFPPPPPPPPSSWFKGGGGGPPFFVGPSGDRGFFCPPRGVVGRVFLPLGAPPGGGPGFPPPFFGGVFPPLFFPRGGGPPKNYTR

SEQ ID NO: 941385 - protein, 109 aa, Homo sapiens
MGPPLRGGGGPPPPPQRGPPGGGGAGFLGLGPGGGGSPQGSPSRVPLWGGPGGKPGAPPNVFWVPPFPPPPGGVVGGGSRGGGFFPPPGFSALFPGLFGPPFFFFFGPP

SEQ ID NO: 941386 - protein, 105 aa, Homo sapiens
SSPPLSAPGWCCGKGGPGGIRGEKGALMVCGGPGGMFKGARGGTKGGFLGGRGMAPGGFGGGKKGGPGGPPGPFLDPMGGKKGGRGGPGKMDKGGPRPGGRDGPL

SEQ ID NO: 941387 - protein, 104 aa, Homo sapiens
MPFPIIFGGVNLTFFPQPFFGLSGMPRRFSGYPDAYPPGNILSSVGSFISLTAGILIIFMVWEAFALKGKVLIVEDPPLNLGGLFGCPPPSPPFEEPVFIKFCP

SEQ ID NO: 941388 - protein, 158 aa, Homo sapiens
HPSLEAGLCFWGSLFFQGVPFPGLPAAVGVSPFPTPGCFSGAFLGNLPWLRGPLARLGPGGVCPPSCLVFRGRLGLGRLGLWVLLEGVGGGQTPLVGGCRVVLGFSPFPGDVLAWRWGWDLGAGSTLFLEVAFVVFPLGGLGAPLSWEFGCWASGFPL

SEQ ID NO: 941389 - protein, 83 aa, Homo sapiens
  misc_feature (57)..(57): Xaa can be any naturally occurring amino acid
STVRSGYLFPAPKRLGDRIERMVCLSLNLAPDAKVEEEAKKTLKGPPKPPPKAQGQXKIKKWMWGPMKKKNPQRDFPLKKMDC

SEQ ID NO: 941390 - protein, 172 aa, Homo sapiens
  misc_feature (68)..(68): Xaa can be any naturally occurring amino acid
GRQHTPPGAPGVSPQLPARAGDSVWSLVLGQSAPSRNPSPFSGGPCFRGTQGFNTRSVGSRPTGLRRXKKPRGGGAPGVFLKRGPQPLGGAPPRAPRGPGPRGASPPAGGGRAKGGWGPPKKIFGGGGSPKTPPGAGLGRNKFLAPPAPPPGPPGGSPGARAPPGGGPPPPT

SEQ ID NO: 941391 - protein, 62 aa, Homo sapiens
LKTPGGGSPPGVLPWARGGVPFFPGDPFCPLGLFGGPFKPGWAQKPGGGGPGFPGFFCPPGA

SEQ ID NO: 941392 - protein, 30 aa, Homo sapiens
  misc_feature (13)..(13): Xaa can be any naturally occurring amino acid
  misc_feature (24)..(24): Xaa can be any naturally occurring amino acid
ESVGEVMASQDDXTRQPNSFPTTXGGTNRK

SEQ ID NO: 941393 - protein, 115 aa, Homo sapiens
  misc_feature (2)..(2): Xaa can be any naturally occurring amino acid
  misc_feature (111)..(112): Xaa can be any naturally occurring amino acid
MXLVFYERGPRGQVQWFAPVIPAPWEAEAGGSPGVGGSRPAWPTWQDPVSAENTKIGRAWLCTPVIPAAREAEAGESLEPGRRRLQLTEIAPQPFRLGGKSETPSQNPKKXXKEK

SEQ ID NO: 941394 - protein, 51 aa, Homo sapiens
  misc_feature (18)..(18): Xaa can be any naturally occurring amino acid
LPQLLHQYPPFIINGYKXSSALSVETDYTFPIAEKVKAFLADPICLCGCCP

SEQ ID NO: 941395 - protein, 102 aa, Homo sapiens
  misc_feature (7)..(7): Xaa can be any naturally occurring amino acid
GTSPDEXSGQPVPFHSTQVLQGQSPCTLFGLVIWEFRWDAHSLLQRPHQFLGHFPVCGSSCGPLRVHAWEVLWWGLPGGLAHKALRNRGSLIGINHTWSPPA

SEQ ID NO: 941396 - protein, 81 aa, Homo sapiens
PIAQQNRVLQLAKKLGSLVENNERVFYPKQGPYGGYFQDQKDGSRKNEGYMPPGGYPQQQFQTAYGAFHFVSRLGHPPLKS

SEQ ID NO: 941397 - protein, 108 aa, Homo sapiens
  misc_feature (11)..(11): Xaa can be any naturally occurring amino acid
  misc_feature (16)..(16): Xaa can be any naturally occurring amino acid
CFRRKEFKGKXWAELXEQWAARRSGSACNPRTLGGPRQVDHEVRSSRPAWSRDQPGQRGETPSLLKIQKWPGVVAHACNPSTLGGRGGQITRSRDQDHLANMVKPHLY

SEQ ID NO: 941398 - protein, 63 aa, Homo sapiens
  misc_feature (16)..(17): Xaa can be any naturally occurring amino acid
FFGGPKKKRGPTRGPXXVFPPPGPVGGARGKFWPPPSTVKGPGPPREKILGGPPPPGKKSFCG

SEQ ID NO: 941399 - protein, 105 aa, Homo sapiens
  misc_feature (5)..(5): Xaa can be any naturally occurring amino acid
  misc_feature (28)..(28): Xaa can be any naturally occurring amino acid
PPLPXLGWGVAWAVYINPGFFGTRWFCXWPPLPRVLAPLDNPRGRFPASDFSLGGGRFPFFPGARVFLLAFLGSPFGPVLPKNPVGPGSGFPGFFCPPGSRGGGL

SEQ ID NO: 941400 - protein, 177 aa, Homo sapiens
KRTHTGERPFSCEFCEQRFTEKGPLLRHCANRHQEGRPPFCQIFGKTFKTVEQLRVHVKRPKGVRKFECPQCGFKFSPQAPLRRHMEIPGRVKNFNPRQGKLRNLIIEDEKMVVVALQPPSKLEVGSAEVILESLAQGGLASQLPGQKLCAKESFPGPGVLEAALIIPTAVPQGCDT

SEQ ID NO: 941401 - protein, 105 aa, Homo sapiens
SLQRVTSTGQPASGMPLLSSFFRHRGPPSIQLPERQLCTPKEPPQTPASGQQPLLALRTSLLLAACKLSQNTPVGSDPMPSLLLSSLLRAPSHHPCLPVPATHVG

SEQ ID NO: 941402 - protein, 112 aa, Homo sapiens
  misc_feature (99)..(99): Xaa can be any naturally occurring amino acid
RPEDHPPERNQPGKRAHDDAASRSLRVCRFQMTLQCPQGYSIFIDCNPASLLTGPEPPSSDCGAKEGPRAPAWAPSLEVDMAVGGSENQPTHHKKTQTXGKHKFLGGQGSSV

SEQ ID NO: 941403 - protein, 183 aa, Homo sapiens
THSFVFPTLPPSMPGALVPLDEHQIFVQGSFGAPHLFHVGGGAGETPGLKNKALGLWQGSNGLSPRFFPWGPPLFPTTGGGPSSIKLGFFAAPFLAPPFFFGPPPRGRAWMFLGPPPRPPWVVGFGPQPFTREGGFPPPYPPPPPVFGPPGFKMGEGVFGRLLFLPLFRCFPPLLKNKNAPGG

SEQ ID NO: 941404 - protein, 64 aa, Homo sapiens
MQLGSGARAWALRAALYLLRARLPCSPSASLFVRSCPPSRVAGNRGGLVAGFQKDAPAVRGGHA

SEQ ID NO: 941405 - protein, 88 aa, Homo sapiens
SSSSSVQFEMVQKNTFKTPSCDMTPKQSKVVKAILWLLKIKKRGKKELPARAEAIIVSLEENPLVKTLLDVNLIFCVSCPIFIWGYFA

SEQ ID NO: 941406 - protein, 78 aa, Homo sapiens
MSNSRPRSRRDAGGGAGAAGRDELVSRSLQSAEHCLGVQDFGTAYAHYLLVLSLAPELKHDVKVSVLFSHLLADPTSS

SEQ ID NO: 941407 - protein, 162 aa, Homo sapiens
  misc_feature (54)..(54): Xaa can be any naturally occurring amino acid
  misc_feature (160)..(160): Xaa can be any naturally occurring amino acid
VKSAMALRQPYSAESTSGGQLVTCPGGAHLSMKPGALAAIGAAWRPAAASSGAXVQGQRRLRRVQHEELAPAQAQQRHLVGHRQLGKKGPGGTIFLLPLQPRRQLAHVVDASKGATYNPLPEVFFSSKKNVSAQQLRDQFGHRLPREEVSAARHCRQRRXRG

SEQ ID NO: 941408 - protein, 66 aa, Homo sapiens
LFNPRAPFGPPPPFPGGPPPRPPPAKFGPGGFNSPGAPPPAVGLFILGFETKRDFPPGGGPPPKNP

SEQ ID NO: 941409 - protein, 72 aa, Homo sapiens
GPMRGDSGRKEKPIPPPVLEDGGPHHPGEGGNRVFEYRPRRGVGSPIVDMAPYAIGGPDQEFGGGGGPVGFL

SEQ ID NO: 941410 - protein, 95 aa, Homo sapiens
  misc_feature (8)..(8): Xaa can be any naturally occurring amino acid
  misc_feature (35)..(35): Xaa can be any naturally occurring amino acid
  misc_feature (37)..(37): Xaa can be any naturally occurring amino acid
  misc_feature (39)..(39): Xaa can be any naturally occurring amino acid
ETLRDGRXVKSTNPWANQDEREGGVGGRAKTKAPXPXSXPQAIFPIPEAPAACAPHHPGQGNRRKCNFRLSARLPKTASSCPGLFPPPPPSKDNR

SEQ ID NO: 941411 - protein, 113 aa, Homo sapiens
  misc_feature (2)..(2): Xaa can be any naturally occurring amino acid
LXVTVVPGPFLKRGIPSPEGDGPMRGPEPEGADSKPFISVWTQTPWGMTDSFNPMSAGDGAVPGQLFGVWWGPAGPAVPASLGANRVPWEKTWKPFNEAGDLGGFLETQRNGP

SEQ ID NO: 941412 - protein, 67 aa, Homo sapiens
  misc_feature (12)..(12): Xaa can be any naturally occurring amino acid
PRNVHGSTQPTXAGLCQSMAHDKNPKFFNVFKARMKSAHKRETKRVVPKALEKLQFLNGKKKKPTCK

SEQ ID NO: 941413 - protein, 67 aa, Homo sapiens
ADPTPFPLLEHFVQLCMEPVGLQCQTVSQATGAMCITGAGRQGPHSPSETGPGARVFLGPGGGHFSP

SEQ ID NO: 941414 - protein, 67 aa, Homo sapiens
AVHRVCRRRSQLVHMGSCLSLHLAVTDLCLIYDLHEDVVSGHSVHLLHNVFASLVRTPRDDSQIGLA

SEQ ID NO: 941415 - protein, 105 aa, Homo sapiens
  misc_feature (48)..(48): Xaa can be any naturally occurring amino acid
  misc_feature (53)..(53): Xaa can be any naturally occurring amino acid
  misc_feature (67)..(67): Xaa can be any naturally occurring amino acid
LAGNASKDLKVKRITPRHLQLAIRGDEELDSLIKATIAGGGVIPHIHXISDWXRKGQQENCLEGCFXTRPSFLTLSLVLVTWDKRENKWGICWTFLDTQVKMEKA

SEQ ID NO: 941416 - protein, 53 aa, Homo sapiens
RLNPKALTLDQWLEQHKGDFNLLGPARLAAPCWDWGGQRGIGKNTPIKPLFSQ

SEQ ID NO: 941417 - protein, 90 aa, Homo sapiens
KSETAVCDIPPRGLKMAVTFIGNSTAIQELFKRILEQFTAMFRRKAFLHWYTGEGMDQMEFPEAESNMNDLVFEYQQYQDAPAKKEEDFG

SEQ ID NO: 941418 - protein, 129 aa, Homo sapiens
PPNPPQEIGGGVFLNPPLTPPPPPGWKEGEMAPPPPPGPPLGGAPPPPNPFFPFPGEGQEGPPPFLGFFPPQRGAQKGGVPRPGFRAPFGGAPPILGPPPKIFPPPGGIPLEKNKKRFFHGTNTHKKHT

SEQ ID NO: 941419 - protein, 69 aa, Homo sapiens
NTVGPLLAAATGAPAPLYLGGLPEPMAVQPWPPAYFGCIRRLAVNRSPVPITRFVEVPGAVGASGCPTA

SEQ ID NO: 941420 - protein, 105 aa, Homo sapiens
MQNRGVALMLQAHWSMTKMKGKGGVARQQYVQRDLWLTRKAVHATAVPAYSEGRGRPLWERGGAAPSGRGEGPPPLGEGRGRPLWERGGAGFCFKSFKTLKNICV

SEQ ID NO: 941421 - protein, 124 aa, Homo sapiens
ALAETHPLQRSLPPGQLLLRAAPTAVHPVRDYAAQTSPSPKTGAAPGRIVAVIGAVVDVQFYEGLPPILNALEVQGRETRLVLEVAQHLGESPVRTIAMDGTKGLVKGQKVLDFGAPIQIPVGP

SEQ ID NO: 941422 - protein, 148 aa, Homo sapiens
  misc_feature (57)..(57): Xaa can be any naturally occurring amino acid
  misc_feature (67)..(67): Xaa can be any naturally occurring amino acid
  misc_feature (70)..(70): Xaa can be any naturally occurring amino acid
  misc_feature (79)..(79): Xaa can be any naturally occurring amino acid
PANPVSLSFPFQPLVAAGCNTFPRKIRCRPCLRAGALGPGGGGGDPTAGREGSPELXAPPTPRVEPXHPXVPFQALAMXIPQKARLHPRPRASGLQVLGSGSPFRPSTPSIPVYGPPAPPCFIPEDPSPWPLSVHVLRLINGHLVFSF

SEQ ID NO: 941423 - protein, 144 aa, Homo sapiens
  misc_feature (28)..(29): Xaa can be any naturally occurring amino acid
PPLPCCQGRTLHNQRTPLFSIGPGGVGXXAPPPPRAGVVLGRQGNLPGFGHWWVGPQNPNRTKGVGFGQPLWLEGSPWPANFPSPNPVSCGLVGGSQPPLDCPPRLFKVKIVFWIFTQLSRSPPPKKTQKKTPRGWGAKTGKNL

SEQ ID NO: 941424 - protein, 147 aa, Homo sapiens
LWALFEDPPQKNRYILALFSKRKALSRELYEYCIKEGYAAQTLVAKWKKQGYENLCCLRGIQTRDPNFGTNCIFRGPKNKLEVGRIIEGPPWGCCGCFGLGWRAPPWTLDFAGFCLSPPPLSGSNEQCPRPELEPGFYGEGFPVYQL

SEQ ID NO: 941425 - protein, 79 aa, Homo sapiens
MNFIHLHFSMWLAWTGDLERCGGMDPLEPRDIRSVPRKECTGLTELQLTVLFLAILCCLFLGVDFVRAKIFHSEEIKAQ

SEQ ID NO: 941426 - protein, 118 aa, Homo sapiens
  misc_feature (29)..(29): Xaa can be any naturally occurring amino acid
EPMETESGDTSFEGPAQVYLPGRGPPLPXGEELVMDKEAYVLYHRAQTGAPCFSFDIVRDHLGDNRTKLPFTLYLCAGTQAERAQSNRLMMLWMHNLHGTKPPPSKGSNKGPGRGKKK

SEQ ID NO: 941427 - protein, 192 aa, Homo sapiens
  misc_feature (86)..(87): Xaa can be any naturally occurring amino acid
  misc_feature (90)..(91): Xaa can be any naturally occurring amino acid
GSARKLVCKVMALSLHFFLAGRQARPVQERLQVSDLEAQALGQGKAGKGTVPKGSGVFDPALSAAGLSKVFLWRSPRLLGSLCFQXXGPXXAGKTAQWETAGPPGWGAQTFVPIVPTFSVFNSPGMEVRDPRNAKHQQAQRFEEEPYRGRNQILFVLAGMATMVGYPLLNGIVSIQGAKPGWAPGTRTLGMG

SEQ ID NO: 941428 - protein, 143 aa, Homo sapiens
ADAREELRAAGWSWLDTRGHLRLAANGLLVDANVPAAMRAPRRREPFAGQVGIELASAMLLTPDRVVSIRPLATQIDRAPSSVSDTIAAFRDANLITPAGHPRTPELFWELASRWKPTDFAVANEPREGGLLNALRMNLDDFD

SEQ ID NO: 941429 - protein, 83 aa, Homo sapiens
KLLSYHPQLNSSQRSGVPHLLTFSAMPFCCLTAFLFIIFICSWSLGFGVYMGTGYGGVVGQRATFWVRKQKCLFPVRAMGLQA

SEQ ID NO: 941430 - protein, 93 aa, Homo sapiens
  misc_feature (2)..(3): Xaa can be any naturally occurring amino acid
  misc_feature (13)..(13): Xaa can be any naturally occurring amino acid
  misc_feature (67)..(67): Xaa can be any naturally occurring amino acid
VXXVHTVVYPVRXCGTAGDPGLVDFSHWLVCLAGSLTGCHTFLHCSRKFEQKQDRRRRIQALCLLGXVTAYRRDPCTLTITRTMQKPVRRKSQ

SEQ ID NO: 941431 - protein, 53 aa, Homo sapiens
KKGATPGKAEVATPDKKGAAIPVKGAKNDKNAKKEDSNEEEDDDSEEDEEDDE

SEQ ID NO: 941432 - protein, 88 aa, Homo sapiens
  misc_feature (32)..(32): Xaa can be any naturally occurring amino acid
  misc_feature (52)..(52): Xaa can be any naturally occurring amino acid
GHPSVAVQLRGFGRTYRALVGQRTVAIHQSQXLELLLESRPGSAFVLVELRXVSPHSHLVGCSEPAVVGCTAYRRDPCTLTITRTMQK

SEQ ID NO: 941433 - protein, 42 aa, Homo sapiens
MTVPEQLQRPCGCTAYRRDPCTLTITEDYAETSPTTLLVRRK

SEQ ID NO: 941434 - protein, 100 aa, Homo sapiens
  misc_feature (34)..(34): Xaa can be any naturally occurring amino acid
KFQKRGSPGNFESGDKKSCREIIPQSGERHLRSXGSRIVRRNLGVQKFDLGIICVDNKNIQHINRIYRDRNVPTDVLSSPFHEHLKAGEFPQPDSPDDYD

SEQ ID NO: 941435 - protein, 68 aa, Homo sapiens
VTFGTPEELFVGLLLVWCLASFAKFACQHWGHCARPVRPEAAPRRKGATRSELEELVSAGKPTLRAYE

SEQ ID NO: 941436 - protein, 70 aa, Homo sapiens
RTCRPATKHAIRFQVIKQVPSDQSPPMLTHSHPITVLLRVESKLDPVKYVVPYLFVGSQRGVYSLAMDSY

SEQ ID NO: 941437 - protein, 86 aa, Homo sapiens
ECAPSAEKETRVGYSSPQAGHTVICPSLDESRVLVGSRGEEVQADWSMGGHGWATPGVVAHTCNPSTLGGRGRWVPCQEFETILAN

SEQ ID NO: 941438 - protein, 157 aa, Homo sapiens
KAPTKVGTYLSVTSSSTHIAGRVSPVKLMHRSPVPCVPFGSVAFRVTKPSASGLAGSGTSASTLPLQSPRRTSISPCARLAFSKRRLVFVVGQLEVVRNAARADLHAADAVQLCLRPAPARLEDVDIEHRTRSLARAVVFQAQHQALRAHAAEQLIA

SEQ ID NO: 941439 - protein, 116 aa, Homo sapiens
PSFPHAPPYRVQKLSPQPQPLRVHVRSIFSSLRQDALFLARGGDGPPSRVWSTLSRLLRALGICPFTFPKGWSHTSTLTFGHRKCCSRGPKSQALSCFRQGPCFRIWSAGQKRPVQ

SEQ ID NO: 941440 - protein, 41 aa, Homo sapiens
ADYMYGREGTTMLVVDEPKRDYMEGRRNVTRNYNYWLYWVG

SEQ ID NO: 941441 - protein, 71 aa, Homo sapiens
IASANQSFRLGVTRVLSSVPFQQCTGNKRAGLGKGLAAAGRPLLFKPRAHCWLLWAPVWAGAALFSLLAFL

SEQ ID NO: 941442 - protein, 45 aa, Homo sapiens
  misc_feature (2)..(2): Xaa can be any naturally occurring amino acid
LXVCLKNIISPDAHQKRSSERNTDKSKRNEVEREHQEREPDETED

SEQ ID NO: 941443 - protein, 114 aa, Homo sapiens
PSGPNSAGYALYWIATELTIACKFVELKEKIVPGSGKKLEDGPKFLKSGDAAIVDMVPGKPMCVESFSDYPPLGRFAVRDIKQTVAVGVIKTVDKKAAGAGKVPKFAQKAQKGK

SEQ ID NO: 941444 - protein, 136 aa, Homo sapiens
ISTGGTGEPSKAKAMLEAFTVSGEVPDPGEGSALFSVVDEVAAWPVGAKADGVEGAAQLRLVLGVAGQAAELVDAVCELALVPVLTGTVFLKGAAQLRLVAAGVDLAAPGLLLGGQQPLAPFREGAVSEAAVSRAQ

SEQ ID NO: 941445 - protein, 66 aa, Homo sapiens
FQLLLSEAVSRAAKAAGARSLTSPESLSRDLEVPEVQESYRQQLRSDIQYRQWEDPATVPSAPPHR

SEQ ID NO: 941446 - protein, 80 aa, Homo sapiens
PALHLAFRKGDVVLAQLLIWYGVDVMAPDAPGNPALTYGRQASSQECINVLFQDGCPHECVEYLFYLAAVSLGPKPNGEN

SEQ ID NO: 941447 - protein, 34 aa, Homo sapiens
TPFPHVVINVETVTYKSVKFNVWDVGGRTRSGRS

SEQ ID NO: 941448 - protein, 48 aa, Homo sapiens
DGEFFHALSDPTRLKLREFILAAERTSGECVEHAGISQPRVSVHLSCL

SEQ ID NO: 941449 - protein, 38 aa, Homo sapiens
GTLSRLSIKPINMQAPHMLHNGALQILQHQQQSITWGY

SEQ ID NO: 941450 - protein, 47 aa, Homo sapiens
LRGITKYAAHVKHWIHCGVIALAPTSNMWKLTLVTLKLGPKDSRSQD

SEQ ID NO: 941451 - protein, 109 aa, Homo sapiens
GEHHPPVFHVHPQGGFPQDQLQHLLGRIQKAGTEVVKAKTGAGFSTLSMGYAGARFVFSLVDAMNGKEGVVECSFVKSQETEWTYFSPPLLLGKKGIEKNLGIGKVSSF

SEQ ID NO: 941452 - protein, 36 aa, Homo sapiens
TLVHALLWASVEEVMLSCELDITYQEPHGTQPAHEQ

SEQ ID NO: 941453 - protein, 34 aa, Homo sapiens
DKVIFHMFDVGGQREERCKWIQCFNDVTAIIFVA

SEQ ID NO: 941454 - protein, 77 aa, Homo sapiens
MNKRRGFSEIVSVRRFGRSFGGSRFAGTLGAGSQPCQPALSRQRNLKWTLWKIEAIAPEFTNRNPRNLELLSVARKE

SEQ ID NO: 941455 - protein, 71 aa, Homo sapiens
RTGLTGGPDSNYTTRATVTKTAWYWYQNRDIDQWNRTGPSEIMPHIYNYLIFDKPEKNKQWGKDSLFNKWC

SEQ ID NO: 941456 - protein, 39 aa, Homo sapiens
  misc_feature (15)..(15): Xaa can be any naturally occurring amino acid
MANPLVNSACEGSRXHGSLLRNLTKCRAKVRVGFTPWQI

SEQ ID NO: 941457 - protein, 124 aa, Homo sapiens
WKAGGKRVGRAKKLEAFCREPRTKDGNARCTSEESGTGTPMADDQTCFAWLGELGHGKNTGLAPAQAQPPLGHGGEPAPGPPGRSTSIIPGASPCLTPKSMSNTFSCVHNSHVVQRRRSITVSR

SEQ ID NO: 941458 - protein, 104 aa, Homo sapiens
FFPPPFGDFAPPAQNFGPGAPFPPPLAQKVDPPPPPPPKKKGGFFFVAPPRAFGPLGGVLKGGEGKKKIGVFFWDPPRPLGPRGGVFNWGGGVPPFFFFSPWSF

SEQ ID NO: 941459 - protein, 70 aa, Homo sapiens
YDYGDDIALLKQAQKVKMTTHARTICLPCTMEANLAMRRPQGRTCRDHENELAEQTECSCSFSRPEWENT

SEQ ID NO: 941460 - protein, 48 aa, Homo sapiens
YTPVLCHTTLPPHFGPRLKLLLGRVSSCRYCALNGYLNGGNNSINQES

SEQ ID NO: 941461 - protein, 40 aa, Homo sapiens
KNIPVIEAARNPHKYRMLIAMVDLIYADVAQPDQNRIVAL

SEQ ID NO: 941462 - protein, 75 aa, Homo sapiens
  misc_feature (65)..(65): Xaa can be any naturally occurring amino acid
FLFIQDRIIVPPLTGADSEIFLCVDCFGKCHLFYIGDWWGLVHVLLYRSSMLPLLLVATPLNLCXGVEGTYLTFF

SEQ ID NO: 941463 - protein, 58 aa, Homo sapiens
  misc_feature (7)..(7): Xaa can be any naturally occurring amino acid
ERKKAKXDEEEEKRKPKKNKQEQMQTTHSIRLGLALNFSVFYCEIQNAPEPACLLAKQ

SEQ ID NO: 941464 - protein, 57 aa, Homo sapiens
GSGVYSEQISGKVVLNLRFPSKDFLSEQIQLVEEQDHRDECAAICMFQMLYEEVQSL

SEQ ID NO: 941465 - protein, 118 aa, Homo sapiens
QYPIPPDNKYLGVLGSPRIFGKRLSLLSRGSLMCTPARSPVPRLDGQVQMYPKTLIPHELPATFLDKISPTSLRALGKNLSNTLFMLPPFSMGESPVYESSLTSTPNQGRLFYIVVPQ

SEQ ID NO: 941466 - protein, 151 aa, Homo sapiens
LGWKFPHVSGISAGSSLTANYISRDPERTRLSFTDFAADPRFGNLGTWLAGRGYFDGEYIYQRTAEPHQALPFDFLTFCASSQAFRIGATRTSDGEQEWFTREDMKTMDDLMARIRVSSTMPGFMPPVTIEGVEYVDGALGTQVAFLSTAL

SEQ ID NO: 941467 - protein, 77 aa, Homo sapiens
MSIPCIAGAGIPRLLTDRNVKITFFNPAGRGHRILYQHLKGTTRQRELEILTPPSWDQTTIKALTATDKTNPRDTYA

SEQ ID NO: 941468 - protein, 175 aa, Homo sapiens
  misc_feature (157)..(157): Xaa can be any naturally occurring amino acid
AAQRMPSPCCSHNVHTFDLKLVWVDPGQDGCTFHLLTPEEEFSFCAKDSQGQAVWQWKVTWAVHQALHGKKDFPVLGAGLEPSQPPDCRCAEYTFQAEGRLCQATYEGEWCRGRPHGKGTLKWPDGRNHVGNFCQGLEHGFGIRLLPQASEDKFDCXKCHWREGSMCGYGILCGS

SEQ ID NO: 941469 - protein, 50 aa, Homo sapiens
MSGKLGSAGMGTMLPGLKNTYPTPILKTILNLSPYPEVYTLPGQASFVAE

SEQ ID NO: 941470 - protein, 40 aa, Homo sapiens
TEVTMLLTILCLAEQKLADSDHINQQCPQRPEDQHPSVNK

SEQ ID NO: 941471 - protein, 178 aa, Homo sapiens
  misc_feature (15)..(15): Xaa can be any naturally occurring amino acid
  misc_feature (25)..(25): Xaa can be any naturally occurring amino acid
  misc_feature (49)..(49): Xaa can be any naturally occurring amino acid
  misc_feature (53)..(53): Xaa can be any naturally occurring amino acid
  misc_feature (69)..(69): Xaa can be any naturally occurring amino acid
  misc_feature (72)..(72): Xaa can be any naturally occurring amino acid
  misc_feature (77)..(77): Xaa can be any naturally occurring amino acid
  misc_feature (95)..(95): Xaa can be any naturally occurring amino acid
GSSQANGGLSERVVXVKAKNWAQLXAQGREDSFLSYEQVTQMEVHYARXIIIXVANKDRANDDLSRVFXDKXGSVFXHTTRPKREYEIDGGIYHXVSSREKMEKDIQAHKFIEAGQYNSHLYGTSVQSVREVAEQSRACSEPRSCHCTPAWATERDSVSKKKKKKKYKNWPGAVFSGL

SEQ ID NO: 941472 - protein, 115 aa, Homo sapiens
GGGKGGGFLGPPWGPLFGAPPPPKGGGGGVYPGGGGSPPPPRGRGGGTPPPLGPRGPLVPAPPQTRGPRGGGVFSPPGPPPWGGGGGGPPPGGPPPPGGGFGFFFLKGNKTGGLF

SEQ ID NO: 941473 - protein, 106 aa, Homo sapiens
ALRFFFQGGGGWGFPNPSKPGGLPFFPKGGGLPPLGVIQTFGVRGPRGGFLGVPIKGTGGPWANYGNRGWPRAREAWGFNPPAWFWPRLAPPRPAGPDGLRKLFPL

SEQ ID NO: 941474 - protein, 97 aa, Homo sapiens
GGVRQKVALVAFGEKKVAPWILVVPVEFSKVPLVETKVASLVARARTKVAFVEKKKVALGGPPALFWNKLEEKKEALGALEKLIKAGPLRSPKIGPF

SEQ ID NO: 941475 - protein, 84 aa, Homo sapiens
NERQRVAGDLHKAHQSLEPYPVQNSKSCWRPTVIENSDVSPETESSEKETMSVSLNQTVTQFTQLLQAVNPTLPKEKEPFPGLE

SEQ ID NO: 941476 - protein, 116 aa, Homo sapiens
  misc_feature (4)..(4): Xaa can be any naturally occurring amino acid
LIAXLVPKTKGPTVASQFQCLGELGGPSQTLLFFKAQPAGGGFWTLRPVNFQPSGRVFGPLQEIRPAFCVPPTIYTGFLFLMEFCTFFFFFLQKPLFTRWPFFCLWASQKSPGFGP

SEQ ID NO: 941477 - protein, 145 aa, Homo sapiens
  misc_feature (2)..(2): Xaa can be any naturally occurring amino acid
PXPLLSPHPSLPGVQPVPPQQAGDGLARCGDPTGQPQPGRQAPREVRSQHCLPASQGPVTGKAPHLLHPEWWRPERSPANPPVHRGTGAGGRGRPAEQPVPGTPRRPPRVRAGLWAPLLVEPGSASSVSAASVPGASPTRTPRLG

SEQ ID NO: 941478 - protein, 108 aa, Homo sapiens
RKGGGRGLANVEGKGAENLTSHLLRFPGQLRGECGQGECGQGECGHGECGRASCGQAECGQGVWARQVWARRVWARRVWETLGLRHRRREPEKLLGEPAPKQSARKRL

SEQ ID NO: 941479 - protein, 109 aa, Homo sapiens
FGPGVHLLPPPWEKLAFTKLVPFEVLGTRFQPQGRFVSLVPGVPGVAPRKVPFLGFPAGAQPGPPPFCCAQHFGGGTRGLEKGGPLFRHGGPRGPSVGFSPEALGPFGG

SEQ ID NO: 941480 - protein, 154 aa, Homo sapiens
  misc_feature (1)..(1): Xaa can be any naturally occurring amino acid
  misc_feature (9)..(9): Xaa can be any naturally occurring amino acid
XEGGGGEPXGVVLLPPRGGCITHPGALLLCVGVFFSPPPLWVWGGVGGRGKNIKTPPPRGGRGGAFFFFLNPPRGKKGGGGGGVFFFSRGGGGLGPPPPQEGLFFFPGVFLGGGGPPPPPGFFCWGGGVVGGPPFFFFPPPPGGFLPPPPPGGG

SEQ ID NO: 941481 - protein, 79 aa, Homo sapiens
GFPTVGGAFGAAPLFGVTGGFQGFPSTLCCPGMAVGNCITWVLSPGSVSGPLFKSGPQWGVFVSCFFGAWKERASGGGF

SEQ ID NO: 941482 - protein, 34 aa, Homo sapiens
SPPGGLFSPILYREWIIRDPPLFPSFPYKKGVPL

SEQ ID NO: 941483 - protein, 109 aa, Homo sapiens
PPPPKSPPAGGPPKMGGYRGGPRAPPGFFFKIFFPGVGGKFYQGVPPFNTPLMNPLGFPLGPGGCLPFWGVFLGGFSPLLGGGLFFLFFPFLGPFGGPGGKKKGFFFFL

SEQ ID NO: 941484 - protein, 131 aa, Homo sapiens
  misc_feature (72)..(72): Xaa can be any naturally occurring amino acid
  misc_feature (81)..(81): Xaa can be any naturally occurring amino acid
GSPPGPGGATSSPRRSPSGPRGAPTSPRDAPSGPGGPPPTFRGPSVGSWGPPSASGGSPLKFWGAPPNFHAXNVEAPISLXRAREHTSPSPNQLRRCSLPQQAQGQVVLPFPPERRVLFCTAPRSLNSLPQ

SEQ ID NO: 941485 - protein, 111 aa, Homo sapiens
KPPIYPPPRPQDCGLWEAPLKCLAPPKVGMGPAQGGPLKFTPFCGTKNCFKGAGQPVFSPPWEGGPGAAFNGPPAPGFIFFGGHPFFGFLGFFIIQPGFAGLMPIFPENKK

SEQ ID NO: 941486 - protein, 111 aa, Homo sapiens
RESGRTRGRSPFPQQSLMTPQTSEKLLFPGKQKILQGCPLSDPRSCGIAHGRHPSGEGTYGSSGHRRRSDGSDVSLPPSLLCSCNEHILVGDSSYICKVPSEYTPESRFIW

SEQ ID NO: 941487 - protein, 82 aa, Homo sapiens
  misc_feature (82)..(82): Xaa can be any naturally occurring amino acid
YGQIFPLPQGLVTYISAGDRRMPSGWALVIDQVPPTLVTRLDGPPPLPHTAAPARAERGAMPPPAQPGTGCPGAEVPFVPGX

SEQ ID NO: 941488 - protein, 67 aa, Homo sapiens
PFKPRALVELVKPKPKAPKEPLKAVMDVFPAFVKKCCKAADKEPCFAGGGKKLVAASQAPLGLYPPI

SEQ ID NO: 941489 - protein, 70 aa, Homo sapiens
NLVALQVAGRRWKPGGLAIGGQAVGGLAIGGQAVGGLAVGGLAVGGQAVGGQAVGFLVFSHSQSEDKAEA

SEQ ID NO: 941490 - protein, 108 aa, Homo sapiens
PPPNPPRGPGGHLGSPPGALAKKGRAGPRPHQNQNPGINKGAPLGGWGEISPPFWGAREGPVTFKKGGSPPAPHPPKGFFLSPGVLGPKGGIFAFPPGGFFFFFFFFF

SEQ ID NO: 941491 - protein, 121 aa, Homo sapiens
  misc_feature (33)..(33): Xaa can be any naturally occurring amino acid
  misc_feature (50)..(50): Xaa can be any naturally occurring amino acid
  misc_feature (61)..(61): Xaa can be any naturally occurring amino acid
  misc_feature (88)..(88): Xaa can be any naturally occurring amino acid
ELRADLTLITHMSLPQSYDAASGVDPIDADAYXFVFGSGVNEDVESPELXTSRPLPKILLXSGAPKVETPALNIQNKIPGQAKSPEEXDKEKVPLFGSERKMGPAEEDTNGYFEKPSDRLF

SEQ ID NO: 941492 - protein, 214 aa, Homo sapiens
  misc_feature (17)..(17): Xaa can be any naturally occurring amino acid
  misc_feature (64)..(64): Xaa can be any naturally occurring amino acid
  misc_feature (97)..(97): Xaa can be any naturally occurring amino acid
  misc_feature (146)..(147): Xaa can be any naturally occurring amino acid
  misc_feature (160)..(160): Xaa can be any naturally occurring amino acid
  misc_feature (202)..(202): Xaa can be any naturally occurring amino acid
LKGHGASRCCQMRETVXVGHADLTPSKRPRALHLHREIAEGGEPWHVSKGPWAIADEKKAKAVXLPPRRGKRLLREGACEGGCCQVLDAIACLKNLXMKEQLWSPEWIQLDKQITPLLLNYCQCKLVVEEYYEVLDPCFSILNKFXXNVKAFFKRGKAPXAVWNAQEAQAYFSKVLELDPALAPVVNPKLRALEARIRQKDXKDKARFRGIFSP

SEQ ID NO: 941493 - protein, 106 aa, Homo sapiens
ASRNPRPGPAGGPGGFPKHPPVMWAFQETSVESAVAPPFPAGIFVRLEFKLQQPTCRKRGWKKPGCKVGPNGRKRKCLACIKLGFEDKVLGGLVPCPIKTQVLGGV

SEQ ID NO: 941494 - protein, 115 aa, Homo sapiens
NPPRGGFSNFPGKVGSLFPKKRLGWGGFGGPGGRLGPMLGPFFFSKKNPNPGGGPPPPGGGVGAGVLVFIFPPPQLGLFPGLFFPGGAPQGGFIWVGPPKGGRFPPAPPAPGFCP

SEQ ID NO: 941495 - protein, 95 aa, Homo sapiens
SFIMAALRNGYRPFPACLVEQPPRGAFAEQEKALHGAQTRLRGTFFSLLFPPTRPKYKQGNVWHSGFHELKTKPHGEKCKTRRMGEKWSPALMLL

SEQ ID NO: 941496 - protein, 99 aa, Homo sapiens
FVNDYLDGPCTFAQLKELPDERGHKMFVINRSKPLFPKGSGGGAPLFRPGTGGGAGTPRAPPGRLRDPLLGPRARGLRGRRRLAGAASRMLRQYKVEAA

SEQ ID NO: 941497 - protein, 30 aa, Homo sapiens
RGQAGVMGFPGPQMCLGEPGKAFLITIVFA

SEQ ID NO: 941498 - protein, 82 aa, Homo sapiens
GVHPGPGPFLFMGWNRFGEARLGCAPRFQEFPRAYKAARAAPLPPCEVALHKGLGAGEGLEKEGWAPCFGGDGAINKNSVPP

SEQ ID NO: 941499 - protein, 125 aa, Homo sapiens
QPWGSRAPFVPRSPGGQSGAVVPPPWARSTPLAGCLGPPQQEGGQTGQGGPLNPQPLGGPPPLGGMELFLPPPARGRFALEKDPPSFFFLVFDKPRSRGGLIFLGETPKLVFLGAGAPFPPSKPD

SEQ ID NO: 941500 - protein, 88 aa, Homo sapiens
  misc_feature (22)..(22): Xaa can be any naturally occurring amino acid
  misc_feature (50)..(50): Xaa can be any naturally occurring amino acid
LLDLPGPIKLAQALLLSLPQRXNDSALRALTLPIVFKKYGPEALAGNQAXPSLLEAQEDVLLLDAQAQVKGSEDAAKVEGGGQTQQLS

SEQ ID NO: 941501 - protein, 74 aa, Homo sapiens
  misc_feature (14)..(14): Xaa can be any naturally occurring amino acid
  misc_feature (43)..(43): Xaa can be any naturally occurring amino acid
LPRVFAKGRLFHPXGVFIPKGTLPFSFLGGGPQFARVCFPIGXPTVGPGPPFFFHGGKKVLGLFWGRGFPLPPF

SEQ ID NO: 941502 - protein, 137 aa, Homo sapiens
  misc_feature (6)..(6): Xaa can be any naturally occurring amino acid
EELESXRFQLVDSRSQGRFLGTDRNLDTVGLDSGHIRGAVNMPFMDFLTEDGFEKGPKKLRALFQTKKVDLLQPFIATCRKGVPACHVALAAYLFGKPYVAVYNGSWSEWFSRAPPKNRVFQGNFLKGLNRDLFCFL

SEQ ID NO: 941503 - protein, 74 aa, Homo sapiens
AREHTLRDYYPHCLRSTYLGLWSGVPSVPCTSGTPNPLCTQPVSHGAHNHVAGKPDKRALPDPPLPPENQPLGH

SEQ ID NO: 941504 - protein, 149 aa, Homo sapiens
AYTRAPPRPGFRLWRQPKVLYPCAFPAGVFQRVQLRQVGVATLSGTLGILAGHVAPFQVLRPGLVVGHFKGRPPPSQYFVSSGSIAVNPDFLGQLLAQKAVTLDMLDLGATKANLEKAQAELVGATFKAPRAKIQIRIEAHQALVKALE

SEQ ID NO: 941505 - protein, 141 aa, Homo sapiens
  misc_feature (21)..(21): Xaa can be any naturally occurring amino acid
NKALGQGDVSADARGGPSPPXGSRRSGAPDAVHSLAECYFHQPEAIEEFPVPALHHPVFQQESFTRQVLWKLLKVVKFGEVIFSTQLAALAGNPKTARAVGGAIKGNPVPILIPCPRVVCNNGAVGNYSGGLAVKEWLLAH

SEQ ID NO: 941506 - protein, 110 aa, Homo sapiens
GFPPGISRAPFFIGGPPFFFFFFGPPPPWGPPGPGGGVLPPPPPPWFFFLGGLPGGFLGGGPPPPRGVPPGFFFSRGPPPPPPGGGPGVFFRCFPPPPPGGGPLFPFFFF

SEQ ID NO: 941507 - protein, 151 aa, Homo sapiens
LFKEGVMVAKKDVHMPKPPELADKNVPNLHVMKAMQSLKSRGYVKEQFAWRHFYWALTNEGIQYFRDYLHLPPEMGLPPYPVTVQKLAGLGLKVWRVSDLRDSTEGKLAENPSRRSVGPPGAPKKTEAGGGSPTEFQFKGGFGCGGGHPPQ

SEQ ID NO: 941508 - protein, 113 aa, Homo sapiens
PFPPPGPQILWGWGGHQGPPWENFWPPPPPLLGTPLGGPPKNPGGGVFLGFGGPIPFQGFPEGAPPSPKKFFFFPQNLFFSPAPLKGFFFFPPPPRGFLGELFRKKKTGVWAP

SEQ ID NO: 941509 - protein, 104 aa, Homo sapiens
QFLTQCPGPCSELNPLQQSPGKSPWKTCNGNLHPEARPFPCYPTVNRTPCVVGCTRVLGFWIPWGLETPFSTNNPCVPRSSQLAGKEFNPTKDKGPYYDGWMLV

SEQ ID NO: 941510 - protein, 72 aa, Homo sapiens
  misc_feature (20)..(20): Xaa can be any naturally occurring amino acid
  misc_feature (60)..(60): Xaa can be any naturally occurring amino acid
VFREVFCGKNRAKKVFLGGXNRKKPQTRHGARGIELGGPRGPKHNFPKRVFKKEGEVKNXKIVAVSGAEKEG

SEQ ID NO: 941511 - protein, 191 aa, Homo sapiens
  misc_feature (15)..(15): Xaa can be any naturally occurring amino acid
HQRVEVLRTWGYVTXVGTVKLAGRVACAMSSHELLLTELMFDNALSTLRPEEIAALLSGLVCQSPGDAGDQLPNTLKQGIERVRAVAKRIGEVQVACGLNQTVEEFVGELNFGLVEVVYEWARGMPFSELAGLSGTLRGLGSPAFNAWVKRVPPLGGAAPLVGKPVLGAKMETAATLLRGDIVFAASLYTQ

SEQ ID NO: 941512 - protein, 80 aa, Homo sapiens
  misc_feature (47)..(48): Xaa can be any naturally occurring amino acid
  misc_feature (51)..(51): Xaa can be any naturally occurring amino acid
HRAALHCFPSTTAILSLIGCVLSTIHSHRPNEKQEGAPCPKNPKCLXXFPXLQVDSDIQSCTAHLGLLMTPGCPTILSDL

SEQ ID NO: 941513 - protein, 125 aa, Homo sapiens
AILVGGRIILPLVHAPPPALSLLTQGPCWGSGMLRTSSSPAPALGRPLPVPASLVLPPLFLDPQWLSHGYILWVGAPHRTAGRFVFSGIPSLGSPGSPSFPAPRGWGMFAIKERFVAPVLAGLSW

SEQ ID NO: 941514 - protein, 226 aa, Homo sapiens
  misc_feature (63)..(63): Xaa can be any naturally occurring amino acid
GKPFSPVLFVLKAPSPQVKMGWVFEAFFLAFGGDPIPFPGENPSPFVPRGGVPLFFRQGPPPXGGVFLSLEKKSSPGGGFPPFSPPPPRGWGLGGGPPPIFFGGVFLFLKRVGFFFPPPSPLWGFLGGVKNSPRGAPKKNPFPPPNWGPPPSLLGGGGFFGGGFKTPPPPFFARGKPLLGPPRGFFPRFFNPFLGVFPPPRGPGFFWGNWVLSLFPPRFFKGGWGL

SEQ ID NO: 941515 - protein, 102 aa, Homo sapiens
QNQPGKGQVKRWGRRGVCWRVSAVERATRRGRRVWEGGGGGLSPREGSVFWGLKGHGPGMGALGWLGDPGSCGSRGIMFYLPYLGGQQVISPVFFRELPCWG

SEQ ID NO: 941516 - protein, 158 aa, Homo sapiens
  misc_feature (7)..(7): Xaa can be any naturally occurring amino acid
PRGSLAXTGEAGNLEEVIQDLRALRALVKEQGARFFPLEDQLGRMENGDGRAPPPRPLFFLRRPLPPQFLPGGGPGLVGCPKPLGQGRGRFPPPPVPGPGRSQGPAFPPVPGGDVSPPAGPPPFGGPSPRPRPRPLPPPPGGGGGGLYFFLPKKIFFL

SEQ ID NO: 941517 - protein, 90 aa, Homo sapiens
FAIPLPPWGRPWTRQGPVPSPNPTHAPWSSQTNETPLGFRCPRLPGNGSANPMAKWGLPPEEEPGSRAFLTNSQVCPSPQETHVLLGGHV

SEQ ID NO: 941518 - protein, 35 aa, Homo sapiens
  misc_feature (17)..(17): Xaa can be any naturally occurring amino acid
MGKSGDCSRSELQGEEXAEWSEGGLLKEGVKQEEF

SEQ ID NO: 941519 - protein, 166 aa, Homo sapiens
  misc_feature (132)..(132): Xaa can be any naturally occurring amino acid
GAPGGRLRCFQQARAVGLAGTSAAFLSSRLQDLSSIVRRADRQAVPIVNLKDELLFPSWEALFSGSEGPLKHGARISCFEGTDVLRHPTWPHKSFSHGSDPNGRRLTESYCETWRTEAPSATGQASSLLGGXGGPQRGLLCGQSAASCHHAYIVLCIENSFMTASK

SEQ ID NO: 941520 - protein, 102 aa, Homo sapiens
  misc_feature (38)..(40): Xaa can be any naturally occurring amino acid
  misc_feature (42)..(42): Xaa can be any naturally occurring amino acid
  misc_feature (45)..(45): Xaa can be any naturally occurring amino acid
LSRPGEDVEDDLIFTSKKSLFGKIKSLPPRGLLMDLGXXXLXQGXPAEDILRRPRHGPVRGTACLTCLLTLHSTFASLRRFGCQHPATPTAGNLFIVALSDV

SEQ ID NO: 941521 - protein, 153 aa, Homo sapiens
  misc_feature (90)..(90): Xaa can be any naturally occurring amino acid
  misc_feature (93)..(93): Xaa can be any naturally occurring amino acid
STVYIMAMAMQMATSPINYKGPPFMESLPENKPLVWSLALSLLAIIGLLLWPLANFNSQFGLVDIPVEFKLVIARSCSWTSAWRSWPNPXRGXRVPDQVLPGDPEAESAFLDGSAGTHCPPWLPLGGNPNRAPGGNPAPNPPQQGCTVSPLED

SEQ ID NO: 941522 - protein, 120 aa, Homo sapiens
  misc_feature (45)..(45): Xaa can be any naturally occurring amino acid
MWVSLLLSLQVLVCSEGTFYSHYPHASVNGHLYVVRVSIPNHGGXGGPQRMPPKHSERSLKGWPQPHVVCPGGLGWSEVGTSIYTRAQGVPEASFTELSNDPISLSLFFFLFFFVFFWQR

SEQ ID NO: 941523 - protein, 106 aa, Homo sapiens
  misc_feature (43)..(43): Xaa can be any naturally occurring amino acid
  misc_feature (86)..(86): Xaa can be any naturally occurring amino acid
SNLEKKGEYLWQLLQVSPEALKFMCKDAFCSNLSVENAAEILXLADSNSADQLKLRQWISSTIMLRMSWRPLGGSQWWCHILTWWXRRTALSLQHSLLFCDLYAHL

SEQ ID NO: 941524 - protein, 131 aa, Homo sapiens
PLPRPLLWLFLTGNPWDKPCSVQAPALLSPGARGGGQVASGANAVGAQVRVCWSPELPSGVKGSWHPEVRFVHSPRVPPGALGYHQAPSWALGAAPGAWRGSWASLSRAERGRRPLGAVPTPTRLVPGDAV

SEQ ID NO: 941525 - protein, 170 aa, Homo sapiens
  misc_feature (56)..(56): Xaa can be any naturally occurring amino acid
GQLNLGNGLLVGPCLRVPLFSPWRKNLETVANWAGPPGIMPPFFSPTLGPKRPVLXCPPGPKRFFPPPTKLWLVWWVGGAQFPNPFLRVAGGSPNFRPKGTSGPRFGGWPLILWGLLFGGAPPRPLGSPPPFPKMPLLAPKWVFFLPPGLGVSGGPSLCRGKRTCVWGPH

SEQ ID NO: 941526 - protein, 108 aa, Homo sapiens
NPSGIRKRWVLANGPCALPPHPWVGPLVPIALFPEHPPHRMGASPLACLCFSPNPFKWGGKRRRGEGACPLLRHLGGPRPPGLYPSLRALSPAPLFKSNLNKTPSFIW

SEQ ID NO: 941527 - protein, 230 aa, Homo sapiens
  misc_feature (32)..(32): Xaa can be any naturally occurring amino acid
  misc_feature (64)..(64): Xaa can be any naturally occurring amino acid
  misc_feature (153)..(153): Xaa can be any naturally occurring amino acid
  misc_feature (157)..(158): Xaa can be any naturally occurring amino acid
  misc_feature (206)..(206): Xaa can be any naturally occurring amino acid
PLHPLVCFSAKGNPKEFKKLRLKRKERRRGKXKQKRPEAPRGNKIKTRIREFKNQPQEEGKGAXKAQEKGEEGKGNKPGEEKGRGGPRRRKTGRAGGAKRGRDGGGKDDGIEEGGRRKGQKERRRSWAVGFQTETRGGGEQETQELASKGLDXQNKXXKKDVKQNAKGRFHKIAEEGAGGTKSRLTQTKAEAAENSDKDGLTSKNXTRSGAQAAQSRRRQAPRRAAGRGA

SEQ ID NO: 941528 - protein, 78 aa, Homo sapiens
  misc_feature (44)..(44): Xaa can be any naturally occurring amino acid
SRTSAVSAVKATVGVHFPVNTRKAHPGEQLHQCIEGGKSFNKHXNLIGQQKIHTVAEMVKGLAMSKFSRSPPKLCGAG

SEQ ID NO: 941529 - protein, 145 aa, Homo sapiens
  misc_feature (13)..(14): Xaa can be any naturally occurring amino acid
  misc_feature (22)..(22): Xaa can be any naturally occurring amino acid
  misc_feature (34)..(34): Xaa can be any naturally occurring amino acid
  misc_feature (43)..(43): Xaa can be any naturally occurring amino acid
  misc_feature (45)..(45): Xaa can be any naturally occurring amino acid
  misc_feature (47)..(47): Xaa can be any naturally occurring amino acid
  misc_feature (69)..(69): Xaa can be any naturally occurring amino acid
  misc_feature (84)..(84): Xaa can be any naturally occurring amino acid
  misc_feature (93)..(93): Xaa can be any naturally occurring amino acid
  misc_feature (97)..(97): Xaa can be any naturally occurring amino acid
GGGGKEKQSEENXXGRRKERGXQKKGGKARSKKXEERGGKGKXAXAXMGGKRKEETRAQKTLAGGPKQXGEEGERKLRTENKGXRKKEQGSAXRGAXGGAPAQQQGGGGEEAAGSAGRGPARRAPDDAPAARAGETPGCAQAPRA

SEQ ID NO: 941530 - protein, 116 aa, Homo sapiens
  misc_feature (21)..(21): Xaa can be any naturally occurring amino acid
  misc_feature (30)..(30): Xaa can be any naturally occurring amino acid
  misc_feature (38)..(38): Xaa can be any naturally occurring amino acid
  misc_feature (41)..(41): Xaa can be any naturally occurring amino acid
  misc_feature (93)..(93): Xaa can be any naturally occurring amino acid
GHKKGGEQGGKERGKEKPKEXDKKKKAKAXRKKREAPXGDXQGPGSKKAIGAKIKQKATTKESQTNPPPKRKKKIDVKPIHPSTQVPESKGDXSSKSELNDRQKWRPDTTVWRKLR

SEQ ID NO: 941531 - protein, 76 aa, Homo sapiens
PTPPPPPWFPPLARGVKWVFLGPGPLLGFFFIPPLGPRLLGKEGWGLVGDPTQNLGLGPGGGRLGAFLGWFGFGFF

SEQ ID NO: 941532 - protein, 135 aa, Homo sapiens
  misc_feature (81)..(81): Xaa can be any naturally occurring amino acid
VEASNTSFPRSEPPTGCLIPKHECLPVTPPPADTHRGVLSSVVDVHEGGSMTLMLNVRTRTAATLLDGSPTMSSKPSVSFXPRGLKMAVTFIGNSTTIPELFQRILEQFPSMFPRKAFLPWYTGEGMDQMEFPQA

SEQ ID NO: 941533 - protein, 42 aa, Homo sapiens
PPPPPPPPAFSFPGKVHGRSWGNRYPFGFVRITRNLKTQKGF

SEQ ID NO: 941534 - protein, 122 aa, Homo sapiens
RVIIKKYYTRLGNDFHPNKGVCEEIAIIPSKKLRNKIAGYVPHLIKRIQKGPVKGISLQLPGEEKKKKAHYVPEVSPLDQEIIEVDPAPKEMLKLLDFGSLSTLQVPQPPVGMNFKTPRGPV

SEQ ID NO: 941535 - protein, 126 aa, Homo sapiens
GPPPGAGLGSRLRAGGKGPHGGGTPPSPHKARGAGGGQGANPGAGSPYPAPPLGTPGRGKWGGPPPSQLGAGQGLAWEKPPCRSPAFGAPPPNHPNPGPPSFPPPPPPPPRFFFFQKFFFFFPVFK

SEQ ID NO: 941536 - protein, 197 aa, Homo sapiens
RFGPKTGVGRGPDFRDFRAPPVPERWVRRVGSRTRGRNAGPVFFWAPKNPLPVVCSPLPGGSVGDMYFFPFSQNPGLVLGLFGGDGADFPVFLPPAPGFFGFSSGARPHGGVSWGQFRGGAPPVRVFFYPPRVFPRVGGGPFAPGVGAFLPWENRGLAGFGPRGVFPPFFFFFLPAPPPPPFLGGSVFWFWGVFGSL

SEQ ID NO: 941537 - protein, 115 aa, Homo sapiens
REGIEEPWASCLWEHQPGVAVATEAVQPHLGTNVAFPSRSQHYRSVAHVHSEAIQGQDSQSRTDFAQGHLRSQQARSGTNGVPEAVLLVEGVGRWGPFPSNACHTRKGNGNGLFS

SEQ ID NO: 941538 - protein, 129 aa, Homo sapiens
KGLLALMTFWMGLQLMAILILKKRALFIFSPIALLGRFTFYSESLHIPLVFLQGPEPLGQMLYLNLIPYSPQLDEGNIEVRIVIIIPFLGRFRQLSGLAQSNQPPAFLPTSKFYGNFFGFFQFFNKCLS

SEQ ID NO: 941539 - protein, 116 aa, Homo sapiens
  misc_feature (55)..(55): Xaa can be any naturally occurring amino acid
  misc_feature (57)..(57): Xaa can be any naturally occurring amino acid
IYAFGATPTDPSQRGPRPSWKIFEPLLGPAQPRPPKTFWLCWPEKPLTAVRRTKXKXGGRRSLLSSPLSLSVGPARPAPVLGNHGFPGGGALVRNPGHFHQHGLRLGADRGPPVGL

SEQ ID NO: 941540 - protein, 195 aa, Homo sapiens
VHPLPRGGAPPRGTMKVLPLCLFRCGGGRPSRLSWVLWFVPTPRCGVRRMAGSSPAVDLGGVWVTQGGGPLPPKALPPPRGKKAPFFYPGVWGAPFKTAGFGGCPRGAPPPRGKTRGFFGAPFFLFFFHPPPRGLGGLGFFSEPIFWGPGGGLFFFPRPAARERAPPFFFPPFFFLGGGGNPCGVFFFGFSPPPP

SEQ ID NO: 941541 - protein, 105 aa, Homo sapiens
FLWCQTLGRNFQMKQIDSYCSWIKEKSSGSPRRPWAAPPKPYNILSVGCRGGFSFLSNLTALLNHCLHLPMRWLALPFKAGPLELKLKGGVQQPGDPLFLLCLPC

SEQ ID NO: 941542 - protein, 72 aa, Homo sapiens
  misc_feature (38)..(38): Xaa can be any naturally occurring amino acid
TDLFPPGVSWSARSQKARRTSPVEESSFGFGKFLEEAXQHGGSKEPQNSSRPKDPEHEGKKRRKEEAQVSPK

SEQ ID NO: 941543 - protein, 70 aa, Homo sapiens
  misc_feature (59)..(59): Xaa can be any naturally occurring amino acid
PPPPPLPFVWAPESGGPRVFFPTKGGEEPRGEGTLFSLPWCGGPVSSFINPLKRARSVXFPPPPGGVPGC

SEQ ID NO: 941544 - protein, 57 aa, Homo sapiens
  misc_feature (21)..(21): Xaa can be any naturally occurring amino acid
  misc_feature (33)..(33): Xaa can be any naturally occurring amino acid
GQHPAPHQAGGHRDPGNGSIXQSHHRHPGAALXKRTQDIEIKAHPKPRMTSQDPPLH

SEQ ID NO: 941545 - protein, 116 aa, Homo sapiens
  misc_feature (70)..(70): Xaa can be any naturally occurring amino acid
KEPETTDKPGRATAPTKEATSGTAPISSETTPNHRNSNRASHRGSICTLIPINHIKLDSFTISNSGAEIXVRHQKEGSLMDKDIFIGGSSINKTRAISDVEPFDRAKDFGARTFFT

SEQ ID NO: 941546 - protein, 206 aa, Homo sapiens
RGRVSPVCGRGLAGSSPPRRGCSFRFFWPGYNRRGGCARGRGIQKWGAPLFFFPPLVAVEFGPLWCGRGKIFPPRGQGRWGGVPPPIGGFPGGCPNGGTRGGPFPLSGPPWVGKRGFGKPQLFGGGVPPPGGGVPGPKRFPRGGGFRGKGPPPVPGFRGAPPPPLGFGPFFPGGAPPIGGPPGFFSPPPPPPLGFFFCFGGGGGIN

SEQ ID NO: 941547 - protein, 113 aa, Homo sapiens
  misc_feature (60)..(60): Xaa can be any naturally occurring amino acid
GPPPPKGLVGEPSPPPLGAARGPPWASGFFSPRRAGPGALGWGLFPPGFCGPPPGGAFLXPTREKQGGQGPPFFGPFFLAPPPPPRVFFFVFPGPGGGPVPGFFFAGGFMAPW

SEQ ID NO: 941548 - protein, 149 aa, Homo sapiens
PRECHPIRGAIILAKLSIVPVGKGYWGNKIGQPPPVPFKGTGPFGFVLVPLIPAPRGPGIVSAPVPKKLVMMGGIDDWFPQAGGALPPWGNLPRPPFIAFFKAYRYLAPGLWKEAGFPQFPHPGVPGPLVQTPPQVSVQRAPGPPGGPT

SEQ ID NO: 941549 - protein, 107 aa, Homo sapiens
FGGPLKKARAVLLLGGAGEGPGPCSPFNSRAGAGKQPAPPFGLKAPPPKRCAGKKRPRPGDLGFKGPFMPVNVPWVGRGWFPVFQCRNFWLCSPFPFFRNYRSLGFF

SEQ ID NO: 941550 - protein, 131 aa, Homo sapiens
TNQGKPPNPEKFLGVSPEKPNPRTPEGGPFPPIFPPPKPKALVPVPPGMFFLLWEPEPLLFGQKGAPFPPPWAPRKGVFGPSPPLPKKNQGFGFPFFFFFVGDPKGPGWEGKGKGFGGGKNGPPVFKKKIS

SEQ ID NO: 941551 - protein, 106 aa, Homo sapiens
NVLNPFPKFMGYCMLGGLFGYLHWLLCQRGHHSLVILVSVWTSHFPQCIKEPSMDFRGALRFPIHPRVINVYKYSVHDTCLGGSPWCLREGAHAASGLQGQCCWKG

SEQ ID NO: 941552 - protein, 137 aa, Homo sapiens
  misc_feature (135)..(135): Xaa can be any naturally occurring amino acid
GHTSFKGILKQPAPQSDPYSRLALGNGGLQTLHQATQDQGKEERHQDRALPINKQVLRNFLKDSKRNVSEKRQSKKKLLDQRAQNVGKPKNIRMLTGETEATKEKKRGGGGGRRSKKAGEFHEFDNEPLMMTCLXPP

SEQ ID NO: 941553 - protein, 116 aa, Homo sapiens
  misc_feature (23)..(23): Xaa can be any naturally occurring amino acid
  misc_feature (43)..(43): Xaa can be any naturally occurring amino acid
  misc_feature (46)..(46): Xaa can be any naturally occurring amino acid
  misc_feature (96)..(96): Xaa can be any naturally occurring amino acid
  misc_feature (110)..(112): Xaa can be any naturally occurring amino acid
KEKGPTGQRKRHEEITQKSYNFXKKGTAQPVGKTLTFKNLFKXPSXGQSPPTPRVEGTKVARWHWGCGRDTRPHQSVAAGENCPLPEPAWEFWIHXGERCGHLRQSLGTXXXWKTI

SEQ ID NO: 941554 - protein, 83 aa, Homo sapiens
  misc_feature (5)..(5): Xaa can be any naturally occurring amino acid
  misc_feature (35)..(35): Xaa can be any naturally occurring amino acid
ETTEXQDKAQDTNGNRETWRGQQEECRRPKQTREXKTIAKKGLWNLDKARPPATYKSSRGLRSICLPSHKPVPRYGPKFKNLL

SEQ ID NO: 941555 - protein, 93 aa, Homo sapiens
  misc_feature (21)..(21): Xaa can be any naturally occurring amino acid
  misc_feature (25)..(25): Xaa can be any naturally occurring amino acid
  misc_feature (68)..(68): Xaa can be any naturally occurring amino acid
KGKGPTRPRKRHKGKPEQTTXKGGXQERRRPQKRGEKATNQDTENKGIKRQQKGGETAAKAAEAELEXGAESQQGRTSPGRPSREAHQRIHSR

SEQ ID NO: 941556 - protein, 100 aa, Homo sapiens
  misc_feature (8)..(8): Xaa can be any naturally occurring amino acid
  misc_feature (27)..(27): Xaa can be any naturally occurring amino acid
  misc_feature (37)..(37): Xaa can be any naturally occurring amino acid
  misc_feature (100)..(100): Xaa can be any naturally occurring amino acid
KGQKNTKXTTQWKKEKQREKVKNKSNXRAKRRRIEQXNFEDRGKGRQSYRYVLVTGVKTYEERFNMNGTLEIGGRNLKPKDCFLKPQIIECILGKSFRVX

SEQ ID NO: 941557 - protein, 135 aa, Homo sapiens
RGPQKLLEALSAFSCPWESWVRAARCVSRGFWRQLALDCPAPWGSSPWEVRDASPGHTHSRTPGAHCSQGISSWAAPPWAWCPSGQSPHPQPASSLKSLGHGDDVGRQAGLGDGLKLGAGPGDFLLPNFLLCAPR

SEQ ID NO: 941558 - protein, 144 aa, Homo sapiens
TGSPGRVGAYNMYRIRKGTNQAPHKDHTLTCSRICDAEHRVASANGAQGPLGILGNLGYTGYWGCRSSLNPRLRVHLTQLASVPGTFDWSCGALHGGPVVAGVAPVCGVCARRLETAGHAPVGPSVLHVHAPPVQGPELTVGIS

SEQ ID NO: 941559 - protein, 126 aa, Homo sapiens
PPGGSPVSWKSLKGTLQKSVWNLGFLALELPCRAPGPKPRSGAGVVFSKNNGRPVLPSLAPWGETKHASFHGPPKSFWAPLFGPLMGVIIIVILKWSFALFPRRRLQGAEIAPLPSSLGAEKTLSP

SEQ ID NO: 941560 - protein, 35 aa, Homo sapiens
LEQPLSYGKLCCDGLGPLYLCEYRFINRLINLSKV

SEQ ID NO: 941561 - protein, 30 aa, Homo sapiens
ACYESGLRLCGNGEEMSLSKTKNKLLGEKT

SEQ ID NO: 941562 - protein, 82 aa, Homo sapiens
GKVFPKLDLLTKVPQRALELDKNRPIGTAPVSFRTLVGSAWNGTCSGQLNRVALCRGEPLGSKTVNVEDEDAAWRYMQFYSI

SEQ ID NO: 941563 - protein, 124 aa, Homo sapiens
LSEFRRRRGHWSIHVEPQIQQQAEKVTVGTRCTAKCPLAVPKRNPTLSLAKLGAVNAVFLFCCHPEDSHCNVTPLSFQVQAQLQVDSAVAHARRRLHPHLAAHAPCMMLPAPPFGMPLPALAAY

SEQ ID NO: 941564 - protein, 88 aa, Homo sapiens
ELGKHLREAGPENRNRVFPSGREGDSPGLQNLQYSPPRSTALGCEGPLWPCSLAKKAFGVECCSQKQHVYLPIVFHGSNKLQIKLYGN

SEQ ID NO: 941565 - protein, 77 aa, Homo sapiens
KRKGRSRNPCLSARHVVQRRRGFGCEESAVQSPKPLGLQNGRAGVDRPQGAEPRRGGHVTRPVRMTLGLRKRASLYF

SEQ ID NO: 941566 - protein, 108 aa, Homo sapiens
WQPQAQPQACPPFLLSGVVGTKSLGPPRVLFSQVLFFSLVFPPPPPIKGAPRPGAALEGLGKECFEEGGGLKLRVGARMGWSEGVFKVWAGCFAGKLGAGLWLLTAPL

SEQ ID NO: 941567 - protein, 43 aa, Homo sapiens
QGASGSIFSKFTSKFVRRNLNEPESKDRRGDAQTSRGEAVAAT

SEQ ID NO: 941568 - protein, 95 aa, Homo sapiens
GPLARIEASLSVQMSRRVRALFGAMNFWAIIMDNLVSLNSLKFTEVVARGLLLTGFPQTTLSILFVPYWGVQLVKGGERPLALGGGQKRGKEKPG

SEQ ID NO: 941569 - protein, 109 aa, Homo sapiens
  misc_feature (7)..(7): Xaa can be any naturally occurring amino acid
ASPKRGXPRGVHTFTGLILSPWVLLFGLWIRDGANVSNFPFAPSTIIFHLGHAAMLGLMYVYWAQLHMFQTLKDLALLGSVTFLAGHRMLAPQAVQRTAPLFPKKDGNF

SEQ ID NO: 941570 - protein, 105 aa, Homo sapiens
PPGFSPRGLKGKVLKGSNFTPRPPLFGGGGGFPLKGAFWPLPNFWGGGEIVSFPKNPGGAGLLGSPLFSPPFGGVGGGVFLGPKFKTPLGQFTGPRFFFKKFWAG

SEQ ID NO: 941571 - protein, 112 aa, Homo sapiens
CECPGGFLLDASRARCVDIAECRELSQRGLLCQSERCVNTSGSFRCVCIAGFARSRPHGACFPSAAAVPAAPALGPAFGCPLRVFRELGLASAPTCGSGPGTFRARRPSRRL

SEQ ID NO: 941572 - protein, 95 aa, Homo sapiens
PRGCGDQSLCDREGLSFQGSDQRGENSTEEAAEHALRSSGDNSSAYEHEKRTQSQEKNQRKKGLVLPVARIPHQLEIVPVPTSQTEKLQKSPGIE

SEQ ID NO: 941573 - protein, 105 aa, Homo sapiens
CSQVPRGQVGSPSHPNMLQAAFPLSGSFGKQGPICPSVAVWPEWVRRPQHLCSLRHFGRMFGASPAGGGASRAGGPLRPTAPRGPPPFGCEVAFSPSACKGPICH

SEQ ID NO: 941574 - protein, 191 aa, Homo sapiens
  misc_feature (9)..(9): Xaa can be any naturally occurring amino acid
FSRMSPATXVITHTRCDWKCMHLASASSRYVSVHTLPIHPSTCHAWILGQHADPSVAVWTGVNGQRVSLQELNPEMGTDNDSENWKQVHQMVVHSAYEVIKLKGYTNRAIGLSVPDLIESMLKNLSRIHPVSTMVKGMYGIENEVLLSLPVIPNARGLPSAINQIVKDDWVAQLKKSADTLWDIQKDLKDL

SEQ ID NO: 941575 - protein, 79 aa, Homo sapiens
RIRYRPTCNFSKVSGYKINVPKSQAFLYTNNRQTESQIMSELPFTIASKRIKYLGIQLTRDVKDLFQENYKPHLPSPAA

SEQ ID NO: 941576 - protein, 105 aa, Homo sapiens
SLGRGRVVGAWGWPRGAPWRGYVLVFGAGRLLGSGGVFACGRVGVGGGGGGGVGGPSPPPFLRPPPPFPGGFPPLPPLPGPQPVGPFGKWCPVGFPLGGLFLGPG

SEQ ID NO: 941577 - protein, 171 aa, Homo sapiens
PSRWVFSPTGGEEVLPPPLFVGPPGGGGGGGGPPFFVGPPPPFCFLLGGGGGLPKMGAPPPPPPLFWGCFPVGPPAPPPPPSVGGGPPPGGVGVSVSPTFLGPPPPVFCGFPPPGGGEGGGVFPPFFSLAPPPLLGGGFFSPFFFPSGVFFFPLFWGGFSPKKKNQQNKKT

SEQ ID NO: 941578 - protein, 111 aa, Homo sapiens
FCHGNPLKSVTLNDGNPFNSGQEKIVYVFPGVALEFIPGGIRPIPNEIFLLTAEQIAQEVFEQHLSQGRFYPPLSTIRKVFFRIANKVFGQGGKTQTGFSLPQALRTRRLL

SEQ ID NO: 941579 - protein, 70 aa, Homo sapiens
AEIFLEIIQSSFPEGVSLSVKGPPEEAFKGRFKVRPNWEKFVGKVQAPPVPPFMPAGVILRAKKKSFWGG

SEQ ID NO: 941580 - protein, 36 aa, Homo sapiens
QEEYLVHLVPVAENLGGRWIWGCSPPPVFSTPQFLL

SEQ ID NO: 941581 - protein, 30 aa, Homo sapiens
ATTNTPRSRAMAAAGSSAARVCGVGDAERP

SEQ ID NO: 941582 - protein, 118 aa, Homo sapiens
  misc_feature (10)..(10): Xaa can be any naturally occurring amino acid
SHRRVTTGFXEKQGRPPNFRDPPPIPRELSEPDATRQPRELSWEAVGEPGQHWCPCPQREEQAGERGEAGMHCSPHHPPCSTSGELESGNVPRRPSMIAQGKEKGWGVIRSTALVSSH

SEQ ID NO: 941583 - protein, 74 aa, Homo sapiens
NLILEPKIMLVAIDNRYIRAVGVPVLGFSPKPDNLCCCTTTITGWHKAVFLRGVDIYTRLLPALASVPALPSDS

SEQ ID NO: 941584 - protein, 95 aa, Homo sapiens
LELETETSGPKRPPEKPRKHDSGAADLERVPDYAKEKEIQSSHLETGEKTGKKSPSRREDLELIMTEMEISRAPAEPSLREPMGNVVKALIALTH

SEQ ID NO: 941585 - protein, 114 aa, Homo sapiens
KKVLGQAPWLTPVIQHFERLRRADPLSQEFETSLANMVKPPFLLKKQKLAERGGMPLSSQLLGRVRQENRLNPGGKGCSEAEIAPLHSNLGDRLCFQNKTNKQKDFIKNILLTQ

SEQ ID NO: 941586 - protein, 181 aa, Homo sapiens
  misc_feature (2)..(2): Xaa can be any naturally occurring amino acid
  misc_feature (36)..(36): Xaa can be any naturally occurring amino acid
RXLRDPAADAAGRPDADAQPAGAKAAALVGLQEAGXALSPHGGPRRLRWPQSLGRSVRSLAGAAQVGVHHSGPGDDLRSREGPGITKDSQPSGYPSAPGTGPTARGRETMGSSGCAISSASVRGGLSLRRSHPPRARREVPRELPAGTGRRPRWRHARREQGLLGRRRHRVNVRLDVGARP

SEQ ID NO: 941587 - protein, 171 aa, Homo sapiens
  misc_feature (95)..(95): Xaa can be any naturally occurring amino acid
MLKLERTIKTIINTFHQYFVKLGHPNTLNQGEFKELVRKDLQNFFKKENKNEKVIEHIMEDLDTNADKQLSFEEFIMLMGRQTWAFPQKKCTRVXRALAPPISQALGRAPPKTTVAKITVATATATFMVATATATNQEARPPCLYPTRAPGPVMSNFFGCGVRGWGQKKFF

SEQ ID NO: 941588 - protein, 127 aa, Homo sapiens
  misc_feature (41)..(41): Xaa can be any naturally occurring amino acid
  misc_feature (43)..(43): Xaa can be any naturally occurring amino acid
DPEDEASGRENKTAVVVGTITDDVGVRRYQTEGMCTAGDKXGXSSILGQGARSYFGPAALDSLKAVALSCSRVLAKAREGYRHFGKAPRTPDSHPKPYVRFKGRKFEGAKGRRANRRFQKLPWVLLF

SEQ ID NO: 941589 - protein, 214 aa, Homo sapiens
  misc_feature (51)..(51): Xaa can be any naturally occurring amino acid
  misc_feature (58)..(58): Xaa can be any naturally occurring amino acid
  misc_feature (62)..(62): Xaa can be any naturally occurring amino acid
  misc_feature (94)..(94): Xaa can be any naturally occurring amino acid
RTPTPTAPGDPGPPGQGPSYPTPLKLAQNLQGTLTGPVKVPGVRAPGPAQXGPNPNRXRGGXHGGPPVDPPSRPLPAGRAVAAILGLGLVLGLXGPLAILLALYLLRRDQRLPPDAHKPPWEAVFRAPIQKEQADAHSTLAKFDLGPPRWTLGPARLEPEGFVGRAGQVQAACPPTFLGQFCPVLGADGCLRLFAYVCHAYLLPRGTPIKPLAA

SEQ ID NO: 941590 - protein, 80 aa, Homo sapiens
  misc_feature (36)..(36): Xaa can be any naturally occurring amino acid
  misc_feature (53)..(53): Xaa can be any naturally occurring amino acid
GAGRTFPRTIPLIQQLLNATELTQDPAAYSQLVAVXVYTPERAKFATGVERQXWMELFIHTFKLVHRDIVGDPETALALC

SEQ ID NO: 941591 - protein, 84 aa, Homo sapiens
QLVHGPIFFLTLHIAVKCLLASSTFGQSFFPGEAVLAVVAPLVDREHVGIGRAGEQQVPHLEGLQSPQPPAFARAAEALQAAEA

SEQ ID NO: 941592 - protein, 105 aa, Homo sapiens
MLEMLFEPTVAMTEERSSRPKIGLFSRRPNPKRFGKVRVREILPCCRPRGGHTLQKAFLENKGVSKHFAPPLAFFYFFNFLGGKGFLKSLSCKGFKKRKKSFSPL

SEQ ID NO: 941593 - protein, 109 aa, Homo sapiens
GPLGFRVFKNPSWFPNGRFRDFGSLRGPKGGYYGGFGFGPPHWGFFESRVFPLWVPIFLVGRGSGFFFFPPGWFFWEALFVVPFFLGFFFLPKLANLKRFFFFPPLFLR

SEQ ID NO: 941594 - protein, 57 aa, Homo sapiens
MTNVTLQKGAKIRKGFEREEFHVSKLGPQLVENAEKRPPGGAGRPACAQEAHFLFLF

SEQ ID NO: 941595 - protein, 150 aa, Homo sapiens
MPCLLISLRWTSLPPTQKHQGLQKALEQPAHLAATSQPAQRRLSQFRGSSTQLELRYEEQLLSWANVQNGLEKRNLLRTNSRFAPSADSTKHFRWGRLSLVLCCSPLSSPQCLPVRPSLPGGPKAASREALCSQFAPFISWPLRGLSRTA

SEQ ID NO: 941596 - protein, 229 aa, Homo sapiens
  misc_feature (3)..(3): Xaa can be any naturally occurring amino acid
  misc_feature (7)..(7): Xaa can be any naturally occurring amino acid
  misc_feature (12)..(12): Xaa can be any naturally occurring amino acid
  misc_feature (24)..(24): Xaa can be any naturally occurring amino acid
  misc_feature (26)..(26): Xaa can be any naturally occurring amino acid
  misc_feature (31)..(31): Xaa can be any naturally occurring amino acid
  misc_feature (42)..(42): Xaa can be any naturally occurring amino acid
  misc_feature (88)..(88): Xaa can be any naturally occurring amino acid
  misc_feature (112)..(112): Xaa can be any naturally occurring amino acid
  misc_feature (150)..(150): Xaa can be any naturally occurring amino acid
  misc_feature (175)..(175): Xaa can be any naturally occurring amino acid
  misc_feature (183)..(183): Xaa can be any naturally occurring amino acid
  misc_feature (204)..(204): Xaa can be any naturally occurring amino acid
  misc_feature (227)..(227): Xaa can be any naturally occurring amino acid
DDXIAVXNMDYXILQVSLLALAGXAXTKGLXSGVDIGVKYSXKQERNFDDATMKAGQCVIGLQMGTNKCANQSGMTAYGTTRHLYDPXNHILPPMDHSTISLQMGTNKCASXVGMTAPGTRRHIYDTKLGTDKCDNSSMSLQIGYTQGAXQNGQVFRLGRHIYDPIMPPGTIGRXGSLRHRRXPGPGEVLNSPYYQEEARYELXQLSPNLSEFLIPYLKILDPFLNXIY

SEQ ID NO: 941597 - protein, 70 aa, Homo sapiens
CQKESHSARSVDRSTGAKGQWQPGSPRYCSTVGGGEKSNRTGAEGDEGKITKVLQRNIIGCLKEDPGADK

SEQ ID NO: 941598 - protein, 90 aa, Homo sapiens
MLQYPPEIPCPAASGISCPVASALCGPSQACHVAPYYEPPGLPITFCSSSPDLSMLLRPLEPPCLGGAGSQPHMLQSEIRPGLSQGGVRR

SEQ ID NO: 941599 - protein, 103 aa, Homo sapiens
  misc_feature (2)..(2): Xaa can be any naturally occurring amino acid
  misc_feature (5)..(5): Xaa can be any naturally occurring amino acid
  misc_feature (63)..(63): Xaa can be any naturally occurring amino acid
  misc_feature (80)..(80): Xaa can be any naturally occurring amino acid
  misc_feature (85)..(85): Xaa can be any naturally occurring amino acid
RXFGXALNLPFSPAVATYCCEAVAISACVPSSSSSAFCTASALPSHCLLSMVPPLGLKPVSPXHSFLALPFTVGPLARIXLAISXPTFLWLPRAPHYQDRVHG

SEQ ID NO: 941600 - protein, 86 aa, Homo sapiens
  misc_feature (77)..(77): Xaa can be any naturally occurring amino acid
ILWLNQFLWDLKQSLNQSMAVYKLNDNPKSDKHVDVRVDGLMLKCVIPSEVNSECPPYPPRAISIQSPEMIATLYGXAVQAVDLLN

SEQ ID NO: 941601 - protein, 34 aa, Homo sapiens
PGESYDPGALGCQPCSSLWGGKGSRRYPRYRSKF

SEQ ID NO: 941602 - protein, 30 aa, Homo sapiens
DQDLDPSDLTFFLVITRFLTSMPSLQPVLC

SEQ ID NO: 941603 - protein, 81 aa, Homo sapiens
  misc_feature (11)..(11): Xaa can be any naturally occurring amino acid
CVTCTSILKSXLLKDIKQAVRKPELKFHEKSKEETFDKITWHYGEETEYHGRPFKIDVQVVCTHEDAMVFVDYKTHPVGAN

SEQ ID NO: 941604 - protein, 67 aa, Homo sapiens
PQCAWIRGAQGQRALVRCKKGGDSDPKEESEGGFVGWAWHFEEAEVGGSLEQEFETSLGNIARPHLY

SEQ ID NO: 941605 - protein, 92 aa, Homo sapiens
  misc_feature (56)..(56): Xaa can be any naturally occurring amino acid
GPRICRSRRAISKPSVVSRIVASRSRAVGDSGAWYISRQTDSALPRPTRPLNWWSXASPKRSACSITISDALGTSTPTSITVVATSTCSRLA

SEQ ID NO: 941606 - protein, 102 aa, Homo sapiens
RDGSHLPPDFEGLQTVSQWLRTLSGMSASDELATHSAQSCRPEQLHASTVLILTRALALAQKGKSEAMAPGPLSATQAVVIHTTHCLQLPVWCLSLVSELWG

SEQ ID NO: 941607 - protein, 133 aa, Homo sapiens [sequence omitted]

SEQ ID NO: 941608 - protein, 134 aa, Homo sapiens
MGKKTSRKTENSKNQSASPPPKERSSSPATEQSWAENGFDELREEGFRQSNFSELKEEVRTHGKEVKNLEKRLDEWLTRITNAEKSLKDLMELKTTARELRDECTSLSSQFDQPEERVSVMEDQMNEIKREEKF

SEQ ID NO: 941609 - protein, 124 aa, Homo sapiens
ECTCIKRVVWFLGGFPDPLSIMERRWTPVQISLEGGLCLMGRQSLSPGLASAGFWGALQQGRHVASHEESQGDSAREAASLAQAWLWCRASWGAAWGQGVAFSLPGCPLRGVKPSRTSVLLSDF

SEQ ID NO: 941610 - protein, 146 aa, Homo sapiens
MYLSISCSSKCHTPRGSEGVTISVSPQHLSTVSQTIQGRPFAWERKSLFVRVTQVYAYCPVIIYAPSFAVIGVGLEQSPYLAHTYYSQSTLVCRLPSPKPVPKGPFSPATLGAPVIFPTPLVRARVGSKCLKQGLQQGPFPERLSL

SEQ ID NO: 941611 - protein, 116 aa, Homo sapiens
VKKMCQDYLSNSGLCSQETLEINNVSSVASASPSAGCHSTNALSTVNQKKPIGHHTLRTNPDTDALPDALSSLTDSIAPALGEKHCCLCTPFTGELSPLQLSLQPALATTSFPTLS

SEQ ID NO: 941612 - protein, 316 aa, Homo sapiens
SRTALTQPWRRRLWKPCGASYENSRPLQGVGAALGSGVSSDYWHLGMELSVHSSRATVGSTEVSVAVTPDGYADAVRGDRFMMPAERRLPLSFVLDVLEGRAQHPGVLYVQKQCSNLPSELPQLLPDLESHVPWASEALGKMPDAVNFWLGEAAAVTSLHKDHYENLYCVVSGEKHFLFHPPSDRPFIPYELYTPGTYQPSDRPFIPYELYTPATYQLTEEGTFKVVDEEAMEKVPWIPLDPLAPDLARYPSYSQAQALRCMVRAGEMLYLPALWFHHVQQSQGCIAVNFWYDMEYDLKYSYFQLLDSLTKASGLD

SEQ ID NO: 941613 - protein, 110 aa, Homo sapiens; identical to SEQ ID NO: 791515

SEQ ID NO: 941614 - protein, 615 aa, Homo sapiens
AVQGDNSQVLQLLGRNAVAGLNQVNNQGLTPLHLACQLGKQEMVRVLLLCNARCNIMGPNGYPIHSAMKFSQKGCAEMIISMDSSQIHSKDPRYGASPLHWAKNAEMARMLLKRGCNVNSTSSAGNTALHVAVMRNRFDCAIVLLTHGANADARGEHGNTPLHLAMSKDNVEMIKALIVFGAEVDTPNDFGETPTFLASKIGRLVTRKAILTLPRTVGAEYCFPPIHGVPAEQGSAAPHHPFSLERAQPPPISLNNLELQDLMHISRARKPAFILGSMRDEKRTHDHLLCLDGGGVKGLIIIQLLIAIEKASGVATKDLFDWVAGTSTGGILALAILHSKSMAYMRGMYFRMKDEVFRGSRPYESGPLEEFLKREFGEHTKMTDVRKPKVMLTGTLSDRQPAELHLFRNYDAPETVREPRFNQNVNLRPAGLPLPLSLTVKDKLTPPSAPTYFRPNGRFLDGGLLANNPTLDAMTEIHEYNQDLIRKGQANKVKKLSIVVSLGTGRSPQVPVTCVDVFRPSNPWELAKTVFGAKELGKMVVDCCTDPDGRAVDRARAWCEMVGIQYFRLNPQLGTDIMLDEVSDTVLVNALWETEVYIYEHREEFQKLIQLLLSP

SEQ ID NO: 941615 - protein, 304 aa, Homo sapiens
CKHVEKPINNSSLVSPLQKIYSSVKSHILNKYRNDFDDSPFLPQEQKAQIREKPCECNEHGKAFRVSSSLANHQVIHTADNPYKCNECDKVFSNSSNLVQHQRIHTGEKPYKCHECGKLFNRISLLARHQRIHTGEKPYKCHECGKVFTQNSHLANHHRIHTGEKPYKCNECGKVFNRNAHLARHQKIHSGEKPYKCKECGKAFSGGSGLTAHLVIHTGEKLYKCNKCGKVFNRNAHLTRHQRNHTGEKPYECKECGKVFRHKFCLTNHHRMHTGEQPYKCNEFGRPRRVDHEVRRSRPSWLTR

SEQ ID NO: 941616 - protein, 50 aa, Homo sapiens
  misc_feature (46)..(46): Xaa can be any naturally occurring amino acid
WEDEEEDDEDEDDDDDEDDEDDDDEDDEEEEEEEEEKPVKEAPGKXQKGK

SEQ ID NO: 941617 - protein, 234 aa, Homo sapiens
  misc_feature (9)..(9): Xaa can be any naturally occurring amino acid
  misc_feature (28)..(28): Xaa can be any naturally occurring amino acid
  misc_feature (37)..(37): Xaa can be any naturally occurring amino acid
  misc_feature (71)..(71): Xaa can be any naturally occurring amino acid
  misc_feature (77)..(77): Xaa can be any naturally occurring amino acid
  misc_feature (84)..(84): Xaa can be any naturally occurring amino acid
  misc_feature (101)..(101): Xaa can be any naturally occurring amino acid
  misc_feature (106)..(106): Xaa can be any naturally occurring amino acid
  misc_feature (113)..(113): Xaa can be any naturally occurring amino acid
  misc_feature (135)..(135): Xaa can be any naturally occurring amino acid
  misc_feature (144)..(144): Xaa can be any naturally occurring amino acid
  misc_feature (193)..(193): Xaa can be any naturally occurring amino acid
  misc_feature (208)..(209): Xaa can be any naturally occurring amino acid
DSAPAAPAXNSQAPRPPAPPGRPEQHTXTHRGNPEPXTHAPRKGKETREEDRTPGPQGAGDEDKNRRRPAXGGRARXQRSRAGXRKRPRTRPQRAGRRQPXGRRGXRAPPAPXPRQGRAAADSEPNRDPPKNPHXRGGPPGAPXPGARPAKEGGPGEERRGKGEAEGTPPPPPPPKPKTQRPQTQSQAHQRGXRPGREPPGAKQRPGXXPPPGPQPPTPRPKKEPAGGKKQQPN

SEQ ID NO: 941618 - protein, 132 aa, Homo sapiens
  misc_feature (16)..(16): Xaa can be any naturally occurring amino acid
  misc_feature (21)..(21): Xaa can be any naturally occurring amino acid
  misc_feature (46)..(46): Xaa can be any naturally occurring amino acid
  misc_feature (61)..(61): Xaa can be any naturally occurring amino acid
  misc_feature (63)..(63): Xaa can be any naturally occurring amino acid
SVLSPFLSSLSLLFVXLCLPXLVWCVRRRGGVVLVVALCVGLVAGXVPFFSFVGFVWGVAXVXVCPFFFCCLVFLFFLWLFGGLRRFSPSLAFLSFLFGLSSGFVVLGVRSCFRGALLVGGVGLLSPRRSFF

SEQ ID NO: 941619 - protein, 121 aa, Homo sapiens
  misc_feature (6)..(6): Xaa can be any naturally occurring amino acid
  misc_feature (33)..(33): Xaa can be any naturally occurring amino acid
  misc_feature (49)..(49): Xaa can be any naturally occurring amino acid
  misc_feature (51)..(51): Xaa can be any naturally occurring amino acid
  misc_feature (89)..(89): Xaa can be any naturally occurring amino acid
  misc_feature (118)..(118): Xaa can be any naturally occurring amino acid
GGSPGXGRFWSLAFKPHQGKHSMNCPAREKYPXEDQQRTIIPSPRNFPXCXLAKGDTKSEWLVQQYHAVGGTFPRSCRHKPLLSLPSHXASVIHLGHSALQTFTRAEANLGLWRHLEXKRR

SEQ ID NO: 941620 - protein, 157 aa, Homo sapiens
  misc_feature (2)..(2): Xaa can be any naturally occurring amino acid
  misc_feature (111)..(111): Xaa can be any naturally occurring amino acid
  misc_feature (135)..(135): Xaa can be any naturally occurring amino acid
DXSPATYRFIIVNFVETILPKWVPGSDFLLGVSVHRIKKTLPSTVVSEGFQKILMFLPKVSDPLSIIHPTPHPQCSPTDPPCISFQFLSGVDAWCKMCSEGGLPSEMQDLXLAIHHHQTLYEQVTQAYTEVRMEXGNHGSWACLHVGGVMRALACAL

SEQ ID NO: 941621 - protein, 43 aa, Homo sapiens
YIRAQKECGRCISLPCRYRSGNYPAYFQLFAIGHSLVTWLRLT

SEQ ID NO: 941622 - protein, 34 aa, Homo sapiens
  misc_feature (11)..(11): Xaa can be any naturally occurring amino acid
  misc_feature (28)..(28): Xaa can be any naturally occurring amino acid
IRAHAGEEFIXRRPAPAGADTHSNHTKXRERLEF

SEQ ID NO: 941623 - protein, 34 aa, Homo sapiens
MLPGTFDLDDDDDDDDDVYPGFPNRDLQPSQFSF

SEQ ID NO: 941624 - protein, 35 aa, Homo sapiens
MDPVNLNDDDDANREIPDGSRQASKFPLKGVDLKL

SEQ ID NO: 941625 - protein, 103 aa, Homo sapiens
SSSKEGDNKEIVINIHRDCLENGKEDLLEERNNYILSLIPYFFLLEERNKELMKEYNYLKEKLLQCEKEKAEREVSMKKTINFWKENLNISFWLYVEPSSIYK

SEQ ID NO: 941626 - protein, 276 aa, Homo sapiens
NSHPGPGCTASPPAPPGWPFSQRGPGRWSTTELRKEKSRDAARSRRSQETEVLYQLAHTLPFARGVSAHLDKASIMRLTISYLRMHRLCAAEELQDALTPQQTLSRRKVEAPTERCFSLRMKSTLTSRGRTLNLKAATWKVLNCSGHMRAYKPPAQTSPAGSPDSEPPLQCLVLICEAIPHPGSLEGFVMVLTAEGDMAYLSENVSNHLGLSQLELIGHSIFDFIHPCDQEELQDALTPHLNTSSLLPKPQGTVSFLAPSYPVPRSFSPHLPPWWP

SEQ ID NO: 941627 - protein, 109 aa, Homo sapiens [sequence omitted]

SEQ ID NO: 941628 - protein, 449 aa, Homo sapiens
MGQGPRAWKGRWRLTQRSRSTGLQEFARRFLCSGCYSRVCDLPLDCPVQDVTVTRGDQAMFSCIVNFQLPKEEITYSWKFQEELRTQDLSYFRDMPRAEGYLARIRPAQLTHRGTFSCVIKQDQRPLARLYFFLNGGAGRGRVSERGRERGGARCLADVRAPAVTGPPPRAETELQAPFREVLRWAPRDAELIEPWRPSLGELLARPEALTPSNLFLLAVLGALRISECDSVGVVSSGDSGAPASSSPLSQIPPRSLGSQQPPTQEVRLSVPPLSDPRVQVPAPLYSAQESKFPAPSSLRSKSPGPQPLLPQTQESRSAAPPPSDPGFQAPNPYSFRPRSPSPQSPPPADPRVQAPGPPPPSDPGVQAPSPSSLRSRSPGPQSFHPQTQKSMTLAPPPSDPGVQDPSPLLPQTQVSIQAPGPSSLRPRNPGPQPFHPQTQKSKPPAPPP

SEQ ID NO: 941629 - protein, 129 aa, Homo sapiens
  misc_feature (46)..(46): Xaa can be any naturally occurring amino acid
  misc_feature (88)..(88): Xaa can be any naturally occurring amino acid
  misc_feature (93)..(93): Xaa can be any naturally occurring amino acid
  misc_feature (104)..(104): Xaa can be any naturally occurring amino acid
  misc_feature (121)..(121): Xaa can be any naturally occurring amino acid
LTPKASDRGSWNEIAYGTSSGAVREIVQHPQTVGTGPQLFRTFTVXRSPETESMLSEKHLVSVSADNMSCPDVDSNTIHGKDLYSSGXTPLAXFKILFLEETEXDGSYSSGNDIGPLGERXYQHGFIQR

SEQ ID NO: 941630 - protein, 197 aa, Homo sapiens
SQMVGSWAKALLTSQTGRPGRGAPRLPHGVAGQRRSSPPRWGGRAEALLTSQDGETRKRRSSPPRWGGLAEALLTSQMMGSWAKALLTSQTGRPGRGAPRLPHGVAGQRRSSPPRWGGRAAALLTSQTGRPGRGAPHFPDGAARQRRSSLSRWCVIREEALLTFQMIGSQRKRRSSPPDDGQQEKGLQMEERTLEVQ

SEQ ID NO: 941631 - protein, 130 aa, Homo sapiens; identical to SEQ ID NO: 742619

SEQ ID NO: 941632 - protein, 137 aa, Homo sapiens
  misc_feature (9)..(9): Xaa can be any naturally occurring amino acid
  misc_feature (62)..(62): Xaa can be any naturally occurring amino acid
  misc_feature (75)..(75): Xaa can be any naturally occurring amino acid
  misc_feature (83)..(83): Xaa can be any naturally occurring amino acid
  misc_feature (87)..(87): Xaa can be any naturally occurring amino acid
  misc_feature (95)..(95): Xaa can be any naturally occurring amino acid
  misc_feature (116)..(116): Xaa can be any naturally occurring amino acid
  misc_feature (123)..(123): Xaa can be any naturally occurring amino acid
  misc_feature (132)..(132): Xaa can be any naturally occurring amino acid
  misc_feature (134)..(134): Xaa can be any naturally occurring amino acid
ITHPGDDRXPSCGRRFEYDGNLSLSPPLLALGTRPETQDLGDGHRRAAAVSSPWVTSASRTXANPLSTTTGVQAXCRLNTSPXRRRXCRGRVRAXCQARITPDYRYDLARVTKIAXRPQLATXSQMMVLPVXSXARG

SEQ ID NO: 941633 - protein, 592 aa, Homo sapiens
TRAVPSPPPPPIVKKPLKQGGAKAPKEAEAEPAKETAAKGHGQGPAQGRGTVVRSSDSKPKRPQPSREIGNIIRMYQSRPGPVPVPVQPSRPPKAFLRKIDPKDEALAKLGINGAHSSPPMLSPSPGKGPPPAVAPRPKAPLQLGPSSSIKEKQGPLLDLFGQKLPIAHTPPPPPAPPLPLPEDPGTLSAERRCLTQPVDPAEQRPGGASPGLVCVTALQGRMAGLGWLDFVLDLISQTEDLGDPARPRSYPITPLGSAEAIPLAPGIQAPSLPPGPPPGPAPTLPSRDHTGEVQRSGSLDGFLDQIFQPVISSGLSDLEVVPTKEVFYPRENFSHPYYLRLLCEQILRDTFSESCIRISQNERRKMKDLLGGLEVDLDSLTTTEDSVKKRIVVAARDNWANYFSRFFPVSGESGSDVQLLAVSHRGLRLLKVTQGPGLRPDQLKILCSYSFAEVLGVECRGGSTLELSLKSEQLVLHTARARAIEALVELFLNEFKKDSGYVIALRSYITDNCSLLSFHRGDLIKLLPVATLEPGWQFGSAGGRSGLFPADIVQPAAAPDFSFSLSRGVAGTRVSCPTGNQGWLGGTGPQR

SEQ ID NO: 941634 - protein, 878 aa, Homo sapiens
MLGRFEAEALEFIETEEDVTSLREAKEVLKGEKPGKEDRYRSILKTKFWQMWKTWPGDLKVVHIMAQRYKMLIPFSNPRVLPGPCPHTVVLHGPAGLGKTTLAKKLMLDWAEDNLSQKFRQAFYLTCKELICLGPCSFAELVFRNWPELQDDIPNILAQAQKILFVVDGFDELGAPPGALIQDICGEWEKQKPVPVFLGRLLKRKILPRAAVLVTTGLRALRDLRLLVERPIYVRVEEFLEKDRRAYFLRHFGDEDQAMCAFELMRRNAALFQPVSAPMVCWIMCMSLKLQRLEGEGPSPTRTGLFLRFLCGRFPQGAQLWGVLRALSLLAAQGLWAQMSVFRGEDLARLGVQEFNIRPSLDRDILRQDIVSKGCYSYIHLSFQQFFTVLFHALEKEEEEEEEDKDGHAWDNGDVQKLFSREERLKNPDLIQARHFLFGFANEKKAKELETTLGCLMSPISLHLNAVDIMLFSICLKHCRNLQKMPLQAAKAKLPENVTVSESDAEVERSQDDQHMLPFWTDLCSIFGSNKDLIILEINNSFLGATLVRILCEQIASDTCRLQRVMFKNISPADAYRNLCLALGGHKTVRYLTLQGNDQNDMLPALCKVLRHSKCNLQYLGLVSFSTTTEQWADLSLALEVNQSLTCVNLSHNELLDEGAKLLYTTLRHPKCFLPRLLLENCHFIEGNCKNFAAVLVVSGELTHLCLAKNPPLGDTWVMFLCKGLSYPHCKLQTLVLWDCDITSNGCCYLAELLQEKSSLMCLDLGLNHIGVTGVKLLCEALKKPLCNLRCLWLWGCSIPLFSCEDLCSVLSCNHSLVVLDLSQNPLGSSGVKMLFETLTHPNCTLQTLRLKIDDFNVELDKLLEEIEENNPQLPADN

SEQ ID NO: 941635 - protein, 226 aa, Homo sapiens
  misc_feature (120)..(120): Xaa can be any naturally occurring amino acid
KASPVAESPKVMDEKSSLGEKAESVANVNANTPSSELVALTPAPSVPPPTLAMVSRQMGDSKPPQAIVKPQDSPPTSLKALLSRKEQNLSRWVVLKLLKESEEATTDWPSDRAGLENQSXVGPLGKWDSPICWRLDKEGRNLLKCEYCGKVRPRKKQVFVAPKEEFCSMELALKRYNVSLLAIKFPAEEGKKNERKFQRKPTMARRSQGRWTPAAAPPGQLPRAKD

SEQ ID NO: 941636 - protein, 519 aa, Homo sapiens
MVTGDNINTARAIATKCGILTPGDDFLCLEGKEFNRLIRNEKGEVEQEKLDKIWPKLRVLARSSPTDKHTLVKGIIDSTVGEHRQVVAVTGDGTNDGPALKKADVGFAMGIAGTDVAKEASDIILTDDNFTSIVKAVMWGRNVYDSISKFLQFQLTVNVVAVIVAFTGACITQDSPLKAVQMLWVNLIMDTFASLALATEPPTESLLKRRPYGRNKPLISRTMMKNILGHAFYQLIVIFILVFAGEKFFDIDSGRKAPLHSPPSQHYTIVFNTFVLMQLFNEINSRKIHGEKNVFSGIYRNIIFCSVVLGTFICQIFIVEFGGKPFSCTSLSLSQWLWCLFIGIGELLWGQFISAIPTRSLKFLKEAGHGTTKEEITKDAEGLDEIDHAEMELRRGQILWFRGLNRIQTQIDVINTFQTGASFKGVLRQQDRVCSAGFVTDLKQDYQAVRNEVPEEKLYKVYTFNSVRKSMSTVIRNPNGGFRMYSKGASEIILRKCNRILDRKGEAVPFKNKARDELP

SEQ ID NO: 941637 - protein, 121 aa, Homo sapiens
  misc_feature (118)..(118): Xaa can be any naturally occurring amino acid
SSTDSANEKPALIPREKKISILEEPSKALRGVTEGNRLLQQKLSLDGNPKPIHGTTERSDGLQWSAEQPCNPSKPKAKTSPVKSNTPAAHLEIKPDELAKKRGPNIEKSSGRICNGCXVSS

SEQ ID NO: 941638 - protein, 142 aa, Homo sapiens
FPVKWAHCYLLHRAAEKKGDRRIRTQKALSKCCFPPSPYTKRLKATAAARRAELEGGRSRDFLGNRAASLGYLSAKHSLSRAAPGSLSGPGGASDPVPLQSYGDRKAKQSCRRGSIRCPPVERRSSKPNPNLNSVRLIAELS

SEQ ID NO: 941639 - protein, 233 aa, Homo sapiens
MPWEVAGAQTLPSWLRLNLGSICPLGAPGGRADFDPELSCLISFPGGTSLSFLVLVTGCTSVGRIPDAEIYKITATDFYPLQEEAKEEERLIALKKILSSGVFYFSWPNDGSRFDLTVRTQKQGDDSSEWGNSFFWLRPWVPCRGWALGLLQRVGPGSPAEGGPWLASEALTSTCTTPGLWGTSGELGPRPALSTMRGKLTLNSLPPPTPGPWNVLECRFGKETCARHGASCL

SEQ ID NO: 941640 - protein, 149 aa, Homo sapiens
  misc_feature (1)..(1): Xaa can be any naturally occurring amino acid
XGGREPIPLAPTNAGAGLSSQVTSRQPRVEAAEASARPSRGKGAWGGGRGGRYPPGVSAPPLPEVGRSARGSAGRGGVGFQSAGDSGRGPGAGILPAAAAAERRLCSLQEGRARRPALSDPSSSAKLQRSARQPRAFRGSADPRDGTKE

SEQ ID NO: 941641 - protein, 205 aa, Homo sapiens [sequence omitted]

SEQ ID NO: 941642 - protein, 153 aa, Homo sapiens
  misc_feature (144)..(144): Xaa can be any naturally occurring amino acid
  misc_feature (150)..(150): Xaa can be any naturally occurring amino acid
GPPEAKLMRQSGLSRPGVCSFAWAPGPALPPVGLSRPSSSSRQPLQDQTVVKEACPGTAPASRQTLQAQVVLKSASPGPAPASRRPLQVQKFLESVSPGPAPPVSQLASFSPAQLMPPGGLPRPPFDFPRPLQAPNLTSSRPLXAWASGXPKG

SEQ ID NO: 941643 - protein, 34 aa, Homo sapiens
  misc_feature (3)..(3): Xaa can be any naturally occurring amino acid
RAXYYYYAAKKTTEWRGPFGQLPRQGTSFFHTCP

SEQ ID NO: 941644 - protein, 131 aa, Homo sapiens
  misc_feature (3)..(3): Xaa can be any naturally occurring amino acid
  misc_feature (14)..(14): Xaa can be any naturally occurring amino acid
  misc_feature (18)..(18): Xaa can be any naturally occurring amino acid
  misc_feature (28)..(28): Xaa can be any naturally occurring amino acid
DFXFFSNFMFTANXISCXSVPPHVHRSXPIITIPHHSGTFVKIDKPTLTHHYHPKSIVDVGFTLCICFGFGQIYNGHISSIIVSYRNNYTALKNLCSVCSSLPSPQHLATTDLFTVSIDLPFSECHIVGTI

SEQ ID NO: 941645 - protein, 58 aa, Homo sapiens
  misc_feature (4)..(4): Xaa can be any naturally occurring amino acid
  misc_feature (58)..(58): Xaa can be any naturally occurring amino acid
SGGXLLCWRRRRQKGKETWTHCPLRAFPTLIVMSIDNFHHICNVVLIRPPYLSISAHX

SEQ ID NO: 941646 - protein, 663 aa, Homo sapiens
ALSLGVRDFHLGRVQGPGDSPDSGCRANLPAEAHPPSLMACSLQKLFAVEEEFEDEDFLSAVEDAENRFTGSLPVNAGRLRPVSSRPQETVQAQSSRLLLLHPTAPSEALGLPDLDLCLPASSTPSADSRPSCIGAAPLRPVSTSNCLNSSHSATPLGSLSQRSTVQALQPLQAARGTIQSSPQNRFPCQPFQSPSSWLSGKAHLPRPRTPNSSCSTPSRTSSGLFPRIPLQQQQVGGFEGPEQDEFDKVLASMELEEPGMELECGVSSEAIPILPAQQREGSVLAKKARVVDLSGSCQKGPVPAIHKAGIMSAQDESLDPVIQCRTPRPPLRPGAVGHLPGSNHLVQLVTAASRTPQQPTHPSTRAKTRRFPGPAGILPHQAALKQLPRNKVPNMAVMIKSLTRSTMDASVVFKDPTDWSVFSFLRNHYLNVTPNNLVHIYSPDSGDGSFLKPSQPFPKDSGSFQHDVAAKPEEGFRTAQNLEAEASPEEELPEADDLDGLLSELPEDFFCGTSSGDCPNAGQPTMSRQLWARVWSHPRGRRRPSFAVGTRIRPETGSPANKKGLSPLPWVSLSCLSLILEDIGPGFLVPSYPSPWTAEEMKGATPQQWRPAPPHRGEARSGFLCFVSSDLWLLCSSMPKVPRCRTEVWPIVPCSEIKHLLL

SEQ ID NO: 941647 - protein, 121 aa, Homo sapiens
ENLGQHTIHSLLQVPGGDHSMTLQRLIPCKQKKSERCLLVCLHLNLGMVHIQKKANQEAPSPNSDDFNRESPSYPSPKPPTRMFASTFFMQDGTHNSSDLWSSSNGMSQPGFGGILGTSTF

SEQ ID NO: 941648 - protein, 32 aa, Homo sapiens
  misc_feature (6)..(6): Xaa can be any naturally occurring amino acid
  misc_feature (13)..(13): Xaa can be any naturally occurring amino acid
VPEGLXLVACINXSLSDSQSKDERPRAVFHEE

SEQ ID NO: 941649 - protein, 112 aa, Homo sapiens
GSTSCGKELPTVRLLNLLGQPSCGKERQPSCRKELPASGLLRAVLPLNKALLHLAKPPFVRNTSSPWTQDKNSGPAWRCPQQNPHTVHLVQPHAEPQLCWRLELPASLQQPD

SEQ ID NO: 941650 - protein, 50 aa, Homo sapiens
LGNYNSTFCFYAFDYFRYLMLTEGRQAQMENVFFRPLYQYAPACRAPPCA

SEQ ID NO: 941651 - protein, 186 aa, Homo sapiens
MDSLLREGRSLATTVWVSRNPSSQNAHSVPLDKASTSLPGEPEVEASSQLSQAPPQPHHMAQPQHFTPAWPQSQPPPLAEIQTQAHLSPPVPSLGCSSPPQIRGCGASYPTSQERTQSVIPTGKEYLEWPLKKRPKWKRVLPSLLKKSQAGLSQATGHLPKRGRPPGAPSQPHSFPGGTSPELQSM

SEQ ID NO: 941652 - protein, 102 aa, Homo sapiens
MPLVTKGRPGGGNHRRSPGQAAPHPSLRTARGCWRESLQKSCRRDLEDRSACVFLGCSLRRGWFSWRAEPLCSSGRHLKTCFGSGIGPQPNGSQVFFDFPWH

SEQ ID NO: 941653 - protein, 132 aa, Homo sapiens
QSWPGQLPGRSPEAGIRGGSSSRKKPQEEETSDRSPARQRGIPASGVRGRCAGESPQKWSPCDDEHRSACVPVGGPLTGGSQSWRAEPGSFRGCLREGVPCCTCVFVMGVCVCVLGGVRLCVCLCVCARSAC

SEQ ID NO: 941654 - protein, 70 aa, Homo sapiens
SEECLCPARPIWEVYPKLRRDSDHREQAMMTMAVFVEKKRGKCGEKKDRSDGYCVCVERRRHRRHHFVLY

SEQ ID NO: 941655 - protein, 51 aa, Homo sapiens
  misc_feature (10)..(10): Xaa can be any naturally occurring amino acid
  misc_feature (18)..(18): Xaa can be any naturally occurring amino acid
WTLGLNILRXALNGFCQXTNQLTQDMSTHKAIQTEKDLQIQTVCETIHNLV

SEQ ID NO: 941656 - protein, 44 aa, Homo sapiens
  misc_feature (34)..(34): Xaa can be any naturally occurring amino acid
MGGWPAGPDQAEPDQTGSTSARSITLSSFTLLAXWEAPVPRLDP

SEQ ID NO: 941657 - protein, 76 aa, Homo sapiens
LLSRQDAQRKGAAYGLMACRRAFAPIAEAQEKMAALTDAIQDKMNFRRREGALFAFEMLCTMLWNYSEPNAVYVLS

SEQ ID NO: 941658 - protein, 75 aa, Homo sapiens
  misc_feature (40)..(40): Xaa can be any naturally occurring amino acid
  misc_feature (50)..(50): Xaa can be any naturally occurring amino acid
MGMPPTRLAIMNATMQEGQAIASEMTLILPMANLVTQLPXNGEPGYTPLXAGNLNPPGMYSVPGPKKTYIQILGQ

SEQ ID NO: 941659 - protein, 198 aa, Homo sapiens
SNPRFPNQPAHPDFSLSSGFIKKSARALAFTSEKEKGNSQNPKGPLSRRVAGREKRSDYSELASPRETPSSAKSLSPPESRSHEVVFPPPKRSCPSSTLPPRERSEFYSGSNELSKPTRLEDFGVPSLSGVSKSVPSRVRSDEGSAGSSLNGLGIPSSSLPTRGRTANPNFIPPPLTPIENPLFPISTENPFLEEKPP

SEQ ID NO: 941660 - protein, 100 aa, Homo sapiens
MFVSKIVTQNEREFPPNNYTNNSPRTTYLRKRTSFPGGPTRPTTARIDLRSADLPRNPNSTTLNVSLAREADDFTRVLLYYKGLERGRILYPLPCVSVFG

SEQ ID NO: 941661 - protein, 82 aa, Homo sapiens
IQSKVSQIIPHIHTTTTTTTTNNKKTTNQSPPPNPPPKPQFHTTPHLNQHLTTSLRLIQAEKVQLFGWGGTSQEPTTNISTV

SEQ ID NO: 941662 - protein, 81 aa, Homo sapiens
IQSEGSQIAPHIRFRLLGILSRPLSLVFGGPYKGGRGCSRSTRKKGKTFESCEAECRDDKAERRILGFSPISSLLYLLSDG

SEQ ID NO: 941663 - protein, 191 aa, Homo sapiens
PSKNLLTNPNPRFPKSPAHPKRYRTLRGIRYLTLPSSLLLTCYPVDPKRAPTFNSTDANKGLTEGLDPRHLPYPIILYSERSEHSSKLPIPKTITIRNDIRRKTTKAQKPTRQLLLLRLNGGDAILRKIAFNNVPAILLVSIDYFLFLVLIFSVVEEEFYSCNHVYPNIEDERQIRVSRVIVSFLLESAEL

SEQ ID NO: 941664 - protein, 143 aa, Homo sapiens
TNPIQVPKSPAHPTPLYKKDRKPVTDVLFADSSAGNAGVVPYSFLVPIQSPTPRARKSTSRSPPNRLLNPSENPSRKGVSKKNPGKTPELQTEIREALENYYRVESLGRVTRPALLYSPDSRRSYFKTLITVCRRGVFIRNVV

SEQ ID NO: 941665 - protein, 38 aa, Homo sapiens
MGARTRARTKGVESGFNYNRGCSIALNGSNGLEVSRFL

SEQ ID NO: 941666 - protein, 80 aa, Homo sapiens
NPIQVPKSPAHPKDPDVKPRPPDRPRDERDDRLTYPVGYESTWKVTPPDVGTRSYLYSPSISSPTLCVYPRLNPSYGTRR

SEQ ID NO: 941667 - protein, 114 aa, Homo sapiens
MKYNSLKPYEEEKALDYPATEFIGGDSGSRAVTTGRVRGSLLHAVPDGTYFTDVNDVKIPHLHEILQTLTYLCPRVNCYRNANVITPPPTIPKKKKHLLSWYLPSSEAYSPPPA

SEQ ID NO: 941668 - protein, 171 aa, Homo sapiens
MQSKVPKSPAHPRSLNSYLPRLWSKRSVEGRGKLGLGEGAGIRIGGDGGEANFWDYGAPECAIRVGHDPLDRRSEEVYASSKLRYIERFLGSGFADYAGGVNLIICDNVSYLGPNNVPRLSSINYRWLPIFLGRARPREVGGSPPSEAFEEIRYEYYEVILGGKFRGYFRR

SEQ ID NO: 941669 - protein, 149 aa, Homo sapiens
  misc_feature (55)..(55): Xaa can be any naturally occurring amino acid
  misc_feature (142)..(142): Xaa can be any naturally occurring amino acid
FGLAPTGRSGPPRPLSPAGGGAGTAPPEPQPPPPRRGGGVGEGEGEKGKGQRGGXGGRRRSRGASELGGQACRAAYNSAAVGGGGCPPAAAAGAEGGGCTVDAPSRLPPHAPAPSLAHRASLTGSAVLPHRRLPPWTLIPFXTEPRAFV

SEQ ID NO: 941670 - protein, 104 aa, Homo sapiens
MPIHGFPNRPHIQTGRNYRQKEVKYNLESRLSTGSFSEMFTVSPRGFNGQLYKDKVDSEEEPLSSSNPRLLQSNPLAPTTSKFFPNKLKKTKNKIRVKETPFLE

SEQ ID NO: 941671 - protein, 164 aa, Homo sapiens
MQSRFPNRPHIHLLYTSGPKKDEGVRRNAPAFYWERETEVNELASTNLSLTKARSRNRGRLLEGLKDMIFDKTTVYLNLALKIVLLVRRGEVSEKADDVSKEKKKDDGGSIIKSDSRYRDFQGDLLLFPSLYDPKLKTIEDLRLYKGKGRPLPSTPRALPGSTN

SEQ ID NO: 941672 - protein, 225 aa, Homo sapiens
VGSPEKLKPVGEKVQRMTMYRWTKLETGVHKCISLSSYDTCFQSGGVSRETQTSGIESPTDDHVQMDQAGMCGDIFESVHSSYNVATGNIISNSLVAETVTHSLLPQNEPKTLNQDIEKSAPIINFSAQNSMLPSQNMTDNQTQTIDLLSDLENILSSNLPAQTLDHRSLLSDTNPGPDTQLPSGPAQNPGIDFDIEEFFSASNIQTQTEESELSTMTTEPVLES

SEQ ID NO: 941673 - protein, 88 aa, Homo sapiens
MGIRVAVLYDRGEGAVGYVTSKIDLDGACYSISVLAYLESDGSFAELNLKEKRGENFFLKRQWRVRELLRILRKGLLTAIGIEVTSTF

SEQ ID NO: 941674 - protein, 42 aa, Homo sapiens
  misc_feature (39)..(39): Xaa can be any naturally occurring amino acid
FKKRARCLSYSAAQSSGSRGSAGLIPTIRMMPPDAIAVXAAG

SEQ ID NO: 941675 - protein, 103 aa, Homo sapiens
IQSKGSQIARTSKLLNLNFDLNCNSVFAGGLINPRNLRGRKEGRKIRRSSKALRTMYRDKPTNKRKYPRSHRLTSHKPFYAKPLERLPEEGLEGVLASLFYPD

SEQ ID NO: 941676 - protein, 97 aa, Homo sapiens
MASVLDAPVTRPGTPPSQASTGATELPGGEKKTCRWEKKKKTFPGSAGLTGKSIERLTRPALYLRPLLFSSFPARVTLEALPGGVPKRSASRMPVEL

SEQ ID NO: 941677 - protein, 108 aa, Homo sapiens
MTYRLNASFSDLAMVSCLMIFECNVFGRVSLTSGFIVVRSYVRAVGGRLSSFGAFVKAGRYPERCTERYMVRDSWTFAPNPLEPTGDEWGSYASGYDAEWVIEPGAEN

SEQ ID NO: 941678 - protein, 201 aa, Homo sapiens
  misc_feature (201)..(201): Xaa can be any naturally occurring amino acid
ISVHTKDYPHKCEMCEKGFHRPSELKKHVAVHKGKKMHQCRHCDFKIADPFVLSRHILSVHTKDLPFRCKRCRKGFRQQNELKKHMKTHSGRKVYQCEYCEYSTTDASGFKRHVISIHTKDYPHRCEYCKERASRRPSEKEPAHNETPLKKVGSGLTVWLPSLVKKVALEARKFHFLKAVLVTFLTILGICWGKNRNIGFX

SEQ ID NO: 941679 - protein, 72 aa, Homo sapiens
ECQSKVPKVRPHIQGECARGYGRTRARVPGGMYGMVWTRTFVLERLALFALLFRFVRKRVYAAFESGKRPSD

SEQ ID NO: 941680 - protein, 70 aa, Homo sapiens
CQSKGPKSSRTSNKGRLYSDHIISPVPYRIRLYRSYEELIREPVSCTLAEPSTGPNNLILVIAQRRCLLW

SEQ ID NO: 941681 - protein, 203 aa, Homo sapiens
EKRVNRNEQSLQEIWDYVKRTNLHLIGVPEKDGENGTKLENTLQDIIQENFPNLARQANIQIQEIQRTPPRYSPRRATPRHIIVSFTKVEMKEKVLRAAREKGRVTHKGKPIRLTADLLAETPQARRELGPIFNILKEKNFQPRISYPAKRSFISEGEIKSFTDKQMLRDFVTTRPALQELLKEALNVERNNQYQPRQKHAKL

SEQ ID NO: 941682 - protein, 113 aa, Homo sapiens
MPIRRLPKSARTSILVFSEGLIRRGPERYRRPSNILTGQTIKDLCINECGLPYLTSGLVFTLLSNSWGTKSENLRDYFISNCYLITRGMLARERKHFYASLLPAYALKRIDSN

SEQ ID NO: 941683 - protein, 32 aa, Homo sapiens
MTRLRLMRALLCVWILFAEFDLRSENYRLNSG

SEQ ID NO: 941684 - protein, 192 aa, Homo sapiens
  misc_feature (42)..(42): Xaa can be any naturally occurring amino acid
TTNPFLGSQIARTSNKTRINNYKAHTRSHNKQSLTRLRNTKXQNSNNPQNPTRQTSKISTTTPKRQTKSKTPDQTITKTSTVFTKLRSLNITGNRSLGRALAGYARPLGTVRRFRARGNILLPSLRSTLPFLSLRKAPQLRFRRSMFSRLQSGLLRQISTVTSRKGTRRECGGLRGLLRGDFSLIGVPSYDP

SEQ ID NO: 941685 - protein, 93 aa, Homo sapiens
CDKMLEQLDMRRDVQEIFRMTPHEKQVMMFSATLSKEIRPVCRKFMQDVNTLLPSLPPLPARCLLPFLALFLRLPCHSSAKKAACAQLGVMTP

SEQ ID NO: 941686 - protein, 114 aa, Homo sapiens
KSESKVSQIVPHIHKHINGGLDDVRSRIGLGTKVIYLCGKFLFAIDCRCVLTFNKSIYLFLRGGVTRFELSEKRVLEIELNMMVYYLPPIVYTGSRTAGGFDCTLWREQPPRVR

SEQ ID NO: 941687 - protein, 121 aa, Homo sapiens
  misc_feature (79)..(79): Xaa can be any naturally occurring amino acid
MGCLRLWGLKINYNVITRSCDLDALKNQNERVAYESKIRSRPNRRNRAPSLLGVRGLTNYNNAYLCSQLLEELEQRGHXGPKDENYEILESRRYDPDLNSEARALILGGGGGGGTNHLWGK

SEQ ID NO: 941688 - protein, 92 aa, Homo sapiens
  misc_feature (4)..(4): Xaa can be any naturally occurring amino acid
  misc_feature (18)..(18): Xaa can be any naturally occurring amino acid
  misc_feature (21)..(21): Xaa can be any naturally occurring amino acid
  misc_feature (32)..(32): Xaa can be any naturally occurring amino acid
  misc_feature (41)..(41): Xaa can be any naturally occurring amino acid
  misc_feature (71)..(71): Xaa can be any naturally occurring amino acid
MPSXRQKRFWTRRLTSGXLAXLDSNVFFKKGXREPFALGDXFTVNGGGKPVCAFRNKRLSCFRKTPFAKLXRVGGFYPPPGALGRRAQAFGA

SEQ ID NO: 941689 - protein, 222 aa, Homo sapiens
NYECLIQGSQISPHIHLGIFSDESRTRGYKRYLLEANVTYLYNARIGRGLRCLFDRITGSNDRYSRHRLNILLRRTVRIPHRLNRITTFKNDGIRPDIHDYFHFDAKGPIVRTSQIPKINRPKTPIRNITNYSTSNRRYYTDEDVEPDTLSMNDTPSENSNAKIYGRFGISVYRAYFLANETDGNGGLRCPVVRCCAPAASDRGVESFTAALGGGFHSGRCF

SEQ ID NO: 941690 - protein, 47 aa, Homo sapiens
MGAPACALALCVAVAIVAGASSESLGTEQRVVGRAAEVPAPEPGQQE

SEQ ID NO: 941691 - protein, 60 aa, Homo sapiens
MFVKRFRNSGWVRGILLRFRDRSGKGENSLCIEVSSLRPLMAESDVGRFFLVKVSFKRYP

SEQ ID NO: 941692 - protein, 75 aa, Homo sapiens
IRSLIRRFPNQPAHPDKLRGRERRVNDTCGSRYVGKLRNFLAYALLISLTVLPLVSLRFLVDIVFYCARFRGFYL

SEQ ID NO: 941693 - protein, 82 aa, Homo sapiens
GPGLGLGLGRTGEVRVTAPQVRLLQGGSLGARPWVGGQASDDKGGPSQPKLQAGAVQGPQQVKAPGVESAGPWAKSVQGTGD

SEQ ID NO: 941694 - protein, 110 aa, Homo sapiens
PATCPTACPHTVPKPLAAPSRLSPLMSLSPWPLPAACPTACPHTVPQSPSRLPSNLPPTLSLSPLATPSWPAPSPPLRQLLGGLWLCLPQVTMGPVFASIDVKICQEKKK

SEQ ID NO: 941695 - protein, 57 aa, Homo sapiens
MVARDRDLQQLRLGLVVPAAQPPPSWQQRQEGFDNYLRLIYGSGLLGMQSGRGSQQW

SEQ ID NO: 941696 - protein, 116 aa, Homo sapiens
GSRADVWRAVAAARNGGFPHIPGGGGGQTTVYEFEPAAVRTRVSRETEAAACIEGLVTVDFLNDIISTPNVDHIMDGLRNEGIEVRLERGENYDEETVRWADAVIAAGGDGTLLLA

SEQ ID NO: 941697 - protein, 105 aa, Homo sapiens
  misc_feature (29)..(29): Xaa can be any naturally occurring amino acid
  misc_feature (49)..(49): Xaa can be any naturally occurring amino acid
  misc_feature (79)..(79): Xaa can be any naturally occurring amino acid
SFLVAKPRLEASSGGCRKPPMSAALPPGXHKQVVKRGGVGAGSAQVRIXPVYLEGLLRVCAGGRRWWQADYLPFSCSAXAQEREQPPVRTQLQDTPSSWTLLPAL

SEQ ID NO: 941698 - protein, 88 aa, Homo sapiens
IQSKVSQISPHIQTVRCVLGNLIGVRYYSFRCSISEIEGVGATRYGLFRIGLGRKIQLRRKGDVWRVDFFGILFYVGKGGEFGWIVGV

SEQ ID NO: 941699 - protein, 48 aa, Homo sapiens
MSGVSACLCRRTFVTVRGGWVEWLSGGTGERDAYSVTRVSDALIVRRR

SEQ ID NO: 941700 - protein, 83 aa, Homo sapiens
EKNNLKVKEPVLMPAKSLRITKRNTPCGEGSQTQDHFQTRIHKQLVDLPGPSWIVRLIALLELSCEPRLTSPLQMLKPSVLIK

SEQ ID NO: 941701 - protein, 89 aa, Homo sapiens
SNPRFPNRPHIHRGCLLYRKIPKFSLAPALSPFDRTSNERVVGFKTRFSLREGAYRLTLQEEFRLALMMRCLCCILKCRVWGSGGVWGA

SEQ ID NO: 941702 - protein, 76 aa, Homo sapiens
MSYTLRSDLLVLFYKAKGKTFRYVSLARRPYRPYESPDLEPDIKLYYVLSRISLVRTSSPTLIKAYYWIVSLNLMA

SEQ ID NO: 941703 - protein, 163 aa, Homo sapiens
MTVTRPSTTARSRSVSSSSFKTRPSTPNNNKDPKTYPTLKAGDYDSSYTIRSLVFYESIGGAKFIFNAALVVLLSLTTFDIVDIISCLVLTLLSIAVDFEVCGSIVRTMRGSRRNRPLRDLPKHERLLYPRGLSVGCVGTTDNTRRRNPRARWFIFFLMRGSN

SEQ ID NO: 941704 - protein, 99 aa, Homo sapiens
TPTNANPRFPISPAHPKGTRHIDVCYNLLSSPGLTLTTCLCPPTYSTAEAPSAVPPRRIPAWVGTSDEYAYPYLEIEGSEPYVSKSVMLRGSYTTEPKP

SEQ ID NO: 941705 - protein, 111 aa, Homo sapiens
MSSLVVDVPRGLGERSRAWIYNFEGTRTGLGVCEGEGMKIGLSIIEDSSIDVAFEGESPERIANLGCVPNFLCYLRFCRRKRNLNFRKESFSVRVGYLPYRRHLFPRFLVW

SEQ ID NO: 941706 - protein, 123 aa, Homo sapiens
  misc_feature (3)..(3): Xaa can be any naturally occurring amino acid
  misc_feature (31)..(31): Xaa can be any naturally occurring amino acid
  misc_feature (63)..(63): Xaa can be any naturally occurring amino acid
  misc_feature (80)..(80): Xaa can be any naturally occurring amino acid
QSXEYAKNTGLPPKGSVMFIGPWSRMESIMXKSCKKLKLLWKLDDMTQKHQCALRSPGPGPHXATVQNSGCRTGTHGCVXQPHPPLSPNCKPAHFPQRRSWIMQALGSEDVLEEVASVNPKPS

SEQ ID NO: 941707 - protein, 167 aa, Homo sapiens
NNTHFHSSGAQEPWAEARMFAPGASLVVRSGAQELRALHALYALFPGASFPGASSFHVGVQQSRSRAFSLCAPHLLMQVMAFRAHLGTPRIHLYHRMREHSQVLGIRDRTGIPLGTALPPTTVPECDAHNGQHIQRPQEDLGWLEQDLVPGTGGAGDSRQRLDVYLK

SEQ ID NO: 941708 - protein, 75 aa, Homo sapiens
  misc_feature (38)..(38): Xaa can be any naturally occurring amino acid
HCPGSLQPSTSQLPRSQGGDCQVHIGQRRLGVGRAWPXNDQMGSTGCNRTQLVWPTAISPYLPGIQIVTPGPLGI

SEQ ID NO: 941709 - protein, 102 aa, Homo sapiens
VNPSRTLAAIGGLLDVDCSEEEIKHLIMAVRGQVSTDELAAEVKKRNRLKLMLPWLEAHIQEGCEEPATNNALAKIYINSNNRPECFLRENAYYDSSAAGRY

SEQ ID NO: 941710 - protein, 218 aa, Homo sapiens
RGPPCGSVRERGLQVLRSPWGPWDVHAHTQTRMGVIQAHIHKHMCAHTDPGIRRHTLTGRCVNTGTYRQAGICTHGHTWMHSGMYTRVHSYMTCTLTMRVHTFPGFSPHPTSHRARACLSLVAFAVWLPAPEAALVRTGWAMLRKQPGLNPQRLRTARAFLAPVACLLVGALPGGVAEGCAFPSVPAAGRGKRARWSHTGHLQLCWQRLLALCCSTSL

SEQ ID NO: 941711 - protein, 31 aa, Homo sapiens
  misc_feature (23)..(24): Xaa can be any naturally occurring amino acid
ISILEEPSKALLGVTLDSRLLRXXLSLDGNP

SEQ ID NO: 941712 - protein, 112 aa, Homo sapiens
MIIKCKILLFLLDSCYIMIIVLQFIVHNMKNNYDSLQSGQGEAAYTTSAVRGTCGDSSGVAAQGALERAQHPCCPPAEPVLRECRTDADALGEISSIERKGVSVLLLFYDGN

SEQ ID NO: 941713 - protein, 77 aa, Homo sapiens
MEEKGAKRGLEAAGKAGLATAGPGLLPRKPPGLAAGPAGTYGKAVSPPPSPRASPVAALKAKVIQKLEDVSKPPASP

SEQ ID NO: 941714 - protein, 65 aa, Homo sapiens
MRLRQLGVAKNFGVLSDNFKGKRIVLVNDSIVRGNTISPIIKVLKESGAKEVHIRVASPPIKYPC

SEQ ID NO: 941715 - protein, 55 aa, Homo sapiens
  misc_feature (24)..(24): Xaa can be any naturally occurring amino acid
MTDTFPKLYFDLCDLVGDHWDDPXPDIGDGCRSPGGRKRTRLYDFYVCPGHTVPI

SEQ ID NO: 941716 - protein, 41 aa, Homo sapiens
MDPRKVKELRAFVKMCEQDPSVLDNEEMRLLREWVENIGGE

SEQ ID NO: 941717 - protein, 74 aa, Homo sapiens
RLRARPAAPGLKARAVRRGRLSHRGFGTLVREKGEREKRAAVLSQPQKVLASLRGLSRIPRQSRRRYLTCPKTT

SEQ ID NO: 941718 - protein, 58 aa, Homo sapiens
RGKLGLVGDNLTLDGVKSCLKPRLGQEATVVKATGFLKNFLIEPLVPHSEAEELYVWI

SEQ ID NO: 941719 - protein, 57 aa, Homo sapiens
  misc_feature (30)..(30): Xaa can be any naturally occurring amino acid
  misc_feature (37)..(37): Xaa can be any naturally occurring amino acid
  misc_feature (52)..(52): Xaa can be any naturally occurring amino acid
TFMRVPSLPTKMSSMSTRMERANGRDRRFXERKAMSXTMTSLAQPEIQAEDXQYALE

SEQ ID NO: 941720 - protein, 200 aa, Homo sapiens
MQSKVSQIARTSTGSYEFRLAIGIITIGYNLREHLRRTKLPSRNHTSTLNRPRRKRIYLTNANRRPPARALLLEGPCNHGGPLVSEAVVGGVLNRTICRLTLVFALLFINRGVFRVSDKEGTPLRSPPSRRCAVVFGAFIVVRLFGRVGTHGVRNRHGIFSNVFQGPVFYAVILNAFTVRVKVIRFKKGPFDYSPLRLSR

SEQ ID NO: 941721 - protein, 159 aa, Homo sapiens
NPNPRFPKSSRTSYFIPTQTKSRPVSPRCRRPKRRLPGFTFSSRSRKMNPNPTNPGEPIFVLKRPSPPPTTAPIVPGPSDLSTSATTLDRTHLQYGDVNTQRSAPEPLSTDQNHHLKNPESPTPRGSETSSDNNDNNNDKNHITRIDLYLYPIPRRRNE

SEQ ID NO: 941722 - protein, 33 aa, Homo sapiens
MSLDEYSYLTRINDQMDLSDTTNRLISPGDYVA

SEQ ID NO: 941723 - protein, 83 aa, Homo sapiens
KSNPRFPKSPAHPKGPSPTYKTKEGFPKGDQAPEDTNLKCLTLKDPPTESNAAPSLEGAPSLRRLDPQNRDLTRQIEKPNPPE

SEQ ID NO: 941724 - protein, 106 aa, Homo sapiens
MSSVASVSSFLTISRGRVLRSIGGYIVTLRRGSISNLSHATNTVQNQTTQIVRMIASRVSGCRTEDLRERNSKDRWTTLRRDRTAFCYTDEDDHKDPRLKPYPTRK

SEQ ID NO: 941725 - protein, 89 aa, Homo sapiens
MKIVLFTLLIKTLPFSSSGLHRLLRGIGQNIFRVPRFVPPSYRDLLEKVAQDKTQGGTRSKTGSRASLMPEQRAQTEPIPKTDPYHKMT

SEQ ID NO: 941726 - protein, 119 aa, Homo sapiens
SKWKDILCSWPGRINIVKMTILSKVICRFNAILIKVPMTFFAEIEKTILKLICNHKGTRITKPIQTKKNKAGGITLLDFKIYYKAMVIKTAWYWYENRHKDQWNRIENAEINPHVYRQN

SEQ ID NO: 941727 - protein, 48 aa, Homo sapiens
QKAMSDSAPRAQALTRGKFLSEIAGTIWTPLRGTDLERDGPTGLEERT

SEQ ID NO: 941728 - protein, 78 aa, Homo sapiens
VNSRRRATRPTICTYNVVPLSQRTGVREWCTGTVPIGQFLVNNEDGAHKIYRPNDFSAFHCQKKMMEVQKKSFEDKYE

SEQ ID NO: 941729 - protein, 70 aa, Homo sapiens
RFFCLGLLSSWDYGCARTRLGDFFVFFNRDGVSPRWSGWSRTPDLMIHPPQPPKVLEITGLSHHTQPKHF

SEQ ID NO: 941730 - protein, 308 aa, Homo sapiens
MARRLWPLQTRRGFRPRGGCIFNESKRRSFTKEKRNRNRLDKYARQGYSALYQLETERYSACPEEAADALERRKGELRSAEEQKKKKKGEELRQLEEQTWSLEEEKEAVNKEVRAPLEKKDSGEVQEEAKDKGPREHKGKTRKEPVEEYQREAQDKEQFDKKELKLPNKKHPEVHVRKEPGPNTPHKPETSQFFSFQPRGHLEIGEILDIIRQKRLSHVSGHRSYYLRGAGALLQHGLVNFTFNKLLRRGFTPMTVPDLLRGQCFEELWDDTKCNPSQIYNIDPARFKDLNLAGTREVGLAGYFMDTP

SEQ ID NO: 941731 - protein, 273 aa, Homo sapiens
VCQNNQRNFLEKKLMLMSDLDCEYQISNDYDKVYSYLKSGDKKEEILVLAETQVPVFIPHPWRWTHRRPTSELHVIVESDFVKYEGKFANHVSGTLEHSHSRRRSRLNLGGQQPRREPVFTSGTLNEAGGGFAAAHQRRCRENKKSDKHCASSSVLAGKESGPVRFDTEDHKMQKCVISEHMQVEEKCGGIVGIQTKTVQVSATEDGNVTKDSNVVLEIPAATTIAYGVIELYVKLDSQFEFCLLRGKQGGFENKKRIDSVYLDPLSFESLQS

SEQ ID NO: 941732 - protein, 211 aa, Homo sapiens
VSGFVFFISEIRVMELFPRPPGGFPGIFPPPTDEDIPGPRRRDEDKSLSSSGAKEARLGRGARGGSPREAGGLRGARPAPGAAAPSPPHPGRRRRRPARPAPPPGGGARGLPLLTTPGPAPAPGAAAEGPPKPAHSQGPGIWPRPPTALNWGVFEAPAGAPTLGRGAWEWRERTPHLGPGQPGVAKMDYGSFGFMRAEGGACVLVNRVLRR

SEQ ID NO: 941733 - protein, 146 aa, Homo sapiens
KVCSFIQPAPIQCTGKPRPPPPAPREPKNQQTPQVGGPKKGKGGLEGPPFKKKQKKKILRPKTQEEFPLQNLHENNANTPPVWTWERTGPFPLKKSGGAFEDGKGQPLTKQPKFGKTKKKTTMCQQRPPPHYEPWGLPPPTRSRHP

SEQ ID NO: 941734 - protein, 158 aa, Homo sapiens
MDVRRPPQRDDDIERRIPLNIHQNPIRGRVADVKNHVIPGSKNHHMTRRQRMLLDAHVNVLDPLIGELLTVLATSLNELQFVTPPHTDIDDESVPQQREKTYHDEVRSQTTAPGRQSRPRPQSGVVEAGLQQWVGAVDEGGGGVGEMTADVSVSRDHP

SEQ ID NO: 941735 - protein, 256 aa, Homo sapiens
LQNFLEKRPSKAWPIGPIGGGGGHCPPQQAKRHKIQLNMRGVARSQHLLGPWHAFRAGQLTQIWKSKKALLTKVVYEDRKKVLLRRIIIWILPFVTGLKIMVPPMLLLVLLRPFLSRRENKQLVAAINNAQGSSLLILLIFRTYLVMWIFPPLILFLFPISFGFVFIFMDRCFTVAKVNKKVHNKIQPIPFNTRGIPILVHRVQDDQQPMKTVSQYMTKLNNKDKLGHVPFDDKFTSTFGFWTGILSFAFSKTTSS

SEQ ID NO: 941736 - protein, 330 aa, Homo sapiens
  misc_feature (182)..(182): Xaa can be any naturally occurring amino acid
SRKTTVLGLANWAHDTCGAGKETSQDQVARDVDGQGVPVVGSAATSVPGRDHVGDPWEAGSASPPTGDVGLVEERQSGGGPPCSPCPTTTGVVPPNPNRRIDNVKQAVRWKVHNLARVHHRKINVQTAMVKSEDDTHGPTYKHYWDYHQKMREVDHDILHPNIRNRDIIVVIQNRTIRLHLXKVNYQNQEWFNKQFQIQLHPGGNRLQKVRILRRQVQDHLQPITKHVIVINNEDHDQIHNDDLGTQLNLNLNLHRPGTQHVINLVHHITEQYHVIINNNDAQFQSSYKQDCRRIWDHRRTGRSLDTTEPQMEQVNARLDLVHIQVDQTR

SEQ ID NO: 941737 - protein, 201 aa, Homo sapiens
CKKKIFIFLHQQTALKKKKPVLGLQSRENKGKFKKSTLTKGQFLTLKDTSQKPTHLTLTQALAGVIFFPPQDFQTLVDRGPQGGGDPVPQGQLATPGKTGGVTGEGRSPPPRNAQLNPTTGGLPSPNVNSVKFKPPLPWGTQSPFYEPPSALWNSENTDFANGEIPFTRRFNLINITYQKQWLTVSVNMFPERINLTINSE

SEQ ID NO: 941738 - protein, 278 aa, Homo sapiens
QTQLKKPLPTWYPQTTTLQPTLASLGSEAVPGACPAEATRVRRSDSRGLTGPQGWPRRAGCVVCEPGATGAPPQDPGEPRPQQNRGPRPPLAHGNGTWRPLPFPSRGPTTPPSGGDGSQPRAEPKPPGSGGSARGTASFSSRRSRYLWRRGAESVGQWFGLLPVNKGIVSPTATVVTSGGACRASINVASPSASYLFRWTETITLTTSPLGFLLFTQMNRPTVEQRRKKKRLPEKNHQTQWELLVPAPAFVTSQLHLVLVLTFLQGPIGRKGPGGQFL

SEQ ID NO: 941739 - protein, 53 aa, Homo sapiens
MYPTRLQGINCGPHFTPSFANLGRTNLNTRGPPRGGPGGELPRGPTGLRPRRS

SEQ ID NO: 941740 - protein, 207 aa, Homo sapiens
  misc_feature (10)..(10): Xaa can be any naturally occurring amino acid
MAQGALPGPXCSRTWGGLLPFCAGLGRGGIGSIPPFPQQQRGRHPNTEAQIAGGRGGREREKEIPRQFKRSGKNDPKQHYRAGGGLPAQGLPSVPPPVPPPPPPTQKIPLNPQEGSREYPIIRGQEQEKPQRRGRGLGESSGEQISQARGGPKGAASRGSSIPPGPPPPQSCPRGPQLSSTLLFGPQGFQGGEVGRRQASAGKVWIP

SEQ ID NO: 941741 - protein, 58 aa, Homo sapiens
RSRIPGIELTRPIEIRLPLVRESLQLLSLWLFRRHMFGLKTGMERMPSLAENYQGRGS

SEQ ID NO: 941742 - protein, 79 aa, Homo sapiens
  misc_feature (2)..(2): Xaa can be any naturally occurring amino acid
  misc_feature (12)..(12): Xaa can be any naturally occurring amino acid
YXRVNPRVRSIXISYKGRQLNLNPRYPEILQHVICKDWINLAEKNYIILNMTENIDCDVFRQHRGPQLLALVEEVLPRH

SEQ ID NO: 941743 - protein, 98 aa, Homo sapiens
MAGGFLELEELLVQAGTVPVAGTKHQQDQYDQEAEEQPCGQGAGCFELSGAVRGCPALLTVAVPVAVTDPMSMAFAWTFLCPQEIHTLASMVYTHQGR

SEQ ID NO: 941744 - protein, 180 aa, Homo sapiens
GMKNSLFYQKGEELGQYNIQAPNQKCSIQMQEKPERLGQGQGGELGPLDIQTTPAKKLGPGLFCLHWSKEKKDWVASPGLEPQQSGQEEKWHKGSGVWPGYTTRFCTGLAQPFPPKGPNTQENSALAGRRSKHFSVPKRAKPSSQKTEQNWDQTAPPQQEHAHEEAFPEHKQGPPKAVGN

SEQ ID NO: 941745 - protein, 247 aa, Homo sapiens
MDDDIAALVVDNGSGMCKAGFAGEDAPWAVFPSMVGRSRDQGVMVWHGLKDFYVGDEAQSKRGIFTLKYPIEHGIVTNWDDMEKIWYQIFYNELRVVSEEDPVLLMEVPLNFKANWEKMIQIMFEKFNTTAMYVAIYVVLFLFASCCTIGIVMDFGEGVTHTVPIYEGYALPHAILRVDLAGRDLTDYLMKILTERGYSFTTTAEREIVRYNKEKLCYVALDFEEEMATAASSSSLEKSYELPDGQA

SEQ ID NO: 941746 - protein, 121 aa, Homo sapiens
  misc_feature (26)..(26): Xaa can be any naturally occurring amino acid
MGPFPSASTSLSKSGNSASGGVLTQXPQESPKSLCGEGAIAIFIKKGEGFLEFSNVSFGQLNSHGASQGRKNRGSEGGCPSPGAATAGVPPMLPLLLLLQRRSVPNAAAAACAAALFRVRA

SEQ ID NO: 941747 - protein, 154 aa, Homo sapiens
MVKGFFSHSSNYSAYLSEMKTENKFTKQLIPNRVLEAVRGSPAPNRPVLGFPPDKFDSPRFSVFQNTKEKCGGCVFRRKIGPLLDGGGTATSPPGGGGPRGAVGLGGPPARLARAPAGGAPDILPKSLGGPGCGGRRAPSGPPAAGGQRGPCVP

SEQ ID NO: 941748 - protein, 178 aa, Homo sapiens
DGILPGWSQTPELKQSSCLSLPKCWDYRPELLDLAGSPIFNFLRNRHAVFHSACTILHPYQQHTGFQFPHVLTSFVFFLCVVLFVLFVFVLDRVSLLLPRLECNGMMSAHCNLRLLGSSNSPASASQVAGITGMCHHARLIFVILVEMGFTMLVMAGLELLTLDDPPALASKVLGLQA

SEQ ID NO: 941749 - protein, 244 aa, Homo sapiens
LGLRGRRGGLASYAETPEALARAAKKRELRLLLINTPPGDQEKRGNGAWGPSPGEKGPFERDCSRPCGMGIAEGQEVEFSLQGCCGKRRPGVFGSFPRGMDMIHLKAGRIPQEAKRIAVKAEMEAVFLENLRHTAGVLAQEDLVGLLEPINTRITDPQYFLDTPQQATHLTEDRKTQPPIKMDIFHWQIMDGNLTGNIREFLPIVGHVQVAQVPGRGELSSPGELNFPYLFQLLEDEGYKGFVG

SEQ ID NO: 941750 - protein, 114 aa, Homo sapiens
GYGSPFIFPYTMTCCWGLMFSQNSRKPKVVVISSNNRELRTKKNLHKSKMNRFKGVNANRFQLKASNSPRCSGQRNQQRKETGSYGLDFPTLTEPQEKRTGSCQPLEKSQNTQP

SEQ ID NO: 941751 - protein, 133 aa, Homo sapiens
QLLPIDLTSEIDSNTLIVGDFNTPLTALGRASRLKVNKETRDLNYTLEQMDLTDIYRTFHPTTTEYTFCSTVNRTFSKMDHTIDHKMGLNKLKKIEIMSSTLSDHSGIKLEIDSKKNLQNHANTWKLSKPALD

SEQ ID NO: 941752 - protein, 85 aa, Homo sapiens
GEEFIRNVFHLCHAFIFQAKRSPSSAFSWLQYEIAKVIWCLHTKKQRRDLKSQGEELQKTKPKNSPLRSPEKLATTFGLLEAVMH

SEQ ID NO: 941753 - protein, 110 aa, Homo sapiens
  misc_feature (1)..(1): Xaa can be any naturally occurring amino acid
XAHTCTYARMYSHARTHAHTHPCVCVCVCVCVCVCVCVCVCVCVCVCVCVCVCVCVCVCVCVCVCVCVCVCVCVCVCVCVCVCVCVCVCVCVCVCVCVCVCVCVCVCVCV

SEQ ID NO: 941754 - protein, 300 aa, Homo sapiens
CLFYWKQDSSQRQGPGEEARRVQSWVTLWASRGKRGLKIARTPKEAPLKQGKENKKGKLSQGGERKRAPTPQTPPPPSSKFPPPASRCQRGGGFQELTTASKLQGPAVKSREALTLGGPKQVFQNPTVHQSPPKKVPEKVKSRVFTQHGHKQQSSHEVSLGWSGILSCHSWGPSVVALRSMLPVLRSCVQVVGSGGPRSERLEEHLKVEALAEEPAGLGGPQSGVSGRLNLVRNPWLGLRSLRGAFSSGGFPYGSSWTLARLAGTREQDGDSGAGSRAVADAARSLENRMARPGTFLSSL

SEQ ID NO: 941755 - protein, 86 aa, Homo sapiens
EVISTAPVKLPTAESTGMTPEKVPVSEVMGTTLAEMSTPEATGMTPAEVSIVVLSGTTAAQVTTTEWVEKKDREININENEGKDER

SEQ ID NO: 941756 - protein, 62 aa, Homo sapiens
VPEEAAKLVACLLLLLLNGRDNCYSVKAATRVPGLPFAASQAPWPLALDSFLLVAFVQYPGR

SEQ ID NO: 941757 - protein, 204 aa, Homo sapiens
YGNKYLLNFPYKDALKRPKTQAKGRKNKGKARPNFPHGPAGKPVTQKSPSPKAAEGAGRPQPRGILNWSRPPRTARMGVTGPVPPACRRTVFPPTPMKGLEVNPPAREDGTVGPPMPYLPLAQASLPRMAALPRPHVACKPEVVDGVPGATVDTCVRGEPAQDPQQSFTHLIRSPFIELPAASHKQGVTCEHGRGLRASGLAHE

SEQ ID NO: 941758 - protein, 166 aa, Homo sapiens
  misc_feature (89)..(90): Xaa can be any naturally occurring amino acid
QARILKRKSQGKAKTLPRGTQKRKTHGVGSCLYLKDMAGPRGPCVLFFHLLSFPGPPPPPHQPQIHTGGALLGIGGREVPPPGAGGRHXXAKNPPLREGEARKGKKATIAIGLGIKRSGPGAIFSPLLKQKEETTGPQQAGGGLSSQWAICFPGACFVCSPKSRKE

SEQ ID NO: 941759 - protein, 55 aa, Homo sapiens
MALDFGEADPSLPAFDSPRGPPPPPPGGRRDGEDFLPQGGFDAQQPLEFIVLPPQ

SEQ ID NO: 941760 - protein, 259 aa, Homo sapiens
MRRLLLNRGPECTALGHKLPSGPHPQGQVAGVGPPFLSCFGSSPLLFPFLKVPAAQRSFGALSCWEKIKGTQQPSFKKNSESPFWGASALGKFGVCVLPFEHSLLLPGGEWSGTARPGRPKADKRQGDGGVVASGNQLTVGKILRPVGGDDLPCFPRRWVSVGDSMKNLYHILIYEGFDSGDIGGIHQEGDCLPFPNLHCPFEHLLVIITGSKSGNGHHLWNSTEVKHTLVSEFEREEMTSGDVVQCIGYKFIQALPGQ

SEQ ID NO: 941761 - protein, 201 aa, Homo sapiens
MGNGGTRAKCVSAHRLSSVCVFVCVPPPMCVVSGGPMGVLVAEAGGGGSPGPWPPPSQWGLGSLKEVGPDGRQPSRGARSGKTLSRGPCPPHHHPSRWVQANAKARSLSFQGCPTPSTPSGQAEEKGAGGFSSGREGKAGLGKLVLHSFKEKTEEERLRRRTGGHRDMKGEWGALPSQGLPRLKASKFFSTPPINSTNASI

SEQ ID NO: 941762 - protein, 121 aa, Homo sapiens
  misc_feature (73)..(74): Xaa can be any naturally occurring amino acid
  misc_feature (98)..(98): Xaa can be any naturally occurring amino acid
GKERKFVETGFGEGAGGTAGGFPKRTEGGASARPGGSGGLATDPISGPAFSFPSASWGPRPDSGPSTCTCEFXXGASHKLPIHLTHGAPVVAGGLEAXEAVALGVACALFTDDLGLEEGWE

SEQ ID NO: 941763 - protein, 51 aa, Homo sapiens
  misc_feature (10)..(10): Xaa can be any naturally occurring amino acid
  misc_feature (21)..(21): Xaa can be any naturally occurring amino acid
  misc_feature (30)..(30): Xaa can be any naturally occurring amino acid
MVRSLGIVWXILTRAEENCAXRRVIQWGRXSNPPRRLGVSASDALNSRRID

SEQ ID NO: 941764 - protein, 161 aa, Homo sapiens
LKQVFRQKGDNEFIDMLNNVRVGNLNYETIEAFQKLDRQINYTDGIEPTQLYPTLKEVLMANQAKLNSLPGKVYTFQAKDPENPFLVSMLDNNLMVDKVLHLKTGAQVMCVKNFTDELVNGTLGTVLFMATRKLYMKFLEQYVYIDAEDQAALAEMRFVCN

SEQ ID NO: 941765 - protein, 160 aa, Homo sapiens
  misc_feature (63)..(63): Xaa can be any naturally occurring amino acid
LPSQFFLGGFSFSSSRPRSFFPNFPSRGLVVFRVPGVKGEFQNDPSPAPPPGEWSLGWFGMFXPWFLGFPGTGSPFPGKLGGSRPGPPGGNVFLIGWFPGPFFSPPGKFGGGPSPRWWGVPPRPGFPGGFCQPGVLRVLAFGPPNKGRPRGGGGNGGGPA

SEQ ID NO: 941766 - protein, 177 aa, Homo sapiens
  misc_feature (11)..(11): Xaa can be any naturally occurring amino acid
  misc_feature (25)..(25): Xaa can be any naturally occurring amino acid
LSEFMNLFSIXFFSDGVFGGFCQFXPKCHRLFSLVLDVLACVALSLLALDFLGPILPFPLCCRFPILNPCQSYLLPIGPGPLFAFPFLPSLFFRAVVFSGIFPFPGSSLVLPGAMGSCFLCCDSCFGWGFSGTPGSRGALLPAQVLLSVWGPSPGGVGSGGVPVSWVAVFWDVSSSE

SEQ ID NO: 941767 - protein, 322 aa, Homo sapiens
GLEGLGGVRFSAEDFAVPKGTGNGACDFGCREGDGRHSYFLYRFFLPVSALQDLRKSILRTLLDKIKDKIKERDKEKEREKKKHKVMNEIQKENGEVKILLKSGKEKPKTNIEDLQINKRKAEEDKDTQRNDKRKRPTLYSQSIQTICSGLLTDVEIKPPKRILPDNLPPYVGKPLATKTYDSPIPETREFPFVSLKEPRVQNNLKRLDTLEFEQLIHIEHQPNGGASVIHAYSNELSHLSPMEMERFAEEFVGLVFSENENSAAFYVMGIVHGAATYLPDFLDYFSFNFPNSPVKMEILGKKDIETTTISNFHAQVKERIL

SEQ ID NO: 941768 - protein, 166 aa, Homo sapiens
  misc_feature (121)..(121): Xaa can be any naturally occurring amino acid
  misc_feature (123)..(123): Xaa can be any naturally occurring amino acid
  misc_feature (126)..(126): Xaa can be any naturally occurring amino acid
  misc_feature (162)..(162): Xaa can be any naturally occurring amino acid
TPNIFFAMLSNLFQNSPPGTVWNRAVILAQEMVPKIPPPPGPALSSPPLNALPTINLPTAPPPHCEPWMGQRDVKATWVPPCPWESLLPQNRDLLSPPLLSSKGPPDRPMADCGQIPQSPXPXPPXKAKPPAAEPPGPEARARGDPPRALLTATIPPPPDNXPGHL

SEQ ID NO: 941769 - protein, 170 aa, Homo sapiens
  misc_feature (129)..(129): Xaa can be any naturally occurring amino acid
  misc_feature (136)..(137): Xaa can be any naturally occurring amino acid
MSPPPPPPPPPPPPAPPGPRPWHWEPPAPPPPPPGDQKPPSPPWGGAQLGELGAPGPPQPEDTEKKDLKAQTKGPPPPPPPPPAPPPPPPGGPGGGPGPPPQLDGGGLFSRGDRGFPPPPPPGLSLSPXQFVSPPXXNPGPPPPREPLRGPPPPPPPAPPPPPLFPPPTH

SEQ ID NO: 941770 - protein, 66 aa, Homo sapiens
ARCVTRVAVAERVERDGWQAAASPGRGVPQKLARGRLWDDDDATRPSQFGGGPALMEEMEAEPQAA

SEQ ID NO: 941771 - protein, 145 aa, Homo sapiens
GRQCAGKVRQEIVDDHHVGAVFQVAALDLPRVPRWRESARDPRRIGNVNQPPEGAPDRTLVLVGQRCPGDAQTGQPCQRGLVVSDDRIQWGIDAPAAQVLELIDVVAQLPTDRRALAIGRLRPPSHAGCYALPRSSPVRIVARSP

SEQ ID NO: 941772 - protein, 288 aa, Homo sapiens
GKRFAHCDLPPATVARWASSKAQFKFAPERQEPPLLLDTALRILQAVGNLRRCAAAPRCNPGATPLMTALCMGKAREPVLIQAFVSELAVERLDVGILRRFASLNQFQGHAAGVCPLVQRSARELRPLVRAQALGEPLKRAAWSSARATYKPEMAVVYDNVDRFFREVINDGQALQATPIGQRVHHEVYGTDLVSVRPAEPVARARHITPWRRRRRRTAKPASRYNLVYAFVIRVQTLALQQNVQSPVTKAPTLMRQSNHPRFEYLVSWRSLRFVMQHAAGQPDKPAG

SEQ ID NO: 941773 - protein, 207 aa, Homo sapiens
  misc_feature (99)..(99): Xaa can be any naturally occurring amino acid
MGISFYSSTPSLLIKHRLCLLSIQTFDFSVGEDTGEHHHAERHFEDEDEGEGQGGSSGHDGPEQGQAEQLQGRYQVHTEGADIFYVIDILVVFWRHYHXIHPLIKLSAFKGGYSHFQENSKNHGQGDLPEQIPDNYGEAHKQGNQQPRHPLLLDFLNLGLVPRCHSLAHDSERVGVTEKMDSGSSQPGQAKEGTDAAHCHDDSRSRW

SEQ ID NO: 941774 - protein, 121 aa, Homo sapiens
MRKKIKNYKGGLGAPEGKRLGKWGGGEEEGGNQKGTDPAARCPGPQTGGAEERPRGAPGTGHQPLGAPEKEKNQACGGLGPNMAEKGAPKDPGGGRERLLPGGGGEGGGGAGGGGGGGAGP

SEQ ID NO: 941775 - protein, 157 aa, Homo sapiens
  misc_feature (142)..(142): Xaa can be any naturally occurring amino acid
GAIWAFCFQFGGKLELGLGLWRRIAGEPLGQGWEKGSLQEAPRFRLERGGLRLGVKKVIGLVGEKLCFAVGEKGGGGGERGGGGVEIGEGRPPVCYGAARRIGEGQREEQAGGRGGGGVMGEERGKLAGAPRRSGENSVKGXKGRMKRSKPGAPLIG

SEQ ID NO: 941776 - protein, 110 aa, Homo sapiens
  misc_feature (103)..(103): Xaa can be any naturally occurring amino acid
MLDFLKINPMKASGGIPQSKAVFIGKGEERPRALFPRGLFVVGDLLSHLERRWRNEENPPGKKRLYRGEEEPQDLRREEDPLLLKNPFLKLQIENLQNQSREXENQKEND

SEQ ID NO: 941777 - protein, 60 aa, Homo sapiens
YIIKTITSEDVAEMHNILKKYHQYIVECHGITLLPSSWHVRLNVDGVGIYVIVTRNVFSH

SEQ ID NO: 941778 - protein, 75 aa, Homo sapiens
CPPELPLCASVTLLWGLTAGYELARISGALLALHLDSWLTCSYQEVLAGSLLPGALLASLVGGFLIDCFGNDCYG

SEQ ID NO: 941779 - protein, 192 aa, Homo sapiens
GQLKSNTNINQPKIREKRKKMKETNEKKKNIKQKVKKFKQQYGLDKKKKKTYNISYFGALNEIKKQEIQGVVHKTCRPTKRHPETPNGNGGTEKQDCPELVFPLQRPTALNKGFANNFFLYFFLFSFFFFLFSFKAKNNRGQRNETKPAACPFEKQTQLLPNFHTNSPKNPKHHGILHALQPPRCKKGIVQE

SEQ ID NO: 941780 - protein, 67 aa, Homo sapiens
MVLWLAQNAQLGDAEAQATCNFPPPELNELTHVDVCLPPGGKAEMLRSPLQTGSPGWGERAPPNFAT

SEQ ID NO: 941781 - protein, 130 aa, Homo sapiens
GYDSVRTGPLLRRPGMLASHMSALSQSQLISHMGIRSRIAQQLPITGGEQVSDPLPSSSTHEEELEVHFKISGERRPETDPGKTAQNPRTRTQKDPNEPHKPVSACALLFRDTQADIMGQNPRATFGDVF

SEQ ID NO: 941782 - protein, 130 aa, Homo sapiens
  misc_feature (88)..(88): Xaa can be any naturally occurring amino acid
MPPFVRLQFQASQPKRGALLTAWLGAEQVVSLGWQAGAGRQVGGLPSSREALIPKVKPYQKTLILVPVADIGEESRPSGKRVEVPLQXGALLTPLVTQPPEQGKEGARVFTLALHSHFGTYSPWDVREAG

SEQ ID NO: 941783 - protein, 110 aa, Homo sapiens
MTGGGGGNQRPPALGGRFPPALSRPLWGPGQALPVLLFLPLPQGRPNPVKFGSLCRVFIPADLPELPPMGGNAWWGGWPPLPIPPSFPSPFWGGPPRVPPVSPVPPEALQ

SEQ ID NO: 941784 - protein, 72 aa, Homo sapiens
MPVSLGTSILGTGPEHMPWTVLPGFGFLPCAAGESERHDDSIAGHTLSRGAQQGLGRQSWPCWEHCVEALEG

SEQ ID NO: 941785 - protein, 134 aa, Homo sapiens
MGLPGTISTMAASPDFKNLGPSSSFLPERRSIFSFSSANLHAMWAREEIQYRGIAGAYLAWMVQDNHLSREASSFHWWVIFAVTTNVATTKNLDRHILDIEAHIVPRKSFTQSFKVHFDRIYFRCNVDWSKGEH

SEQ ID NO: 941786 - protein, 126 aa, Homo sapiens
SLPQIAEPGNGVGAGAFAVTASEMLASRFSCKVMDETSYWSPVDSFVGASMAAVILCILALVGANMLLLLASGWILAYGGVLFLGFGGSSWTSYMAINYYMTVLGVAAQLFAMVLLVGMDRTLIVD

SEQ ID NO: 941787 - protein, 85 aa, Homo sapiens
MTHILASSISNDRNTKAPCILRHLVHCCRLGPPTGQLFLRDAEGATPHPHPLEIHTCINEVLGLGSSYHIASNDLEIRVFVFYVL

SEQ ID NO: 941788 - protein, 33 aa, Homo sapiens
MRKKRTPAAGCVTVFRNSGYRKSVLDAEIVRIE

SEQ ID NO: 941789 - protein, 143 aa, Homo sapiens
KKTYLFARPGGGLGVRFRALGPKRGPGGPVGGAAGPRGTAGPEARPPAPAVGGTRGGGRARARRGGAPRVGPAPPGSPGAARPSGAGGPGGPRGPGGRPGGRAPWAARGGLLPCRGAGGPPPPPRSGGPGPPAVSPGAGLGPP

SEQ ID NO: 941790 - protein, 100 aa, Homo sapiens
MGLHNTYYVVAHLHDVLSIGAVFGIICGFIHWFPLLSGYTLDQTYAKIHFTIIFIGVRSNFVPTTLSRPIRNAPTLLGLPRCIHHMKHSIIWRLIHFSNS

SEQ ID NO: 941791 - protein, 34 aa, Homo sapiens
LLAAASVVNSIRPDRWIPSNYPITENFRAIYLTL

SEQ ID NO: 941792 - protein, 168 aa, Homo sapiens
MTVSKGLPTAKGEGNPRVSWHGLSPHYLMSVPPNKKFEEAGGEDLTTSYRACKGKKGCLCGFPMSRKPGDTGQVAEAPNSVKTRRLNAQVQEKQKWDFGGGFFVVLKNKHIIHLLVAPELLAWPPDPSPLPTKPKGVGREEEDEKFQGWGMLQSLEIDRDSEPGEPWE

SEQ ID NO: 941793 - protein, 99 aa, Homo sapiens
QVNNGSWTLADVLSLLWTNMEQTTTLDENIEKVLMKRKTEDEEAKSEKLEKDKEAKEGSEPAEHEDLQETDEEGSKNDASMTDYSLTADNMLTNRAPEQ

SEQ ID NO: 941794 - protein, 33 aa, Homo sapiens
MTCPQVTCTGFSYTSKHTGHVNRRNIDTSPIVR

SEQ ID NO: 941795 - protein, 89 aa, Homo sapiens
  misc_feature (80)..(80): Xaa can be any naturally occurring amino acid
MVDRVNFCCRNVHILMFFCLAVEWMLAMLITMIRPKPGLCTKKRLTCTTELTDSCNTDTDCTELHNSYFYGCQNKSMDSXFLQKKCMDP

SEQ ID NO: 941796 - protein, 93 aa, Homo sapiens
  misc_feature (85)..(85): Xaa can be any naturally occurring amino acid
  misc_feature (87)..(87): Xaa can be any naturally occurring amino acid
MARHDTLDRVTFSCRNVPILMFLCLAVEWTSAMLITMIRPKPGLCTKERLTCTTELTDSCNTDIDCTELHKCCFYACQNKSMDPXLXRRSAWI

SEQ ID NO: 941797 - protein, 91 aa, Homo sapiens
MPSSACFQREYGFVKKGCNATQSESAYKHLRGTMEGPDSSDSCLLIHICWKVDSEASDGAADHTEYLRSGGAMILIFIVLGARAVISFCIL

SEQ ID NO: 941798 - protein, 101 aa, Homo sapiens
MAGGREKVGSGTATEPGVTREAAPVVRGGRRGERPGAQKSSCTLRALSTSFLPVKNSLFLSPFSGSRRWFWFSSATAIIFLASFSALYSFMGSMLLSSPAA

SEQ ID NO: 941799 - protein, 78 aa, Homo sapiens
QASASCASASEYINEILLTERDYAGTLRFLQSAFLHRIRQNEADSVEKGLTEENVRVLFSNIQHILEVHKDCLVALEY

SEQ ID NO: 941800 - protein, 169 aa, Homo sapiens
KNGMLLYLFRRAASITHATQTWQKRFGENGLGTLKLRGPGEKVLRQKPGVQGGPRARHCGEGNAGESGPTLQLGTRGRKERGQANVPLPQEQTTGPQEGLQAARSLPSAGGSRGRKGWRAAGRQPSTKRGRPGRHGGKGELAGHPGPRQSALQFAGLRPPQSRWGQRWL

SEQ ID NO: 941801 - protein, 48 aa, Homo sapiens
MSGTEGGEEEPPVYGQRGNTVPKFRERDSGEKSLGLPKPQLLFCKTLE

SEQ ID NO: 941802 - protein, 258 aa, Homo sapiens
YIVKTKIICLRLANPWEEAQNAGLSFMLPWAPTRQAGRKKLAKELKIFGSSAKEQQALLLPKPKPANTGLDCSQEGGPAKIPKKVRQKDLFLELPSLPSPALSKPRRTENLGQKLGPSEKDQTNSCEAVSVGPVSPVKKPPGQGRPGSPPGITPCTQLSAGHSAGDRDGQSLFQKTTVGETCMAAGLSLLQPPFMGSWLGLKIVGPQLSVVQKNTSSSKKPLKLGARLGTGLWKLSQGCYFKALRTASSFMGHSQGAL

SEQ ID NO: 941803 - protein, 330 aa, Homo sapiens
PRNARPVPCGDAQRIQPRAASPALRCPALRCPAPGARPERRIHVRCDMSAYPGSCDELCWGESSEPENREGFGPVIKESGPRVVQDGSSPGECGVTMNKSPEGEIRICWQRRTTIWTERMAYVKAWSTTPHSGRSTQSSSPSLRKRLQPLPPSRPPPEPEPGTMVEKGSDSSSEKGGVPGTPSTQRIGRRNFIRNSKKMQSWYSMLSPTYKQRNEDFRKLFSKLPEAERLIVDYSCALQREILLQGRLYLSENWICFYSNIFRWETTISIQLKEVTCLKKEKTAKLIPNAIQICTESEKHFFTSFGARDRCFLLIFRSGRMAAVKNAESR

SEQ ID NO: 941804 - protein, 88 aa, Homo sapiens
RPLARLSLRFRFKVRTFSRTSCQNRCLAYISCSQDIHGAILRCSGEKPALAFKNHRKQGCVCIQMLSLAAEGPASSIGPQSEVSSTEP

SEQ ID NO: 941805 - protein, 221 aa, Homo sapiens
  misc_feature (19)..(20): Xaa can be any naturally occurring amino acid
  misc_feature (54)..(54): Xaa can be any naturally occurring amino acid
  misc_feature (169)..(171): Xaa can be any naturally occurring amino acid
  misc_feature (175)..(175): Xaa can be any naturally occurring amino acid
  misc_feature (178)..(178): Xaa can be any naturally occurring amino acid
MRERHTEKAAAESSSSSSXXDTDTAAAQREREQQQQQQRRAAAAAEQQQQQQQXQRCSCAAQRQRAERDTAQQHTHTESAAEREQQRQQQQQQKNNSSSSSSSSSSSSSSSCCSSGGAATLQQQNKTEQQQNNTTTAHSSSSSSSRTAEQQQKKNKTTTTSATTTEQQXXXAAAXKKXAAAAAADDSITHTQRARERERHTAHRERDRDTHTHTHIHTHTE

SEQ ID NO: 941806 - protein, 65 aa, Homo sapiens
PAPVMQRAESQRRELEPHAQPEAGEGLLPYYHHSPYKHAHIPAYAQHYQSYMQLIQQKSAARRGQ

SEQ ID NO: 941807 - protein, 49 aa, Homo sapiens
HADGRSKALLSSDRLPEVASLAAIVLSNSTTLAAARRGQRFSYERLRFE

SEQ ID NO: 941808 - protein, 173 aa, Homo sapiens
NKYLEDELVPKSIWALGLSSGVSHPWAPRRGAWVPSHPEIKKRNGELGAGLQCAPFLGPSPAIYRKGVVGKKKTGISRRKGGRAVVDYTWFCWFPGGESVCGGGRGPSDLLLEPVVKDQPEGAPHAPEEEDHAPLKKAFPPAALRIFLQQWGEPVFMMLAPLRPGCIIMPRRP

SEQ ID NO: 941809 - protein, 310 aa, Homo sapiens
  misc_feature (72)..(73): Xaa can be any naturally occurring amino acid
  misc_feature (80)..(80): Xaa can be any naturally occurring amino acid
LQHRHRFQEAWRGVRPAVGRFLFGPRGHPHRALALRPRCPPPPRALPAEVPPVRSPALSSAGRIARAGAARXXKLDGLRXTALFLCSGLARPRVAAGEMMQEVSSSLVSLADESLSKSEEEPERQQLLSGKRGGGKLRRGGAGGLRRGARRKGWGRRRRRRAGSPAQGKPGKKSAGCGGGGGAGGGGGSSSGGGSTQSYEELQTQRVMANVRERHPPQSLNEAFAALRKIIPTLPSDKLSKIQTLKLAARYIDFLYQVLQSDELDSKMASCSYVAHERLSYAFSVWKMDGAWSMFASTSRRTPHPLSRAG

SEQ ID NO: 941810 - protein, 307 aa, Homo sapiens
PQTTLMTQGEGGAGRGGTLGGGGGGRLREPRRALAAGLGQGGAEQERRAQAGGLRQSGERGQTGRCPPPPPRPQHSKNKKPPFTAQTTQGSPAPQPGAPSREEEPGGAGRGPPGADTAPPPTLAPGGRDRQRGTEETKPQLPPNPNAGWAIQAGTAGPRDFSPHQTFVLPQAGSLAETAPRGAGARGSEAQGAWETGKSVVPKFFPAQASALASRKQGQVRAGETQAQRGRVVWLQTRCSVSTVVEKVELAGVGGGVVVVSVEVLSLVLEEAVTQEGYHHHNAEDQEHCDIISTEPVLGMGIPASGQ

SEQ ID NO: 941811 - protein, 113 aa, Homo sapiens
MWASPEGTLRSQLASPKLKNQLKSKEGPKNKKNAKVSFQTKPGKSGTNTSASLYWLPKPTLVQSEGTAQGCEYWASLGPSWRWTTKETNPCLPNPAALAFGPQDKIEWRLPLG

SEQ ID NO: 941812 - protein, 31 aa, Homo sapiens
MRLEFYYYENKFSEKKTNWAFNYTNLNDKTP

SEQ ID NO: 941813 - protein, 107 aa, Homo sapiens
MSGLPVGFPNKGIPSANLYKGGTKTKAKETTTKIGSSKTILKEHFSILKKAIPVSNESKPARSCGPIRSSPNCATTPSNPPLKVLQPFKRYFTAKKKGKNNRRSSKK

SEQ ID NO: 941814 - protein, 282 aa, Homo sapiens
PQLTFLKGPKKPGQNFGQVVANKKNRFEKPKTKNRHTLKRKPKWPPKHSPSPPKVLRRFVIINQSFTTNPKGPMETNCPETGPPPPIKRGGAGIRENNHLPPRASRADLVAPPPPAAPQPPALMTPTTTARPTPRTANAAQRRKAREAPNTHGPARHHINNGSLSRIQEFRAIFQLFTRTAINLFLQLSKLACHVSSVEIQYRGIAGAYLAWMVQDNHLSREASRFHWWVIFAVTSYVATTNILERNILDIEAHIVPRKSFTQSFMEHFDRIYFRCYVDWGK

SEQ ID NO: 941815 - protein, 302 aa, Homo sapiens
EQKRRKDRPGIPGCENNTKKTKIGKEKNQIKIVVIGNVDSGKYKNTGNLSNKNGGIDKRTIEKFEKEDAEMGKGSFKYAWVLEKVKAERERGIIIEIFLWKYEKSKYYVIIIEAPGKKDFIKKMIIGKSKDDCAVLIVAAGVGEFEAGISKNGQNREHALLAYTLGVKQQIVGVNKMDFSEPLYSKKKYEEIVKEVNTYIKKIGYNPDTVAFVQISGWNGDNMLEPSANMPWFKGWKVTREDGNASGTTLLEALDCILPPTRPTDKPLRLPLQDVYKIGGIGTVPVGRVETGVLKPGMVVTF

SEQ ID NO: 941816 - protein, 141 aa, Homo sapiens
AFNGLTFINFNISSARAWGKGLGSVGIGGPCWERGGSECPEFSGLGEKFGFHASGVLLQGDGDSRGGEGEQGGSAAAPPGGTLGLGPGVGAAAAVEGGGGVQLDPERKLAFEGDKERGELQGEKPEELLGFVLLGRAGQKQ

SEQ ID NO: 941817 - protein, 141 aa, Homo sapiens
MAKRSKAPAAIRRSGNCPVTNPIMWVTSLAPTTVANSPTARPASPPPRPNSGGTSPQKLRPLPSPARRLICFPAFPRRRPAFPKGFFRALPNPKNPFPLSKKPSRATNSRRILFVPPKIRKKRRSRSPRSTPGSFMKPIPP

SEQ ID NO: 941818 - protein, 227 aa, Homo sapiens
GVAQFIGKTGTERGERRARKPGAGAPFHLKNFHWTLKASSQSLTEGHWQPEVQKGAWRGGGAPERRAGRGRGGGRAGVRSAAPPREGPAAGALTSLARLLRLLRRLGELAGAAALLPHVLKNAKGQRLPQVAHGERPKSGYWEKLSKKKGFPGTISTMAASPDFRDLGLSSTFLPKRRSIFSFSPSKLAGDVGCVAVDDRGVAGANLPRVVQDDDWGGELSTSCGGS

SEQ ID NO: 941819 - protein, 109 aa, Homo sapiens
MCKTLSSPPPPNPKTKNLKPKDPPKQLPPEKPFLFFLSSKVPDGKPSSGKKNKEEPNLATNNPRSPQPPLEAREEGKGDGKRMAARQEPSPSQKTNKNLEKKKKGPNQL

SEQ ID NO: 941820 - protein, 35 aa, Homo sapiens
MAELAPWVGFVGRDVEASSLVAVVVVGAGVGVRAP

SEQ ID NO: 941821 - protein, 128 aa, Homo sapiens
MNALLPAYSAFATASSMGPSRELACPGRGSYAPPPINWNPLMVSFRGTSFPIMTCEDLSNLEWLREETLFFPCPGQGQLFFLRKFIHTQDGNDILEGFVVLQDLLPPTGNIVMPPANNVGIHDTRGGV

SEQ ID NO: 941822 - protein, 103 aa, Homo sapiens
MRGGGRRPRTTSNGRGRGSGSGNGMARASGRLGPMTAGPAGAPPAPTATARYIPPAQPPPPPLPLPSISGPTPGLGPALGGAAGSSKGGLSSAMEPSGGPGAR

SEQ ID NO: 941823 - protein, 245 aa, Homo sapiens
SGSAFVCGGLQGRVVGGSGEEEPRNCVTGASGGGHWGPLLQMPIGIPGAAIGGSGYRVLSSSTWVGGSHGSNSLEAGPWAHHFVFQEHVVLWREPHAGPEDVLDAAALAENLIDHRAAGRHLWLLEEEAEQGQPGVEGLRLGVHLSSEAHTLAHSVSSPRSSMMGAASSQSSHVLCSPSFLVPPSISSEVYSSSARFLLPTFGTNLMTTLEGLFAGRLEHWVALHHVVHHVALGHLLRAELQWRR

SEQ ID NO: 941824 - protein, 271 aa, Homo sapiens
MDAGVTKSGRNVTITIRHLMHGKEVGSINGKKGEEVKKIREESSARIKNTEGNSTEKIITLTGPTNAIINAFAINKEKLEEDINSTMNNSTAASRLTKDPEAGGAGHPVRLPEWKKRVYQNKEIRESTGAQVQVAGDMLPNSTERAITIAGVPQSVTECVKQICLVMLETLSQSPQGRVMTIPYQPMPASSPVICAGGQDRCSDAGGYPHATHDLEGPPLDAYSIQGQHTISPLDLAKLNQVARQQFHFAMMHGGTGFAGIDFSPPEVKGY

SEQ ID NO: 941825 - protein, 146 aa, Homo sapiens
MRNPTAPFVWGLTAPEVSWARAKPSQSPQGQPSRGPRLGPPESHPQVCATLGLRAGGVCSHRSREYRTLPGRGPLERQPPRVPVSTPPGSENKVESRPPASPAARSCPLSAAPTLGHSWLLLGAMQPHRAPAHPGPGRRPSLPDPL

SEQ ID NO: 941826 - protein, 167 aa, Homo sapiens
MIEAPVPKPYPFPFQQIPGPPGGRRLSEGGTAEPAPRPPQPGGGPPPGLGAVPDPPLGQSPGPGEGREAGAVAGPERLWVSKLVYENNPFLQGPPNCSDKVKEIIFSVIHRGQPEGKNIDHSRKFAKRLKLPPQINVGDTELLQAAPVPTPEETDIRDVAEDHGQPF

SEQ ID NO: 941827 - protein, 133 aa, Homo sapiens
TAKKGNRAPRPGPPNPEKPPKQNSRAPPPPKETPKPPPPKRKNPAQNTGGGPQKPTKPQTRPPEARPNPSHEGHQATGTKGGTQRNGQGKKEKAKGKKKPQKKGKNSKKAKKPGPKTKTSPKDKTLSKANPVS

SEQ ID NO: 941828 - protein, 134 aa, Homo sapiens
  misc_feature (30)..(30): Xaa can be any naturally occurring amino acid
  misc_feature (93)..(93): Xaa can be any naturally occurring amino acid
  misc_feature (98)..(98): Xaa can be any naturally occurring amino acid
  misc_feature (115)..(115): Xaa can be any naturally occurring amino acid
MGVQKPKKKHLLSKATELNNQLETMLPKSXLHCHFSKLQRASIKPPLSKCKVLEKDCTPVEKGFQKAVKQKKRRGPIQEAAVREEKTNTHQEXNHAVXKKQNQGLPPVKKENMEXIVLKTWGKLHPPPEALNPT

SEQ ID NO: 941829 - protein, 196 aa, Homo sapiens
QNKKKPEKKKPKKAHPYRKPNPKNVKTKPAVPPRKPNPLKRKNEKTQNFIPTLCGENAVCSQKKKPTVTQTKKNAINPKQPKEKKQKEEKKKEPNKKKNHITFHKNEQPKGAPKKKPLKNIPARTKPSRTPRQSQKQRPLPNRGTECPAKSRKQPSDHHPQGQVAGMRHPFLSCLGSSHLHFTFLKVPATQRSFRD

SEQ ID NO: 941830 - protein, 206 aa, Homo sapiens
GSFKFELRAGPSFNISEEGSKGEREGPRSRATGVLGSPQPLGANPPPKDPFFPRGQKGMKKGMKGTHAGANKQKKKRGFWHHHIWAQQEERKEGGLGEQAASVKGWETTGLDARGTFPGPTATEDRGGFLQGPPKGFFCGPWMGLEEIGLINPHLAVFPGMRAPGLLPGLCSGEGLQRTQHQGLQRQGLHQVRVPDHSPVERLQVL

SEQ ID NO: 941831 - protein, 142 aa, Homo sapiens
MSWYSHLPYIRLYPELMSRRSVSLRNTMKPMKVRSFLPAPLMAFLSLSPKKAGVFLKDFTTANMPSSRSPDISRQKLFSISRPFILWYSLKTATRWARLRELRTALNLDSSVPRRFSPAAYSSWASLWASEKSTFVLSSRFP

SEQ ID NO: 941832 - protein, 103 aa, Homo sapiens
ENLNSQSCLFAAESCGQTGIPPNVKRRMSQNKKKSKRALLSFLSLRRRLLAFLEKEICDFLNKWATGLNEQSIPFPKGKNKKKKQTEKKPKPPTVIPKNLIKD

SEQ ID NO: 941833 - protein, 193 aa, Homo sapiens
WGKLPTLLGKRGPKGLPRAHPQSKKTKKEKKRNLQPSPLSLGFWARERGEKGRGGLALKRPEKEKVTGQGCKGAQSGDWGRMTCPKEAHLTQPPVWEGASARHPGGKGDFKKPTAGSPCGPPPPDIVEAKIKKRWARQGEAPGKNRKVLGKPQGQQLLWTEKPRVSDLHPLLQALVVAEHLHAGLFFWVVGWL

SEQ ID NO: 941834 - protein, 194 aa, Homo sapiens
RPDMFIRPAPTPPRGEGPPKPNPGGQGGQGETGARQLPPPPPPPKNPKQTGPQGPRARAAQGIRGLLSPQQQIPKSSPGQKTPEEKPQKMAALFHPPHPKAPKGAPPPHPNNLTKRNLKKPGQPPDPFKPQRAKKKKTSKKKLLENPQNVGVQRGTGGKTGGVRPCCRKPLYTEKILLLESLLWALRKPSSYRS

SEQ ID NO: 941835 - protein, 134 aa, Homo sapiens
  misc_feature (43)..(43): Xaa can be any naturally occurring amino acid
  misc_feature (48)..(48): Xaa can be any naturally occurring amino acid
MKGWGLWGFPGFLQTPKPEFCWSRMSTAKSQSSPPFLPPSSPXCFNAXQIAWLEMEGGAGARINLKLKPRDFHIIEAKSQSRAGRCCQRPGSREAKEEGARGKGDTGPNPGFPPTAGAAQGKARRGRPRPPGGR

SEQ ID NO: 941836 - protein, 314 aa, Homo sapiens
QKGFNYTVFDCKWVPCSAKFVTMGNFARGTGVIQLYEIQHGDLKLLREIEKAKPIKCGTFGAISLLERCCTKCSTFNRFGLFSRDDLATGDFGGNLHIWNLEAPEMPVYSVKGHKEIINAIDGIGGLGIGEGAPEIVTGSRDGTVKVWDPRQKDDPFANMEPVQGENKRDCWTVAFGNAYNQEERVVCAGYDNGDIKLFDLRNMALRWETNIKNGVCSLEFDREDISMNKLVATSLEGKFHVFDVRTQHPTKGFASVSEKAHKSTVWQVRHLPQNRELFLTAGGAGGLHLWKYEYPIQRSKKDSEGIEMGVAVL

SEQ ID NO: 941837 - protein, 133 aa, Homo sapiens
TNALPSPRANSDSLLIYCNGQGWLVPERRARATARTHTVINFFKNERLEELSGGAAAAGGSRCCPAVEGNPSARAARARAGGRVAGWSGRRRFRELLDWSPPPRVAGPPPCPPAEAPGPPWALLCAGPAGAEV

SEQ ID NO: 941838 - protein, 122 aa, Homo sapiens
MKKQFGPPPAESPPKTNHPIQTSIPLHGARTTKNRTKGAKTLKNTLFWKKKGGPERKIQTKTQGPNPQKKPKAGRAGTTNSQNPQFKQKAQKKQQNPEVSTKIRKRAKNKEKINEKPKVGQN

SEQ ID NO: 941839 - protein, 165 aa, Homo sapiens
QQEPWLHLENRDLREKIPPARAPPAKTTFLSKGPAPRPPRPPPPAPKPEKRRGGQARPPRSKKQEARGAQKKGKYTKNPGWPPGPRKILEPKLGGLPEKKKSGPPGKKNGPFLEKGEEPKESGAGGLKERTPSNPQEPQKIPQPTVSEKFTHVPPQSPQKTNPNN

SEQ ID NO: 941840 - protein, 122 aa, Homo sapiens
TTKKKLFLLGLQNLFQLKRISFVTQQGPGTSWLEFKKPEFWLPKKSILYVVAYKPQRPPPPDAWPALCPPKKSSCPPACLNEPLLEVKNLPHPFVHFQKHRLRLCLLLLLWHAQQRQKPAKI

SEQ ID NO: 941841 - protein, 256 aa, Homo sapiens
MREQKSQKDTTQFQKTIAGEKVTEKDQQFAKVLEDAFLGEGDLYMPGGGGLIPGGGMPFGVPRAGGSPIGGPMGGLTPGGGAKMPGGGVALPTGGGGVPRPGGYCVGAPAILAVAATAAAATVPLPSGVITCWDGPPTPRTGPANPAGAWGIGTTNWYSSASCPTNPRASSSSSKWYPSNASFFGGGPTTVMDTKFFPTQQQQNQKPLFFTLWLLRILWLDLFELITMTEVQIHMLLKSLKGAMKIRPFCRINLIL

SEQ ID NO: 941842 - protein, 292 aa, Homo sapiens
  misc_feature (122)..(122): Xaa can be any naturally occurring amino acid
  misc_feature (170)..(170): Xaa can be any naturally occurring amino acid
ELRCLLACARVRFMASNDYSQQATQSYGAYPTQPGEGYSQQSSQPYGQQSYSGYGQSTDTSGYGQSCYSSYGQAKNSYGTQSTPQGYGSTGGYGSCQSSQISLTGCSPPNPGYGQLPAPSSXSGSFGCRSQSSSYGQPQSGSYSQLPSFGGQQQSYGQLLSYFPPQGFGXLNLFNSCCGGGGGGGGGGYFGQDLSSMSCGEYEVVAVYGNKDQSGGGGSGGYEQQDRGGRGRGGSSGGGGGGGGGYNRSSGGYKPRGRGGGRGGRGGIGGSNRGGFNKFGGPRDQGSRHDSE

SEQ ID NO: 941843 - protein, 135 aa, Homo sapiens
WVYSKFIVIKKPGRKKFTGLQQKGVLSSGGSLNPASSAQSPEKPLSWYHPAPLDSECEKRGCTPELKKGGGPTGQKEQPNWRNLHKHSKGCREKEQFPTPHYSLLKRERVRQQQKTMFFILKKTSKGWSGRSKKQ

SEQ ID NO: 941844 - protein, 60 aa, Homo sapiens
MGGEGSSYSSLLIHNCWEEGSEARVEPPIHTVSLRSGGEIILIFIVLGAGELSPSASCRQ

SEQ ID NO: 941845 - protein, 132 aa, Homo sapiens
GKAKTLLKGKRKEICGNLKRGNLDTPPQAQDQEQSGLFLDVEVRKGVSIYQQFPSKKQPLRSRGAAFLILDLCLEIVEGVTGLHHVGEGLTSKGLHEDLHPTPERERQGQGGLFLDVVVRKGASIYQLFPSK

SEQ ID NO: 941846 - protein, 148 aa, Homo sapiens
MTASADPKKNKLLSFHCQGIGPGSPPPPRFPPPLSLTRPEGESTPRPRPPPPRKPLVRRPGGPGTVGTRKPGRSSGPRPRGTPTLAKPPPEYQGRKALRRKKDGKSPEKRLKSSWMAGLEPRKGAEIFRPRGGMSHTAVFTFLGIHST

SEQ ID NO: 941847 - protein, 126 aa, Homo sapiens
MPFSQLSSFCQTFFNGSHQKEGLFWEKVKFTCQKLLESFDGLLQGYQLPQKNCEDLSNLEWLKKETLYFPCTGQGQLVFLKKFIQTQDGNDILEGLVVLQDLLHPTGKNVMLNAKNVGIHETRGGV

SEQ ID NO: 941848 - protein, 111 aa, Homo sapiens
KKKLYFLGKQPKVSEKRKTTTKKLKKSFRNKGTSYCHPSSGKHHFKAGPEPTAVPSNPKGTRARPPPPGTALHPLLTGASKKQRAAAFPPGSDPGLEGGTEPPPPPGGRVT

SEQ ID NO: 941849 - protein, 237 aa, Homo sapiens
RGPSLFKPAKDTPGAQGSWGALPSLAAEEGQSPEPPWAWEKELPAPLFGAQRQKKKGGGGAPGEPTFNVNLEGKENQRAVFSLGGSKGPAQDPEGAGAFQREGTGLTAAVTQLSGGRVFGIRVFRAAEHHNAFRCLPGATGHVVAVGQEDLTSYDGGPGARRSSQVGGDTALEVLGLGFSWELRANLTSFPSSDSILMTFLGDWVWLLFLFWAVVVFEKSRSTSIGALGVLAASGLA

SEQ ID NO: 941850 - protein, 133 aa, Homo sapiens
MPEVPSLRKDGVGCGDYSGRRRVKKDRGMKAESARRPGPRTGAGGNKGSWAAHRTGGLGGHSPPSWPSRVSGRVAPRRGLAEQAEHPGTPGQKDPRPPVPKTQARLLSNTPPTCDVSPEKVTGKFKTKRKPQK

SEQ ID NO: 941851 - protein, 221 aa, Homo sapiens
  misc_feature (1)..(2): Xaa can be any naturally occurring amino acid
  misc_feature (4)..(4): Xaa can be any naturally occurring amino acid
  misc_feature (8)..(8): Xaa can be any naturally occurring amino acid
  misc_feature (93)..(93): Xaa can be any naturally occurring amino acid
  misc_feature (97)..(97): Xaa can be any naturally occurring amino acid
XXPXELPXFRDAPPFLPSVAPTFQWKDTTIRLEGQPPNAGEPPSPPGPPITPAEAPGKPPPPPPPGLPRLPGPLCPRRQTPYQPPMDSQAAPXTPPXLAPPEEENPSRPRAAKLSPGPPCPTLAPPAALPPIPPPGPPRAGRPESPRGPSLPPPPSPSQGPCIGRRQAEGGWAEDPIFISQAGGESVSVVPKLNKGGQRLFPTLPDGFWPKQGSFKEGVGW

SEQ ID NO: 941852 - protein, 103 aa, Homo sapiens
MSQRVSALFLSGATPSPFSFWLKTRVKPRALRKEGRPRKTSFSMPKIPFTIVEKGGIPDTFFNMDSRRTATLNPTAQWVDPFSLRTSEALSTTTLCTSFQFSL

SEQ ID NO: 941853 - protein, 145 aa, Homo sapiens
IIQDGFIFPSAGCIPHQPEPQTASQCIHPDDLSRKEGRKPPPKCWPRGTQTGACRLSMQAPPKFSHGDKGAAAWAPESQPKCPEASGDGPLGKSLEEGGNPQEDGRRGPPANLEEKGGVVPPPPQAAEFWRAEVLAEELVAKVRA

SEQ ID NO: 941854 - protein, 186 aa, Homo sapiens
THKNSIYFSGPQHKSKPTAALLGPERGPGNRGERNPKAGRGQGQFRPPAQSLGAAVTKGVFAEDTEGHVGGAGWAGELEYRGAVDETKRGLSPPGSPPVAGFLVPPAEGSRLWEQGTPIRRRELAKGVETATSPQNSGPNTPLSWAPGLLAAWSLLPEARLNGLGPRVFVQAPRGRLPCPVIRLRP

SEQ ID NO: 941855 - protein, 221 aa, Homo sapiens
KAKTGLFNEKAGSGYKKQKEEKEDGGLHKGGGGGRRGGGWARRGDSRGKSSKTALKTTEVTKGQTRGAPLASLTQKKRQGRLPARRRGGGGKPSALGAEGEIQACGPADLLPSSPDPLGLPWWPRQGEPAVEVSGLRPLPQCGHPTQKFALPLPILGEPGSKFLLRELGEPTPFCLEVEFRNVGSWSEKGLGFAAKPGCPSPAPPGPGPLRCCGISSLPEH

SEQ ID NO: 941856 - protein, 167 aa, Homo sapiens
SESNTFIKYPRKDKHKPVKNKTEKRQAWGSNKKETGAAHTGPRGGGRGHKYCRGEEREPKGEGKAGGGQREGSGGLDTAGFGPGRHPPLTPAASCFTVGPWASDSPPSSSYISPPSSAEASWYCWDSDTRAFMLLSASENSISSMPPPVYQCRKALRRNKAVNRSEK

SEQ ID NO: 941857 - protein, 64 aa, Homo sapiens
MQKENGKIAETQDFNGAPGDFSGETYSLKKGGLLGPETSFLGWHSDFTWGNGTSAGSSGHLIGQ

SEQ ID NO: 941858 - protein, 180 aa, Homo sapiens
GDWKDLIFSISFFPQTLRSFSIKEANNPPRQKIEKKKLKPGSNFKKEGKKKNPEHQKIEKKKEKPRPPPPGKGKKNGGGAQGSGGRGAGGAGGGGGPPPPPQEALTKKKKIRGLSKKKNRGPQNKKGRGGTTPPPQALPRHPSLTIEPGKDTPSPRAPPPPAARGSPPPFHPSPSPPPPR

SEQ ID NO: 941859 - protein, 110 aa, Homo sapiens
  misc_feature (50)..(50): Xaa can be any naturally occurring amino acid
ISEKQPFKPVEPKEGGKKKNIFFPSEFDYKKKGAEGALPKENDNPQVPRXVFFFFFKKKKKTNSTQGHAKKFQPLPTPPPPPQAQKNTQQRAPFLERGERKEKKKTKGAP

SEQ ID NO: 941860 - protein, 287 aa, Homo sapiens
WTGIVPDIAVGTKRGSDELFSTCVTNGTFIMSSNSAFAANGNDSKKFKGDSRSAGVPSRVINIRKLPIDVTEGEVISLGLPFGKVTNFLMLKGKKKVFIEMNTEEAANTMVKYYTSVTPVLRGQPIYIQFFNYKELKIDSSANQARAQVALLAVNSVQLGNLVLAASAAAVDAGMAMVGESFVLRIIVENLFYPVTLDVLHQIFSKFGTVLKIITFTKNNQFQALLQYADPVSAQHAKLFFDGQNIYNACRTLRIDFSKLTSLNVKYNNDKSRDYTRPDLPSGDSQP

SEQ ID NO: 941861 - protein, 156 aa, Homo sapiens
SGGGLRFNGHYEGIEHRSKPGPRPSPPSAGNTARGPQTPGSAQGGAAPPPQLEKRKPILLAGDKSGEPLGPVRGPYSPPEGRGGPGGHCGAREFLKTQGPAPPGPLPSPRPVCGDGATTLRVEKAELKSSNERAGGAWGDGEQAPTQSLLSRRGRC

SEQ ID NO: 941862 - protein, 223 aa, Homo sapiens
  misc_feature (197)..(197): Xaa can be any naturally occurring amino acid
SQKKSHFYFLAKQVPPGGEFTTEKGKKGAIHSDLERLEGPEGGPTGETETLHTINWNRFFRFPTGTSPEGLDGAGAPRGKGTPPNHPPTWAGPRSPAGDFLGVRALDPGGGVWQAPTQPGDRGWAKGQGRGACQLRGGAGHTEGGAGAPARAGARGGGTGKGSHGRRSRPCAMYFSSPTCPYNRPAAPSPAPCPPRXGASLAGIVARRRQGVVVVAAAQGPGR

SEQ ID NO: 941863 - protein, 152 aa, Homo sapiens
  misc_feature (95)..(95): Xaa can be any naturally occurring amino acid
MTKKTVENKGKGKSTEKFSLKAKMKNNQPNNLPPHPRKEREKRNKNPQGLSKKQPKKRKAKTGEGGQPPPMECQKAQGPGFKKTQKGPQKTGKTXLIEKKMERKKKEKGLKTDPAKKNKNEECHLPRHNSLKIDLQFAPRLALLNHSSNGQC

SEQ ID NO: 941864 - protein, 249 aa, Homo sapiens
ELTIRYIGEGRKGGTFMSSSQGQQPLQLAGGSGEAGSSWGSSSKDEPQGCLDVPTGGLQGPQAQLIVLDAHVTELLQLGLPLALKAGLPTGLKGILEGLAEDIIGDGLSLTGHQRTFVRSLRNDPGCQEWVCENCSPEFLLGQGGGQLTLGYGPGPTAPLYPREAGRELGVLLQGVDLVFGGKSSSSSESPSNRKPPGISRYELEGMLREEELFPGIGALPATELQNQDNGIYEGWVSWHQRIKHIGIS

SEQ ID NO: 941865 - protein, 149 aa, Homo sapiens
MRIWILHCPATHPISPQMKKSQPWEAAELRRLPTAPVKNTPTGEHVQKEQNPGTAFHEEKLGPKDGGGGGGGEKASAKRTFLRFYTSDPDAESPELGGVLASSSSSESPRRPRFFLLLFSPEELSSLDTNSLLLKLSLSCLEADLDDEP

SEQ ID NO: 941866 - protein, 129 aa, Homo sapiens
MPQQHLDGLNNPINGGPRGSTTKGRGPTTRKAPRHSPRHACEFKLAKQAVIHCHGTPTFKNLKKLTRMVVRIGSEGLCVLGRNGGITLEEDSNDSSSSFKTKGKRSDNQEQQSLNILRLVSRQEGCLDS

SEQ ID NO: 941867 - protein, 165 aa, Homo sapiens
MECRVGGPGDTLGAPDVAGEKEFQEAQRLEGKAPGKFPPVGAPPLPPPCPPPPPRPPPGVKPSGQKAQGQTNGPPPPSFSWAGVSGGGDSAPGPWQGLEGPGWSPVLGIRGMEPGPGSSRRKGRARVAKARGQEFAAEVNGPGVHPPRGRAAGKKVAVAGVEVGA

SEQ ID NO: 941868 - protein, 84 aa, Homo sapiens
MKHYVLPGEFVPPETFQGTCHPQGLPPKKPRLPTTGHLWAFKTSEAVWTAPPQLKLSQIPFSQTLTPPSLREWASRLGQSITNK

SEQ ID NO: 941869 - protein, 128 aa, Homo sapiens
MWENFISKCMKGEGEGGPRLFAPPFVGLRGGGPPEGWGDRAFLPAEAPSPPKLLLLAPSTLGPLSPPPPGGEREENRFNPGGRGCRPPPPPPPWEPRPPSPPPPPPPPPPPPVASFSFFPSLGLFPFF

SEQ ID NO: 941870 - protein, 139 aa, Homo sapiens
MCINLFMDPFPRRAAPPGKGFGGSYTAVPEYRTEPGTHQGPVNIGGRKPQKGISHHYFTTKNNRKDTVPTQPPPKGFEAEVNINSLSQGTAPTRGPGRGGAGKGERVGPHGPGPLKPPTPPSQENHEAAKDKKTLAALL

SEQ ID NO: 941871 - protein, 102 aa, Homo sapiens
EEFQLYLKAESPATMPPLLSIALGGGGEELGAFCQAQGPGGAPLAWEEQEGLLTSSGVVPWPDESCEWGPHLGVPGRGKKRGSAQPHSGVRGTNLQPEPDRQ

SEQ ID NO: 941872 - protein, 100 aa, Homo sapiens
MVQKGGISGFLIRRLANLKKFFLPKKKKPEVEKLKRQNFLFLENLAAICFWEKVRQVPVAENELAPRPLFVRAAQPHPGRKNPHALELILLRERTPAGFG

SEQ ID NO: 941873 - protein, 191 aa, Homo sapiens
GEIKQFPGGFLGLLTTLRQGGKLFSPCPGTKVFGGKGKPQFGGGGALVPAPPRVSCSYRPAGSVAVGPGGGGGCPGPAGAGGGAGRRGLGGAALPPGGGRPGGGGPLLPEPPGGPVGSGGPALPSGLSSGVGLGEGLGGWGWGGGGDKNLCRKGPMLVAGPCFPPRHWVPEDPAFSSQGYNIPQTQSWKAA

SEQ ID NO: 941874 - protein, 190 aa, Homo sapiens
SAQKKVLLNELHAGAILFFPGAAELSVTVQDPERGEAGGVGGLEEGAWLLGDVQSFSGGLQPILGGAGLKSPRRCKTNNQISLLPGLFAVFLQRFLRHGLQKFRVLPGDFYRDRQSNGIKVKKLHDHLSKTERNVRVKSVGSHRGDPQKVLVFALREVCQPGHPLKLLVQLPQQGGGVEHLPLEDFSSPF

SEQ ID NO: 941875 - protein, 104 aa, Homo sapiens
PPRPSCMILQELGRAPASLWCDPPTPWVPRTPRVGVWLQEGRFFKAQGSKVVVGAPTCRRHARERLHQGMAPRVWLRVWRVGNSRCHSYQEPELYLLPQVSKVN

SEQ ID NO: 941876 - protein, 103 aa, Homo sapiens
MTPHVWGLVKILCPQKPNLRLCNLGPTKKFEKKEKKKSKGKPPAAVPNRGKFNLESPEPQEDTGPTTSMDPAPEQQLRKATQIKKLKKQSQVVCVGIPMFVNF

SEQ ID NO: 941877 - protein, 114 aa, Homo sapiens
MLIWDRGPALKREGEIHCAASPGAKERKATGPLAKRKGEGREEEGKDPPAPSMGATGTGKVSVNSSGEEGRHPSCGDYRSTSPMPPKAKFPWTSLALASVLGLPIPRKLTALSF

SEQ ID NO: 941878 - protein, 104 aa, Homo sapiens
KEVSLYFLVLQKKVAKLVAFWGLVKKTKSQILVRLPRLFLGFNLSWGSSSRGGSSGGSRHRGSSQKGRRISQEGLDLFSKWEGVIRLHKKGQDSFVPVDERMGY

SEQ ID NO: 941879 - protein, 270 aa, Homo sapiens
MAELEKNSLNNDLCPGPGANASPLPYTTPGSRDRAKGTRQKSWGLGSRVAVWRSLLLTIPRAFRPLPVCPPTPSPPVPQRRKGVGTAGSRTGARVAWAAPHTAGRGDNPNFYCPPWHSPPPPSSRPQNEKLSKIQRAAVLCARLKEGRCVVVWLVLEDRDVFLSDSMKEAKATILPLCIRGLDISGSCSDWASSQASSEASEEAFPPPADLLAPSEEEAAPTGHTSPSGLSRLLATGGDLFVSTPGEFCKMTLEKNLLYYMFFHKMAAKS

SEQ ID NO: 941880 - protein, 221 aa, Homo sapiens
PPPEMLYYMVSSVINEGSLMPMRGDRNICVEHGTVPPPATQSEGGWGLNGGLASLLWGRLRELSRKKGKPGKKGGRNVQASVTPMFCSLFSRETSLAAAFFLLPPCCFFCFFDGSSPMGAGFTKGISSCSPGGMNPFNFSGTVMPFSVVVVLQDGADGTGSGAHGSIEHMDKHHLVHQLLGLPISDLKPESLVIRAIRTGEQLTEGSGARKPGLQVKLLTG

SEQ ID NO: 941881 - protein, 121 aa, Homo sapiens
KTAQFIIIIFDGYRQCGPPHLDKLFWWKGLGTDRQQGFWFSFFFFPFSFFFFFKKKAERLNGGGGLQENIHLKKIAPKTPPRKEKKKPPTKVKPQTKNNKKGACTEKGLWGKGKGGDFSGH

SEQ ID NO: 941882 - protein, 102 aa, Homo sapiens
  misc_feature (46)..(46): Xaa can be any naturally occurring amino acid
MALLLCLQRFRNVESDIYQGPISIILNFIVLEEDIGLEVIEGFIHXSCVCGVPGGRPFELTSDRQQFHVSDEFGIRIHDTRVVSRHLGGARISTRRAGSRYS

SEQ ID NO: 941883 - protein, 67 aa, Homo sapiens
PPQPPGFICLDISERHHRVNWLDVNTLKKNVGIRLEREEESRVINESSLHIFHCPLSNMPPSPFCLF

SEQ ID NO: 941884 - protein, 194 aa, Homo sapiens
  misc_feature (12)..(12): Xaa can be any naturally occurring amino acid
  misc_feature (23)..(23): Xaa can be any naturally occurring amino acid
  misc_feature (37)..(37): Xaa can be any naturally occurring amino acid
  misc_feature (40)..(40): Xaa can be any naturally occurring amino acid
  misc_feature (46)..(46): Xaa can be any naturally occurring amino acid
  misc_feature (48)..(48): Xaa can be any naturally occurring amino acid
  misc_feature (52)..(53): Xaa can be any naturally occurring amino acid
  misc_feature (64)..(64): Xaa can be any naturally occurring amino acid
  misc_feature (80)..(81): Xaa can be any naturally occurring amino acid
  misc_feature (129)..(129): Xaa can be any naturally occurring amino acid
  misc_feature (140)..(140): Xaa can be any naturally occurring amino acid
  misc_feature (148)..(148): Xaa can be any naturally occurring amino acid
  misc_feature (153)..(153): Xaa can be any naturally occurring amino acid
  misc_feature (168)..(168): Xaa can be any naturally occurring amino acid
  misc_feature (171)..(171): Xaa can be any naturally occurring amino acid
SHSFGAGLPQQXLNERRLHQQDXNEISQSPPELGRKXLQXAEIVPXHXSLSXXVSLLFFRPATXAVLILKVIKMRTFVCXXSPQLEYKPSKSISPVCLMSDPYLPAWCLGLSKCWDYRHEPPRLAFSKXKHYFIACKHCXKNLLEARXQLSAXGMLGKQPMLNGHTLXRAXDSQLVPNVEVQRKISRATYPTHS

SEQ ID NO: 941885 - protein, 114 aa, Homo sapiens
AALSALSPPGEKEPQFPPARSQPCPGQRKTTRIPGSGRRPGWAAPVRAGESPPPLAAVSGAWVPALRGFQRTGGPLPGLPCQPCRGGRKITVIEEEAFPGVKKAVAERRRPQKM

SEQ ID NO: 941886 - protein, 96 aa, Homo sapiens
  misc_feature (90)..(90): Xaa can be any naturally occurring amino acid
  misc_feature (94)..(94): Xaa can be any naturally occurring amino acid
SFPALPCLAFQCSSFCEMTLKASEGESGGSMHTALSDLYLEHLLQKRSRPEAVIAITIEITVNRGQCNNQTGLLPQGKPLPKVKGTRKVXEKCXTQ

SEQ ID NO: 941887 - protein, 261 aa, Homo sapiens
  misc_feature (66)..(66): Xaa can be any naturally occurring amino acid
  misc_feature (116)..(116): Xaa can be any naturally occurring amino acid
WLSPPSPISESSGGVRCVPRCPGRQTPELHLPWVRGSSLGCDPWGQKRPRDARPNWVGSCPEAWGXPLSQRALPSSSQGPAWPPSLVIGDGKSVLPGKPGQTTPKSLTFPGGSALXLTLRNRKRMSFLARKPEEILTGTQHPNQQHFCSRGPAGRGVLPAACKSCQSQGFAFLTGLPLARKVTKLSWVGYKLQGRELQWPVYREELELEPPVAAAAGDVIAAHGDCAGERDFSHRGELRKQAVVHILLEADLWGVARQGAA

SEQ ID NO: 941888 - protein, 172 aa, Homo sapiens
MRHHDAPTIGLGQLARLKRLGHGALLVDFEQEAVAGLLVHGLGDPLWVGPCKNIPHYLDSCTGCELLPSSPVILVKGIFDRHHWVVLDEGLVQVSQLVRREVPPGVIGRLEVQVILPRPEELGGRYVHADDHLISLASLPNSSFQQLQAFFILRMLGATVFIPTLVASFHIS

SEQ ID NO: 941889 - protein, 245 aa, Homo sapiens
  misc_feature (132)..(132): Xaa can be any naturally occurring amino acid
  misc_feature (142)..(142): Xaa can be any naturally occurring amino acid
  misc_feature (218)..(218): Xaa can be any naturally occurring amino acid
MVSPFRLFTKISIPPLIRSPMSRVDSFWISFLSRFLPFPTLLPSNINLFIFMRYSFLFFPGALYIFNGVTRLHHESDGLTSQGLHEDLHPTSKTEHQVQGGLFLDVVVRQGACIFQLCPSKDQPLLVRRDAXLVLALALDIXNGVTGLYLESDGLTSEGLHEDLHPTSETEHQVQGGLFLDVVVRQGTTIFQLFSGKDQPLPVRRDAFLVLDLFLDIXNGVTGLHHESEGLTFRVSEIFIHSERS

SEQ ID NO: 941890 - protein, 248 aa, Homo sapiens
MAKPRSSQGGGKARALEMENSQLCKQFIGGLNVQTSKKGLRGHFEAFGTLKDCVVVVNPQTKRSRCFGFVTYSNVEEADAAMAASPHAVDGNTVELKRAVSREDSARPGAHAKVKKLFVGGLKGDVAEGDLIEHFSQFGTVEKAEIIADKQSGKKRGFGFVYFQIPDAADKAAVVKFHPIQGHRVEVKKAVPKEDIYSGGGGGGSRSSRGGRGGGGRGGGRDQNGLSKGGGGGYNSYGGYGGGGGGGY

SEQ ID NO: 941891 - protein, 271 aa, Homo sapiens
MTQPLHPADGCHIPGEHFIRLYICISPPITARNTGIIFTIDPSSRSVEKLKKMIKCWNECGLLSELSLMELMSTIQRPSRMSTQPRKAFLLTPSVYRPVAVALDTKGPVDPNWARSDRQRHCSMWSCREESSTPQKSRCDNAYMEKCEENILWLDYKNICKVLEVGSKIYVDDGLISLQVKQKGADFLVTEVENGGSLGSKKGVNLPGAAVDLPAVSEKDIQDLKFGVEQDVDMVFASFIRKASDVHEVRKVLGEKGKNIKIISKIENYEG

SEQ ID NO: 941892 - protein, 108 aa, Homo sapiens
  misc_feature (1)..(1): Xaa can be any naturally occurring amino acid
XYKHLPQLTYLDGNRPGTDKEAPDSDAEGYVEGLDDEEEDEDEEEYDEDAQVVEDEEDEDEEEEGEEEDVSGEEEEDEEGYNDGEVDDEEDEEELGEEERGQKRKREP

SEQ ID NO: 941893 - protein, 239 aa, Homo sapiens
MGKEKTQNNKVVIGHVDSGKSTTTGQQNKKSGGIDKRTIEKIEKEAAEMGKGSFKYAWVLEKLKAERERGNTNEISLWKEETSKYKVTINEAPGHRDFNKNKNTGTSQADCAVLNVAAGVGEFEAGNSKKGQTREHALLAYTLGVKQLNVGVNKMDSTEPPYSQKRYEEIVKEVSTYIKKIGYNPDTVAFVPISGWNGDNMLEPSANMPWFKGWKVTRKMAMQWNTLLEFWTHLHNSST

SEQ ID NO: 941894 - protein, 240 aa, Homo sapiens
VIRIMAALLFVLLGFALLGTHVSLSGLPAQSSYRSKTLAPDKLITCSLNESATEVTGDRWFKGVLVLKEDALPGQKTKFKVDSDDQWGYYSCVFLTEPMGTANIQLHGPAKLKAVKSSEHINEGETAMLVCKLESLPLCDYWAWYKITDSEDKALMNGSERRFFVSSLQGRSELHIENLNMEAVLCQYRCNGSSSKGSDQVIITLLAASLWPPCWPFLGIVAEVLVLVTIIFIYEKRRKP

SEQ ID NO: 941895 - protein, 184 aa, Homo sapiens
MADDISALVVDNCSGMCQAGFAGDAGPRARLSLHRGAPQAQGVMVGMGYEGFLFSSDREPMSKMRHPHPEVAPSSTASLPPGTTWRKSGHHTFYNELRVAPEEHPVLLIEASPEPQGRDCDEDRLRYIVWRPLKHPERVERGLSMAVASPCYRSLGRYPLVIGVWELRLTVGHPTPGAPLYRGG

SEQ ID NO: 941896 - protein, 277 aa, Homo sapiens
SGRPVAPGARRTGGLQKPHAQSLREEVVIIPLPSGDVAATFQFRTRWDSELQREGVCHYRLFPEKRAWGSRSPSILYGSSTCYSHEGFWRTRYWGPPFLQAPSGADAVGLVSKTLLMMWINLGRSSVMCSQWIFCAFFNFIDCHHTVTPTASFKPLGLANDTEHYFLGDAVVAREVVCTENLTPWKKLLPCSSKAGLFVLLKAERLFHTSHHSQAVHIRPVCRNARCTSIFWEQRQTLLVVFDAFITGQGKKDWSLFRMFSRTLTEPCPLASEIRVY

SEQ ID NO: 941897 - protein, 121 aa, Homo sapiens
MGLAGVKQLTSYISVEAICALRKYPLGLVAPLRGKGWAGLKVAGSEGVGDGRRCDLAAAARELVLRAGGSEMEEEEGSLEGGPGLQEPVELGELDMTFDEFILDEVDVHIQANLEDESVKE

SEQ ID NO: 941898 - protein, 160 aa, Homo sapiens
MYCNGVVELLYLCSNGARCATWFEDPTRFIGTMDAFVKIVRDEGTRTLWRGFPATLVMTVLATAIYFIAYDQLKAFLCVSALTSDLYAPMVAGALARLGTVTVISPLELMRTKLQAQHVWYRELGACVRTAVAQGGWLLTVAGLGPTALRDVPFSALYWF

SEQ ID NO: 941899 - protein, 274 aa, Homo sapiens
  misc_feature (9)..(9): Xaa can be any naturally occurring amino acid
  misc_feature (31)..(31): Xaa can be any naturally occurring amino acid
  misc_feature (54)..(54): Xaa can be any naturally occurring amino acid
  misc_feature (97)..(97): Xaa can be any naturally occurring amino acid
  misc_feature (121)..(121): Xaa can be any naturally occurring amino acid
QPNLVGLQXHLVLVLVLAQLDLLGVDLLCQXCQPPPGGVTPHEQDLALGAQGLXTLRLSRQRLCPQFQQLSSRPCNFAQGPGQKTVPVALPETLSIXEAMKLTCVLYVACTLRRKRSIFLXGVLIAMPDLKVLPRLPERAGRPGVTELGAEAVEGPGAVNLPELALHVCQPQAHLTRVLVRELLNGLLVDAAGVGYPYDLGRPPEVEVEHVILLGGLHGPCGTLVHGHGMPGQAPLLHQLCVQQEQGLGIVWGAAVQSLFKQVPCPLQLAAPIA

SEQ ID NO: 941900 - protein, 174 aa, Homo sapiens
  misc_feature (10)..(10): Xaa can be any naturally occurring amino acid
MWAMRSTTLXLVAKSVVKGGKEHKKVVVEGNASPSVKGGGVGVAVEVRGDHLVLSVAQDALDGAPRRLHHHLLDVIIFGRFFYKEGEDHHYNVGSGDTEGHASKHPVQPRDDLAHSFGSASGGRNKVLENTATITPQYPGGAIHSLLGGSYGMDCGHECFHDTKVVMDDLGQGC

SEQ ID NO: 941901 - protein, 117 aa, Homo sapiens
MSSRVKGLVARKLDRARAAGPGAKDINTTTAAGATGLGGGREARPARRPRAGPRAARAGAGQERSGGKPSRTNPARGRGRAAARATAPATGQRGGGGGGGSGAPAGRRQGDGATTPN

SEQ ID NO: 941902 - protein, 275 aa, Homo sapiens
APRTLLLLLSGALALTQTWAGSHSMRYFSTSVSRPGSGEPRFIAVGYVDDTQFVRFDSDAASQRMEPRAPWIEQERPEYWDQETRNVKAHSQTDRENLGTLGGYYNQSEAGSHTIQIMYGCDVGSDGRFLRGYEQHAYEGKDYIALKEDLRSWTAADMAAQITQRKWEAARRAEQLRAYLEGTCVSDSADTWRTEKETLQRTDPPKTQMTQHPISDHEANLRSRGLGFYPEEITLTWQRDGEDQTQDTELVETRPAGDGTFQKWAAVVVLLERRE

SEQ ID NO: 941903 - protein, 128 aa, Homo sapiens
MSSSAGSGQEPSQSRAIPTRTVAINDAAQYLNDYCTNSLEGKLFSTTTGGTRIIYDRQFTSWYRGNYHMAQTRTCHLPNIPEVTNTGTLIEDSKVEVNIGTTMNNHDRKHAVGDDAQFEMDKPLSCKI

SEQ ID NO: 941904 - protein, 134 aa, Homo sapiens
  misc_feature (1)..(1): Xaa can be any naturally occurring amino acid
  misc_feature (109)..(109): Xaa can be any naturally occurring amino acid
XQQRPQSRTQHRGQPGSQSGQSSGSHTGNTTPGVEWQIQDFAATVAPDITQGSSPLPQRHRKLTPKEHVGRGQDGEGCRAVTWRKCGPAPLPPASTTLRPGSPGLGLSXRPSSTQCRAAGVPQTLSSPLPTEEV

SEQ ID NO: 941905 - protein, 291 aa, Homo sapiens
WGLTCCVTPPQSGRGSPTLNAQGVLREIWTSFGSLSLGSTWPTILSIAGLGGPHTGVALKPVRLPRSAGVHLRPPGNFERLPYFPHLSPRAGALGVTWLGSVARSPSRPSGPGLSTVQTSRGLPPLVARASWPQRLGVVWGPLRSSSPPSLPGPAPCLTHTFPLDLRRFYGLANSKTMAEELFTRSLAESELRIAPYEYPEAGPFAQLEERRQSQRRRSTQLSRWRTSSSSGPRPLSGRLTVPRSSRSPRPRVRGQVTDACGPVLMLSGSFRESPLWGGTVWGAIPTLLAA

SEQ ID NO: 941906 - protein, 281 aa, Homo sapiens
  misc_feature (130)..(130): Xaa can be any naturally occurring amino acid
GAPPIPSHNKQDRSPSGPAGEGPASILLAPVPLTVKLVVHNPQGGEEIAEEKEKEGKAAHKHMLLSCTEVVLGQVEQRQRVKKLPEVSKEKKRQQEGEAPPHPGLEALHSEVHGVPLAQRLCRRLLGSRXGMEYLETLAEALVHGKGEELVPEFLVHKNIIPSQHDSRQGGEHLDCNTHQPFIHQPSVDEDALPDGQGAVVPDQQAVEDSICDPGVEQEAASKGEEDEDDGEVELELLILVLVGKLSPPAQDRDVDDPRNRLRYNPFFLRKYGLHVKEEAL

SEQ ID NO: 941907 - protein, 181 aa, Homo sapiens
  misc_feature (24)..(24): Xaa can be any naturally occurring amino acid
  misc_feature (40)..(40): Xaa can be any naturally occurring amino acid
  misc_feature (58)..(58): Xaa can be any naturally occurring amino acid
  misc_feature (98)..(98): Xaa can be any naturally occurring amino acid
  misc_feature (125)..(125): Xaa can be any naturally occurring amino acid
WGQATTTAPACCRGSIHSRAGVLXGFIYKHDQAPSRRGSXHPIHPHHTRPPHETLKVXTNLLLLKVYTKPNTPLGIPTPHPLNNISRTKPTILTHPPXENLQSLPKTPNQHPPSSSNNPQLTPQXPQHSHSQWPRHQLTTESFLMALLTIMMASCRDRSVSSINCSAPPRRMKVHVLAFGQ

SEQ ID NO: 941908 - protein, 102 aa, Homo sapiens
  misc_feature (49)..(49): Xaa can be any naturally occurring amino acid
  misc_feature (94)..(95): Xaa can be any naturally occurring amino acid
GRTGPLYSYYLAQQQKTDSISHWGALLARHEKEQGGTSRWRRQGQSSSXISTNKTDSNGKALPWLPNHGLHCRSHHKAAGTEVALQGACTAALXXAGGCIRG

SEQ ID NO: 941909 - protein, 196 aa, Homo sapiens
  misc_feature (81)..(81): Xaa can be any naturally occurring amino acid
MEEGGKGGGRGGGKKGEGEPEGPGGLDTPGFGGGGNQPVNGAAGRGTGAPWASYSPPSSSYILPSSSAVASWYCWYSDTRXFMLLSASVNFISSMRSPVYQCRKALRREHGREPPGEGDEEGLDGRAVPDEGGGHLEEAGRDRQKRRELHVVGDPLHEVDCQFWLWMDIISSSTSFMDMRARNTVATVSNGRRAGR

SEQ ID NO: 941910 - protein, 181 aa, Homo sapiens
  misc_feature (119)..(119): Xaa can be any naturally occurring amino acid
  misc_feature (146)..(146): Xaa can be any naturally occurring amino acid
  misc_feature (150)..(150): Xaa can be any naturally occurring amino acid
MAGVEEEAASGSHLNGDLDPDDREEGAASTAEEAAKKKRRKKKKSKGPSAAGEQEPDKESGASVDEVARQLERSALEDKERDEDDEDGDGDEDGTNEKKKKKKKKKKEKKFEKENSLFXIFEIYFNVLFLKEKELEYKKKKDDKKXGFKXKNEEKKELDYGNEEILNYFLEDGEENKKFKK

SEQ ID NO: 941911 - protein, 126 aa, Homo sapiens
FLCNVKVWLLGPSPLQGVYMATVRRGDLVWWGIEFGRDSPSSEGVFLPLLLLLGLVVQGSYSLEATVGHEVHHPVAVAKFVVIPGNELEKVVVEGNASPSVKGGGVGVAFEVTGDHLVLSLAQDAL

SEQ ID NO: 941912 - protein, 106 aa, Homo sapiens
MGKTQDYHAKIKDHMTAIEEVHTNNENKYILRIHDYREDFPSPKGFIIFPKKYRSSSISQVSSSALMKESKQHNRFIRLGELQNNQKSVLCFFLFWIIQNFAVCLS

SEQ ID NO: 941913 - protein, 222 aa, Homo sapiens
  misc_feature (187)..(187): Xaa can be any naturally occurring amino acid
YSKEAVQNDLTLKEKSNLRVYTAAFSSPRRRVAPRQASFQERDSWEQRAGVWPTRGFLSISTPTAAFFPSLPTTGLLPATAAFSSDLACSAAAAAAALSTRSLGFLAWRRRGCRRRALAKGFSLNMILKFFSGFFFRTRRGIFLRGARRALGISGLFKILPRSVLIILGMGRLEERWREAALRQGPXKSPNSRKALPVQMQKRPTCPPGASFKMFSLLTLSR

SEQ ID NO: 941914 - protein, 108 aa, Homo sapiens
MQRSPGFSTRKHKNIPTGMEPTGSTKPIRTGPTSRKKETGPYKYTGGNKQHRTLLKPKRIPEEHPGEERQLARVVDYVLHDALDVAVPLSEIHGAQPPLFTVLYVRSV

SEQ ID NO: 941915 - protein, 237 aa, Homo sapiens
  misc_feature (3)..(3): Xaa can be any naturally occurring amino acid
  misc_feature (48)..(48): Xaa can be any naturally occurring amino acid
  misc_feature (79)..(79): Xaa can be any naturally occurring amino acid
  misc_feature (81)..(81): Xaa can be any naturally occurring amino acid
  misc_feature (100)..(100): Xaa can be any naturally occurring amino acid
  misc_feature (112)..(112): Xaa can be any naturally occurring amino acid
  misc_feature (116)..(116): Xaa can be any naturally occurring amino acid
  misc_feature (118)..(118): Xaa can be any naturally occurring amino acid
  misc_feature (153)..(153): Xaa can be any naturally occurring amino acid
  misc_feature (160)..(160): Xaa can be any naturally occurring amino acid
  misc_feature (166)..(166): Xaa can be any naturally occurring amino acid
  misc_feature (175)..(175): Xaa can be any naturally occurring amino acid
RKXWAAQRDSPALEHVAGREGKQAPPLSAEEKALGWVSSCPLPIRGRXGVLASLPLSAAQKPVLVQPLEEAFAELKVPXMXAQEGAALKNRGRKPAKSPXVPDSARILRSSXQGEXTXRGFTLKASIAPRATRRWVFTTSKGRVSTAATVPEXPPATKLXPTEVWXFGLSPLSQXFTSPELNQFRAEKGTTLKGSWAPAQPQLAPPPWSHFSSNTGTQHPVRQKLNLQLCSHKLQGG

SEQ ID NO: 941916 - protein, 71 aa, Homo sapiens
MPWFKGWTVTRETGNANGTTLLEALDFILPPTRPTDKLLRLPLQDVYKIGGIGTVPVGRVETRCTQTRYGG

SEQ ID NO: 941917 - protein, 130 aa, Homo sapiens
MSWGERLVPLNFGQTACWCQNDAKDIEKSQQEVELGSSLGQFVEGLASKLSLKGEGHGNGKQGECQAEGGVCGQDAEDQAGQGEQCVVENVGERGADEDGQRDDTSLPVGLHVPGVVGMENGLGAEGEGD

SEQ ID NO: 941918 - protein, 202 aa, Homo sapiens
MRGKRMGPPLSQPEPKKVGINRGVKKRGGKREDGQGREEGQGLGSPKSHSIVGRSRGTIGVPSLEQEGRAQHPERGESQGPPVNPIVNRCKSPPPPENPEWAVRRQESLGTDPQPHAQAAPPHPQRPRQENYRNTEFQVSAPPPQTQEREERQGTKTLDVKVNISVDTYKNIEREEDSACPNMDASLHLAGSRNFDSCRYHN

SEQ ID NO: 941919 - protein, 115 aa, Homo sapiens
TSWYKVGREEEEHGARAPGLSREVLTHEAPPRGTTAPGHAPPHAQPPSEGEGRLTVVRGQEGLEGAGAGRGHRKWWATGFWEGMPRVFGGAASKKRKSFWRGPSSPKRAATVPQR

SEQ ID NO: 941920 - protein, 110 aa, Homo sapiens
MGFTDISPRRIKWQTPHVAPPGTQAPLCKEGMTFCRLATGHTQGDSNSARGSQPSPTFSAVMEVRRRRLQGHPASWDAGSPRSQQNPTVVALLPTQSRTRQGSDLKVTNI

SEQ ID NO: 941921 - protein, 125 aa, Homo sapiens
MEFTDTFPVHTQGFFCYDSAYAKPYPGPEAASRVPPALVYALVTAGPTLTILLGELARAFFPAPPSAVPVIGESTIVSGACCRFSPPVRRLVRFLGGYSFGLFTTTIFANAGQVVTGNPTPHFLS

SEQ ID NO: 941922 - protein, 122 aa, Homo sapiens
MAEAGAAFLLITFSPFGKLVQIYYALAAVAGGAPFVGIKAANGVVLATYKKQKFIFYDERSVHKVEPITKHIGLVSSGMGPDYRVLFHRARKLAQQYYFVFQEPISTAQLVQRVASVMQEYT

SEQ ID NO: 941923 - protein, 147 aa, Homo sapiens
AAVMGRRRHTASAVLSQTLGGAPVAGGGEWGTHPRPSLSLPQTASFRAQTHSFRQETKEQREEEAGEEDEGGAEVAAQMKEEERGVGKATPPPHPPQKGARKRQQHAAGGGDKGGLKDEGPGAGGAWGLSESRASGCALSGMPARRP

SEQ ID NO: 941924 - protein, 232 aa, Homo sapiens
  misc_feature (66)..(66): Xaa can be any naturally occurring amino acid
WTGKTASAQSGTGPKDRLGVNKEYTLLLCFPQLLKALGHLLLILLLELALLLGCCILVLLVLGHQXIDVALGLVNSISSMPSPVYKYRKEKRRNMAVNCSEMRFISSWMAVLLQIKVADIFSPRGGMSQKAVFIIVGDPLNKIAAVFVLDIKHLLIHLLHGHAAPEHGGNLLVAAMAGVAGSHHVLGIKHLLGELGHGQRPVLLAAPAGQLGKAGMKKFSRGNGTMFTASLR

SEQ ID NO: 941925 - protein, 111 aa, Homo sapiens
MALERGGRLKECVVILSEEVDLRSRAMGEKKKKVLTSKNRKVMSSSSNQNVNRAKKPPVFVNNENLAPPGWSKGACNWEFAVNKHHDTVISEPSIQPWLKDEAKEARKCIN

SEQ ID NO: 941926 - protein, 68 aa, Homo sapiens
  misc_feature (32)..(32): Xaa can be any naturally occurring amino acid
  misc_feature (34)..(34): Xaa can be any naturally occurring amino acid
  misc_feature (43)..(43): Xaa can be any naturally occurring amino acid
  misc_feature (68)..(68): Xaa can be any naturally occurring amino acid
MKDPKHPDALTPGKDLCTSPGEESRAFCGFDXIXPLVFTRRDXEQLHNFVQQRMNYLKPRIFVVIKRX

SEQ ID NO: 941927 - protein, 154 aa, Homo sapiens
MKNHKNNGSITRIQEFRAIFQLFTRTAINLFLQLSKLACNVSRVAIQYRGIAGAYLAWMVQDNHLSSEASRFHWWVIFAVTSYVATTNILDRHILDIEAHIVPRKSFTQSFMVHFDRIYFRCNVDWSKGDHHTGFENTSFHSANRNSTNTTNFV

SEQ ID NO: 941928 - protein, 207 aa, Homo sapiens
  misc_feature (94)..(94): Xaa can be any naturally occurring amino acid
MRVKTKVKLTSARVWGPGFVAPRLTSPLLSRARKAMGGPPSQAQPPDLWHRVGFLGGPDVPSRHHCRGFPEAEADRSWYILDQDSDSIMANALXLGEAVSKNEDRRGSPEGDKEGGCPPALRAPEFMRRGPWGRLGQEVPQSVPVGEEGRGAVTGRAHPGGYFLSWVGTRCVLACRVLAGLERGRWTQRGGRRRLRQTQNTVLADPG

SEQ ID NO: 941929 - protein, 150 aa, Homo sapiens
QPWPRPCRHGWRLPLLPAQGPVQVALDGVEEVRGVQEVLVQLHIAEAVNPARQALGHGSPLHRLPAHLLQHLGQPDEVLVPIQLPPVLQATCPGKDAGDGVGAGGPALLVLPTVAGDGSMSGLSLNRLPIRAEQDGRYQAKGAKALGQDV

SEQ ID NO: 941930 - protein, 154 aa, Homo sapiens
  misc_feature (124)..(124): Xaa can be any naturally occurring amino acid
  misc_feature (127)..(127): Xaa can be any naturally occurring amino acid
GRPRVPPPPPPSVAPAYLLSFPFCWGRRQAILCHREGLRAPKMELYSVPDPDPPMAPDARAWGPAVHPRSLGWGGVGRWPGAVLSLASGLGPPGAAAVAWPPPMLGAWLGAPPPSWLGAMGGSXGDXMGCERGAWGAGRPPYSCSGVKEEGEGG

SEQ ID NO: 941931 - protein, 277 aa, Homo sapiens
  misc_feature (138)..(138): Xaa can be any naturally occurring amino acid
FPGSLLLPGRAPWSYHGGWGQAALRFGWAHGPQSNAGGLGPSQSGTFASELGVAPASSQAMGLSDVTLIGGVGPGVMVVAGVVVLILALVLAWLSTYVPTAVATSSWALLCQPATHPSSPWGLWATWWQAKATPSQLXSPLPQRVMMSWLEWRVKVGETALGRLELGVVLSPALSISLKSKACPKDKQVQAAAVQRPSLRAEDSTCLPPSTGLITVRLKFLNDTEELAVARPEDIVGALKSKYFPGQESQKKLKYQGRLQQDPARTLRALNITDNCV

SEQ ID NO: 941932 - protein, 167 aa, Homo sapiens
  misc_feature (24)..(24): Xaa can be any naturally occurring amino acid
  misc_feature (120)..(120): Xaa can be any naturally occurring amino acid
  misc_feature (130)..(130): Xaa can be any naturally occurring amino acid
MWAKRATTLLLLAKTVVKPGNEPXKVVVEGNASPSVKGGGVGFAVEVRRDHLVLSLAQDALQGALRRLLYHLLDVIKIGRFFQKAGQAHHLNVGSWDTEGHASKPPVQLRDDLAHSLGSXVEAGMKFWRXPRPSATLSRRATHSLLGGSYGMDCCHEFFHETKVVMD

SEQ ID NO: 941933 - protein, 180 aa, Homo sapiens
  misc_feature (132)..(132): Xaa can be any naturally occurring amino acid
GPTRTASLQCPESRARAAAARLRSRPLCVQACPGGGGEPSSAEEAGKRKPRRQKGLNAVPFATAFSLPAPLCISLLFLYFFGPARVWALLVSKNAASRRLKATRIFGLTSCLGQPSRAMSSWSLPAPLSADXRSRYDGRQKFVWGGYKSNQVRGLYDFYLPREELWIYNMETGRWKKINT

SEQ ID NO: 941934 - protein, 251 aa, Homo sapiens
  misc_feature (1)..(1): Xaa can be any naturally occurring amino acid
  misc_feature (46)..(46): Xaa can be any naturally occurring amino acid
XRVGTRGTQGWDSTENKPSCCSVEGPHPQDVAMGQPLRVQVEGRQXWEAGTGRGRPRAVAGLELVPYNPEPQQGPRVRSEKAGGGAVDKGQNDPAPNQFRQALAQWPQALAAGVSRCLPSALRGDIQCAGEASVMAPSTRRYQGWMCVFRIRATNASSPSITRSTPKTAKTARIGFWPPMKGRSLPTAATHSSAASKRSSRTLSWRRCLPLSCLLKRKKAAAPMFLATAPSTAPNLPSLDNVVKGRQNLGG

SEQ ID NO: 941935 - protein, 72 aa, Homo sapiens
YYTKTFSIILSSLHMAVLFHVHIIGKENEKCKPCVRGTWHSYCSNLLNLLGSKGKRFLLSPHFDRHSSHIFI

SEQ ID NO: 941936 - protein, 157 aa, Homo sapiens
PALCAARGPGPPAPRLGSGAAADPPGLRAPRPPGRPRLLLSSASASSCRLVGGLQPPSALSCQLPRRACVLRPPGPASQPASRAGGGHQAVPMPDPGPRMNGFWLGELCWLFCCAPCPTSIAAKLAFLLPDPTYTVLVLDQRAAGAFAPAPAQDTAA

SEQ ID NO: 941937 - protein, 173 aa, Homo sapiens
  misc_feature (1)..(1): Xaa can be any naturally occurring amino acid
  misc_feature (37)..(37): Xaa can be any naturally occurring amino acid
  misc_feature (87)..(87): Xaa can be any naturally occurring amino acid
  misc_feature (89)..(89): Xaa can be any naturally occurring amino acid
XGYRAPASLWDLSIEGSGRVRRVHKWKRYFLAGLRLXCVAWICPASGFRIIFELLPFGAHYLVVDVSDQLLGGLLGSHGPVNLLNLXAXHHHVLLQDEGLERSLLGDCEGCGQGLVGALPGCGACAFACERVCEESEKCQGEWGRADWAWATEQVGNTFRSPCTPGRGSCSAP

SEQ ID NO: 941938 - protein, 84 aa, Homo sapiens
PLKRCCSQTARVKYDRQYRLLLSALHIHIGVCACPWSAENLALLVHRGDITSPDQQFQNVPFSYIGIHAHLLKMRYSRANTFPK

SEQ ID NO: 941939 - protein, 341 aa, Homo sapiens
MEDLDALLSDLETTTSHMPRSGAPKERPADLLTPPPSYGHQPQTGSGESSGASGDKDHLSTTVCQPPSPKPAAPVGPSHSPLPAVSWVPVLCELVRLLQEINATEFNITYDILFVFTISLGGFLSAEGGPVSSLELTQPPFQPVSWPPNGFCHLSHSGSGYLMVSLYYFRVQNHSSSLWVSSQPPVVSSTNEGSPSPPEPTGKGSLDTMLGLLQYDLSRRGVPTQAKGSVGSCNKPIAGQVVTALGRAWHPEHFVCGGCSTALGGSCFFEKDGGPFCPEYYFERFSPRCGFCNQPIRHKMVPPWALTGTRAFLLRQLRGALGEEEFHQREAALLRRDFLQR

SEQ ID NO: 941940 - protein, 243 aa, Homo sapiens
  misc_feature (36)..(36): Xaa can be any naturally occurring amino acid
  misc_feature (87)..(87): Xaa can be any naturally occurring amino acid
  misc_feature (105)..(105): Xaa can be any naturally occurring amino acid
  misc_feature (114)..(114): Xaa can be any naturally occurring amino acid
  misc_feature (132)..(132): Xaa can be any naturally occurring amino acid
  misc_feature (137)..(137): Xaa can be any naturally occurring amino acid
  misc_feature (146)..(146): Xaa can be any naturally occurring amino acid
VVVMQRWKPWWWGLLGVGAVVFPSPPLLVSSPEGQXVTFQNGRVSYRVFSLLEELSVLSGSPLILTSKRSCTSLRILASFSSDTDVXAIALGCQTGLSLATRCRXVSESTGHVXIKSNVHPLEVHALAKLGXLPPEXVVENLSTAXTEKASPPGASHGGWQLCWEVLAPLELGQGNAPLPKLYKDHHLVELKDIQKVKELSVLLVVLQFDEYCCHPCSVNFVSSSTKISIGSSMNLRQNRRIF

SEQ ID NO: 941941 - protein, 205 aa, Homo sapiens
  misc_feature (83)..(83): Xaa can be any naturally occurring amino acid
  misc_feature (110)..(110): Xaa can be any naturally occurring amino acid
MPCGSALPLLRTPASASLCPPDSAAQQGLGEMLPHQEGGGLVPADWTGFSAISRKQQLAENCFLNPKGDAHFSPGLSAPRCPXIYTAVRRPLLQPACVAEPAVGAPKLSXRVRSKGSGLEFCGNVPFTLCQQLLGSFFGPFLRLTTYLQPAQNNERSDHLLEKALGRPLHPHCRTSFLLAFITAWPPKRSPSWPLLLFLKKATPL

SEQ ID NO: 941942 - protein, 227 aa, Homo sapiens
  misc_feature (23)..(23): Xaa can be any naturally occurring amino acid
  misc_feature (212)..(212): Xaa can be any naturally occurring amino acid
FYTPPLYQKTKNNIHPPNTNSPXTPTPIFTYIPNPTYNPHLYPPSPLPLLFPLLTKILFLFFPPIILFLIFTLLTPSSSSHLFLNSISSIVFPFFQFTKPFPTNIPLNFSHIPFTSSSIRSSIPINRHSYFHRHHRPHLTHPSFHIFPHPFHKLPPLLLLHLYTIFSSTSFIHIPPPNTPPTLTYPPSPPLHPPIIFFPSNTSSLISPTLTXPYFSLPPLLTPPNHP

SEQ ID NO: 941943 - protein, 239 aa, Homo sapiens
MWSAVKELIHVQHLAQSLVQSRLSPGAIFSTTAWFSYCCSCRLCPKGVGSGAVQQEGVTKEAGDNEPYLFRISALDLENGEILLLLRAKLGKLRTKPVTEELKWNSLHLQVALYLKISLLVKTKSQTHSSTPSASTCAIEESPANYSRVYLCAGLAKQAGYEFGTVLGSGFPLAEMTESFSRCSLMFWSNRVVSRRGWCRSRELVLAVKEVRAPTSTPCPRGRVGSLELFKKPCLPEDG

SEQ ID NO: 941944 - protein, 161 aa, Homo sapiens
MTKVHALNDGTAVVEHTADVLSVHSAGEKREAVVTPISTGSADPQKLISNEVPGPGHAWVLSGRGSCILRSGVASKFWKVVLNLRFPSQGFLSEQILLVEEQDTEMERINLVVPEALEEVQSLLQAVGLVVLPDDHVVAAAGHHEDDGSYIVEALDPLAAF

SEQ ID NO: 941945 - protein, 116 aa, Homo sapiens
STVFFKRVSFKHNFARNWSKDRKRVGMLKRGGDQGHVFLGAAIDDVVHTQNTPLRFSCPQKNLSLHLKTFCDTQDSHISNGAFPSYPIQSVVYAFTVSGPELCHQVCTVIACNCQL

SEQ ID NO: 941946 - protein, 125 aa, Homo sapiens
EKNFVKCKLEGREDRRKVGKRKKGWRMGDEKEKRKEKGEGGGERKGKEKKRREEGGGGLEVNIEVKRRGEGNVVKRKWKGVGEGVGGNKRDEVIRTGRVEERGEVVNGNVVIVKRKDIEGRNELV

SEQ ID NO: 941947 - protein, 270 aa, Homo sapiens
QSRVDYILSVMNVPDFDFPPEFYEHAKALWEDEGVRPSHKRSNEYQLIDCAQYFLDKSDVIKQADYVPSEQDLLRCRVLTAGIFETKSQVDKVNSHMFDVGGQRDERRKWIQSINDVTPIIIVVASSSHNMVIREDNQTNRLLEALNRFKSIWNNRRLRTTTVILSLNKQDLPAEKVLAGKSKIEDNFPEFARHTTPEDATPEPARGPTLTRAKYFIRDESLRLSTASGDGRHYCYPHFTCAVDTENIRRVYNDCCDNIKRMHLRQFELL

SEQ ID NO: 941948 - protein, 64 aa, Homo sapiens
  misc_feature (24)..(24): Xaa can be any naturally occurring amino acid
MVKLNSNPSEKGTKLPSVEDGFQXVPVMSGLEVNDLQLPGPEKVIVKKRREYEREEKNKGKFWV

SEQ ID NO: 941949 - protein, 322 aa, Homo sapiens
RGLEGLGQALGVDIPETGMTVQKSMGCATPSADRAVGHTGSQGPAPRVPHQPHPSSARAPRARLTHTHTHITHHTHTGSQPQTLSKGQASPGERAPAGDWSGENSAPPLHPNRTQAGGRGVVEKGLEGVPGAFGSSRGSSGLKGTPWAFPPSGEPWWGAASGALVVLGWFLLNTFFHLDPPLFLILIFMFSHSSSSSPSFSSPSSSGGRWAGAGISGGCMGVSLGEVSGEVGCGVSGAGDAAPSFVSQRSSWSVSALGAALAWGPPPLSPSAAAGLSFCAGTGTPQKVGGLRGAGPKAWVIIAVGWFMGRDWAILEHPISLL

SEQ ID NO: 941950 - protein, 251 aa, Homo sapiens
  misc_feature (189)..(189): Xaa can be any naturally occurring amino acid
  misc_feature (212)..(212): Xaa can be any naturally occurring amino acid
TVRDTMSDLPEVRNGASALEISYNGEPQSWFQRQLRGAQYQLIFRDQICKDMSTLVAARMRQIPLAPGSDWRDVPNIEVRLSDGTMARKLRYTHHEKKNGRSSSGALRGVCSCVEAGKACDPAAKKYKTLIPCCLHHTGNRYNHWDGFYGRFEWEGFFSTTVTNPEPMGKQGRVLHPEQHRVVTVREYXHSKGLPETYRLFGNILDKHRQGXNAVPTPLAKAISLEIKLCMWAKARESALAKIKEEEAAKD

SEQ ID NO: 941951 - protein, 112 aa, Homo sapiens
  misc_feature (23)..(23): Xaa can be any naturally occurring amino acid
MPQYRSQGRTQWAQSPELQQQRXRHEFPELQEPEVAQFRTMLHSVRYSQNRQDRMQWTEQFSCAWEGELGGGGFAAALTLLAALAGEKRVCLQLPVGLGAPRAQFPPVLGRQ

SEQ ID NO: 941952 - protein, 262 aa, Homo sapiens
ALGEWDTILPAMPQPLSHMRNHQGGKDRVPEQSGKGVLPDEKQVVGHIGVDTWVVAVTTARSPADDALQGELALCSLVLTHQRASGITLARIGAALEEPCAEHFEEEEDPCTSGAEQRSKERNGTCASCRKARHISSAPSNWWPQPATWQSVVSEGARRRLAGTPAERKATGARTAVRILLKAQESQVVLELTGEKAIEQAVGAHGQRLARLTAVVTAFLAEHHRQNLRVRACGGGRGEAALSDLATSVLGKPLLPNPNDVF

SEQ ID NO: 941953 - protein, 95 aa, Homo sapiens
LCRRLHFLEYCSLNTATFRFVKYILFRFWSQLDVISDSGQGFLTRRKLFRIFFKSKVFPELIEFDLLPRLLLGIFFFFFLVLCWLFAQPTGSGRS

SEQ ID NO: 941954 - protein, 67 aa, Homo sapiens
MPRGNQFAQRAQTPRSLGVLAAGKGLALTSGTPAAPPPPRRGPKGTEGHDGCSPGVHVFKPRLIAAE

SEQ ID NO: 941955 - protein, 294 aa, Homo sapiens
KSSGGERLVEQRARHQSRGPAESKGSEGGPRGRTCVRLPSPPNDQTCHPGADGPVQGKQKEYKLEAHRIGSIPLGKIHNPRGQRGGIKQQKNPLGPPGLRKPAKTTRATRAPAPTRPVPPGPRRRHRSSSPGSRRPGHPPAGESRPRPPPKPQGLETEPQPERPTDTDAPRGGDEVPAATETGEGDVFQGGEADATEAAWSRVEGPRRGGQRSRGYAGVVASSRGICAARFPCAVSLGGEAPPGTPAAVPGAAGRGAPHQRGTISLGRPRCAQESAARRGVGGGQPAARRPARP

SEQ ID NO: 941956 - protein, 120 aa, Homo sapiens
SGGASNLGLAKPKGHPTGSLVHTCNILRRSGAPPPQSAHRLSRGSRLRIATQSPPGRMAEVLHRRPRGLVSRAPTTKAPPPVHPEEKPLPQRGGGAERAQGLPGGHPAGPPRPRSLAPPE

SEQ ID NO: 941957 - protein, 93 aa, Homo sapiens
  misc_feature (1)..(1): Xaa can be any naturally occurring amino acid
XTTDDDAGSEKKKGRNRSKEERKQHLSRAREQRKRREYKKQSRQEAQLELQKGERSTTTTTKPKIHRKTKKKRNKKNQDNRNTNQEKQAHGAH

SEQ ID NO: 941958 - protein, 214 aa, Homo sapiens
MKETPLSNCERRFLLRAIEEKKRLVADKPMIIGSSGSHLVQITDAALWTWKTRVLGQVFCELVFTKLNRETEGILFFDLELSEKAAPAFEPGKHLNLLVKLNGLKERNLTNSKCIDTESLCVVAGEKVWQKRVDLHLLNPDGNIIDAASLAAIVALCNFRRTDVSVQGDEVTLYTPEERDPVPLSIHHMPICVNFAFFQQGNIYVVDPMNEKNV

SEQ ID NO: 941959 - protein, 102 aa, Homo sapiens
YLFSVFFLFWELINLVIYSDDVPMVLVGNKFYLPTRTVETKQAHELAKSYGIAFIDTSAKTRQGVEEAFYTLVREIRQFRMKKLNNSNDGTQGCMGFPCVVM

SEQ ID NO: 941960 - protein, 145 aa, Homo sapiens
VLTGVRQVMLLRKSMLLPVSELSVRTGPATRLLAGPGLAAGPREAGAPFSRSPMAAGSRRVEGNPQFSPRLAVSPSACTWTEGGMKMRLLWDKSRRIWSARSGGSAQMTFLSLEVSSRWLPSLIQAPSQCRAQSQRHGFSVGEQR

SEQ ID NO: 941961 - protein, 220 aa, Homo sapiens
EAKSHKGKAKRGRNSKKKKKTKISLFGFSSKKKDPKKKGRERDKREQTPKGREKGKEKEKPQKERGEGKEIKAAKKSLRKEGGGPPKASEKKAKMAPTVSRRERAAFPPSMAATPLPTPDNLHPDVENSAAEPERQKIAGVGKKSALPAAAVPPTPPSQGPPTALGGALGGERLHGAGIQLEASNPLEAAQSGQRFCPTGRLQSFHRRKAFDETTLQKYS

SEQ ID NO: 941962 - protein, 117 aa, Homo sapiens
  misc_feature (45)..(45): Xaa can be any naturally occurring amino acid
  misc_feature (48)..(48): Xaa can be any naturally occurring amino acid
SLPRGALPPRGPRPVQSGGPEREEPGAQRRREKRTQNPHKRIPAXRAXQHSNQQKEEGNPEGAKERRPGKEEKRPLPFWTLRGTIFAFISEAMEGPPPSFYRDYFAALMTFPSHLSF

SEQ ID NO: 941963 - protein, 305 aa, Homo sapiens
LRALLLWGRRLLPLLRAPALAAVPGGPPILCPRRPTAQLGPRRPPAWRLPAGRLYRPPPAAAKAAPLPSLLSRPESVPGSPSPPAFPAAPQELLDIVARSLSSEEEVFLRELISHASPALEKLRHKLVSDGQALPEMEIHLQTNAEKGTITIQDTGIGMTQEELVSNLGTIARSGSKAFLDALQNQAEASSKIIGQFGVGFYSAFMVADRVEVYSRSAAPGSLGYQWLSDGSGVFEIAEASGVRTGTKIIIHLKSDCQEFSSEARVRDVVTKYSNFVSFPLYFNGRRMNTLQAIWMMDPKDVREL

SEQ ID NO: 941964 - protein, 86 aa, Homo sapiens
LVSRRGYASEAIKGAVVGIDLGATNSCVAVMGGKPAKELGNAEEPEPPLQLWPFQQRVSDLLEVPAKRQAVTNPNNTFFATKRAHW

SEQ ID NO: 941965 - protein, 113 aa, Homo sapiens
MASEAAGDSLSSGGGACRAAAALTVRSPAVPCRRNMHFSIPETESRSGDSGGSAYVAYKIHVNGVLHCGVRYSQLLGLQEQLGKEYGANVLTAFPPKKLFFLNPAEEKKKKEQ

SEQ ID NO: 941966 - protein, 217 aa, Homo sapiens
MTPKRPMALPKIFTMRIYYKEAGVLSIGQGSTTAQMPTQTTTEEVRKDYGEASPKDGVACMAVPMAEGLGVCGTERLSHVANDNSYDEAVDGHSLTEEEAEQVLGLDPGGLHYSTNEGGAGNIDAPGCPNHRKGDSRPIPRLDHIKGEVSVRTMQQQSGTQNKNGVAESHGQRAGPEGHEDPGVEQFQPRNGGDGGGGRNGGAGATNAFDLTPSVPQ

SEQ ID NO: 941967 - protein, 326 aa, Homo sapiens
  misc_feature (62)..(62): Xaa can be any naturally occurring amino acid
  misc_feature (193)..(193): Xaa can be any naturally occurring amino acid
  misc_feature (211)..(211): Xaa can be any naturally occurring amino acid
VSPGPSALPPPPQRQGEEGGCRGAGRGWAGPEWARLGQERGHEALGAPVPGQRPGLPGEGSXGAALRGEDGCHAAAALPKRGRGLKGVAPRTVLWRKNQGAGSGHWPPGALCKEGDSGTCGNAQGRVQRVRGRAAILRAGLRRTRDRTKGGQRGPPRRMALGGEEEGVQEVGAASRSLSLSLLLGWCGRHHQXVGPQEAAPGLAGGSLGQXTQNIANEEREGESGFRRLQKELSVVVDVDEAAARQADWGKAGTRILLVPIRPPPGFDARPHHLRNGPYVVDSALGLTGQFLQQSGHHRAGVLACMVLNVGMQLQFLPHHKAAEIS

SEQ ID NO: 941968 - protein, 127 aa, Homo sapiens
  misc_feature (49)..(49): Xaa can be any naturally occurring amino acid
  misc_feature (52)..(52): Xaa can be any naturally occurring amino acid
MLRYASVNSIWSMPSPVFQWRKAFRRNRAVNCSEKRFKELLDGCSIANXGDXNLEATRWDVTKGCFDIFGDPFHKVAAVLVLHVKHLLIDLLHGHPTTEDSGHGEVSAVAGVTGSHKVLGIEDLLGE

SEQ ID NO: 941969 - protein, 205 aa, Homo sapiens
KGNPDPCPSSGRGGLGQEAPSIGPSREESGPLFAQRARFQAPTTERTCREEREQRPVAMGEEKWEERALPEESGSLGIPGMHAGASGHKGPAPGWLALGQPVGKQVQTIVQTCSLGGKGGLDKPSAVAYVLLPQLVSEPAHGHGVGHVLLVGKNQRPSIPQLVLLQHLLEFISRFLDPLPVITVHHKDEALSVLEVVPPQRPNLV

SEQ ID NO: 941970 - protein, 108 aa, Homo sapiens
RADLERKALNYRFPRALGSASSPVGSNVVLMRVMCKTNHILLVHCESSLQFASHCTETVEHKARSSYTVDASVTYGERGHSTTKSPPSLFYQQLKLADELCAPGMSDE

SEQ ID NO: 941971 - protein, 172 aa, Homo sapiens
MNREQQHKGSNKLLFLFLPLMTRKGREKDLLKVAPKPMGVNFPVDWGLCCGRPGHKGTTLAPGPVTSVPLVSSLVGGRKKEDKQQEATKEEAQNHEKAQHEENPWKSKEQVLNKKERFHKREVFKAIDVSFLVKSENTTKVDQKSGAHNGEGGSGGREGQEVDEEVPKVPGP

SEQ ID NO: 941972 - protein, 281 aa, Homo sapiens
ATMRYIAALSSASLSEFHKSQKWTALGSHPSWLLLLGLSMVEERREGAVGPMLTPEHCRGEDAPVVPGCGSGKDWKYPAKGSLRNRKLKALAVGPKRTQPHPENFTPKGKEEALGWGFRGEVGDAAVVQKKAFLKAIIQEKVVQGQHWASKGKKELSPEGVGRRGLEFRPPPTAPSGCQVEKGVGAGLGTLPAALPTPGSVGSGPTKSPWGLPEEDLWLPLPPGQRAQEGAALQRALGWVFQGQLQSPGGGGAAGLCHGGAWARGSLESCTSEWGTVHAAH

SEQ ID NO: 941973 - protein, 192 aa, Homo sapiens
  misc_feature (132)..(132): Xaa can be any naturally occurring amino acid
  misc_feature (151)..(151): Xaa can be any naturally occurring amino acid
CCRAIDKQPKQAAHQGPRVVNKCSSNKGVLVYMNQQQQSQARLACAQCISFSKSAYLGLNSSVGGRSGARPSWVLASGGMRRKWRAAPISSTVTMAGWVSSGRVTFTLVKRDPSTILTQAMSPSVSFSERHXAAGDLPPNFSSLSVIHDYXRFHREQLLLVKLTKVQQGEPIKLLKAEENLCVSLLHGLKVG

SEQ ID NO: 941974 - protein, 267 aa, Homo sapiens
  misc_feature (6)..(7): Xaa can be any naturally occurring amino acid
  misc_feature (9)..(9): Xaa can be any naturally occurring amino acid
  misc_feature (13)..(13): Xaa can be any naturally occurring amino acid
  misc_feature (16)..(17): Xaa can be any naturally occurring amino acid
  misc_feature (156)..(156): Xaa can be any naturally occurring amino acid
RRGEKXXPXEPRXQGXXPPRSRLGGPPPHKVPLCKAPGPTRTRAGPRQRDGQGRGGEEQTTQGTSGGEQELGKKAGAAGGESGRQTQPRPPRGKGTEAREPGEHKGSGLPHTDGELGGHNSEEGERGHSGKEREHSLAPKDNRGAQAAIVGEESTXTETGARAKNREKERQRQASPNIVIALAGYKAELASKRAVEAQEAQAYADDNSVLSMETSAKTAMNVNEIFMAIAKKLPKNEPQNATGAPGRNRGVDLQENNPASRSQCCSN

SEQ ID NO: 941975 - protein, 273 aa, Homo sapiens
MLLLLLFLLLLFLLLTLWFCSPNDTSTSSKGPSTTDGSSSWLSSPALCSAVGGRNVEIIKKLRLRLLQKKDLYGIRVEVRGAHHFPPSQPYVVVSKKEKPLDLLGIMDVQPGRCVPIAKSEQMWAGSAGLACWLAGIIFIERKSKGDAINVMSEAAQTLLTQDVRVWVFPEGTRNHNGSMLPFKRGAFHLAVQAQVPIVPIVMSSYQDFYCNKERRFTSGQCQVRVLPPVPTEGLTPEDVPALADRVRHSMLTVFREISTVAGGGGDYLKNPG

SEQ ID NO: 941976 - protein, 322 aa, Homo sapiens
EIKRCRIWICFGWKKKGNQPSSEKSREKRFKDPGLVDQLVKAESEWRRSKFRGKEIEESEEPKKQENRRKNKEKKTSGKRRICAKKCAEFRKPYCKGFSKPENLTKKKKPSPQYETILKYEAEEIKLEAKRFENLREIGNLLHPSVPIINYEDVDNKVEMIWGDCTVRKKYSHVDLVVMVKGFEGRKERAVVAGSRGYFLKGVLVFLEQALIQYALRTLGSRGYIPIYTPFFMRKEVMQEVAQLSQFDEELYKVIGKGSEKSDDNSYEEKYLIATSEQPIAALHRDEWLLAEDLPIKYAACLLLRQTVGSMAVTPWHLPVIS

SEQ ID NO: 941977 - protein, 79 aa, Homo sapiens
  misc_feature (8)..(8): Xaa can be any naturally occurring amino acid
  misc_feature (23)..(23): Xaa can be any naturally occurring amino acid
  misc_feature (39)..(39): Xaa can be any naturally occurring amino acid
MSTCENSXLHVLPWTRAKNLFQXLTLSTSCNTAHCTNRXKPRDWILDDKTHKKLFGGQKFSVFCSTPFIPEFSTTNSLP

SEQ ID NO: 941978 - protein, 340 aa, Homo sapiens
LYTHFSHTSNSHNIQTIQHSHPHTLTQPLTPLLSNPHPSQPLPYPIITKNIQNSQPNPKTSIPLTPPPSNFTTHHPPSTTTTTLSLSLSLIFQNTPNPPQTNHPHLLTTTHPLLPPPPHSPLTFPPPFLTPPSHSLHSPHPPSPPPPHHSRRPTSFLLSFHSHNTPPSPTHPHSPNSNLLLLPSTHSHTPSHTPTYPPSLLLSSLPPSPHPPILSSSPRSRNRDSEESVPSKKKLLRTFLIVQILLKPMPPRPHSPIPLPRASHARLPQPVLPLGLPVQLWAQALAGPASRQWDTENTLQHRLSLRHTQVSRDGPPTERAQLWYREVGRVGEEWRDMSPL

SEQ ID NO: 941979 - protein, 78 aa, Homo sapiens
SHQAVRVATQQSLAITRPGQGGALGWFCLAAGTENFLLQSNYNDLSLYIPDLEAGACGSTKPVAVRAEAQGVDEVPTT

SEQ ID NO: 941980 - protein, 174 aa, Homo sapiens
MWAMRPTTLSLLAKTVVIPGNEPEKVVVEGNASPSVKGGGVGVAVEVRGDHLGPSVAQDALEGALRRLLTTFLMLSYLAGFSRRQARSTTNTLAVGTRKDMPVSFPFSSGMTLPTALAAPVGGRDEVLESPAAIYATFSRRAIHSFLGGSYGMDYCHEFFHETKVVMDDLGQGC

SEQ ID NO: 941981 - protein, 349 aa, Homo sapiens
  misc_feature (6)..(6): Xaa can be any naturally occurring amino acid
  misc_feature (31)..(31): Xaa can be any naturally occurring amino acid
  misc_feature (209)..(209): Xaa can be any naturally occurring amino acid
QLGGLXPPLPDPPLHSSAYSHGPSPGHVGVXAGRGKAKEGVEWSNAEVKVQPDFLTEFRCGGPPLTPPSLHSPGFSLELGGCLSHNCCGLEGEPIPRQWGGQEGPEPEEGPAGPQGCLQVVAGTQDKGVLAPSPLPCGLAPQQPPPMEEQPSPAQQPTRHARFRNEGQGKLCQKNFACKQQEPGKQEEGSHVEGRVGSQQGRQFRAQQXRDVEQDAGGMKQPAQEGPVVAEAHAAAQLEAVVVPTQEAEAAGRTVFAAWRHLALALVAVSPAPAQNAAGQLHAKDAGIRAQEEPQVAQQVEQLEGGQPHAKARAKGSSGGGPGASPTREPAPGPRRGPKRGEHEKNCPA

SEQ ID NO: 941982 - protein, 313 aa, Homo sapiens
  misc_feature (5)..(5): Xaa can be any naturally occurring amino acid
RLRQXGVQAMGQPWAAGSTDGAPAHCLSLLTALWAAAVGLELAYVLVLGPGPPPLGPLARALQLALAAFQLLNLLGNVGLFLRSDPSIRGVKLAGRGLGRGWAYCYQCQNQEPPRSGHCPACSVCILRRDHHCRLQGRCVGFGNNRPFLCLQLQAAGVLLHVSIQLGPALSALLRAHTPLHKAALLLHPWLKEHTGRVSLAQFALAFVTDTCVAGALLFGAGLLFHGMLLLRGQNTRELARGQHFYYLGSCNNLQAALGPRWALRLALALPGLPIAGDGITFQTTAEVGKKPPDSGRAELSGRKGEKGPHTRL

SEQ ID NO: 941983 - protein, 266 aa, Homo sapiens
MAPRTLLRQLSGALALTQTWAGPHPMRKNTTSVSRPGSGEPRFNAGGNGDDTQFGRFDSDAASQRMEPRAPWKEQERPEEWDQETRNVKAHSQTDRENQGTLRGNNNQSEAGSHTIQKMYGCDVGSDGRFPRGNEQHAYDGKDYIALNEDLRPWTAADMAAQNTQRKWEAARRAEQLRAYLEGTCVEWLRRYLENGKETLQRTRYQGPRGAFLIACRSPGLASHKEGRQLGPTLEYHPPSGPEGEEILLGFQILYQRVTLRFRPAL

SEQ ID NO: 941984 - protein, 110 aa, Homo sapiens
GTEFCQLCALQTPSNSNLGSISLSITLMDVVFMSCATPLVFFGVFFHGGVITFFETGKKTSGASSSGLCILGRGKTPLAPVIVGMVGLDCLFYALWVWWKKDLANGRSIS

SEQ ID NO: 941985 - protein, 218 aa, Homo sapiens
  misc_feature (22)..(22): Xaa can be any naturally occurring amino acid
FLKKRRPRHMRSQLQVQELQPXVGSRGSQEFTHSHGVLLHNILFGKFQQHRFLVAFVVVHIFIVALSMGGFDFGFPGQEWGWERVQGGGENALVQGITRDNLPVVEDRQRKGLSLGVSPEISLKAKRVDGRDKNFDGVQKGAWDGCILSHVPPAPGQDGINCRDAICRGLDLYKVVRLHQTRSSHEEGRVDDSPGCGDDLAPAPVQGLLGNTASRILN

SEQ ID NO: 941986 - protein, 106 aa, Homo sapiens
MAFLFHGFEAAAFSAGFEHSVLDAALLPRHGVDEHYRFKGVALMGVLVEEEVVAGSISGHRGGQLGHIRGLCVHQLNGFPLKVQLHLDVVDHFLLELLECPLGLRL

SEQ ID NO: 941987 - protein, 105 aa, Homo sapiens
GEEPIPLCLYPAPLIPGSFLQPLPASGNTEDQQLVTRDPPGPQRGAESRLFSPRSGSFGEFSEPPHPPASMMLGSAFSVPQNRTNSSSLLLGKECGGLGPRKKLS

SEQ ID NO: 941988 - protein, 262 aa, Homo sapiens
ENLKSCNVCCKSSWNQLQDLCRLAKLSCPALGISKKNLYNFKIEYLFDYKKIRKQEYDLVKRRGYPNSKNTWEPRQNLKCVRILKQFHKDLKKELLRRHHRSKTPRHLDPNLANYLVQKAKQRRALRRWEQELNAKRTIWERITLKNKVDLDGPPRAFFYINKYHCCLRQSPSTNVAVGLRVPGLSVGTHWRLLPGGVLHKFAYNDQGQVRLRAGLPIYECNSRCRCGYDCPNRVVQKGIRYDLCIFRTDNGRGWGVRTLEK

SEQ ID NO: 941989 - protein, 132 aa, Homo sapiens
  misc_feature (48)..(48): Xaa can be any naturally occurring amino acid
  misc_feature (62)..(62): Xaa can be any naturally occurring amino acid
  misc_feature (89)..(89): Xaa can be any naturally occurring amino acid
  misc_feature (103)..(103): Xaa can be any naturally occurring amino acid
  misc_feature (117)..(117): Xaa can be any naturally occurring amino acid
MGENATQYCPGDLNYRAFEGEEGDENFVGFFSEESLIDEVRMKKPGFXISNGKGKEEGEKLXKLTSSALGEGGHPRLLCLLGGLLALQXLPGLCPQILLGLLXHHLVLQSSLCFHHXPRSHLHTLGFGPRPR

SEQ ID NO: 941990 - protein, 171 aa, Homo sapiens
EEEDHGDLGQGGGGLRQAREPRSHRRLGKSTRQCKGEDRAFRHGKEVKRGGGPATPHILQAQRHRVEEVPLLRRLFHFPSPPGAASQRGGGGKTHTGGGAQGEGARNKDRPGGRLAGQGGLLIGTLDSYDVGLGGICCTCGVFGQRNLVDGDPGTKVRLHVPQQNMASSTG

SEQ ID NO: 941991 - protein, 122 aa, Homo sapiens
MGGDSVRKRGHRDGSDRARRKRREYGVERDRAGDNQRLNIFPKEGFRPRNNIQRIGGHDPRQQECGIAVLEQMENHGVMPNKETEFLLIQIFGRKSYPMLKLVRLKLWFPRLMNVNPFPVPR

SEQ ID NO: 941992 - protein, 155 aa, Homo sapiens
MGLQKTILKMAAYTKIQELKTIFQLFTRTAINLFLQLSKLACNVSRVAIQYRGIAGAYFAWMVQDNHLSSEASCFHWWVIFAVTSNVATTNILDRHILDIEAHIVPRKSFTQSFMVHFDRFYFRCNVDWSKGDHHTGFENTSLHSANRNSTNTTN

SEQ ID NO: 941993 - protein, 263 aa, Homo sapiens
MGKEKTHINIVVIGHVNSGKSTTTGHLSKKDGGIKKKTIKKFKKEAAEKGKGSFKYAWVLEKEKKKRKRGITINISLWKFKTNKYQVTIIKAPEQKNFIKNMITRTSQADCAVLIVAAGVGEFKTGISKNGQTQKHALLAYTLGVKQLIVGVNKMDSTEPPYSQKRYEEIVKEVSTYIKKIGYNPDTVAFVPISGWNGDNMLEPSANMPWFKGWKVTRKDGNASGTTLLEALDCILPPTRPTDKPLRLPLQDVYKIGGIGTVP

SEQ ID NO: 941994 - protein, 118 aa, Homo sapiens
  misc_feature (42)..(42): Xaa can be any naturally occurring amino acid
PARSQQEPGPRRRRRGRGEEATSLPAAGAARAPEPPRPLKTXAAAAPRARQYLYIFFFFKSLLAKLIRNSVWPRSKYWRRNHEIDEFALGVGKKVKPGANMGQKVTGGIKTVDIKDPT

SEQ ID NO: 941995 - protein, 236 aa, Homo sapiens
MAAAAGGGAGAARSLSRFRGCLAGALLGDCVGSFYEAHDTVDLTSVLRHVQSLEPDPGTPGSERTEAFYYTDDTAMARALVQSLLAKEAFDEVDMAHRFAQEYKKEGERGYGGGVVSVFKKLLKKKCGDVFEDGWEEFNGKGFYGNEDAILLDAIFLAYKNVEDVEKFEELFLELTEEFFLDYNATILEELAVELAFQEEFFKEEFVKKLLLEMEDVEGDGKWVLDGRELGMEEGG

SEQ ID NO: 941996 - protein, 218 aa, Homo sapiens
  misc_feature (139)..(139): Xaa can be any naturally occurring amino acid
PFSHSILSFFSHMYKKNERVSVYVCVCECVWFVLFFSCFKKLCWSGGWGGGRGGRRRGQVGVPWGVSGASGGAPPGPGWKGMGMGVFTGLCAGQPPVGGLCLHCMGGMVAGLLSGSGGLLLGAWWECPAGAVAALLWRXGAARELGVLVLPCRLQGLGGSQAPHLQGRELNRRWGNLLVSNVFIHEAVHAPVGLLQVLFFVLLGGLLVAPVAVPPELQ

SEQ ID NO: 941997 - protein, 286 aa, Homo sapiens
  misc_feature (138)..(138): Xaa can be any naturally occurring amino acid
  misc_feature (154)..(155): Xaa can be any naturally occurring amino acid
MPASALTPPPSRPRRPPGRAAPPHPGPPPPPPPRCSSSRPGKVAVEIAKSKNKKWLQILQFPHINQCEENAAQTYEHDYHKPVRAAAPLGDLIFREFYAPGPELNHFVDFLDGVAEYEMTPDDKRKKCGRQLQKHFLXHTGPKLIPEVTRPMLXXFTTRLAQGPCHGLFPEIPRLNPAYLSVAPFADYLDSIYFNRFLQWKWLERQQVTKNTFRQYRVLGKGGFGEVCACQVRATGKMYACKKLEKKRIKKRKGEAMALNEKQILERVNSRFVVSLAYAYETKAAL

SEQ ID NO: 941998 - protein, 52 aa, Homo sapiens
  misc_feature (9)..(9): Xaa can be any naturally occurring amino acid
  misc_feature (42)..(43): Xaa can be any naturally occurring amino acid
LQGLGAGEXTFTSASRGRSTTNKNHGGGAFAPFMPVWCPLLXXLFPFLKTAN

SEQ ID NO: 941999 - protein, 277 aa, Homo sapiens
NTDSLFHPSFPPLSLHSAGHPFLYAKELFLGAPFFGGTPNLLILVFLLLGSFPSTDARSLPLKATFLEDLAGIGETEGSSASSPNLPPPWTPALNPTSMGPQPTSLGGPSPPTNFIDGILDFFRHYVMLIAVVGSLAFLLIFIVCAAVITRQKQKASAYYPSSFPKKKYVDQSDRAGGPEAFSEVPDRAPDSRPEEALDSSRQLQADILAATQNLKSPTRAALGGGDGARMVEGRGAEEEEKGSQEGDRKSRDMGSSGDTEAQEEPCSGVLRGLWWR

SEQ ID NO: 942000 - protein, 134 aa, Homo sapiens
  misc_feature (82)..(82): Xaa can be any naturally occurring amino acid
MPGASGRLRPGDVAGPGEWLRGNGCLRGGANGGPASPGYVATGGALAPGFRLALLGWGSLGLRWGGSGFKFWVPISVAPGPXDGEATRGEWGSACMWDAWREAAVCGGEREAVVGWFLRHSRGLKGSAPAMDTI

SEQ ID NO: 942001 - protein, 334 aa, Homo sapiens
  misc_feature (44)..(44): Xaa can be any naturally occurring amino acid
  misc_feature (124)..(124): Xaa can be any naturally occurring amino acid
  misc_feature (204)..(204): Xaa can be any naturally occurring amino acid
YFSGTVLNCCAFLGEGGGALATAKVPASFLGGVRQCPPPPFWSXSFLSGFPSLNDKHQPFPTQGAGGGGGGRWVGCSGRGSAAALAPVRPLPWLWGAWPWAAPPCWGWGAIQFSALPPGIFPGXEGGRVWEGLCHPVGSRTGGGHGCCGPPVGAAGCPLPPPPPTGYPGVPAFWPWGSGGPPWGSGPGPTGLAGPAGGSPPPPXMALHSHTPAQRLLSMQLNVTCVCMSCVEGKAAGGHCCATHPGVQGMQGALSLVYEPRPKRVKGSVSPPSPSPNMPRPPWALESFAMNSPGAFLFILLFGHPHLLQSVLRGQDGAPIHVGSAVPAGLRFDF

SEQ ID NO: 942002 - protein, 197 aa, Homo sapiens
CLTTKENMLFSSFTLLTSPLFAPRKSLLSVIGQKNLKNSTAKLFVLTVDSHFCHLAWVNTPKKQGGLPPMNIPFVLNPKPTITHDYGVFKADKGISVQGVLFIINYKGILRQITVNNLPVVPLYGLNFETSSGLPVHLQTWGSVPIWLETLAVIPSSLMSKKAKNISPSRSERWAVLVPSCIGHPSKQNLFCIFFFH

SEQ ID NO: 942003 - protein, 235 aa, Homo sapiens
  misc_feature (114)..(114): Xaa can be any naturally occurring amino acid
  misc_feature (129)..(129): Xaa can be any naturally occurring amino acid
  misc_feature (136)..(136): Xaa can be any naturally occurring amino acid
  misc_feature (140)..(140): Xaa can be any naturally occurring amino acid
  misc_feature (155)..(155): Xaa can be any naturally occurring amino acid
  misc_feature (160)..(160): Xaa can be any naturally occurring amino acid
  misc_feature (167)..(167): Xaa can be any naturally occurring amino acid
MSREMQDVNLAEVKPLVEKGETITGLLQKFNVQEQDIETLHGSVHVTLCGTPKGNRPVILTYHDIGMNHKTCYNPLFNYEDMQEITHHFPLSHLDPPRQQDRPLLPPRNIYPSXDQLAKILPGFLQQFXLKNIISXGTRXSTYILTPFPLNNPKXVEGLXLINLNPXAGGGLAWAASNISRRTQTLPAIVVSHLFGEEEIHSNLEVGHTYPQHILNNMNPPQPPPFHQYLQQPAR

SEQ ID NO: 942004 - protein, 157 aa, Homo sapiens
EVNSCGGFGAKVRLALRKGRFSAPFTPFSKYQQGVLPQVPTQPLLELCVVFETLWRILVSPFLLIALAYAIFVVTPFCHLFFFSHCLGIFATGSENKKQRFISTFSSHVLPCAPSRSSLTMFNFQIPNKPRGVVCIMYAFLFLLSSPFLHHPLGSTE

SEQ ID NO: 942005 - protein, 55 aa, Homo sapiens
MENLGLLFGQMLLLFQTFFSSALCPSAESFPGVARCFGTNVFSKTLPAYCIIGLG

SEQ ID NO: 942006 - protein, 63 aa, Homo sapiens
MSWMGALVLPYRTRGLWKTGSLSGGKASYTSNHRGFSFSTPARTRSRVREKMLPTVSSRLPAM

SEQ ID NO: 942007 - protein, 255 aa, Homo sapiens
  misc_feature (120)..(120): Xaa can be any naturally occurring amino acid
MASAVAAIRTLLEFFKRDKGVTIQGLRANLTSSIETLCGVDSSLAVSSGGELFLLLHQSCLPGNYSDYSKFKKIMIELGELFLLVIVTVEEQNCRSVLYFDLRLSDNIDIIAYSLYMCSXESLEAAVGGPGKRFYLYTSLSQSLNLSGKKIGKALCHLNVPVTVVLDAAVGYIMEKADFVIVGDDGVVETEEIINKIGTNQMAVCAKAQNKPFYVVAESFKFVRLFPINQQDVPDKFKYKADTLKVAQTGQDLKE

SEQ ID NO: 942008 - protein, 324 aa, Homo sapiens
  misc_feature (6)..(6): Xaa can be any naturally occurring amino acid
NLGTEXQAANQGQGAVERPKSDRVPTVPNPRLGPAAGAAMGKKHKKHKDKSRSSYEDYTDKPLEKPLKLILKVGRSEVTELSRSGHHSNYYNKKSNHEPKRHKKKKKKKKKKSEKEKHLDDEEKKKPKEKKKRKQKKEHCDTEGEADDFDPGKKVEVEPPPDRPVRACRTQPAENESTPIQQLLEHFLRQLQRKDPHGFFAFPVTDAIAPGYSMIIKHPMDFGTMKDKIVANEYKSVTEFKADFKLMCDNAMTYNRPDTVYYKLAKKILHSSFKMMSKQAALLGNEDTAVEERVPEIVPGTSRNCQEIQKAEIEKLSAACLSLK

SEQ ID NO: 942009 - protein, 153 aa, Homo sapiens
LHSVTLNVSAANLQAGAAAASCISPKYYMIFTPCKLCHLCCRESEINMHSKVTIICIRFLFWFLLLCMLIGKSHTEDDIKIATKNGKVRGRNLTVFGGTGTAFPGIPKAQPPPGRQRTKKPQALTKRPENRNAKKNAKTCGQNIDQRCPGLNG

SEQ ID NO: 942010 - protein, 158 aa, Homo sapiens
GTGARTREVWKWNKWRRRRVRRAVDVESVWKRGKSVCGEKRVKVRTEVQAGPKAAARGRHRQAAEKGKSGKEAGRPGKKKGTNRGRRQGEGAGRNNKKERKRRGAEGTGQQGQEKQKPGEGKQGKQAQEECGGRGTRRAGGKGTEGRKPRSKGGGGLS

SEQ ID NO: 942011 - protein, 114 aa, Homo sapiens
GTGSRRRTNKQKREAREEARRKKDEGKNKKAKGRGKKPGEKGTNRKGNQNRRGRQERKGRKGGGQQREPQDEKQQGAGERRTVNAQGRRKDQRGARKDSYSMMTRGGMNSDNRL

SEQ ID NO: 942012 - protein, 89 aa, Homo sapiens
  misc_feature (7)..(7): Xaa can be any naturally occurring amino acid
  misc_feature (33)..(33): Xaa can be any naturally occurring amino acid
  misc_feature (38)..(38): Xaa can be any naturally occurring amino acid
  misc_feature (40)..(40): Xaa can be any naturally occurring amino acid
MGQLYEXNNEEDYFLYVAYSDESVYGKYSGCEXSRWEXWXWGVGAQARVLCHKIQKTALASQRQAAQQTEAHLENITPNTPLITFSHAQ

SEQ ID NO: 942013 - protein, 181 aa, Homo sapiens
  misc_feature (51)..(51): Xaa can be any naturally occurring amino acid
RKSQFFKKIAVIVLLCHGLLCAAKQKCSVVLLLLAFMFGFQNEQLVIIMYXLKYDQLISLTNIFQPVIFEKERIFLIQIHNIQKIPEREISGIRGLQIRNKTLIQLVINGYKEKKRRINMPAKKEIITKHRQLPPPITKEQKPREKSRGPPTNENNIDQGNDQSSREESKAKMSHSYFRDK

SEQ ID NO: 942014 - protein, 116 aa, Homo sapiens
MVSGLLLRGRGGGVWGWPGGCGARRGARAGGGAGISLSDTPCLCVALIMYSTLPTCSKARQPTGRQKYTKKNYSVASGGKIVNVLVPFTKPQPKKVTHKIPERKRCSRLRLRLSRC

SEQ ID NO: 942015 - protein, 154 aa, Homo sapiens
MTVPLVITPKVVYSGDEGFFFTPSIGRHKVAFSSGCVTWAFLKRKPIGLMNLSYLGGFPVKPSPTKHTLVTILFHAFIFPFPVRITFNTSVSPGARTLGRGTSHFPAGAVRGGVIILERTLARECPARSSREAGTGPGGAVQHSVGWWGAFHAS

SEQ ID NO: 942016 - protein, 288 aa, Homo sapiens
  misc_feature (157)..(157): Xaa can be any naturally occurring amino acid
EKGFSHMGTNHQGSPGPHLELPSAALALEPVLRICALTLTGSNRKLQPTASMRVIGGQTVERRFLSSRGQAPSGMAQSSYRGDFAHESPWGSEQIIAGAEPGQALYISIRSMQVGARWAQANEPTRRALTGQQGQEGKGTGKQSPLGGRESVDIGTXPRKGTRGLRNRSTQTALGQKLPGELGTSRSVWEPHPVPVAPGTPGSVTPIPKLGACVATKQKGNRGRGAGWQWSILAARGDQVTTGKDWSLVFKKEGWGWHTGKATPIKCLDCVTFTGRRAGSWARHSGTV

SEQ ID NO: 942017 - protein, 244 aa, Homo sapiens
MLWGSGLCLWGVRGIHVLGVWGRGGSRLSWGVRAVWRGPSYGFGDEACRRLWVMSWRGSRLCLRGWAMFWGGVNAGGWGPGLAGGCVPRIQAGPLGNFWICVLASVGLDTQRLRPSQQRKLLENMKDRWYQADSPPADLLLTEEEFLSFLHPEHSRGMLRFMVKEIVRDLGEAGSSLAGSQDPGPDWQGPGIVGRSGQVLREPQPGCGLTHSRLADQDGDKQLSVPEFISLPVGPWRTAGQDID

SEQ ID NO: 942018 - protein, 114 aa, Homo sapiens
MASYSLVVVFGSQLAGQGVVPQSPLRAETRRHCPAALSASLLPALLRGLLGAALVGAPQQPLQRLLQLLLQGGHLPVKAEGPGATAEAGRRGPEYSGYSSKAVALMWTTFWKVF

SEQ ID NO: 942019 - protein, 104 aa, Homo sapiens
  misc_feature (6)..(6): Xaa can be any naturally occurring amino acid
  misc_feature (28)..(28): Xaa can be any naturally occurring amino acid
MPGSVXCTKGYRHCAPNPLLLWTLLLFXAPFGLLGEKTRQESLEAIPNWQGPLQNLDDIKAVGTKSTLHYVWSSLEASEDGNGEPHNTPHSTQEPTTGDLLAIP

SEQ ID NO: 942020 - protein, 71 aa, Homo sapiens
WGGVATSHRGSLQGLHEIFPLFDGGIQLGDGIRDHLLIKRGDFADAQVIHGCTFSLAAAVWRSRDIKFTVT

SEQ ID NO: 942021 - protein, 247 aa, Homo sapiens
  misc_feature (157)..(157): Xaa can be any naturally occurring amino acid
  misc_feature (171)..(171): Xaa can be any naturally occurring amino acid
  misc_feature (204)..(204): Xaa can be any naturally occurring amino acid
QFRGWVLILLINGQYGPPPARLPPMPIFGGVYGWLGERVFGVLGGEGGQGCLGVVPGRRGLGCGVPGEGVDVAPWGPGPLGVAVLFAFLWGGALSVGFVGWVVACGSGCWPGLPGWLEWRVGGEVREGLGGLGPFLGGFIAFGFGAVAFGGPVRELXGLGVPGFVLANWAXDPFGWLGGLLGFGAVVVLYFGSLPLPFVCSFLXGGLSKTVLSSSLGRLFGNVSSDPLTSWDGITDADSVTFEEFLW

SEQ ID NO: 942022 - protein, 188 aa, Homo sapiens
ARPPTLMAGWGLGQGRVPKVVLFLEQLSSPGARKILFAGVGMVAQACAPGALGGWGGWVPGSGGRGRRWLTWWDPLSTKDAENFGWGWWWGPVVPATWGDGEGGWWGPRRRGLPWAGVGPLHSRLGGRARLRLLEKEKKGKLLCEVRGGGGVWRGGGGTGAGPHLSSSLGSGPPGQPNACRRAQFWPR

SEQ ID NO: 942023 - protein, 206 aa, Homo sapiens
ALLVPVAPPETRSRPAPQCQRPVYPAGAASPPEDSTSNEPSSTLQVASPGHPALMTLKAAAISTVQRYKFFSLRGPMCCKRDLRRLHKTVYPIERLVADKLIFHNSFFCCKIRHTKFTPRAATLRCTGSYNENPTSRSCLRAKANKKRGLAASSTSDALGPQGGGPRDQDGLRRLKPSSPSAEGLERGKRGKVGSEVQAGACRGGP

SEQ ID NO: 942024 - protein, 145 aa, Homo sapiens
MKPENTVFDIPKPWAYTPKPKYTPKNTESNSENPEFEYQNPRYKHQNTAYKPRSPGYEPRSPGYESESSRYESQNTELKTQSPEFEAQSSKFQEGAEMLLNPDEKSPLNISVGVTTLDSFTQGFGEQPTGDLPKGHLFEMPTGAL

SEQ ID NO: 942025 - protein, 105 aa, Homo sapiens
  misc_feature (87)..(87): Xaa can be any naturally occurring amino acid
  misc_feature (100)..(100): Xaa can be any naturally occurring amino acid
  misc_feature (105)..(105): Xaa can be any naturally occurring amino acid
MIQTVPNKNTVHLYWKTGSHLFVRESWVSAFTRAKFNGNLPISLNFSSCQKQNRVYIKVDMTRVTVYISVWPVLFTCEMLPCVIPGXGYHHAFRLAFGVXAAVRX

SEQ ID NO: 942026 - protein, 275 aa, Homo sapiens
  misc_feature (8)..(8): Xaa can be any naturally occurring amino acid
  misc_feature (35)..(35): Xaa can be any naturally occurring amino acid
  misc_feature (39)..(39): Xaa can be any naturally occurring amino acid
  misc_feature (46)..(46): Xaa can be any naturally occurring amino acid
  misc_feature (61)..(61): Xaa can be any naturally occurring amino acid
  misc_feature (69)..(69): Xaa can be any naturally occurring amino acid
  misc_feature (86)..(86): Xaa can be any naturally occurring amino acid
  misc_feature (88)..(88): Xaa can be any naturally occurring amino acid
  misc_feature (151)..(151): Xaa can be any naturally occurring amino acid
  misc_feature (154)..(154): Xaa can be any naturally occurring amino acid
  misc_feature (177)..(177): Xaa can be any naturally occurring amino acid
  misc_feature (200)..(201): Xaa can be any naturally occurring amino acid
  misc_feature (203)..(203): Xaa can be any naturally occurring amino acid
SPPPQDGXKEVSFQQLQLLSPPIQGSRLNQRGGDXQTGXGNLLRLXHFFLLPSPHSLPFPXEPCWPLAXLRPRTSLEEVDWDRAPXGXGPRPKGGGTYPPPPYSSPLISQHREHLSPNNSIMEVYQFQGSKEQVGYKLAGAFKMTAGSRGXFAXTSSYPLEETIGPLLFLFVVIAFXSHLISLGKQDLSTLFLITAILHXXFXLGLNSKMCKSEVIYKVKFISQAFLQEMDWYPKEDNLVTNNTAALAPAGTWPLPLRFNLFPGKGHRIKLPKVK

SEQ ID NO: 942027 - protein, 285 aa, Homo sapiens
MGSPDSMSVGFIGAGQLAFALAKGFTAAGVLAAHKIMASSPEMDLATLSALRKMGVKLTPQKKEKVQHSDVLFLAVKPHIIPFILDEIGAEIEEKKIVVSCPAGVTIITIEKKLSTFGPAPRVIRCMIKTPVVVRDGATVYAKGTDAKVEEGRLMEQLLSSVGFSTEVEKDLNKAVTGLSGSSTAYTFTALDALADGGVKKGLPKSLAVRLGAQALLGAAAMADQEQVSPAAIKKTILDKVKLDSPAGTALSPSGHTKLLPRSLAPAARIDTSCLTTILPPPSLL

SEQ ID NO: 942028 - protein, 289 aa, Homo sapiens
  misc_feature (174)..(174): Xaa can be any naturally occurring amino acid
  misc_feature (242)..(242): Xaa can be any naturally occurring amino acid
CQLCAVASYFLSPGLSVSSSAASPDFCQNIARDSFRHRTDWQQGLLHEWEFAPALHGLQARHLLTLGLPEHRKPTWAAMEWDNGTGQALGLPPTTCVYRENFKQLLLPPVYSAVLAAGLPLNICVITQICTSRRALTRTAVYTLNLALADLLYACSLPLLIYNYAQGDHWPFGXFACCLVRFLFYANLNGSILFLTCISFQRYLGICDPLAPWHKPEGRLAAFLVFVALFLPLTNHSLPTPXFPPTAIHPKPTLSYQLTPPPLPTHYIPYPIPLTLIPFLLPFPPLLPS

SEQ ID NO: 942029 - protein, 127 aa, Homo sapiens
SGAGSGLRSPSRSALPPLPVPPGCPAPAESPPPLAHRSDPCPAAPWLRALPLLPFSGAVGRAALASALPPSLPVCWPLRPWRPSSLACLRPNCRDCSLPLDELGCSLPSPKPGRLDGVGSQSPWSYC

SEQ ID NO: 942030 - protein, 201 aa, Homo sapiens
  misc_feature (116)..(116): Xaa can be any naturally occurring amino acid
  misc_feature (133)..(133): Xaa can be any naturally occurring amino acid
GDAGPRAAPRHVRVNMDELRQKVMINQFVLAEGCAADQAKRMLQEEHWQFVERAEQRFFQKTNIPKKYQQHLDDVNSQQHPCHAAQLPRFDGYVLQASCLRGNAEQQQPHDSRRLXPTYKLQHLMGLLPDKTXGVLAPALLPQHLPPPPQHTANVAQQKHSREEPTEKPWSHGRPEMRMDAAGRWAGAKGQPRVVGKQEGQ

SEQ ID NO: 942031 - protein, 105 aa, Homo sapiens
MVLLTRDGVGFFVFPSAPFPSLSAIWGFSLLFSFALPPPFRFVPLRAFPLPPAPAAPHPTGPGGVRKPAVGGHEGVGTNGCNWAALGGWRGARDALRARPAQPDL

SEQ ID NO: 942032 - protein, 87 aa, Homo sapiens
  misc_feature (3)..(3): Xaa can be any naturally occurring amino acid
  misc_feature (52)..(52): Xaa can be any naturally occurring amino acid
MSXRGPGGCAGGGARGPPAIRPRLFRASAPGGGARGSLGGARGGGCVLVQCXGWGGAAGAWTGPPSPARDRRVRPPGTKAQRLERRR

SEQ ID NO: 942033 - protein, 179 aa, Homo sapiens
GGEAHACNPSTVGGPGQAGQLSPGVRAQPGRLGEILLLQKIRKTRYLPGMELRARRGHKLLGGLGWGGHLGPGWGSSGLCCRHWTPPGETGRDLVSKGGKGEEALLQTTYCNFRLAEYSRKFMLVSAQGDITPPLLNLSGYGFFVSWPYILDAGTLSFSSLLHFYFCVSSFFSWQQYQD

SEQ ID NO: 942034 - protein, 123 aa, Homo sapiens
  misc_feature (20)..(20): Xaa can be any naturally occurring amino acid
  misc_feature (52)..(52): Xaa can be any naturally occurring amino acid
  misc_feature (82)..(82): Xaa can be any naturally occurring amino acid
MGLPGQVSPERPFPAPLEGXLGAVAHQAQEQPHPGGKAYPKNWPCLFLRGPXVRKTDAPGVTLENRKLFQEEGGASVSPGAXLARKALGNPHQSHGRGAVVTCDHGCLAPPAGPPQPFLAGLA

SEQ ID NO: 942035 - protein, 69 aa, Homo sapiens
  misc_feature (40)..(40): Xaa can be any naturally occurring amino acid
  misc_feature (42)..(42): Xaa can be any naturally occurring amino acid
  misc_feature (57)..(57): Xaa can be any naturally occurring amino acid
MVLVSGSESTWSFEALGTFPLVEPNLGSAGSEKEVDAVDXQXVGERKGGGPTPPRRXRPLFRRTGTEGG

SEQ ID NO: 942036 - protein, 237 aa, Homo sapiens
AENPGGPPSRGLLDDGFQVLPGERGSGEAPPGGDRSTGGGGGDGGGGGGGAEAGDGGRRRLWQLLPWRAAAELLLHGARSKPYSCAECGKSFGVRKILIIHHRSHTKERPYEYAEYEKSFNFHSGLIRHQMTHRGERPYKFSEFEKTYNLKNTFRTTQRLHTGERPFQFSLFGKNFIRKTEPAQTHNASTRGERPYTCGECGNIFRYKESLKDHLRVHSGGPGPGAPRQLPPPPERD

SEQ ID NO: 942037 - protein, 104 aa, Homo sapiens
GVESLGSWASGETWPGPASSKTEGARSAGTQPRPLADPAMDPFLGAVALVCRLALCSSELTDLKFLCLGRVGNAKLVSCADRPRTFFHFVGVERIVVRVKLVLV

SEQ ID NO: 942038 - protein, 94 aa, Homo sapiens
QRNCFAACHLLWQAAILVSESGVCSRLGRRLYTFQKLTGSGIVLGCLAFIVLTVNVSSMLLQLCDYVPYVLAPRPSEVEPYPLHLSHSHPHFSI

SEQ ID NO: 942039 - protein, 229 aa, Homo sapiens
MGRTYILEETVGQYFSNINLQGKAFVFGLLIGQCSSQKDYVIVATRTPPKEEQTENLKHPKAKLDNLDEEWATEHAFQVSRMLPGGLLIVGIFIITILELANNFQNALRRLMFAVEKSINKKKFWNFTEEEISERLTLHISASTKKIFSRTYDIHDPKNSARPADWKYQNGLSSSWLSLECTVHINIHIPLSATSVSYTLEKNTKNGLTRWAKEIENGVYFINGQVKDE

SEQ ID NO: 942040 - protein, 113 aa, Homo sapiens
QTSNDNKIEEIKLLAYLTALNRILDPVKTKSYVPMWVYANLYTHIIPLGGPSPILAIISSTQFFLAISVDSVWCVFFSIFHNSLPLANSTKAFYRRGCGGGGGGGRHLSQFFT

SEQ ID NO: 942041 - protein, 211 aa, Homo sapiens
  misc_feature (68)..(68): Xaa can be any naturally occurring amino acid
  misc_feature (113)..(113): Xaa can be any naturally occurring amino acid
  misc_feature (129)..(129): Xaa can be any naturally occurring amino acid
  misc_feature (138)..(138): Xaa can be any naturally occurring amino acid
  misc_feature (179)..(179): Xaa can be any naturally occurring amino acid
MVPHFPQTINSNMNTENHKSTILSSCLLSPHSSIMPPSSALAAPGHLEVLGCGWGAVGGLRVVQMLPXQRESQLGGCIWAGVLIQGRGEVGAVSWVAGAEDRETPVLFHLPSXINGGFLQLLRRTPTTXSPLVDPPLXSPGDTDAAGAMRRRSLPRLDMMSSGTVVVMISSLVLGIRSXGPWYLHSCSALFRLRCCLTVLVTRPLQLSGMT

SEQ ID NO: 942042 - protein, 153 aa, Homo sapiens
  misc_feature (12)..(12): Xaa can be any naturally occurring amino acid
  misc_feature (19)..(20): Xaa can be any naturally occurring amino acid
  misc_feature (31)..(31): Xaa can be any naturally occurring amino acid
  misc_feature (47)..(47): Xaa can be any naturally occurring amino acid
MTSKALSISPLXYSLKKVXXSKRRQNVRVHXFFCAFSLSPTPFGNRXCQVLQPLLVGFRGTNLGDDKTQQFVQQLQYLVSILGKVIQLSASSNSTLFSATQATLLKTGFVLLVNLSITPGFLLPSFSSFPRIISNSRLSITSSLTQRRNMFSP

SEQ ID NO: 942043 - protein, 112 aa, Homo sapiens
  misc_feature (13)..(13): Xaa can be any naturally occurring amino acid
  misc_feature (56)..(59): Xaa can be any naturally occurring amino acid
  misc_feature (69)..(69): Xaa can be any naturally occurring amino acid
MGTCPHTHPKKGXFTGLHNSKVNFIFPKGLCQVEPDPSSLGVWVTPPRGCHSCRCXXXXAPIRSIPKCXNEEQVWLLTRAVAPKKLSWLLFKWPLSCRTMLYQRDKKSTLFC

SEQ ID NO: 942044 - protein, 137 aa, Homo sapiens
SLWACWCLALRWYLSSIPGEVETENVGTISTEVVQPTLVDLLLPTGQLCLQQLGQVADDEGVPGGRGISKGELLGAQGLGEQGQRLPSLWVQLLLQLFLVLRPVLPSEQLSRSMYCRCMRPGRKKWRGKGIASAYHF

SEQ ID NO: 942045 - protein, 70 aa, Homo sapiens
IETSHYVAFVNYGKDDSAWLFFEILAAFVLVVIVVSTFFKLPPVPDFGVYFMIFVCMTFFFCFPVIFLFV

SEQ ID NO: 942046 - protein, 103 aa, Homo sapiens
  misc_feature (35)..(35): Xaa can be any naturally occurring amino acid
  misc_feature (71)..(71): Xaa can be any naturally occurring amino acid
  misc_feature (87)..(88): Xaa can be any naturally occurring amino acid
  misc_feature (91)..(91): Xaa can be any naturally occurring amino acid
  misc_feature (97)..(97): Xaa can be any naturally occurring amino acid
IRHWITGPPGIDRCALFAYCYISRKWPSFLRQKVXLWFRVYHRPSSSAGGINVDICVCDFGGGGWVRRGAXCCSIYEWLRFEAWDPXXLPXKELGPXGPQVAA

SEQ ID NO: 942047 - protein, 94 aa, Homo sapiens
  misc_feature (2)..(2): Xaa can be any naturally occurring amino acid
EXNSTFSSFTHRPRPSGIHPELRRVRKWSRARLLVGLMGSGAEKVADSSACGPAAGSGSLLIFPLWSLTSEGGKGEREKEGPGASGLYFRRQRL

SEQ ID NO: 942048 - protein, 192 aa, Homo sapiens
MWHFEEATFLERDAWFQAIESYILASLQCCESSKVKVRFFCGVEDWPQELTLVLTAIGNLTAEVVFFESRGVFFVGGAWRQSQFQPKFSLQLRKDSQSEVVAIQVIGNAKGNSICVDCGAPSEFQEAAEGLGSVVNAGVPVLPGWEPPLRSFRRPHVGQLEPGLLICIECSGIHRNLGTHLFRVPSLDLDDW

SEQ ID NO: 942049 - protein, 123 aa, Homo sapiens
  misc_feature (89)..(89): Xaa can be any naturally occurring amino acid
MGGGMAGPGAVASWEGEPAHARGSRAGQAGPATGPTLGSGPPAAMHHSTPQARGCLNTGSASRASAVARSLGSGSSIMDKGRTQFGRQXGSELRGQVALAQWLQALPTVGQLHVACHLQDGEA

SEQ ID NO: 942050 - protein, 226 aa, Homo sapiens
GGVNIPHTPVRFRQVMAHRFGSPTEELSVSDVSPSRRDLRDGSEVSALKLQGQGSSERGDGARKALEEAPAAAAGSGRSGPQGVEKKAAENAGGASRELEPVRWYKEWIRFSMTIPSTAMPVKSRATSSMSTETAVLPFGATRAEIQKLNPQPGGPMAWGTKSTSWTKKMKKKKKKLNELSLRKALDMGRYQQKKEQGVKKKTQKIESPKPPPFFGFHTEAGQAGE

SEQ ID NO: 942051 - protein, 61 aa, Homo sapiens
YEEPVAGGDVWVELWPPLLLLLVLVVSGSPVGSSGRLMASRCSLELEGLGLGVCFLGVFVC

SEQ ID NO: 942052 - protein, 115 aa, Homo sapiens
  misc_feature (33)..(33): Xaa can be any naturally occurring amino acid
  misc_feature (44)..(44): Xaa can be any naturally occurring amino acid
  misc_feature (50)..(50): Xaa can be any naturally occurring amino acid
MKKTIQLIKPVVRGGAVGGPGLPSPGSRPAAAXAPLPPGCPVSXFGGGGXGGGGEGGGKFCCPQCGGGGGGGEGVCSLGPGGGVGKQGLCQFCGFRAHAERNSPFVPSCLPPLLC

SEQ ID NO: 942053 - protein, 293 aa, Homo sapiens
PFLDHHTGRSGPDRQVDRQTVQRDKKTTNWISGPRPGSAAVSRLQLQLCSGELVSKKNWPGPLFLQGSFSSCPTFPHPACWDPWQVDFPGLWLAGLSEQRIEALGDSLGSWRPGFFGVSSSSGGTLVNFQAVATAQQGPYFQGRPSTCPPHQHGAINKISSSKSVSSRRAAGWQKGRAEKDKPPATHHICSVGSSGRKSVLCTGVGVWPCCPHEHSPLTSSPSHQRQILLGGAEAGQHGAHSVHDGCQVLVLRLRPTELHEVCQTLQVFKVVAGEAPAGQDLRGNGLFRRGAR

SEQ ID NO: 942054 - protein, 258 aa, Homo sapiens
SALSYSQTCREGCGAQIHGGSVGWGWVSELCACAPEVGSRACVLRHPEISREMAGMREDDAEAKPGAQTGRSPVCQGWRWALLQAPGAHQWPPGVVVEGVHVGCASQEPLMQNGQEDEVDALCRKPDHPSAGRDPRLGHCSGGRAQVERVGQRRGDGREAKPRSLVAAIWWERYLLKRDSGKCSRKIGVQKIPGYEILGKVNYDQGKNVPQQTLEHCPPFPKRMAGAGAWLRLRGLGSYEGLPGCALCFFFPSKVLGL

SEQ ID NO: 942055 - protein, 71 aa, Homo sapiens
GVSTFMFTGVVMVAAAPSDMEGSLGGGCATPDAIEQAKGSGLAGSERFLALCGGSLNNLNPTLAEEFVFWH

SEQ ID NO: 942056 - protein, 70 aa, Homo sapiens
  misc_feature (68)..(68): Xaa can be any naturally occurring amino acid
IGFTSSFAYLRATEAIRGPGPEELEWRVIQNKELSVASQGLRSPPGTERDLRDDFLFSSSGNQNKGRXFG

SEQ ID NO: 942057 - protein, 114 aa, Homo sapiens
  misc_feature (4)..(4): Xaa can be any naturally occurring amino acid
  misc_feature (17)..(17): Xaa can be any naturally occurring amino acid
GSSXVREGWLRERRVRXGPRWTSRRCSPPALPAEGNIGGGAPGARLRAEPHAARLRATAARRSAARPAHLFWALNIGGPGARPGTASRPNPPARRGAIRLAGDLLFFRCSLGSC

SEQ ID NO: 942058 - protein, 191 aa, Homo sapiens
  misc_feature (185)..(185): Xaa can be any naturally occurring amino acid
AKKNTSRNPPPGNPPRPRSTLLTRGHLKTTPPPPPAETTTTPTRTTNNPTADPQTTPREAPNTPPTTHTQPTPPNHNPQPHPNPQPKPPTQDPTKTTPQQTTPPTPPTTTPPTPPPTHTHHHPHPPPHTPPKIHHTKAKPPHPTTPTPHPPPTNPPPHPPKPTTTTRTHTTTTPPPHPPQPEPPXPKTTPP

SEQ ID NO: 942059 - protein, 141 aa, Homo sapiens
  misc_feature (78)..(79): Xaa can be any naturally occurring amino acid
  misc_feature (84)..(84): Xaa can be any naturally occurring amino acid
  misc_feature (96)..(96): Xaa can be any naturally occurring amino acid
  misc_feature (101)..(101): Xaa can be any naturally occurring amino acid
  misc_feature (108)..(109): Xaa can be any naturally occurring amino acid
  misc_feature (119)..(119): Xaa can be any naturally occurring amino acid
MQPNSPALRGRPNPSAARGPRTLGGQTATFQILQRVPGCRLCFRLPKKRQLSLQVFHCLKRPFFPIKRCQVKKKYRGXXVFSFXVRFLLSQADVGXVPRRXAGVGSPXXRALLGLLGPXIAGVCDFGIFYFLLVQLVLSPK

SEQ ID NO: 942060 - protein, 190 aa, Homo sapiens
PGVILDNRALGKAKEGGTEVHAHRGIPAVTVIPDIFKHLHGREGLEEKRQNRLGYGSQPQHSGPLGGMTEPTISGACVCRNSSIGQGCASPWGSWAPHSRSVAVWVGLGGLCSVTPLRRDEGGFPGGCVDRAEGEVGVNSPQGSGELPGLSAHMYCSNLYPMYISSRRSGGRASLWARAFGVSTSLKYSV

SEQ ID NO: 942061 - protein, 69 aa, Homo sapiens
VSWLNALQSAGRYVAFTHTCCCGPELEGAFSHRTAKGKYCVKFGIKVGLGVTGEGAGEDRLAPALHHLG

SEQ ID NO: 942062 - protein, 106 aa, Homo sapiens
  misc_feature (71)..(71): Xaa can be any naturally occurring amino acid
  misc_feature (75)..(75): Xaa can be any naturally occurring amino acid
MPLTQGWLRGLPAQTGLAVVCFGRRVNITGNGSVSPRRVGWPLVPGLLLALQAIESLNLLPLLLGPGEGRXEEPXVEVHSQQRVVITGYRVGEEAGVAVGVHEAHC

SEQ ID NO: 942063 - protein, 131 aa, Homo sapiens
MIPNVPFLEKVAKYIPGVCCACPLIHKASMFLPPVLMPVSFQNPNWGRPLALGTDIRGEYNLLLGRDAAASSKTALCSQNLMAGSWLQYSAAKHDADSSRICNPVLSGLHTPTVGRGTGPGLRRLQALAEV

SEQ ID NO: 942064 - protein, 103 aa, Homo sapiens
QQTASKTSYRTHWPSPGCSQPCIHRCARQLQPPPPWGLQRAGLLNHFPCVCTTALSLYFLLQDWSALPPRRKCCGRKWGERAGISRALKLPPSLAAWARMQEA

SEQ ID NO: 942065 - protein, 126 aa, Homo sapiens
  misc_feature (43)..(43): Xaa can be any naturally occurring amino acid
  misc_feature (80)..(80): Xaa can be any naturally occurring amino acid
  misc_feature (94)..(94): Xaa can be any naturally occurring amino acid
  misc_feature (120)..(120): Xaa can be any naturally occurring amino acid
SSLYRNQNILLKKKAEITWVLGKEGGNRNCSAGWGSLSWGAVXEGAESIKPHILCRVGLVAKAGWGCWNKSLRFWKEASXTFYGALWDPRRPQXDRSSDRPKLDLPQLEWVVTQLASQLXDLCHQG

SEQ ID NO: 942066 - protein, 143 aa, Homo sapiens
  misc_feature (94)..(94): Xaa can be any naturally occurring amino acid
  misc_feature (109)..(109): Xaa can be any naturally occurring amino acid
  misc_feature (115)..(115): Xaa can be any naturally occurring amino acid
MGRVNGSCGGFQPNGTYQEWGCGLLSFLGEEERAVPQFSLWALRQGPQCAGRIPKGGKVGVMGSDSGGAGHGVAENGALGGGKLGGWGVGRHQXGGGGAFPLRVGAGNXQHFRDXTRSASFNPFTRRMSSWRLICHEVEGLAE

SEQ ID NO: 942067 - protein, 278 aa, Homo sapiens
ENILLAKPGFLLLFLPILILTPLRGVLQSPEKDFIAIRVNQDGAEISPVPQLLWPFQTNFLLGLWATPAPAAHTVTIWPGRRMYLGVNLEAISSPSKICLLILQFPRDCSLYDFFFICTNFLSRSMSSMVMLHEDEDCWASYNLPLPPVPVPRNLVPLPKGSSTSSRFHLLRPRGPVAEKLPLLLEVAREKVTREDGLGDSFSLSSSPSRSFREALISMSRASFTSSSSWYSASCCCITSRISVISCSLASSIFRNLSRSPAMASSSSRMRSSAAVAC

SEQ ID NO: 942068 - protein, 150 aa, Homo sapiens
  misc_feature (26)..(26): Xaa can be any naturally occurring amino acid
MFSLRKLASSSAGTFIFSKMKVMFEXLDFISAPQEERVQWVRTPPGFSRGKAWFLMKCELVSFPGLLREWVRIVQDPIKVTVEEGVGATPSHRPFKGMTFFFFSGAQFRSRWKTPSFHLMIQCSEMGAFSTFDAAMAMPKPTSRTRPPLE

SEQ ID NO: 942069 - protein, 226 aa, Homo sapiens
  misc_feature (21)..(21): Xaa can be any naturally occurring amino acid
  misc_feature (24)..(26): Xaa can be any naturally occurring amino acid
  misc_feature (29)..(29): Xaa can be any naturally occurring amino acid
  misc_feature (71)..(71): Xaa can be any naturally occurring amino acid
  misc_feature (74)..(74): Xaa can be any naturally occurring amino acid
  misc_feature (143)..(143): Xaa can be any naturally occurring amino acid
  misc_feature (145)..(146): Xaa can be any naturally occurring amino acid
  misc_feature (173)..(173): Xaa can be any naturally occurring amino acid
  misc_feature (177)..(177): Xaa can be any naturally occurring amino acid
MARLLQASFLLSLLLAGFLSXTGXXXIVXIDFNAGINGTIYYYGALTISGEDYMPFKHYGGKYLVFFNVAXYLXFTGHYIEMNAVQEEFAPFGVVIVGFPCNQFGKQEPGENSEIFPTLKYVRPGGGFFPNFQLFEKGDFNGXKXXKFYTFLKNSSPPTSELLGTSDRLFWEXMKVXDIRWNFEKFLVGPDGIPIMRWHHRTTVSNVKMDILSYMRRQAALGVKRK

SEQ ID NO: 942070 - protein, 114 aa, Homo sapiens
  misc_feature (11)..(11): Xaa can be any naturally occurring amino acid
  misc_feature (69)..(69): Xaa can be any naturally occurring amino acid
  misc_feature (73)..(73): Xaa can be any naturally occurring amino acid
  misc_feature (88)..(88): Xaa can be any naturally occurring amino acid
  misc_feature (92)..(92): Xaa can be any naturally occurring amino acid
  misc_feature (95)..(95): Xaa can be any naturally occurring amino acid
MGSHVLFVSLXNDLEGSSSGIGFVCYKVPVSGWTMGHWTELTNRDFLGPPLGEPFLESGFITKSDEGTXAASXGVDGSSSSMRSQCRXRGSXIKXFYVNVLFLGAWVPNKWHCD

SEQ ID NO: 942071 - protein, 135 aa, Homo sapiens
MPPGSQGHCPQKQALERDRQLFIIPSRTSVKLAIEGFDLGGDGLLLEEFTFTGVLIHSLELQFVGQLFTVLAPGLGQDPEPLGGVARNVVGLLVKGCHWPWMLGLSVWKGLRMRITSKPDWSASFCTSVEISSTD

SEQ ID NO: 942072 - protein, 255 aa, Homo sapiens
KLIVDGLLLYFPYRYFSPDLFTFLLDPSPRWAPRVLDSWGSPLAPGSQSPLLALIMAFQTTYPLEVALLFSCSITVPDIEKVIEELRELLLFYQELEGELLPFLGLALTSRLDLCVPPAVPPLLFGKDVDGTCLLLSSSSVRAPSPLVTSLPRCRFSEEFDAHGRVVPLPAGFFHLADLQALGRRQGWCPSFLARYSILHANVVVYSYHYLLDPKIADLVSKELGRKAVVVFDEAHNIDNVCIDSMSVNLTRRTL

SEQ ID NO: 942073 - protein, 111 aa, Homo sapiens
  misc_feature (12)..(12): Xaa can be any naturally occurring amino acid
  misc_feature (111)..(111): Xaa can be any naturally occurring amino acid
ERRPRPARTRRXCRWSPGQCRRARGGGGGGRAPGGRRGGRPGAATSCGIAVGAVLSFVFFSYCFTDLFLAVSYYLSNQHTYHLFLSFLFFFSFSLLFLVFYLFFFFYYYFX

SEQ ID NO: 942074 - protein, 265 aa, Homo sapiens
MNSSSRSTRERVHSAAARIWKAFPGRPLKVEDDSPGVGAVPGTGSRRRVGPCRKSGVLPWARSHCSPPVAHPGLSQGPFGQDADLTNPAPGPSPQDLMGASAQQTHLAVGSRARGCPGRRYRFVGWVDFGEVAQSPGIPRGPDDPLSEPQARALCWGSPVPAATQVQNKGLEQEDEAQGPTGTAGVETGERGQGHCMGLGKGGQAPPGRALASPGCSREGEAQSAGGEQHSPQEGREERGPREGGARRWEGGRGPREGERGLREG

SEQ ID NO: 942075 - protein, 270 aa, Homo sapiens
PVSRPSRTSPPLVAMYRYLGEKLLLCRAGPAALGSASADSAALLGWARGQPAAAPPPGLALAARCHYSEEVADRKDDPNFFKMVEGFFDGIAIIVEDKLVVDLRTRESEEQKRNRVRGILRIMKPCHHVLSFLFPIRRDDGSLEVIEGYRAQHSQHRTPCKYGIRYSTYVSLDEVKALASLMIYKFSVVDVPFGGAKAGVKINPKNYTDNELEKITRRFTMELAKKGFIGPGIYVPSPDMSTGEREKSWIADTYASTIGHYDINAHACVT

SEQ ID NO: 942076 - protein, 206 aa, Homo sapiens
GPVCRGILWLERGGSTRPLQLPQPGSGHPGTAITPPTLFWVWLLVPGTQGVNDGDILLADGGTTNQGPLEIFYRGQWATVCDNLWDLTDPTIVSRPLAFHNPTHPLPTPPFPQPSPPIILHHLHSTPTHPSLPLSNSLPSLNTNSTHHTHPGVFSTNETTTTHTLHLSTDLSHPLPTSLTPTAPPTSPSPSISTPTTPSPSGATRP

SEQ ID NO: 942077 - protein, 97 aa, Homo sapiens
MPGLGAEAVPASAVLVSVRLILLVTAQEGQRVLVAEGVGAGQQELVLYQNLRTAAGRQRAPIGLVEFELSSCSGSLPEDTGTSGDPQDPLAGGARAW

SEQ ID NO: 942078 - protein, 229 aa, Homo sapiens
  misc_feature (98)..(98): Xaa can be any naturally occurring amino acid
  misc_feature (100)..(100): Xaa can be any naturally occurring amino acid
  misc_feature (111)..(111): Xaa can be any naturally occurring amino acid
  misc_feature (145)..(145): Xaa can be any naturally occurring amino acid
  misc_feature (147)..(147): Xaa can be any naturally occurring amino acid
  misc_feature (153)..(153): Xaa can be any naturally occurring amino acid
MHAPPPVKPFLITVHQPTQWGSRLPRQFHNGFSGFGHLYVATHAPFFTPAVLHQPIFIVISFCSFKSVANHQHTMTHVFTATVWLKINAFFIEQEGLXTXINSNRNGPHSXNCLHQGLLLLRDVHKAGVISNRILGIVLTGFFCXLXWIGFLXVQASIILNILESIIHEATIAAFIAFRPRAVYQILLTQSDKPPSFPEHLSFKSTSCTKSPIRTTLTLILHRSDVAFL

SEQ ID NO: 942079 - protein, 210 aa, Homo sapiens
  misc_feature (135)..(135): Xaa can be any naturally occurring amino acid
  misc_feature (160)..(160): Xaa can be any naturally occurring amino acid
GGASLGGGRAGCARDGTFSLGPPGWGEPLGTRLLITAAALWVPHFVFFFFFFIFRPEPLDLGSQLLHLVAGFLAGPRLLLLQPPIFLLRPVDSRLLQAPGLGFGTRLLAWLAGPGRALGWWEGGSVRSSGGRSLXGWEPQPVAARAPGRNRRGPPGRQPXPPTWETVGVGEESPMGGNNPKGGGHPSGGSPWSISIWGTWGWVVGRGGPR

SEQ ID NO: 942080 - protein, 45 aa, Homo sapiens
  misc_feature (3)..(3): Xaa can be any naturally occurring amino acid
LPXSLTKGGDTEGTGDSGLRAPPGGLNNLGTPGGFLSPPPHTTRP

SEQ ID NO: 942081 - protein, 175 aa, Homo sapiens
  misc_feature (61)..(61): Xaa can be any naturally occurring amino acid
  misc_feature (67)..(67): Xaa can be any naturally occurring amino acid
  misc_feature (73)..(73): Xaa can be any naturally occurring amino acid
  misc_feature (75)..(76): Xaa can be any naturally occurring amino acid
MISTSRKVRAMVAQEAFSVRGVGPRAARGGAAAKVPGKPDLNRQSPLGCFARWDLSFFSGXGIVSRXPRKQGXSXXRWGITLPTRDSRHGLLAFKLPGEAEGNLRAERVGWGPRAARSLRLLAPLEEGCLGPGDVTSVPGGRQLRREKARARACTHPLRHTFRLPGVGWEEQALK

SEQ ID NO: 942082 - protein, 84 aa, Homo sapiens
MVRGQTLAGRQQAQQQPGTQQGDACPQPAIGRTEIAQKALAAADAHGSHTNIDAFWDGAGRGTGLAQAVAKCDEIPNAGTSRHS

SEQ ID NO: 942083 - protein, 129 aa, Homo sapiens
  misc_feature (24)..(24): Xaa can be any naturally occurring amino acid
  misc_feature (29)..(29): Xaa can be any naturally occurring amino acid
  misc_feature (31)..(31): Xaa can be any naturally occurring amino acid
  misc_feature (62)..(62): Xaa can be any naturally occurring amino acid
  misc_feature (129)..(129): Xaa can be any naturally occurring amino acid
MAQNRPDLSRFLDRLLSRSRRQPXPTLAXAXPGPGSLDRERRSRDRDLDLCFLRGGPYSSRXSSLEMGFKCMKLQKPPRGHSPISYCREQASLKSVTGESSAVDRLSIKQRVIQVNHSLFGIFLTGKIX

SEQ ID NO: 942084 - protein, 302 aa, Homo sapiens
  misc_feature (12)..(12): Xaa can be any naturally occurring amino acid
MRIYRALSRGRXQSIKYFTPSMTSGTSPTSELPRRSKLEISKKPPVAAVSTPPVPRFWSLRFSRLYGKRLSLPSRGSLPCTPARRPVPRLDGQVKTYPKHSCHMISQPRPWISLSTSVKPRQNLSNTLFMSPPFSMEITLCMTLLIHPDQEALLIVVPNSTSIWPVSSHSCCSQQRGHRLIKQKVVINKLLLFSLCHLTEPIVTSSQVTLQATQCIHHNTFHLSSLCSSSSRRQTESSDASASADSRGQYIPLSKVARTDFTGIQIRGVLQCPGVISIVSLLDHRVKQVSKYLIGLSAQPPC

SEQ ID NO: 942085 - protein, 127 aa, Homo sapiens
MGDPGPSLGGTGLWEGGSPGGRTRPAGALGLEEDSPSGRGGEGLHQAVELVAVVISYGCLSRKRENMGKAARGLSVGTMWPAPLNVRKARGENSSTKPAISPPPSPYFTNQGRRRTPISWLRESTNH

SEQ ID NO: 942086 - protein, 185 aa, Homo sapiens
  misc_feature (27)..(27): Xaa can be any naturally occurring amino acid
MGGNVEGLCGGSTIFSTAFILARGGKXFTSARVRNSAGAAPALARGPRQALSARGLQGTPIGEGKRPGSGKGAAVDGIEVEVMPLLRSDPQTGRSLLGQLGAQCDAGSDSCHGNLLWGILDGTGMARGHHVGLEQGPPRYDMMVTQGLVHSSQDLLCNILTTFEAVVSIRQYFRVHNRHKAILLA

SEQ ID NO: 942087 - protein, 252 aa, Homo sapiens
  misc_feature (21)..(21): Xaa can be any naturally occurring amino acid
  misc_feature (31)..(31): Xaa can be any naturally occurring amino acid
  misc_feature (79)..(79): Xaa can be any naturally occurring amino acid
  misc_feature (145)..(145): Xaa can be any naturally occurring amino acid
  misc_feature (170)..(170): Xaa can be any naturally occurring amino acid
RWHRKEVGGGKDTEDQVSSRXVQFAFSNSEXSTSFSVSIWHSQTRSPQSSYSSQQGHWPSRGRSCPGSSSQETPLPGRXHGPLAGQPGWGQHKRPLFILDGLGAQAQQQAPGSPWPGSGSALTKRAHLRGACAAGAWGGGGPKPXARSAAAGTEDVLAEVWAHPAHLQRXGEHRAVRAHVPTPRLKRRLFLSQRGPRALGAEECGYRKATETEGGHGGREAVHEEHQLPGPSPAGPPGPAFFAAPLCCWTRR

SEQ ID NO: 942088 - protein, 158 aa, Homo sapiens
WPPAKRIARQVKNVPSSALVILFACEVAAGIWGFVNKDQLAKDVEQFYEQALQQAVVDAAANNAKAVVLTFHVTLVCCGSSTLTALTTSVLKNNLCPSGSNIISNLFKEACHQKIDDLFSGKLYLIGIAAIVVAVIMIFGMISEHGAVLWHPEQRRVY

SEQ ID NO: 942089 - protein, 185 aa, Homo sapiens
GAATTGQSDVRKEESVKSGGQCAVNKGGQSMMLGAEWPGGSTLTLSRDLDAQASVHAGIWEGEQHVPRPRGRISWACRAQNKAPARGRISWTCRAQNKVPAPGSHFQDMPHPEQGAGPGVAFPGHAAHRTSRWPRGRIFLDMPRTEQGTAPPWLHCPWPLSSGDLELAETMKPGFNLGCPGQPGV

SEQ ID NO: 942090 - protein, 66 aa, Homo sapiens
PAPSPQPDKRLQAPNLWSWIIEKDPKAHLTDYMKLQQLVCTSESALNPPEKNSTTQKTGGQLGLKL

SEQ ID NO: 942091 - protein, 227 aa, Homo sapiens
MSLFPPPASADRSPPALPRRPPHPLPCLLLRFPFSPVLGSDIRGRRGRQPKQPAASAAEAARRNLHRNSAPAPPPPPPKSGPIGGLSSRHRATEGEFFFGGGLGGGFLLAVAALAQGGPPVPGGGRRWSPNLLRPGGGGAAAGAAAAAAAPWPGPPRPGGENKLVYDDHGSSEEEDGDVEETQESEEKEEHEMEEDEADSDYLEELEDDDDASYCTESSFRSHSTYS

SEQ ID NO: 942092 - protein, 95 aa, Homo sapiens
MLVQLREAEEILQVSFHAEGVGQENLVVVVAEPMRMERLARDSTAVDAIQVDEDVGHPLQYQLLLHDGLAKAERQCLHGPAEAVGVLLKLVGTVR

SEQ ID NO: 942093 - protein, 247 aa, Homo sapiens
  misc_feature (86)..(86): Xaa can be any naturally occurring amino acid
MYPPPRHAVADDDRYYRQLYESDISGGLIKGVGNFDSTFLTSEHLYADFDRHEIQIYEGVANVPPFQRDTLVLIGAQGVGRRSLKXRFIVLNPTRFGTTVPFTSRKPREDEKDGQAYEFVSRSEMEADIAAGQSLEHGEYDGNLYGPQIDSLLEVVQTGRTCILDVNPQALKVLRTSEFMPYVVFIAAPELETLRAMHKAVVDAGITTKLLTDSHLKKTVDESARIQRAYNHYFDLIIINDNLEKAF

SEQ ID NO: 942094 - protein, 191 aa, Homo sapiens
  misc_feature (12)..(12): Xaa can be any naturally occurring amino acid
  misc_feature (111)..(111): Xaa can be any naturally occurring amino acid
  misc_feature (150)..(150): Xaa can be any naturally occurring amino acid
DTKEQGKYKKAXQGPDRKTRERRSGAWVPMAQRPAPRTPPILAQAVGCVFLLEPEQPGSALRSPWSALCLGPAPAPPGPVSPEGRWRQLGRAYRAASPALAPRGSTVSANXAWVSDPPKTALEVGRTRRNRASQRSPGGAAVRAGPLARXVGRLSGTRFVTAALSTRLASAPFSHPGSSLRSSRSKATKAS

SEQ ID NO: 942095 - protein, 228 aa, Homo sapiens
  misc_feature (157)..(157): Xaa can be any naturally occurring amino acid
DLDEPQHQQPEQVCEPACRHGPPEVGQCVEIPDVELVEEGAAEADANEVGGEEGRNALVGCGELGWGFLLEGSLSSDKFISPVLCQLLEGKQQGRGGVGSQQGPAAGSMRGERLWEEEPVHCPVEQKLAAKVKGAGQVAAGVLQLEGQPQHHLKASXDSQFEEGPRKPNCVRRRNSNPGAKSSTFIFTETARLKKQQPQPQRWASRRLILRKSSTMATGSLKSRSTKM

SEQ ID NO: 942096 - protein, 82 aa, Homo sapiens
MAHVSPRRVGWPLVPGLLLALQAIESLNLLPLLLGPGDGRLEEPAVEVHSQRRVVIAGYRVGDEAGVAVGVHDAHCGDVHLG

SEQ ID NO: 942097 - protein, 185 aa, Homo sapiens
  misc_feature (40)..(40): Xaa can be any naturally occurring amino acid
IRIQVQTGQPASTASTANTGLDKEGVSENVLIGSFRVTSXRVRQRNVRRGPLSRRGHNTHPGITVSKTDICLTIKDRAAAPRVSQHASDTINISTLVTLIPRKGTPGDPPGHAAGPVDRPQRQAPPPPGSHPHTQAKHTDQTLVQNLKEEKTLKSDTQSSRRLPAKASRKATGAMPEAATRPPLP

SEQ ID NO: 942098 - protein, 311 aa, Homo sapiens
  misc_feature (16)..(16): Xaa can be any naturally occurring amino acid
PPPQSPTATGLGPAAXSCLAKPPFRGPQQPPSLPQGPGAMSELEQMKKEAEQLRKKKRDARKKCRESTLNQKKAGLEPVGKIQKKKRKTLRGHLAKKYAKHWGNKSRLLVNASQDGKLIIWEKKKKKKVQAIPLRSSWVINCAYSPSGNFVACGGLDNICSIYSLNIRKATSGSAGSCLATVGTCSVDRFLDDNQIINSSGDTTCALWDIETGQQTVGFAGHSGDVMSLSLAPDGRTFVSGACDASIKLWDVRDSMCRQTFIGHESDINAVAFFPTATPSPPALTTPRAGLFDLRADQELLMYSHDNIICG

SEQ ID NO: 942099 - protein, 158 aa, Homo sapiens
MAGASLRINSGVGCFTLMGAGFGVIQFTRGIFHVFFSGKLAHPHSILLHISITAFPSFSACDPSGPASCLTEEVLKQELGNQIFLWGPIPPTTEPPTPTSISPGELHTKPTLAIIITISSINSILCISGVLEAHEGEGHEAVRVLELDLADVAVLVEQ

SEQ ID NO: 942100 - protein, 327 aa, Homo sapiens
  misc_feature (106)..(106): Xaa can be any naturally occurring amino acid
NISTPAFRGCMKKLKKTSGVVRMNEKEGVRKKCSEDWKLVRAASLSRGGQLSFTDLGLPPTDHLQASFGFQSFELSGKLKEDEKWTRNLQVTLEDGYIELSTSEKXAQFLNLHRRKWMVYGIKYLYKSENSGLRLLIDDQLLKKSKKPKDISSSRQSLLSGRENFEGCISNVFVQRLSLSPEVLDLTSNSLKRDVSLGGCSLNKHTFSNVAKGSTRFNKTKTFRINQLLQDTPVASPRSVKVWQDACSPLPKTQANHGALQFGDIPTSHLLFKLPQELLKPRSQFAVDMQTTSSRGLVVHTGTKELLYGSLSVKRTSGLALGTDGKN

SEQ ID NO: 942101 - protein, 112 aa, Homo sapiens
MAGGVLTQLTSLETYFVCQFIFQDFPTHNKLPLFNPTTGARTERPQARHPRQELEERAHCFVLKRDFRQQRYSSMATEGKIERRGGGKGGSNGCASWDSATASNPFCPISTK

SEQ ID NO: 942102 - protein, 173 aa, Homo sapiens
MSVGFIGAGLLAYALALGLYGRRILSAHKIIASSPGMELATVVRAQEDGCEPDTLLLGEVKNSDVMFLAVKLHIITFILDEIGAVVKASHIVVSCEAGVNFSSVEKKLMAFQPAPKVISCMTNTPDGSAGRRCCVRHGHPCPGGGWAAPGAAPEPRGLLHCGGRGPPRCRPGA

SEQ ID NO: 942103 - protein, 190 aa, Homo sapiens
  misc_feature (16)..(17): Xaa can be any naturally occurring amino acid
DSHWSYQKHHGALGRXXAPGVEPRGGTSEPPLPVGLEVNFGALVLLLVLTLLCSLVPISVLRRPGANHEGSASRQKALSLVSCFVGGVFLATFLLDLLPDYLAAIDEALAAFHVTLQFPLQEFILAMGFFLVLVMEQITLAYKEHSGPSPLEETRALLGTVNGGPQHWHDGPGVPQASGAPATPSGLGVP

SEQ ID NO: 942104 - protein, 40 aa, Homo sapiens
MAKAKKVGARRKRLRGEGGSPKRNGEGKIKYVRGESKKEE

SEQ ID NO: 942105 - protein, 229 aa, Homo sapiens
  misc_feature (23)..(23): Xaa can be any naturally occurring amino acid
  misc_feature (26)..(26): Xaa can be any naturally occurring amino acid
  misc_feature (30)..(30): Xaa can be any naturally occurring amino acid
  misc_feature (47)..(47): Xaa can be any naturally occurring amino acid
  misc_feature (58)..(58): Xaa can be any naturally occurring amino acid
  misc_feature (69)..(69): Xaa can be any naturally occurring amino acid
  misc_feature (90)..(90): Xaa can be any naturally occurring amino acid
  misc_feature (100)..(100): Xaa can be any naturally occurring amino acid
MHAAPWAPRAPQGRRPSALALGXKAXTGSXLLQRRAAARVATARPAXFWSPLSSGCGXLLVEMAQGRVXAGVRQGCHSEGQGFRAHQGTXTPRSAQPGAXPPGRMGSLVERETGSKKWGPPAAAFSAAGLLLGWCGRQPPRGGAPGGSPRPGRGLTGAWFTAILPMKNGRVKVASGAFRETCEVVVGVDEAAARQAGLGQGRHQDLLVHFARRQAVDARTLHLRNGPYV

SEQ ID NO: 942106 - protein, 204 aa, Homo sapiens
PGSPMRPLPTGRRKNRGSSLRLFALCLAATRCLQTQGVSLKIPQANNKATVKKKILLSVEYSCQGVPTNEGKKSANWGKQKNVEWKTRTQANISQNQKEKICSFEKGSSQLFIVGVRDSGYYVINVTERLGSSHFGIIVLHVSEILYEELHFVAVILAFLAAVAAVLISLMWVCKKCAYKFQRKKRHKLKESTTEEIELEDVEC

SEQ ID NO: 942107 - protein, 108 aa, Homo sapiens
MSLRAVSSGLSTGVCRVKRVSNWLTSSSDCRQGLKRGSPRLARRSSQFMCRKKGCLCTSAASPGPPPIRWLGFRFKNFLRRSRASGVKKGGSASLPLMILSMVFFRFS

SEQ ID NO: 942108 - protein, 182 aa, Homo sapiens
MYKGFCFSCSWSRGCTLSSLSVFRWFCCVSCLNFWEVAFKSSSFIVTSSSWLRVFGFVFWSAVSLGFVLSGSFSSYGFSFSFVALWSSRDFSRWSSSAGRSHCLATSLLFSFRRVSNCSFKCVEYRLFFIYKGRTLSPKPPAGGKGRKGSQVPLVEVLQLGSALPLALLSQSLLYTGGDRVR

SEQ ID NO: 942109 - protein, 111 aa, Homo sapiens
MIGPLVRSSSSLSCPWLCCLLLKWSRTTIPCTAVLVRSCPFGVFSGWTRLFGFGFCFSCWSQRACPPWNQRAFPPCQGPRRTPGGLRSSQWKFPCAGALSQHSASPRSQAL

SEQ ID NO: 942110 - protein, 151 aa, Homo sapiens
  misc_feature (28)..(28): Xaa can be any naturally occurring amino acid
  misc_feature (30)..(30): Xaa can be any naturally occurring amino acid
METRKELGNEIMRAAPPALDALPTPHAXAXEKYFTGCTEEARGVGGPGGPGLRGTSRANATGLSKRGRRKNKKRKRIDNITILISVSRSPDAFGNWPFRFLLRAKGFLLKPPLRSGKVTARRSIVFYGGAFPGQKGAAPALGLHGRAQNER

SEQ ID NO: 942111 - protein, 151 aa, Homo sapiens
  misc_feature (68)..(68): Xaa can be any naturally occurring amino acid
  misc_feature (77)..(77): Xaa can be any naturally occurring amino acid
MRKKRYAIHGVTEYSINQMTCATVRETTMTPFTSKLSHACLCELYISFYQYKKKALVSDTEKAVWPLXGGPGWLGAXLNVSGLFSLLHSLPSAPPPDTQGRGQGPGVCPQERGDGIGWCRHRTATLCGGLSPPYTLLFYNEPLEQFLKKIK

SEQ ID NO: 942112 - protein, 287 aa, Homo sapiens
  misc_feature (94)..(94): Xaa can be any naturally occurring amino acid
  misc_feature (98)..(98): Xaa can be any naturally occurring amino acid
  misc_feature (110)..(110): Xaa can be any naturally occurring amino acid
  misc_feature (112)..(112): Xaa can be any naturally occurring amino acid
  misc_feature (116)..(116): Xaa can be any naturally occurring amino acid
  misc_feature (138)..(138): Xaa can be any naturally occurring amino acid
  misc_feature (142)..(142): Xaa can be any naturally occurring amino acid
  misc_feature (159)..(159): Xaa can be any naturally occurring amino acid
  misc_feature (161)..(161): Xaa can be any naturally occurring amino acid
  misc_feature (163)..(163): Xaa can be any naturally occurring amino acid
PSAPGCLLFPGEIMKRGRLPSSSQDSDDNGSLSTTWSQNSRSQHRRGSSSRHEDRKPSEVFRTDLITAMKLHDSYQLNPDEFYVLADPWGQEWXKGVXVPVTPGTIPQPXAXVVSXDKSLMLIRPKKYIVSSGSEPPXSGYXDIRTLADSLCRYDLNHXDXAXLELTNEEFKEMGMPELDEYTMERVLEEFEQRCYDNMNHAIETEEGLGIEYDEDVVCYVCQSPDGEDGNEMGVLCQMHICVPKAVMESQGTEGSGCADMCLGVSKMYPCQKREEDEATVANQWVT

SEQ ID NO: 942113 - protein, 288 aa, Homo sapiens
YKTAPWNQVAKEAAAPGGRLGLGGKLRLPDKGRGSGCWEGGGGGGGEAGSYGSSAIPATEVLTAAKGLYCTRRSPSVLCSPQSKRTWQRWSAQPLVLRWNGGCLRCDISWVRGNDWGLPLTRGWGRGLPAQTGLAVVCFGGGVNITGDGSCQPLEGGLAPGPRALLALRALEGLNLLPLLLGPGDGRLGEPAVEVHSQRRVVIAGYRVGDEAGVAVGVHDAHCGDVHLGCVSHGHVWLKDVVERVQEDDEVRQADRGAKEEARVGQHAAPEVASLGVLAKITGHVLNQ

SEQ ID NO: 942114 - protein, 245 aa, Homo sapiens
  misc_feature (8)..(8): Xaa can be any naturally occurring amino acid
GCCGRPEXGPQALALPSVALRQRLTLLSGKGGCELPRRTPGQPWPQPLPVPSVEPEPLLPSEAGLLRIILLPLKELSPGHEEDEELKKKLKHVSSSPAAKPEERGFHKFYSQKITTIFPPPSAHFASDAGGSNFFLPWELLLASLTVLKPLSSPPQENSFDLNNYKLAFQSQDKFTYTFIVPQQRVTGAICLNSKEPDVLLENRVHKLEPELLNNELLKQKLQIETLQQLVEVDGGIVSEVKLLR

SEQ ID NO: 942115 - protein, 150 aa, Homo sapiens
  misc_feature (150)..(150): Xaa can be any naturally occurring amino acid
MIMLYKALANPTAYSALGPSPRVWEVLPMGWLGIGGEGGGSLGAGGAVLRLQASEHSQVPHPPARCFSAEDARIARGVTGKRDIKSDGGCGLPSCQPQRAPRQVLALEAAGVSGSSERSLGSGTSPHTCFNHWSASLSSLQVAPDDQRHX

SEQ ID NO: 942116 - protein, 158 aa, Homo sapiens
  misc_feature (59)..(59): Xaa can be any naturally occurring amino acid
  misc_feature (64)..(65): Xaa can be any naturally occurring amino acid
  misc_feature (67)..(67): Xaa can be any naturally occurring amino acid
  misc_feature (82)..(82): Xaa can be any naturally occurring amino acid
MHDKGPKGGEEGEGTQGGGHQGSRRAGIKNREPRGGKEEAHPRQRRGTPPRILDPADGXRRVHXXEXFGRVPAGEQRGGPRXLAAKMSPAMRSSGSQGPGTATKLGNDATFFVSGDVVIVNRSIENRALRPPWLRQTIANLLVGPLQPLFWGPGLGLE

SEQ ID NO: 942117 - protein, 316 aa, Homo sapiens
PGERYFVAAVRGELPVPPPPLSVRGGVEEEWEMLEKMWEMEKEMGWTQKKKGSEYDVGLVKVRWGSMGGRCWKGGNGGDGKEREFDVMKWGDGGGGEIGFGGVGKWRLGSQRTFKGSEEEGYECSSVKCMDGVIEYKGANMELLDLPGIIEGAPKKKPFPPDDLCATHFSGHHHNPEYHQDKIAYSLLEKYLYSVVILLNNHKPKIYFNLNKGGGISFKSTFTLTHFSEKLLQLILHKYNIFNAEVLFPEDCCPDEFINVIVGKRVYMLLLYVYNKIKQISMAEVDAWGEKKTVWSSAGDEAELELSAGKLWEYLP

SEQ ID NO: 942118 - protein, 124 aa, Homo sapiens
  misc_feature (97)..(97): Xaa can be any naturally occurring amino acid
ALLPGLPSTPAFQQGLTSRQSVQSYKCFRASIEFPQAHPLRRYSGATWANPLLFLILGILLSIAMFVDLGTESRVSTCQGEWDGKELWLGGGAKKGXGDEVPSIGAGHCGMTPPQQDLAAGHRG

SEQ ID NO: 942119 - protein, 202 aa, Homo sapiens
  misc_feature (13)..(13): Xaa can be any naturally occurring amino acid
IKHHSLRISKALXWCLDLCTSALAGREKSKELGPALAHGSFSLGRQLHWKKATDQVQTLKTTNASLQKPEKIKTHWKKEEVQEEDPAQPPGWAVGKAMTQFAESCNDEHWLCAQTPKAAMDWAALSWALGKEEDLLPSSPVYALEKQGLTSPFRACIKRRLRRERLASEHSRQPISHSVFLSWGPHPGPAGPWVLRGAETLE

SEQ ID NO: 942120 - protein, 211 aa, Homo sapiens
  misc_feature (116)..(116): Xaa can be any naturally occurring amino acid
MLQFPHISQCEELRLSLEREYNSLCELQPIGRLLFREFCATKPELSRCVAFLDGVAEYEVTPDEKRKACGRQLKQNFVSKTGTELITKVPRKLVTNCTQRLEQGPCKKIFKEIKRXNHEYLSVAPFADYLDSIYFNRFLQWNWLEKQPVTKNTFRQYRVLGKGGFGEVCACQVRATGNMYACKKLEKKADQEAARGGHGAEREADPGESEQ

SEQ ID NO: 942121 - protein, 212 aa, Homo sapiens
ASLPLSPQAHPPRRHGARRRPAGQYFQARLAGAGNSTARILSTNHTGPEDAFNFNNWVTLLSQLPLAVLFTLLNSFPCYQLRPGDGCAFLGQPCLAITCLLLLPLTAALGSRLDIEPRTLSFFHSPLASVLAFINFLSVAVPYRAAFFGQLGTMPSTYSTLFLSGQGLVGIFAALAMLLSMASGVDAETSAQGYFITPCVGILMSIVCDLSL

SEQ ID NO: 942122 - protein, 208 aa, Homo sapiens
  misc_feature (32)..(32): Xaa can be any naturally occurring amino acid
  misc_feature (35)..(35): Xaa can be any naturally occurring amino acid
  misc_feature (76)..(77): Xaa can be any naturally occurring amino acid
  misc_feature (83)..(83): Xaa can be any naturally occurring amino acid
  misc_feature (86)..(86): Xaa can be any naturally occurring amino acid
  misc_feature (90)..(90): Xaa can be any naturally occurring amino acid
  misc_feature (92)..(92): Xaa can be any naturally occurring amino acid
  misc_feature (102)..(102): Xaa can be any naturally occurring amino acid
  misc_feature (111)..(112): Xaa can be any naturally occurring amino acid
  misc_feature (128)..(128): Xaa can be any naturally occurring amino acid
  misc_feature (132)..(132): Xaa can be any naturally occurring amino acid
RPCRETPSPYSSPPSFTSRSTSSRLIFFFLCXKAXWPAIISYRRQPSAHQSGLNVYRSFFTTSGGHVTHGAHTPFXXLALGHXHSXSQVXDXDVAVVIHQNXLGLQVPVHXXLPVQVRRRAQQIWGAXKTAXTFGETSLAHVVDVELEGAPVHQCQHQAQRVLGLIGVGKAHYKPTVHFLQDLLLVQRHGLPFRFLIRFFSSLLEAYI

SEQ ID NO: 942123 - protein, 134 aa, Homo sapiens
  misc_feature (7)..(7): Xaa can be any naturally occurring amino acid
MSPICEXGEIKRRDFNSKTTKAWERGKPCIKKIESGVNLWDTKERAASVTPQTVEKRLRNCTVCTTNGFRKATVLFRRIAGTLVRSMPEPMRGSPSSSIFSAGGGPRVHPQTPPRWGPPKPVITFQLSPQVPAS

SEQ ID NO: 942124 - protein, 89 aa, Homo sapiens
  misc_feature (37)..(37): Xaa can be any naturally occurring amino acid
MAIRNKMISEGLDPDLLERPDAPVPDGESEKTVEESXDSESAFVIKLNFDKNDICMHRGTFTFCKRLSLNSLSHKNIKWPHVHYQASAM

SEQ ID NO: 942125 - protein, 215 aa, Homo sapiens
PVDTGVAARTPAVEGMTEAEEEELRAELIKVEEEIVTLQQVLADKERHCGELKRRLGLSTLGELKQNLSRRWHDVQACSAKRRLRKLFDRKERRLQLAYPQMGSTISRKIGDMRNSETFKWFDDRFGTIKSKVVGDRENGNANLSSSAGSGEKPLSDPAPFYSPGLLHPLQSTRNPASASQPQLCSADSQPGRMNRAGPEDSPAHPRGDVAAAFA

SEQ ID NO: 942126 - protein, 114 aa, Homo sapiens
MLQKRGGAAEALAAHGAPVGPLARVGALVLDESGGAIEGLAAVGAAVGAAWQVGAGVDGQHRALAKALAALRALEGLLPGVAAGMGDKGRPLGEALAADATAEGPLTGVHPLMA

SEQ ID NO: 942127 - protein, 165 aa, Homo sapiens
KCRRDARGGPDERDSPCPDFDAGAAGRARAVGVATGAWGAALEGSPDGLAFGAGAGGDSGTEEEGAEAEEASGEADGDTEAEAGGRADGRERHPGLRGAPRRRARDRPARAAARAHGAEGNGADAEEEGKTPRGQAGQGGTVSGGEDRRQNGADANQRDSRGRAP

SEQ ID NO: 942128 - protein, 235 aa, Homo sapiens
LPHRPPSSRTLHQAASQPTQHVHQPLRSFWLSSTPSSTSISPRAFIFFCATELGSFIRWLRSVTSADLNSGNLTPAVSGTAGFSASFFWGSFFFGALRSVRRCSAVVSAAVVTFCRSSLRFSRSFFRASILLIPCGRYSSSATCSGVLVVETLKLFLPPSFVPSIKYWYLKVCSLHSPHVGKLSTDFGSSEYFRSSKERFLNCWGAYRVWITTKRRSKRRLKSRGCQFLLSQTSP

SEQ ID NO: 942129 - protein, 215 aa, Homo sapiens
  misc_feature (2)..(2): Xaa can be any naturally occurring amino acid
  misc_feature (59)..(59): Xaa can be any naturally occurring amino acid
  misc_feature (115)..(115): Xaa can be any naturally occurring amino acid
  misc_feature (175)..(175): Xaa can be any naturally occurring amino acid
MXFQTCKARKESKWVNCMGGLKKYFMEEAQQVRITAMVISEAHFGGGMEAEQVSQKVKXSIKDKSMAKQRVKQTGIIHKKIKKNKHGAVGGRSAWKARKHTYGEGMKARKKSDLXKQGKAGRVCRVEEEESEQNLQHPSTWADIKQQYIQLIYIILELEKEKKSCFQGGGRQTKXKGGHFQAEEHGGLTKGKENSKEWAGVFKEAPEHPFGQKLR

SEQ ID NO: 942130 - protein, 267 aa, Homo sapiens
  misc_feature (100)..(100): Xaa can be any naturally occurring amino acid
  misc_feature (153)..(153): Xaa can be any naturally occurring amino acid
GKNQVGAAGAQAAGKKEGGLGPGPTEPSDPSPRAAWQRDQPTGLSRTCAEGGKPGLPAGHRGGRGEGRHGEARQEEQKDPWAQGGGGAGAGLGLRRPQEXTEKRRKKKSDEAYSKPTRSATKNMRGGRLSGKGALGAGPGPRTRRRGRRRRRXMRLGLSGTGTFVASHVALGRPRPARAEDPGQSPSRPAPATPAWMLGSLSEVLVGSLDGPPFLPWEEALGCAGGSQLTGQCSGQKWGTNNTGPEDTGTQVTRALKVACDMSYPGP

SEQ ID NO: 942131 - protein, 280 aa, Homo sapiens
GLRETVRAGAFGHRADKLTQWVIQCLVFYCRTLSPIAQCINLVKLSISFEYVIKKNIGSKYKPLYILLENLGRFNCAKLGRTKQVQNYSNPKFSKNLELKYRFKKIKKLHFEIYKIKKKKPKLKNNNFLWGTKFSLKEILSNKVLNLPLMLKLEKSSGRGNITVSTQELKDNRLINMEVEARNLHKKDFLGKSDPFLEFFRQGDGKWHLVYKSKVIKNNLKPNWKRAAALGHEVSGGNPAHLSWGQGPRRTWAEYIYAVVWSYQRHSSSCSPVLVVSSYP

SEQ ID NO: 942132 - protein, 278 aa, Homo sapiens
  misc_feature (1)..(1): Xaa can be any naturally occurring amino acid
  misc_feature (263)..(263): Xaa can be any naturally occurring amino acid
XLGDGERRRGPLRCAKCFSYPTKRRIRRRPRDLTILSLPEDVLFHILTWLSVEDILAVRSVHSQLKDLVDNHASCGHVASFQELWPSPGNLKLFDRAAEKGNFEAAVKLGIAYLYNEGLCVSDEARPEVNGLMASRFFSLAERLNVGAAPFIWLFIRPPSSVSGSCCQAVVHEILKAECQLQRTHKASILPCLGRVLSLFEDEEKQQQAHDLFEEAAHQGCVSSSYLLWEINRRTDVSDLGDASTASDNSGTTLPKAAGKRQXLLPKPVPILTSLGWW

SEQ ID NO: 942133 - protein, 136 aa, Homo sapiens
MTKSSLHSNESQGNCCFCFIDVLSVGKAICPWQKPVEPLQHAVAQALEVCCGGRARNPLCRVHAYELIGPPRGAPAAFHVGDVFATWAIAEGEQYACQSHLTLVFWIHKDIFSCDISMNILILMVELQGIKQREAT

SEQ ID NO: 942134 - protein, 125 aa, Homo sapiens
  misc_feature (61)..(61): Xaa can be any naturally occurring amino acid
  misc_feature (74)..(74): Xaa can be any naturally occurring amino acid
  misc_feature (85)..(85): Xaa can be any naturally occurring amino acid
KSIHNGSGSIRITLAGALRQSCFHATESFPIRFLSDYCFPMVMSPFNNINGKVLIFKFCIXRKLISWFAIRDLXPSKPVHSASEXRGVSACDSIKIIIIGCIRIIHINGNYFPVGFPFVNYSQYA

SEQ ID NO: 942135 - protein, 249 aa, Homo sapiens
  misc_feature (1)..(1): Xaa can be any naturally occurring amino acid
  misc_feature (85)..(85): Xaa can be any naturally occurring amino acid
  misc_feature (91)..(91): Xaa can be any naturally occurring amino acid
  misc_feature (147)..(148): Xaa can be any naturally occurring amino acid
  misc_feature (153)..(153): Xaa can be any naturally occurring amino acid
  misc_feature (155)..(155): Xaa can be any naturally occurring amino acid
  misc_feature (170)..(170): Xaa can be any naturally occurring amino acid
  misc_feature (175)..(175): Xaa can be any naturally occurring amino acid
XYRCGGGFGGWGTQVLHWNLGSCIMYQVGRSVANLSANLRGSPSFQEKSWGGRAVGFHNAVLIIPSPSCHMAEAGWRWWRRGGPXPPSLAXPPGKGGLRRRTGPGILEFLGHFGWGSVPFFRGVLLFVGFPGIELLPEVSIHHILPXXVVGAXAXVVPPPVWGLFRPPCXSPCWXRPWASWGVGGTRMPIPPDKVVQTSDSEPPGISVVFCKDSTVSPDMVVHDHLCLLGGPIEQATVPQGFVSCRTLI

SEQ ID NO: 942136 - protein, 106 aa, Homo sapiens
SAAAMAAVDLEKQRVSGAGKAIGVLTSGGDAQGMSAAARAVTRKGIDEAGKRLPIYEGEEGRGEGGGRRKLANRRSGAQQHPAGRRYRYQRPPPGLFHQGGAPGSG

SEQ ID NO: 942137 - protein, 105 aa, Homo sapiens
GRAWANGRSGLGWARDGGGPGAGPGGAPREYLSWCQGGDTSCSPQHAGRHRPHRDIGPDAGGVMGHGAQAHSTTHLQWLALCGSVGGAQTGLSPTPQGATGPECI

SEQ ID NO: 942138 - protein, 238 aa, Homo sapiens
MSRRAALSSVGLSRAVGTGLPELVLEGVGVGVVEGVEAAAFHAEVRGPITVVSCLEGGRGLQVAAQGPVPTVTVVEAAVGYTGSWELEEAGSEWVEWVRAAESREFRLSRAMGSSCEDWETSRRIRLAAFLVSLSQAAARMFSAKAEVRRGGVGVVISMPFFFMRRQGLRDVRMRFRARPWNSGNCRLQDWMMAWIFSLGCLEKGTWRSRLSSTKRRTNMLKAFRRSGSMPSESSILS

SEQ ID NO: 942139 - protein, 261 aa, Homo sapiens
  misc_feature (70)..(70): Xaa can be any naturally occurring amino acid
MLGGWGGLGGLYLRLAVLSLPLTVRVLFSFLTRFSFPSGAASGAAASALKARIPCLRPRRQTSNPPPTPXPRRRAQKPPAIQPRLFHASAPDEGTQGTLKGTQKRRLHPTPVSKSGAALHEPGQDHLPQPGDRQGETTWNKGTEAGEKAACSQTAWARGRGMRGQNWHSGQDLGLYSMGRGEAPGAAWGHGGGGRRRHRLLCQRPQSSCSSASRRQRTRGWPLGPPPPPPPPPPWAPKFGAPDIMRNRTTGMMYIQYLAKK

SEQ ID NO: 942140 - protein, 251 aa, Homo sapiens
  misc_feature (111)..(111): Xaa can be any naturally occurring amino acid
  misc_feature (114)..(114): Xaa can be any naturally occurring amino acid
  misc_feature (117)..(117): Xaa can be any naturally occurring amino acid
MLPRVGCPALPLPPPPLLLLLPLMLLLLGASGGGGGARAEVLFRCPRCTPERLAACGPPPVAPPAAVADNGRRDPHAMRGARPGAGLRLLLRVCARMEERRKMRRLHPAMXTGXELXLPPGLHELPLAGARSWSEGTDEKAPGTPEYARQPESWFADKWAIDHSRKEGLGVGTLVGQQPWNMFGAGGEQFWAGKPLKVEVMKGAGQCSGEKVTDAAPADGARVASIILAWRSPRSCDHPLPGLPANRNWTR

SEQ ID NO: 942141 - protein, 328 aa, Homo sapiens
VGSKPRWRQQRWGNPAAPALADRAVAAPSRARGSGCRAGTALREGLGRKVEEGEACGTVGLLLEHSFDIDDSANSPEAGLTALEPAGWYLVPRHSGSSARLTLADSGDVAALNGLYRVRIPRRPGALALPGTSLAQLSSFPPSPPPPPPPPPSLTTLTPRTWMSPATLVGVSVVTHPGGCRGHEVEDVDLKLFNTSVQLQPPTTAPGPETAAFIERLEMEQAQKAKNPQEQKSFFAKYWMYIIPVVLFLMMSGAPDTGGQGGGGGGGGGGGSGQPLVLCLLLAEEQLDWGFCTAAGGSCARGPHGPIHPKGFPLPMEESRDLATMQSD

SEQ ID NO: 942142 - protein, 96 aa, Homo sapiens
MVPKENSRWQLNAGWLTLDGARQQPGRDPDPDPELRCGQCCGPVPDLRLPDGLLRPLRGRPSVHSPGQFDSWAPDSASSAPSKGRWPSRGFPPMSL

SEQ ID NO: 942143 - protein, 111 aa, Homo sapiens
MEKGFREHGQTFNRGAKKICKRKIKKKAAKKVVKGLDRVQDEYSRRSYSRFEEEDDDDDFPAPSDGYDRGEGTQDEEEGGASSDATEGHDEDDEIYEGEYQGIPRAQSGGK

SEQ ID NO: 942144 - protein, 120 aa, Homo sapiens
MPAMLRTLQDLNPRRDISSWLAQWFPKKPARSVVALKNPIKVELVAGKKYKWCVCGRSKKKDFCEGSHFFQRTGLSPLKFKAQETRMVALCTCKATQRPPYCDGTHRSERVQKAEVGSPL

SEQ ID NO: 942145 - protein, 244 aa, Homo sapiens
SWREPRSLGGVFEGGGGHVSGHPEPKFPTLSAVMSAEVKVTGQNQELFLLLAKWAKGAALATLIHQVLEAPGVYIFGELLDMPNVRYLAESYFASAFRLLTVFAYCTYADYLTEARDLPPLTEAQKNDLRHLSVVTLAAKVKCIPYAVLLEALALPYVRDWEILLFMLFILKCFVAPWTSATSGSDVQYSIGREIQRQDLSSISRALQEWCVGCEVVLSGIEEQVSSANQHKEQQLGLKQQIES

SEQ ID NO: 942146 - protein, 103 aa, Homo sapiens
QGLPVPPGIQSPLSPGVGQTAQTVAPALPPGRLPNISLAFHVTLPNPPGPSLPPAPYRPTGPPPPSLGTPPGADHPTVSRGPKLASPIPPPIPTTPPPPARGA

SEQ ID NO: 942147 - protein, 91 aa, Homo sapiens
MVEGDTGSIVMKQGPKEKVLRENQAAQGEELQTHPLGPQLLVDRLLSEETTDKHVAKDLQSSADEMSRWWVDECDWVRSVHDWHFGLRNRT

SEQ ID NO: 942148 - protein, 194 aa, Homo sapiens
  misc_feature (42)..(42): Xaa can be any naturally occurring amino acid
  misc_feature (105)..(106): Xaa can be any naturally occurring amino acid
MGFFFVGPDFFPPSYSLEWWFFPHSRATKAQVGACPSPVEPXKPSHRTSCGWAQTWVPPPVGLPCRGGQGVFSALGLRVGGGGLEVWGSLSPKASRPSRKPRAPXXSPSQPAREGWHPPCRRRPRGAPLPQPPAWGPHPGPQALPAGLRPGSRSLRCRAVKATCLNQGSFFSYLLQDFLDGCFLNLVVITVWEA

SEQ ID NO: 942149 - protein, 314 aa, Homo sapiens
  misc_feature (100)..(100): Xaa can be any naturally occurring amino acid
KEDPKPRTPPRKKNQKKARAKKKDKKTPTPQKPETKDAPPTPKKKRRQKKQKPKKNATKKKKNSPTTKKTKPHTTPAHKTQKTAPARARNHPKNPPPTRXTPSKAEPRTKPPKPHQKHANPKNHHPPRQQRNEEHEPPSTNNPQPPNHNPHRPTTNNPTKKPEKKEENPRRRTGRSPQQKPRPQPPRKPKTENQRNTKTKPQGARAAPKEKKQNPTTPAHPPKAPSERENERKPPKTQKKRDRQRHRPNRRKATTKATRNKATTTTTAAKSPNAQPTTKTTTKAASNPNAPAKTNNAAPKTTQQQKNPQQHPPP

SEQ ID NO: 942150 - protein, 177 aa, Homo sapiens
  misc_feature (47)..(47): Xaa can be any naturally occurring amino acid
  misc_feature (149)..(149): Xaa can be any naturally occurring amino acid
  misc_feature (151)..(151): Xaa can be any naturally occurring amino acid
  misc_feature (165)..(165): Xaa can be any naturally occurring amino acid
  misc_feature (172)..(172): Xaa can be any naturally occurring amino acid
CPGPSFSRPRAGASFFVGCVPCPPFSFWFSPRVCALLPGGAASRGLXWRGPPPGSGFPGVGPGLGLLGPGLGGGWGGLLFGGFFLLVLDAGEGAGSRASWGFLGGGGGGAVVLGLGGGWGWGGGPGPWFLFWFRGLWPLLPCVVLGVGXGXFFLCPFLLVLLVVXFLWPLAXAGLLA

SEQ ID NO: 942151 - protein, 173 aa, Homo sapiens
PSFSVQLTAVSAFGFLKTCAMYSGATSNAHRSLGGGENVSVAASRVNILPPPCVSLFPLPQGDHTRRRGPYLGGVGGLEGRAIGSFSKLGAGSTCYGAFVWDEGSGSFGPFSIFSASGDFVAPSASAIGLFSPRELNIPILIAPPFPRFFTRVITRTLSLPYFWQYLKATFEV

SEQ ID NO: 942152 - protein, 242 aa, Homo sapiens
MRGCLVCKEELEGQKTPYRFSSIIRCSDFGKQNPASRSSQPQDELVRSCSLCCGQRDQGGLLAMATRGQEGELAYWKVLGFGRIIINTFLSELETHRFSAQIDSVLVAALVMAPTVTEPVEVGVGTAVIPTAFLLVVGTVFYVDILISVQGGELLAVVPCKGVTRIDMVNAAKKLIILALWFQAQTGVFCKDFAGGPVLHGHQEFVVALVRQPVNVLQAQPVFAVNVPKPLLLRLPVPEEVN

SEQ ID NO: 942153 - protein, 203 aa, Homo sapiens
  misc_feature (11)..(11): Xaa can be any naturally occurring amino acid
  misc_feature (30)..(30): Xaa can be any naturally occurring amino acid
  misc_feature (36)..(36): Xaa can be any naturally occurring amino acid
  misc_feature (130)..(130): Xaa can be any naturally occurring amino acid
  misc_feature (132)..(132): Xaa can be any naturally occurring amino acid
  misc_feature (151)..(151): Xaa can be any naturally occurring amino acid
PDQEGTSRSGXATINCFLFRLEGCFALMRXDLQRDXKRLDDTAAGGPPSPGGSPRSPATPQGSIQFGEVNFGQEEVGGFQPQVQVGFSGPDLALPGAGVSRSPSPWIRGRCPERIFFCQTEPMNGRSSIXRXFGFSSKLYLSLKALPGDGXHEPPQDIAVLHPPVEVAVESYVVGGTSLAFCIQFCMRLSQNQGDAKTSLALL

SEQ ID NO: 942154 - protein, 80 aa, Homo sapiens
APGYCLGGNPAVRVAHIRLFEYKDSFKGPHLCAERRDLALLGPLEEFYAKFKANPNITNFKKPKMISVDKNKKGLFELGS

SEQ ID NO: 942155 - protein, 142 aa, Homo sapiens
MTKGGKPENKKKKRTKGGLSERLPWGEKAGGASATLGEAQRPPSKNTEGPCPSPQPHPHCEGSERGLPQRPSAEAQTLRAAPGRGGLLQPAGGGKRRGGRAQRPGKAAAGSRAGAGDPGPAQPQEHGFQAGGHGGGARGRKR

SEQ ID NO: 942156 - protein, 166 aa, Homo sapiens
  misc_feature (3)..(3): Xaa can be any naturally occurring amino acid
  misc_feature (22)..(22): Xaa can be any naturally occurring amino acid
  misc_feature (26)..(26): Xaa can be any naturally occurring amino acid
  misc_feature (53)..(53): Xaa can be any naturally occurring amino acid
  misc_feature (121)..(121): Xaa can be any naturally occurring amino acid
  misc_feature (139)..(139): Xaa can be any naturally occurring amino acid
RVXKHCKRPVPRRTARGSVQAXVPLXVLLVLRVALFLPGLGVVLHGFGKRFHXALVGGLHSLSRQTELAQEGAQLPRGQGCPEQAQGLLELGRGQGILDLIRGLRQRLPRRQVGKQAPLDXRVGEDGSYYLRRHSLARXTCWPPAGPAGTSIVARMLWRAPSWMGW

SEQ ID NO: 942157 - protein, 201 aa, Homo sapiens
MRVCPPCDKSMGALIEGSALPKAQKLQTWRRPRECPGVPTIFPGGQFPRGAADKLEPIPAQPCPCPDLPGCSPTRWVLSPSILLKECPQSVRPPRVVPTALAHTALLTIIALFATPIIVALSLSYLFNHPTFCHEMWAFTGPEVGLTLTLSHRLCPALSLLCGGHTKAPGKVWWRLRKICYHIVEHSWFETIINFMILLSS

SEQ ID NO: 942158 - protein, 39 aa, Homo sapiens
MAEGWMVEEMTERKSYDDGGGEQGNMVEQGRVTKAVAHP

SEQ ID NO: 942159 - protein, 173 aa, Homo sapiens
MGPWCNYTTGTVAVMWSVQGVAWLRPAWNPAYARVASPWRCAPLGSSSPSSPQRHEEDTSGPVPCALLASLALETFGLLPGARDPGPQFAPPPPPHHPSGPLLPPVPPPPPAEPEPPPDKEPPPSDFAAFSLPPPVPPPTPPPPTPPPPPPSPTPHTTPPTQTCPAHPPPSPR

SEQ ID NO: 942160 - protein, 258 aa, Homo sapiens
  misc_feature (112)..(112): Xaa can be any naturally occurring amino acid
PEKPQSSRAVNEVFLVVSGHPFCPPGVAWAAPRAGTVRWAQEGAKMPMNKSEKPKSCHNVKVVVGARPLNEKKKSMCYKKAVSVDEMRGTITVHKNDSSNEPPKTFTFDTVXGTLLLALRGLITYCKTVIIDSVLEGYNGTIFAYGQTGTGKTFTMEGVRAIPELRGIIPNSFAHIFGHIAKTEGDTRFLVRVSYLEIYNEEVRDLLGKDQTQRLEVKERPDVGVYIKDLSAYVVNNADDMDRIMTLGHKNRSVGALI

SEQ ID NO: 942161 - protein, 171 aa, Homo sapiens
  misc_feature (111)..(111): Xaa can be any naturally occurring amino acid
  misc_feature (114)..(115): Xaa can be any naturally occurring amino acid
  misc_feature (117)..(117): Xaa can be any naturally occurring amino acid
MSKGLKSIKHKDSRKHQQEGINEEKVKPEVERVAQPSVLESVAVLCKEVEHIPIDLAHRNHKLENEAEGMLGEKGDNHQEAEWSPQASRNGFHAHCKVVTQDVSAVSLGIXFPXXRXEGLASKQVFVVEKNKLSITRGINPQTAKQHRDSCRQVPNGTTAARPENSNVVTT

SEQ ID NO: 942162 - protein, 107 aa, Homo sapiens
  misc_feature (6)..(6): Xaa can be any naturally occurring amino acid
  misc_feature (65)..(65): Xaa can be any naturally occurring amino acid
GGCFSXGFYRFSPRHKPSGKATDCAWGPLWLRGHNTEPGIAVSKIYICVTIKDRAAAPRVSQQVXNILNFYPLVTRFFGKGFLGGPPGQGAGAVERAPRQGRPPSGS

SEQ ID NO: 942163 - protein, 105 aa, Homo sapiens
MGPLQGDVQIQELGRQGWGPFSCFNSNSRWWWAQRSLIPQNMTANSSSKIRFVLFFPIQQGNELDTHGEIYNQQHHPSHCLFYQILHLKLSIFGISALGGVRILR

SEQ ID NO: 942164 - protein, 147 aa, Homo sapiens
MMGQCKGNGWEYGLTGIGVGMVVLGVMMGMWNVVPGFSAAEKPTAQGSNKTEVGGGILKSKTFSVAYVLVGAGVMLLLLSICLSIRDKRKQRQGEDLAHVQHPTGAGPHAQEEDSQEEEEEDEEAASRYYVPSYEEVMNTNYSEARG

SEQ ID NO: 942165 - protein, 145 aa, Homo sapiens
  misc_feature (43)..(43): Xaa can be any naturally occurring amino acid
MVTVVDHVHGEGRVGQVAEKEGSYDENHHAAKLAYSFLGGSCXLRLNCKSFEGPKQLSVGEADEGERDNAAEDEEGPRIGLAAGFGAHGVPVRATGTLQGLRGEPAPAKEGWDGEANSNGPGSQEHRQFMLGAEAEVAEGLQMKM

SEQ ID NO: 942166 - protein, 240 aa, Homo sapiens
GIGYFVFGRYVCALEGFLGTVEGLVKGWSLAFLAFERYIVICKPFGKFRFSSKHALKVVLANWTIGIGVSIPGFFGWSWFSPEGLECSCGPDWYIVGTKDSSEYYKWLLFTFCFIVPLSLICFSYNELLRALKAVAAQQQEEATIQKAEREVSRMVVVMVGSFCVCYVPYAAFAMYMVNNRNHGLDLRLVTIPSFFSKSACIYNPIIYCFMNKQFQACIMKMVCGKAMTDESDTCSPQKK

SEQ ID NO: 942167 - protein, 223 aa, Homo sapiens
HSCGSPSSSQPGINYSFATSADGKRSLPELWPGLHQVPTLKQQKEPEGILEPRYQGAFIRGDGQGSPQRGFNKASPPGCGGTKSIGASWVVQLPGMHLHCQNQKQEHEGNGKETKEETVGLAMAVELLCKAKHLHAAINEWSDGKEFHADHGEHQVTNVVSGKGEKAQERGQNAQQIRVFPLIGHGHLIMLQEPQVFHAHVINQQQPYYQMYVDQLLDFILEG

SEQ ID NO: 942168 - protein, 253 aa, Homo sapiens
VLFGLDCINKSLFKRFWGSCTVAWSFRIFSSSRDTASELGVPLASGAALLRPVSRPRLTLSSRLFGGTEPSLREMRRGPASRPPSQSSAVRAGSGPAVGGYRSSWNRSDFGGTVLALGSHLRSCSFLNLAFSQFFTFRPRLGFLPLRRWDFLEINLESYFWKGASEVISKYRFELFTLATEVDDVGVRVKKGSRTPLLVSSSCRDSGSSRCFVSHSATCRSLMRLKPVVRIFPSDTNTARTGRVPSWGRVLLS

SEQ ID NO: 942169 - protein, 109 aa, Homo sapiens
MGCDAWDSYTSFLASKKLFWCRICQTPMAKRMRVCRMDHHSTRWLVLSLGLPEALLSPPLVVLLFLDLLHLFHQLSHSELQLTQLVFSSHFCIVIGMFTYLDVQVNSQH

SEQ ID NO: 942170 - protein, 240 aa, Homo sapiens
  misc_feature (176)..(176): Xaa can be any naturally occurring amino acid
MRSSGSGGGSGGSSWYLPPPLFGGSRGTEVLSGRPLVGQPKPRALMMGEEGGGNISGAPALNALQLLPPGPLHCLRTLRSRGAGESKDAAKLRTRGLGFTPKNSTGKESETFPQRRNSLRVRYTAASALGSRPDRAEDLGGAKKEDKKRPGQRAAAGTRRFSDLKVADIGGCPERXQYPSSDCGGQEKTVPKCHLPSSIVVPLYRAQGLTKGGAALGAENGRLKVPPSEPSVLECLWTRP

SEQ ID NO: 942171 - protein, 96 aa, Homo sapiens
VPPQSLPGQQEQQAPIPGSLWPRVRESGTPGPPGPSSPRDPDAACELDPGAQLPPGWVPGRLKPAGSEAVCVMASGSSHLLLGYGGGWWVSGGGGR

SEQ ID NO: 942172 - protein, 268 aa, Homo sapiens
MGTRVGPASVLGPLTGPEAAVGAHQDPYTTLLARSPALYRKELLFWGIAYPQKDEADFGDKTGLSSASRERTEPSESAPWGQPGFLGVSPAATHSHGPPKGTPFLILAKGAQAFRICAFNAQRLTLAKVAREQVMDTLVRILARCDIMVLQEVVVSFGSVVFFSVFFFSWIDGSGPYSTLSSPQLGRKPTMETYVYFYRSHKKEVLSSYVYNDEDDVFAREPFVAQFSLPSNVLPSLVLVPLHTTPKDVEKELNALYDVFLEVSSTGR

SEQ ID NO: 942173 - protein, 152 aa, Homo sapiens
  misc_feature (78)..(79): Xaa can be any naturally occurring amino acid
  misc_feature (94)..(94): Xaa can be any naturally occurring amino acid
  misc_feature (115)..(115): Xaa can be any naturally occurring amino acid
MLNIHCLNLFINKGTAEITRTGRKMEISFLDETALCITRLMCLKICMSSGLLRENRLSLAQSKEQAITIQKKEKKEEXXRGPTTKPAKAKAPPXDVPAVFTYTLLVRLGLFFPPXPPSPQQNPQNYFDTARMSEIKNAKDSTKKKNHSIFFT

SEQ ID NO: 942174 - protein, 284 aa, Homo sapiens
PSEEDFQGITPGAQGPSSRGPEPEARPNPDASETGRSHPSTTTTTRPPRYSPAEEAQGGRDPAEGITPPKGPPPDPNIAQETQKEMTLLLDIYNSPPNDHRDNVHLMAAEPRLRPTVDDLLDLIPELEERDPRESKKIPDDDPLPPIRQAEEQIEHLHAQPPLPPTTEEEALLSEMDVTGQAFEDMQEQNGRLLQQLREKDDANFELMSERIKANQIHKLLREEKDELGEQVLGLKSQVDAQLLTVQKLEEKERALQGSLGGVEKELTLRTKPWELNKRKDVEA

SEQ ID NO: 942175 - protein, 282 aa, Homo sapiens
ARREHLQFCRLLRAGAASPSAGAAAPQGTPGGGRRGACSAGPGGQPAPEARVHFRVARFIMEAGVKLSKRSTPSAIACSIYEKYFCENNLDAYDPYLIAKSSIYLAGKMEKEELRTREKKNVSKKYFNPSGEPLEVDSRFWELREIIVHCELLMLKVLRFQVSFQQPKKYLLHYLVSLQNWLNRHSWQRTPVAVTAWALLRDSYQGALCLRFQAQHIAVAVLYLALQVYGVEVPAEVDAEKRGGRCLMTTLPSQELIILCLISFIFIPWTQRSPKVLARLPK

SEQ ID NO: 942176 - protein, 108 aa, Homo sapiens
MVVSEVADMFVPLLDGFLVNVKKSRAVITSYGDQIPEKIADTRETEKEKEPENQGGKEEQKAAESPGKLFLFHTYLPIAEAPGKLKNRDDRKLTNSDKEKTLFQPQTG

SEQ ID NO: 942177 - protein, 172 aa, Homo sapiens
MREEFLECSIMSVWFLVVIDGLQMVLDDSKLDGNEEVGGWKMGWLQVFEKMVHGNFMGQILVSVDLLDEGIKVVHGFSELLCLLGLVSDVLLQKVSRLLRELGAYVLKVFLVELAVKMAGHLVLIEGPVFAQRTHKLDPFHHAVSLPLFLLVLTLLACLPLALGLAIFILGG

SEQ ID NO: 942178 - protein, 146 aa, Homo sapiens
  misc_feature (138)..(138): Xaa can be any naturally occurring amino acid
GSCAGGGPHPQGLPGLGGGGGQAVGRGLSQAPNLPGAQSLGTVAQQLSVERLCRENEPLQEEEGEKKEPGPRGEEGMGPGKKKKKRENGGGGGGGGGGRELGGEGRGLAPSLAQHHPAPSPEAATRGPAALARAPRLXSVTMTVPF

SEQ ID NO: 942179 - protein, 212 aa, Homo sapiens
  misc_feature (44)..(44): Xaa can be any naturally occurring amino acid
  misc_feature (173)..(173): Xaa can be any naturally occurring amino acid
MAAGPKLHYPNGRGRMASVRGVLAAAGVEFDEEFLETKEQLYKXQDGNHLLFQEVPMVEIDGMKLVQTRRIVDYIAEKHNLFGKNLKERTLIEMYVEGTLDLLEMLIMHPLLKPDDQKKEVVKMAQKAIIRYFAVFEKILRGQGQSFLVGNLLSLADVILLQTILALEEKIPXILSAFPFLQEYFVKSVISVQLRDYLKMEERRRIEVMKFM

SEQ ID NO: 942180 - protein, 73 aa, Homo sapiens
LWIPGTGPAAKVKPGNEWHRSIRAASHREGPSPMKPQSSCPALPPGHAGRGRSPQASPSQPPAPRPLSRPCTW

SEQ ID NO: 942181 - protein, 115 aa, Homo sapiens
  misc_feature (1)..(1): Xaa can be any naturally occurring amino acid
  misc_feature (67)..(67): Xaa can be any naturally occurring amino acid
  misc_feature (99)..(99): Xaa can be any naturally occurring amino acid
XPPTLENGLLQTYPRLSRHPPCNAVVGRQDPWEGATGCGHLFQAPWTPCLTPALPIDPAVLRATKGXRQLWSCHQPAVTLAKPLRPGWPSVPISNDTQXETMGAGSKDKVGEGGT

SEQ ID NO: 942182 - protein, 301 aa, Homo sapiens
MPSEIITLHLGQFGNQIGFEFCKQLWAELCIIPEGIVEEFATEGTDRKDVFFYQAADEHYIPRAVLLDLEPRVIHFILNSPYAKLYNPENIFLSEHVVGAVNNWASGFSQGEKIHEVIFDIMEREAYVYDSLEGFVLFHSIAGGTGSGLGSYLLVLAEFLVILRSWCSYTQCFPTRSMISDVVVLALQFTPHLKRLTQNADCVVVLDNTALNRFATDLLHIQNPSFSQINQLVSTIMSANITTLRYPGYMDYDLIGLIASLIATPRLHFLMSGYTPLTTEQSVASVRNTTVLDVMRRCCSQ

SEQ ID NO: 942183 - protein, 277 aa, Homo sapiens
GGWSIKQGLDQPVMADEVSLVLWGLTAPGCPRRCYVWPCGLLVSHSMSCCTISLDVSISIKVFLEHVLLTELLQEGLPLNQSFHTGDKFSRGSDEILVLLAIMSPLTRWAVVAGRETSLDMVLYLDACWAPPYEVVQLGFPDPLPALVDLSGVHLSLDDFDGGDVAVVGLAVSACGPPSRSLAAAAASLTSRTVVFLTLATDWSVSERGVAGHEEVEPWGGNERGDEADEVIVHVARERRVVVLAGHDGKHQLVDLGEGWVLDVQAVCGNPVQGCVV

SEQ ID NO: 942184 - protein, 244 aa, Homo sapiens
RESGARPPPPSPCPHATSPSGIVERGFSHANPGARGEGEAPFCAPYPRGTDTATARGAVRPRGHEKGGRERGPRPLMIRGTGDRSGGEELSGTGGEDCGSECPLPSFRTKKEDLGSASGQEKGEGAAAARKRPGREAPPPARGGRTPGSQQRLIKKEQSREKESGRVGRDCFLPASSPSEGSAGGGVQAPALGEGGARAPAGLGRWSSSRRDAPARAARRGHKAGRRGNSPAAGKRRPGDGGHR

SEQ ID NO: 942185 - protein, 98 aa, Homo sapiens
  misc_feature (86)..(86): Xaa can be any naturally occurring amino acid
RGPPNTTHEGFNVTLHTTLVVTTKLVLPTPGKPILPVQTGEQAQKEEQSSSKTTFSSLLVLTICIKLVHLLIRYRLHFLTRESCSXIYRYSQWSSYKK

SEQ ID NO: 942186 - protein, 137 aa, Homo sapiens
EKKKRPNRGLLQPTWGRKMSKSGLHNASKNKKPANDIITKEKKKRNGRITSILRTKQASTLKGRNKNCRTKHGETVKAFGVSKAKPTMQVEAGKPPQPNLKLRTLRNGSRVKTTEAQQKNTITGPLLTSTSRSLRSQ

SEQ ID NO: 942187 - protein, 354 aa, Homo sapiens
  misc_feature (283)..(283): Xaa can be any naturally occurring amino acid
RGARRTRAPPPRRPAPRAPRRATHATPPPLARARPLTLPSLTHPHAPTPTPTPSRARPHTRSHAPARSHTRTRACCRAPARARARARARAPSLHTHSHPHTRSLSPRTHPPHTRAPTPPLPLTLSHSPTHTTHPLAHTPSPSPAHTLTLTLPPTHTLPPPPSAHATHPPAPHTHPHSHTHPLSPTHTLTHATHAHTHPTPAPSLAHTTAPSRPLSLTLTLSHPLPSLHPLPLTRPPSTAPPLPRNPPRPPTPRPPPPPLHIHCETLHFNKATHFSISIHEPHXKHSMHHCLCSQLQAKGRTIHWHYHKLCPMQMNSMAGKLHSSNTPRPCAQHALLRIYAKTPFKSKHAWQAIC

SEQ ID NO: 942188 - protein, 182 aa, Homo sapiens
LKPHNAGLQCFRSQELKLMDSRLPVKVKDIIAEGNPNKRETAPGSDPCEGQIKSLKTVDVAACSLVDTLKKKSFDSELAWRPEIMAAAAGDPGLSELQFAPFSSAIRDVGFWHELTPKKLNEYRLDEAPQDIEGYYYHGVLPPQPVAAQLLGPCIPPPPSSLSRLQMRGSFWDKLPMRYGNP

SEQ ID NO: 942189 - protein, 223 aa, Homo sapiens
RGMKQETRDRADEETPEIHHQPGLSEAAGGFTHEELQKEGKGQSYCMWMQDKPLLQEELGRDYFPTRIMLFQTTEAHTMFLQAFRQTMKREWKDIDKLSQEKFYMHKRMALNESLKELKMQGCEKIQIEELLKQQMTEILHPSSQDPNGVKSHFIEIFLEELTKVGAEELTADQNLKFIDPFCRIAARTKDSLVLNNITRGIFETIVEQAPLAIEDLLNELDT

SEQ ID NO: 942190 - protein, 217 aa, Homo sapiens
DPLMMGPSLQCRTIPSRPGTRDSRSHGPRVYRTARANLVPRRRKRRARPPSLPALGTGHITVCVSSSSPAPGHWPPLPGHWSGGQRCPPSLASPSLATAPELSSEEGPLQLMTGWTPASARASGPAPTPLIQLICCSMPGPGGSFSPFPLYCSNQRKKPLLAAASSAASLQAGACRPALGSHLQGKCLLPSPAASGSLCRDAFCTEKGCTGGWPFQT

SEQ ID NO: 942191 - protein, 175 aa, Homo sapiens
MDRRGGRKGGSEEGDEGRGGGGVGEGGPGEGLRGQGLRGGGRLMGGGWGERGGPGAKSLARGRGQGRGARPGSRPGVGGGGKGGARGPGRGSWGVGGGGGVSKRGVGRGGGGGAVSEVVWGGHYAIGKGVTCAACRSLHSITNAAHCMPAACGCGNLESGPLSINNLNVCPDVCA

SEQ ID NO: 942192 - protein, 169 aa, Homo sapiens
  misc_feature (53)..(53): Xaa can be any naturally occurring amino acid
YVYSIQQVILQIKKKRSKKERKRRIKSQKKKPKGNSSKRKRKKNAKNKNGNNXKGARGKERRKTKREEHNRRKKTTAPSNAGKRGANQKRGAKKAKKRGAHGQQNHRRENKRKKPAGKKSERNSARNTEGNQNRCVVSKAGNQAEAKQGKKQEKAPEQQEKAKGRKASS

SEQ ID NO: 942193 - protein, 136 aa, Homo sapiens
MEDSVGLRAVVHIAFSPPHLMTVRIGAIPSEISNLIHGGFIFNGICYFRHRRMEQLDLHFKWVRVTQQLIRFSGGQAFHGVFIGLLSILDVKDLGHFLNDLSTEMGGKSVSGWWWYKKLIFPLTQLARKALAAVPD

SEQ ID NO: 942194 - protein, 259 aa, Homo sapiens
  misc_feature (74)..(74): Xaa can be any naturally occurring amino acid
MMMKIRKKNKKEGEGFKGQKKISWGYPQAAKENGKKGTSKVASAPHFVDANDDGNGEGELKKKWVEEMREKQQXEREEEREKRRTIESQCEDVLRGQEEFEHKEEVLQELNMFAQLDDEATRKGYYKEFRNLVEYSDVILEVLDARDPLGCRCFQMEEAVLRAQGNKKLVLVLNKIDLVPKEVVEKWLDYLRNELPTVAFKASTQHQVKNLNRCSVPVDQASESLLKAKPAFGAENLMRVLGNFAAFGEVRTTFVWVLW

SEQ ID NO: 942195 - protein, 264 aa, Homo sapiens
TPPPVPEVTSVAERKNLGREGDLPQEGGETLEEQPGLQARAGRDQQRCKVPLRRTQPFPSQQSSLPCWGLGLGEGSVAEEAKICCGSTSFSLGFPVPWPRATSSASSFSQYDKETGLDPSAAEEGLDGCVARGGARGEQTSIEVLQQHLGGEEAVSDGCGYDTCWSSLQPAAAVEGWNIHKAGLHIGDDPSLELKGTLGSTGRLLYPMLLSTSPQGRSSMSPVGSARVASSTPSSLVTARRTPAGRRPSGEGSPCWGASEKAEA

SEQ ID NO: 942196 - protein, 137 aa, Homo sapiens
  misc_feature (103)..(103): Xaa can be any naturally occurring amino acid
  misc_feature (108)..(108): Xaa can be any naturally occurring amino acid
MTVGLVSRYVDFEECKDNPLFLPPTPGSQRPFKSISKVYPEPPGTIRPLASLSGPNLSSYPEDPQGTRKCVGAGSAPPVAQDLAQEEAEERVFKILHAAIDEXPLDKXPPAFFTHLTISTRARYCQKWVGWGALMPK

SEQ ID NO: 942197 - protein, 312 aa, Homo sapiens
  misc_feature (26)..(26): Xaa can be any naturally occurring amino acid
  misc_feature (152)..(152): Xaa can be any naturally occurring amino acid
PRSRAPFRPGRAQLECRDRRPATAHXTPRPPAATVHGPRDTGPPLTRAASPPAPPPTPPPPRPPPPPPPNAVPRPPPPGAPSPPPGRPPGTPPSTPLAHPPAHQRLPGLRQGPPPPPAHLTPDLHNAVLSHLLRQRFQRTSAAGGRSGPFRXRQARTASAVQHFARTTPNYTVPGRSAEKAERAKAQASWEPGPPSSLGLGAPAGHRPKPLPPGRLGSARAFTASKPPLGAEFDGLEEATPQRSPLDGLEPGEAAFFPPPAAPEDCALRPFRAPYHHRVVAGPGGCHGAPWRKRSGPPPRRALAGLSTAPGH

SEQ ID NO: 942198 - protein, 220 aa, Homo sapiens
IGLFVAVGSVSPSGQAALGFPPPPSSPLAEVTTFASYLAEYVNFSGLGAFGGFGVLLSLCAPALTLMLALSRRRRLSPLLSVTSFKRFSRGDSPTDSPEALIGIPLPPWLEKTDDSIETTTARLLYESRGRGMLENCLLLSLFAKQLLLHMTDLLLNLYDRLINEPSKDWDIYYWATEAKPAPEIFENEVMALLRDFAKNKNKEQTLRAPDLEYLFEKPR

SEQ ID NO: 942199 - protein, 167 aa, Homo sapiens
MALPSGRPRSHYAILASIFPSSVGRSPDQPAASGSKWVSQGQRSPPVIKLLPRRQSLLGFSPPVVFSQPLRIPGFKICPHLPRDSFLQFQSLPLLHGPSCLFQPFWRRLMWVPVLVALLAPAPPPSNPSNLPAASPPWPAAFSSALLPLAAAPSVPPPPEFAAVTVP

SEQ ID NO: 942200 - protein, 132 aa, Homo sapiens
  misc_feature (61)..(61): Xaa can be any naturally occurring amino acid
  misc_feature (98)..(98): Xaa can be any naturally occurring amino acid
  misc_feature (103)..(103): Xaa can be any naturally occurring amino acid
PLVAAAARDRDPAPAPLSATPRDPNPPAPRGTCGSGSRRPALEFFPAPASACPHAGEAAKXRLAQAMKRLRRLRKKIRDRLLQAIDPQSNIRKMVAVXEVISXLEKYPITKEALEEKKIGKTHKKKYEKKKK

SEQ ID NO: 942201 - protein, 314 aa, Homo sapiens
  misc_feature (129)..(131): Xaa can be any naturally occurring amino acid
  misc_feature (142)..(143): Xaa can be any naturally occurring amino acid
  misc_feature (145)..(145): Xaa can be any naturally occurring amino acid
MRALLMALYELFSHPVERSYGAGLCSKEELFLLLEEELTYILLLLEAFRSYGFWLKRRAKEEEETVGFQEEVVVVALLGGEREGFLGWSKFPGFKWVQGDGLRVALVSTREEDRNQDGKTDMLNFKVEXXXEFTEDVLGVEXXLXLSYGLHRMGTLVMERMGFVEWWFGVPGSQLLVNGDLRLQQKQPLSCGGLDARYNISVINGTSPFAYDYDLTHIVAAYQERNVTTVLNDPNPIWLVGRAADAPFVINAIIRYPVEVISYQPGFWEMVKFAWVQYVSILLIFLWVFERINIFVFQNQVVTTFLLTVTPGEI

SEQ ID NO: 942202 - protein, 112 aa, Homo sapiens
  misc_feature (97)..(97): Xaa can be any naturally occurring amino acid
  misc_feature (104)..(104): Xaa can be any naturally occurring amino acid
MGTIEEIAHQIIEQQMGEIVTEQQTGEKIQIVKALDHNTQGKKFILTNHEGSTPSKVILGREDSTPGKVFLTTPDGGGVNQLFFTTPDLSAQHLQLXKDNFSEXEPNKDFDL

SEQ ID NO: 942203 - protein, 36 aa, Homo sapiens
MTLMNNFRDSYDFGVITEQEYENQNCKAKADGQKAW

SEQ ID NO: 942204 - protein, 243 aa, Homo sapiens
AEMQRRLSDTTCNYYFPDRSANGGAFQGISGCHILLLAFGVHGREQKFFLDVGGVREKHGDSINAHAPASGGGQLICQGSTDVFIYEQGLTITSSLGLGLSFKKPPPPHGIIQLSIRIAYLFLHDKQPKALSQTLFERRHSAKGLMCQWVATDECGIDASDFQGLPNKPVKDLAVVRGGGHSTAFATRDIIKNFASLFSFKEVRFWQLHPQGFLKLFYHVDSPEGWGEVNIVGLALWALWGGR

SEQ ID NO: 942205 - protein, 204 aa, Homo sapiens
  misc_feature (4)..(4): Xaa can be any naturally occurring amino acid
  misc_feature (30)..(30): Xaa can be any naturally occurring amino acid
  misc_feature (35)..(36): Xaa can be any naturally occurring amino acid
MGEXLSEMGPTVAAAEAQEEAQHVVVMGLXCGGKXXLLYRLKKKEFDQRDPHQRQQHREEPGAPGGTAGQHAAQEGDGGGQEKLRRTVALLYRAGQTVLVFVVDACGGVSGWRKRKVELHRISRASDNQGVPVLVLANKQDQPGALSAAEVEKRLAVRELAAATLTHVQGCSAVDGLGLQQGLERLYEMILKRKKAARGGKKRR

SEQ ID NO: 942206 - protein, 115 aa, Homo sapiens
  misc_feature (115)..(115): Xaa can be any naturally occurring amino acid
RHLPILWSPPRGDRFPQLAAEDVASAAPTPPAPREPRELGQRPGLDGWDPSPPPKACPSAGRSLEASPGPWPSFAAQGPGRLFAVGSPRAGRSSRPPPGAAGQSSRPSDICLSRX

SEQ ID NO: 942207 - protein, 134 aa, Homo sapiens
MFGPGLERIEYLFGVELMSSEELCPTAGLPQRQIDGIGSGVNFQLNNQHKFNILILYSTTRKERDRAREEHTSPVNKMFSRHNEGDDQQGSRYSVISQIQKVCEVVDGFIYVANAAAHKSSDTEAETLTGFLNG

SEQ ID NO: 942208 - protein, 260 aa, Homo sapiens
MSSNCTSTTAVAVAPLSASKTKTKKKHFVCQKVKPFRATEPILSVLMWGVNHTTKELKKVPVPVKPKPKDFKAKSKKKVEKQLYKKENLPSRFKFKEYCPMVFRNLRERFGNEEEEYQKEVKRSPQENENKGRCGTRFLTTYERRFVTKTVSSEDVAEMHNNLKKYHQFIVECHGNTLLPQFLGMYRLTVDGVETYMVVTRNVFSHRLTVHRKYDLKGSTVAKEASDKEKAKDLPTFKDNDFLNEGQKLHVGEESKKTSW

SEQ ID NO: 942209 - protein, 110 aa, Homo sapiens
MKLMQTKKEEKAEELHEESFPTPPSPKLIHHPETTKVRTLTKEENPNEEGPGGTTKEATPPNQYPTISSTGRQGLTCSQGYIIIKIYKMEDTRAQSPTIPGPQRHTPIFV

SEQ ID NO: 942210 - protein, 225 aa, Homo sapiens
RQTKGDSRPQAPRLGPPRLLLEPARACPARELTGELLDEDDLLEGGGGQLAVEVGLPELGKPDVVAGAAQGEGGEVEEEAWQGTRTSGAHWPSGPPAPALPASPRIIYGPGGGRQTRRRTSSDPGENKMWSIFVSFKMKRAVLGPRGIVCNLQLLLFMEEKHTDEDVSTAFNRWNANSGFEKEPPGSPEITAQRLEGEPNPGEHLKRRPGQTRREGTTQITQQDQ

SEQ ID NO: 942211 - protein, 110 aa, Homo sapiens
  misc_feature (1)..(1): Xaa can be any naturally occurring amino acid
XSKENHMQGKPNEKEKMISGQKLEIERLEKKNKTLEYEKEILEKTTTIYEEDKRNWQQELETQNQKHQRQFSDKRRLEARVQGKGTETTKKWETEVSVEWQPNSGGGGIN

SEQ ID NO: 942212 - protein, 293 aa, Homo sapiens
  misc_feature (203)..(203): Xaa can be any naturally occurring amino acid
VGAGWEVFQPFKMLRVVSWNINGIRRPLQGVANQEPSNCAAVAVGRILDELDADIVCFQETKVTRDALTEPLATGEGKKAQGSLSRNRSGYAGGATFSKDNATPVAAEEGLSGLSATQNGDVGCDGNKEELTQEELRALDSEGRALLTQQKSSKGEGKEKTGIRSNGERPPGGPWEALSGEPGRGAPSGGGKSEQKPSGGSMXIILGDLNTAHRPIDHWDAVNLECFEEDPGRKWMDSLLSNLGCQSASHVGPFIDSYRCFQPKQEGAFTCWSAVTGAAISTMAPGLTMCWGT

SEQ ID NO: 942213 - protein, 165 aa, Homo sapiens
PREPTQHALRPLVPSSRRRPAESPLRSRRCSGDMVLCVQGPRPLLAVERTGQRPLWAPSLELPKPVMQPLPAGAFLEEVAEGPPAQKEEMKPKDAGPKGEIQLCITKELLLASGNLAGIGVPLRANEARENLQKMPKRQRSYYSENTHPNYLFTLSVKKNRGPTQ

SEQ ID NO: 942214 - protein, 157 aa, Homo sapiens
  misc_feature (99)..(99): Xaa can be any naturally occurring amino acid
  misc_feature (105)..(105): Xaa can be any naturally occurring amino acid
MVCGSSAFFFSALGLLWGPSKKSLQLVVCVVLVYGVLALGLDVPVEISSSELEWKPVAVVGPEVLEGDLIQREPAWAHFVALQESSLGAVCFDEMKVNXKRLENXLKHDLAHLVQGVNCKNALLLPPPPSPILDGLFFLHFAPKAIPPAGPQASLFH

SEQ ID NO: 942215 - protein, 244 aa, Homo sapiens
  misc_feature (1)..(1): Xaa can be any naturally occurring amino acid
  misc_feature (92)..(92): Xaa can be any naturally occurring amino acid
  misc_feature (150)..(150): Xaa can be any naturally occurring amino acid
XGGPDTETHRLGTLIADADEQGGRGRQGSGRRGGPPASGPVLGGVEGADSPRRSQLEVGSHGWTASSLAALAGQKPGEARQSVFEARQSGSXRWASWGVRGTRGCRVSSEAAECGPEEEAEVAEPCRQRLHSGSSARKFFLLGKGLSPKXSFSCWRSFGNWPSQTLQLLSKVWVGVGDGPGGLDGFKQSRQPSPVTVITYAVTIVVLLRDACKAVHKAVLPIKAAELDEVDTFFEVLFDGYSGV

SEQ ID NO: 942216 - protein, 114 aa, Homo sapiens
TVIRFFPAASATKRVLPPVLPRLQSSHPGTAQRPPRVPRIPRSPGLPKEDEAGAPDRPGAAPDALPPATRPCLLSRSRADPVQSKSARRFASWDEMNVPGRHGLLQLGQGLREH

SEQ ID NO: 942217 - protein, 211 aa, Homo sapiens
  misc_feature (2)..(2): Xaa can be any naturally occurring amino acid
  misc_feature (4)..(4): Xaa can be any naturally occurring amino acid
RXLXDSHFRGLGVEVPGVGQAPGRVAFVSEPGAFSYADFVRGFLLPNLPCVFSSAFKQGWGSLAALGEARGEARIRTNAKELRKSGCNNCKKWGPRRKIENQKTKKSQKTNKIMEKTKKSGLIFSQGLSLNEKMEIVQGIFGGGGFQAACVFLVRMAESILGCNGCGEIMLCLSGACGQLVPFHAEIFRSFNWSINVCGKKKWLLFPPGQE

SEQ ID NO: 942218 - protein, 263 aa, Homo sapiens
SADPERKSQAAGAAMWAPPPPPAAGAWLPGVPSCGAAELSVNSIEKFHFKSWMSKPPKTYRYGGVPPLAADVCQPLEEDKAPINGNHTFKMALNQFSDMSFAEIKHKYLWSEPQNCSATPQELPSQYWSLPPSRGLAEKRKFCLTCCKIRVPAAACWTFSSPGALESAIAIAAGKMLSLAEQQLVDCAPDFNNHGCQGGLPSQAFEYILYNKGIMGEDTYPYQGKDGYCKFQPGKAIGFVKDVANITIYDEEAMVEAVALYNP

SEQ ID NO: 942219 - protein, 176 aa, Homo sapiens
RPGNLRCRAPRRKGKSRGQSGGPPGRGGTAGGGPAETGGQGAGRGGHTRRGAKGLQERAGPGGAHRPSQGGEQGEEGTGGPGRGGRGREEGGDRQRGPGQGAGGGQRERDRGRGAQEKGERGKQGGRETGKRAGGQGGGGGQRWGGRGGGGKGWPSGEGEKEEGGGGEGGAEQGKE

SEQ ID NO: 942220 - protein, 295 aa, Homo sapiens
KTPALNEYGDQDPKGQTSLEHLKQLPNHRGLTKKGEGHPGDRDKPEEGQTGGRDGGEGGQGGPARRLGGGGRPERRARGEEREERPGAGAGTGNRGGGREGGGRGGGGRGGGETAGEGRERRRGEKQEKKRAGSKEQKPGEGKPGQERRRGGHGPAGLGTPAPARPSRCRPPTPPAAKARKASPYPNTHFPTSLGPRYIHAHMHAYMFRAILVSKYDPSLEGNCIGTSNSGLACTLSCAALHIHTCIHEPPHKHLHTWGLLTMLTSLAGKEGTHGPALAGGPFARLRGVASPESY

SEQ ID NO: 942221 - protein, 206 aa, Homo sapiens
  misc_feature (106)..(106): Xaa can be any naturally occurring amino acid
RGPVPRGGGPSAFGGGCGARLPFSGGGAASVCPGARWACVAARRWREGSLPVASFRSALSPRPPGVRPVSPGGLGRRLCLVFVVVVLFCVFAIRTGEGPCCLAVGXPGALSPFSHQTQVMHLPKKKKEKDFAAKKLSSEEAEVLKIKNLQLRFNRHLPSPHSGLSKPQEHEVQKHSLWKALPTRTKLLALAKGTVPSSSLTSHLVS

SEQ ID NO: 942222 - protein, 186 aa, Homo sapiens
MSPLLWFQIKRKKMCLVNLKLHRVQMQLYCLLKEQRIFQHITFCCSWYGFTNKGTEDFVVESLDASFRSPQVLPAFISMKFHSLLPLKHCSATPGERQLVENPITPAEPMGGRPFGLVINLNYKDLNGNEFQDAVFNQTVTVIEREDGLDGETIFMYMFLAGLGLLVIVGLHQLLESRKRKIPIQK

SEQ ID NO: 942223 - protein, 221 aa, Homo sapiens
  misc_feature (38)..(38): Xaa can be any naturally occurring amino acid
  misc_feature (186)..(186): Xaa can be any naturally occurring amino acid
GRADSGTGGGRRARSARGWGSGAYMRFDVPGQGSSAAXTFRALLLLRYVVARVIWADILFIAVTFFFTLCLFPGLEYEIRHFFLGEWLLILIMAVFNLSDFVGKILAALLVDWRGTHLLACSSFRVVFFSIFFLCVFSSGLLALSYYAWFCFFFFAYGHLLRLFGCVFLFLAAGKVSSKLRELAGXTMTVSYMSGLTLGSAVAYCTYSLTRDAQGSCLHAS

SEQ ID NO: 942224 - protein, 227 aa, Homo sapiens
AARARAAAASCWPKGPEGEGKLAAVYWNITNQHLRREGNKKEVNVNDYVDKESTEENSPGVGPGAGAGPGGGAEQYVLYMESSNGYSTCNASKGFKRWECNRPHAPQSPIKFSEKFQRKIAFSLGYEYHAGHEYYNISTPTQNLHWKCLKMKVFVCSASTSHSGEKPVPTLPQFTMGPNVKINVLEDFEGENPQVPKLEKSISGTSPKREHLPLAVGIAFFLPTYLG

SEQ ID NO: 942225 - protein, 231 aa, Homo sapiens
  misc_feature (147)..(147): Xaa can be any naturally occurring amino acid
REGLKHSLVLQGAWIYLPKVKSKLRSVGVSLKDSQTGWAVSRKEGPGQEEALVAAQGIVGWGLGPLRGGARAEGRPCLRGPAPKDGEGRSDTDQPGPLGTGVTSGGSSGQRWRAWARPGLGRGGGAGAGAWGHAPRAPGLTWTPAYXVGQVVVGGRGKVELLTRRVVVARAAEPQRPLKVQQLPHEVEVGRDVGLFPLDKLLASLSDRFIFCIREATVTVTERLSLPGSAP

SEQ ID NO: 942226 - protein, 198 aa, Homo sapiens
  misc_feature (70)..(70): Xaa can be any naturally occurring amino acid
  misc_feature (126)..(126): Xaa can be any naturally occurring amino acid
  misc_feature (147)..(147): Xaa can be any naturally occurring amino acid
RRARIRREAGARRRGWGPRGRGAVPGQGCPAPCPVAARAPHEKPAPRPPQRGRTLSTSGVAAAGGTRAGXNPGAGPGSGAGTGAGAATGAGAMPCKSAEWLQEELEARGGASLLLIDCRPHELFEXSHIRVSAIQPGHPGPHVAPPXARCNLPIRSIIPNHALTKERFATRCKAATVLLYDEATAEWQPEPGAPASCA

SEQ ID NO: 942227 - protein, 230 aa, Homo sapiens
RRLVGLASLRAVSTSSMGTLPKRVKIVEVGPRDGLQNEKNIISTPVKIKQIDMLSEAELSVIETTIIVSPKSLPQMDDHTELFKDIHNSPGINNPFLTPNFTPFHSAITKKFYSMDFYQTTLEDTIAVGTPAIIKDMLSAVMQELPLAALAVHCHDTYGQALANTFMALQMGVILVDSSVAGLGGCPYAQGASGNLATEDLVYMLEGLGIHTGVNLQKLLEAGNFICQAL

SEQ ID NO: 942228 - protein, 300 aa, Homo sapiens
  misc_feature (1)..(1): Xaa can be any naturally occurring amino acid
XKFKYSESPLSQTRTRTDRASPYRGKGAGSGEGYTKQGRGEGTDNGGVPGGGGRLGPPSILGLSSDGGNRPPGIDRRLLRQEEKSDVSALPPRPPRAPAELAGIGGSSPRGQGEGVFGRRASPPRPTSPEGGRKAIFVLEGLGGRQARGPPGSPQIVSEENAKGPPARVPNRNRGLQAQLRPPAPLQVLCMSSWGAGLRSRDCWQWRHGSRARVMGTLTKKGAEGPPPLPSSPGSQIFVVGGGARELVVLVVVSAAWASVVRCRGSSVQGVRWAATLQLLHVPISLSFGCHLDDVLLPGV

SEQ ID NO: 942229 - protein, 330 aa, Homo sapiens
GGEQAAGRGDAAARGAPGLIAASRGARRAPGAHSPPAAACPGPRSAVEKPPEERGLRAPRPPEMVGHLHLQGMEDSLKEQGREGLLESPDSGLHPKASPSPRFYSLAPGIIEARAGGAGASSLPPGPNKAKPPSSQLPNPPASEMRPRMLPVFFGESIKDEEEHKMKEDENVKIKYDSEKHFQDKVFYAPVPTVTAYSETIVAAPNCTWRNYRSQLTLEPRPRALRFRSTTIIFPKHARSPFRTTLHCSLGRPSRWFTASVQLQLCQDPALSLLGPCHALTGLGPPGVLDEPGPGETLDDDTIIRLALGRSGKEAADKDRVEEALPLLPD

SEQ ID NO: 942230 - protein, 91 aa, Homo sapiens
MFGPVSCVACFCSSAELSPCGGAVGLLGKRMNLERYSFSRCTWACRDFVDLYRLSRIHRNADGPGHLLVNAGHPELLQAEAAAGAHLRVVP

SEQ ID NO: 942231 - protein, 207 aa, Homo sapiens
  misc_feature (60)..(60): Xaa can be any naturally occurring amino acid
  misc_feature (70)..(70): Xaa can be any naturally occurring amino acid
  misc_feature (74)..(74): Xaa can be any naturally occurring amino acid
ELAGLERFDPSELLEQALLSGLLLSGQEPSGLEPFYCGGDLFCWNFSSSSSSSSSSSSSXLQYQVLFWEXLLGXLPFEASQLHSGNILSLIFFAFLTLKRSKSVTWAFPSLASISSAQRVAAQSRIDVTLPPGFSDILRVGTVRKRDDDISHPHALHKHGLSPHLTPRPIDQSPVLINNTYNREPFSGMRSKGEIGHPANLQKRLNT

SEQ ID NO: 942232 - protein, 204 aa, Homo sapiens
PTLRRGGKSGGQGGANAGQGQGRGEQRGERGGEGPQPAGGGGAHSGPKKEKKQDRDKAQGAGAGRGEAGKGPQSKGRDRGGGRQPRAGKGPGGRGEATGPAGGKKAQHITQRDQTRSAGPKAPQPGRGNRRANPQRERGESRPHHRPAHPPTPEDGREGGAEDRGEEGDGGAAQAPPGGRRGGGGRARGPHRARAPDKAGEKDL

SEQ ID NO: 942233 - protein, 225 aa, Homo sapiens
SQHLVPRRVVRRGARRELVVTMAMRELVEEECGGANPLMKKDGELTQDKELGVVREGGLGLGALEPWWEEGAAKWGGGGREEEGGGEGGQEQKGPWGGGGRENGKREEGWEEKEEREQRYSGYACLESTVVLQTLPGESECAPRQEGGSEYSRGECTACRRSETYVRPIRQRVKEQTPVGVARAAWRRKRVTKERRTVGEENRRKQPPSARCSKSSRRRSVSTRP

SEQ ID NO: 942234 - protein, 143 aa, Homo sapiens
PKRDQARREEQSKQQANEHRRRQGASQAKGGGPGSHTKREESGRSAREKNGTREDQQSHQKQEERINGDNKPNRDRREQQHQRSQEARSGDNKHTNETREHSRGGGEQRRTTSARTSNEGENQSRTRDAKGSSQEQKQEYRAS

SEQ ID NO: 942235 - protein, 181 aa, Homo sapiens
  misc_feature (18)..(18): Xaa can be any naturally occurring amino acid
  misc_feature (59)..(59): Xaa can be any naturally occurring amino acid
  misc_feature (75)..(76): Xaa can be any naturally occurring amino acid
  misc_feature (176)..(176): Xaa can be any naturally occurring amino acid
TGELWVLAQNKGLRTSSXDARPPQAEGTGTGDMAGFRLQAQPRHPPLPLESPPEEHGCXPHGENEVSRGFLPCPXXTYPLRIYTPPVFSSPPPGSSYTPFLQSQPRPRLSSPYHTPKTYLLNSGENKFYQFLQLLLQALFNSMVFDDPVKVPEVVQATFCLSIVHPWREHPAPLLXALLQR

SEQ ID NO: 942236 - protein, 104 aa, Homo sapiens
  misc_feature (24)..(26): Xaa can be any naturally occurring amino acid
  misc_feature (47)..(47): Xaa can be any naturally occurring amino acid
  misc_feature (54)..(54): Xaa can be any naturally occurring amino acid
MEQRRVTDFFARRLPGGPRIAPPXXXCRLPSPAKARTPRPGLRYLWXPGARPPXRGPRTRQARPPARRRLRLSVDEVSSPSTPEAPDIPACPSPGQEDKEIHSG

SEQ ID NO: 942237 - protein, 318 aa, Homo sapiens
  misc_feature (103)..(104): Xaa can be any naturally occurring amino acid
  misc_feature (110)..(111): Xaa can be any naturally occurring amino acid
MRLKRATRAGPFLTSGGGGGGGGLCGDHEAPPLGLLAMYRYLGGGCCGPGGGELAWAGGVPGWAGLLGWARGQEEEGTELGEELGERRYYREGVEEGEEEAKXXKMGGGXXAGGASIVEDKLEEELRKRESEEEKGNREGGILGIIKACNHVLSLSFPIRGDDGSWEVIEGYRAQHSQHRSALEGGIRYSTDVSVDEVKALASLMTYKCAVVDVPFGGAKAGVKINPKNYTDNELEKITRRFTMELAKKGFIGPGIDVPAPDMSTGEREMSWIADTYASTIGHYDINAHACVTGKPISQGGIHGRISATGRGVFMGLK

SEQ ID NO: 942238 - protein, 252 aa, Homo sapiens
SEQEEIQKQQKKYHSQCNGKNFSEAGIITLPSFSLVFHGPPPGPSNIIRKSQFLQGSGRQKDKQAFNPRAGGALPPPTPPAPPGGPPNDRERRAARCQRGEGPPGSPPPPPASETTLGFWSSSLPLGTGLLWPPLGTLLPPTPPRPPPPHPGLSELAAPRLLRCVGWGGGGPNPRAPLPAHQQRESSGQTPLPHLLCGRWDTFLRTSHVVVVESGVALERLLPAQVLVLVFDAEKRGTGNLSGIFEGISSSS

SEQ ID NO: 942239 - protein, 273 aa, Homo sapiens
TGRAMGAGGRGGGGRGGGGRGCPGGGEGPAARDEGRVAPGRARTMGRAGTGTGGEAVAAVVAGPLLLLLLARPPPASAGYSGKSEVGLVSEHFSQAPQRLSFYSWYGSAKLFRFRVPPDAVLLRWLLQVSRESGAACTDAEITVALPFRRPSGHQPGCGTSFPGTTAEATDPPFQVRGLPAAAPTAEEANAFLLKVFGGRAPGGLASLAAQLAPLQSKKNRIENGLVSHPVPALFQPGICWVTRGGGDFPSVGLDVAPSLKTLLSQSQTTSRV

SEQ ID NO: 942240 - protein, 62 aa, Homo sapiens
MPGMKGSLISAGTNTATLRPFSISGCCLEAARRHSSFLAGNVLYRANDFKFSLPGDAFMKEG

SEQ ID NO: 942241 - protein, 100 aa, Homo sapiens
RSLARSLALSAWAPRRAPGPRAAGTPGSHRPGRGRGGQPEEALHPLQPPGLAAAAAPREAALGGGDGDRKDSTRPGAPGVVSPFFVFSFKRWWYEDYVII

SEQ ID NO: 942242 - protein, 93 aa, Homo sapiens
  misc_feature (2)..(2): Xaa can be any naturally occurring amino acid
  misc_feature (19)..(19): Xaa can be any naturally occurring amino acid
  misc_feature (51)..(51): Xaa can be any naturally occurring amino acid
  misc_feature (53)..(53): Xaa can be any naturally occurring amino acid
  misc_feature (57)..(57): Xaa can be any naturally occurring amino acid
  misc_feature (70)..(70): Xaa can be any naturally occurring amino acid
  misc_feature (88)..(88): Xaa can be any naturally occurring amino acid
MXFTVAVTTRLLAQKLLCXVPVRRHCFGQVGASGRCRRFLCFLRWLGLGGXLXFWLXSPFGAGPLPFFGXAPRQGLVGGCVASAVALXSGGGL

SEQ ID NO: 942243 - protein, 157 aa, Homo sapiens
  misc_feature (6)..(6): Xaa can be any naturally occurring amino acid
MVNTSXNYNDETWMSDSLTIRRNWSGSGTTQERGTPNAWMATVRPSGDCGLVYERWSGAAGVHQWGPAAKRLGAWEEMKKAVLAWGRERKPQTSWGAGEDLSRSQCRRKVGMGPVDCVGNLCQGGSRGGCGCGPGDQRGTEQGKSRERGGRRFERRS

SEQ ID NO: 942244 - protein, 160 aa, Homo sapiens
  misc_feature (72)..(72): Xaa can be any naturally occurring amino acid
PAGCPRLYPSSPYPLGFTHRQGWVFEPPAPCPSVKPLLQLGAPVPPTGGGEDCPRGDGGVSHVGAPGPAVLXSSGMMQKQCLLGLRTLRSLCRQVMELLHLPSAEEIRTVIQYQTVRYDILPLSPVSRNGLAQVKRKILVLDLDETLIHSHHDGVLRPTV

SEQ ID NO: 942245 - protein, 99 aa, Homo sapiens
MNNRELQRRLLRALGSVEAEGVQRGAATVLLELLRRRVDLVLHVFRVRDTLAELTDERGPRGGLLVVVLDVHIDHVHGLAGLLCSGMQIFHQLVIHSLF

SEQ ID NO: 942246 - protein, 52 aa, Homo sapiens
MKALDFSRQFNLKITVPVVSVRIQKRLKRPPLKDPGIPTEERSPIPENANEN

SEQ ID NO: 942247 - protein, 97 aa, Homo sapiens
  misc_feature (55)..(55): Xaa can be any naturally occurring amino acid
  misc_feature (60)..(61): Xaa can be any naturally occurring amino acid
  misc_feature (63)..(63): Xaa can be any naturally occurring amino acid
  misc_feature (74)..(74): Xaa can be any naturally occurring amino acid
METESQQNSNSTNGNSSSGGSSRPQIAQMSLYERQAVQALQTLQRHPMQLSISTXSFSTXXSXIPSCIPGCRPXGHNFCQSAGQLPKHQHYTAADYQ

SEQ ID NO: 942248 - protein, 320 aa, Homo sapiens
EPLSSGGRGGGSGGGMADANKAEVRGATGGDSSHLQRAEPPGEPRREPSPAEAEKQQQQHSSSCNGVKMENYELAKEEKFYFEEKFVGSEKANGFYFYFKDKNFGTGEKKGSNCKKVFISDISYYIKWKAIKDLMREKVVEVTYVELFKDAEGKSRGCGVVEFKDEEFVKKALETMNKYDLSGRPLNIKEDPDGENARRALQRTGGSFPGGHVPDMGSGLMNLPPSILNNPNIPPEVISNLQAGRLGSTIFVANLDFKVGWKKLKEVFSIAGTVKRADIKEDKDGKSRGMGTVTFEQAIEAVQAISMFNGQFLFDDYACE

SEQ ID NO: 942249 - protein, 181 aa, Homo sapiens
  misc_feature (110)..(110): Xaa can be any naturally occurring amino acid
MLVEGGGSLLPGLGKIDPRVMHHPRPRKNVRPPPPKEEKAAETKQGEGEPHRPASKLVCWPPGLESFFKGAAARVQTCICGGCKWTLIARRKNEWDGNVKGKGFPASKRXWKGKKPKPKNKTTPPTTTEEACPDPKQQLVTMEQLHLALPKGSLPVVAQAALPPGPWALLPITKYFLDHIQ

SEQ ID NO: 942250 - protein, 291 aa, Homo sapiens
AGAGSGGRSWELGRRNITEADSLVIVAPGRLSQRPFTPWFLDLPWEDVLLPRVLNLVPQPRRSCCCRYRAFLSLVLLLLAWLLLFNATLVGPPIPQAPLALLLLDAEGLLELALAPCHKWLSDKDLVPVLARNPQLRECGVGRLRATERRALGALAEGCPRLQRLSLAHCDWVDGLALRGLADRCPALEELDLTACRQLKDEAIVYLAQRRGAGLRSLSLAVNANVGDAAVQELARNCPELHHLGPHRLPPRRKRRCQDIGRVLPRAAFAAGCGTATMCGSPACSRLRKRG

SEQ ID NO: 942251 - protein, 293 aa, Homo sapiens
  misc_feature (163)..(163): Xaa can be any naturally occurring amino acid
MARAAASPTEVIRAAKKDEYYRGGLLEAAGGALHSLAGARKWLEWRKEVELLSDVAYFGLTTLAGYQTLGEEYVSIIQVDPSRIHVHSSLRRGVLVTLHAVLPYLLEKDLIELEKEMKDEIESRRSLQGSLGPGGRGCSGARSWISKHKAHPDIEQQRRELLXEVFVLKKGLAWIQRLHVAWFYIHGVFYHLAKRLTGITYLRVRSLPGEDLRARVNYRLLGVISLLHLVLSMGLQLYGFKQRQHAKKEWRLHRGLSHLQDLLGGETRFQKPLCTLCLEERRHPTATPWVHLF

SEQ ID NO: 942252 - protein, 297 aa, Homo sapiens
GGRRQAGQSPSGRETGPGPSETGGPPHAGDHGQGTLPPDPQTPQRGGPERGKASRDPAPAEAGLLAFSASPPQGKAGEQRREAGGHEARQQEAETPSGGAKGGGGRSRLERKKRGAHRGQNGAQGGPREGGTGGQGQHGRGQGAEREGRARAKGRGQRREEGKERRRGERAGGRRKNRGGGHRGTHIQHQVQVSSCQRLLEGLIEEALLQQLQDMGLLGLAVKEGRGDRCASSCAHGLHDAGGDGGLLLPERHTHLTLNDALYLGQKGLLQAAHSHMQLVRTSARTLPATVAAICPV

SEQ ID NO: 942253 - protein, 318 aa, Homo sapiens
EGPGARGAGGERRGDGGGTGGPRARPGAGERGCGGRGGGGTNAGRAGRPRRAQGRRRDIDIEDATQHRRENRKLDRPAGGPRAESPRPARAEKGERKGRLGPEPPGAGESTAAKKNGRRTRPPKKRQEKQVICCSGEESTTGRGSLAKEGERGASRDASRASKAWGSNKGKKQPGAKNDGEQKDDEGNRRAGANAGGAEARRAANKGAAGGRGSSGKPAERTGRKGGTGRGAERAGAHRNAPQRAGREEAGNRGGGRGARGKGKRQEESGGQRRQPEGTPRNHGRRSSGGPAARRRPKRRGGESQEGPAAGDGRRGGR

SEQ ID NO: 942254 - protein, 243 aa, Homo sapiens
  misc_feature (50)..(50): Xaa can be any naturally occurring amino acid
  misc_feature (53)..(53): Xaa can be any naturally occurring amino acid
  misc_feature (57)..(57): Xaa can be any naturally occurring amino acid
  misc_feature (76)..(76): Xaa can be any naturally occurring amino acid
  misc_feature (132)..(133): Xaa can be any naturally occurring amino acid
  misc_feature (154)..(154): Xaa can be any naturally occurring amino acid
RFLVRWLEKSCCQLLVGFLLFRMLGNSSPIPPGGARSPRLGGQGLQGTQXRLXEPSXISSGPLGPGTRHHRVPVSXHSRPPQLQVQPQTPTLTHTHTHTHTHYTHTHTHTHTHTHTHGCNNTGPTPWTPGMXXDQNRTAGSTVRGAAQGAGSLXRYLLAASQAFLPSLYTSTGSEKDVMGVWYPSGHTVQDMTAVWRARSIFTSQDFSWFQKGQVNWVLRVPVIFFLGGGFCFDFLRPMFAGG

SEQ ID NO: 942255 - protein, 108 aa, Homo sapiens
MDAVTHQWELLAARLAAHSAKLGYPGIAGILALELREAALRVGAGNHRRYAGALRRVYSAEARAYTCAQLGTAARASSPVPWQLNVYLCVACAVLEGKAAGGALLCQR

SEQ ID NO: 942256 - protein, 221 aa, Homo sapiens
  misc_feature (129)..(129): Xaa can be any naturally occurring amino acid
MGMLSSDNASERRHKRPRDSGPENRLAQQVFTIGCFEPFFGNEGHSRSGAWDPGQGVLLGVGNHTRWGPRGSRLSGTHTAGTMAAHCEGVEPLCQGRLGPSGAQCDGNVLGERVRAWDPRAGECEREEXPLLRRCQSLEHYMPSTAALQPTQSQRQRVANVAAISDPHLKGYEEVAGALGKALGALQNQLSGSPPSCLLFCLLILLPTKPPEARTGAKRAR

SEQ ID NO: 942257 - protein, 44 aa, Homo sapiens
  misc_feature (15)..(15): Xaa can be any naturally occurring amino acid
  misc_feature (26)..(26): Xaa can be any naturally occurring amino acid
  misc_feature (40)..(40): Xaa can be any naturally occurring amino acid
SPGEIHFAAKCDQQXWAEYIIAQSQXCQTANVAQGMACRXVSLE

SEQ ID NO: 942258 - protein, 318 aa, Homo sapiens
  misc_feature (1)..(1): Xaa can be any naturally occurring amino acid
  misc_feature (136)..(137): Xaa can be any naturally occurring amino acid
  misc_feature (139)..(139): Xaa can be any naturally occurring amino acid
  misc_feature (142)..(142): Xaa can be any naturally occurring amino acid
  misc_feature (184)..(184): Xaa can be any naturally occurring amino acid
XGRSVRESGGQPLRGARAETGSVQSPTRGGGTRLAWISRRKGPGEDRAGQPKQKGGAGVREGAAAGPGPSRLGARLREPPTQAARRREQGHGGEKGQVIHRGPREEEGPGGGAESMVRSPLEAVVKGSSNMLYFNXXTXFSXSSSRAKKQRQEISNRRSLERSNWPTSASLWGAKIKQHGEKGXQHHGVPIHAVVHKGPRQALELLEGAQDLLVAAEDTFGVLHSLTLPGLGLTKTPPTSTYLLLLPPPVTGAAFFGRSAGGRRLQTQGPRNGPQHHHGCYPPSALAQASPGSCLCLHPSREMNESAGTQKYSVLKIS

SEQ ID NO: 942259 - protein, 136 aa, Homo sapiens
CWFGGTAWSREAPGAQVVAQGHSARSWGTRGRGTRPVSGPGLPAGSGGRDPGVAAPHLRKTIPGLSTDDRPSPRKRTLSSRSLYSSSSYEPGSTRKVMLRKVPPDLALLQQGRHAARHALRRSPMPRPRPMPRGIM

SEQ ID NO: 942260 - protein, 121 aa, Homo sapiens
MALAECVTIRSSAESRRAGSPTAVTEEGTFSSTHFKSSACPSLNFTISIGFLLVLLIVIPPKPAFSIGSFCASSSSSSDNGDKANLWLFLDGRQRTMKTKRIMENSKRQMASSTHSSRQYD

SEQ ID NO: 942261 - protein, 297 aa, Homo sapiens
GSGVCARHNDPGRGAAGLERVAGAAEPSMVGQAAVRMPKTLLTNAGYLEQVKRQRGGPSDTVGSHGTVPGTVGLLEEDLDRLTIIHVTGTQGKGSTCAFTECILRSYGLKTGFFSSPHLEQVRVRLRINGQPISPELFTKCFWRLFHRLEETKDGSGVSMPPYFRFLTLMAFHVFLLEKVDLAVVEVGIGGAYDCTNIIREPVVCGVSSLGIDHTSLLGDMVEKIAWQKGGIFLLGVPAFTVLQPGGPLAVLRDRAQQITCALYLCAMLEASRKGGAADLGWRGAQRSKRLACSGHC

SEQ ID NO: 942262 - protein, 190 aa, Homo sapiens
MAASFFLLHTGQKMPLIGLDTWKNKPGQVKTAFNYSLIVGYRHINCPAIYSNKPEIWEALKEDVGTGKAVPREELFVYIQAVDTKHHPEDVEPALRKTLADLQLEYLDLYLMHWPYAFERGDNPFPKNADGTICYDSTHYKETWKALEALVAKGLVQALGLCNFNSGQIDDILSVASVRSAVLHVGIHPY

SEQ ID NO: 942263 - protein, 64 aa, Homo sapiens
  misc_feature (22)..(22): Xaa can be any naturally occurring amino acid
MSRLRPRGLGTGLGALAFLHQXANPPMSPIRRYPGTVLVSPLTGTSNTAVSVAPRGNTLTHMRL

SEQ ID NO: 942264 - protein, 171 aa, Homo sapiens
  misc_feature (9)..(10): Xaa can be any naturally occurring amino acid
  misc_feature (62)..(62): Xaa can be any naturally occurring amino acid
  misc_feature (125)..(125): Xaa can be any naturally occurring amino acid
MWRASAWSXXPLFPKGLSGSIFTKTLGREKNWKASSTCTSVRSSAARWLWALSEFAPAGSGXSPRSSGLWLCELLGQCFQLRVLRLRVWAGGMAGSGCALLAGLVPPAATVPLRSNKLCVHMCPXAVCIVCAPVCLLLALAVHFVPGPCQLSREMPFGGALLVQPVALVTN

SEQ ID NO: 942265 - protein, 107 aa, Homo sapiens
  misc_feature (17)..(17): Xaa can be any naturally occurring amino acid
  misc_feature (71)..(71): Xaa can be any naturally occurring amino acid
  misc_feature (86)..(86): Xaa can be any naturally occurring amino acid
  misc_feature (102)..(102): Xaa can be any naturally occurring amino acid
VGDCFLSEAESGPRLTXAGSTAAPYAPSLPPPRPPRRHQPSNANRRSRGGAAARREPQPGLRLAHRLRRSXSRGLSAPALSPPRPXSNGPPASRQWTQNKGXYIYKL

SEQ ID NO: 942266 - protein, 107 aa, Homo sapiens
MAAQPRPVPAEGMNQQQMSVFSKKRKGLVQSRGLGSVLMFNHCALPACFDAQGSNSKVEWPTCGLSVVAVWGGSRPPPSDLGGRSFYALRDKLQPAAEYPGNPDRYS

SEQ ID NO: 942267 - protein, 157 aa, Homo sapiens
MGGGGPIPRPVKFESFGGSSRCDPFRLGVLGPFTTSGYSQLDRGGDEMRVQSVQKTKRWKGGIVTAAVNGVCSLSYAPLTPLRANRKHQESDAQGGLDHAERTQNQQRPWAGGPQTNAHWLKNEKVFSPLLPENQEFTNPGPPSSATKAWGPQFHFF

SEQ ID NO: 942268 - protein, 155 aa, Homo sapiens
SDLLRIAAPAPIGSGLCPGTRPLELALALPTFLPPSSLPDVDPSSTLNPSPPPPHPPHPPPLLPHPHHPPPLNTPLPPLQTSPPSSPSSSPPSLPPPPSPLSHPHPPPPHPPPNTHPLLSSPLQPPPSPTTSFSFTNILLNTLFSFPTSTPIFTP

SEQ ID NO: 942269 - protein, 207 aa, Homo sapiens
QGEAESWAELQGGGHTGGWSSCPGRQAGSLSHPKATGPTTEAEAMSNGWNHPPTPPPQQPLHHPPHHSLQLSLHFPIHNHKKTKTHSHPPTHNQPTPPHHTHTHHLYPQPTPTHTISHPHNSTHKTPPTNHTNHTHTSHVQAQAKKPTPKQRSVSQIETKIPGERHTHRLRRKGGESKGAPGERGGAQGQGGGLGALGCCRPPGPRG

SEQ ID NO: 942270 - protein, 110 aa, Homo sapiens
MAGMHRTVAFAASNHPSAMFGYEIVNNSAPPSSPPLIFSGKKGPLLYFLFNLQIMCKKLSVERKLKKLNVYVCVGALSLWLSEPVRIDHWTPRTTNCIGKNLELVFSAWL

SEQ ID NO: 942271 - protein, 241 aa, Homo sapiens
  misc_feature (12)..(12): Xaa can be any naturally occurring amino acid
  misc_feature (65)..(65): Xaa can be any naturally occurring amino acid
  misc_feature (75)..(75): Xaa can be any naturally occurring amino acid
  misc_feature (100)..(100): Xaa can be any naturally occurring amino acid
  misc_feature (104)..(104): Xaa can be any naturally occurring amino acid
  misc_feature (106)..(106): Xaa can be any naturally occurring amino acid
  misc_feature (122)..(122): Xaa can be any naturally occurring amino acid
  misc_feature (126)..(126): Xaa can be any naturally occurring amino acid
MGPVGILQQGQXSVCHPRGLAQVLGQDEKVKQRLRAATILVERLQQQAHNGPPTALGHVAGRLPXKQQQGGRALXSKHLEEVVGIQQHLTTRSQADPGSXEQGXGXILVQVLHTLHHHPGKXQAVXQHQEQHYHGCSLQAVPLVQRTQGGIRVLVVEKEGGGHELEGGVGHVHAPPHLLVQPGHDAVPPTLVGEAVSKHAHGLELRGRGGLELIQDHTELPLRQVRSIQEDVPLHVSFFGF

SEQ ID NO: 942272 - protein, 289 aa, Homo sapiens
  misc_feature (14)..(14): Xaa can be any naturally occurring amino acid
LTWTRGLFNEGRYXGRVGEFPRPCTFRGSVPRYAPLLRRLFAGGWALPSAPRDILLTLPGAGDGRRRRWFPSWIQRAVPLRPSAAGVSRSSAMNDRSSWRRTMKDDETFEISILFDEAPHLDPQIFYSLSSFWRNFEEPPEAACSALALMNSVKTQLHMALERNSLAAEGIEDLEEERDFLRCQLDKFISSARMEAEDHCRMKPGPRRMEGDSRGGAGGEASDPESAASSLSGVPEEGSPVRGGGRSRREVLVGGALGKPKAREGSEFKDADGVLCRYKKILGTSRSSR

SEQ ID NO: 942273 - protein, 165 aa, Homo sapiens
MGELLLLSAVPVLLALGGPYSSSVEDVSILFVDQMKPQRVEEVERLNWSKVRKLLNQFSLGEEPLKKLERYTLTKVAIRNWQEKRSMRPPWHRNGIGKVFDFKGSFEFTCEESSKGANEPGKGGESDAVNLEGDIRTVFQQMTEWITPGMLYSCRRKRSEGSEST

SEQ ID NO: 942274 - protein, 307 aa, Homo sapiens
  misc_feature (163)..(163): Xaa can be any naturally occurring amino acid
MTHTESRITVASRATHLFGLSYGHSFTTKQQKPQTGTRMLASPLEAVQTPAGGLGLTTRLSGAGHQGVRVPMLPQGVGMTGRSLVTRQWTSLGEGWRERAGQAPAAHRLAHANTLKALLGGFSENQGERSSPSLGRCQFFLPPHSLQSPETLRVFWLGVLSSXVFDPQNLSLLMSPRHAREGVGLLGRLAQLPPHPAWLGPRKLGFSKLAWGAGGLPGFLHQNRSPPPPLPFQLKEDAEEEKALGRGALVPSISPLGSTFLGAALNLFFLPFASLGKGLAGGPKGRCGLLEEGRGSRVGGDRDVLWA

SEQ ID NO: 942275 - protein, 88 aa, Homo sapiens
RPVCGGEPRDCRHSRFCWLLHAAGCGRKPSLGLVALRCRGSKKMSSGLRAADFPQLEGKISEELKRRERLQKKAFEEIILKYKKLLEN

SEQ ID NO: 942276 - protein, 169 aa, Homo sapiens
QHAPHAPAAKPTTNEREYEEEETQRRRQQQYKEKRKEYQDKTQREAKYPENRKRNKNREESTKEHSSVKQQKAEKEKIKASKVEKEEAQRSNNKTQGPQPNTSSQYRLKVWQQKTKAVVKQNRIVEKETEKSAQNRPTEDQEKQYKETGLSVKHKSEEVKTKKTEQQQQ

SEQ ID NO: 942277 - protein, 106 aa, Homo sapiens
MKKKHYRCSTRSICTWSDEIRYILDGSGYFDVRDKEDRVDPDLHGEGRHGDAAPRGSITSFTVEREELHEEAMRLFVGEPVWTAYNRPADHFEARGQYVKFLAQTA

SEQ ID NO: 942278 - protein, 372 aa, Homo sapiens
  misc_feature (32)..(32): Xaa can be any naturally occurring amino acid
  misc_feature (52)..(52): Xaa can be any naturally occurring amino acid
  misc_feature (207)..(207): Xaa can be any naturally occurring amino acid
  misc_feature (210)..(210): Xaa can be any naturally occurring amino acid
  misc_feature (213)..(213): Xaa can be any naturally occurring amino acid
EPAGRRGGSAADGASSAGSKITAIIELFKRTXKITKVDGPYPFPAEASLISXQGTITEVKVKTDLPDNYIHKVILQGEAKEEKKAVSKDGTSYVPSEICFVIGGVRNQQTLGSYNSESFARITIITTSSRPTFGLTETPKPPHGMQPPKSTISCTHVISAGRSTNTTSVSNITDTCTHDVFSVEGAPYNRADPFYQSVVATDDVKDXPPXPFXKIGPMNNITSDIFKKKEVRQCQKRETGNYTCEFCGKQYKYYTPYQEHVALHAPISTAPGWEPPDDPDTGSECSHPEVSPSPRFVAAKTQTNQSGKKAPASVVRCGTLLHRTPPATQTQTFRTPNSGSLRARQPSQRYLWQGKLFKCAYQLSSLKFAAQL

SEQ ID NO: 942279 - protein, 222 aa, Homo sapiens
MSTIQGMNSLHLGLSGQNHFFELGAQPQASQVIVLCPEAREADGLAGQAAQVHKAGGLRGTEVRDSYQQHCVVLRTSDDFGAKAGGVATKVDMRALWEDERVSFLEGVTTRVLGAVGLMLRTRSNFQDLQVILHAAVSENLTHVLSLCSQKSDFINGGLEGVGEQQEPGVGSCQREHAGVEGLLGERFIGGKNSPGITSTGTEALSCRRMSSSILTASTLAA

SEQ ID NO: 942280 - protein, 247 aa, Homo sapiens
EGFGILIAGPEDSKGGRGSLSGGLRDHGVQQSQTPGTLHRQWASAVVEDEPGPAGEGPAVLAQPRLVLTGPRLPLALEALAAPGPPGAVLGAGLTEPPQVAASLAEGLEALCFLPVPGALTPRLSLQGQGWVHTLRSWGLLGGGLRTSWLSLESSPLWTVKLHCQRPGDVVFLPLPGLIILICWPSIFLGHPALRGLLPKRGSICCLWVLFLTRGVTELHPSAGEFTHDPLGIVGLHVPIIRGCRMR

SEQ ID NO: 942281 - protein, 233 aa, Homo sapiens
GVLLRAPLPSVPPPGGGGESLSESVKGDWRRFLFPFVRVAGAGSRRRGPRDWGLPAGPGGALLRMRPAGVTVSAALLCALRPPPGEPARCPENPGVRAGRGAGSVRSGAGPGLPAPGRDPGASWRRRAAVSLLGTALPAETPRASADAPPPPPPPPGFGALPGPPIPRGASPPGLRRGSLPPSSVGSFSSPSFAFSFPLSIQSPAAGGTFSFSSFPALPFLSTSSSSLGPGAR

SEQ ID NO: 942282 - protein, 117 aa, Homo sapiens
  misc_feature (46)..(46): Xaa can be any naturally occurring amino acid
MRTALRRVYRLCKPKERWADLLTWIQGVSGVIPKAKYGWKGEGLRXDDGPGISREAQDDPCQNLGEDAGSASQQLVISGGHKGQASYASLSHRARPWKKFLKRFWASSFTLLPGEVF

SEQ ID NO: 942283 - protein, 283 aa, Homo sapiens
SKVMASGIATHVRGSNLWGRIIIIHVALGPILTIPITTQQSVPKGSRPKDNLGPTQQGDHGPLLRGTRALPWNTALKGMGSVALARLEEIKGSSPLCLQGTEDRLDEVGCGAVAAHVSSPHLANFDHLLHRICDHAGVKPKIKRPQHVGSRQQHGRGNGKIPAHCLGKWVPGTVLKDCVSRTIALTRDHTSPPNQASSQNVNNVPIEIGHHKHIKLVKILHQLHAAVVYDHCIKFDFGVQFSNFLTALQEQPIPKFHDVGLVDSSYLPRPFFVAYSNANFAIS

SEQ ID NO: 942284 - protein, 112 aa, Homo sapiens
  misc_feature (110)..(110): Xaa can be any naturally occurring amino acid
HLLAVILDITTSRYMMSIFKRANFSLGLFFEILFYPLLLPPSAPWPVAGVLRGATFGCLLAWVFFLGFFLCLPPFGLVFVVVCGSVFGFVFLRVWRWLVIWPRLLGSSRXFW

SEQ ID NO: 942285 - protein, 128 aa, Homo sapiens
EDGRPSPGQGCLLPRWWELGDPCAWPGQGRGPRRMTPRDPWLILACQCTVFTPRSPPSGMYAQQLVATLSMSGPENKKLGTFLLTQDLARLVMVPYHLKQISWVTQTALDGIDITTGPHIVMEANMGP

SEQ ID NO: 942286 - protein, 172 aa, Homo sapiens
LSRPWGGTGPGWDPEGVLGGGPWWAALPAFCRFSVSSTFSLKRRFFCLILASSALRLGSRSGSFPSRFSCFRLLFFFFSLKWAASSLYLTLSSHHVDLCEVLLHLGLFHGELLQLLLCTGRPADSVDEILGEPGGVVVDDQLYRRNVQAPGGHVCCDQDPVDAGLEVGYGGK

SEQ ID NO: 942287 - protein, 149 aa, Homo sapiens
MVTYEHQPQKATWLQLDSMKLCNNQKKPALGFEGGESHAGRIFTIPTLSTVQAVSPRLPVPEKPGPTAFWMLSWARKGKVWEECLPAANEKICTHLKGLGEEKAAFFKELQVEHHQAPALDFPVLDSLRACTLKLGSNPGSFLPEKMTP

SEQ ID NO: 942288 - protein, 40 aa, Homo sapiens
APRARLGLRDVRTVHPPGAPGPPGPPPATHRPPPLSPQDL

SEQ ID NO: 942289 - protein, 99 aa, Homo sapiens
  misc_feature (4)..(4): Xaa can be any naturally occurring amino acid
  misc_feature (72)..(72): Xaa can be any naturally occurring amino acid
  misc_feature (79)..(79): Xaa can be any naturally occurring amino acid
LLRXPAHPLLQPALSDERTGERGAHHSGGHGGNSLLEVLPLGTQKSRTFSPRTRIEAGDLIPSAHHRQPFAXSEKRGLXLGWVLGLVLLSWFIYFQLKI

SEQ ID NO: 942290 - protein, 112 aa, Homo sapiens
  misc_feature (58)..(58): Xaa can be any naturally occurring amino acid
  misc_feature (67)..(67): Xaa can be any naturally occurring amino acid
  misc_feature (72)..(72): Xaa can be any naturally occurring amino acid
  misc_feature (74)..(74): Xaa can be any naturally occurring amino acid
MRWLQNRKFFCKGLCFFSKQRHRLAACALGSSSCCSSLDKDSPSTLFLAALERMKLSXSTVAFKSPXLNLAXCXALGSSYNQSPVPAAPLVPGCRARQLHRGQLGQRADFCK

SEQ ID NO: 942291 - protein, 133 aa, Homo sapiens
MSNVPAKLFAEVSKGGPRVGVCGVGVPGLDLARFDHLLPLPDHGNYRPWVHVFHQAGKEWTVLQVNVVVLERDLAGSLLEFQNNKAESFLLKTLVNLSHKNPLVPIWFDRNEGTLTVGHGSFQLLRFELRLQR

SEQ ID NO: 942292 - protein, 92 aa, Homo sapiens
MEKGKARGLEPPGFPASHVIKLQTHEEVGSQELTSLTRETHLDDQALWEAQGLQPLYSFFLLLRHLDVVQLQGLLSYGAHLPLHICKVRQHP

SEQ ID NO: 942293 - protein, 178 aa, Homo sapiens
  misc_feature (11)..(11): Xaa can be any naturally occurring amino acid
LTIGLNKKTLXLIQVPLLIIGMKEHHFSNFNPLNSFTAIHLRSFGAVLKGARFSQDLIHIFTFFGIFTLQPPIWWSTDHSTTFYTVNSFPASQGIFPRAEFVEGKTGVFFFFFGFFYFQWHFFLSFFLGFDYYAFFLLENRENKKPEFLDFLFLGHIIWLLIFICVFGTFFQIKVNPS

SEQ ID NO: 942294 - protein, 166 aa, Homo sapiens
  misc_feature (13)..(13): Xaa can be any naturally occurring amino acid
HTKEQERTKKQAXNRTGKPGNAEQAAGSRRYLALDLSMIATYRDIHHPENENVLKRGYSGYNTRWAKKILTQDETGKETDYEDIPVAVTNNNSTNKNPLKDEKPKQHIPQEEKAANPKNIEQYLNSVDMPKNEYNHNTPTPLSKTTWEEQSIKQGCKLNRLNSEVG

SEQ ID NO: 942295 - protein, 129 aa, Homo sapiens
MPWALEMAAVNNSKRKRPPPGPWQPRSPWLFCFSPQILVHLLFEHLKTSPMTARTPPPLLPPGALSLLFPSFPSPPSGFLIFSFLSSCLSPLHIEHTLYSRTAFSSSSHVATALLSRLHGGCLTAHFHF

SEQ ID NO: 942296 - protein, 263 aa, Homo sapiens
  misc_feature (145)..(145): Xaa can be any naturally occurring amino acid
GAPHPPPAVWGGGGACLGGGRVAKGRGGRETGRRARARPGGGGGAGRGGGGGGSGGGGGGEGGGGGGGVAAARAEGRRREGGAGGGGGGGDTGSPKHQAHQHFTGVEPGATALPADSQTQERRAGVLHNPSQEGCYGLADLGGPXTGAPSLPAGAIKPSVSPDGRAKGIYIRPLGNGGDLGASLGDPRAGTTGGAARMPPPAAKLGEGGALWWGGSEAGRSPDLGEGRQLPWGVGLPPGSPWVETGEREDACQRGRDPPQKNT

SEQ ID NO: 942297 - protein, 258 aa, Homo sapiens
  misc_feature (2)..(2): Xaa can be any naturally occurring amino acid
  misc_feature (115)..(115): Xaa can be any naturally occurring amino acid
  misc_feature (131)..(131): Xaa can be any naturally occurring amino acid
  misc_feature (133)..(133): Xaa can be any naturally occurring amino acid
  misc_feature (154)..(154): Xaa can be any naturally occurring amino acid
  misc_feature (163)..(164): Xaa can be any naturally occurring amino acid
  misc_feature (196)..(196): Xaa can be any naturally occurring amino acid
  misc_feature (206)..(206): Xaa can be any naturally occurring amino acid
LXAAMPPRAPPAPGPRPPPRAAAATDTAAGAGGAGGAAGAGGAGGAGGPGFRPLAPRPWRWLLLLALPAAFPAPPPRPVPTPPWAVPVLGGPAEADRVAAAHGYLNLGQIGNLEXYYHFSHSKTFNRSTLXGXGPHTFLRVGPQVKWLQQPEVXRRVKRQVRXXPRPFTSAAPFGPHVDLHCGDKNRRCRSDMNVXATWLEGLPRXIARGGPPPDDGIERHHPDLGPKFIDSYASYDVDGNDYDPSPRYNASNENNTE

SEQ ID NO: 942298 - protein, 172 aa, Homo sapiens
  misc_feature (74)..(74): Xaa can be any naturally occurring amino acid
  misc_feature (92)..(92): Xaa can be any naturally occurring amino acid
  misc_feature (143)..(143): Xaa can be any naturally occurring amino acid
FVTWWDTATPNMYRAEADILWVNEMLQIKMLPNGTQQKKQLHATQAFSSTHSFSCGKWLEIVTVLELSIFIQEXFWILLFWFWKFLVVIQNXVQSWHYVCALGDEVSSENGVSGCFMGQVGGLQCDEPLNLMHHSIHVGPLLXIAGWQGFGLAQSPVNFFMGASLRSQGYFM

SEQ ID NO: 942299 - protein, 142 aa, Homo sapiens
QREPTMVVSPAEKTNVKADWGKAARTLGEYGEEALERMFLCFPSTKTYFPHFDLAKGLPQVKGQGKKVAEALTNAVVSRGRAEPNALSALSDLHAHKLGEDPVNFKLLSHWLLVTLAAHLAAEFTPAVHASLEKLLACCEHR

SEQ ID NO: 942300 - protein, 227 aa, Homo sapiens
  misc_feature (20)..(20): Xaa can be any naturally occurring amino acid
HQGTKHKTTSTMRALSNQKXPGPQSVNVTESAIEASMAGPKGTLKIPNSLASKELKLHAPGTKPLESEHILQPRSQEETQQPPCNQKGGFSSRGLFVCPQVSRWPLLGAPAQAGNGHILGESQESPYFVGLGPGPARTVGGCLCCHGLDQDGGGLQRVVAAPPGFPEDFVFKLLLLLWDGAEVLAVEVGMAAGAKPSAFREALGAVLVPAEVVILVPSGEGYGEAAG

SEQ ID NO: 942301 - protein, 144 aa, Homo sapiens
  misc_feature (24)..(24): Xaa can be any naturally occurring amino acid
MSHDPGPGEALLCTQSLEGEQGKXDALSQELHNDLLRAHLQLCRKLQRHHHHLLVLDDQVAGFALPRVVVLYPVVDLHVPPQVALSGKLVATLGALKLAHPLVPSEVHTQLLQGFEGLAAYVEEVGPVLLMFVCYVPFVVSLLS

SEQ ID NO: 942302 - protein, 242 aa, Homo sapiens
  misc_feature (104)..(105): Xaa can be any naturally occurring amino acid
AHTPGGPQRCLHSRASSFPGRPMKGDRFGCRTCCYGAPWTNRYGWVSGRALDSEADPAPTAAWRCSQPADGFFTKRPLQGTSANKPRVVQGVRDRARWERGSAXXLIPQMQGAVRLRELEGAWDKGVHNGKEKKKNSQGRALGSPRETSPPPGAAVVEDPLDLGIQGGHGAVLWTLGVAVLATMVNAAGGKRVPRQAVQVMECGQPGWHPHICSLPMISKPRCDSRAAVFRRHRASTQHGHA

SEQ ID NO: 942303 - protein, 287 aa, Homo sapiens
QEPAPPLEKMFSMRIVCLDLSVVGTAWTADSGEGDFVAEGGGVRGPKVVEKYQCACKKSKWPFCSDEDWNKKDTSGCRMKGLNEEVNQEFKKTKKNLKKSQFEYQKNKKDSHSLTTKIKEKMKGDFSSANNRDNTYNRVSDDLRSRIEVLKRKVIEKVQHIQLLQKNVRAQLVDMKRLEVDIDIKIRSCRGSCSRALAREVDLKDYEDQQKQLEQVIAKDLLPSRDRQHLPLIKMKPVPDLVPGNFKSQLQKVPPGEKALTDMPQMRMELERPGGNEITRGGSTSYG

SEQ ID NO: 942304 - protein, 114 aa, Homo sapiens
  misc_feature (30)..(31): Xaa can be any naturally occurring amino acid
  misc_feature (37)..(38): Xaa can be any naturally occurring amino acid
  misc_feature (51)..(51): Xaa can be any naturally occurring amino acid
  misc_feature (81)..(81): Xaa can be any naturally occurring amino acid
  misc_feature (94)..(94): Xaa can be any naturally occurring amino acid
  misc_feature (100)..(100): Xaa can be any naturally occurring amino acid
GPPSMGFFRQRGQLTRPTSMSYPPARFSPXXPREETXXVMGAAGREGPRQXCFRVRSGAEAGGTGRSCPGAVTIAHLQTLXAWPGLKVPHGCWXGRLSAXGCPQRAGGAAAAQG

SEQ ID NO: 942305 - protein, 73 aa, Homo sapiens
MGSQHTGTAVFHLGGEEASAQRLNGTGQAHPRKGTQDPQPLWSGLWATWREGSRTVLVDEPLPTSPFSSRPIP

SEQ ID NO: 942306 - protein, 225 aa, Homo sapiens
PAALVARPPYLAHGQTQVLPPTWSSVRGPPIFSGPCASWRGKSLRGSEDPAFPPGLPPPSLEYSFQITVSFPGSQTVLPDLPLVIGSRSGLSRRPSRLARRTRSEMSWVDLNLPETPDAPPCNMDVIPEDPRLASPPSPLPDDMDGSQDSPIFVSAPEFQFLPPPPYAEVDPSLLNNNVQEPVADKKPPYLTCFFLSLFLDTHFFRDSTVSAMECGSTLASDFLM

SEQ ID NO: 942307 - protein, 132 aa, Homo sapiens
  misc_feature (58)..(58): Xaa can be any naturally occurring amino acid
  misc_feature (66)..(67): Xaa can be any naturally occurring amino acid
NKYTKQLITNRVLKAVRSSTTPNKPVLKIPQEKFKNSSLNIYENKKKKNRGCVSPWQXGPLLAAAXXATSHTTVECSPGAVGLGGPPARIARAPAGEGPEILPKYLSELEFWGRRTHSGHTVTVGDMGPCVP

SEQ ID NO: 942308 - protein, 171 aa, Homo sapiens
MRPAAGWSLSLFLSSFHYTRSLRSLYGGYRPGALFECGFRAPEYFLGGSLGFDSIPGQFVSKFVTEGFSFDIVFFGENGIGKFTLMNTLFNITFEIEEATYNDVCLLIFVQIYDFHESNVQLKLTIVDAVGFLDHINNDESYMSIVDYIYVQFENYLQEELNIRRSSLRLL

SEQ ID NO: 942309 - protein, 140 aa, Homo sapiens
  misc_feature (105)..(105): Xaa can be any naturally occurring amino acid
RGKKHGHRGSSLTVFGGQHGGSEKRGSCVPGRGEPQGVNSAWEEGGQGHQQAVAEELEVDRVHPKLVRVQVAQGGQRVGHVVHVPHGVGQRVGHLLAVALNLGKXVAQVEVREVGLGGREGQEHPLQGLRTTLRHPAHPT

SEQ ID NO: 942310 - protein, 179 aa, Homo sapiens
MKRPELGVTLTLLLCWSLTQYSKCVFMDAAALVLAPIDDVFDRGELSAAPDPGWPDCFYSGVFVYQPSVETYNQLLHLASEPGGFDGGAQAFWTPFLAFGPQQISENTCHLFVTSAASLYTPTSRHLKCLVQVPKLCISWDESNHGIILMIPKQKVSKDEAHDPNMTHPEFLILWVDIF

SEQ ID NO: 942311 - protein, 252 aa, Homo sapiens
  misc_feature (12)..(12): Xaa can be any naturally occurring amino acid
  misc_feature (22)..(22): Xaa can be any naturally occurring amino acid
  misc_feature (24)..(24): Xaa can be any naturally occurring amino acid
FQKDRRRKAGQXWWAKRRACRXLXAAGQTAASAPRAPAVKWRIRPCTGQEAPSARAQIVWPSICLLISQRESISAGRASPLKKGANTLFIQIQILTAWGKLAKALVLIKLNEAGDGFDDVRRAVHEDDRSCAQACVCLHKRIEVHEERLKKRIGDQWGREAARDERKEVVPAARNNPIMLLNQFFKGTDISSSTVQGWLTWPEMLNSLVPKKRSLPKPANKVPPRRQIVGDTATVSTLATVVGQPNTPTSAG

SEQ ID NO: 942312 - protein, 81 aa, Homo sapiens
GVRLRRQDLPYTGGRTRPPLSDPPQCLFDFVCMCVLMQAFQLTVSYVEKYSVVILYLYYRKELKMIIIFSGVFAGATWDIN

SEQ ID NO: 942313 - protein, 269 aa, Homo sapiens
GPGAARRVWVCRPGWRPLVCSWLFATSASWAPAFLPPAPPPSRACRVPALPPPGPVPRLATLWLPCEWGSCSFVCSSLAPFFAPVPPPLPPPLPGSGEAAAAAAAAAPTCGRLLLLVAGTCGFCSLAQMLLPSAAQSPSPAPPPPLPPWGLSGLCQARLPLAPAYLAFPRRPVLPCPPCPLPVSVGALCGFLRPSCVVFSACGRPPSVLCLRRRWPGPPGGAVWLARLFLPLPGPPFPSRAPPPPYPGGRGRLPPLLGACLPPLPRSSF

SEQ ID NO: 942314 - protein, 281 aa, Homo sapiens
RLREPEAERGGGPKPGRGEEGDAGPVAAKQGAGAPGCERHPRTPDRDRRPGPRPDQARAEQEAQAPGGRGRPPDRPAEQGERGGAQQPRRAARGGGGAGGLGAGGGAGGVARRATTSSRAGEGRQATGTVRGELALLVLGKQRRSAAGQDRNGIRQAHQGARRRRGGGADARGGRRRGLVLLGTGLTLAGLAAAPAPARPLAAMLSVGIALAAFGSLLLLGLLLYQVGVSGHCPSICMATPSTHIVHFFHFIIFIISLHYSSFLLHYTTSIISILILLIQI

SEQ ID NO: 942315 - protein, 146 aa, Homo sapiens
  misc_feature (52)..(52): Xaa can be any naturally occurring amino acid
  misc_feature (82)..(83): Xaa can be any naturally occurring amino acid
  misc_feature (88)..(88): Xaa can be any naturally occurring amino acid
  misc_feature (90)..(90): Xaa can be any naturally occurring amino acid
  misc_feature (92)..(92): Xaa can be any naturally occurring amino acid
  misc_feature (109)..(109): Xaa can be any naturally occurring amino acid
MQLALLCTCTAGMLDGVVSAGDERDEEAEHHVDEDADEGIKVDLGDEPHQAXAALLRLHMKDASTIQPTEAVAQVDDIYAVXXKASSXEXAXPQCGDEDILVVEEGQVXDHPTHTSSVEVLRKKLQTSELAKFLASMQIFMMVPDM

SEQ ID NO: 942316 - protein, 289 aa, Homo sapiens
LPPPLCSSPRSLPPLLSLRLILAVLGVVEAPFGGYWLLGSPCLGWCPRPAPCRAQSPAFLGPLEPDSGEWLCAAAFLPVLPPLRVIVQPAPRLFPPPPPPPALPSPPPASSGSPPPVVWPPRAVFRVCRLLPPPARLAPPALGPPPPGLPGPGGPPGALPLAWLPTSGPGADLVWLCGLPPLWLSGSSALPCRFSLPPPAGWLRAWGAAPLGASENTIVPQSIAGLGHWSDSPRGSQNWGCAERLRGLCLRYPCPSSSSSLRSGSPGTVFRINALQAALVQRRSQARSL

SEQ ID NO: 942317 - protein, 183 aa, Homo sapiens
MRKTTLRSIKINTHTMEPPSPTPPLGHHKEESSDVLKAIRKYESQKASEKAAETEINENGMENKGLKENRRRGTGAHACDPSTEGGREGRSTRAGNRDHPDEHGETPPLRKIQKKLAGRGGGRLEAQLLGRLRQENGVDPGGESAEIPPLHSSLGDRARLRLKKKKKKSTKLLLIFQVYIMLN

SEQ ID NO: 942318 - protein, 75 aa, Homo sapiens
  misc_feature (36)..(36): Xaa can be any naturally occurring amino acid
  misc_feature (44)..(45): Xaa can be any naturally occurring amino acid
  misc_feature (51)..(51): Xaa can be any naturally occurring amino acid
  misc_feature (55)..(55): Xaa can be any naturally occurring amino acid
  misc_feature (59)..(59): Xaa can be any naturally occurring amino acid
QFYTQPPVCINIPIGPHLDQLGESFIDEDDGNVEGXDLLGIVGXXGGREGXLGGXGEDXRGGGGGGGGEGGQDVL

SEQ ID NO: 942319 - protein, 285 aa, Homo sapiens
GVVKTTPKNKNGKGKKSDEDCGDWRGKFGKVHHYWPAEPEILCQRQNNHLKKLRRRLLTWERAPSSIPPALAPLPPPRPRGIPLAPPLWPPPPRPAPAPPLPPPRPTPFPPPPPPRPLPPPPVPSRFSPPAPRRRPPPAPPPLARPAPLPPPPPPSAPPPPPFPASPPPFPLEPPNTQKRSAALVPAVRPSLPPLGSPPAPVAFVPLSGWPGAPLLAPRAPLPWFPGWPVPRPAGPARGPPLLAALACLLPPPRPPAPPLRLPLPAVSPLGGLGPVPVGRVALGV

SEQ ID NO: 942320 - protein, 74 aa, Homo sapiens
ECPELRGFCWTSREAVFSRLLCSVTSLLPPPRSLGGAIHTAEPGGGLEFFGEVERAENGFPVPKPSLISEMPHL

SEQ ID NO: 942321 - protein, 221 aa, Homo sapiens
MECLYYFLGILLLAARLPLDAAKRFHDVLGNERPSAYMREHNQLNGWSSDENDWNEKINPSVEAGRHEVEKLLEGRPCAGGPEPVTHQPSWAQNITFAVNLIFPRCQKEDAYEQHNLMKKLTKNEGWFYLAESGMYYKWKNMCQKTDDGGKMAPAKNQSIMSSLDGKIFFLTTPGWRRRNFIYVFHTVGQYFQKIGTMFIESFCEHSQCDTWASTHGSDCV

SEQ ID NO: 942322 - protein, 147 aa, Homo sapiens
ATAEAKAMPGGGAGARGTKTALNKKTLEAECNSPAPPTPEPGEGPRKEEGGTSAKGTWQPPSSIGCRKKDMDGEKQAEPGGGGEPAATQEPQTKDQGAEKEPTQHKEDEGENQPENKEDSIENGREKDSPNGGAKNQKPDMFGSPFQ

SEQ ID NO: 942323 - protein, 248 aa, Homo sapiens
  misc_feature (132)..(132): Xaa can be any naturally occurring amino acid
MLSPQRALLCKLNNINLQHVSLGLHLSRSHELQEGPLSTHPPPGETGGKESRGPCSGTLVDANSNSPAVHCRCCQEHGPGLENSRTRNRRKRGLHLPKKQAAPPHSAPAQILAPMSQLSKSTCGNSMVMRMXTLSPVSYTWSRAHKWIKKELEPAHRTASAALMINAQELILQKIMDLDSNCNALNTCQDVPSPGLEEEDERAERDLPTSELLEADDGKIDAGKTEPSWKINPIWKIDTEKLKLNGNH

SEQ ID NO: 942324 - protein, 134 aa, Homo sapiens
  misc_feature (39)..(39): Xaa can be any naturally occurring amino acid
  misc_feature (121)..(121): Xaa can be any naturally occurring amino acid
GWCGTGRPQQRRRAKPRAGQTKKAARVGRHGRRRRSARXAGRWGSALLALCGALAACGWLLGAETQEPGAPAAGKKRRRRLRKKDGSPSKHRYTRSCARRSCRVAAVHRYEQEFKTVWAHXRRAGSSCVIEAVR

SEQ ID NO: 942325 - protein, 80 aa, Homo sapiens
  misc_feature (32)..(32): Xaa can be any naturally occurring amino acid
  misc_feature (40)..(40): Xaa can be any naturally occurring amino acid
  misc_feature (50)..(50): Xaa can be any naturally occurring amino acid
  misc_feature (71)..(71): Xaa can be any naturally occurring amino acid
MGQKAFIASLRYCLEQFAELFDLGFPIPWQIXLSLILIRXTLQLLLVQRXFSVPPDDVLLAMIIAPICLIXFLITLVVWW

SEQ ID NO: 942326 - protein, 177 aa, Homo sapiens
  misc_feature (82)..(82): Xaa can be any naturally occurring amino acid
MDRHVVTSSSSQCQPVYRCMQILLVGYMHANQSSACMDFVMKQALGGATKDMGKMLAGDDEKDPDAQKEGVSERQEALRQQXVWNFISSTVCRFGCGGGGRSGQQDPEIKYGAERRREEKESRGRKQPWEQPCEGELTRPKKAIPAGFGDEEEEEEESILDTVLKYLPGPLQDMFKK

SEQ ID NO: 942327 - protein, 318 aa, Homo sapiens
LGAPPTRFSPPARSVPPPPSPPPPPPPPPPPPCPPLAPVPPFPLAAFPSVGYGPAAFTPQPPPPPPSPAPFLPPVPAPLTLSTPPPPGAPMSPPPLAPCPPSPVPAWLPPPPVWRPPGPPAPRRLPFLGPPPPPPPLPPPPPPPGWRPPLRLAPTPRLCLATPLPPNPGPPSPPPLPVSRLPPPPGPPSPPRLPPPPPRPAGLPRRAFFRVSPSFWLLRAAAPLFHLLGLPPISRLVALLVRGLGTEKEDSCFELLHRAVGHFDLRKNGTMPREVARDPQLCEKLTVLCSAPGTLKTLARYAVRRSLGTPVSPRCSEG

SEQ ID NO: 942328 - protein, 189 aa, Homo sapiens
GLVCVQRRDQPVVRSAPAARSVPPWSPRRRRRRVAKEVQKKAQRIKTLSVWKMYHSLMQPGGLRLHRKQQLSLVMRTPGSPTSRPRWRPPSPRCRCRPPSPLTPACPRPEKPSPRPKERPPTVNPRFRSQWTRRRRRQPRRPPPAVPRAPPKSTANDAAQPERRRGSWTGPEQKTPSGTKRKRGESISA

SEQ ID NO: 942329 - protein, 79 aa, Homo sapiens
RLEFSGSAGRRRSAEVSTPPVMALNATGFPAFLRCLRPILRLLAEEADYGGAESLPLSAEVPVGKGFDSASPKVKAARE

SEQ ID NO: 942330 - protein, 295 aa, Homo sapiens
TLFSRPRGEDTSHLPAVSFLPENPFRASERLVKSCCLLLLLQTKCWAVEVKKPRGVSLKKKKIKEESNPFSCLDGSATKANEDVKKEKCDCKKFSEDSGKAACAKGSIKCNNNGYKHLYIPSNRVNDGVCDCCDGTEEYNSGVICETTCKEKGREERQSLQQMAEVTREGFRLKKILIEDWKKAREEKQKKLIELQAGKKSLEDQVEMLRTVKEEAEKPEREAKEQHQKLWEEQLAAAKAQQELELAADAFKELDDDMDGTVSVTELQTHPELDTDGDGAVVRSGTQALLSGGHT

SEQ ID NO: 942331 - protein, 69 aa, Homo sapiens
HSTSPSLDSEYNEELNEEDSQSDEKEQNAIETDAMIKKKKKSSKPSKAEKKKEPRKEKEKVRRNENIFH

SEQ ID NO: 942332 - protein, 198 aa, Homo sapiens
NLLRILVLQMFYMCGAVLRLRLDGFVPLFLVGPGAAPPGGGAPPPGGPPGVPPGVPPALWYSLVVVGLRAFSGSFCWCSGSSFSAVWFLSGQLVVSLRLCGVFCLSSSLVLPWGFSSSTVAFVLKALGSSDFLGGTLSLCFSSSALCFSASWAVRSVSSLLKRPLSLVIVILFSFPVLLSTAETLSIPLASMSKVTSI

SEQ ID NO: 942333 - protein, 132 aa, Homo sapiens
  misc_feature (1)..(1): Xaa can be any naturally occurring amino acid
  misc_feature (11)..(11): Xaa can be any naturally occurring amino acid
XETGVNGERSXPYMSLHNKPKNEMNPEELQKRDEEEFGTGYHSLFITQSVKNNTQILINCRNNKKLLGWVKTFDRHCNIVLENVKEMWTEVPKSGKGKKKFKAVNKDRYISKMFLRGDSVIVVLRNPLIAGK

SEQ ID NO: 942334 - protein, 125 aa, Homo sapiens
RVPQDHDDLFPAQEHLGDVAVFVDCAWTSSCPFHFWVPYFTSSLLLQHHVAVPIEGLYAAQEFLIVAAVDEHLGIVLDLFFKLRYLTGFKFLLLLLLQLLLGYLTFWLFEEAYYGYYALRSLPFP

SEQ ID NO: 942335 - protein, 224 aa, Homo sapiens
  misc_feature (63)..(63): Xaa can be any naturally occurring amino acid
  misc_feature (66)..(68): Xaa can be any naturally occurring amino acid
  misc_feature (79)..(79): Xaa can be any naturally occurring amino acid
  misc_feature (83)..(83): Xaa can be any naturally occurring amino acid
DPRRRPGGPGSLFPKPPPLQPLHSWEGICCGQRSSLPQNPGKGIIQPTRVFFPVSLRVRRGPXGNXXXPPSSSLQPYVXAAPXGAASLALSLGPRSPRWPSHWNVAADVGKEGSSSPGRIVLSFCPSAARYTTALLVLPLDHLVVLPVLQVGGQLGVLSLLSPLPGSVALLVCLHERGPGLHDVVADGALAQGRCLVQTGLPVFLHRIKDLWGGRGPPGSGPHP

SEQ ID NO: 942336 - protein, 115 aa, Homo sapiens
TTPSFLPSCGPPSGGRRRSPGPRAPDVASPPPDLPPLVSPLFRPVGPPTLFLPPGREPLVPTLRTRDLVGSGKEGTSPAPPEVVGRLLPLWPYLGPFPLPPPPPGAGGPLFFCPT

SEQ ID NO: 942337 - protein, 267 aa, Homo sapiens
PPKSPNGEDKPHIDIVVIGIDVDSGIVHHYWPSDLYMRWHRQRRTIEKFVEEAAEMGKGSFTYAWVLDKHEAERERGITIDISLWGFEASQYYVPIIVAPGHRDFVKNMIAGTSQRCPVLLLIVAAGVGEFDAGVSKNGRPREHALLAYTLGVEQLIVGVNKKVSTEPPYSQGEYEEIVKEISTYIKKIGYNPDTVAFVPISGWNGENMLEPSANMPWFKGWKVTRKNGNASGTTLLVALDCILPPTRPTDKPLRLPLQDVYKIGGI

SEQ ID NO: 942338 - protein, 286 aa, Homo sapiens
  misc_feature (11)..(11): Xaa can be any naturally occurring amino acid
  misc_feature (106)..(106): Xaa can be any naturally occurring amino acid
DADRRWGRRRXVCWSSRQPGRKTEAALAAAAAAAGAETHLAQKPEQRHCLVNTAPTPPVFKDSQRQALISSLPPRNRCENLLKHPRSWDRKNRTEVNTGFYTQMGXVGVFLEAPHREGDGRGGEGAGPATLDRNKKGTDGKINLMKGKNRTQNYSNKLALFGMAARDGVLPATGGRASSRVDSSSPERAQRSTGSTRTTDHTRRHTSSVAQVPGGDHTTPRSRTGRLISSSEATGLAHTHNGCWSFHETHTHGHLSPRVLGGSLAYTPRHSYALKTAIVDHSMDIN

SEQ ID NO: 942339 - protein, 265 aa, Homo sapiens
MAPSLWAFLLEGLSAFCWLGCTTPNPCSPNPFLGARSSRAVDREPGGVGERRAGSMVFRGGGSYLGGQFLAAMTTESSKPPKETAVAPNSHFHGMDQAPLPGHLAGSRLGLPSIFRYKAVSVLRCAACFFTSFESSAWLVLLEGSSFSDALIFFAGENVLPLLGQPLALAEDSFDVVWLVLQPKAAGAQGCAVVVELQQRGRQVVQTLHLQLQELCLLLERYVHFGAGGDSFDGEVVGVGGQDEMPPLVVGVAHSRFRLAGHALF

SEQ ID NO: 942340 - protein, 57 aa, Homo sapiens
MWLWLSVACSSSCFFSRPGWLLAWLSRGSSGEKGIKLRTDAGIGPAEVQAPVGPAAG

SEQ ID NO: 942341 - protein, 265 aa, Homo sapiens
NGRVPRLLQLLPSSSSSSSTSGFWGITVLSRQQNEPGGGPPQQVPRRVWTAGQGGPSAMKKWAYRQIHLETSGFCAVNPKYVALSCEGSGGGACLVLPLGKMERVDKNAPTVCGHTAPVQENPWGPQNDKINASGSEDCTVIEWENPDRGTEAAPDGSTWSPWRATPSVWDIVAWHTTAQNVLLSAGCDNVIMVWDVGTGAAMLTLGPEVHPDTIYSVDWGREGGLNFTSCRYKRVRLIEPRKGTVVAEKDRPHEGTRPVRTVFV

SEQ ID NO: 942342 - protein, 205 aa, Homo sapiens
MRKIMHIQAGQYGNQISAKFWKVINNEHGIKPTGSYHGKNNLELEKINIEENKTTGKKYIPRAILVDVEPSTMDFVKSGPFGQILKAKNFIFSQNGAGNKEAKGHYTKGTELVDSVLDVVKKELKNCNCIQGFQLNHSLEGGSGVRDGHLLINKIREEYTNRIMNTFSVMPSPKESDTEEEPYNATLSVHQLVENTDETYCIDNE

SEQ ID NO: 942343 - protein, 168 aa, Homo sapiens
  misc_feature (56)..(56): Xaa can be any naturally occurring amino acid
  misc_feature (59)..(59): Xaa can be any naturally occurring amino acid
MKLRSTQMHPPRKNSDLTALRTGSLDKNAGPKTGAEKASARPLTVLALKMFGWIKXQTXDSRLLVDTAKENFSTMTSLYGSIHPADSVYLSTRTHGAVFNLEYSPDGSVLTVACEQTEVLLFDPISSKHIKTLSEAHEDCVNNMRVLDNRLFATCSDDTTIALWALRK

SEQ ID NO: 942344 - protein, 130 aa, Homo sapiens
  misc_feature (23)..(23): Xaa can be any naturally occurring amino acid
  misc_feature (74)..(74): Xaa can be any naturally occurring amino acid
  misc_feature (88)..(88): Xaa can be any naturally occurring amino acid
  misc_feature (115)..(115): Xaa can be any naturally occurring amino acid
MLCRVRGESSYVVPRKIVVVRVXIIIMFVYAAMKNRAKGPAAYSMLKPETSSDSPSARSKGVRLVSASVEINHXMAKGHDGRSNQRCXCVVIRVERLKEPLISNVESRMMARVTXYETVWATARSPPIRA

SEQ ID NO: 942345 - protein, 297 aa, Homo sapiens
  misc_feature (2)..(2): Xaa can be any naturally occurring amino acid
  misc_feature (8)..(8): Xaa can be any naturally occurring amino acid
LXLGGLYXLSSTWDFCLLLDQSLPPQACCAQAPRTFPPPGLWPHCLVKAGPPPPPVYTSSLRLNRWIEIPGLIGERKGQAVPGKGIGFGEKKTEGGAMEKVAPGGRRREFDKKAWGLKRNVGWYRLGWGPLGSQSGSWLRCWLAPEFADVAAQMASRLTLLYPPGAAVGCGYEAAEIKMLPAPAPMIQRVSKTEAKVNVATTVISKMLFVEPILEVSSLPKTNSTTNSATKITANTTDEPTTQPTTEPTTQATIQPTQQTTQLPTDSPTQPTTGSFCPGPVTLCSDLESHSTEAVLG

SEQ ID NO: 942346 - protein, 67 aa, Homo sapiens
GPGRGSRVKLITSLSSSTVPGDQKLWEPLPCGTTDSHQGTYHEHCTCNTFITLGCMGNLKSTSEIHT

SEQ ID NO: 942347 - protein, 95 aa, Homo sapiens
  misc_feature (94)..(94): Xaa can be any naturally occurring amino acid
MREIVQIQGGQWGNQMGAKFWEVISDEHGIDPIGSYHGESDLKLERINVYYNEVTGNKYVAGAILVDLEPGTMDLVRSGLFGQIFRPDNFVFGXS

SEQ ID NO: 942348 - protein, 282 aa, Homo sapiens
ALSVPLSFATNMRFTFPLKAKFLENAKIVLFGLIVEYEKEQKVLEQLKKNKPKKKGKNFELKPLFQKVEVIYSFGFGFLMTFLKKKGFSSVGTKIIVAALGLQWGTSVQGNLQTKGEKIKIGKKKKKKAKISAAKILKAFGAVLGKTSPTPNADHKKIKKVFFAHNEYLVSEIFEASDIGASMTIHAFGAYFGLAVAGILYRSGLRKGHENEESAYYSDLFAMIGTLFLWMFWPSFNSAIAEAGDKQCRAIVNTYFSLAACVLTAFAFSSLVEHRGKLNMIH

SEQ ID NO: 942349 - protein, 88 aa, Homo sapiens
MPQAFPWSKFYLRRVVGPHPREEPVARLVVLPHPGLARDQGAQAEEREGADQLPEAAVAAHVGPGPDRQLASRERPREGLVVHRVELG

SEQ ID NO: 942350 - protein, 66 aa, Homo sapiens
GRALLLLPPPEDDHAAGVTGGQWALVAVDADIKHRCTVALLLVDSSLGGPLHIKDVHAHVLTARYH

SEQ ID NO: 942351 - protein, 139 aa, Homo sapiens
  misc_feature (105)..(105): Xaa can be any naturally occurring amino acid
  misc_feature (107)..(108): Xaa can be any naturally occurring amino acid
  misc_feature (111)..(111): Xaa can be any naturally occurring amino acid
  misc_feature (113)..(113): Xaa can be any naturally occurring amino acid
GQAQKDGWGQGCCVLFNGGHNVAVTVFLILQEHCWQIQLLIERLHPGHFLSLLLPVFFLQGLVLFWGGPLRTLNHQPAAFVVLGVGASFAGRAGVPQGVGVVFLXLXXLPXLXRGLLGRWECSFSPSVPAVCMAAALGG

SEQ ID NO: 942352 - protein, 302 aa, Homo sapiens
  misc_feature (52)..(52): Xaa can be any naturally occurring amino acid
  misc_feature (151)..(151): Xaa can be any naturally occurring amino acid
  misc_feature (156)..(156): Xaa can be any naturally occurring amino acid
PPSGFSRRPWGLPPPPSPASPGRCSRPPPAGVGFPSPLPSCRGFFLWSGGGXGKQFCALSPLPFSAFAGVEEGVGGFVVLPKFPLSGFSRLALWRRGAGGLGPFPPPSPPGVQAALGVRSRRGGGVPSLPPCPLGGPGGLPRAPVPLPWAXRGAGXSAPPPPASWGRLCRSGLGAWLSWPPAHPHQAQLLHKNKGPPAPGVGVVSGKGPRYGYGAAISPPLLGVQEKSPPFRCPPCHASSVLELGAPALRKKKCLCALSAEKRGDEMCQVLGVGSHFLRPLALRSPPSLLGLPSSVDEVVGC

SEQ ID NO: 942353 - protein, 110 aa, Homo sapiens
  misc_feature (41)..(41): Xaa can be any naturally occurring amino acid
  misc_feature (45)..(45): Xaa can be any naturally occurring amino acid
  misc_feature (47)..(47): Xaa can be any naturally occurring amino acid
  misc_feature (52)..(52): Xaa can be any naturally occurring amino acid
  misc_feature (61)..(61): Xaa can be any naturally occurring amino acid
  misc_feature (97)..(97): Xaa can be any naturally occurring amino acid
KQKRKKREKQKKKTKLYVLRAYNLFSPTPYFFQRALGVSIXKSRXSXMFSQXSLICLTPVXLRRFKVSVSFFIVLSRGRKGGGGFLLLWKGTSPWGXTHLPVPVLRIPVT

SEQ ID NO: 942354 - protein, 144 aa, Homo sapiens
MSSRSSGNEVFLAKLIAQPFISIFPDSGHFNVDNIRVCKILGSGISSSSVLHGMVFKKETEVNVTSVKKCKNSSDSCPFDGMITETKGTVLIKTAEELMNFSKGEENLMDAQVKAIAETGCKCRSNRWQSGRHGSSLCNKYNII

SEQ ID NO: 942355 - protein, 175 aa, Homo sapiens
APGGALPRGQAREGPRSGRRPQPRARREEEPPHDPGSGEGPAARASGPETGPAGPGPEGPHRPPQPRPPGGDSDGRKREKEESEGHPRGPRGARGGEKGERATGAPRDGAGAGRGTPPGGDGGAAEAGNEDSAAGAKQGRAERPRGPANPELDKLRSQASQGRRRHRREREKVHD

SEQ ID NO: 942356 - protein, 199 aa, Homo sapiens
VSGSARVHYSFSAFIHAFHAFSCVSLSLTRHGPCITLVSPPLPLPPALPIARCGTFNPFPLCHSRNMQSHTYLTMTSCWPPHPRDTLTGQDALYQLLLLFSSLLCFVFGSHLLLFRTYDSACFTDITFVHLGHVLSWVSRVTRLQKPEISGLDTPHLPALLYGFAVHVLFFSAPHVNYPEDCTFIMDPTIMLDITLITK

SEQ ID NO: 942357 - protein, 219 aa, Homo sapiens
GPARGGGGGPSGQRRGTKAQEAQRGAQAEGKEEGGRRAGGEGLGDGRARGGAPRAPGGQRGPGEGGRERRGRGRGGEEAGGPGGNQREGRGGGAQREGGLARRQQRLRRPGSCQVQTQPHGARRPDGTGVVRVGRAPEGLARWAEGCARPGAGGWSEQRWHEASAGVNEPVVDLQDGEPRVQRHSFLLPPRGVRVLKELEQPGSHEVGGHLGGRTPSSC

SEQ ID NO: 942358 - protein, 222 aa, Homo sapiens
  misc_feature (98)..(98): Xaa can be any naturally occurring amino acid
APWVGLIPNFNLPPGIRAQARTLTRMLLGLLVPYAHGEEAAPTLGMVPQDDMRKLSFRQVVFVSTLTCSGLLPPELYREVSRAGHHQVALSTDPIEPXVMPPGANGPWWVCGFLHPDGLVSGCGVQGSHGVLDPSKGTFVAHIKGPDKLEAAVAVGEDVQQALVVTSPELGFLVGHAEQVGVQQQTLQDAVGSAVHHHQGVVLAACEDVPVIRQLGQHGSGV

SEQ ID NO: 942359 - protein, 80 aa, Homo sapiens
  misc_feature (10)..(10): Xaa can be any naturally occurring amino acid
PVRPPSANSXICTPAVTGPVICMAVTVRTLSVYITNALYVAPGSTGRLDVPLYRINNSGGLYKLYAMPPCHLVFSQAHLR

SEQ ID NO: 942360 - protein, 148 aa, Homo sapiens
  misc_feature (148)..(148): Xaa can be any naturally occurring amino acid
PSLSLCPCARTAPEVEDGTMIFPPSEGNFLIMAQNWYQPGELEESHESVIICVTRAHVLADGIVVKLHHLIFSWQWLQSPAPCSVPAQQIFQTYPVCGPSTTITRSPSALGTRVSSMFFLRPPRTRPSSVRQTQVSGLRTPSIIILVX

SEQ ID NO: 942361 - protein, 76 aa, Homo sapiens
MTKWRVDTGDATAGIERLVVGTIDVKIGKLRANDANMKTPGNNGLNGYYNGARKSLCYAAYRNSYGRGTCNTKTVT

SEQ ID NO: 942362 - protein, 112 aa, Homo sapiens
  misc_feature (30)..(30): Xaa can be any naturally occurring amino acid
  misc_feature (55)..(55): Xaa can be any naturally occurring amino acid
  misc_feature (59)..(60): Xaa can be any naturally occurring amino acid
RAAWAPAGRLQGPPPPPPKGFNLQQLGNCXQPNPNWFGVRPPGSSWPLAYLAGWXLVPXXAPGYGPPPCPPTQELRAGGCRPWARRKATAGHLGQTQTPQGSVTEGVLFPCS

SEQ ID NO: 942363 - protein, 63 aa, Homo sapiens
QATQAGGGGGSGGPPRGGQGAPTLPQETNNGQQGAAEPAGARDMRAESRFLCQCKAGVGQAEG

SEQ ID NO: 942364 - protein, 202 aa, Homo sapiens
HPAPGSGGGRAPPGAGGERRGPGTTGGARPGGGRRLRRGQEEKEENGGPPAGTLSGGGRREAVRQQQREGEATGELAPGSDLAFRCASSQNPRSLEPGAASPERRRRQPSRALAGTPPGGGRREAGTQQQREATLERPQRATAPPAAVFPEPKKPGTCGIISERRRRQPSRGTTGLGSPRPSWSHQVASNKGLPPGLRGCWS

SEQ ID NO: 942365 - protein, 307 aa, Homo sapiens
MQARPEKGRAVGPVPVACQWCQGANDQAWSQQPSAGPEEGPQDKERLAEERLLPLLSQPTLGSLGEPLRHCPQLSNPLPWEPALEAPPSPEALGRSGGRPRPSLAGPASPFPFLTALLSLLKTLAQSHKGLRGQRAATVAAPGLQNDSPQGVAPGAAPHLTPFSAWAFSHQYHLFFFGIRSGPESGILQPLPATHAALNHGMALALLSRLLPGSEYLTHELLLSCVFRLEFLPERTSGGPEAADFSDQLSLGSSRVPRCGQGTLLAQACQDLPSIRNCHLTHCSPARASLLASQALHRGERQRAQPC

SEQ ID NO: 942366 - protein, 216 aa, Homo sapiens
VSCPPLGHNVLRLARHLWKGWIQDNAPIIPSIATTPGPRDPTLELSGSQFLEEVLTQRGQLRIEPKAPWERGIGKLIEQEELPETLICQQPEFCSILSAGSFDLICFQWVVFEEEASDKSHSHSIEQRGTNVGGRTSYQGPEEELKEGQVVFRRHCVTLQGHRQLGQRQAQSPQGTHVFPKEGKAQGDTLPTLQGQEDQGPKRWSQKRQPQNDPGS

SEQ ID NO: 942367 - protein, 297 aa, Homo sapiens
  misc_feature (21)..(21): Xaa can be any naturally occurring amino acid
  misc_feature (137)..(137): Xaa can be any naturally occurring amino acid
  misc_feature (177)..(177): Xaa can be any naturally occurring amino acid
  misc_feature (179)..(179): Xaa can be any naturally occurring amino acid
  misc_feature (181)..(181): Xaa can be any naturally occurring amino acid
GEREDLHESSKGSASATAGGXGEAGSAWGSSSKDERQGCVDVPTGGLQGRSQLNVLDAHVTELRQRGLPLALKAGLPRGLKGMREGLAEEIIGEGRFLNGHQRTMVRALRNDPGCQELVCENSTPELLARAKAVASXLWVRGRGPAAPLFPREAGRERGVLLEGVDLVFGGKLSSSXEXTXNRKPPGISRYELEGMLREEELVPGIGALPATAVQNQDNGIYEGRVSRHQRIKHIGISEDRKEVLVLENPKSKRVTAEAWGGHNELIQKLLIAEHLKDRLPVRGAAVQGSVPSRELS

SEQ ID NO: 942368 - protein, 117 aa, Homo sapiens
  misc_feature (31)..(31): Xaa can be any naturally occurring amino acid
HRAKEEFPHHAPDREKAKTQPPPPAQPPNPXNPPTPPAQKTTKSTKPKNKATKSTQKKSTSKQNNPQQKETRGNPHQNQNPSPHPPKRNPPKQPHPPDTKNKKQNKAHPPARQPNQT

SEQ ID NO: 942369 - protein, 235 aa, Homo sapiens
MSCLQGHCSLEAGTGKKQAALHYPKQNRCELAHGGVPFAWAWNPKGEEPPEPGVTVQSLGLQLGGQLFTVLAPGLGQDPEPLGGVLRNVVGLLVKGCHSPRMPGLLVWKGLRMRITFKPESSASFCTSVEITSTDLQLMLFSRTAPLRYLATALGTQHGREFAYITTPGFRWAKWNTFRSTNSLAPREEEPSRLKLKLKGCSSSTKRPSSFLRTLAKKRLGVPRAAIATAWRARN

SEQ ID NO: 942370 - protein, 58 aa, Homo sapiens
MGWPSIFRYKAVSVLRCAACFFTSFESSAWIVLLEGSSFRAALRMGIASLYSPCWAST

SEQ ID NO: 942371 - protein, 130 aa, Homo sapiens
  misc_feature (40)..(40): Xaa can be any naturally occurring amino acid
  misc_feature (81)..(81): Xaa can be any naturally occurring amino acid
  misc_feature (94)..(94): Xaa can be any naturally occurring amino acid
MRVKPPICSAQPKGRVYKKTRFSVSCQGGYCRRVDWCGHXFSIFTMYGPGKQSAELSIKIPGADPWYHSKYPRTKYYSSHXFCFHHQQHAKTLXRKFSRIPAAQRDHTPKHMQPSYYGDTTTQFETESIY

SEQ ID NO: 942372 - protein, 296 aa, Homo sapiens
PAHHPSSACSDGTLKLKKAASKEEDVKIVIKTEFQEEEVVATPVHPTDLEAHGTLFGPGQATRFFPSPAQEGAWEIKGSSFPIQDPVLGLRKPARPERDMGELSPAVAQEENPPGDWLFGGVRWGWNFRCKQQVGLNPRTGPEGLPYSSPDKGEAILDPSQAPRPFKEPCKYNGRTKGFGHKTGLKKHPAAPPGGRPFTCATCGKSFQLQVSLSAHQPDEARPTGRARAQAGGGTGSGGGWWRHCWGAAPGHGSALSVWGSAAVASRAPAASSAIAMLHTGERPFPCTECEKRFTG

SEQ ID NO: 942373 - protein, 144 aa, Homo sapiens
MAQCPVSDSGGVRSESSPPRRPRRSRPPRPREDNPRARRRALQSRVDRGRGGCGEGILGPWALWTAAGLPGGPAPAEAVPQKPWPGEEGGHRAGCGAGLPRRSPAPPQCPPQAGAAGWRTAGGHRPRPGGLVAPHAQHAVPVGH

SEQ ID NO: 942374 - protein, 300 aa, Homo sapiens
MADHNPESDSTPRTLLRRLLDYSGPAHPAATPDSSGWSPESPSLNGFPQEFEWPKKDDSQRAFPWSQFFLQIGPYEAIGHFEEQTPRTLLKNILLTAPEFSIFIHYWIFKPLPAPQRSNPPNKKAVSAPGAATSLARAPHNPGSRSPGPWQEETEAETVIFQQGLDQGLSLSQEPQGNSDASSLTRSLNLTFATPLQPQSVQRPGLARRPPARRAVDVGAFLRDLRDTSLAPPNIVLEDTQPFSQPMVGSPNVYHSLPCTPHTGAEDAEQAAGRKDRAVGLELQKNSECVDWVAGANLAW

SEQ ID NO: 942375 - protein, 102 aa, Homo sapiens
  misc_feature (23)..(23): Xaa can be any naturally occurring amino acid
  misc_feature (67)..(67): Xaa can be any naturally occurring amino acid
MKRGEERSKAPSLQGTPNCTTQXPYRKHTDLRECTVGISSNAGELLQMRERDGLTGQLLVGLAGKRXQQWQLLPMGEAAAQHTQAGAVLPGTVHVLMLLHAL

SEQ ID NO: 942376 - protein, 284 aa, Homo sapiens
MSFGSEHYLSSSSSYRKVFGDGSRLYARLSGAGGAGRFRSQSLSRSNVASFVACPWASSLGLGLDYSRQLASEGLELNKAAARTNKYNIIRTNEKEQLQGLKERFAVFMEKVHQLEKQNRALEEELAALRKAKLSSGPYGQLFQREALNCCPVEEASSARSQALLERDGLAEEVQRLLARCEEESRGRKAAERALKATARRGRRTLARLDLEKKVESLLDELAFVRQVHDEEVAELLATLQGASQAEAEVDVTVAKPDLTSALREIRAQYESLAAKNLQSVEEW

SEQ ID NO: 942377 - protein, 362 aa, Homo sapiens
  misc_feature (5)..(5): Xaa can be any naturally occurring amino acid
GTHEXWLHSTQKPTHLAGMPHKTERKQITQQARFILAVTAELPTPKSTEENIALNLQTSEGGASGSQGCRDGSGHRHRPPGVCLETQVEKPPKNSSQTGAAGGCPSTVACLQDSPGSLSPGRLWHDTKASRPGSRPCHCVCLIPGPHSPPPGQEPRPSPLHHPLGPQPTHSETHTGLAQLLNVLPSKAWRLKAVSRNFFSYSRRVFLFPVAGAAAGVPANKPKGPCAPEDGHEAWADVVIVAHVLVLLLKAGQPRTWVLLYILLEQVEGEWRKLPQALKATFSSRSWLRRSFTRAKYTFAVQKMSRCTFPGARSAAPSSGITRWKLVPDTIWSKLDLACWFFNRELGVKKNSGLREGSRSSR

SEQ ID NO: 942378 - protein, 165 aa, Homo sapiens
MGGGGEEQFCGGGGSSVRGENYWVPNWWVRRAPTADTGGVGAGVISWGLGTLGGVGLSGGARAGWLGSARRVCGGGSRVPRRVPGGRVGVSWRAWGVAGGVFGWGRGGCRGPGFGRGVWRGCGGPACRSRLLSLLWLSSAVVFGRCGGAPVIVWSDNTNTFISNS

SEQ ID NO: 942379 - protein, 259 aa, Homo sapiens
  misc_feature (7)..(7): Xaa can be any naturally occurring amino acid
  misc_feature (190)..(191): Xaa can be any naturally occurring amino acid
ESDPGPXSREAHSVKIGNYKNTANECLEDKGEQKTEVVCENLESKTNRGEREEDVLDSQRRAGEHPERLWQPTQPHPLGLWSALQGGPWQGGVDHLTTRLRRTEERGLSDAGAKAPSSHQGWEWEGVLRGPALSEKMGVEAEGVTRIDQGVTAELASAHRGRSLAPTGLCGDCGADVGGAAGVGPVFRLXXASSGGLALTGRGLAVASWTRRAELGKGATPIRGSCLGRRGASFLLLFRSLGITGLNLFGSLARAGLLA

SEQ ID NO: 942380 - protein, 286 aa, Homo sapiens
  misc_feature (43)..(43): Xaa can be any naturally occurring amino acid
  misc_feature (189)..(189): Xaa can be any naturally occurring amino acid
RSDGLSLAVWGAVVVVDWLNKLLLLLLLLGGRLAGEALGLLCXCKSRFLCLLLGFLGCFNKYFGRGLALQLSQEKFKTLESFGHVAFEPGKNKSLDSSGETKKARGDPGFPADFSPATFVRFHTVNTSFLHHHQQGVVKVPGEGSNGLILWVHKRVLQDVHRVSNIGRKKWLGPAWHPVGLGQEWPGQXFLVRGNLPVYYVFRKDKFAIGIRVPLQEGGEHLVPGTPEHALAQEILYHRPGRSGLSTRAETEGAELCRYARSGPGRGSAHTRRQVCGLVTTAPRPS

SEQ ID NO: 942381 - protein, 176 aa, Homo sapiens
MGLGVLLVVFVHFGLFLGRGVVVVVVVGDKVVDVGVGLGEVDVVDGLARVPVQEGVGREHGGELLGDGLEQLLDGRAVPDEGGGDFEGGGGDVREGEVEVVGDGLEEVGGVVGLDGQHLLSTSFMDMRPRNTVATVSSGRGAGLQAAIMFLASNICWVSSGTVRARYCWLPRAVRG

SEQ ID NO: 942382 - protein, 299 aa, Homo sapiens
  misc_feature (1)..(1): Xaa can be any naturally occurring amino acid
  misc_feature (21)..(21): Xaa can be any naturally occurring amino acid
  misc_feature (34)..(34): Xaa can be any naturally occurring amino acid
XPLSFFFVCFYFSWGGFLPAXCFPSWGPPGGSGXCLPPRGVLGGAGVPPFPVPECFPSPGGGGGGLGGAPVRAVGGAGLLGGPGGRGRLGGAGPWAVGGGVPAPPPGGGGGPLGVVWWVPAPRVCGAPAAGPGVGWAAGGGGAAGVRCWGWGGSGLSRWPPLPPRARLPGSPPGWGRDGKEKTADGGGTEFCSPSPPGWLGGGWGGGEVPPWSCGGPTMSAPRSGGETDSLSGTLSGHPYFFSPKPQPLCPNGVAKQRPKAPGMWGVCPSWGRAACAQEGVQLGFGEYSGGRGGGEGLR

SEQ ID NO: 942383 - protein, 112 aa, Homo sapiens
  misc_feature (2)..(2): Xaa can be any naturally occurring amino acid
MXCPMAGPSERIVTLKVGTLYMDDTITLDPQTKSILLSPLAARRNGRGKLEAGSLFDLHVKSPSLFNGIQDKLPFPKPTNPCSVPLLPALPNRTFSFCSHPPFAQILQGDVP

SEQ ID NO: 942384 - protein, 282 aa, Homo sapiens
RSGGDGYWDGGGAAGAEGPAPAGTLSPALLFSTGTYERLVLLQGSIGLLGEGNNLLVLVLKKKFKRLRTPSEIFLAKKSLIYLLVCGGGAIFIFVSSLKNGWVWETSREACGKGSKEASSNDCEEKIKKKKVKKISKEEKKKEKKRIKKKKKFLVCRMPEKERSIMLVKSKGQLETPTISIVSYLFAKSNTVYNPVIYVFMIRKFRRSLLQLLCLRLLRCQKAAKDLPAAGSEMQIRPIVMSQKDGDRPKKKLTFNSSSIIFIITSDESLSVDDSDKAMGPS

SEQ ID NO: 942385 - protein, 241 aa, Homo sapiens
  misc_feature (74)..(74): Xaa can be any naturally occurring amino acid
  misc_feature (77)..(77): Xaa can be any naturally occurring amino acid
  misc_feature (97)..(97): Xaa can be any naturally occurring amino acid
  misc_feature (134)..(134): Xaa can be any naturally occurring amino acid
  misc_feature (138)..(138): Xaa can be any naturally occurring amino acid
MVFLKAENAEQSQTPLPSQGVLEVSGEELCTTGFLGARGPLGEEQKTTSQGCYRPASARMLSDQGPTHGLASVXWGXPVSQGGPLGGGGGPRGGAPXSSSLRRRSGVFFFFLGQLWAWVFWGQVGTCSFLAFGXSTGXNLKFMLPCFMNSICIILMNVLSMEAMLILVQLRLSAFHVLFVFGADCYDYHQGLIPKVALHPFNDINASDSILKYVNCSLAAIYQQKVHEFHHLQSCVHRISD

SEQ ID NO: 942386 - protein, 162 aa, Homo sapiens
  misc_feature (88)..(88): Xaa can be any naturally occurring amino acid
MVTLMSRYQAASSSQLSPQPQALGLGAEAQCGPEVPPSVIPVSRVIGSPGWAAETIASSGRAAGNTAGGGGAGLRSRLGDTGSDLMLXWGWVVIFRAAPTWGRGLLGLRFLKFFRDQVGFLLRWLLRLLRLLLLLLLLLRWLLLLRLLLLRLLGLLLLLLEK

SEQ ID NO: 942387 - protein, 289 aa, Homo sapiens
  misc_feature (171)..(171): Xaa can be any naturally occurring amino acid
KKKQADPPNPQPPEKKGKNKTQQERRKARGREGAKAPKKQRTQRDQQDARQNGKEDRPGRTAGRRRKTENPKAGKSERGGHKENPEKGERGQKAEPKGGGAKAAPKQRGKKPETKGRRRPPPAASNGETRKKRKPPGAGQKGERREGGPAPQPGPQTTTRRAKGTRRRRSXETQEGTPRQGGSPPPDRNQLCKKMQESEEKKERESRKTQETQNERTKEKKKTPITQPAIIKERAKRQSKPAASSSSTAQQNRHTNKPKANTQERASGPLTKETPPRPERAPKGETKAI

SEQ ID NO: 942388 - protein, 86 aa, Homo sapiens
  misc_feature (49)..(50): Xaa can be any naturally occurring amino acid
  misc_feature (68)..(68): Xaa can be any naturally occurring amino acid
  misc_feature (71)..(71): Xaa can be any naturally occurring amino acid
  misc_feature (82)..(82): Xaa can be any naturally occurring amino acid
EPSLIPEPEGDWDRENGDGGRPRRRRTRARNPGGPARSRPRPAGCGTLXXPKKVLIWPSLPAAPPPSXQHXRPLKHRNNSFXKNKK

SEQ ID NO: 942389 - protein, 189 aa, Homo sapiens
  misc_feature (22)..(22): Xaa can be any naturally occurring amino acid
  misc_feature (49)..(49): Xaa can be any naturally occurring amino acid
  misc_feature (158)..(158): Xaa can be any naturally occurring amino acid
MSSCMCEYSTVKRKVQPPGQQXLHKGSSKQVQQTAFYLKFEGAGAKVHXVAVDQHNCKHAVPEQREVVPLLGSFGPEVKYLVEELDEHRVEEGEEVDELIEPSQKLNPAEVSIQDGRIKNSLKYFEKVNEELNWTTPRFSAIRLRLNSKASCLSSSAXSANSWLATVEGMMKKAFLPSMVFPFPSVSRP

SEQ ID NO: 942390 - protein, 130 aa, Homo sapiens
  misc_feature (57)..(57): Xaa can be any naturally occurring amino acid
  misc_feature (97)..(97): Xaa can be any naturally occurring amino acid
LVRLGPGAAISTLGLGSKGGELPAPLGAKENLPLKHVRTPGARRPQFAPPPPCRGAXPAQGPHARSCTGAPGKHKEAGPRSSRSKAAHRSGGSSNGXHREKKKEDQRNEEKGQVEANKKIEKQLQKDKQV

SEQ ID NO: 942391 - protein, 227 aa, Homo sapiens
MNFDNVSIRGNTDFVFPFRNKNHPPINPNHGIAFTTIIAKTEQTKLPPQGNNRRAGHKGATGDAGANKGGTATPPHTPRPPRQEGPDTGPGARGGPSTGNRSDSNTGKKRRGQGRRGTPAHAPGAAQGPQRARTPQAAERTTTKGKGQAILTVGFPRGELANSHCLTTLVCCLTREGQGGEENRGAVGSSSSRKNGSVPRRPWPAGPKGRNTEGMPAPDVRTRTAED

SEQ ID NO: 942392 - protein, 139 aa, Homo sapiens
MDARKLSLDAVRSRRPPLLGWLAASRKRPCMYRLKPRGLGTGLGALAFLHQKAKPPMFPIRRYPGTVLVFPLSRTSNTAVCVAARGNNFTHMRFFLDTEALESMGSQKGEKPAAGGSCSPRSGYRPPRSPAGSLGCPEN

SEQ ID NO: 942393 - protein, 316 aa, Homo sapiens
  misc_feature (173)..(173): Xaa can be any naturally occurring amino acid
MAPTAAQRAYEPRRARPPPPKPGARGSQKEARREEGAGPPSPALPSPARRQTRRNRDAKKKQSGGIAQRARAPPAPGAETRRGDTSQAPPPEPAEPGPEPERVRDQQPPAGQHPGPCKPGRGRGQRDKHPARKHPSRRGPNRRGTEHTQERPTNPEESRQEDSTAQDSEGRRXSTGDAPQQTMCSRDARTKQLRQLLEKVQNMSQSIEVLDRRTQRDLQYVEKMENQMKGLESKFKQVEESHKQHLARQFKAIKAKMDELRPLIPVLEEYKADAKLVLQFKEEVQNLTSVLNELQEEIGAYDYDELQSRVSNLEER

SEQ ID NO: 942394 - protein, 314 aa, Homo sapiens
FQFFDFDLLAQGYYSYILFGSGERFIFLDAGPLMMGPSFQCRPFPPAWYRSSGATVLTLKNSPVSLVPAVQARAGLPPCLFLARPHHSLRFFFFSGSWYIGLPLFGQLVMGPRCPPSVASPFVAKAPGLISEQGPLSSSWLLNSFSPRLGVGPYTPPPAPLPLHARAVGLLLTFASVLLYNLAYFFPLRLLLPPPFKQAPAGLLWDLIFRENAYCQVLQLPDHFVETLSVLKRGALAAGHSKQSVSNCLVVKLENGAATVPVVTCLLLTSLRFSPADGACERLLRALLGQRVFTLTTLRGLITVRRHHLILCVQ

SEQ ID NO: 942395 - protein, 284 aa, Homo sapiens
  misc_feature (202)..(202): Xaa can be any naturally occurring amino acid
MLVATYADLQQQSASLRSNPGLGDSESNLFSLPFLFSALKMKPYTSNTMCSSNVIQQNRSSIPRHSLITSLANLFTLVVIECLTVDGNSFLKYGKTCGLLCSLRALPSFMYVNERNARALLSSERMADMICWRRLLDINLGCRANKCTAGHKQVLKRVCERGMYALLLLTLDLMTFQLGLFIYRDVHVTQHSVPPPPPNCTXLYCPRNVSVYQETLLEGAESGFNSKNGKRGSSKSGKLKGDDLQAIKKELDPDKLEVDSLLVNLEKIEKVKSIQAVEMKNDKS

SEQ ID NO: 942396 - protein, 248 aa, Homo sapiens
MWGRRSPFQCEGFLCSVVFLTPKGGGVPGETEAAAEADPAPVPVYAVTPPKEAGARGEWPGPLKAPLPAPTGPGHPCLWSVPCSSGGPPGRGVEGWGVPEGGLRYGNKGPGVLGGGAGLGDGKVRKPVAQRDTKPPGGQCGVLKGERVRGAAERGPGGGERGGAWGGRRQSVEGPREGGEKDASAGAPPSRSGGAYAYQRGHTEDPRVSQQGVREVAGEGGALFSEKQKKRGRGAARVGQGAGCRRGG

SEQ ID NO: 942397 - protein, 227 aa, Homo sapiens
MEQDRIGGEGAGKGGARSSSRRRGGADGPEKQRGSTRDTNTQDQGGTQEPSQEGEGGEHRGEEAHARQATEERTQPGGRHARRGTQRAQARTPGRGAGDAEAAGRRRTARAPAEEAWQGVEGGWSRRPADNFSEMLKILPLPPLPLSVEGVAIQMEGQFALTPTSYSSRPSSKSERKAARAMPTDSMAASGEAGGRGGGQPGQGQAGDQQHEATEQHHEGGGPSTTA

SEQ ID NO: 942398 - protein, 247 aa, Homo sapiens
  misc_feature (2)..(2): Xaa can be any naturally occurring amino acid
  misc_feature (31)..(31): Xaa can be any naturally occurring amino acid
  misc_feature (111)..(111): Xaa can be any naturally occurring amino acid
  misc_feature (113)..(113): Xaa can be any naturally occurring amino acid
  misc_feature (115)..(115): Xaa can be any naturally occurring amino acid
QXSIWLRNRCRKRSGCQRTCWTLKYLLTAPXSSSGGPLATRAAAMASGSPPPGQGQGTKAKRQTLPLPAPLGCSSLGPALVGLGSRSPKASCAPLARLNAALPPWPGLAPXRXAXPPPAVASTGWSPQHVGVDRIPLLLAAAAGTSGHVPGPGDLTRLRRTEVPGFHEEVSPSNLPMNSCHWCSSSPWSFSVHFRSLGGIIFFLLFSRFPGGVPSPKFGQGSPQPLFFIPMAEGQRLQQLEVDIGVG

SEQ ID NO: 942399 - protein, 277 aa, Homo sapiens
  misc_feature (135)..(135): Xaa can be any naturally occurring amino acid
  misc_feature (180)..(180): Xaa can be any naturally occurring amino acid
FAATVCAPGPPPPPPAARGSLRWARAARPEPGERARGGCLGPSRAAPGEARPRAQGPWEGAGAAAVPRRRAHEWRTATGSPRPRVPESGWRHLKMWRGPGATQRSPVSSKASKDPPPVAAAMVMFQGTYTFLTCXAGFWLNQGLNVLLCCFCTTCAAASNGARRSDYTTNLRARKLEHLXLEGSMAGSTPGLAPPQPPPHRSRLAAPAHAHPHPHVHVTPLLHHGAAHRTRTPPTPAPTRAPAPAAYAPFGAATALEPPAPRGIGHVQTTVLRKGGA

SEQ ID NO: 942400 - protein, 228 aa, Homo sapiens
QGQSQTRHGPPSPGAQPRPTATRAEDADRRKEREERQRRADQGAEEARESTRRKRQLGEERKEAGNRTVGRWEEQGEQRERGEEGRNQNNQDKKEAEKNGKEEGKGGGLGKRPGNKRKTSEADKKAGGKKQDGGGASQPARGGDEREQRANSGGVNLQGTKEARENEREENLEQVSGNIGNLRHMALDMGNEIDTQNRQIDRIMEKADSNKTRIDEANQRATKMLGSG

SEQ ID NO: 942401 - protein, 111 aa, Homo sapiens
  misc_feature (36)..(36): Xaa can be any naturally occurring amino acid
  misc_feature (41)..(41): Xaa can be any naturally occurring amino acid
  misc_feature (45)..(45): Xaa can be any naturally occurring amino acid
  misc_feature (66)..(66): Xaa can be any naturally occurring amino acid
  misc_feature (75)..(75): Xaa can be any naturally occurring amino acid
  misc_feature (77)..(77): Xaa can be any naturally occurring amino acid
  misc_feature (84)..(84): Xaa can be any naturally occurring amino acid
  misc_feature (92)..(92): Xaa can be any naturally occurring amino acid
  misc_feature (99)..(100): Xaa can be any naturally occurring amino acid
MAARPAQRDSTSTGDVGATQTSDAGARGRAEVAGLXTSRRXSQLXARERRSQCTTYSLHKRISRRXQNTPLTTVXHXSLEQLEXALETSQLXAEVSEVXXQISTFSRFSDN

SEQ ID NO: 942402 - protein, 238 aa, Homo sapiens
  misc_feature (114)..(114): Xaa can be any naturally occurring amino acid
HERPPFLKSKPFKISYGNSLKELEGRVKRSQVFTRTHPPLHIGWHCHTAASDLLEYRPQHHVCYGEYIPSQPRSLPKNRVHGAENSGFFFTASLFELKNRNIYPAIYKVCFDSXMLLAKQKEQGTCNVPFAFLGAQRLAAEYHLPFRHILPNSSKFQPIVLEGLFFILFSKALNKVLRHALERGVRVHSGQDPEVLKEQPVQHKQGEGRGGRVCVDHDVFEPPVIFPKHLIEVQRIGG

SEQ ID NO: 942403 - protein, 302 aa, Homo sapiens
  misc_feature (15)..(15): Xaa can be any naturally occurring amino acid
  misc_feature (209)..(209): Xaa can be any naturally occurring amino acid
  misc_feature (214)..(214): Xaa can be any naturally occurring amino acid
  misc_feature (222)..(222): Xaa can be any naturally occurring amino acid
  misc_feature (229)..(229): Xaa can be any naturally occurring amino acid
  misc_feature (235)..(236): Xaa can be any naturally occurring amino acid
  misc_feature (244)..(244): Xaa can be any naturally occurring amino acid
  misc_feature (247)..(247): Xaa can be any naturally occurring amino acid
  misc_feature (255)..(255): Xaa can be any naturally occurring amino acid
  misc_feature (264)..(264): Xaa can be any naturally occurring amino acid
  misc_feature (268)..(268): Xaa can be any naturally occurring amino acid
  misc_feature (272)..(273): Xaa can be any naturally occurring amino acid
TADTFLSFPMAAASXSLSSSTFAGKAVKNVPSLALFGEARVTMRKTAAKVKQVSFGSPWYGADRVLYLGPLSGEPPSYLTGEFPGDYGWDTAGLSADPETFAKNRELEVIHCRWAMLGALGCVFPEELAHNGVNFGEAVWFKAGSQIFSEGGLDYLGNPSLVHAQSILAIWACQVVLMGAVEGERVAGGPLSENVDPLYPGGSIDPLGXADDPXAFAELNVXEIKNCAXNVLNVXXFVKLRHGXGPXENTLTHRXRRQQQCMSXCNNXVAAXXSLRCLARGVSVLSVQRKCKASKKIKKGYG

SEQ ID NO: 942404 - protein, 84 aa, Homo sapiens
QAMLYLKGAQGRRFISDQSRRKDLSDRPLPERRSPNPQLLTIPEAATILLASLQKSPEDEEKNFDQTRFWKTVCLTGENILDYV

SEQ ID NO: 942405 - protein, 275 aa, Homo sapiens
  misc_feature (92)..(92): Xaa can be any naturally occurring amino acid
MYLWRCRCSSCNLVCVACVSIAVYGIVVFSCLVACYIGRASMPILSDVVLIVSSEVQTALIECRLPAGANHFQREREEETPAYQGPGNPEEXSPKREAPRKLKTKDWGTKENREGRHNQQNHKEETENKGEDPQHGYYQTAFDRDEETAKASKQHRPKRHHSQTHGKGSKCDLNGRPREAEVRFLCYEGAGISGDYIDRVESPFSCSYVLTIRTPRLSPHPLLRPPPSAAPQAILCYPSPEPEEYMAYVQRQAVDSKQYGDKTIEELQDLGPQVW

SEQ ID NO: 942406 - protein, 208 aa, Homo sapiens
MICLKAAPNSAPAPRGPPRTMNKKDAAPMAPPPRGEEEEEEEEDEAVPEGPSPIQERRQNPVVHPSAPAPLPKEYAFTFFDTNEPACQEILFEPQNNIPELFAIVRQWVPQVQKKKEVIGNEILRRGCHVNDRDGLTEMKLLHYACKDGAHGVGDPAAAVRLSQQLLALGADVTLRAAGTNINALHYAAYFDVPDLVRVLLKGARPRV

SEQ ID NO: 942407 - protein, 193 aa, Homo sapiens
MDYLLMIFPLLFSGLPKELQKQQYEAQSSARKVRTEGEKPTPSPPWRLRRSKRCSCSSLMDKKYDKFCNLDIIRSQHITSTMYRKDLEALGPRELWRIYFPQREQTVRIDANVLAKKTRSAGIFAKQEKNSGLKTFMEKDWNNHKKGKDCSKLGKKCIYQQLVRGRKIRRSSEEHLRQTRSEPLRNSVKSSFH

SEQ ID NO: 942408 - protein, 168 aa, Homo sapiens
  misc_feature (70)..(70): Xaa can be any naturally occurring amino acid
  misc_feature (103)..(103): Xaa can be any naturally occurring amino acid
VSGTSTSVALGREEPETSIQRPNSVFLTICVSVTAPQIHSIGNPAFCPAEPVPGIKAEPDESYARDFHVXIAGPQDSPFEGGTLKPEPFLPEEDPMAAPKVRXMTKINHPNVDKLGRICLDILKEKWSPALQIRTVPPSTQALSSAPNPDEPLANDVADSGRPTKPKP

SEQ ID NO: 942409 - protein, 226 aa, Homo sapiens
MSLLDSGLALLLDEVDEPIGRSVVRGHLSTAIKLRLYFLSQLLSQLHSPLVKAVDVPDDTLNEILGLIHGDQGSKHEWCELGEHNRVGWAISFKDLMWQQPLKVLWTLARSLELLSGLLRRFSPHQGLCLGQEVGQEDLVMQTLPYGVLGLDRDEEVTGYHLGALVDELVKSMLAIGPWLPPHNGGCLVVHTGFQIGDVFPIGLHVALLEVRSKAVQVLVIGPMAC

SEQ ID NO: 942410 - protein, 107 aa, Homo sapiens
MGVAEELDQQWRASPDFKNLGPSSRVVAERRMRLFSQLGELACNVSGVAIQDRGIAGAYLAWMVQDNHLSSEASCFHWWVISAVTSNVATTNILDRHILDIEAHIVT

SEQ ID NO: 942411 - protein, 149 aa, Homo sapiens
MALHAGSAACVPQKRGSATPVRLHAPPLIQCHGDLIGTREPLAGGLAGLLSVSTPKHRCPLPCAFCWPLRAFRDCLRLGHSLDLRGATLFPRGSARSLFPCPSSGISGQPPFRRLSRPSPAPELQSFHDFGPLRTWCALRCQRPGPTVL

SEQ ID NO: 942412 - protein, 243 aa, Homo sapiens
  misc_feature (80)..(80): Xaa can be any naturally occurring amino acid
MTRRVYAHHRPMVGRTIVISYERTPSNVNPPGLKTPLNGNALISLNINSVMFVQNRRRNWGMGMTNGDRHNGRALRLSSXLDRVFPETDKKPPEMVVGVPLPENLSPVMLHFPRFRTIPTLNASTSDVPPAGEAMIHNGTQTLKHAPKTVRVYPPPYRHMKRGGPESHTAEMGCTADPPAPHTVFLQPHARTTTGPMRMHVMKQQNNGTEMPKAVNKKIGPVIKSDRSPHYTRGVSPDYAARY

SEQ ID NO: 942413 - protein, 144 aa, Homo sapiens
SSPSYEWLLRGAIGINIVKVVATIIIVVTTIILGISGAIPVGEIAAGLTGHGIMDAKDVADIGTVAVLEGGKEDELPYWIRIAGAGMGGDAGIDALTRPDQIIKGWVKEKDLIKQAERDTREIIARVVAGGRLKATVDTGTETE

SEQ ID NO: 942414 - protein, 277 aa, Homo sapiens
  misc_feature (102)..(102): Xaa can be any naturally occurring amino acid
PRSARGPTFHLARVRSPLPAWPGLPGGRRPLAAPAFSRGGGQVGGHYCCRSRRQIPQPRSGWDRLGLGGWGGGSGDLSSEQLVFAARSLLRTLSLPAAARSXRARWHLLGAARSPSSYIQAAPAPSTARSPKPDSPMYEDSYVPGFEDSEEEFNRIVNKKLISGLKGSLEEDRENTRSEVENKAQQKLEKAKHKPVAFAVRTNVSYCGVLDEECPVQGSGVNFEAKDFLHIKEKYSNDWWIGRLVKEGGDIAFIPSPQALESIRLKQEQKAREIWGT

SEQ ID NO: 942415 - protein, 167 aa, Homo sapiens
  misc_feature (105)..(105): Xaa can be any naturally occurring amino acid
  misc_feature (107)..(107): Xaa can be any naturally occurring amino acid
  misc_feature (109)..(109): Xaa can be any naturally occurring amino acid
  misc_feature (113)..(114): Xaa can be any naturally occurring amino acid
  misc_feature (123)..(124): Xaa can be any naturally occurring amino acid
  misc_feature (141)..(142): Xaa can be any naturally occurring amino acid
  misc_feature (157)..(157): Xaa can be any naturally occurring amino acid
FWGGGKGQLSKTAKGTGKPEVVGALPSGLLFGLLTGILLLFCGGILVLLLLRDEVVHVALSLGELHLVHALACVPVGEGLPAGHGSELLRDALEELLGGCAFAIXGXCXLEAXXWGVTDGCLXXVGGPFHKVAAVLVLPVXXLLIALLHGHPPPADXSHGEVSAVAG

SEQ ID NO: 942416 - protein, 185 aa, Homo sapiens
  misc_feature (113)..(113): Xaa can be any naturally occurring amino acid
FFQAPWKHHWAPERVPPVAWLSLRSQRRRFQQKTPKKKEVEAGALNPPLQKPGAERHKNVLQWQNPGAVTVQNKKAQGGGGSNAAPCRTASAPQHKRLPTVLQATPESRGEDXFSYEELNGLLSPVVHVAVQPVSFHPSSQLQALVFLLHKSSWAILRYSRKSSIKVRLLSTNAFEALDLIKRSF

SEQ ID NO: 942417 - protein, 276 aa, Homo sapiens
  misc_feature (58)..(58): Xaa can be any naturally occurring amino acid
ARLRAAADLGAETGPPPPTPPSTSAARTGGSETDGQNDGRRLQRPRDGERHAAGGDLXIRSSGRAMDGNDNVTLLFAPVLRDNYTLAPNAIFLGPGTTSPSPLPPAPAPALGSASGRVRALASAPAPLDPGAHDQRPRGRRGERRPFPVPSALGAPSLPFWDTPLNHGLNVFVGAAVSITMLGLGCTVDVNYFGAHVRWPVGALLAAFCQFGLLPLLAFLLGLAFKLDEVAAVVVPPVWLLSRRQFLQSYVPPGYGDMNLSIIMTNFSTLLALVLM

SEQ ID NO: 942418 - protein, 100 aa, Homo sapiens
AVRKERTMKFMSADEVQASAYVVAIAAEQQPREPTEDHSHVFVATVGQLVICAQVTAHGGQVEAQELGQHLHHHPHQICSCSQAQHLLGEPFLSSQFHPS

SEQ ID NO: 942419 - protein, 69 aa, Homo sapiens
DKSTLPYKTQIITLTDEKQKQTAQANRNDNHTLSLHATAWKKIRIVGYVRLCRLSMVTPRFSVPFSGLH

SEQ ID NO: 942420 - protein, 80 aa, Homo sapiens
RLIPGSHIGEKLPRDLSQDTFSQSSHAQYVVPTPVNIIPEWHKLHNVSLSIFSPRGDSYITTIQFDHCIKFCRANTYHNY

SEQ ID NO: 942421 - protein, 87 aa, Homo sapiens
MPGTQGLPPGSHSVEILSRHRGTQTAPNLEGDASPEPVIDGRLVAIACRLAPGGNPVHVPVMTNVHGNLVHLCHPHKPVASQEPDYK

SEQ ID NO: 942422 - protein, 192 aa, Homo sapiens
MSGGRMAQVGAWRTGALGLAQLQLPGLGPGLEAAASPLSTPTSAQAAASPGSCPPTKYQCRTSGLGVPLTWRCDKDKDCSEGSYEEECRNEPWTQKRQCPPPPGLPCPCTGVINCTGGTEKKLRNCSSLACLAAEHRCTLTEDCIPPTWRCDGHPDCADSSDELGCGTNEILPEKDATTMGPPVTLESVTSL

SEQ ID NO: 942423 - protein, 115 aa, Homo sapiens
MVLFVLQDGGVKGPLLPFLRGQGDLAAKPPGEKGTRWVLGPVPSPQRPQGRAGVPPVGGFLELQPGDYLTTLLKEQKYDKIKRPSIGKERAIGGEPRPPPGEARKSQGPPLGVGI

SEQ ID NO: 942424 - protein, 103 aa, Homo sapiens
  misc_feature (27)..(27): Xaa can be any naturally occurring amino acid
  misc_feature (33)..(33): Xaa can be any naturally occurring amino acid
  misc_feature (36)..(36): Xaa can be any naturally occurring amino acid
KRKKDKRSYGELLDKEQRGQGEHWKWXHRGEGXKWXWDHRGWGSYWYVGAQRLGEQLDVGTQRLGELLDVGSERLGQLLDVGSHRLGGANSCTSSLRELVSSD

SEQ ID NO: 942425 - protein, 98 aa, Homo sapiens
  misc_feature (63)..(63): Xaa can be any naturally occurring amino acid
MADFKPGRLPRITLRVFGRSSAQRLRCPDEGERGERGLGERAQAGPGGCGKPLTGRGERVGPXLSISSRGGQLRVPNSESSDSKKRKQGSSDQENRVR

SEQ ID NO: 942426 - protein, 226 aa, Homo sapiens
  misc_feature (132)..(132): Xaa can be any naturally occurring amino acid
  misc_feature (204)..(204): Xaa can be any naturally occurring amino acid
SRLRGGPGCGIYILSGHWWCDPDDPGFVYDSGCPVALLYNPNNPCLVAFTILGDFISAQNRAACPRGKQIRRPPEVSGQVPCKGRTCIRSLAHRSNLGQPREDVNHKRHPVPLPPGQVLRMAQNPEARKVSXGVGLERVPQSSPVEPRHVHHRLPAGQPYISLGDHQSNLIPFLRDIQPLVHTPLPPFPQGSCQPQPVPRHCIXWHDKFIGLADSGSHFSQDNAGV

SEQ ID NO: 942427 - protein, 198 aa, Homo sapiens
  misc_feature (53)..(53): Xaa can be any naturally occurring amino acid
  misc_feature (147)..(147): Xaa can be any naturally occurring amino acid
  misc_feature (163)..(163): Xaa can be any naturally occurring amino acid
EQDNKIACTLFKTNQALIKNIYHCSSNSTSNLNSKIWAFILHIMCQAWQRRTXTSTRASKEKWPLTTKTGYPGGEGQLAAHPALCRAREGKGAACVPPGLPGWALVSHSFSVSGCGAMGREVHAVVQIRGWVLPALFGFVIPPQGIXCPARSHLQGLASYSSXYLLLWLMGNQDSESYFSFLDKKQQQNTFLHTVWQL

SEQ ID NO: 942428 - protein, 290 aa, Homo sapiens
EAGAAAMLPGGRRGQLGWHSWAAGPGSLLAWMILESPGPAPCPDDCCPHCSSGLPCTRDGALDSFNNLLGAENIIDLYMENQQHLQHFELRDIKGLEELRNLTMVKSGLPFVAPDAFDFTARLIGMNVFFNAVEFLFWKNLQGLFLKELVLLGNLCTVLVPCAGYSVGGGGTGRSAWTEAAVSWAKPPGHMLNASCGVPTLKVQVPNASVDVGDDVLLRCQVEGRGLEQAGWILTELEQSATVMKSGGSAILGLTLANVTSDLNRKNVTCWAENDVGRAEVSVQVISPSR

SEQ ID NO: 942429 - protein, 168 aa, Homo sapiens
MMLWGGIQRMGSMVRLLHTVIVGAVDMPAHAKITNFDHQFLAHQIVACGQVTVHKMQIRYVHHPRSDLASHGQQLPQTQGAWSHILPTSQQLGIRSMGSEEAVEVPCRIYSKTMSRGRPRCRRRRSARGNGAADGEQLSLTLEVCRALSDASFSALTAPASCPAQGGG

SEQ ID NO: 942430 - protein, 346 aa, Homo sapiens
  misc_feature (4)..(4): Xaa can be any naturally occurring amino acid
  misc_feature (19)..(19): Xaa can be any naturally occurring amino acid
EPRXPGHGAAAAAPAVPPXPLPSAGTWPEAPAAARDPTPTLPPDPRPRTAVSLPGPAARAGEKRPGGQGGGRAREAWPGTGEKGAAHRVFPPFILAQKRLGRTGPLALCLLLLLHGAMPLGGGSRKKLACWLAGRAARTGRGEGGRQLRKKRRGGGGGGGGGGREKNYKVFPGLLEDLIELGPESSGIPATTGAVRYMEEECRESSGGPHSFQRAAETIEIRAQPEGRPTAVTWPPSVRFIGWCWLYGVEFWTLPAIRGTEFQAAGIKRDIGGKPREGQRPSLGAELAEEGARCETGRRSARWAAPEQIADPVGSGSPGRARGSSAKQLGIRVGVSAGLLPGTSER

SEQ ID NO: 942431 - protein, 103 aa, Homo sapiens
MAEDLLRVFVAVGGGGEDKQRVQQAYGDAVRALVAGAPDSRKATVGGHEQDRGKVTFQGPVEEGEALDVQHVDLVDEQHFRDELRLALLAPLSHLGINLLTDF

SEQ ID NO: 942432 - protein, 41 aa, Homo sapiens
MYREESSVYLGQGGLAEKKAVSTFMSPVRPGLEWPIVDISA

SEQ ID NO: 942433 - protein, 225 aa, Homo sapiens
  misc_feature (76)..(76): Xaa can be any naturally occurring amino acid
  misc_feature (141)..(141): Xaa can be any naturally occurring amino acid
DRVSLCHPGWSHRARLQISKKKKKGGPVTGGKCSQGETEIKGQKKKKQEGGRKKHEWEEFMEAGENHGGDEGKAHXGRSPSGGIFVVWAHSAGHCPAIGVLHNENAFADRQPFHPIHLPPQGIINEDLEARRRVAERADAXDLAVGKRMKMIFEASELRDRLTQKNLARPPAWRKLARVVLGHVLAGGAADGVVMLELSHRLIEGCTVSGAIGSHVGRQPTSTYS

SEQ ID NO: 942434 - protein, 152 aa, Homo sapiens
VYFVDKGPLQEAVHKNNPTRYQRLENKSEDYNTTLFLLEDAFDMPTLIPKNALFHEGCPRPPHPHTTVDVVAYTHICRESPKLLLQRRYSTKSRFAFAVREAAAGLVGDWKAQFSLHNKRLFCAHVCQRHHDPAFLYCIEMRLISSADHNMS

SEQ ID NO: 942435 - protein, 84 aa, Homo sapiens
  misc_feature (18)..(18): Xaa can be any naturally occurring amino acid
MVLVKLELGRYLVQHNDXIFFFEEASGLANIHGKVHPEVHVLSPGLLDWVLAQHREDATVQVGLTSCLGIPGHSNDGGTWAVSG

SEQ ID NO: 942436 - protein, 73 aa, Homo sapiens
  misc_feature (12)..(12): Xaa can be any naturally occurring amino acid
FLQGPQIELKVXRKLGAGFLQALAPGPPPEERALRSSGEGVVHTGVPLEKEKSRQPTHGHWIGVSGFQATAMC

SEQ ID NO: 942437 - protein, 107 aa, Homo sapiens
HNFIPTIIQPVKIPKTIQITSNILAVKLPNKLDADQYSQVAIVSNDFAEMHKMDKPRYLRNQQAFIFFVPRLENAWKKLDQKTPQSNCYCPTILKILNIWLKNLLAM

SEQ ID NO: 942438 - protein, 158 aa, Homo sapiens
  misc_feature (49)..(50): Xaa can be any naturally occurring amino acid
  misc_feature (93)..(93): Xaa can be any naturally occurring amino acid
  misc_feature (112)..(112): Xaa can be any naturally occurring amino acid
  misc_feature (117)..(117): Xaa can be any naturally occurring amino acid
MLGESCCNAGNARLLLANEELEVTTSFSSTAHKYFSAKKWPSSSSFGGXXLLCWDVWSCEGRVSGGGEEGALEGTVMSLGLQESALELGGWLXGRGGLTPSCVEPSCRAVLXCAWAXEGADALGPYGKLLHSDAFPAPRVVDDTGNGDTFNASVIFSS

SEQ ID NO: 942439 - protein, 52 aa, Homo sapiens
MAKPPQTHSQTCIRNSVTCINYPRTSTGRKGTTTQRIMEPVEPEVEGTEQDN

SEQ ID NO: 942440 - protein, 130 aa, Homo sapiens
  misc_feature (46)..(46): Xaa can be any naturally occurring amino acid
  misc_feature (65)..(65): Xaa can be any naturally occurring amino acid
  misc_feature (83)..(83): Xaa can be any naturally occurring amino acid
  misc_feature (87)..(87): Xaa can be any naturally occurring amino acid
  misc_feature (103)..(104): Xaa can be any naturally occurring amino acid
  misc_feature (128)..(128): Xaa can be any naturally occurring amino acid
MSAKNKRDSTFGVGSWYRWDSDTRWFMLLSASVNSISSMPSPVYQXRKGLRRNMGVNCSEMGLNXSWMAVLFPMKVEDILRAXGGMXHTATFTLLGIDSTKYXXFLLWMASICSSTSFMDMRPRNTVXTS

SEQ ID NO: 942441 - protein, 55 aa, Homo sapiens
MTKAALVSDLSLRQQNANARAAHPHARSGTQLLTKLREGGGLLTPETQKLSKMRR

SEQ ID NO: 942442 - protein, 282 aa, Homo sapiens
MSASPSSSSASPCSSAVVSWYCWYSGTRTFMWISASVNSISSKGSPVYQCRGALRRNMAVNCSEMRFNSSWLAVLLPMKVADIFRPRGGMSHTAVFTLLGIHSTKKLLFFFCTLSISSSTSFMDMRPRKMAATVSSGRGAGLQAAIMFLESNICWVSSGTVSARYCWLPRLVRGATGHEEVREMYCLMFTASLPRSAFSWSGKRTQVVTPLMVADTRRLRSPYVRGGQLQGAEQMSYRASLSMEEVSSVFFHQLVDREGGVVGLHTVSDTVGEGMTLNVFMM

SEQ ID NO: 942443 - protein, 345 aa, Homo sapiens
SLQMTCCRGLMFSHNSRKPKEKIISSKNRKLPTKKILHKLKMNKFTGVKTNRFQLKTSSSPPRSGQTHQPRDATAAAGLAFPTLTDPQDKTPGSCQPLEKSQNTQPWHVIFLHRSEAAGHTDSPSHSFVFHKLVLFLATCAKPHVLEVDLKDMYLVLNKYFGEQLTSIQGQFLQQVLQSSADIRYKLQGQFVFEGLFQSREGSMRGVRWRGANFYSQLTHESNATHLLSPFEKHFLWTLEGPDSSYSCLLIHICWKVDSEARLEPPIHTEYLPSGGAMIFIFMVLGARAVISFCILSAMPGYMVVPPDSTVLAYRSLRMFTSHFMMELKVVSWMPQESIPRKEGW

SEQ ID NO: 942444 - protein, 270 aa, Homo sapiens
  misc_feature (145)..(145): Xaa can be any naturally occurring amino acid
GEGGKGALGGGERRVWGARWLRGFRHCWVGGRRAPASDSSCEQLHLGPWASDSSSSSWYMWGSWWGVASWYCWYWDTRSFMLLSASVNSIWSMRSLVYQCRKALRGNMAVNCSEMRLNSSWMAVLFPMKVEDILRRRGGMSHTAXFTLLGIHFTKKVLLLVWMGSICWCTCLMDMRPRNTVATVREPAVARVAGGHHVLGIEHLLGELGHGQGPVLLAAPGCEGGDGAMKKCRRGKGTCCRQLAQVSVDWPGKRKEVVTRYGGDTGGEVP

SEQ ID NO: 942445 - protein, 291 aa, Homo sapiens
  misc_feature (99)..(99): Xaa can be any naturally occurring amino acid
  misc_feature (106)..(106): Xaa can be any naturally occurring amino acid
  misc_feature (108)..(108): Xaa can be any naturally occurring amino acid
  misc_feature (114)..(114): Xaa can be any naturally occurring amino acid
PPPPVTDAEVTPPPQPPPTARRRRRLPGDAGGRRTAEVPAGSARGSVLGRRTALRPRSDPGPAGTPSTPPPPRSFPPPLLWRARSLPRFFTFFSSLFPXLPSPLFXVXSLFWVXLAIPLNLPSQPSLSGYALSAAPAMKEEGAGAVAAAAVRRGGVGLAEIKLKSVQSSSGSLEGQTSWSQLFKSPNPGSAAAARSLLNHTPPSGRPREGAMDELHSLDPKRQELLEARFTGVASGSTGSTGSCSVGAKASTNNESSNHSFGSLGSLSDKESESLALLPRLECTGTISAHC

SEQ ID NO: 942446 - protein, 135 aa, Homo sapiens
  misc_feature (15)..(15): Xaa can be any naturally occurring amino acid
  misc_feature (32)..(33): Xaa can be any naturally occurring amino acid
  misc_feature (36)..(36): Xaa can be any naturally occurring amino acid
  misc_feature (62)..(62): Xaa can be any naturally occurring amino acid
MFMPGRVGYKVRELXVLVRFTVPFSQKTLFGXXISXWSHYCAQHSHGGLLWGHRKSREKITXVFGALSMGGAKQGTTRGTFPDGNQGSHPVGAQHRWDGKTLDRGQRPRPQPPHQPAPAQASDYLETVGNQCGTD

SEQ ID NO: 942447 - protein, 219 aa, Homo sapiens
  misc_feature (22)..(22): Xaa can be any naturally occurring amino acid
MAFMSLSASVNSISSTALACVXVEVGFSLGEGSGMVRDELEELLGGCAIANEGDCDLEDTRWDVTEGCLDIVGDPFHKVAAVLVLHVKHLLIDLLHGHPTTEDSSHGEVSAVAGVTGSHHVLGIEDLLGEFRHCESSILLASTAGERGKARHKEMETWEGDHVDCQLAEVSIELARETEAGGDTLMVAEKGGSDPRSWVWSASECGKAYHRGPRCQCNR

SEQ ID NO: 942448 - protein, 243 aa, Homo sapiens
MLAPPYTSSSASSPKSSSSSAVASWYCSYSEKESFMLLSASVIFILFIISFVFQWGLEFEEDMGVNCSGMSLMGSWLAVLLPMKVTAILRPRGGMSQTAVLTLLGIHSTKKLLFLFCTLSICSSTSFMDIRPRKTAATVRYRPWRGSQAAIMFLASKTCWVSSGTVRARYCWLPRLERGAKPGIKKWRRKKGTMLTANLRRSALSWPGKRRQVVTHSWWLRQGGSDPRSLVWSASDCGSRYHR

SEQ ID NO: 942449 - protein, 77 aa, Homo sapiens
  misc_feature (25)..(25): Xaa can be any naturally occurring amino acid
  misc_feature (27)..(27): Xaa can be any naturally occurring amino acid
  misc_feature (49)..(49): Xaa can be any naturally occurring amino acid
  misc_feature (59)..(60): Xaa can be any naturally occurring amino acid
  misc_feature (63)..(63): Xaa can be any naturally occurring amino acid
MESKPTKAKLQTPKGVATFFGGVGXAXNELEWGSSQEVSTPPPQDEDAXARDGAQAHTXXTLXDTLPSDKHTCTHTH

SEQ ID NO: 942450 - protein, 90 aa, Homo sapiens
  misc_feature (6)..(6): Xaa can be any naturally occurring amino acid
MDEKLXEEAEGEGAQEWVALTDDDEDIQQEQDGCQSEAHSLHRVVVIVKWVRFLRSLCGGLGRGRHAGPEQGAAGCFGGEGALQQLEQGR

SEQ ID NO: 942451 - protein, 165 aa, Homo sapiens
PWASGSSSSSSFISPSSSAVASWYCWYSGTRSFMLLSASVVSIWSLHSPVFQCRGALLRVVAVVCSAVRLFSSWLAVLFPVGVVVILLLRGGMSHTATFTLLGIHSTSELLFLLWMESICSSTSFMDMRPRNTVATVSTRPWRGSQAAIMFLASNICWVSSGTVR

SEQ ID NO: 942452 - protein, 203 aa, Homo sapiens
PLPGYRPGKPPTPSLSSSAFPNPSRGDIYASAAPSSSSPSPCSSAVASWYCWYSATRSFMWLSASVASISSMPSPVYQCREALRRDMAVDCSGVRLASSWLAVLLPVTAAGIFGPRGGVSHTAVFTLLGIHSTEELLFLFCALSIYSSTFFMDMRPREMGAAAVCGVARVAGGHHVLGVEHLLGELGHVSPRYCWLPRLVRGA

SEQ ID NO: 942453 - protein, 104 aa, Homo sapiens
  misc_feature (22)..(22): Xaa can be any naturally occurring amino acid
MVAVVQLRFKHLQVAHLEGRGXEWDLKVHGNGGSSHFFLSLVGRSSISALICDSFMPAMRLIFHTMAFSLALYLAFPFMQITCTPLVFSGVGISPRSFEPAVRV

SEQ ID NO: 942454 - protein, 256 aa, Homo sapiens
  misc_feature (2)..(2): Xaa can be any naturally occurring amino acid
MXSWYFWYSVTRTFMLLWASVSSISSMRSPVYQWREALGRNKAVNCSEMRLGGSWVAVLLPVWVAGIFGARGGVWRPAVFTLIGGPLLGVAAVLVLRVELLFVHLLPGPAAPVVGCFCFVAAVVWVAGGHHVLGVEHLLGELGHVSTRYCWLPRLVRGAKRGMKKWRRSPGTMFTASLLQVCVQLAREARQVVTRSWWPTQVVEVPEEGVVSFRVRKRCHTGPRYQWSRFICVFHQLVDREGGVVGLHTVSDPWVR

SEQ ID NO: 942455 - protein, 244 aa, Homo sapiens
  misc_feature (2)..(2): Xaa can be any naturally occurring amino acid
  misc_feature (21)..(21): Xaa can be any naturally occurring amino acid
  misc_feature (29)..(29): Xaa can be any naturally occurring amino acid
  misc_feature (32)..(32): Xaa can be any naturally occurring amino acid
  misc_feature (133)..(133): Xaa can be any naturally occurring amino acid
MXTNSSETGLPPRIKRGGAGXWGLGGGGXGGXGGGGGGRASASSRRGHGVVDTHRNWLVHIKDSKATQRGGGGDALNTQGRERAKINNGSIIQKARMEGQRPALDQNGEQAFPSAQQTGMRWERVGKSKKGAXRGAEVAWMVQDNHLSSEASCFHWWVIFAVTSNVATTNILDRHILDIEAHIVPRKSFTQSFMVHFDRFYFRCNVDWSKGDHHTGFENTSLHSANRNSTNTTNFVDILERQAQ

SEQ ID NO: 942456 - protein, 115 aa, Homo sapiens
  misc_feature (7)..(7): Xaa can be any naturally occurring amino acid
  misc_feature (23)..(24): Xaa can be any naturally occurring amino acid
  misc_feature (66)..(67): Xaa can be any naturally occurring amino acid
  misc_feature (103)..(103): Xaa can be any naturally occurring amino acid
DPLLVPXPPKEPPPPPVPRPPVXXPGPLPATPSLPPPPQPQLQLRVSPFGLRTSPYGSSLDLSTGXXSRLDPKAPGPPGAQSPPSATSTSSSSSSTSSSSAQXPTLPRGPQGPCL

SEQ ID NO: 942457 - protein, 68 aa, Homo sapiens
MLCRASHSSLVMGFMAWDSGLLLIRQGWAILFLPQLIGATGPARGPAELHLLCFRLLLAFFFSFFSSS

SEQ ID NO: 942458 - protein, 209 aa, Homo sapiens
  misc_feature (23)..(23): Xaa can be any naturally occurring amino acid
  misc_feature (52)..(53): Xaa can be any naturally occurring amino acid
PSPTLALLGILPLHAARAATPVXERREKSDVLFEMQAEKPGRDVHHLLADPXXGLEGQHASLVDGLGKKQQEVLGLQAVSLRYLLSSGPGCNLASSCPHPAPPCGPAAAAGRCLRTDAVGPSHQASEFPGGLAGLGQGKFDPPDLTFVPEPILADQLQLLVETRFLEGSPRGHISFATNPAPGHWHVGSASPSALMETRKARATIQPKP

SEQ ID NO: 942459 - protein, 123 aa, Homo sapiens
LDARSIYQAFIVLTSTVYISALQSVLRIEALTEVKYCLPFGLCATTATVEKSKLLLIPGWYVHEHHVGALGVGEWGIIAESEISTDYISSSLPALPHDLYCLSSFHLKTGNCRDGQSRLKLKK

SEQ ID NO: 942460 - protein, 92 aa, Homo sapiens
  misc_feature (10)..(10): Xaa can be any naturally occurring amino acid
  misc_feature (17)..(17): Xaa can be any naturally occurring amino acid
  misc_feature (20)..(20): Xaa can be any naturally occurring amino acid
MAWAGGGPLXSSLYKDXCTXQDLDDQATTSSGHDEGVVLPPVPAKAKIGYCIRGVDDIEQGLVTINVDLSIGQPSHDGLEARECCSRRFMVR

SEQ ID NO: 942461 - protein, 285 aa, Homo sapiens
PNKNAVRRQAPTCKPKPVLASYKRNGQDLDNDNDSINPPIKNRPKQTLLSGRQAPAQAQTSDLVPSLFPLGLWAPGFCTWSSPDEDKRPRKPVPGTGNRDSGTRRRLQDATEQDPRPGNDVASAETAGPPSPSGIRAQDRAPRHRRAPPARMPVAPAPSADGGERRARAGRGTRVGGWGPKTHLSNKIPTDPGRDGDLGAPRRPELLHISTPPPEPLQEQGGGLFHRTRSVYNGLELKYLDESGEAVRGEVPSVVFLGQLTSLGFHSARAWGCWTWEKVVVVAWE

SEQ ID NO: 942462 - protein, 148 aa, Homo sapiens
  misc_feature (84)..(84): Xaa can be any naturally occurring amino acid
  misc_feature (128)..(128): Xaa can be any naturally occurring amino acid
  misc_feature (131)..(131): Xaa can be any naturally occurring amino acid
MAAKLLTQKALYSNGAIAEFRPPNEDVDHNLLAVSALLLGILQHLDHLILVLPGEQQAPGPQTHGCLVIISVGQATGHVAAQKXHLFPRDLCPASIIPYQGHHWDLVSDECIKFYEAVAKNSVPKKEXDLXIWAAQLGPKFKCCTNSQ

SEQ ID NO: 942463 - protein, 136 aa, Homo sapiens
  misc_feature (37)..(37): Xaa can be any naturally occurring amino acid
  misc_feature (41)..(41): Xaa can be any naturally occurring amino acid
  misc_feature (90)..(90): Xaa can be any naturally occurring amino acid
  misc_feature (92)..(93): Xaa can be any naturally occurring amino acid
  misc_feature (101)..(101): Xaa can be any naturally occurring amino acid
  misc_feature (106)..(106): Xaa can be any naturally occurring amino acid
  misc_feature (129)..(129): Xaa can be any naturally occurring amino acid
  misc_feature (135)..(135): Xaa can be any naturally occurring amino acid
MGGFLLGLHLQDAFHVVLVGELRSTPAQCDQNRFHTXSLAXGPIEVISAAAQLLVVHVRTEIHLLGVDLHDFRPGLLIGHGELYFGVKGXRXXEGGVQDVXPVCWXNYLNLGVGLEESNWFRSSSIVLXTFRSPXF

SEQ ID NO: 942464 - protein, 147 aa, Homo sapiens
LLVERVQLLCKTGWKFLSKLFLSYRMTQQVHLWVYALEKQQPASSVHGFTAALLIVAKKCSSAAEETNCGPTLQWNILCPPKGTKPLTPLTAWATLENLMLSERGQLLQATYVQFHSHEMPRTGKSLETEIDELLPGAGGGRMASDC

SEQ ID NO: 942465 - protein, 123 aa, Homo sapiens
  misc_feature (31)..(31): Xaa can be any naturally occurring amino acid
GGDKAHCHSCQELMPKYYYFNEEMKNIHKPXLASKAVTATTKGASRGDSSRLMLPEEETLLSRRGDATLDLPGDCVMISAPWSTRVFEYFLKFNFSVFFLFFPPPGSCWAFFCISIFVWAFFL

SEQ ID NO: 942466 - protein, 185 aa, Homo sapiens
MLPLKWGRHGNLREVLFTPVAQGQGKDKGEGKPKAKVCVGTTQLSTGCSFSKKGAREKHSFASFCWEIIALECQPVEGTTFQKFKGCWLEKGEFWIAASSQNPLLSPEPASWCVFSSKLSLPNLSSSEGKRESVPGFSRVGERTGKGTDILARVKLLLALACPLFRNSGPRRLALRLSTLVLGEH

SEQ ID NO: 942467 - protein, 105 aa, Homo sapiens
  misc_feature (45)..(45): Xaa can be any naturally occurring amino acid
KGKSERGRWGDPAPKDFRKHSGAPDLAHIQRVGRGRDLAILWAWXRAGGACYGGKERGRTEEEWSPISSRQFQKKGVYGDLATREGWMQDGIPGSNRSLKLWIYS

SEQ ID NO: 942468 - protein, 93 aa, Homo sapiens
TRTPPPGPPPAIFSRVSYPTTTGPAEAWKRREKHNFVFERGPPPHTKHCRCSRREKRKGGLGGTLAWDPPNLEDSPPPAPPGNWGEGVSGGPL

SEQ ID NO: 942469 - protein, 252 aa, Homo sapiens
  misc_feature (25)..(25): Xaa can be any naturally occurring amino acid
  misc_feature (131)..(131): Xaa can be any naturally occurring amino acid
  misc_feature (177)..(177): Xaa can be any naturally occurring amino acid
  misc_feature (187)..(187): Xaa can be any naturally occurring amino acid
RGHRTQAPCLAGPDLVTGPWEGRAXRGRGQGGGGLAPEAPGGPLGHGTVCVEGGGREHHGPFLPKAKGGGASKAEERASWDRVPIPCWEGVPGYPIKALQMQTVGEEPPSLGPDCLALPLPQLPLWFGGGXEKGLGPPLPQQTPARNLTRRAEARKDPLPLLWAPGVLLARPPPVLXLAVANKEINXSVAAPPLQLGVLLLQGAVESGDDLSSAAELRYLVLRSRGARAARELSPERAGAARLRPARPAHAH

SEQ ID NO: 942470 - protein, 143 aa, Homo sapiens
FYNPSFFYLSFIPFLPPPLFSIFSLFKPFHAPSNPFPFFTSPSIISPHSQSIPPLLTFPLSPIYSYFYYFHLIYIFSHFLSHLSNHYYLISNSFHFIHFLSYLFNSVMNVAFFPAYYLFLLTFLHSFSYIHFQNFNTTFFFKY

SEQ ID NO: 942471 - protein, 94 aa, Homo sapiens
  misc_feature (31)..(31): Xaa can be any naturally occurring amino acid
  misc_feature (73)..(73): Xaa can be any naturally occurring amino acid
  misc_feature (76)..(76): Xaa can be any naturally occurring amino acid
  misc_feature (93)..(93): Xaa can be any naturally occurring amino acid
YNGVKASSSSSEPRLWELGSPGGALAASAGXNPDKLFKVHSSIPIEVQISDNFLYVSVSHLMTQELPHSLSQXNGXYFPITIGVKLSESISKXI

SEQ ID NO: 942472 - protein, 202 aa, Homo sapiens
MTKLWKEDGEKLYCGVWQNEKTTKIIMSKKFESLQGAFHFFSMLNPHINPAEGTQAQTEEVTYPESHRQKPRTEAKTFNNIKLSFYEEVGADPPSRSLQGSPRSGQHCGDAGEHNMFKDFGDGASALQGQGLVAGKRAGTKGLQRAAGTQARQAAGEGSLKLLPEFATEEVVDDGVGSAVGRYTSQWEKVKQAYTASRSLAW

SEQ ID NO: 942473 - protein, 149 aa, Homo sapiens
  misc_feature (10)..(11): Xaa can be any naturally occurring amino acid
  misc_feature (14)..(14): Xaa can be any naturally occurring amino acid
  misc_feature (97)..(97): Xaa can be any naturally occurring amino acid
  misc_feature (106)..(106): Xaa can be any naturally occurring amino acid
  misc_feature (147)..(147): Xaa can be any naturally occurring amino acid
MKETHAHECXXAVXVFEPYTWLSSSRGGPGGSVCSSKPLPIGALFIFPAWGANICSTRSRQEGLQHAQPDHTVSSSLGKGDGRGWRPPDVASFQPLXPLGGSSKEXVVRCIFVPTHTAGWRRMNRSPAHASAPTLAPQGFFSGNKEXTK

SEQ ID NO: 942474 - protein, 112 aa, Homo sapiens
  misc_feature (78)..(78): Xaa can be any naturally occurring amino acid
  misc_feature (92)..(92): Xaa can be any naturally occurring amino acid
GELWSCSHFGGPFLGVLPVPWKVQSLGSSGSGEPNLRGQPLVAALGHCCSGWAAGLDFIVHMFPPHKSNQGMKIFGKXGRAGLGSLEEVAGXGRGHSGLPRGWQFLDLDGVT

SEQ ID NO: 942475 - protein, 150 aa, Homo sapiens
  misc_feature (36)..(36): Xaa can be any naturally occurring amino acid
  misc_feature (146)..(147): Xaa can be any naturally occurring amino acid
MPSHAKPHHTHAPAGGLALEALCQPKLLSFLGPHPXQEDMPLALACFWDPREPKGKVPLPGAARLCPAHSNPGASKTCQGNQGSDHSPFIYNPASPTGINQKKKSPHLTASEKPTWATTCPKKHSSVTIDHLPQAGFIRNEAGHTXXWDL

SEQ ID NO: 942476 - protein, 204 aa, Homo sapiens
MGVPFLEELVLRKEHGLNDVTAVVEHKEDVLSVHSAGEMRVAVETPISTGSADPQKLISNEVLGPGHAWVLSGLGSSILRSSVASKFWKVVLNLRFPSKDFLSEQILLVEEQDHRDGAQHSVVPDALEEVQSLLQAVGLVVLPDDHVVAAAGHHEDDGSHIVEALDPLAAFIALATHVKHVEVDFVHLELGLKDSRSQDTAARG

SEQ ID NO: 942477 - protein, 267 aa, Homo sapiens
  misc_feature (143)..(143): Xaa can be any naturally occurring amino acid
MAGAAETRGAVEGAARTTPSRREITGVQAQPGEATSGPPGIQPGQEPPVTMIFMGYQNVEDEAETKKVLGLQDTITAELVVIEDAAEPKEPAPPNGSAAEPPTEAASREENQAGPEATTSDPQDLDMKKHRCKCCSIMLTLAXTGLLSSHTTDDDHPSPSLLLPTLHPQPHGSTTWRLFTCAFRAFFRWKEGQGPPPVTTPQHSPRTRAVHLCLEERDRTDALFPRQGPPCHGSFTDAARATGVLAGGTRGLHAAQGSLPPSGPRTC

SEQ ID NO: 942478 - protein, 102 aa, Homo sapiens
MSGGGAGGGGGGGGRGARQWRGTRRMFSVSTVQGKRGELEGSPSPRAGLTLRNPPREKDLARVTRGAASGLGSSILRSSVASKFWKGVLNLASSQQGLSQRA

SEQ ID NO: 942479 - protein, 127 aa, Homo sapiens
  misc_feature (41)..(41): Xaa can be any naturally occurring amino acid
LGLKKWGGNPWGISPQEVGASYGFRGDISNIYEPWALSPCXSQHGPHTRSLRLTWELVKNAGSPRSIELESVLRRSPVIFIKNKVCKEKLKNSDCRNEEALGGVVKRNGKGGCEEGMMKDMEKGRRP

SEQ ID NO: 942480 - protein, 141 aa, Homo sapiens
  misc_feature (29)..(29): Xaa can be any naturally occurring amino acid
  misc_feature (31)..(31): Xaa can be any naturally occurring amino acid
  misc_feature (139)..(139): Xaa can be any naturally occurring amino acid
VGGNREFPQTDMTVTLCPEGTIDSPQEPXKXPPPPPPEPPARCLPSVSGSELWRVVSSLKHVTFQFIFSCQVYLVPEPGSKASPCRKHQTGAEIDKATHNSSCHTAVVPTSSAALQGPHSTLTTHEEPALLAPFHWTGXRE

SEQ ID NO: 942481 - protein, 207 aa, Homo sapiens
  misc_feature (29)..(29): Xaa can be any naturally occurring amino acid
  misc_feature (88)..(89): Xaa can be any naturally occurring amino acid
  misc_feature (107)..(107): Xaa can be any naturally occurring amino acid
  misc_feature (113)..(114): Xaa can be any naturally occurring amino acid
  misc_feature (116)..(116): Xaa can be any naturally occurring amino acid
GTRGLRARVPAAASPGPASRAPPRPLRAXAPSAGGVFVCGGVGGERESAQPPSARSLPGRVGASPHPPPPPPREDALARAARTAPGAXXRARGRSHMPDPQPREQAXPPPPPXXGXGYRRRTSSRPAAAAPERRGEAWAAAPLQEGAEGKEARSTSEEQPDREQEKEGRAGQADIEQLESLRPDSPLHLATTLGDLECARVLLAHGQ

SEQ ID NO: 942482 - protein, 274 aa, Homo sapiens
  misc_feature (96)..(97): Xaa can be any naturally occurring amino acid
  misc_feature (121)..(121): Xaa can be any naturally occurring amino acid
  misc_feature (134)..(134): Xaa can be any naturally occurring amino acid
  misc_feature (139)..(139): Xaa can be any naturally occurring amino acid
  misc_feature (142)..(142): Xaa can be any naturally occurring amino acid
  misc_feature (145)..(145): Xaa can be any naturally occurring amino acid
  misc_feature (164)..(164): Xaa can be any naturally occurring amino acid
MSVNMDELKHQVMINQFVLTAGCAADQAEELLQAAHWQFETALSAFFQENKTPYSKDKNQMMCKGANTPAKPPNFAEALTMFFSVKDVRELPKRWXXKTMAAKERKIRKNFSMQPPEALRXSSWNKEAWNPGGXKKKKXKKXLWXKKKTYEASEWKKFEQKKDXLEIREHTAMEAERYREAPPPSRRPGPRGAGERTSLRAPFTPFLSAPLVPRSPGGESADSSQAGTRLVPEHAAAHTQGHGPSGPGTWSGSERPGCLADRTSETRSFLRNAL

SEQ ID NO: 942483 - protein, 283 aa, Homo sapiens
MRAQVRPAPPLRPPQRLPSGLPPGRARLLRLAGLPRTGAAQQPQNLLEAAAAWAPTPPESYARASSLQPWRPGRRGSGWGRRGGGVGAGRLRSICARRAGAASAAPSLQLCSPPLWGGPGSFIERRACKKAAPFCSGALDELEKPPECGAKKLRSRLQSRYAGYMRPDDAKVAGNVHGGNILKMIEEAGAIISTWHCNSKKGERCVAALARVERTDFLSPLCFGEVAHVSAEITYTSKHSVEVQVNVMSEYILTGAKKLTIKATLWYVPLSLKTVDKVLEVPP

SEQ ID NO: 942484 - protein, 213 aa, Homo sapiens
  misc_feature (64)..(64): Xaa can be any naturally occurring amino acid
  misc_feature (126)..(126): Xaa can be any naturally occurring amino acid
EPVVGGGSLGLRLRVALSLRLHVQVPPFAFLKALLLVLGVGDQLGQRQRPAFLAQRDVGEEGTXGPVALLRAVHKRVGVKEDIDFYGLIVREGNASRDGDDAAFFDFVMKINGVHGSCDDVGLAVXWRRFKETSSMSFMVTPPCTKPCRVQSEGPTRWIKLDWLELTVFGSGLRTGWTMSPFLHLVSMRSSFWASYRFRPSSSSPCREYTTGG

SEQ ID NO: 942485 - protein, 131 aa, Homo sapiens
  misc_feature (20)..(20): Xaa can be any naturally occurring amino acid
  misc_feature (26)..(26): Xaa can be any naturally occurring amino acid
  misc_feature (37)..(37): Xaa can be any naturally occurring amino acid
MGLCHYTKGLTKFITHFLAXSSRPPXPPGPQPPLFPXSPSSLVAPCGGPEEEEVFLLFGVFFCGEGLLGGVGLGEECGGGGWGGGGGWGGGIGGGGGGVGGCGGGRGGGREGGLVGVLGLHISFRDLFPFF

SEQ ID NO: 942486 - protein, 153 aa, Homo sapiens
  misc_feature (63)..(63): Xaa can be any naturally occurring amino acid
VIQTYLKCYIDVINITKKEKKSKKQHSRPPETQRTPKVDHASFLPLPGYGPGEDPTASLSSSXFSKQSRGGIQALLSLSSFSNSPCSSAVVSWYCWYSDTRSFMLLWASVNSIWYMLSLVYQCRKALRRNMGVNCSEMRLNSSWMAVLLLMKV

SEQ ID NO: 942487 - protein, 189 aa, Homo sapiens
  misc_feature (158)..(158): Xaa can be any naturally occurring amino acid
MLLSFHCKDIVPGGPPPPRFRPPAFPNLSGGGIYALFSLSFSSNSPCSLAVESWYCWYSDTRSFMLLLASVNSIWSMLSPVYQCRKALGGNMAVNCSEMRLNSSWMGVLLLMKVADILRGGGGMLDRGVFTLLGIDSTKKLVFLFCTLSICSFTFFMXMRRRKMGATVSSGRGAGVEAGIMFLESNICW

SEQ ID NO: 942488 - protein, 270 aa, Homo sapiens
MEVREGPGQRRRRRGNCSLLPRIQFRGKKAVWSKKQGMLGRAETKPLKGPARYPAPTPARLCFGDARSRGAARVSSGDLGGGDLSERGEAGSRARSAIRGLVDEGQVLAGIIQGRGRGEGRRLSFVVGRRGSGPAQRLRWKGRGGSSGCSFSGGGEAAAVRWVTRAVTVPVELAAVICDVPISSRFQWDTTRSQFPMVVSTEAEVSQAEQDPEPHQRLKAGESCLGVRAGHIVAKAHGGKRHYDKVDGLQLALVLHIAEHERGREAKEQA

SEQ ID NO: 942489 - protein, 214 aa, Homo sapiens
  misc_feature (94)..(94): Xaa can be any naturally occurring amino acid
  misc_feature (99)..(99): Xaa can be any naturally occurring amino acid
  misc_feature (104)..(104): Xaa can be any naturally occurring amino acid
  misc_feature (165)..(165): Xaa can be any naturally occurring amino acid
  misc_feature (183)..(183): Xaa can be any naturally occurring amino acid
MGVMEDMGVGWSPHLLTLCLHEHRHMQVPLQKQSQGSSSHKGKGRNNSCFSVPHKAAVSHFTSCERHIRALGTVTACSLRVAPSFSISAVPPPXHSSDXSSSDXSSKENQASNDAHDGEVGWEDGSHLRVRGLGRPSCCTWQVYLCSSPECTTTAAHFWKVPSPXGLVSTSSVSWVWSSPSRXQVSVISAGRSPGPSISEWPHGQRWGGGSYVS

SEQ ID NO: 942490 - protein, 203 aa, Homo sapiens
ESTRFNPHIFLRAHCGLAISGAGLSSGLEHEAFEVKRLKTFLELGLRRDDWILSGRNYAETLKFQEINMVQNSNCSSKYFRRSATTAEPSLLRGIGSAMTDLIISSLAHKRFTLGYARGVCGGAGELSPTRRGVGEFSILDFSTSVKNGPRRGRGAFGPPVFLGLSARSPACSFRFGRWVTLKLSTCWGSSLTNTSLKNLSCC

SEQ ID NO: 942491 - protein, 197 aa, Homo sapiens
SKMNSFEATMSSNSSALNLEKPHFFEMWIFWGPGKLNFALLQGLNQMLLVLQLGADGHDKLNNVNPGHNTLGLSKGTLHGCFLLISPSTGQHLVDADEVGGVVLHPDIEAIFATTFYHVLIGTNFFSLQGFIGQLLIFICYHVATNWKLIHFFFFAPQVKNTNFGIRYTSAEARFWVRLVLTISVTTGGAAAMATPG

SEQ ID NO: 942492 - protein, 179 aa, Homo sapiens
MAHTIVTVWGYGSPGGCPDDRGECAAAGRGPRSGFYLPGQAADIRVEGGQRGPGRLVLPGSLVMQAANGGLRVGGVLLVQDVVAEVLRVFHLPPLLSFWGELGTQLLGAWRGELFMLYDWLLGSSTGVLLRGKPGLWSDRMFFLNGPHGDKGFLGEREGRRERARELCCPEARAAAAAC

SEQ ID NO: 942493 - protein, 329 aa, Homo sapiens
EAKEAGQKEGTGREEAKGRGEAAGGGAAGGGGGAAGGGAGAGGGGAAAGGPTRGGGGGGNTNSSRRAGRTDHRRRAGNRRRRSGGGGEGRGGSSGRSHPERGRPGRAKKGGPAQGRGRGGERQQEAQGGQGGRREDAARERRAGGAKGAGERGAGQEAAKSGRKQRGQEEEGRDAGGKRRDAKGRTRQRTPGKHGQAKGRNGPQAHQEQAAKGAAGGQEAEEGQGGGGRPGGDQEPQERGGTGPGAGDGDGGAGGRGQPAGAERQRPGGEQARREGAEGSKTAAGGGGEPGNGSGNDQRKDRNGRKTRTGRQDQGGEGGGSQGRTEGGA

SEQ ID NO: 942494 - protein, 102 aa, Homo sapiens
  misc_feature (15)..(15): Xaa can be any naturally occurring amino acid
  misc_feature (40)..(41): Xaa can be any naturally occurring amino acid
  misc_feature (47)..(47): Xaa can be any naturally occurring amino acid
PPGAGGGKIKSLFPXPNQPQRGPGLRDAAAAAATSVAEQXXPPPKPXTVIAAPNSRRWLWSVLAAALGLLTAGVSALEVYTPKEIFVANGTQGKADLQIQVY

SEQ ID NO: 942495 - protein, 191 aa, Homo sapiens
ARAPFLPQKELWWALGIRLHGFLVGEEAWGEEKDSGTVSSPCAGVAEGLLCPAMGTPGSRGRSVRVGCISILSRCSVRAVCGWCSLCLLSSCSRARVEEALVLTQKWGHSGSGELLIRYEGFIPPHPKSSRSTTGLPVQVQEKWQGFCDQPAVPILVGAAVSRQVEDEKALGELIQLQYFYQVLRKVQKLE

SEQ ID NO: 942496 - protein, 250 aa, Homo sapiens
  misc_feature (178)..(178): Xaa can be any naturally occurring amino acid
ERSGAGAARRQGGGAPTESGGAEKGEAAGKKGTGPAGGKAPRRPERGNGGHTNGRKNNRQPEAGREGAGQQDEGGGGGDGQSGGAKAQRARGGDAPRGPGGGGKQGAGRPKGGTNQNRAPGAAEREHNPKTRRQRGGPGGRSPYQHGAGRKGSGVEEGAVNGAVWEGKRKVIGGKKTXGSGSAPEETPSLESEQKGEDPAAKEAGKGKRRNRRRSQRRGPGSSEKEEKGSSKAGRNSPGKDAAEGKQAEQ

SEQ ID NO: 942497 - protein, 92 aa, Homo sapiens
METPQWEPQRFMLLSEMAAMRIWSKARVKKAAKVLQKGTYLLRVAQPTAMLTMFLLSNVALDEAVRVLFFEDFEKVEFLVSHPGRGWVTGMA

SEQ ID NO: 942498 - protein, 292 aa, Homo sapiens
  misc_feature (54)..(54): Xaa can be any naturally occurring amino acid
  misc_feature (56)..(56): Xaa can be any naturally occurring amino acid
  misc_feature (159)..(159): Xaa can be any naturally occurring amino acid
EVPPARCRVLPAPCAARAEDTNGRYSPARPGRSVDGAPAPRGRALKRAPEAGAXAXARRRRRRCGRPSGGRGCGACKTLDRSFLAAAAAAAAVAAAERDPSRSPPSPPERRRAPGPRRLGRGRALRSARKGSASCWADERGQDASRERPLLLSVGRRRXGCARFIPPAGRLARAGARAPGPVAQSHPCGTVLSLSPSYRKATLFEDGAATVGHYTAVQNSKNAKDKNLKRHSIISVLPWKRIVAVSAKKKNSKKVQPNSSYQNNITHLNNEKLKKSLSCAKLSTFAQPHRPA

SEQ ID NO: 942499 - protein, 175 aa, Homo sapiens
  misc_feature (2)..(2): Xaa can be any naturally occurring amino acid
  misc_feature (6)..(6): Xaa can be any naturally occurring amino acid
  misc_feature (49)..(49): Xaa can be any naturally occurring amino acid
  misc_feature (52)..(52): Xaa can be any naturally occurring amino acid
  misc_feature (75)..(75): Xaa can be any naturally occurring amino acid
  misc_feature (132)..(133): Xaa can be any naturally occurring amino acid
  misc_feature (135)..(135): Xaa can be any naturally occurring amino acid
  misc_feature (148)..(148): Xaa can be any naturally occurring amino acid
  misc_feature (160)..(160): Xaa can be any naturally occurring amino acid
  misc_feature (163)..(163): Xaa can be any naturally occurring amino acid
  misc_feature (171)..(172): Xaa can be any naturally occurring amino acid
  misc_feature (174)..(174): Xaa can be any naturally occurring amino acid
MXGGGXKNQMRAFGRLVFPMLVLLPSCCIRWSLLHSKPQKIFLYMACGXFVXRQYHISSSQFSQLVLALWVLELXPCRTGLPETFVRGRRMPDTVPGNWEAWSRLDAASLSGASRTRLGSLDKCPLLTQRSXXKXSPIFQLPLETIWXCGGPNLQVSSWXSLXAPGWNPYXXGXC

SEQ ID NO: 942500 - protein, 188 aa, Homo sapiens
  misc_feature (113)..(113): Xaa can be any naturally occurring amino acid
CSPTTQSSPPFCSTFSLCPHLSPENPLFSQRKEVRGTLSPPLPKKKKQKNPFPAWGKHEGDGPPGWPWSCCCTSWILVAQAVRDRNLLRDDRVLQNLLTIQERYLLQLHRRQXAVQKDIQSYMSRMEAIWMLEVLCRNRIGINMVLALLCHGMNLVPWAGGCGCPDFRKCPMLANCLGVSVLAWSPGS

SEQ ID NO: 942501 - protein, 116 aa, Homo sapiens
RGHAEGAKRKAKKRRGGEGRQETRRGGGGRGAKKKQQTAKKEYSALLQPLPEQPKQCPKAGEATRAQGNAHKRTATPEQQQAEASWLTGRAEMARGGKRKQRTGRQGACSSKTKHA

SEQ ID NO: 942502 - protein, 227 aa, Homo sapiens
PSTDPTSLSADAWSHPGLDTTSHGPEAGLQFPDSLGPLGLLLLPLLCSSQGQGGPASFPTPPPPHAPGSLLYMKGLPLTSFCGGLICDFLGGPARGNHYTPIRRCCCYCSKFGCRTCCWLVMTRRMLLTKLPWSSGMRPMKIFFYEEYRSISTRIYTMLCRKSARSRRKLFMIWHRLFSVSRSLVKWNWTRREFRNSGTRVVSSCCGDELHVQLPWPLLGPQDLPLV

SEQ ID NO: 942503 - protein, 128 aa, Homo sapiens
FWSSSTVSPEPLDGQRKEEKDPASPPPPPQSLSTLTTLLPPRCPPACPARQTRQGSLAKARGLPRPSPPYQVILSPPDSHTLSPPPQYPSPPPQQKAHPVVPHSVELEPEEEVKPTFQKDRPTMGHKY

SEQ ID NO: 942504 - protein, 144 aa, Homo sapiens
  misc_feature (120)..(120): Xaa can be any naturally occurring amino acid
  misc_feature (125)..(125): Xaa can be any naturally occurring amino acid
  misc_feature (139)..(139): Xaa can be any naturally occurring amino acid
PAAAISPLGLGSRGGELRAPLGQTELGRCLPVRAPRGPRPQSAPRAPCRGAEPALGLLGRGCLGPPGPREAAAPAAAASRPPPAAAAAAMGCLSNSKMPGPAQRGEGAGEANKRTDKQQXKDKQXYRATHRLLLLGAGXSGKTT

SEQ ID NO: 942505 - protein, 277 aa, Homo sapiens
  misc_feature (174)..(174): Xaa can be any naturally occurring amino acid
  misc_feature (180)..(180): Xaa can be any naturally occurring amino acid
LAGRGLLRFCLFSSFPLPSSPPLASFPLCCPSASGVLPSLSSAGLPSPAPALPALRPPGPFLPCPFPSAPPACFLPACACGRAPGPGRGALAVPALPLPPVVRWWLSGALVSPPPVSPASPLSLSVRSLCFFLPPPAPPPFLSASPVPRACPSLSSLAGPPRLPPRALALPGCXPRSGLXIRLPAPPLASPPPLLPPLLPASPFWPPAAGAVGRCSFPPPPPPLGVSPFRRRLGVAAGPPAGPPAPPVVLPPSAGLLGALRPAARPPSGSCWCGPFL

SEQ ID NO: 942506 - protein, 82 aa, Homo sapiens
MASDEGKIFVGELSFEINEQLLEQVFSKYGQISEVVVVKERETQRSRGFGFFNFENIDDAKDAMMAMNGKSVDGRQNRVDKG

SEQ ID NO: 942507 - protein, 201 aa, Homo sapiens
DRSGGHCENFPTATASTWRWRGDSLKAERQGARKSCVVSSRANPCRVGGCWGEVGALVLGRLGDGLGAGLGLGKRSTHEGFVVGGFEEREEHGGMGLYEKKMWHSCTEWACDEDKEQFGGEECAVEEEPGDIHQWDGGGLRVGVFGWEEGLMGFGGLDGDKGVVSLEEEGGCGVLENRWRGKEWRKNGKGVCGRGKWLRFW

SEQ ID NO: 942508 - protein, 254 aa, Homo sapiens
  misc_feature (26)..(26): Xaa can be any naturally occurring amino acid
  misc_feature (81)..(81): Xaa can be any naturally occurring amino acid
SFPFLPPLGRFAPPPVAPSVCWFVAXFGACFPGSVSRFSLPVPPLLLLPCSAGCLLPFFFVRPFACPRWAFPPPPARSSPXSPFACGSGVCSPELLLPPPPRGGGGGAGSLRGGFGFGGGGAPGASPRPGPSLPQAAPLPWACFLLPGGWVGAGGGVGAPRGGAAGGAVGFGGLGGEGSLARSPPPAPAAPRALVRSRGPARPLPLPLLLLLRPSGVAAGPPASVSVLAAVRVVVARLAVLPRAGLAPPPLPFL

SEQ ID NO: 942509 - protein, 67 aa, Homo sapiens
  misc_feature (49)..(49): Xaa can be any naturally occurring amino acid
PPQQSNSKGGKANGFPHKSSRLKWLCYQNLYFCSVMSIGARFRYSRRKXRNARCGRLFSNSGPCVQN

SEQ ID NO: 942510 - protein, 71 aa, Homo sapiens
  misc_feature (55)..(55): Xaa can be any naturally occurring amino acid
LPKKRDKRKTTANLMSIQTVLNEEQPEAEVGISQKDSKPEDSGEGKKESLESEVXVEGLQNAPAGPQVSKE

SEQ ID NO: 942511 - protein, 133 aa, Homo sapiens
  misc_feature (124)..(124): Xaa can be any naturally occurring amino acid
MFASQIMVSFSGLSHISTFFDLFLILTAAYPDELKWLDATVLSQDGCKASYPEREPDFDWGMKPSGCTLEFSSSLRFVEDAGVNARQLRAQRPTADLSYWLLCENALVSSTMPTKFANLFFLQXRSIHKGWNE

SEQ ID NO: 942512 - protein, 312 aa, Homo sapiens
ALSSAFAAAVLPRRRAPPGAAGGRAPRLPRGAPLSCAPLVPPPACPLRPAPPGVPRAVRPPPPARPPGAPGPPRGPGPPGRRWARPLAPALAAGGPGRAAAAARRPPPGPCPAALGPGRPCPSPPPPPPAARPPGPPPSRCPPGAPGSWGRGGGRCGCPWGAWGPRSWSCAPFPPLLVAGGVAVAALALLLGVAFLVRPPSSLGARRGARRPFLSRPAAARACRVPPSLFVPPPLPSPPPSAPPPPRPVPRPPAPPPAAPGLPPPPGPPAPRLRGPPPRLWGAGPLGPGRPAGPVCGPPPWRWVLWAPGLVA

SEQ ID NO: 942513 - protein, 295 aa, Homo sapiens
PPPPFWEFACCCAPRAPLGLAVLWRGCPRGFPRCRGLRPVCAGGSPPQFSSPCSCLLRWFASGGAGCPLAGPSRGAGRAPLCGALALPASPPVSGLPWRPRWGRRPLGRPPSPRRLPGSVCRPPLGLGGVGLVALGLCCGACPPPVRPPAFAPAAPRWVRPAPPWGAWRPRALSCPPAGRAPAPPSRPPPLPSAPPWGPRLPPPPGVGGPPPGPFLSCRSPAVPSPPLLCCGPRRLGSFCPGGWGPPGSAGVGSGVLFPVRVSWGPLSVCAACACVRLGPGALCLPWFLGSVPPW

SEQ ID NO: 942514 - protein, 294 aa, Homo sapiens
QEKGRRGKTKNGKRPHAKKKTKGGHKTGAGPPEGGTRQGEQEPGGDDETEKAKGNKQGRDRATTTEEEGGGREEGEDAESPRSELGRPGGLASASSRRGHGEEDTHRNWLLQNTNSKATQRGGGGEAPNTQGLARDQNNKGSSTRPQEDRATAQRFTRTAGKLALQRSKQAGQGSGGASQDRGRAGAEEAGRGQEKHLSSEASGGQWWVIFAVTSNVATTNILDRHILDIEAHIVPRKSLTQSIMVHFDRFYFRCNVDWSEGDTITGFENTSVHSANRNSTNTTNFVDILERQA

SEQ ID NO: 942515 - protein, 140 aa, Homo sapiens
MRCIIQDMYENESYMGVYETVNQNTKAHVLHFGKYRDVAECGPQQELDLNSPRNTTLERQTFYCVPVPGESTWVKEAYVNANQARVSPSTSYTPSRHKRSYEDDDDMDLQPNKQKDQHAGARQAGSVGGLNGVESKTFRN

SEQ ID NO: 942516 - protein, 202 aa, Homo sapiens
GEQEPGGDDETEGAKGDRQGGDRAAPTEGEGGGREEGEEAGGLRRGRGRRGDRASASSPRGPGEEDTPRNGRAQNTNSKATQRGRGGEAPNTQGRARNQNNKGSSTRQQEEEGQRPAVDQNGEQAGPAAQQTGRPGEPRGANQDRGTAGAYEAWKEQENHQSSEASCFHWRDILAVTSNVATTNILDRHILDIEAHIVPRKS

SEQ ID NO: 942517 - protein, 219 aa, Homo sapiens
  misc_feature (97)..(97): Xaa can be any naturally occurring amino acid
  misc_feature (115)..(115): Xaa can be any naturally occurring amino acid
  misc_feature (119)..(121): Xaa can be any naturally occurring amino acid
PAAPTYPSEEALAQLRPLQRRYAEHLPRRGQAAPTAWPDTAAALSGDPGARAVTRPQARMLLGWGRRLSPSAGSGSAPSPPAPLLLLSLGKARNSAXLRKYTLLRVDAPGGTKKXIKTXXXMDGAEEEETMKKLAPRKKSTAAEKEEEEQQQLQQGAHKQTVRCVSRRARAPPWRLRRRVLLRRPVAPSRKLGSARAPHPHSKLERGRLVGCPGGVAGA

SEQ ID NO: 942518 - protein, 135 aa, Homo sapiens
MALGCKTEDFGTSQSCQFRTELCLQQEQYSSSMTRKQLSSRALGRTSFRFGPGAFKRDNTDSTLGLTSTSVRPCWTFSSSVCTSCRYFQDGWPSSSTSCTDSVALRLTKTHRYRSSRSLTWALSLVTLAILNTPS

SEQ ID NO: 942519 - protein, 39 aa, Homo sapiens
  misc_feature (31)..(31): Xaa can be any naturally occurring amino acid
QARGWPVFLRIGERAHTPPALRRVLRVTLRXTIEGAAVS

SEQ ID NO: 942520 - protein, 283 aa, Homo sapiens
TSARGKQSKSNPGRGAAHGTTPAPFFPPDAEVAGAHGGPGGTVRIGSAGQHLQAGRARLLLALGRGDTGYIGMGGGDQPGPKEKKTEQRPAGGNNKKDQKGHREEKKEGARKPPVKANTGESSKNPKGQEKGTQQEADLTLNKEEKNEAEHLGDIHRTNKNSEEHRARKGSGNITPNQEQWEKAKESSPHREYPPATAREVDPLRIPPRHPHTSGQPPWCDPLGPFVVGGEDLDPFGPRRGGMIVDPLRSGFPRALIDPSSGLPNRLPPGAVPPGARFDPFGP

SEQ ID NO: 942521 - protein, 258 aa, Homo sapiens
  misc_feature (78)..(78): Xaa can be any naturally occurring amino acid
RGDSSTCNPSRGTEGRGRAGGDMKAPSALRGGDSWGYRREARGWGPRVWGHQNGASDVSVCEGGALVSLVGAEGTAGXVGWSRDLIKEEEGKGVMEGRFLGLGTQAPSVGDIKQQHEDHVEDEKPPKPDGGQMGGRALPPTRFTASSAVRSPRAVPWKRSEGEHRSASGTPIFRQASRKLSTFFRALRALSFGTAGEGPSIKGSERGRAGWQLEQDDPLATASAKSEAGAAAAGTQGPGAVTSLSPSHLEPGGTAEVS

SEQ ID NO: 942522 - protein, 106 aa, Homo sapiens
  misc_feature (22)..(22): Xaa can be any naturally occurring amino acid
  misc_feature (43)..(43): Xaa can be any naturally occurring amino acid
  misc_feature (59)..(59): Xaa can be any naturally occurring amino acid
  misc_feature (85)..(85): Xaa can be any naturally occurring amino acid
  misc_feature (90)..(90): Xaa can be any naturally occurring amino acid
  misc_feature (94)..(94): Xaa can be any naturally occurring amino acid
  misc_feature (106)..(106): Xaa can be any naturally occurring amino acid
MRSLFPWPLAANTQGSGVRARXDGRTTSEKAATHIHLIPSEGXTTWQVLGVAAVPRVKXYRTPLGRFAPKKKWQLQTKKKDKQEXAFFFXHTLXENAINMLFKILX

SEQ ID NO: 942523 - protein, 258 aa, Homo sapiens
SKPGLSWAYLVLVTQAGGSLPALHFHRGGTRALLRVLSRYLLLASSPQDSRLYLVFPHDSSVFSNSFHHLQLFDQDSSNVVSRFLQDPYSTTFSSFSRVTNFFRGALQPEPEGAASDLPPPPDDEPEPEFKVISCVELEPLPTVELGPPVTEEEWARHVGPEGRLQQVPELKNRIFSGGLSPSLRREAFKFLLAYLSFEDTADSHNAHILKKTDEYFLMKLQWKSVSPEQERRNSLLHGYRSLIVDVSRTDKTNKFYD

SEQ ID NO: 942524 - protein, 145 aa, Homo sapiens
MSIKRISGGICSGSSPFLDLTPFSLVAAVYKHGALLRKVHADPDCRKTPRGNRGWKSFHGILKGMILLPSEEEYKAGKALSDTELNNFISIHHAIETCVREESNRRHVFYLRKAEWRVFLFHAPSLEQMQSWYHSHQCSIPYFLC

SEQ ID NO: 942525 - protein, 207 aa, Homo sapiens
MEKGKIEFVDDGSLGKIFRKEKLVFGQYGGGKNCGKGAHYKEGAELVARCPGRSRKEAESCDCLQGFQLTHSLGGWHGGRKGTLLISKIREEFPDRIMNTFSVVPSPKVSDTGGGGANATLSVHQLVENTDETYCIDNEALYDICVRALLLATPTYGDSTTWCRPHERGHTCLRFLEQLNADCATGPSTWFLFSPALLHARLRTLNS

SEQ ID NO: 942526 - protein, 156 aa, Homo sapiens
  misc_feature (67)..(67): Xaa can be any naturally occurring amino acid
CCFQARGILANQSSSQLLAVLFRYLGGKRSCRSTWSSCSSCAASSSRVSSFPTKSYVDLARVAEAVXLQPVLVEGRQLLRVRVQQVMDQIDQEHLQATPKRLTPPRPPPFFDFLTARIMAHGELAVELLVLQLELAAEGGDQAHEGVAHEEELGVL

SEQ ID NO: 942527 - protein, 106 aa, Homo sapiens
MVQDFQRRNRILQWAQLATSSSQEKADQSVPRAFPWSPPPHARYRNWQRKCDKKKDDEDKKNEDIVSGGIILYSSSQSVKCKNQHSLQYINRDLRHFFRLHISSQI

SEQ ID NO: 942528 - protein, 119 aa, Homo sapiens
MDLRGKKRGDEKKEVAEPRNKHTSSSTFLPTDPALYSGPFPFYRRPSELGCFSLDAQRQYHGDARALRYYSPPPTNGPGPNFDLRDGYPDRYQPRDEEVQERLDHLLCWLLEHRGRLEG

SEQ ID NO: 942529 - protein, 253 aa, Homo sapiens
  misc_feature (57)..(58): Xaa can be any naturally occurring amino acid
IFISRVCRTWFRFASPRGPEWLAWSLCGAVSCTCLGIRREEAGTPGSQEMDSVAFEXXDVNFTQEEWALLDPSQKNLYRDVMWETKRNLAPPEGKEGRTSNIKEHNKHRWEKATEATGPERLYQTKRPATQPRGTFSPVSQIRIVSKKIPASETLVKALYMEKSAWVSHPLIDTSKITVDMNQRNIRNMERSQIHVTSVGNPSVLTSPLRAQEIIHTGEKLYDCEECGKPSFLSKELEDTSSHTVDMHHINVR

SEQ ID NO: 942530 - protein, 207 aa, Homo sapiens
MIEESGNKRKTMAEKRQLFIEMRAQNFDVIRPSTYRTARKSRFVQKRCNPHPVDIRNMIEALRDNGLNTLDHTTETSVSRPETVTPPTYHQLNKRLPPTHQISVEQSTSPPPNPTIAAYDSEGRGKLTVFSDKAMLATMCGGKMLDKLRYVFSQMSDSNGLMIFSKFDQFLKEVLKLPTSVFEGPSFGYTEHSVRTCFPQQRKIMPN

SEQ ID NO: 942531 - protein, 253 aa, Homo sapiens
  misc_feature (19)..(19): Xaa can be any naturally occurring amino acid
  misc_feature (49)..(49): Xaa can be any naturally occurring amino acid
  misc_feature (56)..(57): Xaa can be any naturally occurring amino acid
  misc_feature (133)..(133): Xaa can be any naturally occurring amino acid
  misc_feature (140)..(140): Xaa can be any naturally occurring amino acid
  misc_feature (163)..(163): Xaa can be any naturally occurring amino acid
  misc_feature (166)..(166): Xaa can be any naturally occurring amino acid
  misc_feature (168)..(168): Xaa can be any naturally occurring amino acid
  misc_feature (174)..(174): Xaa can be any naturally occurring amino acid
  misc_feature (188)..(188): Xaa can be any naturally occurring amino acid
  misc_feature (191)..(191): Xaa can be any naturally occurring amino acid
IREREEQLTRGLGGEDEAXNTAGGGQGSPRGRGKQGVGREKAPGEKTLXALGGGAXXLSLQGRAASLGARGLGVLLVVFVHLALFRGRGVRELRELGDQGVHVALGLGELHLVHALARVPVQEGLAREHGREXLGDALEXFLDGRAVPDEGGGNLEGGGGDVXQGXLXVVGDPXHEVAAVLALDGQHXLVXLLHGHAAPEHGGHRQVAAVARVAGGHHVLGIEHLLGELGHGQGPVLLAAPGCEGGERGMKKC

SEQ ID NO: 942532 - protein, 148 aa, Homo sapiens
  misc_feature (33)..(33): Xaa can be any naturally occurring amino acid
CVHQWRCETVRNYPGLAGPCGAFSDCTERAPGXFWDPYRSLAVGPDTHGKPFSWRWKQLRCEIPPASAASTWWYGGHWGLPFQGQPIYLICQLDVTEDVAKLLKLPDVPGWEEPSPTLQFLQQRPCAEAALRAPRSRTGTPTVLPADL

SEQ ID NO: 942533 - protein, 131 aa, Homo sapiens
MAKGTEKPELMWLLSYSSYFSSSGEWWWCMLAVMVFVVMVLWSLFDFCVVVFSVDVLDWVWFLGFEELVGCSGFLSIVVSCVSSVVYFVLSLAFLFVVCFLASFFFAFVVCFAFFLWLGALLDCLVFVAFP

SEQ ID NO: 942534 - protein, 247 aa, Homo sapiens
  misc_feature (61)..(61): Xaa can be any naturally occurring amino acid
  misc_feature (75)..(75): Xaa can be any naturally occurring amino acid
  misc_feature (85)..(86): Xaa can be any naturally occurring amino acid
  misc_feature (97)..(97): Xaa can be any naturally occurring amino acid
  misc_feature (113)..(113): Xaa can be any naturally occurring amino acid
  misc_feature (119)..(119): Xaa can be any naturally occurring amino acid
MLKKFDKKDEEQARVFNETPNNPRKCAHILTKILYLINQGEHLGDQEATEAFFAMTKLFQXNDLSTFLLFFYLTXKEKSCIAEDXXIVTSSPTKDMXGKKNNNRGPAVRTPRXITESTXLQAIETLQEKNQCETKEPSVSSSAPVSALHLLKCSFDVVKRWVNEAQEAASSDNIMVQYHALWLLYHVRENDRLAVNNMISNVTRHGLKSPFAYCMMIRVASKQLEEEDGSRDSPLFDFIESCLRNKH

SEQ ID NO: 942535 - protein, 197 aa, Homo sapiens
GTFHQISLHSSFFPPSQPLALTSLFFLTSPLTLYSNPSKKPTKTTNLIIITFNRTPTTNPPSHQNLNNTSSFPFNMNPFSSLMPSTTTPPPSHYPYSSPFNPPSHHIPTYSPSFSLTFLNFTFTFLTSPSPTPSSTFFPTKSTPTPYFSPSLHTSISPITSFLNHLLITNLPSPIPQPTFTTPPSRHHRSSPPHSPT

SEQ ID NO: 942536 - protein, 131 aa, Homo sapiens
  misc_feature (1)..(3): Xaa can be any naturally occurring amino acid
  misc_feature (7)..(7): Xaa can be any naturally occurring amino acid
  misc_feature (11)..(11): Xaa can be any naturally occurring amino acid
  misc_feature (13)..(13): Xaa can be any naturally occurring amino acid
  misc_feature (39)..(39): Xaa can be any naturally occurring amino acid
XXXTGSXPKLXAXTCIVTVSKKQQPGARQGVMATPGHTXQEQRVGVLVNRHFVSPLTKVHSQELHNNTHSLFKCLDGREGERFLLLKFIPYLIPGCFEVQFHDLLNVISYSNFQIFQHILILIAFVTSLPS

SEQ ID NO: 942537 - protein, 204 aa, Homo sapiens
PPIPPFLHITLHTPLLIHTLLTLPPHLHSSTSKIFSTHHHPPSPIPNPPIPLYPSNPQTHHHYLSSIHHTLYFNHPPLNIILHHPPHLTNLIHTNYPHLLPPIPPISDQKPLGSINLYNMMPNPILNLPPINLNHSLTNTNFDNLYPSPHSLIHAINPPTHLIIAPNLPLLPPYAHLPNPSAQPLPPFPPPLIITHIDPINPLH

SEQ ID NO: 942538 - protein, 201 aa, Homo sapiens
  misc_feature (23)..(23): Xaa can be any naturally occurring amino acid
  misc_feature (55)..(55): Xaa can be any naturally occurring amino acid
  misc_feature (62)..(62): Xaa can be any naturally occurring amino acid
  misc_feature (89)..(89): Xaa can be any naturally occurring amino acid
  misc_feature (105)..(107): Xaa can be any naturally occurring amino acid
  misc_feature (126)..(126): Xaa can be any naturally occurring amino acid
  misc_feature (138)..(139): Xaa can be any naturally occurring amino acid
  misc_feature (175)..(176): Xaa can be any naturally occurring amino acid
  misc_feature (179)..(179): Xaa can be any naturally occurring amino acid
  misc_feature (183)..(183): Xaa can be any naturally occurring amino acid
  misc_feature (194)..(194): Xaa can be any naturally occurring amino acid
  misc_feature (201)..(201): Xaa can be any naturally occurring amino acid
EKPAAQGAVCRGQGAPATNPQAXVAAAARVARRVNMAALTTVVVAAAATAVAGAXEGAGAAXGTGVGAKPAPQQSDGCFSTSGGIRPFXLQNWKQKENQTKKAEXXXTAEKFKNQVIKMEKEKKRXINNQKSDFRIEXXMLEELENKLIQSRKKERAKIQQQLAKIHNNVKKLQXXLKXVKPXTDFVEKLREMXEEIEMQX

SEQ ID NO: 942539 - protein, 157 aa, Homo sapiens
  misc_feature (1)..(1): Xaa can be any naturally occurring amino acid
  misc_feature (51)..(51): Xaa can be any naturally occurring amino acid
  misc_feature (63)..(63): Xaa can be any naturally occurring amino acid
  misc_feature (95)..(96): Xaa can be any naturally occurring amino acid
XLILNTFDPNPPPCRAGGTGGLGGAGGPCRHSQLFILLMSPPHPSSSLPGXCSGTLRTPGCPXGQASRANGHAGTAGEVPIISCVRTFNLGNQGXXVAGLFLPLPTPIYNVLGKTMRGGKGNIQPPSTHITSSEAAKSTNRAWESLSSKNPNGSHAA

SEQ ID NO: 942540 - protein, 111 aa, Homo sapiens
  misc_feature (16)..(16): Xaa can be any naturally occurring amino acid
  misc_feature (23)..(23): Xaa can be any naturally occurring amino acid
KGFFAQGHTSGVKRGXPSWGQWXFSYFVIGPPPPPTLPPPPPPPPPRPPPPPPPSPPLPPPAPLPPPPPPPPPAPPPPPPTAPPPPRPPPPPPPPLPPPPPPPPPFPPPAP

SEQ ID NO: 942541 - protein, 78 aa, Homo sapiens
  misc_feature (30)..(30): Xaa can be any naturally occurring amino acid
MLMSAFIQVANQTCYAAPFKRLPRVRGKGXSQTGPLTASALAWILSVDAGLPLLSPASSTRPAWPFTFQMSVSRGLQT

SEQ ID NO: 942542 - protein, 72 aa, Homo sapiens
MTGSSVFDYIHPGDHSEVLEQLGAADADARPPNPALRLLFLLLFLFLADTPEIEASLTKVPPSSLVKSALVC

SEQ ID NO: 942543 - protein, 200 aa, Homo sapiens
MALGLRILLVVFFYFILFFGRGVLVLLVLGHQVVYIVFGFGELDVVDVLVRVPVQEGLGPEHGRELLGDALEELLDGRAVPDEGGGHFEEAGRDVTHGHLHVVGDPLHEVAAVLALDGQHLLSTSFMDMRPRNTVATVSAAVARVAGGHHVLGIEHLLGELGHGQGPVLLAAPGCYGGERCYEEVQAREGHMLTASLRKS

SEQ ID NO: 942544 - protein, 257 aa, Homo sapiens
  misc_feature (94)..(94): Xaa can be any naturally occurring amino acid
  misc_feature (96)..(96): Xaa can be any naturally occurring amino acid
  misc_feature (186)..(186): Xaa can be any naturally occurring amino acid
SRVSLQGSHYLSAVLLHYLRIKFFPRRMRIPIGLNCFQIPRGSWVSTQLGCDFPGSRHLPTQKSWKMMSRISSVPPPPGSGGRGAGGICELFVXRXRSFDCLYVAEGIQEKLEVVLVPCSGEQGGICGRLPTHCSQLLPQRLQEGVQPLFRQKGQKQVRGQVQGRDLGLRGQQVRLVQHQVEALAXVTGALGSQRGYDGGQEVATCCRGQVRSIQHGQNEVSLLKSLPGARMLSCSTGTTPPATSRVAQQHRKSGEF

SEQ ID NO: 942545 - protein, 155 aa, Homo sapiens
  misc_feature (28)..(28): Xaa can be any naturally occurring amino acid
  misc_feature (35)..(36): Xaa can be any naturally occurring amino acid
MARLKKGFGGAGAWISAGTEGGGWGLGXEGGGVPXXAAQRGGPWAKSLEGGLGVGGGGDRRGRLGIWGGDPMGAGWGGGLCFLHAEHGVFLFGSINSQAFQAHGGESSFNADRFAISNLSSTAFKGARRGIKTAVCVYSSVCSVAMGEMSLIDED

SEQ ID NO: 942546 - protein, 183 aa, Homo sapiens
SIWLQKAKVAYCSGTNNQFIIQSETKFQVNNHVDLEIFPMDTMLNQLVTKGNFRLSNCVKWGRNEIMLDEIDSTFNENYQGQTIWFQKSENFLPDWRSLQTCQPTMSALGNIVGKVLCYVRVGSSTLGQSCASGNGCLEFSPCSSSVSFIRVCLLDNIPPPQELLEICKQSGPFAKGLDAIPK

SEQ ID NO: 942547 - protein, 114 aa, Homo sapiens
CAVEFRTLTWETRVVDGEGGGGLAGLRQWLFSPWCCSYLQRGAWGSVISAELLIGPGSGKAPAVGPSRASLRPERWLCLQRSEGISEPVSGAGHAGTRGALRLLLLAHSGERDK

SEQ ID NO: 942548 - protein, 182 aa, Homo sapiens
  misc_feature (27)..(27): Xaa can be any naturally occurring amino acid
RAAPAAPASLLRDSRTPPPPLRERRVXGGGALLLRRPETRRRWTRRRWAHGADRPELEAGGGGERPGRPRSGAPRYQCGVPELRKEILSADFEMMGLENGGGGLKSPPLVLAALLACIIVLGFNYWIASSRSVDYEDTDDEAGRQGPEGGCRERGRGAEEEEFQGELEKQREQLDNIQSIDF

SEQ ID NO: 942549 - protein, 158 aa, Homo sapiens
MRGGGNTSMLGAPPIHSPSCHHGRAWALGATRGDRLSPLGTTHYSAKRNGRAPCDQQTQIEPKQQASPPPRGIMCHHPVCSGRAGMEEIFLVQLHSSSVRTDVPPYLGFREGGWGFPSTLQQILQCYCHLRPNFLPRALYAMLHLGQMFRSVCLLVPI

SEQ ID NO: 942550 - protein, 136 aa, Homo sapiens
HHPPPPPPPTPPPPPPPPRPPAPPVRPSPPDPDLNPPPPVFPEGPSHACLLPRAAPACLRAPRRRPPRAPARAACGPAVGPGPPPRPSPPQAAFPSLPRAPPLVATSPPPPRPSSRPQPPPSPVHPSSRCLQSFLF

SEQ ID NO: 942551 - protein, 35 aa, Homo sapiens
  misc_feature (8)..(8): Xaa can be any naturally occurring amino acid
  misc_feature (25)..(25): Xaa can be any naturally occurring amino acid
PGTMDSFXSGPFGQIFRPNNFLFGXSGAGNNWAKG

SEQ ID NO: 942552 - protein, 101 aa, Homo sapiens
  misc_feature (40)..(40): Xaa can be any naturally occurring amino acid
  misc_feature (42)..(42): Xaa can be any naturally occurring amino acid
  misc_feature (46)..(46): Xaa can be any naturally occurring amino acid
  misc_feature (60)..(60): Xaa can be any naturally occurring amino acid
  misc_feature (97)..(97): Xaa can be any naturally occurring amino acid
RVGRTVRAAPPGVQRPAPPRLAWEKPPGRAGLEWAVIGFXLXRFRXADSDPISFFHIQVXWRLLWRLGPRALETFRAWPPPASFPGPALAVLPGGTXVAPG

SEQ ID NO: 942553 - protein, 116 aa, Homo sapiens
  misc_feature (1)..(1): Xaa can be any naturally occurring amino acid
XTGIYTVWYQKLGPTWCCLTCIRNIKSNSYHKDTGLTIHHIGPVIPWEFPNAITTPFPFYKYIKKQKVSKTSIMMWQTEYNSDVSGGSKVLIRPSKFYNVICSSSDHYFRIQTGEK

SEQ ID NO: 942554 - protein, 197 aa, Homo sapiens
KEESRRGWLIVKAGGRTRGQEKPGCLPFPGSLGHLGVSAKLWGVCWKVVVIGIVGGDKTGMVQMVLVEGFGRVTVRGSLRLGLAWIWPVSGVWGQGLESRLGRGLGVGVRAQAAASLGPGGRSEFHWAMGRRRVGQHGPAQVPQAGPRRAAAPTGHPPDGPRFLAQLCRSPARVSSTWHLSGTWVTGAPRKLESFVW

SEQ ID NO: 942555 - protein, 78 aa, Homo sapiens
  misc_feature (78)..(78): Xaa can be any naturally occurring amino acid
EEKRIDHRAAGRHWWRLEEEAEQGQHGVEGLRLGVHVSLEVDALAQFGEQRQVQHDGCGQQGVFIRVVQHQCVGFAQX

SEQ ID NO: 942556 - protein, 216 aa, Homo sapiens
YYPLRREPEAAPSAPQETPIMGSQSSKAPRGDVTAEEAAGASPAKAKGQENGHVKSNGNYSPKGEGELPPVNGTDEAAGATESDAIEPKPPSQGAEAKGEVAPKENPKKKKKFSLKKHFKLSGLSFKRNGKEGGGDSSASSPTEEEQEQGEIGACSDEGTAQEGKAAATPESQEPQAKGAEASAASEEEAGPQATEPSTPSGPEIGPKAAIAEQNE

SEQ ID NO: 942557 - protein, 162 aa, Homo sapiens
  misc_feature (68)..(68): Xaa can be any naturally occurring amino acid
RWQLVLSESRVSICSSVGEMRHLTLSSSFLLMFPSSRIPQKTLFAKSWWRNTCEPEVIRRHACQRYSXVPCTFVNLKSTSQPFARRKEEGIPYVEFPSGLLRTFDPQLCGFKDHSVTVPCHTPRASRAAEPHPLKNSTKAVNDQCNVWSICVEGEGGGGKRN

SEQ ID NO: 942558 - protein, 142 aa, Homo sapiens
MPLECAAVRARVLSGGVFHSHLTAWRGGAAGQACLEGVLFFGGQGSLSSSGTLHPAVGTLDPSKDGCVRLAGLLRVLGPPWEGGWVGGARGGAVLGSVLFSAAISVLCVIENLKSSLCQSQQQGLGSGLQIDSNFLLMSGAD

SEQ ID NO: 942559 - protein, 166 aa, Homo sapiens
  misc_feature (7)..(7): Xaa can be any naturally occurring amino acid
  misc_feature (32)..(32): Xaa can be any naturally occurring amino acid
  misc_feature (39)..(39): Xaa can be any naturally occurring amino acid
  misc_feature (96)..(96): Xaa can be any naturally occurring amino acid
  misc_feature (121)..(121): Xaa can be any naturally occurring amino acid
  misc_feature (128)..(129): Xaa can be any naturally occurring amino acid
RQNQKKXKTEKTQHNPAIGQHAGGRQEAGETXRLHSKGXLRGLGGEKEKKQSGGKPGRAQKQSYIPQHESSPGRGRAAKGGGGTTLPLESANSTAXAGGHRAEAVGYARVAHKVTASATGXTGAKRAXXGGPKHLKAMSKTPLSKVSREGFGPSVGVVSTNLTVVV

SEQ ID NO: 942560 - protein, 117 aa, Homo sapiens
  misc_feature (117)..(117): Xaa can be any naturally occurring amino acid
YRMDVEKENSKYTQWDRPQDRLGVNKECTLLPCFPQYLKDLSHLLLNILLNSPSSSAVASWYCWYSDTRAFMWLWASVNSISSMPSPVSLSRPAFRRAMAVDCSAAGLNSSWMAGLX

SEQ ID NO: 942561 - protein, 236 aa, Homo sapiens
  misc_feature (168)..(168): Xaa can be any naturally occurring amino acid
GGPSAPLPHHPGTAWCLVGFSSLFSSYTMGIPVDRFSSMIAWADIPSRGLKMPRGLFPWAAMSTRLLALIWGTISSFQKGRARAMVCLRIWQVGSSPGFRPAYRRSLLMEWWWGCFWSMGGGGMWKERLQSFTCSSPCLGAVSALLRPVRPRNASSLRRQVRTTGSHXWSVPSRMAQRVRMARFSTDVEQKSNSILASLKALAPRLASSVPFSLSSASNQPQKRFFWFHVLSPCRT

SEQ ID NO: 942562 - protein, 74 aa, Homo sapiens
MAATAIPVTTATMIPIGEELGAWTVMVTGLDEYSVVAYVSCAVVITTVTVVCLWDGEVGIRTGKFLGFSILEEC

SEQ ID NO: 942563 - protein, 319 aa, Homo sapiens
  misc_feature (29)..(29): Xaa can be any naturally occurring amino acid
  misc_feature (105)..(105): Xaa can be any naturally occurring amino acid
  misc_feature (109)..(109): Xaa can be any naturally occurring amino acid
LHVARRSAWLSWCSVWCSCTFFLAVNGLXSSLFDVIELTPSNFNQKLFRVKVCGLKKPMPQGVVTVKEEHQNGRKQQPHKKKLSKSVQLMQKSTIPQEVSMGSRXSPPXRILDPTKTDQKKTKGAEPVKPLKKPRRVPPRQPVKDRPGGRSGGNSPGKQGRSESASKKDVIELTDDSLDKNVLDSEDVWMVEFYAPWCGHCKNLEPEWAAAASEVKEQTKGRVKLAAVDATVNQVLASRYGIRGFPTIKIFQKGESPVDYDGGRTRSDIVSRALDLFSDNAPPPELLETINEDIAKRTCEEHQLCVVAVLPHILDTAAA

SEQ ID NO: 942564 - protein, 151 aa, Homo sapiens
MALPILPSHRKLYNHLDLEDLILVQVTISILSLLGAKTSTADLPKEKNILLLPSDLGLLVLQLPLQVLALLRLLVQRPLQLTCLVVFLVQLVLSLGQLLFELLHPPPQLVHLTLVLLPPPVGMCQLCHLLLELLLQLAMHMLQVCQLLVLL

SEQ ID NO: 942565 - protein, 105 aa, Homo sapiens
IHPIVTEYCQTIHLLFNSFQILDDKELLFPKDFLYQGDSNAKQSISEAFALTKIQHTIVPKDTRPHIVTSDFKKAINALKKTHFKLKKLLKAIVLQEITNNQKGW

SEQ ID NO: 942566 - protein, 246 aa, Homo sapiens
  misc_feature (40)..(41): Xaa can be any naturally occurring amino acid
SSAHYSAARGPHLPPPNLAPRVHPKQKKKRKPRSLLLLFXXGAWPGSPFHRSQQAGEWTPLCPESKDPGSNNSWNMLAGAGAEACGFGGGKGGGKGTACGVRVSGHPGDARSSFRASGACPWLVSALTARGTASSDHRTDLSLGLAQVAWTYHVRLRKFCCPSLLVSSLTGMALGMSCFLANTSSTASRSSSSCSIFWSSSADSWTRSRSLLFTTKMRPSVFWKWFRHRGRIFFWPATFQNVKQMF

SEQ ID NO: 942567 - protein, 111 aa, Homo sapiens
MEGPDSSYSCLLIHICWKVDSEARMEPPIHTEYLRSGGAMILIFIVLGARAVISFCILSAMPGYMVVPPESTVLAYRSLRLSTSHFMMELKVVSWMPQDSMPRKEDGRVPQ

SEQ ID NO: 942568 - protein, 294 aa, Homo sapiens
GELGGEPGAWEARAEAAFERGERSVEKGDPRKAKMKKMVEEIMKLLYSLYGEKKMKAAVKHSGKGELEKEEIDFVGGFEGGQTGIEVGGAVGGLSGAWMKNGKFNLVDEKIMELHPAEEKRLFKEAAAMMRKLEWTEEVKMKALLMGSEALEKQMLAMVVNYVTKELRAEIKYDDYGRTSGEVGGPLNDSVILKGGLGVGRSQRMPPGESPHHQCITSNVPLERPPLCSVMFQKLLMKQHVLVACALACHDSPLTGPQRRVKACLPQFRRRLLSPLTRMGLEEVITLSRRSDKL

SEQ ID NO: 942569 - protein, 150 aa, Homo sapiens
PFGAKLASFWAAGSSSKRAGSCLLVPRLAGLWVPFSGLLVGWTLVLGSRLGQGPSGLQRVAAFLAGLLGWWGLLRAGARAGVGTGFRERVNVGRAGLAGPAEDNPEQQQQEAHETVADDGDEGPLGDGCPHDRQHPQKKKDSGAASMVRP

SEQ ID NO: 942570 - protein, 106 aa, Homo sapiens
MVGPLGGGAWGGATGGGGSTTRGCPRGSSWDASCALVQLGDGGVANLLQLFLLVFKLLLLGSVIVIKPVENFVKLVQNLLFVLIVNLRHMKVSESSTVRLFMLEEQ

SEQ ID NO: 942571 - protein, 116 aa, Homo sapiens
  misc_feature (3)..(3): Xaa can be any naturally occurring amino acid
  misc_feature (48)..(48): Xaa can be any naturally occurring amino acid
MHXGRGRATGATAPCWALGLQNIMAREDEVPLGWGVEQVHTGWSCSPXPQSHGCRAFAKPFTLPTLRLLHQPAKGRGYGLRVAWVTAAGRLVTCDRAMKLDKPSEKQIRGLPALAV

SEQ ID NO: 942572 - protein, 152 aa, Homo sapiens
GPLHIEIRLPYAREFRRKHRKLKSLSLGGRKGETTLRQNSSPPHPRAAECREPPVKFYLAVGGDPGNIFGVSREGRAGGLHGPPLLPPAGRQASLPLLAATGGGTPPSPEKGKAWEGLAALPPVAFGGAPPPGAPRRPRKDVVVGGGGRSSL

SEQ ID NO: 942573 - protein, 146 aa, Homo sapiens
MADTFLEDMCGEENRIYKKKTTKKEDGKKEDKNGPASRRRGLEGRGGGKRGKKGWGGRKKMEEKICRTKSFKSIKKLRKEKESFASDPILYRPVAVALDTKGPEIRSGLIKGSGTAEVELKKGATLKITLDNAYMEKCDENILWLD

SEQ ID NO: 942574 - protein, 109 aa, Homo sapiens
MSGTFLGMYRRYSMGPGGASMGTSSKGGWERAEQGGGGEREGAGVQRLRVVLKGGSFVLERGEGHSAGLKRNILPYHAISYTGIPCLCMCMACPGLAWKLIESQRDHWL

SEQ ID NO: 942575 - protein, 152 aa, Homo sapiens
LILSAFQVLIITVSLAPRRLVFSVGALVRVPASARALGLALPTCEWCFRPRPPWASPPLPLRLSAPLQPVFGGSSASCRLSVLALRSLVSPSGPDVFFGPTDPRFLLPPLWSGPFSVFLCPPTAVSAPQVSPTGSLSRQGRAHSPLHVFSPP

SEQ ID NO: 942576 - protein, 99 aa, Homo sapiens
VAGAPQLLSSTSGIYWSHPEMHWLPTHWLDAGLVHGWQNQGIPFGDVPNPSGPEAAPSSMSQPVLGSAAPFAGTLALLRGPPRAIAGTVGGNGEPRFPH

SEQ ID NO: 942577 - protein, 72 aa, Homo sapiens
CSDSDTFPSGHKAPDESQCRTPSSQYSRVTLLRRTPRLLASGTRQRRNPAPSPVDLAGYGFCQSTEPSCPDS

SEQ ID NO: 942578 - protein, 183 aa, Homo sapiens
LTKGTAHRNFQEEIEFLNAIFPNGAAYCIGARMNSVCGDLYTLDFPESRVISQPDQTLEILMGEPDPAVMDQFYMKDGVAAKDVTRVGGIRDLLPGSVIDATMFHPCGYLVNGMKSDGDYWAIHITPEPDFSEVSFETNLSETSYDDLIREVVEVFKPGKFVATLFVNQSSKCRTVLACAPED

SEQ ID NO: 942579 - protein, 82 aa, Homo sapiens
KILPGYKNERAFYENPLNSFRVEWQPARRHILRRMAVSPSSWTRVAEKAASTPDINKPLLVLVSQVALTEHCRVLDTEEYLL

SEQ ID NO: 942580 - protein, 119 aa, Homo sapiens
MGGGSGGTGRGMGAEEGHAHECISVHGLVNELLQFFGLVVWEFCVEQPGEVLEGLFVFIERVVPQGQVEEVIELCLLAPFGQQLLEQQDAFTDVIIVLAPYQGPGVFKLRALGHRACCV

SEQ ID NO: 942581 - protein, 249 aa, Homo sapiens
EVAESWEQAADSGEIQISSQSAHSDSGRYPSRGAPVHRSASSTAPTSNGVVSSPNSTSRPTLPFKSLAQREAEYAACARKRILWLSASPEEEQEKPILDRPTRISQPEDSRQPNNVIRQPLGPDGSQGFKQTAHKCRRRKDAAVAAVTASWVVRHRELLTAVADQLDLVAEANDLDLLCTVDAPLLRPILAFLAHVPCDLPPSPPSHCDWHIDKGCPKSMERERVGVRGRLEGTTKDSESQTVPLGNLG

SEQ ID NO: 942582 - protein, 138 aa, Homo sapiens
MIAVRGVIHQAVGKHTPEEPHGLQQRLDEQQEEADSSRLDFCCLSSMSEGVGIEFEKQKEVWELCRNEYFWSFGIYGFFKLLVGVNGQLVRARGLEHSLVKKPGKRNGLDGTSLLKPGQAEQGKSQEQGRPGAWSHFH

SEQ ID NO: 942583 - protein, 134 aa, Homo sapiens
VTSKRAGVANLHSPADSAFLLEVSIGIVWVGTTLRRYGKGKSVHFRAISAEYDRGGVGALPRLSVRYRAQPESPGQGPDALGLSSVEGVYGDGVRRAGSGGCESRCRLFWAAVGIQKLSSPKSYWFQSLVNFPV

SEQ ID NO: 942584 - protein, 290 aa, Homo sapiens
  misc_feature (206)..(206): Xaa can be any naturally occurring amino acid
EELEARPRTQIGTIELRDTDYQPEPHMRRLLSMEPEVAGGRPRSFPRAPTAHGGVGGARICPVRSATRSCPPPGGSWGFWEEAAPYYGGNGKATMQNLKDRLASYAGEGFAPWRSANMKLESSILEWHQQRDAGSKQSITVRSMRKTSHDAAGADSGWYRVSNAQIILLIDNARMAEDDFNLKYENEHSFKKDLEISSQRASARPXDNLTIVTTDLEQEVEGMRKELILMKKHHEQEMEKHHVPSDFNVNVKVDTGPREDLIKVLEDMRQEYELIIKKKHRDLDTWYKNS

SEQ ID NO: 942585 - protein, 72 aa, Homo sapiens
VPKRGHQGTVGDPLSRKKRSVLKMAPDSVSFFLTCQPTRDLVSLDMPLFISIYVFEFLASAANRSMRSGQCS

SEQ ID NO: 942586 - protein, 170 aa, Homo sapiens
SRSQVLEQLASSLPTLLTYLYDNLYQALEPEDISSLLALMHHGVLAIEPAGGVSKVDHAHIYRTGADGFVGIKDQQNHQLTPLTGPPNPQHLTPGPLRAAPCHHKLPAEELDLKLFVFCCSNIALSSVSFLSTGPRSSRRRYRPLWKNWKSAFLKPCTDSFRPWYLYMNM

SEQ ID NO: 942587 - protein, 269 aa, Homo sapiens
MFSLPFFLGAAPIGNSYWYPRIHFSKVNHLVSLTPLPGSPAARLKATYSSLGHLILRSFKDDSKLFLSQILMPPSMPVVQNWELLALLLLSTEIWLTLFLSSEFRPAPAAVPPSGLAFLSRFWELSGAVKPRCELCLGTSSRPPKLSIPAAASEVNSTGKQLWPAATRLLFVMKVSATVGSVSEARVATAIFLSASARQTVLSWLTQATRLPLAEKQTPCTQPQLLLDSNISAPKGILGAPRGGCRPFLHFFDEAGKIRTFEVTGAGSQ

SEQ ID NO: 942588 - protein, 151 aa, Homo sapiens
IWYTLNTANMHNICQPSSCIIGREKKCDVTSILSDYKFIASVSFLSSGIPFTCSLLWGNLSLMWQVLLRLPQWHVCPIIVVCVSRGYDFPSPRVEHRKRCPGPCYLSFLGHVSKLLGRVLTIPVMHQLAVWGLPVSLFHAFPLAAHDISQS

SEQ ID NO: 942589 - protein, 240 aa, Homo sapiens
PADREEPIGWVGGLAGCPFLPSYRTLPGTTHQGAKFSPAASGGPAANPLSSVLSVPGSCLLRFCPGPEGLPQWPAGLGVGLEEGLGKDGGAGPPQGHDTVPTLRLAPAALVLSLEAVSRTSLENFLGFLGAAGMTSVPGLGDGSWLAFTLYPPARWARAGASRDPGPVPQATLSPQQVDFSYSQARNLESSGSVLASQQVLALPWLGGDSDVEMFVDPTVTEDSLASGLKPGSQRDSAQK

SEQ ID NO: 942590 - protein, 211 aa, Homo sapiens
  misc_feature (156)..(156): Xaa can be any naturally occurring amino acid
  misc_feature (162)..(163): Xaa can be any naturally occurring amino acid
MILPLLLALLFGAVSALHLRSETSTFETPLGAKTLPEDEETPEQEMEETPCRELEEEEEWGSGSEDASKKDGAVESISVPDMVDKNLTFAEEEDTVKKEGIPGGHSPPYRLERSHHTGRQPGATSPQGYTGNRGSSHNIKKGLAKNWQQTHKKNPXPPAPPXXKPYPTSTTFNPQLPTTAQQHISIIETNPKHLLYHSKSLKPPHYPLPKN

SEQ ID NO: 942591 - protein, 287 aa, Homo sapiens
MGSLSGLTVLATDSDWADVQVPPALGVIAPSVREQCKCGGSCGWDSGGPKGSAENEPQWINVLQEDSVTLRGRGTHSPESDSYSVVPTDWEVSCPTHTQLSKRFKAKKKDSGEYKCHNGQSSLSEAVHLNVLPEWLVIQTPHLEFQEGETIVREVPQLEGHKPLVKVTFFQNGKSKKYSRSDPNFSIPQANHSHSGDYHCTGNIGYTLYSSKPVTITVQAPSSSPMGIIVAVVTGIAVAAIVAAVVALIYCRKKRISANPTNPDEADKVGAENTITYSLLMHPDALE

SEQ ID NO: 942592 - protein, 115 aa, Homo sapiens
  misc_feature (54)..(54): Xaa can be any naturally occurring amino acid
  misc_feature (56)..(56): Xaa can be any naturally occurring amino acid
MAGEPMAEQREGPGTMEKWYYNWMGSPAEEGAVVELKIIMGGVTGFGFGRRGAXLXSKSPSLLAAARILSMEEGPERGSTEGRTGPGECSEHSRKYSFGKGKSMLCLFCFPVKVI

SEQ ID NO: 942593 - protein, 136 aa, Homo sapiens
  misc_feature (16)..(16): Xaa can be any naturally occurring amino acid
  misc_feature (131)..(131): Xaa can be any naturally occurring amino acid
RSPLEFYRLKHNPKQXTVSIITTLPKEPAYSPPTPLLKFVNATVNVSIIKNYKLFGDYLDDLLSSSSPQECSNGMCAQQLHIGKIRGHNHLSPLQINIFLKEASQTRLQLSYIFFNLIVRYSWISTLLSMXSINSA

SEQ ID NO: 942594 - protein, 237 aa, Homo sapiens
FFLPREGPGLPSESHRSGVVGNPLAPTPGCSLLLKGGGVVSSLFRVTMGSPFGVRCPEKPPGRPWGPVPFPAPHTGEAACSQLPVPQVGLLATHPVAAPSTRKIATSDAPHAGDAGQVLPHPKAERAGAAISVAWSQRAVGGVKLRSEPRRPGPGSARALSMPSRRHPQQRKLSTALHTSLLRKEWMKGLTAELRTARARIQCMPRSYSWAQRLEPKTWASSSPKSGPQHTREASRI

SEQ ID NO: 942595 - protein, 97 aa, Homo sapiens
  misc_feature (22)..(22): Xaa can be any naturally occurring amino acid
PRGGEEKEEHAKNLMTIIQMGXKNNRFTKATFSILQLSTSHSWKKGWGEEEPGSPWGPWEGPGLSRGGGGGGPGGREAHFPGPWGGELPEECANSLM

SEQ ID NO: 942596 - protein, 235 aa, Homo sapiens
  misc_feature (76)..(76): Xaa can be any naturally occurring amino acid
CQELAAGGHSRLIVLHYNHSGRLAGRGGPEDVGFGALRGLSVAANCLVLLDDIFVWFLRPSLNHILSRHLVYYCLXKITLSDLLTGAAYLAKMLLSGARTFRLAPPKWFLQEGLLFTALAASTFSLLFTAGERFATIVRPVARSGATKKNRVYGFIGLCWLLAALLGMLPLLGWNCLCAFDRCSSLLPLYSKGYILFCLVIFAGVLATIMGLYGAIFRLVQASGQKAPRPAARCK

SEQ ID NO: 942597 - protein, 240 aa, Homo sapiens
EPQPGLGAEFLERLEARGGREGAVLAGEFSDIQACSAAWKADGVCSTVAGSRPENVRKNRYKDVLPYDQTRVILSLLQEEGHSDYINGNFIRGMDGSLAYIATQGPLPHTLLDFWRLVWEFGVKVILMACREIENGRKRCERYWAQEQEPLQTGLFCITLINEKWLNEDFLLRTKKENYKKEYPSFYKQMKMSWENRGVPEVLTHARYGGGSRRLRDLALNPLCHCSAGCGRTGVLCTVD

SEQ ID NO: 942598 - protein, 140 aa, Homo sapiens
MPRYRTSPPKICPRSGREQGENGTAGAPGLLWIDLALALALALALALALSDSGVLKAPAKAHPLPPKSQPDKLHHKKPQLRKIFGWGNLTYPIYKSIFTAINLGLKKEPKCGSRGLRGQQPVQSTKKNNNNRMPSHDPKL

SEQ ID NO: 942599 - protein, 261 aa, Homo sapiens
MASGRENRRSCPRGDAQSQLPTEMAPGQAPHQDTPWRDAHPFFLLSPVMGLLSSAWSRLKGLGTLEKWLVEEVKTEALVEDGLEGENRNLLAMNHKFWGKSTEEEAEDSGGPGEDRETVGLKTSSSLPEAWGLLDDDDGMYGEREATSVPRGQGSQFADGQRAPLSPSLLIRTLQGSDKNPGEEKAEEEGVAEEEGVNKFSYPPSHRECCPAVEEEDDEEAVKKEAHRTSTSALSPGSKPSTWVSCPGEEENQATEDKEQK

SEQ ID NO: 942600 - protein, 248 aa, Homo sapiens
  misc_feature (173)..(173): Xaa can be any naturally occurring amino acid
  misc_feature (175)..(175): Xaa can be any naturally occurring amino acid
GRLRRRRNGSPGWRAPRTGILLGLAAMELKVWVDGIQRVVFGVSKQTTCQEVVIAPAQATGQTGRFVLVQLLLEKERQLLPQKYPMGAQTTWDSVPDNVQFVLRLTRPNPAGKPSSNSCPPPERCLIRAIIPVKPRAALGCNPRKKLTPEPAPNLSLPWAYGPVTPTPSCCTXLXGLELKVQENAEELGHEAFWEQELRREQARERDGQARLQALSAATAEQAARLQALDAQARALEAELQLGSGGPW

SEQ ID NO: 942601 - protein, 180 aa, Homo sapiens
VSLVCVLVRPPPCCCCSFSLFFLVLCLTMWSLWALPAPASRVGAWVSLLLSVVSSWCSLLPRLPLGGPSDACFTTFLLFSFLAGFSSRLVWSSTVSLAVGTRKALPVSFPFSSGLTLPSALAAPVVAGLLSWCSPRPFRHTFPEGPSTVFWVTVMAWTVVMSTSTIPKLSWMTLARGAKQ

SEQ ID NO: 942602 - protein, 236 aa, Homo sapiens
MVWPWVAMASMWGPLIGLAPCCLLAPGGSLSDGGVCTACQKIVEFKKNEKKEENKKMHPKKINGVKLEMDGHLNGGFHQEVFLGKELGGFDEEAEGGGGRKLMVIFSKVDVNTDRKISAKEMQRWIMEKTAEHFQEAMEESKTHFRAVDPDGDGHVSWDEYKVKFLASEGHSEKEVADAIRLNEELKVDEENTGSPGELKDRWYQAEQPPAELLLTEEEFCRSPPEHSGECSGDGE

SEQ ID NO: 942603 - protein, 205 aa, Homo sapiens
MRPGGLGPLVSPLNLNTGGGLGNWAGGRPGPRKKEAPGGGGRAPGKLRGRLGKTASVGVLEQHSAASLALAWGCARGGAGGGGGMGHHPPGLLGWDGGDGPPLQPGGRPARGGHGLNVCAAYVVALSSLVVLWIPLSSYILVNPVGLIPSTYLLVPTGILGLMWSPDVKQQGCCPSTSHTFFLAGGCVELVPYAWIHPIVTAKDY

SEQ ID NO: 942604 - protein, 304 aa, Homo sapiens
MRAPRDRAGLLLCVLLLAALLEAALGLPVKKPRLRGPGPGSLKRLAEVSASPEARPLKEEEEAPGLPKKQLQAEPEEEGCWTVTEPAAKSPGKTTPPRTPEVTPLRLELQKLPGLAKKNLSTPNPEKQASASPEARPLREEEEARVLPRTHLQAEPDQEGCWTVTEPAALSPGNATPPRTQEVTPLLLELQKLPELVHATLSTPNPDKQVTIKVVEDPQAEVSIDLLAEPSNPPPQDTLSWLPALWSFLWGRLQRRGKIYGPRGEGGGKEEDEDYPSEDIEGEDQEDKKEDEEEQRSGSMEYKQ

SEQ ID NO: 942605 - protein, 75 aa, Homo sapiens
GDSRSVGGGGAGQVLCFPFPQHSAIFTLLGKAALDAYTRLVLLLTIESYEMQSYSAVGCSGVWKEGMSTATRVKT

SEQ ID NO: 942606 - protein, 293 aa, Homo sapiens
EGAAGKEAAKSAALPLAAGSLDAPGGGGGSVGGARPGDSHSPVPPPPQKAWTIDAKKWAVVVLAAFPSLGAGGETPKAPPESWKQIYFFRFVVNAAGYATIMVPGYFLVQYFRRKKEVETGRGLCFPLVKDCMFGNEPKASNEVPLAPPTEAAETTPIWQALKLLFCATGLQVSYLTWGVLQERVMTRSYGATATSPGERFTDSQFLVLMNRVLALIVAGLSCVLCQQPRHGAPCTGTPLPACAMCLAAGANTKLFKFVSFPTQVLAKASKVIPVMLMEKACVSAQNEHWEYL

SEQ ID NO: 942607 - protein, 226 aa, Homo sapiens
MLVFLLEGGIFFVRLLFEGFIGKVCELSIGMEDSGAYEGQPNAIIEKVFICIKKYDDKKRVEGCERRWIGMFEKMNGGFDIGGMRTSPQRLLNFVKACGDSHFIYVYSAMELDFYGRYFGSGKYDSAGINYPFEPLSSGLYHYYIMELAFYWSLMFSQFTDIKRKDFLIMFVHHLVTIGLISFSYINNMVRVGTLIMCLHDVSDFLLEEPNWPIMPSISGSVTPFL

SEQ ID NO: 942608 - protein, 209 aa, Homo sapiens
  misc_feature (95)..(95): Xaa can be any naturally occurring amino acid
LGLWCFGVAALVSFTLGGSMFSPIGVLALGFSSLVFLVFWVLGVGGLWFLGLRLVGVWGGVVGLLLFFWVGAGLGGVVWDFACVGLVLLAPGAWXLVGVRFFRVLLWLGCFLPSGLHSEDEADPEENQGCDASSPDCSQDTTSPAFWFPMHKETLRDLPGALRMLSTAGEISFFCSPYLRQLLGPGIGDGGGVQGGEAWEQLRCAGGLR

SEQ ID NO: 942609 - protein, 247 aa, Homo sapiens
  misc_feature (100)..(100): Xaa can be any naturally occurring amino acid
PVPPPPHEAWTMDARWWAVVVLAAFPIPRGRLGDSRRTYGIMEPDIVFPICSECMLDYATYMVPGYLLVQILQAEELPGDRKGPLLSPGESLLFLAMSPXPTNKVPLAPRTKAAETTPMWQAIKLLFCTTGLQVSYLIEGVLTGKSDDTQLMRATATLPGERFTDSQFLVLMNRVLAVIVAGLSSVLCKQPRHGATMYRYSFGNLSNVLSSWCQYEALKFGSFPTQVLDKASKVMPVKLMGKLVSQR

SEQ ID NO: 942610 - protein, 221 aa, Homo sapiens
  misc_feature (134)..(134): Xaa can be any naturally occurring amino acid
MEKSIGIQDHTTWWCWAGLCIPFAQDSTIFTLLGKQNWSINRFFFCHQGKKCKYLERGVTLEGGREKLGQELRELVGRVTVEPTYALLTKNSPKALTEECLPPRAQNKLLTGRWVTEGKREELPPGLTNALLQXWSSDTEKNTCILPFQPAPSEVTAEGDGGRVLFHFNPTGTFHPQTFCTGDSTGTAFFPRGFRRPRAYTLSRRAAKTTATPSPPNTVTV

SEQ ID NO: 942611 - protein, 74 aa, Homo sapiens
GQGTGHSSYHLLLGSLHLRGDFFAEVFCQKGHQHISQELEVLRIHMQLVTVQFTQLGKGALEIIQVLFGISQGS

SEQ ID NO: 942612 - protein, 254 aa, Homo sapiens
MASYYEKLEVTRSSVRCMTIKKADIGARLSNGTQTKTQKIKSLAEKKFKEVAEEDKKLYDKKKREIDERYGREGLTGTGTGPISGRNKAEEGTGFTYHLLQHPRRSSGEFFGSGDPFPELYEDLGPISELQNRGSRDSGPFFTFSSSFPGHSDFSSSSFSFSPGAGAFRSVSTSTTFVQGRRITTRRIMENGQERVEVEEDGELKSVKTKGVPEDLALGLELSRREQQPSVTSKSGGLRSNRPCLMPLDSDSVR

SEQ ID NO: 942613 - protein, 209 aa, Homo sapiens
MGGPKPHPESYVYRGPEAACKLRSTGTIEPQCPTIKEIRDQGSCGSCWAFGAEEANTDRICITHQIAHVSVEVSAEDLLTCCGSMCGDGSNGGYPAEAWNFWTRKGLVSGGLYESHVGCRPYSIPPCEHHVNGSRPPCTGEGDTPKCSKICEPGYSPTYKQDKHYGYNSYSVSNSEKDIMAEIYKNGPVEGAFSVYSDFSSTSQECTTR

SEQ ID NO: 942614 - protein, 149 aa, Homo sapiens
MWLHNEDIATELPYNIFPNLFDRSLSNDMGYLIAVCDVLAKKHNCQCTCSFLLSISYKPPQDLAFEGGTSVLDIVAQVYNQAAVCNLYFSFAIVTFRNLLGELNTLAGFFPALFVPVGPKPSPCLTQLAKNEKLAFYSEEMVSVRISFD

SEQ ID NO: 942615 - protein, 253 aa, Homo sapiens
ACGCSGCALLVLLARRAAAWDWAGSEKISGVRFTPVVCGLRCVHGPTRLPLYPDLRAPNATSVDSGAPGGAAPGGPGFRAFLCPLICHNGGVCVKPDRCLCPPDFAGKFCQLHSSGAAAPGPGLPGLTRSVYTMPLANHRDDEHGLASIVTIHVEHPQRRRWWLHQVERVSGPLEDANPEAVAPPEAAARAEAAAPYTVFAQSAPREDGYSDASGFGYCFRELRGGKYASPLPGLRTQEVCCRGACFAWGRSR

SEQ ID NO: 942616 - protein, 117 aa, Homo sapiens
  misc_feature (76)..(76): Xaa can be any naturally occurring amino acid
MCEVGSFVPDKVVAEEDEHDEQQEENESYDPTDDGVVGAGGGGKRNGVIKIAGCSEELLAENACCVRMLKQASCKXAKILLERKAKASGAPSPWRSFFQGRAQKCPLPFFHISAIAT

SEQ ID NO: 942617 - protein, 302 aa, Homo sapiens
  misc_feature (199)..(199): Xaa can be any naturally occurring amino acid
RAPKRLGGALSVNIVVHTLPIPSPRGFRLASAQPGSRPGSAMGAPAASLLLLLLLFACCWAPGGANLSQDDSQPWTSDETVVAGGTVVLKCQVKDHEDSSLQWSNPAQQTLYFGEKRALRDNRIQLVTSTPHELSISISNVALADEGEYTCSIFTMPVRTAKAPSPTAAMCNSTASPFMHWVKKTSQLRSKKAHSPPLXLLSSFWAAKPCQPRASPWQQRADQRSSTRATKPAIQARSQMAKTFHCSAARLTFQDYPGRMMGAGIVCSVNHESLKGADRSTSQRIEVLYTPTAVIRPDPPHP

SEQ ID NO: 942618 - protein, 59 aa, Homo sapiens
MLVALIGGLPLIFAGLVGAGGFSPLVIQLLRFIAVLPAAVPIRRRVQVLGNGDGLVCTI

SEQ ID NO: 942619 - protein, 277 aa, Homo sapiens
  misc_feature (119)..(119): Xaa can be any naturally occurring amino acid
  misc_feature (142)..(142): Xaa can be any naturally occurring amino acid
  misc_feature (146)..(146): Xaa can be any naturally occurring amino acid
  misc_feature (148)..(148): Xaa can be any naturally occurring amino acid
  misc_feature (166)..(166): Xaa can be any naturally occurring amino acid
MNSRDEEVPNSGAEMFRCGGLAAGALKQKLVPLVRTVCVRSPRQRNRLPGNLFQRWHVPLELQMTRQMASSGASGGKIDNSVLVLIVGLSTVGAGAYAYKTMKEDEKRYNKKILGFRLXTRTETEKGARYSAFRRRGKFPQXKSPXSXFLFLPHLEEGTRCLLLEXRYHTGIRDPGGPGSLHCYLEESCSLPIQCEPSSFQKEPVGFHDDPKCHKRHLRFQTVGIGKERSIYFPSQLPFLSSLSPGPGLKIVEWWVWAVPHWGRKGSTAGMWRDNNG

SEQ ID NO: 942620 - protein, 115 aa, Homo sapiens
  misc_feature (33)..(33): Xaa can be any naturally occurring amino acid
  misc_feature (85)..(85): Xaa can be any naturally occurring amino acid
  misc_feature (88)..(88): Xaa can be any naturally occurring amino acid
AEPYEKIIKTLLKKKITQKKRRGKRGRMWGREXFWRGPGGGSEMTAGAELLVETCPVHCAYALTAGAGSSPSLARAPKLHAPSRXPLXPEAWYLLLTKVALRKKQKKDPKLEKGL

SEQ ID NO: 942621 - protein, 243 aa, Homo sapiens
LVDPTYPPLPAKASSPIMPYPTQGQEKQEHPLGRSPSSYTTPPHYTPGLLWSTLLSTNQPTNLDHRETLTSPTSFDAIYHTTLTPSHIFTNTHPSSPSNTHTTHSSSSHHFNHHTTKQPISSSHSSILPIFPTGQLRYQENISKPLPTTSSLLKTYITSKSTYHHTPASPLPCRANGGEAKREAGSGLGRSSPGRQAEPACAQIGLGAREVFDYPCGIYYGADDREQQAVKLPQKEKHSIRQC

SEQ ID NO: 942622 - protein, 249 aa, Homo sapiens
  misc_feature (108)..(108): Xaa can be any naturally occurring amino acid
  misc_feature (112)..(112): Xaa can be any naturally occurring amino acid
  misc_feature (143)..(143): Xaa can be any naturally occurring amino acid
  misc_feature (145)..(145): Xaa can be any naturally occurring amino acid
  misc_feature (178)..(178): Xaa can be any naturally occurring amino acid
MDSMRDLASRCLLLLPLLRQLLLLLPAPELGPSQAGAEENDWVRLLSKCKCVNNVAVELKSAFEETGKTKEVIGTGYGILEQKASGVKYTKSDAVKRNKLKTLQKLLXYNLXKEEDGSNRFAKGCEKTFETLHNMVHKGSSGXWXIPYELWTESPAEVADLKKQCDVLVGKFEAVIAXWSQQPPAENLSCILCAIHVLKGKDTSCLAEQWSGKKGDTAALGEEEAKKKSSRAKAAGGRNSSSKQRKESG

SEQ ID NO: 942623 - protein, 185 aa, Homo sapiens
MARGAALALLLLGLLGVLVAAPDGGFDLFDALDDNENKKPTAIPKKLSAGDEFYLGDAVFDGENYDPRPPNPPKPMLNENTNNPSSFGSFLDADFADGVSGGEGKGGSYGGGSYRKDGEEADAPGVIYGIFGAVVVAVAGAISSFIAYKKEKLCFIENAEQGEVDMESHRNANAEPAVQRTLLEK

SEQ ID NO: 942624 - protein, 81 aa, Homo sapiens
LFTFTYSAIPGPPGALNEKAKSREITADLTGLLPKRTSPVRIPAKRVKYLGYLCSDSLEMEELFQSISCLPNIHSRISPTK

SEQ ID NO: 942625 - protein, 49 aa, Homo sapiens
MVILNFIGSSRIRNTESNNFTDIPIFISLKFRPLIRSCPGKIPVMLCLF

SEQ ID NO: 942626 - protein, 155 aa, Homo sapiens
  misc_feature (147)..(147): Xaa can be any naturally occurring amino acid
MPYFMEEKHSPRQPGASAHLLPDGELGGEHSRHIDGHGLPRGRPKIGEEAVPTTLVLDPAQQPLPEEVQFPAHDGSYQFRHLGAQGLEHQFAGKVEKGDNPAPVEVAVRKHVSCHLEKDLWGGVFFHGGNYPLQLHVTFHFVPDALXKFAQLLGG

SEQ ID NO: 942627 - protein, 257 aa, Homo sapiens
MKHYYPGTPPWTFHPGSESGGPPPPPPPPRTDCAASPGLPPQRAAIRSVPEETSSSTCFNWAAGIPTCTLSRSLISPSPPPGTPAPASRLTPAPPPPALGRVHLREASAVLLSPSSTGRCLSIHPAAHVWQAGEGVELNGRRPRGERGRFGPSIWVPGALGPPAMADSGDAGSSGPWVEIAHQQQKEKQGSRSGGCRLPPSPAPGGAHANLRLPSPGLDQQLPGRTSTPIFSGGAGEPPNQTSDYGGKSGSSRRNLK

SEQ ID NO: 942628 - protein, 155 aa, Homo sapiens
  misc_feature (3)..(3): Xaa can be any naturally occurring amino acid
  misc_feature (22)..(22): Xaa can be any naturally occurring amino acid
TAXTSWYWLQILYKGVYLSHEXFLFGFFLRNILFEILQQHWFVHQILILELRCFVIFLGFVLVMELLYVGQLNFFVLLPGPLVQCLQTNLGRSLEVDEAMSCDPAGKLPQEKRMPVLIDMPLDVTEGTIFKKILCKDIPVTVHRPLKDLYWLPGL

SEQ ID NO: 942629 - protein, 258 aa, Homo sapiens
PCLAFQCSSIWEMNLLAGAGESGGSLPPALSDLFLAPLLKKRSRPKADIASFEYCETGPVQKRVSCPRLPCSGQGAGGAEGANDAVCEVTEEPMGITLTLNEELSCTVARILHGGMIHRQGSLHVGDEILEINGTFVTDPSVDQLLVAMEEAKGLLSFKVIPNQQSRLPALQVFMRAQFDFDPPVDNLIPCKAAGLVFAAGGIFQIINKDDSYWWQGRVEGSSQESAGLIPSPELQAWRVASMAQSAPSEARAAVPLG

SEQ ID NO: 942630 - protein, 134 aa, Homo sapiens
LSSHETVLASLEERSRFFSDVIAPPGVLLSFPITFLLPATIPRPPPLPPPLPPLPPPPRPRPPPAPPPLPPPPPPPPPPPPPPPPPPPPPPPPPPPPPSPPPRPPPPPPPGPPPPPPPPRPPPPPPPAPPAPPP

SEQ ID NO: 942631 - protein, 172 aa, Homo sapiens
  misc_feature (9)..(9): Xaa can be any naturally occurring amino acid
  misc_feature (20)..(20): Xaa can be any naturally occurring amino acid
  misc_feature (38)..(39): Xaa can be any naturally occurring amino acid
  misc_feature (60)..(60): Xaa can be any naturally occurring amino acid
  misc_feature (63)..(63): Xaa can be any naturally occurring amino acid
  misc_feature (65)..(65): Xaa can be any naturally occurring amino acid
  misc_feature (76)..(76): Xaa can be any naturally occurring amino acid
  misc_feature (107)..(107): Xaa can be any naturally occurring amino acid
  misc_feature (132)..(132): Xaa can be any naturally occurring amino acid
  misc_feature (144)..(144): Xaa can be any naturally occurring amino acid
  misc_feature (147)..(147): Xaa can be any naturally occurring amino acid
  misc_feature (159)..(159): Xaa can be any naturally occurring amino acid
  misc_feature (162)..(162): Xaa can be any naturally occurring amino acid
  misc_feature (165)..(165): Xaa can be any naturally occurring amino acid
  misc_feature (168)..(168): Xaa can be any naturally occurring amino acid
  misc_feature (172)..(172): Xaa can be any naturally occurring amino acid
PQPPAPVPXTDPSGTMHPAXHPTQPDPRSPPPPPETRXXTPVTTEKTSPETEKKEEKKNXAEXAXGNPHADGGRPXQMWQPNLEEAPEGNKEETPNEKQEGVARVEXEQHPDKAQRNRKSKNPTPKSARKGXRMKRENRGQRAXKAXAEYIRQQKRDPXQEXRDXAEXTTPX

SEQ ID NO: 942632 - protein, 69 aa, Homo sapiens
DAAPQLGKRKREWEVEEEEEERTEEKEGGVGNGICALVGLVSSGLGEGGGGGGGGGGKEEFGGGGGKGG

SEQ ID NO: 942633 - protein, 165 aa, Homo sapiens
  misc_feature (19)..(19): Xaa can be any naturally occurring amino acid
  misc_feature (117)..(117): Xaa can be any naturally occurring amino acid
  misc_feature (123)..(123): Xaa can be any naturally occurring amino acid
  misc_feature (135)..(135): Xaa can be any naturally occurring amino acid
  misc_feature (142)..(142): Xaa can be any naturally occurring amino acid
  misc_feature (145)..(146): Xaa can be any naturally occurring amino acid
  misc_feature (151)..(151): Xaa can be any naturally occurring amino acid
  misc_feature (155)..(155): Xaa can be any naturally occurring amino acid
  misc_feature (163)..(163): Xaa can be any naturally occurring amino acid
RRRRRRKAHKPGCKCLKRXPSPQKSKPKSTGRQSPEGAPRRTACHTPGPPPRGRTSRARPMTESPVQHPRMQVKHESPEAPRNQHNPEAPKHKHTPKAAKSDHRTTRRSPPHAQKRXSKPGTXGTPKAHRTPPTXQPPSHPXPEXXQTHRXPPQXKEEEKRQXPP

SEQ ID NO: 942634 - protein, 34 aa, Homo sapiens
MLYTHWMLRLWDSRWGKVIFLLVISRLSDQAEVL

SEQ ID NO: 942635 - protein, 316 aa, Homo sapiens
  misc_feature (6)..(6): Xaa can be any naturally occurring amino acid
  misc_feature (10)..(10): Xaa can be any naturally occurring amino acid
GSGMKXPPRXLPTLSSDGATPHESETTSYPPHANWHPGPNASTNGGATTIHTDTRNGTSGDARNADASGACDRSDGSGADTARALLWLGQALRGPLWSEHVAPDGRIYYYNADDKQSVWEKPSVLKSKAELLLPNVRWKEYKSDTGKPYYYNNQSKESRWTRPKDLDDLEVLVKQEAAGKQQQQLPQTLQPQPPQPQPDPHLCLLAPPQCPQASWNLSQVGVKIVMCWRPPAPGTGFLQQLEEGPAVLDSISHSRRRRNQSQNQRGLASVGATVEKAKQAFKELLRDKAVPSNASWEQAMKMVVTDPRYSALPKLS

SEQ ID NO: 942636 - protein, 155 aa, Homo sapiens
  misc_feature (129)..(129): Xaa can be any naturally occurring amino acid
TKGRWAGLRPPPLLQGPLRASAAGATRSPNTMVRYRVRSLSERSHEVYRQQLHGQEEGHHGQEEQGLSPEHVEGLREGPMAQSHYRRKHCSRRRLQRVSFFVVLLRITLARRRKRRLLAGHREEEQRRXLQESSEEEHARKATKASLWPPHPPVW

SEQ ID NO: 942637 - protein, 255 aa, Homo sapiens
MKFLLILLLQATASGALPLNSSTSLEKNNVLFGERYLEKFYGLQINKLPVTKMKYSGNLMKEKIQEMQLIIGSDGPPGPLDPSPLKDDGSPIRMMRVPADPSFQGNARGARIEENYITYRVNNYPPDINPEDVDYAIRKAFQVWSNVTPFKFSKINTGMADILVVFARGAHGDFHAFDGKGGILAHAFGPGSGIGGDAHFYEDEFWTTHSGGTNFFLTAVHEIGHSLGLGHSSDPKPVIFPTYKYFDINTFSPLC

SEQ ID NO: 942638 - protein, 143 aa, Homo sapiens
  misc_feature (128)..(128): Xaa can be any naturally occurring amino acid
  misc_feature (130)..(130): Xaa can be any naturally occurring amino acid
  misc_feature (137)..(138): Xaa can be any naturally occurring amino acid
  misc_feature (142)..(142): Xaa can be any naturally occurring amino acid
IESFTDKGRGLVTTAIIQRGTLRKGSVLVAGKCWAKVRLMFDENGKTIDEAYPSMPVGITGWRDLPSAGEEILEVESEPRAREVVDWRKYEQEQEKGQVDLKIIEEKRKVHKEAHQKAREKYGHLLWXEXFIFKFFXXQINXP

SEQ ID NO: 942639 - protein, 274 aa, Homo sapiens
  misc_feature (185)..(185): Xaa can be any naturally occurring amino acid
  misc_feature (193)..(193): Xaa can be any naturally occurring amino acid
AQPRQQRAPRCQPIFRTPPAGTADAPGAAEGRPGGRTDARSRALSPAAPRELGGDPSPASRGAPSPPRAVLHAVPQLRAPAGAPPRRPRAPRAPHRAAYLSMHRFIGVNSTAAAFPCHPNFFFTCLNSNTLFSINMEITELEFVQIIIIVVVMMVMVVVITCLLSHYKLSARSFISRHSQGRRRXYALSSKRXLLPSESTVSGNGIPEPQVYAPPRPTDRLAVPPFAQRERFHRFQPTYPYLQHEIDLPPTISLSDGEEPHPTRVPAPSSFGTR

SEQ ID NO: 942640 - protein, 281 aa, Homo sapiens
EAAAAGRAAGPGGARPAPGARGAGGSRGARPQPPGQGPAREQDEEAQPPATTARRPDASRASEQGKGGGAPTAAPSGARGRGARDAPSGTRDGQHEPSKPGKAGGERARQGGEPRRSKDRHAGPENRAGEERPGDDRGGGSAPEASGTADGAEGPREARNGNGRGASRERAEREAEESARQKTEGRNKDNEGRRAKGKKRKTKGQEGTAGGEGKERRKAARGNRPRDTGNRETSAGGRGPPRKGKEEESSRGEEEEERAKGRGGEGARAEKGKERRGKKWK

SEQ ID NO: 942641 - protein, 174 aa, Homo sapiens
  misc_feature (70)..(70): Xaa can be any naturally occurring amino acid
GGAGSSELRAAASGSHCGRRRCPAALGCRTNKAWATAPQKPTQLDAGADKKGGRSRVGGRRAGRRTGAKXGNSRGRRDQPLAGPAGEFDDLTRIPLPRVGEETEASQENQDPEKYSFIATRYTKDAQRSKSQFSWMDMAESVTTTPPPKNLGREIFCSRCDLHSSFHLTANSFI

SEQ ID NO: 942642 - protein, 264 aa, Homo sapiens
EGERKQEKRRGQRARGRGGGSKAGEGEGEGHGGTGGRAGGRGGRAGGARAGQAAGAVGEDEGEKHGDGGQVDEAAEPSAERGDRGEPATAQRESRPPRGSGNGPQRQSPGGERPQERGGGGQRQQQSGERGGQGPGEGGPERAGEAPAPPRRQGQQGTQAGAREREPEGQRGEGAGKRAAGEREEADRDSGHGGPRDRGRDEKPEEKQQPAAGTRAAGERHKPRADTGSAAQARGAGHEGRDGRRRGAQPGRARAHTDGQGGRG

SEQ ID NO: 942643 - protein, 101 aa, Homo sapiens
TPESQARFGQSVKGLLTEKVTTCGTDVIALTKQVLKGSRSSELLGQAARNMVLQEDAILHSEDSLRKMAIITTHLQYQQEAIQKNVEQSSDLQDQLNHLLK

SEQ ID NO: 942644 - protein, 289 aa, Homo sapiens
TWWIFKHSEEEIMTREEECASISPELFHRVFLQRDIKSGVTLGKTSYLPDSGEPPKKDGALEERQRHAEAQAGEQGHERGARQPRPARGKGGAGHSRPRRGRTGAGHQAQRKGGGGGETGLGQGGQAGRKRRTARDPPAAAAQRAGRTGRSHDTGPQKGGLDPKRERRRKGEVKGQSGGLAGTEERGKTVGPRGQQLKEHKFLEEGKNDKERKEPSKGKRGAEGRSRKRGRKGERAREKKAEKKKKGGAQAGHQRPGRAAQHGGRPKQKEQGGQGGKTSPGNTARAQRH

SEQ ID NO: 942645 - protein, 122 aa, Homo sapiens
  misc_feature (33)..(33): Xaa can be any naturally occurring amino acid
  misc_feature (45)..(45): Xaa can be any naturally occurring amino acid
  misc_feature (54)..(54): Xaa can be any naturally occurring amino acid
  misc_feature (64)..(64): Xaa can be any naturally occurring amino acid
  misc_feature (115)..(117): Xaa can be any naturally occurring amino acid
MGEFISSGTTRKKKLITLKNVKKYGGNSVGDRXGPLGDPEKEMRXYWGELRKEXAKSPPGAADXDIKEPVEKQTERDETNAENQTEGQITGTAKPNFPNHGGGEAKGGGGGGAEXXXRKPPH

SEQ ID NO: 942646 - protein, 115 aa, Homo sapiens
SSLRTNTSLSCLKLQVFCNILGLNIYPLIFHPRQICLYHGNLVQESDILMYLIQALSATLRFKDYTNLAVFPLQPAKTAFALHSASSNEATTKFTKSGIEFDVYSCILCVFLCMK

SEQ ID NO: 942647 - protein, 109 aa, Homo sapiens
  misc_feature (102)..(102): Xaa can be any naturally occurring amino acid
GGALPGEGSSELLAGTSSVMEQMKRKSSEACGLERQLSSCGYYRCHCQFLTAGPCGWSAAPRTQYAFQPRLSVYIPSESVCLRPEPVILPPIQTCPWFLGAXRALAFDN

SEQ ID NO: 942648 - protein, 161 aa, Homo sapiens
  misc_feature (46)..(46): Xaa can be any naturally occurring amino acid
  misc_feature (49)..(49): Xaa can be any naturally occurring amino acid
MAPCLSARVLLFFPTPGRLRLAEAWGEKKSKIRCHCRIIGISYAVXALXIVGEEYIPFNQYAGKYVLFVNVASYGGLTGQYIELNALQEELAPFGLVILGFPCNQFGKQEPGENSEILPTLKYVRPGGGFVPNFQEFEKGDVNGEKEQKFYTFLKNYCPPN

SEQ ID NO: 942649 - protein, 118 aa, Homo sapiens
MPLRVCSELADRLVALKVGWEVAYAVHGLHQLWQVGLDLIHGADFQAHLFMTVMKSETTFAMQQLRLPFWSLMVMGRSSLIRSMASGQFRRNLRQILSIELISDLWTCLKAALYWTRS

SEQ ID NO: 942650 - protein, 221 aa, Homo sapiens
GRRPGAEAPGARNAFTKREGGKEEAAEQRQQREGQGTGKAQPAPGQAAGAGGAAGSRGGKGGARRRGGAKERQDPRKRAPARMREGNDIERPAGAGRKGISNGERSGLIQGGKKPGQGKDSSTQDRGEGGPTQGSGVGRINTISDQVRGGGVSVRPCPCAALMQSELPQPCCLLTQKHSPVMGLVTYHIPKTTTFLVLLHNAKNSLTHQIGEIVAILSSDQ

SEQ ID NO: 942651 - protein, 275 aa, Homo sapiens
  misc_feature (67)..(67): Xaa can be any naturally occurring amino acid
RSPQVPARGPRRRPPPGGPEGSGARRHHAQLYRARRASPEPPLSPTASSTPGPPGRTMSHGPSPRLXESPQLSKGSLLTILGSPSPERMGPADSLPPTPPSGTPSPGPPPALPLPPAPALLADGDWESREELRLRELEEARARAAQMEKTMRWWSDCTANWREKWSKVRAEPNRAREEVRHWRQALDALTKELAGARRERQRGAGASCEGTGAASSARLEGAPGGVRRPDAPTAPERKRDPEPSCVDVWFRRGRQEAKELEVGGRACLKSMPEEY

SEQ ID NO: 942652 - protein, 353 aa, Homo sapiens
LRDEETSSEQLSDFPRNRTAAWKEAENGNYWAQAPALEHVQGCPEENPAREQSPSPNHSPDPPATGLCQSTQTHSRKRMAFRFPFNGQASTAKKSSCLTGPPTLAPLSLTGGIPVQSWCGASSQLLQQAVERAQLLLEVALVLTILLLQAGQHLVLSLQAGQCAAGLGVLRVGVLAGGLGEAQCVRHLLRGIKVGRRRGWAVISPQRCAQQAWEEVYLEIVLQLLWGHLLGQLSLLLGEHLLRDQVVEQCDHAHGEHLRALLLHQGPQDLQPPELQELPLGIGEVAQRGAQCKQDLLLCSERLLRGQDDQQLLQGSPFDGLHLDLGVAGKAAPAQTPILFTRGSVLFSPLITL

SEQ ID NO: 942653 - protein, 242 aa, Homo sapiens
SETSGSRQTLFLDHPPTILGTMAAVAAASAELLIIGWYIFRVLLQVFRYSLQKLAYTVSRTGRQVLGERREEPPTEAPAPSPGRPYDEVLVCIWASKGESEEEECGVLCVSLEEEELERSVRRKVEERRRSKENEEDKRFIDKEFEKVKIRGGVGRGGGIGGEEECRFGDRQRIVIWTKSGQHHPSPEAKAMPAGPTMEIKTPTSQQNGHSDIASRRPESWCSTNSVPVWRDWRAQLRKEGG

SEQ ID NO: 942654 - protein, 130 aa, Homo sapiens
MPQHSTMLRIISKIMITATTMAAMPMRYSFPEKRSSIFWWQSSLKRLLMMLLPEGHKLFLSTEVVKAVSVLEPQQSSVSWKVFTTALALLASSSTTACCEGLVIELLHILGDLVLVDKAQMPAAAHRQQD

SEQ ID NO: 942655 - protein, 153 aa, Homo sapiens
NISFHQTPPPTHTNSSQLSSIHLILITLSTNNFNLFTSFITSTLQYIYINLSSNFHPQTTKLYHHIKSTNHHSHPYNNIFLYKLIKLLLYINKITSALTTHFLSYSIRSLLSAASPHHLRFFTHVSPKHTIQNSDRYKTQRLLSQNTITLRDV

SEQ ID NO: 942656 - protein, 107 aa, Homo sapiens
MAGVGRVRELGPCASIAFGQATGVVDGNVARVLCRVRAIGADPSSTLVSQQLWGLAQQLVDPARPGDFNQAAMELRGHSVYPTAPTVQPVPCGEPVPGIQTVEQDSS

SEQ ID NO: 942657 - protein, 106 aa, Homo sapiens
FFSFCIMPILESSESWARGSVVSGGQGTGHFSYHLLPGSLPLRGEFFAEMDFQNGHQPISQELEVLRIHMQLVTVQFTQLGKGALDIIQVLFGFSQWFFAPSSHFR

SEQ ID NO: 942658 - protein, 82 aa, Homo sapiens
MQPEASSLSENRDASGPRRGCWLWGKERAAQCDRASAHGSGSASHVCGPGPDSTPTPSPAGTGLPLLPVGRCPRWATSPGPR

SEQ ID NO: 942659 - protein, 44 aa, Homo sapiens
MVAWGAQALMVASSLAVSRSSCSWGLKITELTTSSCRSLARQTV

SEQ ID NO: 942660 - protein, 149 aa, Homo sapiens
  misc_feature (37)..(37): Xaa can be any naturally occurring amino acid
  misc_feature (59)..(59): Xaa can be any naturally occurring amino acid
  misc_feature (73)..(73): Xaa can be any naturally occurring amino acid
MVIALVSFLVLLSLGFFFTVSLAFSEWSSGKKLIGRXWKPTEFPGVAVLGISSEWGMFXKPTVTQATKKIIFXVLVVVKKLLKDHGRVPGVVLVEMLLLHSSDSRYLVTARGYLAQVMACSSCQPGGSPWSAMEWLCRRYCACGPTGSP

SEQ ID NO: 942661 - protein, 142 aa, Homo sapiens
  misc_feature (74)..(74): Xaa can be any naturally occurring amino acid
  misc_feature (86)..(86): Xaa can be any naturally occurring amino acid
  misc_feature (91)..(91): Xaa can be any naturally occurring amino acid
  misc_feature (94)..(95): Xaa can be any naturally occurring amino acid
  misc_feature (97)..(97): Xaa can be any naturally occurring amino acid
  misc_feature (100)..(100): Xaa can be any naturally occurring amino acid
  misc_feature (106)..(106): Xaa can be any naturally occurring amino acid
MAAATGPSFWLGNETLKVPLALFALNRQRLCERLRKNPAGAGRRPFVVVQGGEGRPAHCTDTGVVFARRFFFYXWRGVVREPGVRXGGNRXVEXXGXVRXRVLLSXGVPCQAKCQPLEMDKEVNFQKEAPFTRKKANARCDR

SEQ ID NO: 942662 - protein, 133 aa, Homo sapiens
MWLVMEGAVVQVGLALGTRGLAQLHVQEVVHPSHDLLAGAHHLQRAAVVHVVAGFVVLADGKVQFTPHTLLLHAGVHGASHQERRLAGTRAGSRAHGQGHGQDEQQEQRGAQGPGHGRLGRGKGELGAGEKLE

SEQ ID NO: 942663 - protein, 118 aa, Homo sapiens
MYFAVFLASVSATCFLAGRVWVCPDGLERGGGGPCVFGPGFGGRFGFGGCGAWLVSVRPVGGFARRLAVGVPPRWVCGSNVGFGVCSCVCVCACGGLGLPFVFSLAPLPVSHPFPSGF

SEQ ID NO: 942664 - protein, 127 aa, Homo sapiens
MALFGVGKVDDEMLSITPLTFEVSIIIGKKVLFSEMVMVVDVSDLFQGTMSKLRRAKIYKWSYEGQPSMKKQKLMREEDKSSQRSEDLAAKSGAGVGCCDGEEIKQRLRSMHWGPLFLVVRVGKSKR

SEQ ID NO: 942665 - protein, 280 aa, Homo sapiens
  misc_feature (32)..(32): Xaa can be any naturally occurring amino acid
ALTPSTLQDAAREDPTTRGRLRGPREPRRLRXSPTPPPPPLTGPRSRGRSRRLRGGGGRPDEPSSARSRRPASQEDMFWNFYLHTSSHLDTLLQREDLSLPELLVRVKIFCRIANVVKRKFAGTSCFSHTILQAMVAWVTQEPPDSGEERLRYKYPSVACEILTSDVPQINDALGADESLLNRLYGFLQSTGSLNPLLASFFSKVMGILINRKTDQLVSFLRKKDDFVDLLLQHIGTSAIMDLLLRLLTCVERPQLRQDVCQLAQRGEDRPAADLADPPV

SEQ ID NO: 942666 - protein, 241 aa, Homo sapiens
  misc_feature (114)..(114): Xaa can be any naturally occurring amino acid
  misc_feature (120)..(120): Xaa can be any naturally occurring amino acid
MAGPRPRWRDQLLFMSIIVLVIVVICLMLYALLWEAGNLTDLPNLRIGFYNFCLWNEDTSTLQCHQFPELEALGVPRVGLGLARLGVYGSLVLTLFAPQPLLLAQCNSDERAWXVGSGVXGCVLSDGGEGGWGPLPRLVWEWVQVYHPGAGFDSLGQRQAFTPLLDHSLAVFPLRAVEGWEQAGELLKAYVIARVQFQPWSEVAHLLSHLILQLTLISSSSDGTTTEEVGPLCQRGRGEAR

SEQ ID NO: 942667 - protein, 223 aa, Homo sapiens
ARGGYLQRRSSVFPFISREPGVPPRAPRRSRQSALSPPSAALHARGGGSALAGSEGAAAVMLSAIYSVLPGLLFLPLLLNLCCPYFFQDIGYFLMVASVGLVGFAVRAAVAGAHPPAGVPGEFSPDATQGFSPLLPQDSHLPAGGLALNQVARALLDHLGLCQGDCVALLMCNLLSYVWLLLGLVELGLCHGVPQLQHPREVPAALLPVLLVRMCCWCRQNYK

SEQ ID NO: 942668 - protein, 255 aa, Homo sapiens
  misc_feature (124)..(124): Xaa can be any naturally occurring amino acid
  misc_feature (126)..(126): Xaa can be any naturally occurring amino acid
  misc_feature (129)..(129): Xaa can be any naturally occurring amino acid
  misc_feature (150)..(151): Xaa can be any naturally occurring amino acid
  misc_feature (156)..(157): Xaa can be any naturally occurring amino acid
  misc_feature (170)..(170): Xaa can be any naturally occurring amino acid
LNTLLLPGTLLSGPCPGSCRAAAPFSEKRSLVGSRTGLSVEGGAVRGSVLGCGFLCLWAACFGLSLYVGVYYKWLLCQTRSAPHLDTHSPVAFQCSGRKPVSLDVKLTLMGWGRGLGRRRGRGXRXKSXSSRHAKQQKRSQPKFSYIFQXXTKLLXXPEKSLPVPSWSCXPPQGVFLPSLSWCGLKGHSQTRSPSSEAEACTHPSTATSARPRGSWRASFAIPIVTAMAGLTHGAVRAASWSSPLPSACPPLPAS

SEQ ID NO: 942669 - protein, 177 aa, Homo sapiens
MAGIPGLLFLLFFLLCAVGQVSPYSAPWKPTWPAYRLPVVLPQSTLNLAKPDFGAEAKLEVSSSCGPQCHKGTPLPTYEEAKTISVFMKRSMQWSRTETQVGIYILSSVEMGPNTETQRSSGKSRRKRQIYGYDTHGSRTFLGTAFPAHPPLILTPTVKYVTRGWARAPCVGRENMS

SEQ ID NO: 942670 - protein, 68 aa, Homo sapiens
  misc_feature (40)..(40): Xaa can be any naturally occurring amino acid
  misc_feature (58)..(58): Xaa can be any naturally occurring amino acid
  misc_feature (60)..(60): Xaa can be any naturally occurring amino acid
EGSSELLAGTSSVGTDERKFSEVVGSTPVASSGTQGHAVXTAGPGLVSSLVRKVPAAXVXSLKVCAAT

SEQ ID NO: 942671 - protein, 208 aa, Homo sapiens
  misc_feature (78)..(78): Xaa can be any naturally occurring amino acid
  misc_feature (81)..(81): Xaa can be any naturally occurring amino acid
  misc_feature (84)..(84): Xaa can be any naturally occurring amino acid
ISTASRHNKRLKRTHTTSKAQCFIARRIPITPQAKTHFQPLSCSLLLSSFPPLPQAHLPFSWHHQLMPAQCMPMALLXQCXITXIFNSTHRAHTIFAQPAHIAPSFQHASLHPLAHRVFWIEDKVKTCTGTACCIISKLMNMESMQAFSQSFNVPHTFTASITFLLLEIKDALHWAAPPSPRTRPSLAITGQDTPQVLDPQDCNENPT

SEQ ID NO: 942672 - protein, 125 aa, Homo sapiens
  misc_feature (15)..(15): Xaa can be any naturally occurring amino acid
  misc_feature (20)..(20): Xaa can be any naturally occurring amino acid
  misc_feature (24)..(25): Xaa can be any naturally occurring amino acid
  misc_feature (113)..(113): Xaa can be any naturally occurring amino acid
  misc_feature (118)..(118): Xaa can be any naturally occurring amino acid
SPRGRSPALALSAAXAAAAXIAKXXPRAALLPLLLLLLAAPASAPCPGPAARRLWPPRCPNTLRTGALPAATGTMRRRPGPGSVRLLRSVRRARRRRVRPASRPVRRRAAMRXALRFXNHHKHFL

SEQ ID NO: 942673 - protein, 273 aa, Homo sapiens
MVPRTLLLLLSGALALTQDAGRASQSSGGYFYYLQCASRPLRRGVGAAFIASERLSLASRRREFVACFGTRDSSRAHRDGAEGAGGMMSRRAPDVLCEQETRECERAQSQTDRVDLGTLRGYVTEQNEEGSHTIQNNVWLSKWGRYGALPEGDREDAYNGKDYITLNDDLPSWTAADIASEITITHIEEAVHAADSMKAYLEGRCVEWLRRYLENGKETLQALDPPKTHMTHHPISDHEATLRCWALGFYPAEITLTWQRDGGGPDPGQGARG

SEQ ID NO: 942674 - protein, 67 aa, Homo sapiens
  misc_feature (5)..(5): Xaa can be any naturally occurring amino acid
  misc_feature (13)..(13): Xaa can be any naturally occurring amino acid
MAGVXLLLFRRHXQSRPLLEGSIPCRPGLHELRVLGLLLPIPLPGQCDLRRLEAQGPAPQGGLMVRD

SEQ ID NO: 942675 - protein, 211 aa, Homo sapiens
RWPPGGWTSRGRWELRCDAVRWFQPRCNGSRAKVRQRYFFRSFLVSSLGGLLAVALSVAAAYPRALSRLRRYPLAEKGSLMGKEALEKREHEARRDTNTSVCSSLNNSRTPRWDRCVGTVCWFQVLRRPLPAGRLGAPREPREGVAGLSGGARGSAVGGGGPGKGGENFLESSKEGPYLAWERVGIFVWYSEGREYSAPPGEKKWVPERTT

SEQ ID NO: 942676 - protein, 283 aa, Homo sapiens
  misc_feature (70)..(70): Xaa can be any naturally occurring amino acid
  misc_feature (192)..(192): Xaa can be any naturally occurring amino acid
  misc_feature (200)..(200): Xaa can be any naturally occurring amino acid
GKRGGPNPGRQQPPLRIQTFPAVRNTEGNRSTTPHRAGAHQRSQHRAHHPRAPQAPRRSPPARSRVGGAXQGPKEQRKQPHHSLGALGEAEEAPPASPTPHVGGARFNRKHNRQQQHPHQQGQGEAVVQALGAALVNGQNPLHQGQQEEGGAKNTRDTEGRNKTESQKHSTHQHKHKGVQGQQTNGDLGQQXHVGERMAXDMRRALFSSLLRQDITFFDANKTGQLVSRLTTDVQEFKSSIKLVISQGLRVHPGGRLPGVPVHAVDSLTLLLMVAHSPDGSGT

SEQ ID NO: 942677 - protein, 244 aa, Homo sapiens
MSDFGAARNLLEKEELRSELANTDVGDLVLTTLCPALHVLVAEGLKPFQKELINGKRKKKPLKNGGGVGENQSSNTRSLGTLYNKVNQYKPAEKNYRGFHAFILGLLNTKQLKLWFSSLQEDAGSWWEQLTQASRVYASGGTEGFPLSRWAPGRHGTAAEEGAQERPLPTDEMAPGRGLLVGKTIWSAWGPAENENGALKSRRPSELAAPDSECVGSCEAGGPPEMPSPQSLRLSTKMGNPEAV

SEQ ID NO: 942678 - protein, 218 aa, Homo sapiens
PNGGEARMVRHHLRHKDDRPQVSGISTPRRGGGGGEEGATPQSAAWSIREGRAWGRASDASAEMVWNRVRNRAQVQRRALGLPPESHLGAEHRAAIDMLGQRGPQRWLCVGTRGKWLTLAVDRYWMVPEGLDWCSAVGARTRSSSFNGELNHCWAQQDNAPKVGGPQQHFQVVGHLSPTSQNCRAPARKKLSMAEWKKNSEKATYTIRSSSCSWGSLP

SEQ ID NO: 942679 - protein, 103 aa, Homo sapiens
LGALVSEIRESEIGESDTGQSDTGQSNTGELDWASGGERLWDNYCYNFEGSRKKIWIILKKNLEKKKIVCVSTLNEEMDSIKSKQNEEKKKIEKNTERKKKLI

SEQ ID NO: 942680 - protein, 197 aa, Homo sapiens
  misc_feature (116)..(116): Xaa can be any naturally occurring amino acid
  misc_feature (121)..(121): Xaa can be any naturally occurring amino acid
WRFAIVRPKLASTGVISAHYNLRLWVLAALLPLPLVSLGFRAHASTPGYFFVFSRDGVSPCWSGWSRTPYLRLSHPPLLLCCLGVTGVGDSPAFFFFFYKKGAGEIFYRGEDRSSXSRAPXGVPSPGGAGTGFLGSVPAGRGSGGGGGFLGSVVFCDLCRKVFPPGLVPWEGNFGFLFGSTLLGVWMPTGITAGLWC

SEQ ID NO: 942681 - protein, 262 aa, Homo sapiens
MQRNERWERIQRALKLEYPGSCALGLIGQTILTHSKNKEKRGGVAVPPGSSPVPKVPPSSSQWEADAGLVDAEIESSLEPNTISCMVFPPGWRGDSYHNATTVNGPPVNRPAFGAPQVVGSHQPLLAVTAVVSLITYCGQCLGHVLLPGRRASSGQLTAITCSALRCADLIIGIFSMNLYTTYILMGRWALGSLACDLWLALDYRVASDASVMNLLVISFDRYFSFPRPLTYRAKRTPKRAGIMIGLAWLISFILWAPAILC

SEQ ID NO: 942682 - protein, 228 aa, Homo sapiens
MSGPCTCLSWGCGAARSSWAVRLGCGGLCQSGCRSGWGWAQCGGCCLPGSSSGFGCFPVGLFGGAILGVSGVSYTRLLANIFLGSRTGSSQDLLGSRELRRALGLDFCWVSSMLEGVGVGSGRQKGVWESCRIDYFWSFGVVGFFKLQVGVNGQLERAMGLEHSVVKKPGKRNGLDGTSLLKPGQAEQGKSQEQGRPGAWSHCHQVGCPQDPDWFGELGLGILEPVSC

SEQ ID NO: 942683 - protein, 267 aa, Homo sapiens
  misc_feature (198)..(198): Xaa can be any naturally occurring amino acid
VPARRRQPWPGGRARGSLHPRRPHFLYEVPPWVMCRFYKVMDALEPADWCQFAALIVRDQTELRLYERSGQRTASVLWPWIKRNARVADLVHILTHLQLLRAREIIKAWAPGPPLLSPGTIAPKPSSIPPPAEAEAWSPRKLPSSASTFLFPTFGGSQKHSGPELGLVSSPASLWPPPLSSASFSTKLGSESSVFILXGARPFPFCWPLCEISRGTTTSRRSSRSGRVALGACYRAVMRNTVYAVKRLKENADLEWTAVKQSFLTEL

SEQ ID NO: 942684 - protein, 128 aa, Homo sapiens
KRGIEKNMFRSHGAKHMRGRPQMRDQQNPPPWPKSDPSSLHHPPPPPPPPPPPPPPPPPPPAPPPTPPPAPPPPPPPPPPPPPLRAPPPPAPPAPSPLPRTRRTQHSLSPPTCPPTTRYANTQISELF

SEQ ID NO: 942685 - protein, 122 aa, Homo sapiens
  misc_feature (32)..(32): Xaa can be any naturally occurring amino acid
MLFFRRSTVAFLSRSQCNEQITPLVIDNLSAXCKPSFAWDDTPLNRVSFQSSGAPNTKVVMVRMGQNHSYVGDETQNKRGILTLKYPIEHGILTNLDDIDKIWHHTFYKELLVVPPGTPIAC

SEQ ID NO: 942686 - protein, 297 aa, Homo sapiens
MLGPCMLLLLLLLGLRLQLSLGIIPVEEENPDFENREAAEALGAAKKLQPGEKAAKNLIIFLGDGMGVSTVKAARIQKREKKEKMGPELTLAMDRFPEVAPEKKEKEKKNVPKSGAKKKGLNVLGEGKPEKHWLKCNRPIKPMQHYTLKRGDLRNESGQKNREVNGNGNNHTNKNTSPAGTYAHTVNRNWYSDADVPASARQEGCQDIATQLISNMDIDVILGGGRNYMFRMGTPDPEYPDDYSQGGTRLDGKNLVQEWLAKARGTRYVWNRTELMQASLDPSVNHLMGLFEPGEMK

SEQ ID NO: 942687 - protein, 301 aa, Homo sapiens
  misc_feature (26)..(26): Xaa can be any naturally occurring amino acid
RKGVGSRRCGRLGPHGASGAAPRTRXFLALDREAALFLLEPRASQARRSRLSLELAVSGARACAPRGTASAPERPSWQSSLGRAYRAASPALARAWQMGVNACVDVVPSGVKLLQALGLSPGKRKEESIQHSRNDLEERLHIDFMGKGAELLSASFSDKETFHDIAQVAQSLPGAQVLLCGPVGPKLHELLDDNVFVPPESLQEVDEFHLILEYQAGEEWGPVKSSPANRFIFSHDLSNGAMNMQEVFVSSLEEFQPDLVVLSGLDMMEDKARSSEEEIFGGCNSISDIPLVYSSPRAGSM

SEQ ID NO: 942688 - protein, 229 aa, Homo sapiens
MRDRRSANRSVVFLEPQWYRVIEKDSVTVKCQGAYSPEDNSTQWFENENLISSQASSYFIDAATVDDSGEYRCQTNLSTLMGPWCMLEVHVGLAVVSRPLGGCSRRKIPIHLRFHSWKNIALHKVTYLQNGKDRKYFHDNSDFHIPKDILKDSGSYFFRGLFGSKNVSSEIVDLTINEGLAVSTISLFSPPGYRSLFLLRDGTPFSSGHRTIFLCEEKHLKLNKRLVGQ

SEQ ID NO: 942689 - protein, 114 aa, Homo sapiens
RPQHMVVREKILDLVISCFKRHGAKGMDTAYVIELKEISSTEKYLRRVHVWVSCTDLKDQGGELFSRRYDLTVPFARDLAKNKVKKMKRYHVGKVWRRESPTIVQGRPWEFCAV

SEQ ID NO: 942690 - protein, 125 aa, Homo sapiens
MLWLALGPFPAMENQVLVIRIKIPNSGAVDWTVHSGPQLLFRDVLDVIGQVLPEATTTAFEYEDEDGDRITVRSDEEMKAMLSYYYSTVMEQQVNGQLIEPLQIFPRACQPPGGTEHTWPEGEYS

SEQ ID NO: 942691 - protein, 76 aa, Homo sapiens
MEYMSTGSDNKEEIDLLIKHLNVSDVIDIMENLYASEEPAVYEPSLMTMCQESNQKDERSKSLLLSGQEVPWLSSV

SEQ ID NO: 942692 - protein, 112 aa, Homo sapiens
  misc_feature (112)..(112): Xaa can be any naturally occurring amino acid
SQFPPHITLLTPFTFYSSSIISHHNKFNTHLTTLLITLSKLPPQSSPLSIHSHHSRINTITILHQQNEQLNLIQQRLYQINNDITDTHNTLTQLNKFCVLSLFPSNITNNFX

SEQ ID NO: 942693 - protein, 72 aa, Homo sapiens
  misc_feature (12)..(12): Xaa can be any naturally occurring amino acid
GCCVTGDRVEAXCAPCRDQERRGERHRAALLPGRVSPSGCLHTVDVPGPVLWSPAFGPHLCLLLEIELLSGT

SEQ ID NO: 942694 - protein, 121 aa, Homo sapiens
MGVFEPSWEIWPKTSSWLVSPAPAALVGEAGLAGVWVLQAWPGQVVGDQGALGVNPTVEAAGTYVVPLGHPAPGLRMSHMPEFWRLHPPRGQLVISGPWSHRPCPFPGGTLGISPWPLFVC

SEQ ID NO: 942695 - protein, 126 aa, Homo sapiens
  misc_feature (39)..(39): Xaa can be any naturally occurring amino acid
MGGGVIIPESQLGSGQATITGTAPMRLKPEEETPPGVGXIGWGWAPSVVGGLGEGRAWLERLGVGVNAQAVGGPWGGRRARAEVTEERVPFLEIVSELLGQGRVRGAMASSLISLDGSSRALPRRW

SEQ ID NO: 942696 - protein, 289 aa, Homo sapiens
TPWGPAPWFLLLPLPPPDPSGPACSAPTGLQPASHRTFGGPRLERSAGVGAPRPQMQSSYREEARGIGSHILFAEKKGNKGSICKTSSLSQYFSHSCIQSSYKGHNLFTIPLTVHSALYKLKLCEYSGPPDENLQKKQEYMEYIITGSENKKEIELLIKQLKKSKVKNIMENLYANEKPAVYEPSLMTMCEDSNQNDERSKSLLLSGQEVPWLSSVRYGTVEDLLAFANHISNTAKHLYGQRPQESGILLNMVITPQNGRYQIDSDVLQIPWKLTYRNIGFDFIPRGAF

SEQ ID NO: 942697 - protein, 108 aa, Homo sapiens
GEGGRTAHDETTTPKATKTASNKQKQKRSRTRTRTGIPKGTNGISSRAFEDVIAEMVEKENIMKKCGKCNNAHHLKIKKKVNVKNELMCAWPSAWPSLKEFSLTASNV

SEQ ID NO: 942698 - protein, 105 aa, Homo sapiens
PRSKQGAGSWGKRRQESYRAREGYGGSGSLTGLLRKAAGWLLGARASPEKARAGTQSGHRSGELAARCSEAWKGPADTPQKAWAARMCTKKEKLFYKEELEKDKG

SEQ ID NO: 942699 - protein, 33 aa, Homo sapiens
MAAKKEYPAVLSLDEKELEEQFVKRKRSKGAKQ

SEQ ID NO: 942700 - protein, 210 aa, Homo sapiens
  misc_feature (147)..(147): Xaa can be any naturally occurring amino acid
  misc_feature (172)..(172): Xaa can be any naturally occurring amino acid
MEDHENVPIDIQTSKLLDWLVDRRHCILKWQILVLTIREKINAAIFRNMAMMMRRDRPAAVWVLHLLISLPKEFLDLLNRHRGLHEEYFWPILFTADEGLAGDFSLLYEKDKHSILCWTFYASWFVNVTFKIPSLKKKIAEVPSMLXAKKQAARTDGGATARGVPKNARKKXRTTSLQRTYWHSRGEKLSRRKNLHGPLGEGTLPEISLA

SEQ ID NO: 942701 - protein, 161 aa, Homo sapiens
MEGEPEDDVYLKRLYPREKYEVEKAVHLLKKFQILDFTSPKQSVYLDLTLDMALGKKKNVEPFTSVLSLPYPFASEINKVAVFTENASEVKIAEENGAAFAGGTSLIQKIWDDEIVADFYVAVPEIKPELNRLRKKLNKKYPKLSRNSNGRDIPKMLELFK

SEQ ID NO: 942702 - protein, 169 aa, Homo sapiens
  misc_feature (115)..(115): Xaa can be any naturally occurring amino acid
MTLKNVTMRQGTVGMQPKKKRWSIPAEGRHLMVQKKPQQYSQRNSNSANPEEQCRRSWSSDSKKSVISSESGKTYYRVVLIGEQEVGKSTLANIFAGVHDSMDSDCEVLGEDTYXRTLMVDGESAAYILLDMWENKGENEWLHDHCMQVGGRIPDCLLNHRPSELREGI

SEQ ID NO: 942703 - protein, 112 aa, Homo sapiens
MGAKEIFSYEESKEKFGKPKKRKGFSEGLWEIENNFTVKAFGYKFSQKKSCVEEPEPEPEAAEGEGDKKGNAEGSSDEEGKLVIDEPAKEKNEKGALKRRAGDLLEDSPKLP

SEQ ID NO: 942704 - protein, 138 aa, Homo sapiens
  misc_feature (2)..(2): Xaa can be any naturally occurring amino acid
WXGWNSRDCGEGHGGEIELERPALQEAYVRVVTEKFSMDWAFFIYEGKSNDIRVVGTGEGGLEEMVEELKSGKVMYAFCRVKDPNFGLLKFVFIKWKGEGVNDVGKGACASYVSTMASFLKGAHVIIKARAEEDVELE

SEQ ID NO: 942705 - protein, 199 aa, Homo sapiens
  misc_feature (15)..(15): Xaa can be any naturally occurring amino acid
ALSPRREEPEGARAXLNHCSQSFSISELLSCDQGTRGFRTASSEYENNFKWDLVLSPILYFISIIISHYILKLLASTSPPTSSSQLPETTGILVLEDMDLAANEISIYDKLSETLYFFKQTFHQFGISDKAIKKFIKQLLEKNEPQRPPPQYPLLIVVYKVLATLGLILLTAYFVIQPFSPLAPEPVLSGAHTWRSLNH

SEQ ID NO: 942706 - protein, 209 aa, Homo sapiens
  misc_feature (70)..(70): Xaa can be any naturally occurring amino acid
MPSEVARGKRAAIFFSALAILLLLQLFSNITKKELASFPNPISFALILFISSSFFILLLCLGGREGTGKXRRSSPKKVEQGKEKEPGKRKKGKSKKPGAKKAYAEGLRDQGGREGPGERGSGQRRQKAMQKGGRKEESGGAALNWRTGEKLEQLQQLADPKDKEGSYNGGPKEGQAVGGGGEEGHPGKAWGNMHVGRARMNAKVGPKAM

SEQ ID NO: 942707 - protein, 171 aa, Homo sapiens
MSAVTHSPMMQVASGKGDREPLPPGWEIKMDPQTGWPFFVEKKNSTNTWNDPRVPSEGPKETPSSANGPSGEVSRLPLAREGHPVYPQIRPGYIPIPVIHEGAEKRQVNSFHVYIQPGMQRFRTEAAEAAPQRSQSPLRGMPETTQPDKQCGQVAAAAAASPPASHGPERS

SEQ ID NO: 942708 - protein, 89 aa, Homo sapiens
  misc_feature (79)..(79): Xaa can be any naturally occurring amino acid
MASPPQLGSRALSTASSTQMQADERAQGGRGLPPRPRPAWREITTPTSPEPHPPANQHRAPRARARRAAAHAQAAQRRXRPLAPAAAAG

SEQ ID NO: 942709 - protein, 228 aa, Homo sapiens
  misc_feature (11)..(11): Xaa can be any naturally occurring amino acid
  misc_feature (15)..(15): Xaa can be any naturally occurring amino acid
  misc_feature (31)..(32): Xaa can be any naturally occurring amino acid
  misc_feature (36)..(36): Xaa can be any naturally occurring amino acid
MSLSDWHLAVXLAYXPLTPKSILRLPNTKLXXYSLXGYIILFLKQLIAGKLQESFPDPELIYLIYFGRKLKDDQTLYFYGIEPGSTLHLLRKFWPEPDQKPEPVDKVAAMRDIPGVATALHSSSSYREAVFKMLSNKESLDQIIVATPGLSSYPIALGVLQDKDLFSVFADPNMLDTLVPAHPALVNAIVLVLHSVAGSAPMPGTDSSSRSMPSSSYRDMPGGFLFEG

SEQ ID NO: 942710 - protein, 136 aa, Homo sapiens
YLLPLRKSITLLSQKNNMQQAASMYSFRCQTQKYAFTPVSIIKHTTLKHACELAGPEGTALCPPAVRRQPGFSSGTFFPRVCYEIMLSNQSSSSSSVTFFEVLCCSGSMFFSSVTDGFAQTSSSWTTSPSSLDFRS

SEQ ID NO: 942711 - protein, 156 aa, Homo sapiens
  misc_feature (133)..(133): Xaa can be any naturally occurring amino acid
MVLKKHEKAFEGTICAWCGLLKALLTKGNQSELTGDQKAAVAFQGGKGDRMKLEKFKRRKKGALLKSCLRKCKERRCRNAGLKMLNFCWGPMQKWILYDGNCWDFVKIKIKSENVLRSRGRGWLDDELKDAIXVYSGENVGFMLKIVLKGLGKKNG

SEQ ID NO: 942712 - protein, 156 aa, Homo sapiens
SSRWSCEGPWTPPTPRFMQSLRPENQGTFCPKKLRHLPPPSEQEGDLEEAKQQLIRTQKKEAAQSNWLTANSPFIQKERRKKQTPPNQRRHTTPSRKQRPPRTGEPAPHSPRPHGATSQAARAQCLPHKPSNPGRAKQPPPTHPPRNLHLPQMIGL

SEQ ID NO: 942713 - protein, 319 aa, Homo sapiens
GPPRGAAQKAEAQPGPDPKPGPETLTAPGEAGSPPIQGRRAKGVSGAWAPPALSESNKTWRKEQKGRATGLLLKENSRPLQPEESIETPQDQDTKGPSQQANANPQEKAPAQAPERHPKHIGKTWAQLERGPEPPERGKSPLTHYTIFWTNAQNQTFSAIQNASARGLCHHGLEPASLYHIHLMAASQAGATNSTVLTLMTLTPEGRELHIILGLFGLLLLLTCLCGTAWLCCSPNRKNPLWPSVPDPAHSSLGSWVPTIMEEDAFQLPGLGTPPITKLTVLEEDEKKPVPWESHNSSETCGLPTLVQTYVLQGDQEQF

SEQ ID NO: 942714 - protein, 293 aa, Homo sapiens
  misc_feature (40)..(40): Xaa can be any naturally occurring amino acid
HKRPLGGAGWSMNWSLKDADRLAGPAYGDLEEREMLVTGXGESLGWGSFESWAYGPPPQLQRAEEFKRQAQEGNPRKPYEAPQRRQPMDPDPPLEGEVEQWPKDTVALLAWGWGYQGPQGGGLEPEGRRGEGAGGEARQEGLSGETAEREPRPWGSGAAQERAIKDLSAGARPGEGGGGNGAGGTLEQIGLDQSGEATGLSAVMGLPGHRLLFILLLHCEPGDGWRAKAGQLEGILLHDCGHQEPRLLLAGSGTLGQRGFFLLGLQQSQAVTTEAGEPQQEAEQAQDDVYSGP

SEQ ID NO: 942715 - protein, 133 aa, Homo sapiens
LLGVLVPAVPAVSREAGAGRGSGGVTCPLPPQVVLSAWGSRGPQPWALGLLLFSSLPWEPWAQKRHPPPLPEPPYRGVPRPAPGTPAFLGAGWLGPQQYLSHNSLRAEAEPVELGSGKTRCPGIGRKRPHELM

SEQ ID NO: 942716 - protein, 212 aa, Homo sapiens
  misc_feature (22)..(22): Xaa can be any naturally occurring amino acid
  misc_feature (25)..(25): Xaa can be any naturally occurring amino acid
  misc_feature (133)..(133): Xaa can be any naturally occurring amino acid
MRQKHKRLPGPGGGQKTCSLLXPHXSIPPVRLGNFGPRFPSFLISGMALGKKIFKGSLLFLERACPDELNSENVVSANMGTTEEEIPCKMPRCLGVGPWGDGMEKDLLCQGSPGVKGNNVGEQPQLGSNVPCXKKGPRSLNQPKMGSAVSHIFQGPGEFVVVCFVVCMCLIMKWIMRCKENNNGNDLYSNLYLFLYQCNLLRAFCLKSNMFK

SEQ ID NO: 942717 - protein, 214 aa, Homo sapiens
  misc_feature (127)..(127): Xaa can be any naturally occurring amino acid
  misc_feature (142)..(143): Xaa can be any naturally occurring amino acid
  misc_feature (145)..(146): Xaa can be any naturally occurring amino acid
  misc_feature (177)..(177): Xaa can be any naturally occurring amino acid
TPESLKSYHGSKAQSIHYPNGRGRMESVRWVLASQPESSLDEEFLGNKKKQLVQVAEMVTTCCSNKKPMGEIDGMKLVQTRSILHYIADKHNLFGKNLKERTLIDMYVEGTLDLHGTAYHASFLKTXMISKRKWLTWPRKAXXLXXFPVFEKILTGFTEQRNYLLCNAAEALAECDXYSKTIFSSRREKFHKNPCLNFLSSWNKHVKLKYYPYN

SEQ ID NO: 942718 - protein, 135 aa, Homo sapiens
FICKYFRKQIYIQVLNFIREVRSCSSAHHEVETKMETSSPLLWNRKDDQGGNTGQYGEGVTVDTGVGCLSTSSHYANRNADTFRCLCRKKFHKLLKSQRRGVKKSCISVPHRQLSQALQAMRDSSEPWALLLEAA

SEQ ID NO: 942719 - protein, 165 aa, Homo sapiens
  misc_feature (47)..(47): Xaa can be any naturally occurring amino acid
AHQGRAPSEPTEIRPQKRKKGPAPKMLGNELCSVCGDKASGFHYKFXNCGGCMASSRALLIRELHYICHSGGHCPMDTHMAFGNARMSASQMRVSGMREECVLSEEQIRLKKLKRQEEEQAHATSLPPRASSPPQILPQLSPEQLGMIEKLVAAQATGVTGRSFF

SEQ ID NO: 942720 - protein, 235 aa, Homo sapiens
EAGWHRRGAAGGSGSEAEDEDDEDYVPYVVLRSAGSYCSRSSCSEDERKAAEEEQQDKGSEARGDEDDIPLGPYSTNVQTSWIQHQHLKEKAEARKESAKEEEDEGKREDPGECCRGPTIDVSEGDGKGITYDDPIKTSWIPPRYVLSMSEEDMSTMRKKYHILVEGDSIPPPIKSFKEMKFPAAILRGLKKKGIHHPTAIQIQGIPTILFGRDMIGIAFTGSGKKLVFTLPVIM

SEQ ID NO: 942721 - protein, 164 aa, Homo sapiens
  misc_feature (53)..(53): Xaa can be any naturally occurring amino acid
  misc_feature (55)..(55): Xaa can be any naturally occurring amino acid
  misc_feature (59)..(59): Xaa can be any naturally occurring amino acid
  misc_feature (93)..(95): Xaa can be any naturally occurring amino acid
  misc_feature (98)..(98): Xaa can be any naturally occurring amino acid
  misc_feature (116)..(116): Xaa can be any naturally occurring amino acid
  misc_feature (123)..(123): Xaa can be any naturally occurring amino acid
  misc_feature (129)..(129): Xaa can be any naturally occurring amino acid
  misc_feature (140)..(140): Xaa can be any naturally occurring amino acid
  misc_feature (142)..(142): Xaa can be any naturally occurring amino acid
  misc_feature (164)..(164): Xaa can be any naturally occurring amino acid
VFELDNHYTKTDLIILFTVVIVYRPFTSYFLCIFLLSLPLPGSPLSVCDPPGXGXLVSXLSGVLLVWGALDGCCWCLRVGWGGGPGWGGGGLXXXVLXPALLPAGFRFVGLLLDLXLQVLPPXILLLPXHLLLFRLLWVXCXWVLSPLGQVGGRVPEHQGWCSX

SEQ ID NO: 942722 - protein, 73 aa, Homo sapiens
  misc_feature (8)..(8): Xaa can be any naturally occurring amino acid
  misc_feature (58)..(58): Xaa can be any naturally occurring amino acid
CGERVDVXPQNFWNCFLVPAALVTLSTLKRTVLLRGRHSPTVTMSPIWTSLTPGDRCXDMFLWRFSKRLYLRM

SEQ ID NO: 942723 - protein, 253 aa, Homo sapiens
AAAPPPPSHTALATAPPTFAQSLGHRPPPPTQKKAAPVCCSRLEMSKVPVARVWLVLLLLTVQVGVTAGAPWQCAPCSAEKLALCPPVSASCSEVIRSAGCGCCPMCALPLGAACGWRLHAAPGDSFAARCRGSSKLCTPSAEAKAPVCRTLTPPLPMLQRQGALKTPKSTEITEEELLDNFHLMAPSEEDHSILWDAISTYDGSKALHVTNIKKWKEPCRIELYRVVESLAKAQETSGEEISKFYLPNCNKN

SEQ ID NO: 942724 - protein, 120 aa, Homo sapiens
MKGAPGVQRARLPSLGGGPARCTETDLCVLDQLYPHQTDGETDRQAAFLNPGRGKPQNKTASRAWAAGFQGAQDIGRANLWVYVGGAAGPGASCPGTLLCVCAGARTPWELEAGSLSEPT

SEQ ID NO: 942725 - protein, 180 aa, Homo sapiens
  misc_feature (122)..(122): Xaa can be any naturally occurring amino acid
  misc_feature (134)..(134): Xaa can be any naturally occurring amino acid
MANRDPCRLKGERATITTQRKGCSRGAVVDLGGPACPACYRRFLLVRTHDILTKVSERAQSVGDDGPTLATRGPMDTGGPASHRLPEGGEGGLRHSGVAVGSQPGPWEPWVAQGTKSHGYVXWQGCTQRDKAMXAGDLIRVDPCKKLYRQYCMRLPNNLNGTPQGATAVAGRTGHTSSVN

SEQ ID NO: 942726 - protein, 234 aa, Homo sapiens
AAAAGDSDSWDADAFSLEDPVRKVGGGGTAGGDRWEGEDEDDNLKDNFDHYDHQKKQKPQVKPEVKISKKKKIAEKIKDKKQQQKKRQEEIKNKLEQPKQPKVLTPEEQLADKLLLNKLQEESDLKLPKETFGVNNPVYGIHPINPSSTHHFTQFEKLLKHKITQYEKSLYYASFLEVLVRDVCISLEIDDLKKITNSLTVLCSEKQKQEKQSKAKKKKKGVVPGRGIKSHHER

SEQ ID NO: 942727 - protein, 319 aa, Homo sapiens
GAFAAESRVRGSSGLGGAAVMAAVRSDEFTMGKACVLSHSDGPSGPYPPRTCSDVAQSRRGFAPPGQQKREAPVDVCDREIGRSVRGKLDAWIGPETMHLVCRVFVRASVVGDLISDLLWTFFALSGIAARLLNALGLAGDYLAQGLLLSPGQVQTFLLLWEQGPVVVSWVAVSAPRLGAVALLGRILWGLKLVIFLAGFVALMRSVLRDPSTRALLLLALLILYALLSRLSGSRASGANIEAKVRGLERQVGGVAQAPEGSGQGGLQCGGGESRLPHTPPVSYQRAELLRGHAALLPAPCPFLALSLNLQNIDLAAAH

SEQ ID NO: 942728 - protein, 183 aa, Homo sapiens
LSTLQLSSADRLPPPPPPDSGGEERKDEKMDVNIAPLRAWEDFFPGVQITLPGRTSGTFPDWNNRVVSNMIILPEQQYLVVAALMISFVGFLSPFNIILGGIVVVLVFPGFVWAAHNKDDLRRNERKRSPHDVRYGGHVGALFPSFHVWRRNRIFVFGLTFPLLLKINHGWFKLRNLKNKLGE

SEQ ID NO: 942729 - protein, 107 aa, Homo sapiens
MKLAKSRKKGKEGNSKMKLNEKEKKVKEVEMDRDKVDEKKYIPMHPCRRRMSPGRTHGSYTLHIIKRGDGTRGVTGYFTFTLYLETPKPSISSSNLNPREAMETVIL

SEQ ID NO: 942730 - protein, 145 aa, Homo sapiens
  misc_feature (121)..(121): Xaa can be any naturally occurring amino acid
  misc_feature (131)..(131): Xaa can be any naturally occurring amino acid
  misc_feature (134)..(134): Xaa can be any naturally occurring amino acid
MHFRNFNYSFSSLIACVANSDIFSESETRAKFESLFRTYDKDITFQYFKSFKRVRINFSNPFSAADARLQLHKTEFLGKEMKLYFAQTLHIGSSHLAPPNPDKQFLISPPASPPMGRQQMXRCATPSQPPXPCXAQPQAGARGKV

SEQ ID NO: 942731 - protein, 190 aa, Homo sapiens
  misc_feature (58)..(58): Xaa can be any naturally occurring amino acid
MSIDIYYVVDRLKELNMGLHIVDEKQHIANASLLIQTCHPREDRRDSSHLYTIIRGRXMGTRWSNKDVSPFTVTPERLLKPSISSSNLNPRETMGAVSLTCDPETPDASYLWWMNGQSLPVGHRVKGSETNSTLKPFGVTKDIAGPKEDEIRNPVSASRSYPVTLNLLPELPKPYITINKLKHQGELRMY

SEQ ID NO: 942732 - protein, 248 aa, Homo sapiens
  misc_feature (59)..(59): Xaa can be any naturally occurring amino acid
  misc_feature (65)..(67): Xaa can be any naturally occurring amino acid
  misc_feature (87)..(87): Xaa can be any naturally occurring amino acid
  misc_feature (124)..(124): Xaa can be any naturally occurring amino acid
  misc_feature (128)..(129): Xaa can be any naturally occurring amino acid
  misc_feature (203)..(203): Xaa can be any naturally occurring amino acid
MERASCLLLLLLPLVHVSATTPEPCELDDEDFRCVCNFSEPQPDWSEAFPCVSAVEVGXHEGGVXXXQFVPCVAAAAAAGPSAALVXAVGVGGFLWVLLRFNDKIMVGEMGVLEFSSLEGLELXGFAXXGPLLLLPLGAPGLALSRLRLRPVSWAPGRSWLAALLLWLTLGLPVLRLAPAPSPAFSCAPVRAFPALSRLALSXSPGLGGRGAGGGSLSPPVPGPPASGAAPPRGGGAPRVCAPWAGRV

SEQ ID NO: 942733 - protein, 54 aa, Homo sapiens
  misc_feature (1)..(1): Xaa can be any naturally occurring amino acid
  misc_feature (31)..(31): Xaa can be any naturally occurring amino acid
  misc_feature (34)..(34): Xaa can be any naturally occurring amino acid
XGAIIFRFALLHSKYDCYSSVGRSDRAPSVXPPXVRAIVILLTELPPLYLASTA

SEQ ID NO: 942734 - protein, 250 aa, Homo sapiens
  misc_feature (137)..(137): Xaa can be any naturally occurring amino acid
  misc_feature (157)..(157): Xaa can be any naturally occurring amino acid
TVADGLKKLEEVEMDFAVGLTAVTTAGAEEMVVSLAKPKHRVTMNEFEYLKLAGQGHFRQGRSWCKEKATGAAYYAMKILKKEVIVAKDEVALPTLTENRVLQNSRPPFLTALKYSFQIATTASAFVMCSYANGGRXCIYPPWSRRNDDVFSRRDRXRAYRIGRMKIGDQPRGTYPDISEESNDGGTRGPSEAGRNLNGWDKGRGTIEESRELSGLMQGGGLKGRVATIERAFLRAHPEVPGPPECGWEG

SEQ ID NO: 942735 - protein, 215 aa, Homo sapiens
MWDLTDESLVCWALGFDEAPPMLWAELPLGNGSGPIMLDEVHCTATEASVADFYFLAWLKNNFRYDIYAGVVCTNDIIITHTLDLSRELSEALGQIFDSQRGCDLSISVNVQGEDAWRFCGHTVILTANLEAQALWKEPGSNVTMSVDAECVPMVRDLLRYFYSRRFDITLSSVKCFHKLASAYGARQLQGYCCNLFAILLPQDPSFQMPLDLYA

SEQ ID NO: 942736 - protein, 285 aa, Homo sapiens
AGNTSTSGGDSNSICPAPSTMAKAEEAKKLAGRAAEENHVRNNQVLGIGSGSTMAQAEQRIAEREKQENLNRGGIPTAFQARQLILQYGLTLSELDRHPENDLAIEGADEVDADLNLTKGGGGRLTQEKIVAGQASRFIVIADFRKDSKNPGDQWHKGIPIEAIPMAYVPVSRAVSQKDGGGGELRMAANKAGPEETENGNVTLDWKFDRGHKWSEVNTAIKMIPGVEDTGLFINMAERVYFGMQDGSVNMREKPFCVTLQEQSVFTLSLQPTAKVDVPLQEPLP

SEQ ID NO: 942737 - protein, 147 aa, Homo sapiens
  misc_feature (12)..(12): Xaa can be any naturally occurring amino acid
NKRKREGLLTPXHASNNKGTEKKRKKKKKMRKKKERSKGRHEGTAGRGQYWQAFLGNGGQQQEEEETPRAQQKGNNIFSLTAYIPSHSIPYRSTPQFYKPELKRKPGTKGAHNKNKLKTNQREAEKKTKNPGRHQETTAGGPLTLPA

SEQ ID NO: 942738 - protein, 229 aa, Homo sapiens
  misc_feature (174)..(174): Xaa can be any naturally occurring amino acid
MTLTTHRSSDHERGRGRPTCELLVPIHAAVLETQSPPWCPGIGLEPGPHFLLFSCPCSSQHLGHTLQGPPMVWHWVAMASKVRVPYIWPGSVHSLWLLGAVLLMEAYCNGLPTTRTTQRESSQQGGESDPSPQTTCTEVKLEMDGHLNRGFHQEVFHGKDLGGFDKEEERGGGXKLMDIFSKVDVNTERKINAKEMNRWIMEKKAEHFQEAMEESKTHFRAVDPDGDGQ

SEQ ID NO: 942739 - protein, 179 aa, Homo sapiens
  misc_feature (33)..(33): Xaa can be any naturally occurring amino acid
GRAQLSEHRVGSRDPSGAGSWDGNLGGRLATQXTFGGHQHPRNPEARPLKVTPLERKKMGPARTMGRARLAPATIPALAFWLLYTLGLQGTQAEATPAPPGLPGGADCLNSFTAGVPGFVLETNASVSNKPTFLEFPTVRRGWDCVRASCTTQNSNFALVELQPDRGEDAIAACFLINC

SEQ ID NO: 942740 - protein, 210 aa, Homo sapiens
  misc_feature (33)..(33): Xaa can be any naturally occurring amino acid
  misc_feature (39)..(39): Xaa can be any naturally occurring amino acid
  misc_feature (41)..(42): Xaa can be any naturally occurring amino acid
  misc_feature (46)..(46): Xaa can be any naturally occurring amino acid
  misc_feature (49)..(49): Xaa can be any naturally occurring amino acid
  misc_feature (51)..(52): Xaa can be any naturally occurring amino acid
  misc_feature (54)..(54): Xaa can be any naturally occurring amino acid
  misc_feature (76)..(76): Xaa can be any naturally occurring amino acid
MSPNFKLQCHFILIFLTALRGESRYLELREAEXEDTFLXFXXKLKXEWXGXXRXAALWVLDMLSLQGQFTFTADRXQLQCADFFISELEEFINIHYEQVSIDCQGGDFLKVFDGWILKGEKFPTSQDDPLPSAERYIDFCESGLSRRSIRFSQKVAMIFFRVHEPGNGFTLKIKKDPNLFPCNVISQTPNGKFTLVVPHQHRNCSFSIIY

SEQ ID NO: 942741 - protein, 158 aa, Homo sapiens
  misc_feature (12)..(12): Xaa can be any naturally occurring amino acid
MSGGLLKALRKXSYVELSQYRDQHFRGDNEEEEKLLKKSCKSYVGNISFYKNEEKIYELLRKSGEIKKMIMGVDKMKKKDVDFVLWNINEEEMRKKAWGKEMGSVWMNELFEKNGKKDLRREGNKEVGDMGERFGMSIGRNIMLGEEAMEKWKRKSKW

SEQ ID NO: 942742 - protein, 113 aa, Homo sapiens
MALALFLVLVLAPVLALPLLLGFGFGFCWGLGLGFGPGSDISFCARFVVARQGFPGRAPCTFVLYSRPWPWLLRAASAAALLRCRRSNRALAYLRLSQFLVAFFLFDTSAGQT

SEQ ID NO: 942743 - protein, 198 aa, Homo sapiens
RQHKWKQKSQPARDSHSKSMVGAASHWKRKAAGTCDQSTSSLKSGWQGRSEIALERTTGAHSSEGLPRNQRAHVRRGRADSTQSGSVGGIRQSRPVFSTWKAQNVGKAKRSVRVGRNLFWCVVEASRSYRKQSRWRVVRKGRVPAFVGEAAEWNRWEVTGQQGICGQGAHAPWEMTHWASGQENGISMEKAEADHLLD

SEQ ID NO: 942744 - protein, 306 aa, Homo sapiens
MEAAAQFFVESPDVVYGPEAIEAQYEYRTKRVTARVAFSKKPNNKAAESSGQREPGPGGRRPRSVRNLQRGAAQGGAQKIRVRGLGNLVAETGRSEAARESAGMGAARTNVAAHGSPAAPAFCLKPRTQRGQTERARAQTHPKLACAQLGADPQDIRDFRSSAGLDKVIVLWTANTERFCEVIPGLNDTAENLLRTIELGLEVSPSTLFAVASILEGCAFLNGSPQNTLVPGALELAWQHRVFVGGDDFNSSQTKVKSVLVDFLIGSGLKTMSIVSDNHLGKNDGENLSAPLQFRSKEVSNSNVVD

SEQ ID NO: 942745 - protein, 196 aa, Homo sapiens
AGWGSLMSTGGSFHAFWGPEISMACGVWVPPGLVDGQSGIDTGLSRRGPFLGWRRLSSLLAEGKAVQLGVGHILGGFRCSSLSVHLSVLFSLAVLWAQEFPSSGEGGEAISDKGLEFFTFPYVTAWVVFIVFAPIFHFHPILILFVYHGSPEVFSLDVSSGAGPPLYAPILGLWLGIPWKTFEISLCAGPIFFFFP

SEQ ID NO: 942746 - protein, 146 aa, Homo sapiens
RVQGYSWAPDYDRSQWLDVKFKLDLNFANLPYLLDGKNKKTQSNAILRYSPPKKNKCGETEEKKIREDIKKNQIMDFRTQLIRLCYSSEPRKTESLNDYEKKLPGQLKQFSMFLGNFDGFAGEKLTFMDFLTYDILDQNRIFDPKC

SEQ ID NO: 942747 - protein, 184 aa, Homo sapiens
  misc_feature (75)..(75): Xaa can be any naturally occurring amino acid
  misc_feature (77)..(77): Xaa can be any naturally occurring amino acid
TGLFRSSSGSGVQPDGPLYPLSAGKLLYTQETDSGDKEMAEAISELRLSSPVTGDQDFDRENLPPNISDNLCFLXGXPLRSYSPPNAFPTPSPSYITSSEECSIPSRLPPFTSMELRMGNNKPPCENCTKNPPKYPEETRFAEKKVEGVYTNAWKQLLLSARFPIVLNDKEEKDFHPGWAWSLS

SEQ ID NO: 942748 - protein, 286 aa, Homo sapiens
MMEVDRRVEFEEFGDEEGKKDSSGIVEELSEESLKDGEERGEEDKEEEHELAVDMETINLDRDAEDVDLNDYGIGKIEGFENVCLRKNLIKCIENLEELQSLRELDVYENKMKKIENLEEVTELEIVDISFNVVRNIEGVDKLTRLKKLFLVNKKISKIENLSNLHKLQMLELGCNWIRGMENIDTLTNLESLFLGKNKITKLQNLDALTNLTVLSMQSNRLTKIEGLQNLVNLRECTLATMASRSSRAWENNNKLTMLDIASNRIKKIENISHLTELEEFWVDGH

SEQ ID NO: 942749 - protein, 312 aa, Homo sapiens
GGTCSEEWRRGFKHCLPVGPDNQSQELGSDAQSLLNKHDVERRKASLDRPFKKLEAAFYSSVGLSSLGAQVPDAKKECTYIKDKIDASNVDSLFYAAQASQALSGCDISISKKTKELLLAAVSEDSSVNQKENAVAALSGFGLPLASQEELSALTARLSKEETVLATVQALQTASHLSQQADLRSIVEEIEDLVARLDEFGGVYLQFEEGLEKKSLFVAATYNLMDHVGTEPSIKEDQVIQLMNAIFSKKKFESLSEAFSVASAAAVLSHNRYHVPLVVVPEGSASDTHEDAILRLQVTNVLSQPLTQATVK

SEQ ID NO: 942750 - protein, 108 aa, Homo sapiens
  misc_feature (60)..(60): Xaa can be any naturally occurring amino acid
YLRHAIVLIKIYRERKLYKRKRRNSTRRKATGMHTAVISAIPIPKAVLSCESSFLVASSXLPLMFLENWKPKSLGYSTRMLNKQHIHMMEYYLTITKYDRYVPIAISP

SEQ ID NO: 942751 - protein, 255 aa, Homo sapiens
LGSSFPRRRDSPAMESHDVITNQPVVINNGSSVIKAGFAGDQIPKYSFPNHVGPPQHVPVMAGAPEGDILIGPKAEEHPGLLSIHHPMEHGIIKDWNDMELIWQYVYSKDQPQTFPEEHPVPPTEAPLNPRKNPERAAKVFLETPNVPPLFTPMQAVLSLYATGRTTWVVLDSGDGVTLAVPTYEGFAMPLTTMRIDIAGRDVSRFLRPHPPKEGYNFPPPPEFEIVKAIKERACYLSINPPKDETLETEKAQYY

SEQ ID NO: 942752 - protein, 162 aa, Homo sapiens
  misc_feature (162)..(162): Xaa can be any naturally occurring amino acid
LNIFRPRMVISPPEGDGFQGGGGGGRGGEDHGGGEKAKGKGARGEEGGGEGGAGNQRAREGSLSPKWLVWAGAPSADKPTGARRGSPVMASVFVPVSEQKTPDPRHPAARNTSSPETDKALQCLLVLVFGRDVKGLKACGTEMGRRSGIPKMPSYAAWVNSX

SEQ ID NO: 942753 - protein, 219 aa, Homo sapiens
  misc_feature (61)..(61): Xaa can be any naturally occurring amino acid
  misc_feature (73)..(73): Xaa can be any naturally occurring amino acid
  misc_feature (126)..(126): Xaa can be any naturally occurring amino acid
  misc_feature (139)..(139): Xaa can be any naturally occurring amino acid
  misc_feature (144)..(144): Xaa can be any naturally occurring amino acid
  misc_feature (149)..(149): Xaa can be any naturally occurring amino acid
  misc_feature (153)..(153): Xaa can be any naturally occurring amino acid
RDSWVPFSAPRVTDPQWEVLWDTLALSHKEGVDRTTWAPADQCPLGPRGQRNTESQLQGPXDPGGLPERICPXTKLSPVDTILVAASVVAAVVPHTVEVGVGSGLVPPASPLVPGPVTRIGVSVPXHGAEGLVIVPGKXVSRLXLVLAXPQAXWSLSGSKEKTIIMGMCSTAPPVLQENQPLMVPKAGQLIDGFKAQPVFSVWPPKARLIVLPGSEEVD

SEQ ID NO: 942754 - protein, 232 aa, Homo sapiens
  misc_feature (37)..(37): Xaa can be any naturally occurring amino acid
MRAAPDRTGLLLCVLLLAALSGGGARAARKESVAPRXYGLVIIKMLAEVLSLPRFYVSEGIGVATTAPKKPPAGRATSNMDAGAVTEPAAMNPGNTTPPRTPEVTPLRLELQKLPGLANTTLSTPNPDTQASASPDPRPLIGRGRDTTAHQNPPAGRAITNMDVGHVTETAALNPGNATPPRTQDRYSIAAGAAEAARIGPRNLEYPNPDNQVTIKVVEDPQAKCKSTYRLR

SEQ ID NO: 942755 - protein, 78 aa, Homo sapiens
  misc_feature (4)..(5): Xaa can be any naturally occurring amino acid
MVEXXPARPVLTHLLVALFGMGSWAAVNGIWVELPVVVKELPEGWSLPSYVSVLCGSGELGLLVVTSGGAGPGRTRGP

SEQ ID NO: 942756 - protein, 283 aa, Homo sapiens
ATQASLEWAPRKKRQEAECSSSKARAGKQWLPHGKMATPVYKQIGTQANKKGKKKEEQNAENSSNYLDKTNNPGPKLEGGPYTHGEEAKRQSVENKKISSKPEEDSKKEENNRRKHSQKSSLGEGVKKQQEQKQAKIISKKRHPSTQSPPKYNFSHTTQGHELTQKANGLHGFMNWPHNLLTVAEERADVLGPFSGVKGPHLHPLTALRWGFPYDKKKLEKTEEVSLSEVTEEGVRFRSPYDGNETLLSPEKSVQIQNALGSDIIMQLDDVVISTVTGPRVEE

SEQ ID NO: 942757 - protein, 288 aa, Homo sapiens
RGPSLQSRPGAFSGCGGISFCLRLGLLFLFADVDSGTPVVFSSSNYPEWMQFSSPSIEECPKPLSRVSIMDASLTGLLLLQAVSWASGPRPCIPINLPGYSSVVFVCNSTYCYSFDPPTFPALGTFSRYEITRIGRGMELIIGPIQANHTGTGLLLTPVSSDTDSSRNLKWIWEGAMYIVLLSLTILCPGHPLAQNLSTLNRYFLCKKVTVYNIIRATHGPAVDFSIRTYTYADTPDDFQLHNFSLPEEDTKLEVPLIHRALQLAQRARFTPCQPLDITHFGSRPMER

SEQ ID NO: 942758 - protein, 214 aa, Homo sapiens
  misc_feature (2)..(2): Xaa can be any naturally occurring amino acid
MXSRRRRRLTDSGAQSAPLPMEGVDIMPQYRTKRSEGHQDIGHRYRFALFLGTDFLFHYMVGFYVGTEFDSSLDGKDKFSFDLGKWEVIKAWDISISTMKVGDVCNITCKPEYAYCSSGSPPKIPPNATLVFVRWSCLSFKGEDLSGRGKMAGMLPRIPDSAVKGYAKPQWRVLSSEVALERDYKDKLFDQRELRFEIGEGENWICLMVWRGHS

SEQ ID NO: 942759 - protein, 191 aa, Homo sapiens
MGDWGFLEKLLDQVQEHSTVVGKIWLTVLFIFRILILGLAGEVTYERLTSSHESSSVTSGPRQAAHNVCYDQASPASRHIRYSGAAASVLRQHTPPLDLPGSKSFNLLSAETERAAGTKGGGELRATAGPRYPQDGAARLAAEDAIPEANNVGGRRLVACASAEHVMGTYVASVLCKSVLEAGFLYGQWRC

SEQ ID NO: 942760 - protein, 154 aa, Homo sapiens
ARRFGAALTRVRARPPASPLNAPLASRPPWIRTRRTRLLRSLFPITGPFRLSSQFPARTRSGPPNLQPNSGGGSCGKKMKNEIAAVVFFFTRLFRKHYNFKKKAVERFAEKFTLILQEKYKNHWYPKKPSKVHAYIFILFNKFQRVDPYVLKAY

SEQ ID NO: 942761 - protein, 154 aa, Homo sapiens
  misc_feature (44)..(44): Xaa can be any naturally occurring amino acid
DLLGEKEIKGQEPTDISKKSKKRTTSSSKNDGLKAERIRKTRIXEDMYKEDEYPQITKTKRDEMKTPRMSEEEGLDLGEEKGFIVKLFNGKIKDEVKRMKKRKNIKPKGKESRKKHNRRGRRVTCWGAQRALLEQQVRTVNSGLHRYSQLNWVY

SEQ ID NO: 942762 - protein, 68 aa, Homo sapiens
MPPWCPPGVPRGKGNCLVKKRTGPPGGVSNGPPTLASQGWATLSVGCMQRAGALPMPSLPWCPPLAFL

SEQ ID NO: 942763 - protein, 136 aa, Homo sapiens
  misc_feature (18)..(18): Xaa can be any naturally occurring amino acid
  misc_feature (75)..(75): Xaa can be any naturally occurring amino acid
  misc_feature (109)..(109): Xaa can be any naturally occurring amino acid
YRAWKVQRPEPSCRPRKXTSPPTLPFERETQYQKDFRAWPLPRRGDHPWIPKPVQSSAASQASAPITTGRPRRRXAEPRATRPVTAAAEGPGRQEERPPAERVGLGGRXRASGADKRQNNQGKSTGPAWNSRRPRP

SEQ ID NO: 942764 - protein, 124 aa, Homo sapiens
MPWAVGRRWAWAALLLAVAAVLTLVFWLWLGALGFVFQREEIAQFARQYAGLDHELAFSRLTVELRRLHPSHVLPDEELQWVFVATGFLMGAIFLLHASLSEYVLTASAPPWAPAATAGRYWAD

SEQ ID NO: 942765 - protein, 122 aa, Homo sapiens
LIAVVLQLSQQLSGINAVFYYSTSIFEKAGVQQPVYVTIGSIIINTAFTGFSLSVEEPPGLLTLHSHRPRWHGGLCHTHDHRASTAGAATLDCPTLTHSWPSLALWPSLKWVLAPSHWFTRG

SEQ ID NO: 942766 - protein, 235 aa, Homo sapiens
VNKTPRGSQIAAVAGGWCVAAAGRPPCPGHEVAAAGGAAAQAAAPPPRCAARSSPGGVVSAWTWLAASLDWYFFLFFQAAVWLSEEQFLSLKGLKKLPEHFEMNVLVPPDPYVPIDSSDFALEIGMLGVKPKKSDRYFCMSIRIPVDEEAFVIEFKLRASMDTVHHMLISGCNMPSFTGSYWFCDEGTCTDKTNILYAWARNAPFYLVSPKAVGFRVGGETGSKYFVLQVQYGGY

SEQ ID NO: 942767 - protein, 217 aa, Homo sapiens
MEPSSKKLRGRMMLAVGGGVLGSLKFGSKIGVINAPQKVIEEFYKKKWVHSYGESILPKKLTTLWSLSVAIFSVGGMIGSFFVGFFVNCFGRRNEMLMMNMMAFVSAVLMGFSKLGKSFEMLILGRFIIGVYCGLTTGFVPMYVGEVSPTALRGALGTLHQLGIVVGILIAQVFGLDSIMGNKDLWPLLLSIIFIPALLQCIVLPFCPESPASCHQP

SEQ ID NO: 942768 - protein, 91 aa, Homo sapiens
ADGDWQDFYEFQEPPRSLLDQEKFNGNPEPGAEAGAGAGGGAYCFPALACSLEEKLSLFFRPSNPGAEPPRTAVRPITEGSSCRGTKFGMP

SEQ ID NO: 942769 - protein, 108 aa, Homo sapiens
MLEQPRATWGDPAGSHGPPCSSTTEEGAERPAMGPSYSSPYVNLKKANLGERSLDLLVPWLRGDLCNPEKTAGGNILIPGLSQKPISSFADFERHFLPASRNRTVGAT

SEQ ID NO: 942770 - protein, 133 aa, Homo sapiens
  misc_feature (81)..(81): Xaa can be any naturally occurring amino acid
  misc_feature (103)..(103): Xaa can be any naturally occurring amino acid
  misc_feature (108)..(108): Xaa can be any naturally occurring amino acid
MGLGVPAVRSGREYAPDLGYYLSRSGRATRGAPVYTALDPAMPCRNSRGRSATRDAHWWPPLRVLGSRQPQSRLGVWGEPXQRCQSPDAWLDSMAHEDMRVTXGGERXIQDQLCTSNPGERLRQEVSSFYGVS

SEQ ID NO: 942771 - protein, 307 aa, Homo sapiens
  misc_feature (12)..(12): Xaa can be any naturally occurring amino acid
GRGRGGAACGTXEGRSGGGGGDMHVARRSAWLSWWSVLGEHGRIFRGERSGLDSSSDDEKELTPSNFNREVIQSDSLWLEEFYAPWCGHCQRLTPEWKKAATELKDVVKEGAVDADKHHSLGGAVMEFRDFLTIKIFGSNKNRPEEYQGGRTGEAIVEAALSALRQLVKDGFGGAKLEDTVLENKAEDDSSSKKDVIELTDDSFDKNVLDSEDVWMVEFYAPWCGHCKNLEPEWAAAASEVKEQTKGRDELAAVDATVNQVLASRYGIQRIPTIKIFQKGESPVDYDGGRTRSDIVSRALDLFSDNA

SEQ ID NO: 942772 - protein, 163 aa, Homo sapiens
SFFFHFTHKLPSVKLGIRPAGTSFHPRFLGVEATLGLSLPSLPPPPPPHPSHLVPLDQGLLLSRRRGPHFPTPDLSDLRIPRATGSSSFSSMALPPPPHPQQDEGQGPPSQKQQHQQGPPHGPPHQRAHISGRGLGAARTKRTGAARPRPTAGGPGQTKGEGT

SEQ ID NO: 942773 - protein, 257 aa, Homo sapiens
RRERGASVFCCLHQRGPRAIMRKPRAAVGSGHRKQAASQEGRQKHAKNNSQAKPSACAGLARPPEEVVLLASVSSYHLFRDVAVVTAFRGGLLGWYDLELRALPWGRRAVAVLALARRAFAVWVSVVLLLLALVATVVIFSAGWLLEWPALLALACASLEEVALLWAGLGFFSRGRRLLEGAREVVEELGGLLPRAAVALLLLLPGVGRFPAGAFASFAFGLAAGVVDGIVARGLCRVRAFGAVPCCSLVSLLLWGS

SEQ ID NO: 942774 - protein, 161 aa, Homo sapiens
  misc_feature (117)..(117): Xaa can be any naturally occurring amino acid
  misc_feature (122)..(122): Xaa can be any naturally occurring amino acid
  misc_feature (138)..(138): Xaa can be any naturally occurring amino acid
KLGEAPSSAPSFPNNSSTAQPPGPRGRAGVRQTVQHKYVEATARISSVRGQGNWVWEEKWVALGARPPVLVQSPGAQREREGKSGPAWNVALARPAQGGWEVDMDVDGGGGGGGKSXGKEAXELALALCSKDKMKLLXFNEELKEKENKERDGGRGGESNI

SEQ ID NO: 942775 - protein, 108 aa, Homo sapiens
MPRLTALGVPTYLPDLNRAPILSVVCCLCVVMASLVRAERIGRERLHGKKPLDGVIDALLPPYFLSVPAIVHAARVGCRTASGMRYRGPRRASVEGLSEDSCTTRLRS

SEQ ID NO: 942776 - protein, 252 aa, Homo sapiens
  misc_feature (6)..(6): Xaa can be any naturally occurring amino acid
  misc_feature (66)..(66): Xaa can be any naturally occurring amino acid
  misc_feature (70)..(70): Xaa can be any naturally occurring amino acid
STWVRXREGHIRSRRSMKMLWKLTDNIKYEDCEDRHDGTSNGTARLPQLGTVGQSPYTIFPPLFQXPNAXFHFPYFSPPYQPIYPQSQDPYSHVNDPYSLNPLHAQPQPQHPGWPGQRQSQESGLLHTHRGTASETNRSLKIIRHGTYKAARGPPKVFYTHSTQDSETSRSTPYLIAIEEVPHVEDPGINIPDQTVIKKGPVSLSKSNSNAVSAIPINKDNLFGGVVNPNESSVQFRVASRSSAPPRSTKSR

SEQ ID NO: 942777 - protein, 310 aa, Homo sapiens
ITFIIIQRLEHAMSSEEGKLFLGGLNFNTDEEALEDHFSSFGPISEVVVVKERETQRSKGFGFIIFTNPEHASVAMRTINRRGGASYLQRDLVPICELPSFFLFFPLYVMLGADVSNKATQCPLTEDMTAFCSRGWMAKADKAIGRLGGDDWSCMRPRSHLMDGGAAYGLRIVESADTVGLARRGTRESSDIDSEASNQERCLSSPDSGAASEEWGGELSLSSVKILWMVVRSVWIMQASLLGGTEEVALGPMGVVAATLEVVGTGLWEWKYYDSRPGGYGYGYRRSRDYNGRNKGGYDRYSGGNYRDNY

SEQ ID NO: 942778 - protein, 134 aa, Homo sapiens
CFEPSRALSMASADMRTLRSGGRLKLPRRSNSFWFIFSSSFLVFCTLTSILYFSSSAASILACSFLEISCNSEMEPGICSGGHFSARYFFFFPSWRLFSFSSSVAAICSITLFRCCLRAVMALFRFSSSPILRS

SEQ ID NO: 942779 - protein, 277 aa, Homo sapiens
MRGDGVRRTPHPWRGGGRRVPGVTGQKHAGWVGAWPEWGGAVPPPPGEWAPTAPGGARATNSMYRTSNAPGASVRGLAGAPLLDGRASSGGTRGLSPDLGRCRDRRGRCPGRGWTAGGLYLGPQVDENGHCDPLTTWARARPMRAGAVPTLNAAVLQNCKAGDPRAVGTPRRLGLGGLRARERGGARVLINGQEQRGDARSGTRTRSGEHAPPQGCAPSKRKWGIARCICNGAVNETARGRPAAQPPDKTNVGQGALKLRGAVGPWPRPGTALVPSS

SEQ ID NO: 942780 - protein, 234 aa, Homo sapiens
SFASASRITLLREDGEGEGQESTDLSGIGCLVTRAAFNSGKVDIVAINDPYIDLNYMVYMFQYDSTHGKFHGTVKDENGKLVINGISPSPSSRSEIPPKSSGAMLVAEYVVESTGVFTIIEKAGGHLQGGAKRVIIFAPSADAPMIRLWVSKCEDMKTASRSSGMLPVTTNCLAPLAKVIHDNFGIVEGLMTTVHAITATQKTVDGPSGKLWRDGRGALQNIIPASTGAAKAVG

SEQ ID NO: 942781 - protein, 172 aa, Homo sapiens
  misc_feature (136)..(136): Xaa can be any naturally occurring amino acid
MWHTGQAPLLPPPSSSTGARVALSSVPTKTWPREEAQTCGEREGKRSRNSSSEFPQKVRWNRALAASARGSNPLKPQERGQRRDWDGGGSAQKAPRRHWLQNGVADLARKSACGGQVGLRIPGAASDIGGTQTHPXSLQLWQSEVWKCSQGHLAMAQGQGANKNPGASRPSC

SEQ ID NO: 942782 - protein, 244 aa, Homo sapiens
GIAAGSDSRPAMGCDGGTNPKRHELEKGPKKVEKVDKDAELVAQWNNCTQSQEKKRRPKVACELGRLENKEAVKEFPLDKPAEKAPGKAASHKKIKKNVTEPKPSKKPAREGEKGNTKGDKHDDPQRARFNRPVVGLEMNGRHRFRLLRCSGCVYSEPALKEKKAEVCHTCGAAFQEDEVIVTQKSTKEDVDVLKTRMEEKRLKAKFFKKTKKPKAAESVSKPDVSEEAPGPSKVKTGKPEEAS

SEQ ID NO: 942783 - protein, 135 aa, Homo sapiens
IAIPYAEGQRKRRNTIHEFKKSAKTTLIKIDPALKIKTKKVNTADQCANRCTRNKGLPFTCKAFVFDKARKQCLWFPFNSMSSGVKKEFFHEFDLYENKDYIRNCIIGKGQSYNLTLSIINIFIKFHPFISIIPH

SEQ ID NO: 942784 - protein, 160 aa, Homo sapiens
MLLLLLSIMVVEVAVLVLLFVFKMVSKWMVGNGKENDLWQNCSSSSSGNVQECFSSSGKEWLQSVQATMMLSIIFSILSLFLFFCQVFNLKKGGRFYINGIFKILAGLCVMSAAAIYTVRHPEWHLNSDYSYGFAYILAWVAFPLALLSGVIYVILRKRE

SEQ ID NO: 942785 - protein, 278 aa, Homo sapiens
PGSRQLLGEMTGERPSTALPDRRWGPRILGFWGGCRVWVFATIFLLLSLAASWSKAENNFCLVHPLVTMEQLLWVTWTQIASLDTFLIPLITPTPPATLLPFPHPRKISSSNDLANFIPLPTSMDHLTTSSPTPFIVNHGDVPHLLNLPPLLTHLHTPLLFLFYSLFAHKAGSPGGLYHVGMEKDDGVSWSTPRNLSLDIGTEVFAPGPGSGIQKQREPRKGRLIVCGHGTLERDGVFCLLSDDHGASWRYGSGVSGIPYGQPKQENDFNPDECQPYE

SEQ ID NO: 942786 - protein, 280 aa, Homo sapiens
MLSEIVLVSAPGKNTIQGEYTVVNGKVTVAVSMNLKKFLRLQPKSNGKMRPQLTQKLYEDGPEDVARLQSLEKSFLEQGDVTKITSEEVEKTKEVAGLDEECTIIEGLAVLAFLYLYLSICRKKGQTKENLELINKWAFQGERMIHGNPPEWTMLSAPGEEPSDTIKEKISSLKRSPALQILLTNTKVPRNTRALVAGVRNRLLKFPEIVAPLLTSIDAISLECERVLGEMGEAQPLEQYLVLEELIDMNHHHLNALGWATLSGPALPGDQGRGLHSKLT

SEQ ID NO: 942787 - protein, 266 aa, Homo sapiens
  misc_feature (1)..(1): Xaa can be any naturally occurring amino acid
  misc_feature (4)..(4): Xaa can be any naturally occurring amino acid
  misc_feature (100)..(100): Xaa can be any naturally occurring amino acid
XLTXGGAARPLAESAAGGDAALGGRGGAGNGRLGAARRGMWSGPPQPDQGLPPPLAAVPVPWKTTDPCQGHRESPRALVETSAGEEAQGQKGPAAAQLDXLRLRISSMEIRKKGSEFLKEELAQSTKGLNYRKKNVTAVQVRDTKKELEDWGHLFENSQKVREPAEAAAQKTLKELGATRQLQQSDNLKTLVITSTPPLPTASLTQLLSPTKAGPERPLSPQEHQQHLCPPCVPLRDTPHPRQRGEEVDTCCFAEFQAGGNAPPWT

SEQ ID NO: 942788 - protein, 268 aa, Homo sapiens
  misc_feature (133)..(133): Xaa can be any naturally occurring amino acid
  misc_feature (138)..(138): Xaa can be any naturally occurring amino acid
  misc_feature (144)..(144): Xaa can be any naturally occurring amino acid
  misc_feature (146)..(146): Xaa can be any naturally occurring amino acid
  misc_feature (148)..(148): Xaa can be any naturally occurring amino acid
  misc_feature (150)..(150): Xaa can be any naturally occurring amino acid
  misc_feature (153)..(153): Xaa can be any naturally occurring amino acid
  misc_feature (159)..(159): Xaa can be any naturally occurring amino acid
MPGRVSAWPPTAENRRGRSEALSVFYCGRKCPSPSSGFGSWASRSAGLSGGGGGGDRGGLCEGGGRERRERKGGSGGGVLTHLNKALGQFCAMEALPAPPSSPIGRPPGTGTGWPQGVLLARAWRLGWGVPGXPAAPXRPFLVXNXLXGXCWXFWGLGXGRWLPQVSPPKGWGPPHVAPHSLVFGAFFKPPGGGKNPWGKKGGLAVQSQPVCPQLEVWCWLNAASLACLSLLSASGSRLAPSPRLPVCRLVLGWVLLCLQIPSSLGRA

SEQ ID NO: 942789 - protein, 306 aa, Homo sapiens
APGSSERVHAWQTEKASAQLEGSVIFCSGPKKKKMENGRHEKDLFVVVLSFAKKRQKKASKKFKDTVHVEKEEVQNEVKEGILYLEPYGLVYCVNRICSENGNVLCSRVKGPKIQGLSPVQIPQLCCPRCPEESLPPVNKKVTSKSCEYNGTTYQHGEQFVAEGLFQNRQPNQCTQCSCSEGNVYCGLKTCPKLTCAFPVSVPDSCCRVCRGDGELSWEHSDGDIFRQPANREARHSYHRSHYDPPPSRQVEGLSRFPGARSHRGALMDSSKHQEHCAIVKIITEHGQVCVSMEDYLMRVWHQTPA

SEQ ID NO: 942790 - protein, 285 aa, Homo sapiens
ASAPEGPGQPEAPRPPDPELPKPSRAAHTPGLHPLFQHPLRFERQPVSHRPSCPRDRDAAACEGPNESPRCYPPAPVVLSLLITRAQAIMLLRLDLNDTYSGKREPVSGDHSADGFEVTSRSEKSSGSEIAPVSEMTLLVVNPYLRDATIDYCRRGIDNRNHKIPRLLFVRLISAQECEQGSVTPPPKNKDGNSAKIRSRITPHKRKEKEGRAKNEQKNSKKTRKERKDPVFMLAISKISCYSQEKCKIVYEQPEKQVTLQNVSQEIFRVKLDVGEKSNENLTAM

SEQ ID NO: 942791 - protein, 300 aa, Homo sapiens
PRLLGGSYGWVCRTGAGAGAGSPNGNTKCKRQKLYNFLPSGSIPYSNMQLAPKEISVELQKTGQICLSTIYLSLGAEMWGPEAWLLLLLLLASFTGRCPAGELETSDVVTVVLGQDAKLPCFYRGDSGEQVGQVAWARVDAGEGAQELALLHSKEELHVNPAYEGRVEQPPPPRNPLDGSVLLRNACKADEGEYECRVSTFPAGSFQARLRLRVLVPPLPSLNPGPALEKGQGLTLAASCTAEGSPAPSVTWDTDVKKKKNNRSFKHSRSAAVTSEFHLVPSRSMNGQPLTCVVSILACS

SEQ ID NO: 942792 - protein, 193 aa, Homo sapiens
  misc_feature (86)..(86): Xaa can be any naturally occurring amino acid
ASDSECVRSGSGGGGGGGVGGGGGGMRSPAPLPPWWYKAKVWEGREKEELQPAGELRLHFRKKKGVYGNGREVEIGPPRCELSSAXGFCGVNALFIPPYVSLTLTASQCEKSRAVKSGGRLKASIPTSDPGKATSETGPKKLPVLPAELSPVRVLDPRSNDPGSLFIASRSPRSLLDPGMPGISARGLSHEGR

SEQ ID NO: 942793 - protein, 82 aa, Homo sapiens
  misc_feature (16)..(16): Xaa can be any naturally occurring amino acid
QQHSERSAFRKKSSSXGGCFSGGRAPKKPRAKNLGRPPKKPRRRSQSEAKAPPPQKRKKSNNRLQGPIAGGCPNAWEAKKKN

SEQ ID NO: 942794 - protein, 307 aa, Homo sapiens
LPGAGRRDLAPNPGGPGAVAQGPGRGPGGGALRARPGAVPGGLAPRFLPSLRAQSPFGRAANRRLNDKKARAFPSKTYKKKERKPKAASLLSPPPLKQKLPGSIKKRTHLNFPQEAALRDEYLKKNGARIWKKLAKDLISEGSGLGAIEVMGTQDPGNMGTGVPASEQINCAKEDPQVYCPEDTGGTKDVQVTDCKSPEDSRPPKETDCCNPEDSGQLMVSYEGKNMGYQLPPFGWRICLAHDFTEKRKPFQANKVSLSNMINHIGMGLRYLQWWYRKTHVEKKKPFIDMINSVPLRHIYGCPLGGI

SEQ ID NO: 942795 - protein, 257 aa, Homo sapiens
MSRQVVSSSKFRQVFGQLAKADQCYEDVRVSKKNWDSGFCVVKLKFVALICEASGGGAFLVLLLGKNGSVDKNAPTVCGQKAPVLEIEWWKNNENVIASGSEDCTVMVWEILDGGMMLYLWEPVVNFEGHTKRVGIVAWHTTAQNVLLSAGCDNVIMVWDVGTGAAMLTLGPEVHPDTIYSVDWSRDGGLILYLLPDKRVRIIEPRKGTVVAEKDRPHEGTRPVRTVFVSEGKILTTGFSGMSERQVALWGHKPPRE

SEQ ID NO: 942796 - protein, 299 aa, Homo sapiens
MSFFPELYFNVENGYIGGNGARPEGGVLSQADYLNLVQCEKLEELKLHVKSTDYGKFLAKEEEALKVKVIDDRLKEKMVVEFRQMRNHAYEPLARFLEFINYSYMIEKVILLIKGTLNQGSIAEMVPKCHPLGSFEQMEAVKIDQKTAEIYNAIVVEKTLEAFFQDCILEQDLDEMNIEIIRNTLYKAYLESFYKFCTLLGGTTADAMCPILEFEADRRAFIITINSLGTELSKEDRAKLFPHCGRLYPEGLARGLGLTTMKRSKTWPITTRSKSCSSRVQVATLGDKKLEDRFFEHEV

SEQ ID NO: 942797 - protein, 133 aa, Homo sapiens
  misc_feature (1)..(1): Xaa can be any naturally occurring amino acid
XLSPSSRAKERAPRARPASTSPSPGAHGRRGGPEGKSSSRSPARTPAPGVPAARPLNIARLWEKRRHSPSSSLSPKKPLSRDKDGEGRARHSEAEGTRARRRSRSYSPICKRRRDLSSFMERRRITSARKRPI

SEQ ID NO: 942798 - protein, 290 aa, Homo sapiens
AHSLRRFWLQTALRKDTANGFGYIIKKGFNNRESTQNQEHSVSWTPDNSTVSTLCSEQEQRHGYFLFLKRNAPGGCVPSKNEAKKEKKKKKKCKIGSKRCKKGCMNGFHAMKHLNSLHGNMKKREKGLNKRVGNFWKNKTQIAKKCGLWLSLGGFHERGQDWEQTQKIYNCHVLLNSKGAVVATYRKTHLCDVEIPGQGPMCESNSTMPGPSLESPVSTPAGKIGLAVCYDMRFPELSLALAQAGAEILTYPSAFGSITGPAHWEPVSSEGDVGQQVVASDDAQSSSTWR

SEQ ID NO: 942799 - protein, 273 aa, Homo sapiens
  misc_feature (36)..(36): Xaa can be any naturally occurring amino acid
  misc_feature (118)..(118): Xaa can be any naturally occurring amino acid
  misc_feature (130)..(130): Xaa can be any naturally occurring amino acid
  misc_feature (140)..(140): Xaa can be any naturally occurring amino acid
PSPLSPGDPIPGPERIITVESLSRDWIPTNRGNAGXGEPGIDESTDAPTGWWESPSSGEGPPAVPTGRPDARRGSGGYGACGLTRRTGPGVTGIRGSHNDSTGPETELRRDTPEVVGXNVSGRTMIGEEXDESHVSLSAXYENCITVYGKRGLGKDRGQVTMSAETFRGTRNGRGSGTLANPGALHGRDPRRPFYDIPRTREQLGLDGGGQFTSDLRFGGGRLTRSSALDLVPETDASVVGKPVVVVGLALGDVVEGLSPGPVRVKRVEKVDE

SEQ ID NO: 942800 - protein, 336 aa, Homo sapiens
  misc_feature (174)..(174): Xaa can be any naturally occurring amino acid
IRTVADPPHKLRRLVTRDPLALMLSVLPPEIWGVVLRSHKVPMALLQRADHLSRLFRRHRIRAVWPSLPLRRLRRPGPVRKSLSRLNNRDIRDWGMVVVPPRRTSVVDKAPRVDRLHDVWVLAGVSNFSLCLATLAQILGRVTRLIRGGTARGDLASFSTSGFSSFRGSVILDXHILGRNGGNPVLPALLWSYLHNEVRKVFRPRSHGDGHPGVGVQMGDRWGDDLDASLHMVTARKTGVILVPTDRVVRGSCRQNVARRLRRFPLGSLVPPIRAPVLPAKEGVEMARKATRRVNNRLLILVRPGLSQLAVWYPALVTETTNMMMLNADAQHIFVK

SEQ ID NO: 942801 - protein, 295 aa, Homo sapiens
  misc_feature (3)..(3): Xaa can be any naturally occurring amino acid
  misc_feature (7)..(7): Xaa can be any naturally occurring amino acid
  misc_feature (14)..(14): Xaa can be any naturally occurring amino acid
  misc_feature (184)..(184): Xaa can be any naturally occurring amino acid
GGXRAEXGEEQGDXGGGDQQGGGGGGDGGTGPRGSQPQKQARRARGGGTRRPPGSDAPQEDAHGNGQDDQEAGGGREGAKEGDQRTPEESKARRGRSGDRRDRAGDGRRRGGAGERRAGSAHTQQRHRRDVGSAAGDTDETDRDGRGGGEERRKRTEGHDAPGEEGEDGEEAETDKKRRARDDXRGRGADQEGDARATREERTAGRHPEEGPHRRDRGRAETREDRDRNKEGEGQGEEDSAERDAAEPGGGGAGGGADGEAAGPGRLGEEQGGATGRGRKGATGGGPRPKTNPGG

SEQ ID NO: 942802 - protein, 202 aa, Homo sapiens
  misc_feature (86)..(86): Xaa can be any naturally occurring amino acid
MNKIKKLKVKAPPSVPRRDYASESPADEEEQWSDDFYSDYENPDEHSDSEMYVMPAEENADDSYEPPPVEQETRPVHPALAFARGXYIDNGSSQRLSPPFSKTLPSDFFFFLYKLMLTSILLALIVFHKPQVPPKPKGLLEDEADYVVPVEDNDENYIHPTESSSPPPEKAPMVNRSTKPNSSTPASPPGTASGRNSGAWET

SEQ ID NO: 942803 - protein, 286 aa, Homo sapiens
  misc_feature (19)..(21): Xaa can be any naturally occurring amino acid
  misc_feature (24)..(24): Xaa can be any naturally occurring amino acid
  misc_feature (78)..(78): Xaa can be any naturally occurring amino acid
  misc_feature (113)..(113): Xaa can be any naturally occurring amino acid
  misc_feature (116)..(117): Xaa can be any naturally occurring amino acid
  misc_feature (142)..(143): Xaa can be any naturally occurring amino acid
  misc_feature (146)..(146): Xaa can be any naturally occurring amino acid
MTVEDLGSKRLLTCSLNEXXXEVXGDRWLKGGVVLKEDALPGQKTEFKVDSDDQWGEYSCVFLPEPMGRANIQLHGPXRVKGVKSSEHINEGETAMLVCKSESVPPVTDWGWXKIXXSEDKALMNGSESRFFVSSSQGRGEXXIEXLNMEADPGQYRCNGTSSKGSDQAIITLRCQHLAALWPFLGIVAEVLVLVTIIFIYEKRRKPEDVLDDDDAGSAPLKSSGAAPEGQRQERPPEELFLRQVARGRSLLRVWAAAGVHSQCLQDSKFSPLKENPPVDSHQTLP

SEQ ID NO: 942804 - protein, 109 aa, Homo sapiens
HTYVYCSTIHNSKDLESTQMPINDRLDKDNVENEKKRKPGKKKKTARKRRATQSQQQPKEEEEEKKKEKKKEKKRGERRREKEKRIKKPKTYLKRKKAPSWKGGGLGEG

SEQ ID NO: 942805 - protein, 283 aa, Homo sapiens
  misc_feature (8)..(8): Xaa can be any naturally occurring amino acid
  misc_feature (111)..(111): Xaa can be any naturally occurring amino acid
  misc_feature (113)..(113): Xaa can be any naturally occurring amino acid
GDPKSQWXSQAQFRSPVRHLRGTKAMESTATAAGAAEAGGGDKKEEVPAPTTTAEKVESLDVESEAKKQRGLGQKQLGRGERPAAVNAFQEAARPGGKKDGETAKEGGEAXFXYGKTLLEEARMENGVWGNALEGVHGEEEEGEKTEEESLGEKKDNIDETEGSEEEEKENDKTEESQMYSVLENKSLQENEEEEIGNLYLTWDILDLAKMIFKKQEAKEAQLYAAQAHLKLGEVSVESENYVQAVEVFQSCLHLQEQYLEATAVSLQRPTTSWAWLMGTLSV

SEQ ID NO: 942806 - protein, 204 aa, Homo sapiens
PGGEEAPGAARDRSGAGGQPGQPGKRGEDGGGPGGREAGRTGTRGEAAGAAPGGTGGGGDPSRGDTTGPGRGGGGGARQQKKQGRKRKKKRAQQQQSVGGDGGRGGGGAEPRGGAERQQPPGQKRAEALRRQGAKQPAQRALPAKRPPPLACGMRALAWTPFQKKGEKRGKKGRGIGEKKKKKKKAQRAARKSARKKCKKQSFW

SEQ ID NO: 942807 - protein, 187 aa, Homo sapiens
KATHGPPRDTRPRAERGGERGGGGGRRGRAGDSARGKKPDENTGDRRKGGPRAEQKRTGALRPGGGRGGNGENGRATAGLREEGPGVGGGGGVEKGQSGERRAWSSQPVCVGQAGGSTGGGSVRGEQEENQAAGGGSQGKREPRGGTGGRGEGPREKGPEQARQGRDNGKGEGPGEGGGKERRGNRG

SEQ ID NO: 942808 - protein, 103 aa, Homo sapiens
MARHRLVVVRVAGEKGLPSGVCGQRAKLSVSPDSAYGAPGHPRNLPNSCQSRLRFGASFTGMTGMASSFSFFFFSFVFVGSGASSLVHMNPYGAFPDVPLHFV

SEQ ID NO: 942809 - protein, 185 aa, Homo sapiens
ERTGDRGKGRTKEEQRGRDHRGRKGQEKRTKRRGGEKKTESHDLDAGTGGAGQGAAKAGLGKRGRGAGRGTGGPPGRQRRRPRARLGGGEEREERAREIGKSHAGGGRRRRGGAGGAAEAGTAGGGGGGGGTAPEPRRRTPRAQPAGPRGEGKGAAPRATAAQGRERRDGRPRGAAGPQTAAPRP

SEQ ID NO: 942810 - protein, 197 aa, Homo sapiens
  misc_feature (170)..(171): Xaa can be any naturally occurring amino acid
GPGRKAREGHRGRGAAGGGQEDPRGSQERRARHREKEPGGSAASCDQGKGRRGPWGEPAGRGGGPRPPPPPEGRPSVGSHKQATQEEQNTASGEEAKGPGKGSRARAKEKAGLERRGSPGGQQGPKTGTGSAAKEKPEPRTGPRPPGTAARAGEAEDKGAAQPSGPGRRXXTSAGGPSKGVEVGRNFKMCPVLPRPL

SEQ ID NO: 942811 - protein, 195 aa, Homo sapiens
LPPSWYFLELPVLVLPKCPDPKQESVAEIGTWERNNLGNMKVMLVAKGRQLDSVEKGCSRSIRCLDLSMSTGEEDSDTVTGETENPVTLTQDTEGNLILHSPQNEAEEIDAEESIEPPQKRPWLSPEEEQSIEESTPCISVVALPRSENDQSVEVTMTATTEGAEEEGTEGTVTQIQSLQNEQRDEIAPFGNEEV

SEQ ID NO: 942812 - protein, 259 aa, Homo sapiens
APNLVLAVAPAPRSPTAREGGRRGPGARSAKRTRNPERRRGGVEPDDAQKGPRPARAAGMSEARKGLEEAEESKYDSGIESLRSLRSLGEYTSAPASGPWEGSLEKWKDDEGEVKEEKEKEDADGERADSTYGSSSLTYTLSLLGGPEAEDPAPRLPLPHVGALSPQQLETLTYIFEDGDTLVHLAVIHEAPAGRRGGRAGRPQEALDIQNNLYQTAHHLAAQLDQPGAVRALELKGASRALQDRHGDTALHEACQRHT

SEQ ID NO: 942813 - protein, 172 aa, Homo sapiens
  misc_feature (112)..(112): Xaa can be any naturally occurring amino acid
  misc_feature (128)..(128): Xaa can be any naturally occurring amino acid
  misc_feature (130)..(130): Xaa can be any naturally occurring amino acid
  misc_feature (136)..(136): Xaa can be any naturally occurring amino acid
SGRLAAAAAAPAIPAAATTRTRLRPGEQQQPQPQQPPLQLERQQQRQPQQQPPRRAALGRARPPEGSSPPPTAAPSGVFMPPGPQGAAMARARQEGSSPEPVEGLARDGAGXFIFGRLVPSAVSCGLXEXGLVAAXIHPTLLPAAYLCSLTAPPAVTAALGGSRWPGGSPPP

SEQ ID NO: 942814 - protein, 147 aa, Homo sapiens
MRTENDVGRPPPGPPKGRELGARNRKDGAAGAWMLAFCPVCLVVSGTWSWYLVALPRLGVEGRGPQRPLPACGIQALPGQARLGGGNTGEKEVATSAQAGTCRSASLQLFSSEIAPSSPASSSFSSDCALPDPESPCSIKWLILIFV

SEQ ID NO: 942815 - protein, 70 aa, Homo sapiens
  misc_feature (23)..(23): Xaa can be any naturally occurring amino acid
  misc_feature (25)..(25): Xaa can be any naturally occurring amino acid
  misc_feature (52)..(52): Xaa can be any naturally occurring amino acid
  misc_feature (59)..(59): Xaa can be any naturally occurring amino acid
AALSLSTLASPKGGSGTAGTEAXAXIIIPLRTTENNYCPHYEKVSGDYGHPXLHRSKRXPAPRSPAKQSN

SEQ ID NO: 942816 - protein, 170 aa, Homo sapiens
YPSHTPSTLFSISHFLHHPIDLNQTKFKFQSPSTQPYSQSDEQYPFHLTFQNQLPFPELTQEQLISLIPKMHLLFPLTLVNSFSSDIIDSPHIFITSSLTFYLQANDKKIFIFQSKPEIHYPPHFHHHPTNLRESSLSKMSSDLQMRNSQAHRNFLEDGESDGFFKMPLS

SEQ ID NO: 942817 - protein, 99 aa, Homo sapiens
  misc_feature (97)..(97): Xaa can be any naturally occurring amino acid
  misc_feature (99)..(99): Xaa can be any naturally occurring amino acid
RLDKLMFAGAPCLARLAPPPPGLEAAAQPGCLLVEAASAVEADVVLGGSSAQGFRGGASSCSLSGGSSGAFGGSFGGGFGSCSVGGSIFWELLGCCXHX

SEQ ID NO: 942818 - protein, 85 aa, Homo sapiens
MDEIIDVGSENNYSGQSTSSVIRLNSPTTTSQIIERNKKKEIIKKKRQYQKNNSLSELRRLVPTAFEKQGSAKLEKAEILQMTVD

SEQ ID NO: 942819 - protein, 143 aa, Homo sapiens
EEGGRDKAPVQPQQSPTAAPGGTDEKPSGKERRDAGDKDKKEELSEEDKELQNELEMLVERLREKDKSLYRPTLEELRRQIRSSTTSLTSLPKPLKFLRPHYGKLKEIYENMAPGENKRFAADIISVLAMTMNGERDCLKVIG

SEQ ID NO: 942820 - protein, 141 aa, Homo sapiens
MGMQLPWLHGMLTRVRAEDQGAWGWYLLEFFSLTDQSSLDEMEKGQSSGGGKYSWVRRSFIDNLRNSNSSGIQYVGEAKEDIGNVCRKPHARIFTVALLVITKTLELTQMSIKQRLDEMYGGDLLNGIIDSNESGINKSYM

SEQ ID NO: 942821 - protein, 72 aa, Homo sapiens
MEEQKEEVQLKEFGLTVKTETHLHQGKSIENELGENPRVVAPQCNVGVQGVKTYRGGRPLRVQLESRIVDWT

SEQ ID NO: 942822 - protein, 83 aa, Homo sapiens
PYLDPKGTSLLGWLSVSLLSSGEITASSAPRMEPPGRRECPFPSWRFPGLLLAAMVLLLYSFSDACEEPPTFEAMELIGKPKP

SEQ ID NO: 942823 - protein, 214 aa, Homo sapiens
NKRFIILDLITSENFYIKRIPSRLDKYWKKKVDQILFYTGNEGDIIWFCNNTGFMWDVAEELKAMLVFAEHRYYGESLPFGDNSFKNSRNLNFLKSEQALADFAELIKHLKRTITGAENQHIVIAIKGSYGIILAAWFRKKYPHIVNGSLAASAPIWQFEDLVPCGVFMKIVTTDFRKSGPHCSESIQQVLGMPLIDSQILAVVCSGLLEPFTY

SEQ ID NO: 942824 - protein, 245 aa, Homo sapiens
  misc_feature (241)..(241): Xaa can be any naturally occurring amino acid
MSSFLSAGSGYGRVSELRAQPGRRREGLSSPGGWLEAEKKGAPQKDSPGGVLEESIQIERMLLHSLQKFVPTDYASYTQEHYAVCRNTDDCHSTESTTTTLRSGGVARGYGFVSYLEEHAEELNFQDAKILEIGAGPGLVSIVASILGAQVTATDLPDVLGNLQYNLLKNTLQCTAHLPEVKELDGGEDLDKNFPKSAFYYDYVIDSDVGLESIIPGEDADQHGVNLEEREGDDLGKKIKXYERI

SEQ ID NO: 942825 - protein, 99 aa, Homo sapiens
  misc_feature (81)..(81): Xaa can be any naturally occurring amino acid
  misc_feature (94)..(94): Xaa can be any naturally occurring amino acid
PLRLLRAQWRRRMRKRGRSWQAALEEADRGAPAAPGALPDLCDPSRLAQLAFGAVTDVLPWPMAAVIDQASSLTALTNSTXPTQLMTHVPYTPXPYPAE

SEQ ID NO: 942826 - protein, 152 aa, Homo sapiens
  misc_feature (131)..(131): Xaa can be any naturally occurring amino acid
LVLPTWDTGEVVGDLLVAPVVAFQLFLGAERSGEWGDIWWPVVDGPCREEGGRGGEPAVRAVLGCAPVLTTLGPRRLNNTLKEVESGEKGRMTVRQPVEVPCGAGEGGGALRARLVSRALVNRTPSSPLKXGDCRATKKPFAVASGAFVFVG

SEQ ID NO: 942827 - protein, 146 aa, Homo sapiens
  misc_feature (75)..(75): Xaa can be any naturally occurring amino acid
  misc_feature (96)..(96): Xaa can be any naturally occurring amino acid
  misc_feature (116)..(116): Xaa can be any naturally occurring amino acid
  misc_feature (122)..(122): Xaa can be any naturally occurring amino acid
MSAAGSCWLEARGLPRGPSAARRGHGSGHPGTAIDPRPMALLGVAAALQDPKACPMVTLRAGRCGAAANQGRDGXLLLEAVWGTVCDALWGLTDAXRRHAEALRLEKNAYTQHSEXVLPFGXGSRAPLILAGVRCSGSRSLPGRLL

SEQ ID NO: 942828 - protein, 138 aa, Homo sapiens
RPQSLAFHGCPPPASSLPGSPHCRRRCHTMAFLTRHFIRPVSSSSTASASAKKIIVKHVTVIGGGLMGTFLCPQVAAATLHTVVFEHHTHDILAKSKNKIDENLKKVANKKFPQNPKAGHKFVEETLATPPPSTAAPS

SEQ ID NO: 942829 - protein, 82 aa, Homo sapiens
MRGEQEIGLVCDVTEAIEQIAWAVIVITREVNSQPWQLLSRRAHPNFHKFSLVGLFEYQEGINIIHADVIGIALDPTLGHMG

SEQ ID NO: 942830 - protein, 108 aa, Homo sapiens
MVAAKVAAAWLLLWAAACASEEREKFQDFKAVKIRGKLVSLEKYREKVSLVVNVASQCGFKNQHNKAMEQLQRELGPHHFNVLAFPCKKFGQKEPESKKDIDSFARCT

SEQ ID NO: 942831 - protein, 67 aa, Homo sapiens
SAGLKGNLTDRAHVSTRPEKSPARPASPAPRPGGTARAQENHIFVPAPEAPVGKNVSQRVPEAPPGR

SEQ ID NO: 942832 - protein, 113 aa, Homo sapiens
  misc_feature (91)..(91): Xaa can be any naturally occurring amino acid
  misc_feature (104)..(105): Xaa can be any naturally occurring amino acid
MSASRETQAQHHNPGLGLQLMHQWHNGLEDTERRCSAVVCVVVGAHTDHHNLGPDVCQLPILQPPQYMLWCPLHHQCQSQAACRGEKSSRXNSHWRMSGTKEEXXKKTAGSLF

SEQ ID NO: 942833 - protein, 66 aa, Homo sapiens
  misc_feature (5)..(5): Xaa can be any naturally occurring amino acid
RAYVXALAVLALLERNNADSMSAHSMLCERIAIAKELIKRAESLSRSRKEWQKKWCKAVQQIEGEN

SEQ ID NO: 942834 - protein, 104 aa, Homo sapiens
MSTENESFVENKVAFKNEAAGFGGVSTALLVLALLFFGAVAGLGFYYVKRYVKAFPFTNKIQQKEMIETKVVKEEKVNDKNPNEESKKTDKNPEEFKIPSKNIV

SEQ ID NO: 942835 - protein, 282 aa, Homo sapiens
PGPRGPQGALGEPGKQGSRGDPGDAGPRGDSGKPGPKGDPGRPGFIQTEPRGAAGEKGEPGPGGPEGGRGDFGLKGEAGKKTKKRKPADPGPPGEPGPRGPKRVPRAEGDPGPPGKPGLTEDDVMNYVKENCGCCDCEKRCGALEVVFVIENTENIGYNNFTLEKKFVINVVNKLGAIAKDPKSETGTRVGVVQYSHEGTFEAIQLDDEHIDSLSSFKEAVNNLEWIAGGTWTPSALKFAYDRLIKESRRQKTRVFAVVITDGRHDPRDDDLNLRALWTRRH

SEQ ID NO: 942836 - protein, 336 aa, Homo sapiens
  misc_feature (171)..(171): Xaa can be any naturally occurring amino acid
CIVLSSEAGESSAWRSPLQPSRALGVGATTGHRAQMAPSVLNQQRPRQRYCSLGCKNWFREPQQDALSSCAHIARDAVAGLDFQRALLAHTRVLRQDGQSSSYYEDRHSALIYSKTMYLGDMGEYMWDQLLFASQDNPKTYISYGRLGDKTSPHLGIVRDYKNSIATVEHXKGEKFNICMEFCWGRPFAVSKKDDEVTFIDAKTHRSKAEEQFKFEVNEISWNNENNMFFLTNGNGCINILSYPELKPVQSINAHPSNCICIKFDPMGKYFATGSAEALVNLWDVDESVCVRCFSRLDWPVRTSVSAMMGKCWGQIRKIILFDIAEVETGDNYGEY

SEQ ID NO: 942837 - protein, 195 aa, Homo sapiens
  misc_feature (69)..(69): Xaa can be any naturally occurring amino acid
MAPPLCPGNPPLLAPPGAPASAPPPHCPPTHPPPTHPPRTLPGPARSAAPSNPPPRPLWARRCRLPQWXACRCWMFFRGRAALGLGGLFPDRFSRRLFTAAYEGSSPPPTFYATPPFSLGPFRCSGTMGLMFPPELPIPKFVFRPIHFGGSPSSIIFGPAALHCPHTIRTHFPTAVGPPPGGGAPRGPIGGTSPP

SEQ ID NO: 942838 - protein, 141 aa, Homo sapiens
GIPAFPSWIPGSFSPGKHDRRQYLLPLPRPPPRAPPRHPPPRQPPPPRAVPPPPPPPPPAAAPRAPRSPSLLRPRFPALGRCILPPPTTFGPPPPAAPPPPGPPPPPPAPPPPPPPAPPPPPPPPPPPPRPPPPPRHPPRA

SEQ ID NO: 942839 - protein, 205 aa, Homo sapiens
  misc_feature (40)..(40): Xaa can be any naturally occurring amino acid
  misc_feature (125)..(125): Xaa can be any naturally occurring amino acid
MAPVPQLTPSKAAPGSSDKKGAWELLEAVTGSPSVWASEXSVAKKSQSSLRLSRTQTRGPHKIKHKSTKMAQPDSIGFRQAGHGAPRVTCYFPQSGKVLALTSGQLRRLFRPPGHDSDPEADSTXRGRRQHAPGLSLNTSYGKNPKEQNPEWRKPHTFLKKKEVYEGNLRGGFSLRGEILESCKHWEWTPAAAQTGAVERPRATC

SEQ ID NO: 942840 - protein, 149 aa, Homo sapiens
MDEKGEPSNEEEDKEIKGSSKEFRKKWGFGRRNIAKGEGAGEAEAEEVELKKKKKKLGMFLRRSGRKKKGTEGVEQFFTIVGGGGRRRMNVFLEDFGEETCCAATEAEKEFEGSVERGFEKRRGEKYDSKDVKERKEYYEKVKGGDDHD

SEQ ID NO: 942841 - protein, 171 aa, Homo sapiens
RPSAPRAEKRARHRWERRRQLLQNPCWAETGQSGEKSEAAQLGARVEPPPGKTPRREPADTAPGPGSQGPASRAWGLIGLRARRPGPRTRQLRRAVATAQSGAERCQVRKAEANGRRFDLLGQVSANKEARVKAFGTNRELRSIRARSPFRPDLYLPGACNPLANESAADR

SEQ ID NO: 942842 - protein, 182 aa, Homo sapiens
  misc_feature (144)..(144): Xaa can be any naturally occurring amino acid
MPSCWGDQVFTCETGVGHLNPAPGLVEDVVTAPNWGSRPIPTQLLPLSMPPMIDPANQGDYVPWENLGTQASLWFQPLLLFPGCLYSPDGPFPWDVIHISWEGSLADSILEEVASPLVTSKLLKTDLAPEALEPPTGSKEAAPXSAPLSGARRAWKSAFAAPPRSRLRPQKGVPWTEKRAPG

SEQ ID NO: 942843 - protein, 105 aa, Homo sapiens
  misc_feature (93)..(93): Xaa can be any naturally occurring amino acid
GSRHVSRQVAARLALGSGGAGALDALAVVAESVSSLTIADAFIADRGDELSSDPSLLTRASQWVHVLLPCICQSPIKLNLAIPFMRCHSLHIXYVGDVLQVDYYS

SEQ ID NO: 942844 - protein, 155 aa, Homo sapiens
  misc_feature (94)..(94): Xaa can be any naturally occurring amino acid
  misc_feature (107)..(107): Xaa can be any naturally occurring amino acid
  misc_feature (111)..(111): Xaa can be any naturally occurring amino acid
  misc_feature (137)..(137): Xaa can be any naturally occurring amino acid
  misc_feature (155)..(155): Xaa can be any naturally occurring amino acid
PPSRDSSAPQMDIWKKFFSKFEENLHNLKKEKKKQTTTAKKKEEEKQGNNKKEAAKNKAQQKQRQRKTRKNKQAAGDAERRKDPREPSPHQKPXAETNSQQKKPKAXRNTXKGKKKENPRGRRSKKPANPERRKPPXGPERWGECRPTCRVCQTX

SEQ ID NO: 942845 - protein, 133 aa, Homo sapiens
RCIPSSTSRCSQSKAVRYHNAVSRRSFFRETAEFRGKLYAAFRYARHVLTFPWTSGLSGWSSGGRFTEASLVELTRISRSAALRRMLLLPSLKMEDVAAPLPGSARLGGRVERRNAWGQSGEGKVGASCSQDV

SEQ ID NO: 942846 - protein, 248 aa, Homo sapiens
PAPFFILEPLPSVLPSSSLLHPPTTPLLALLSHCPPSILLSPPHCAFLPPGLPSLPRLCKFLFPHGLPPPLFLPLLAWLSQEATTGATGPAEPRVLGRCVHVPVASPLRRYAASSGFGLSAVQRSLKLREKPELNFEMEKEAYPCACEIGHRFEYEEPGSEVQVEHIKAYVTKGPVDAGKAVIVIEDIFGWQLPNTRYIADMISGNGYTTIVPDFFVGQEPWDPSGDWSIFPEWLKTRNAQKIDKEIS

SEQ ID NO: 942847 - protein, 105 aa, Homo sapiens
  misc_feature (85)..(85): Xaa can be any naturally occurring amino acid
ADSRAQRVSGYSAYLHRGEHTSSRDHGNPVSPSLHSAHQMEEFTADIITFINLEKEKKEIMFLATKQKITGTPFPAEVLANFGLXLEGTRMSLIPHLHPKSKGIV

SEQ ID NO: 942848 - protein, 195 aa, Homo sapiens
LDKYGVRAGYIDLCDSGPRREDISAISPPVGFLRTEPVSGPQQRLVEMLLPLLLLLAMCWSRREVNSAPGRLPSTEMQIICATMEITDDLSPADRGTSFGPTQSSPVNLEIQADEHNCRTCQEKWSSCTEARGTDSPCSVNGQTLRDVTQAPGPEYSPLVIIPHPYPELNRVDDLLHCVTNGDKTELQTGERSVS

SEQ ID NO: 942849 - protein, 295 aa, Homo sapiens
RSQVKSFTSPHYEGWQGQGWEVSCGASHQSGGPKGGAMSSFTHLWMVCMGPGNVDQPRLGPSAGHEAPQRSLCSPQERMWQQCQRQAQKGGWTALQRAGFMAFYVRFVLRPIQLDLVIVVFGGCFRRWLRAGGWRHHAPMRSLAATARSVVLGHHGLFPAQEAHGGGAVGALPAARAFLILHGTELFVVWANPSSPGAKAGGTPPEFGFLPDKLEGAEAVDVFVGGGLVALAVQVRKLPVGAKVKRNLLLHVPDGILHVLKRPPGLLELVAGLLGSIDEGLRLLVVGRHFVFLSR

SEQ ID NO: 942850 - protein, 300 aa, Homo sapiens
TGAAKRRQGTGAGRRRGGSRGASQAQQQEGSAPDTTERNNNGPEKTDGPSHGDGGRDTAESGTRQAPTDSRRGHRKQGGPQGSSQRQNEGDRDQGARSGRDGGRHGADQGEGGSPPGSDRAAGSKNRQGSSAGRRGTGTDGARANRTEQSRQDRSKGTGHGAGGSTDGHGTGSPGGGSKRQAERAREEGSRRGAGAPNQNRKEQGLRDIASTPHELYRNDYATMLPDSTENDQDTINRIIKVMKHEAYGECNKVSCLEIPGPSGPKGYRGQKGAKGNMGEPGEPGQKGRQGDPGIEGPIG

SEQ ID NO: 942851 - protein, 330 aa, Homo sapiens
PKQPGAGRAERGRAAGGGRPGSRRRAGGDRGRGGGRGDGDPGGGAGEGQAQGGGRGSSGAGRGGPGPAEHQGRGGRTTRDGGARAAARAEPAEEAGEEAGGRQAGRGRRGEHGGAGTQAERGEHGQGHGAAQGQHGGDHGRRAQGGRRRGQTGGARDAGREEHEGQRGGPPGPATRRRTRAGRAGTTPAPTGEKELQGGGGRQRRGEGREGGAQREGHRRRAGATKRQQRHAGGERGGGPPGQRHRRATGATKRRAGGKGGAPSRAEPASRKTRATGRGGHGATDSAGGAGKGGAHERRGRAEDGRQGSEERRSEQGGEQRQGAHRRGRG

SEQ ID NO: 942852 - protein, 144 aa, Homo sapiens
  misc_feature (30)..(30): Xaa can be any naturally occurring amino acid
  misc_feature (88)..(88): Xaa can be any naturally occurring amino acid
  misc_feature (96)..(96): Xaa can be any naturally occurring amino acid
  misc_feature (106)..(106): Xaa can be any naturally occurring amino acid
  misc_feature (111)..(111): Xaa can be any naturally occurring amino acid
RPGLFPWFPVCRLPLAEALGRRVPVVVRQXLLPLHQLRALGCGDLAAVGGGQAGCWGLPELSGGGDSEGPRGLSLAVAAGFLSVHGRXCSPGARRXRDSSCWPVGXEFPTXATFSNGSPKWVAQRKSSGCQETSESISVRRGRS

SEQ ID NO: 942853 - protein, 258 aa, Homo sapiens
  misc_feature (65)..(65): Xaa can be any naturally occurring amino acid
  misc_feature (67)..(69): Xaa can be any naturally occurring amino acid
  misc_feature (116)..(116): Xaa can be any naturally occurring amino acid
  misc_feature (139)..(139): Xaa can be any naturally occurring amino acid
  misc_feature (144)..(144): Xaa can be any naturally occurring amino acid
GELCACMSSRVECESAGSRGGRGGRSGGLEVGPGYLVTCRALCGGLQRILGGAGLRCTRSAKATXTXXXSRCFLRYSCSAFSATVSINLGFFLETFYRDRDSDGIRVKELDDHLSXNGRNVRVRSVGSHRGDPQIVLVXALREXCQRGQPVKLLVQLHQQGGGVEHLPLVGLQQPVVFSGQPLSDLEGFVELPPQLSLGGVVGGTVQKEDLPALVKLVLQPQAARGVVADLPAQSPVIVAFSYEFCWRVLEGRAVEID

SEQ ID NO: 942854 - protein, 112 aa, Homo sapiens
PTSPPPKHTHTHTYTLPKRTARVGRDALAMGPLGAAVAWSAARWFGCELSTFGGGWRQGEKEVSDLPRTQEKVLAKQADKKATGTQKRDEKKEEWKKRNKVGAAVTPVLPAT

SEQ ID NO: 942855 - protein, 237 aa, Homo sapiens
DELATKLSRRLQMEGEGGGETPEQPGLKGAAAAAAGAAEEAAEALGSADCELNAKMLRRAKLKKIIGEPQWLNSRVFKDYKKFKDFSKKEKKEKEKKFKKEEAGREGFTKLKEQKKKKEKIGAPQNKLGLKKKTKKVDKEFEKKDTFRDFLLIFRKEAAGELQEDNGLCVLARLSENKVSNKGVKGAKTFFEDKAQAINVSSRFEEEIKAEQEEKKKQAEEMKQRKAAFKELQSTFK

SEQ ID NO: 942856 - protein, 267 aa, Homo sapiens
KRRAANNQRQLEKGRGREKEKKDGKEEEAERDRKGSGGERWEEGQGGERGRGGGGGDREKEGERRRTREKGEGKSSGGSPAPGGGARREGRKRGKWGDGKKKRGRGGRRDGGEEGGGPEKGEVKRGGESSEEKEKGEVCREELCVYVKGSEVVCQWGKQWVVEWWKGPEAPPLKAPQSGASLPYSGPGTLKPPKERCLNPERLREVAGSPARGYPSPHPLSHVCRDTPRFAFRTSEEQGGCPSPRGPPGEVRVNIQCPIGKNQRLVG

SEQ ID NO: 942857 - protein, 206 aa, Homo sapiens
MAWVVNSLPQPSCPLEGQFSWVLVQGQAGSQGEEGERWWGAGEEELQAATRAPGAEKGKRKKKEKGGGRKGGGELRERGGEGADLEGKEGKGEGKGGEGRENGENRRGLERRGGKIISKGKGPGEGGEEGGGAGPWKGKRDKLKLLGFLRKDRLKSRASWKKFWLLRTVEMRMTLRSWPWNSSTEPTFKSLMSSSPRSSLSSLVMQ

SEQ ID NO: 942858 - protein, 245 aa, Homo sapiens
MTPYDDKLLGEKLKYYYSSSEDEDSDHEDKDRGRCAPASSSVPAEAEDKEGEGISVNTGPKGVINDWRRFKQLETEQREEQCWEMERMIKKLSMNCRYHLNEEEEQQKQKDIQEKISGKIDSEKEFAIMNEDQDDEEFLQQYRKQRMEEMRQQLHKGPQFKQVFEISSGEGFLKKKKKEQKKKKKKDHIYEDGIPGTEAMNGCMICLAAEYPAVKFCKVKSSVIGAKGQFTRNALPALLIYKGGD

SEQ ID NO: 942859 - protein, 152 aa, Homo sapiens
MGQQSSHGDIFSHFFGDFGFIFGGTPRQQDRNIPRGSDIIVDLEVTLEEVYAGNFVEVVRNKPVARQAPGKRKCNCGEELRLAQLGPGRFQITQEVVCYEFLMANSDEERTLEVEIEPGVRDGMEYPLLEKGAHVDGELEITVRIKVSKPIF

SEQ ID NO: 942860 - protein, 176 aa, Homo sapiens
  misc_feature (10)..(10): Xaa can be any naturally occurring amino acid
  misc_feature (62)..(62): Xaa can be any naturally occurring amino acid
  misc_feature (74)..(74): Xaa can be any naturally occurring amino acid
  misc_feature (174)..(174): Xaa can be any naturally occurring amino acid
KTAPPAHRQXPPPQTPIATGLGPEEEEEEEKKTLQEETAKKFCKKGEEKCSELEQMKKEEEXVGKNILDDGKEXEELKMMQIGKWDGKSGENKDEEKEENNSENGKNICNAMGERIKAAGKRFPGWEADDVGKIKEKKGPSHLAALLLGNKVCIRALREICGLWGVGQHMLHLXHQ

SEQ ID NO: 942861 - protein, 293 aa, Homo sapiens
LRLSEANSRVQSSQFDIGELYDSITLALERCYVGNRRPISQQNGAIIFQPINRTVPLRCLEEHYGTSPGQAREGSLTKGKPDVAKRLTLTMGGVQARAAEFRPRGKPPQNTKQKTLCIQPACLGSHRMDRRALSLKAHQSESYLPIGCQLSTSVLGCGHKPLPKLTCVQDGKRACPEPTSGSEGLLRRQGWGGAEGISTVNCALSPRLSPPSAVPQGSLVSLCLANSEANYCELNPAFATGCGRGAKLPSCAQGSHTELLTAKQNEAPGTRNSGVNYLILDDDDRERPWEPAA

SEQ ID NO: 942862 - protein, 149 aa, Homo sapiens
LKEQQRHKVREEVVTVGNTVNEGLNQPKDDIVHLTPKEVSHKAVGDEWERMSESGIKMWCQCLGFGSGDFKGDSFKWCQDNGVNYKIGEKWDSQGENGQMKSWTCLEKGKGEKKSDPHEAKGEDDGKKNHVEKTEEEGISRCHLLLHKL

SEQ ID NO: 942863 - protein, 267 aa, Homo sapiens
MAAVAVAVREDSGSGIQAAFPLALGYLVGNDQIRKSAASEGKETSSKKKRKEEKGADTMMTGLCCYLQPNVKAQPENCQNRAFSWALLGRKFQLVGVRPNFGLSVEPSREARAGPETGKKRGQGGPPPKASPSTAGETPSGVKLLPEYPQVDDLLLRRLVKKAERQQVPTRKDYGSKVSLFSHLPQYSRQNTLTQCKSIPSPEIHPAKERLGLQYSQGLGSGPNARGIALLRALQQVIQEDTTPPNEELSRDPVNKLKPYMSFLTQC

SEQ ID NO: 942864 - protein, 210 aa, Homo sapiens
AVTSVRRPPEEYEKAERARLRESAEMKGFLLPPAQQRDSEIMLQKQKKANVKKEAPKKPCGFVSNPLALRLGAGGQGHHAPLPPVVLTGPSTEGIVFELSLLRAPAAPPPPPAATLPLGHFRGGGGYPSPEEEKLVGPTPKKKKKRRELVGAREEWGPGGKGLEEGQPPPHQKRENSLDSDCGYVDLISETSQKKPLLYNDNQTSTPDMQ

SEQ ID NO: 942865 - protein, 184 aa, Homo sapiens
FTNGEIEAQKIKHLTKVCTATDMREREYEPRGASTSEDETNLATGGGAESNTLTAGKDRPKPAGGEEEARTVGRRLGNRGGRQRGGLREGPEEGGGGGGGPEEPASAGTKGGGGVGKWGGSSAAPSSQGGAPGQRGGAAGPADQETPPAPPGQGQQRADNEAAGHGGGFLASLYVMVTLTNWFR

SEQ ID NO: 942866 - protein, 111 aa, Homo sapiens
MFFVHMDLTTESVSDSLKSLLLDCPSSPIMCPAFLKARYPWSPWSPDASSYTRDFLFLFLEDTLENSSILKDGKDILLMALFLPLRYLFQGSAGIPAHTNLVETYELQEAN

SEQ ID NO: 942867 - protein, 199 aa, Homo sapiens
  misc_feature (2)..(2): Xaa can be any naturally occurring amino acid
  misc_feature (47)..(47): Xaa can be any naturally occurring amino acid
  misc_feature (168)..(169): Xaa can be any naturally occurring amino acid
QXYSKLTGYLLSDKEYKMIDRERLEANTTIGTRLPVHLNTIRTLSSXNLHITFPAPAPPHPSSALSIFYLLNGYLSLSPAWLNIKTREYRPPPPPPAPAPPPRPPPPPPPPPPPPPSPRPPPPPPLPPPPPPPPPPPPPRLKKHTSLLSPIPLSLQALSKDVYLDILXXVGMKKIDSEKGNRDGIKNIQQPIQYECCSR

SEQ ID NO: 942868 - protein, 322 aa, Homo sapiens
  misc_feature (8)..(8): Xaa can be any naturally occurring amino acid
MENRATLXSNYFLKIIQLFDYYPKFFIFGTNNLGSKQMQQIPISLPGKAVVLMGKNTMMPKAIPGHLENNPPLEKLLPHIPGNFGFFFTKEDLTKIKDIFLANNVPTAALSGSISPFEVTFPAQNTGLGPEKTSFFHALSITTKISKGTIEILINLQLIKTGDKVGATQTTLLNMLNISPFSLGRDNQQEDDKGSSDNPEGRESTEETRQARGREGGRKGAKGGRQRGDPTGAAGPQASSNWDKRLRALAGETEDTGPRAEKGKAGGAEPAAGGAAARGRRHHNGAAAGHPNEGGTKEKRRRGQERGGGEGGKQKKSRTRGG

SEQ ID NO: 942869 - protein, 110 aa, Homo sapiens
  misc_feature (46)..(46): Xaa can be any naturally occurring amino acid
MKFLISLLKSMTMKDNESMQEKQQEEQRKSSAKELPPKPLSRPQQXSAPVQLNSGSQSNRNEYKLYPGLSSYHERVGNLNQPIEVTALYSFEGQQPGDLNFQAGDRITVK

SEQ ID NO: 942870 - protein, 274 aa, Homo sapiens
  misc_feature (16)..(16): Xaa can be any naturally occurring amino acid
VCCVVYCVGNIRVKTXAINLGDGRGCLVPNTNYPDLSGFFLWSVFSPRRSWGEAAELSPGNRAQARPCPPMWAGTSGAAGAFWLSLALGSGGLCGGGCPFFFPGPPGCVWAGGARVYWVGSGSGSVGGGVGGSYSSLGYSERGVALCCLMLLLASHRATLSSWQKPRGLDPRRQVALGPSAFGAIRGPWGLVDLQLLPLWQSSLQSWLLRALDLSSSDLLQADAGGLLGQAQVSELPGLQLQAELLQLLLYLPVAPVHLDVVVLQLLLVADHLL

SEQ ID NO: 942871 - protein, 318 aa, Homo sapiens
AQAAEPSEQLGWEQRNPELGIGSRARGAAQPGRSTRAMMSTYKRATLDEEDLVDSLSEGDADPNGLQVNFHSPRSGQKCWAARTQVEKRLVVLKELLAAGLVACLAALGIQYQTKDPSVCLNETCVSVTNSILNPKDPTVDPCYDFISNACRGLIKANPVPGFHSRWGTFSNLWEQNHAIIKHLLENSTTSVSLVERKAQVYYRACMNETRIEELRAKPLMELIERLGGWNITGPWAKDNFQDTLQVVTAHYRTSPFFSVYVSADSKNSNSNVIQVDQSGLGLPSRDYYLNKNENENVLTGYLNYIVQLGKLLGRGDE

SEQ ID NO: 942872 - protein, 324 aa, Homo sapiens
PERALGGGLGKLPRSQVSLLACGRCEERQRLLAASASRPCERTVRPRHSGRSGAEELLQLQVFQLERERRRLLADLGQLLREGELLERRCATLVRGAAGARAEAWGDKVGGVPDVRRDLPAVAAACEGLQAELVRKGGELVVVCGWRCGGPVLRCGSVRARARGLRGAARARELELEACSQELQRHRQEAEQLREKAGQLDAEAAGLREPPVPPATADPFLLAESDEAKVQRAAAGVGGSLRAQVERLRVELQRERRAREEQRDSFEGERLAWQAEKEQVIRYQKQLQHNYIQMYRRNRQLEQELQQLSLELEGRELADLGLAE

SEQ ID NO: 942873 - protein, 103 aa, Homo sapiens
ATKGTWEDPTSAFVTSEVRKRPTFPWCAASAFEVPSSLADVLSSFFSDIFFLFSTDGVFLFFVDFQFYFQEELRFLILLVFLKDFDFFYFGSALPSLDCCGIF

SEQ ID NO: 942874 - protein, 113 aa, Homo sapiens
  misc_feature (104)..(105): Xaa can be any naturally occurring amino acid
VAPLPGVLEASQRKKVLGTTGATENPYEAAADGGSPGRGQNGALKANQNGGKNWGTRGRCCGSWLDLWDRRLRRAGAAQGRERRLGRRMCAPTRARLPIPPFLXXGWGGGGSG

SEQ ID NO: 942875 - protein, 316 aa, Homo sapiens
LPGRRSLRDLGSPGEPPAVSARSAPPPGPLGRSSRGRRAGCEVDSRRAVCPVLPPVFPLRSDLLITMSTLYVSPHPDAFPSLRALIAARYGEAGEGPGWGGGGSRLCLLPPPSSGPSFPPPLAAVPCEQGRRWALGRGGPTCCGQLLWPAGLGGPGGRRAAVLVLQWVSYAGTEFIPAACGAYAAGPGTPKLGPGPPGFAGGPWQGPESLGGVASAAELLGWGGPTLADLAAVTALLLPFRYVLDPPARRMWNNVTRWFVTCVRQPEFRAVLGEVVLYSGDRPLSHEPGPEAAALPKTAAQLKKEGKKREKLEKFH

SEQ ID NO: 942876 - protein, 242 aa, Homo sapiens
MAMKYLEVIKLFCVIMQEIQKPEKKIQFNEKVLWTAITIFIFLVCCQILLFGIMSSDLADPFYWMKVILASKRGTLMEPGMYPIVTSGLIKKILAGAKIIKVGETPKNRALFNGAQKLFGMIITIGQSIVYVMTGMYGDPSEMGAGICLLITIQLFVAGLIVLLLDELLQKGYGLGSGISLFIATNICETIVWKAFSPTTVNTGRGMEFEGAIIALFHLLATRTDKVRALREAFYRQNLPNL

SEQ ID NO: 942877 - protein, 137 aa, Homo sapiens
  misc_feature (48)..(48): Xaa can be any naturally occurring amino acid
  misc_feature (137)..(137): Xaa can be any naturally occurring amino acid
LLRGSLDPGLISTGENTQAAGAMGPLSAPPCPQHITWEGLLLTASLLXFWDLPTTAQVIIGAKPPKVSEGKDVLLLVHNLPQSLTGYIWYKGQMTGLYHCIASYVVHGQIIFGPAYSGRETVYSGASLLVQDVTQGX

SEQ ID NO: 942878 - protein, 178 aa, Homo sapiens
VGLGGGAFQGSAHFPVGGCGGLILLIIWASGVGSFSSLSGVWWGGRPVLFLGVSVGEAIEGALVGGRGGGRGLGRVGGGGVPGGGRGGGRGGRGAREGWGGGGGGGAWGRGAGAAQGGAGGARPGGEGPRSEGKAGGAPGRGGGGGGGGRGGGGAGGGGRGGGGTAGAARVGPRVARG

SEQ ID NO: 942879 - protein, 85 aa, Homo sapiens
  misc_feature (44)..(44): Xaa can be any naturally occurring amino acid
AAPRNSDLFSGGYLSSRRSPEAIPPTLLWSLLLLLELFVATAAXPLEPLFQLPAPQHPKIRMENAEKVLSWELMALKNSTRPVVY

SEQ ID NO: 942880 - protein, 274 aa, Homo sapiens
VRVRFLALRAGGPWWFRLTRARPGDAESEGVAVSGGKGYGARFELTGESAGGRKHPSPADLLLAPARLSIRLLLLLGYRRRCPPLLRGLVQRWRYGKVCMRSLLYNSFGGSDTAMLILPFSLSTDLVDNVICWFGVVFVVLVIVLTGSIVAIAYLCVQPLILRTYSVPRLSWHFFYSQWNLIQYIVFHYYQAITTAAWVPPQGRNDIATVSICEKCIYPKPARTHHCSICNRCVLKMDHHCPWLNNCVGHYNHRYFFSFCFFMTLGCVYCSYGS

SEQ ID NO: 942881 - protein, 74 aa, Homo sapiens
RWWACSGVRFGVRRIEDKRRSCSKEGPGGMEAKRGRRLKWAIKKAGKEEEEGVEVNGEVERKNRYKKKEKWKRK

SEQ ID NO: 942882 - protein, 155 aa, Homo sapiens
MAISKTVAWLKEQLELGKERLLLMDCWAQSYTVRRTLSRAVNVAIPGIMLRRLQKGNLPVRALFTRGEDRDRFTRRCGTDTVVLYDESSSDWNENTGGESLLGLLLKKLKDEGCRAFYLEGGFSKFQAEFFLHCETNLDGSCKAARRRCQCWGSG

SEQ ID NO: 942883 - protein, 125 aa, Homo sapiens
  misc_feature (72)..(72): Xaa can be any naturally occurring amino acid
LPVVVASSLRALRVRSAAGRSTTAPFARANAHVLDAPDARSRRPTDRRNALASAPTPAAAAAARNLPTAPPXTADPRERTAHARARDRDPHAARRRLPLDANLRRRTTPNATQLNKLRRRHCPND

SEQ ID NO: 942884 - protein, 105 aa, Homo sapiens
  misc_feature (17)..(17): Xaa can be any naturally occurring amino acid
  misc_feature (19)..(19): Xaa can be any naturally occurring amino acid
MTVFPKKKTFDPYIIIXAXPPPPQSKKIFSFEQAVRILQDDVACYIIKIGSLVRNKERFVKRRQRLIGPKGSTLKALELLTNCYIMVQGNTVSAIGPFSGLKEVR

SEQ ID NO: 942885 - protein, 101 aa, Homo sapiens
  misc_feature (47)..(48): Xaa can be any naturally occurring amino acid
MGQVRGNSERGHLGRFFGLDLGGECAGGAAGEIAMERRRRNFSSTSXXPFSASGLVAGLVPLVRTSAAARGCGERRVVANGGGPSRRSPSQIWRQRHVQLF

SEQ ID NO: 942886 - protein, 303 aa, Homo sapiens
  misc_feature (142)..(142): Xaa can be any naturally occurring amino acid
MAGERTRRQVNLEIEKAQIHLSTAHNKKHQQESTSERHHQGTTTKNDKELNYWRCARDVGPQGHIEAKIHPLKNRRKENRRKIWEINKKMRITSKARLHSPGSPGAELRRFFFNCLDAFLWCSSFHSSYSVQTGRQYKKNVXENRTYSAAVIYDFLDVDDINGERIQDVLFFIKTPTEEKISADPVDEGFSSPCTFAAAVSGANGSTLWERAVAQDVALVECAVPQPRGSEAPSACILVGRLNAFNAVNLFTGDNLWNHSSSFSENASILSPLLQVPDVDGDGAQILLVLTQEREEVSGTSTR

SEQ ID NO: 942887 - protein, 269 aa, Homo sapiens
  misc_feature (35)..(35): Xaa can be any naturally occurring amino acid
  misc_feature (190)..(190): Xaa can be any naturally occurring amino acid
APGFLQAEFSSAKPRGPQRARQRPSLGDAGGGLRXGDLIGAPRGAPRSTGRGPQAGGAKEKRPGGPGASGVRFKRKTGTHREDGRCPAAPESGARWGEGADPLLAPGRAPTSSKGAGLEVGFREGEKRSLGWKTLAARTAFRATKPGTAAGPGPGPGPGPALALSSPAAAFSLPDAEAAAGYLGFADYAXMLFSPPSFTGKRGRWRILLLKGRVLRFFLAPSGERSTFCSGRGESPSLCFIRRLLEYMDSGQGPHGRTSWFKSCTATLR

SEQ ID NO: 942888 - protein, 292 aa, Homo sapiens
GGVGEEGQGGGGGGGGGGGGGGGEGGERGGRRLRGGGETGEGGGGSESAGRGEAGACNAWGTGPLQGESELQCVLRGDENDPKKLMSTASALGYSEQMRPEDELRHHVRSTCERPRGVSSRAGPQPILLGETLAPGFLTGRWSKGPSRHPPCQRIPLWLREGLRSGAVSGSRGGPGPLSAMTPWGTEPRREKGNGLLQDGVGDGLSRGHPGSFYAMAALAWERSWQGEGTGKDGVLHDPALPKVARETTMKAAWCERDPGGVQNEALCGDSGRDAGRETGPGCPLTHPGPWV

SEQ ID NO: 942889 - protein, 333 aa, Homo sapiens
GERIEDEEVKQRLRAAAVAAAAAAVAARGSRRYAAPRSALYLPSDPLTLLQADTVRGRGAWAPAAPWAVEFFASWCGHCIAFAPTWKELAEDVKAWRPALYLAALVRVLQETNSAVCRDFNIPGFPTVRFFKAFTKNGSGAVFAVAGADVTVLLCVERLIGGPCEYPYIETCAPQPCAPTGSLAQSWEEDYMGFFCRENKRKSDLGSESFEEGESSLPRGERSVGSSDLVPQPQKGGGRVAQGLLERQEAQCWLEESLVVHRPSPYFAHQLVPGNGLLCSRSSPWLMGIPGPFYNRFTCKKLSWGSPGEAAPGPQFAPTTAEQDSSHWFGKLG

SEQ ID NO: 942890 - protein, 68 aa, Homo sapiens
QRVTGRLDRRAAEQLCRAAAVIDGERLERTQRVRAHSLDPKAAAATPPPAQRPSAGRDAAPLALVYFI

SEQ ID NO: 942891 - protein, 68 aa, Homo sapiens
  misc_feature (36)..(36): Xaa can be any naturally occurring amino acid
  misc_feature (40)..(40): Xaa can be any naturally occurring amino acid
  misc_feature (47)..(47): Xaa can be any naturally occurring amino acid
MSGGRHTVTMIPGVGIGPELMLHVKSVFRHACVPVXFEEXHVSSNAXSEDIRYAIMATAGYRVALKGN

SEQ ID NO: 942892 - protein, 104 aa, Homo sapiens
MVDLKHNKGGDRTRGVTGYFTFNLYLKLPKPYITINNSKPRENKDVLAFTCEPKSENYTYIWWLNGQSFPVGSSGKRPIEKRILTPPSVTRKETGPYECEKRDR

SEQ ID NO: 942893 - protein, 120 aa, Homo sapiens
MMVQNPGQVCAWEVSASAMVPWVSPPGYLVFEDFAKLTPFVKEELRFAIQNKHLCHWMSSELELVTVSERALGVSIKKAEVAPEEDESKKRPRERNKIADAKCRKKKKEKTECLQKVSAF

SEQ ID NO: 942894 - protein, 53 aa, Homo sapiens
  misc_feature (53)..(53): Xaa can be any naturally occurring amino acid
TFCLEFPCTPGEHLVLQESAEKSTYEKTALLLPCFAPSTPPLGPQSYAHPAQX

SEQ ID NO: 942895 - protein, 150 aa, Homo sapiens
  misc_feature (26)..(26): Xaa can be any naturally occurring amino acid
  misc_feature (37)..(37): Xaa can be any naturally occurring amino acid
  misc_feature (63)..(63): Xaa can be any naturally occurring amino acid
  misc_feature (72)..(72): Xaa can be any naturally occurring amino acid
  misc_feature (74)..(74): Xaa can be any naturally occurring amino acid
  misc_feature (76)..(76): Xaa can be any naturally occurring amino acid
  misc_feature (79)..(79): Xaa can be any naturally occurring amino acid
  misc_feature (106)..(106): Xaa can be any naturally occurring amino acid
KKKAKREKRNMKRWGGGVNNPQGGQXGREQRPTPAPXRTREHIKQPPVPSTKKKTPGNCWIEXGPSLPGPDXRXGXPEXYPPRPQLPTASPRHPKPPRTNEPGRKXGDEEYTGTKKKKRGGKGSPPTKGCKGTKESRKGPPHGHYGVEEG

SEQ ID NO: 942896 - protein, 286 aa, Homo sapiens
PAGAEAREREQQEQPAPDNGRAQGAGGGGGGEGSAQARGPRASHAREQAGAAGDAAREQAERRGRRRGGPRRRRRQAAAPRQQGGGAGAGATPGPGAGRKPAGGTPEGQPGPQGGSGGRRTPARRGAGGGAGGTGGPGSGPGTSGGQRRPEATQRHGARRERAEPGGPQGPADREGPRETKRRPPNAGPKGAGEGAREEDRRDARRKGEGARRAPGESGPKRRGGAAGHPRHTPPTGQPGERPGPDRGTHRHGGRQHKQGTGGGETTTGNGRGGTRSRGRSGGAGA

SEQ ID NO: 942897 - protein, 340 aa, Homo sapiens
KRAQGRPGPRHAQPDGRQARAQTGSAERGRPRTAGPEGGGGTGRGRRGSTGRRPRGEGRRKGARHRQRGRRGQEGAGAEAGDRNRAGGDRPRGGEGKGESSRDRGKERRRGEGGSEEGPSRKRADHRAGAGRQGHRHRKRPEGREKRRQAREAHRGHKGEGTQGQEEAGEGGRRQAQGRQGGPSGGRGGVRDQGGGSGQRSAGAHRQQRAGRNGGAPQGGKAGGDRKGKEAPGGEAAGGRSGAAGGRGGSGSGAGGGSRGGGGERRKATATPHRGGSAARENAAGAKDTGAEERKTGTPRTAGAAEDAATARERDGAGTGPRTEEGGSGGRTTRAAGRRG

SEQ ID NO: 942898 - protein, 223 aa, Homo sapiens
  misc_feature (9)..(9): Xaa can be any naturally occurring amino acid
  misc_feature (32)..(32): Xaa can be any naturally occurring amino acid
  misc_feature (35)..(35): Xaa can be any naturally occurring amino acid
  misc_feature (68)..(68): Xaa can be any naturally occurring amino acid
  misc_feature (106)..(106): Xaa can be any naturally occurring amino acid
  misc_feature (115)..(115): Xaa can be any naturally occurring amino acid
  misc_feature (156)..(156): Xaa can be any naturally occurring amino acid
  misc_feature (159)..(159): Xaa can be any naturally occurring amino acid
  misc_feature (183)..(183): Xaa can be any naturally occurring amino acid
  misc_feature (188)..(188): Xaa can be any naturally occurring amino acid
  misc_feature (197)..(197): Xaa can be any naturally occurring amino acid
  misc_feature (200)..(200): Xaa can be any naturally occurring amino acid
  misc_feature (202)..(202): Xaa can be any naturally occurring amino acid
  misc_feature (205)..(205): Xaa can be any naturally occurring amino acid
MWMHKIFQXVSCRCRGVWIRKKGRKLGSHSPXMSXPQLTGHHLKQTLLREQVEEGQISGFLPWYNLAXKGKELGLIFQGFPIDGDPGHILVWWLESIFSLGVGVHXQQPRSPIAXSMKVFGDTWGVELQAQWQSSLHVLKLFHAENGQEGKLHVKXIQXAGLHLVEFALLFSMLALELPPATXILFLXVSVGTSVKXRIXMXNSXVGKSSRIRKARQPPHSAS

SEQ ID NO: 942899 - protein, 300 aa, Homo sapiens
RRRRRAAVPASAPSTCSFTYPIRAGNDPGVAPGGTGGGLLYGRESAPPPTAPFNLADINDVSPSGGFLAELLRPEFDPVYIAPQQQQPPGGGLMGKFLLKASLSAPGSEYSSPWVISVSKGSPEGSHPVVVAPYNGGPPRTFPNIKQDAVSSFTHLGAGPPLSNGHWRLHTNSPWGGSSPAGLHLTLGLDEVLSSMDCHPALPLPPGFHPHPGPNYPSFLPDQMQPQVPPLHYQELMPPGSCMPEEPKPKRGRHRGPEKDRTHTCDYAGCGKTYTKSSISRTLRTTQVRNLHCDWTLWMK

SEQ ID NO: 942900 - protein, 164 aa, Homo sapiens
MERIEPSPYNCTFKNKETCEPRLRTKTYHTQKARRQTKLTILPKDHVIELSTSLDSRIISLSRRVTIAGGIAHQRSADPGISYWAGHITDKGHAKDACVISSDFHERDTFYIFNHVDIKIYYHVVETGSMGARLVAAKLEPKSFKHTHIENQTAQGPHGHKYKD

SEQ ID NO: 942901 - protein, 85 aa, Homo sapiens
HPASIFLLTTTTLPYITFHLSTITFPDFSPPPAATIPYIIFPFLLLSPLYFIFPLFSLLSFTSPSYFPFLLYILLSFSFLSLLLL

SEQ ID NO: 942902 - protein, 251 aa, Homo sapiens
DPPSHPTIIFLLSASTLPEITVHLSTITFPDFSPPPTTTNPKNICPFLLLSPSDFKGPLFSFLLLLLLLTVQFYVTTFSPFQFSPFSSKKLSLFPPLSSSFSYLTLSSFFFFFPIFSLPLFSTFFCSTSLFSLSLSCRALPGEQQTLHALTRGQSACVQESDASAPHAAEAGSPEKPESTEITEEELLDNFHLMAPSEDDHSILWDAISTYDGSKALHVTNIKKEKEPCRIELYRVVESLAKAQETSGEEI

SEQ ID NO: 942903 - protein, 76 aa, Homo sapiens
  misc_feature (30)..(30): Xaa can be any naturally occurring amino acid
  misc_feature (37)..(37): Xaa can be any naturally occurring amino acid
  misc_feature (63)..(64): Xaa can be any naturally occurring amino acid
  misc_feature (70)..(70): Xaa can be any naturally occurring amino acid
EAPFALPAASACYGPGNAPRDYISLHPFDXLETVDRXSFRFEFKESIGALKKLSNRPQMYPRXXGRLNLXLSNGEV

SEQ ID NO: 942904 - protein, 119 aa, Homo sapiens
MNDIWNEEDDEEKEKKMRENERIGVMGRYRWEKKRLKNLEVNGSEPVSHPLPAWCQSPFSRCFQSAALLLLAGPPGSPARGFLLSVSSLPPCPPPPSLLAPDPCLQLLSLSAPPCGHSD

SEQ ID NO: 942905 - protein, 52 aa, Homo sapiens
  misc_feature (28)..(28): Xaa can be any naturally occurring amino acid
MARYYRRIAALGVREQYRAGSPDERGAXLTTTRQFTWDLLARVHRLESLAPT

SEQ ID NO: 942906 - protein, 302 aa, Homo sapiens
HSSSSIPNLLFPPFLPEPSKTKYQISTLHPAARRLLLDTISHPLSSRAQEIPEEKAPGNIPPSLPFPSIHPSPASSDPISLAHYFFFPFLFLLFSFAWGHTKPVDLLNQDFIDFSTNPPYLPVTVVNTTMSLTALHHQIQTQNLSSYIIPATYAHINKYIFQHDERRAWITGFTGSSETLYDFKKAAVFTYSRYWTQAERQMECNWELHKEVGTTPIVTWLLTEIPAGGRVGFDPFLLSIGMLFLQSLNSVHANEGDSASLGYKEKDLGRKKGRWDYKDKDIEIVVAECFADEDVFMDCVIK

SEQ ID NO: 942907 - protein, 203 aa, Homo sapiens
YCSVLHFIGLGQEDNGILCLALALAEGSEFLLFLSSGGLASAVEGGPCGGARQGPCCPGSSAARSGPSRSPPLTRSWCCPSGDSGSCWIRGTPRAAAAWFVVSHWFFLRKVEVMVEATIRGKGHHRLAHGQLRLLLPEPARVGGEGRAEPAPQELVLLEVGLHGDLGLRCCLLVTQHPQQGQFHPQRVMSSHSPAAERVFGAW

SEQ ID NO: 942908 - protein, 261 aa, Homo sapiens
DPALALKRRLRGAASGSAGLRVPSRLSEGESLTVLSSGSAPQVESSSSAPGLPSVSPPVPSPTSAASPEEEEESEDESEILAESPCGRWLKRREEVNQRNVPGIDSAYLAMDTEEGVEVVWHEVQFSERQNYKLLEEKVRAVFDNLIPLEHLNIVKFHQYWADIKENKARVIFLTAYMSSWSLKQFLKKTKKKHKTKNEKAWKRWCTQILSALSYLHSCDPPIIHGELTCDTIFIQHNGLIKIGSVAPDTINNNVKTCREE

SEQ ID NO: 942909 - protein, 67 aa, Homo sapiens
NGQAIRAKYKEESDSELSPGQPSEATRCLDAFPGDRLLTFPCYIQIFLTSRDFLFICLHIFLKENQN

SEQ ID NO: 942910 - protein, 177 aa, Homo sapiens
  misc_feature (176)..(176): Xaa can be any naturally occurring amino acid
EAQRSPPHGRKAEAKTPEEMDRVTRYPILGIPQAHRGTGLVLDGDTSYTYHLVCMGPEASGWGQEEPQTGPTDHRAQQGEQRQGVPYSVQANTGQPAPRGLHSENREDEGGQEERRGGREANHGPPTVVMPLRGRGGQVEEDDSREAGAADFRRRVDRERECGGLQLGLVMHEEYXR

SEQ ID NO: 942911 - protein, 277 aa, Homo sapiens
  misc_feature (46)..(47): Xaa can be any naturally occurring amino acid
  misc_feature (106)..(106): Xaa can be any naturally occurring amino acid
  misc_feature (108)..(108): Xaa can be any naturally occurring amino acid
PAAAPARAGAGAQAEPCPGRRPGRGRAAAPPRLRAVTLPPGAGTAXXPGPRRRALRSAEGRPSRRGGRLEKFARQGSPGVGTFDPGEPCPSGPHAPKSYSGTKGVXRXLGAEAMSAGKGDGRYRVPAKCCPHGAEALVAMGGSSNRNFGPVAADAQGQKVFTNTWAVRIPGGQLVANSVARKHGFLNLGQIFGDYYHFWHRGVTKRSLSPHRPRHSRLQREPQVQWLEHRVAKRRTKRDVYQEPTDPKFPQQWYLSGVTQRDLNVKAAGRRATQGTE

SEQ ID NO: 942912 - protein, 271 aa, Homo sapiens
PAVGAFDSEGHPLSSTAEGSSKGDPKGAHAGLGPPGRRWERPLPARVRAVSLSKACARGAGTRLARAPAVAGVQLPTFCPDLWLISPGLRRLKPSGYAAAMPVHTLSPGAPSAPALPCRLRTRVPGYLLRGPADGGARKPSAVERLEADKAKYVKSLPRGPTTAQEPCASPLPVPNQPASFQPLETSPATSASSPSPPAAPALGPLPDRPPAWDPVTIPPASPPSDFVVNSPPGSPLPGGPARHSLGTGPEGEPGPSLPPSPPPPANRQPQ

SEQ ID NO: 942913 - protein, 161 aa, Homo sapiens
  misc_feature (19)..(19): Xaa can be any naturally occurring amino acid
  misc_feature (25)..(25): Xaa can be any naturally occurring amino acid
  misc_feature (36)..(36): Xaa can be any naturally occurring amino acid
  misc_feature (153)..(153): Xaa can be any naturally occurring amino acid
GCFYQHLLVLCCQSTKKLXIEEARXGGCGLSDYYMXWACAGRANNSHVEDLKPRRSARGDEPLPTLDATVQSHEKGKQAASAPHSPGLNVCARAPSWLPRVVAPSGPGGRAVILGEGVSQSLSAAAQGAHGPSSEDLQAAGRVLAPQLGLQQXEGRERRRT

SEQ ID NO: 942914 - protein, 187 aa, Homo sapiens
EEREQYGRVPPGGGSSGEFGEGAEREGEAQGEGEGSQKDEDQTAPEEKEQAHRGSRRGAIGKKREDGSDNTKQNKVPQCTDPEYDWADLSTAKEEEQDPETFLTIIKGAGGKAFCAGGEIRVTAEAEKEKQKIEPVCVCQRRIYDEYCVGGGARNRRVHVVMEVQWVGEVVSQSMGNFEWLQKSVFL

SEQ ID NO: 942915 - protein, 115 aa, Homo sapiens
MTRPNKGCPFAMEDDDHCKEEMLLKAMLAHGGHASENKAETNFLLTENQTENKKALEASPSPGQQLKTKKRQIIYKQMSIASANKALYENAENFHAMKYEELTTFPNQSKRRKPF

SEQ ID NO: 942916 - protein, 291 aa, Homo sapiens
  misc_feature (201)..(201): Xaa can be any naturally occurring amino acid
CRRAPPRLPGCVLFSLLRFSCSLLLLAPLSASSCPCVFFFLPLPLSWPFPPPPSFRLPCWFLVFSFLSFPPSVPCRGSFPFPGVGSVPCALFSAPCVCLGLCSPPFALGVCRASPRCVRLPPLCSCSLPFRFRGFLFPWSPGFVPLVGFPRFSFPAPRCFCPPAHRLLPLSARGRPLRLGVRRCFGAFFVFWLGVLAASLXWVDFSGSTVADTWVLYGTSHKSYTSCTLFFEFLLMRNIHFCIDSDFQIAFSAFKGFLTSRAHQNCQVPSGSEAVSFGWALASALSLSFTD

SEQ ID NO: 942917 - protein, 319 aa, Homo sapiens
  misc_feature (216)..(216): Xaa can be any naturally occurring amino acid
LFGFLGGFGIPFFIPLSSSRLPSSGAFAARLSLRACGGFSASPVSGAAPVARPSFPFPPRPPLFSALPHAFPFLVFPVSSWFLSFAALRLSPSSASSPLFFVSPFSLACWCRVALRGVPVFSVLCFLFSSCGFPGGSLGGWLRARLVGVSSPPGPARGAPGGGGGPPGSPSLGAWCFPFFLLPGGRFFLFVWFRCFWGPPSFLGCPLPTLCPVVCXVLVPVGQGTSYGGSQCGQVLWFRTHTRAGYCQIRITPERRPVSLNDLWHGKRVNCISKGEQNFFCFVMPVSDVISGSGLEFASELSVKLSESADARAHPKLTA

SEQ ID NO: 942918 - protein, 201 aa, Homo sapiens
  misc_feature (2)..(2): Xaa can be any naturally occurring amino acid
  misc_feature (6)..(6): Xaa can be any naturally occurring amino acid
MXVDGXAPPADKKLMGFEPDLRSEQQILPHVYVQVHKIRPLLSIRSDKQLQDIVYKLVPGLFKDEMKRRRDFYAAYPLTEVPNGSNEDRGEVLEQEKGALSDDEIVSLSIEFYEGARDRDEKKGPWRMGMGRRETGVRFWMPSSHDRHASCKFLRNKMDVPSKYKVEVLYEDEPLKEYYTLMDIAYIYPWRRNGPLPLKYR

SEQ ID NO: 942919 - protein, 284 aa, Homo sapiens
MALRSVAATLPSARRWPAPRAQGGVAGRAAMGCIGSGGAAGSGISGDQQMAEAQRIETAAPAKGELLETQSAMLLKYTERALTIQEIAALDRSSLHGIFQVVKEHVNKPTDMAQGRLAHLIEWKGWSKPSDSPDALESAFSSYSDLTEGEQEDRFAAGVAEQFDIAEAKLRAWSSVDGEESTDDSKMRTLFGEWTQTWLGSCPWGRTSRNCSPATGSPGLCAKAPWSLESDSSQTVSPDTLCSKICSLEDGLLGSLARLASQLLGDELLLAKLPPSRESAFRSL

SEQ ID NO: 942920 - protein, 124 aa, Homo sapiens
  misc_feature (14)..(14): Xaa can be any naturally occurring amino acid
LAKIWGLPGGERAXSLKPWTPGALSQVGVLWDLERLGWVVSGRPFSTSSHFGWSRFLLRSLRTCLGARCPLIAPRRISAWSPGSVILPDCRWDSEAHTGLWSRWRYYGLFELLLVSRFSQATWR

SEQ ID NO: 942921 - protein, 263 aa, Homo sapiens
AVLRGAARRGTARWECLRLACRENTTETSNPGSSVMESVTFEDVAVEFIQEWALLDSARRSLFKYRILYQCRTLASKKTPPCKPNYFSQLRQTAEPKPTKPEILRATDISLESQLKPKDFPSIQNLFEECILQGHSNAAWAVALRMQLVPSIEERETPLTREDLASSPGAALVSGMHGTEGRYADSEGGDTSAYTGPPQPMGGQGFWEQFLDLSLVLLFSIFLRVTPLLSSDGEMGTGNSHKENTDPSSVELTVSWVVRVRNE

SEQ ID NO: 942922 - protein, 254 aa, Homo sapiens
SQTRSGGGSEAGVRGGWAGSPSGGRSEFSHSHFLPQAAHQPPSPPAGAWAEPGWLCCAVPPGKMVVALRYVWPLLLCSPCLLIQIAEEFMEPAVITEQSPGRLVVFPTDDISLKCEASGKPEVQFRWTRDGVHFKAKEELGVTVYQSPHSGSFTITGNNSKFAQRFQGIYRCFASNKLGTAMSHEIRLMAEGAPKWPKEKVKPVEVEEGESVVLPCNPPPSAEPLRIYWMNSNILHIKQDERVTMGQNGNSTLP

SEQ ID NO: 942923 - protein, 75 aa, Homo sapiens
RGLREEEEPLDGEDAAVSWGGRGGGGLPLDSDPGSTGLSILQQLSATVCELGVFESFHTMSWKKVVKSVAGCADD

SEQ ID NO: 942924 - protein, 315 aa, Homo sapiens
VTLFLHNNVVFHDPHIADSWPQLQDHFSAVELVGPEEALSPGEARDMAMDLCGQDPECEFYFSLDADAVLTNLQTLGLLIEELRGVMAPMVSGEGKLWSNFWGALSPDEYYARSEDYVELVERKDVGVWNVPYIFQAYVLGGDTMWMELPQRDVFSGSDPDSDMAFCEGFGEKGIFFHLSYQHEFGRLLATSRYDTEHLHPDLWQIFDNPVDWKEQYIHENYSRALEGKDIVEQPCPDVYWFPLLSEQMCDELVAEMEHYGQWSGGRHEDSRLAGGYENVPTVDIPHEAGGVRGPVAAAAADVCGPMTETCFRFT

SEQ ID NO: 942925 - protein, 94 aa, Homo sapiens
  misc_feature (75)..(75): Xaa can be any naturally occurring amino acid
TAVSERNWISLDLNYEEEAAAAAAAEALGWGKLAVEAQLRLHSPSAASSFFGRYLLVLLILAVLLMGGLGGPESXVWLTELCCAAGAWWRSELC

SEQ ID NO: 942926 - protein, 61 aa, Homo sapiens
  misc_feature (31)..(31): Xaa can be any naturally occurring amino acid
PPPPLAPNPLLPLASNYASPIIGPLSGKPEXTLTSPKVSKPPTTPASRNPGLRAQERQNGK

SEQ ID NO: 942927 - protein, 144 aa, Homo sapiens
MGCGEIAVHAAVGSGELFSSVRCRVGKQQHGHRPTLNPPTGTGSHNLGQRNSGALVVIKAIHGLEAEDHVQAIGEDEEHEQGGEQQKKKKKGEEAGPVAGVGELLPHYVESLALAVLKHQLPGRGLRAGQEETTLLAQAAEILA

SEQ ID NO: 942928 - protein, 165 aa, Homo sapiens
MEMNRFRLIGPLSHSILTEAIKAASVHTVGEDTEETPHRWWIETCKKPDSVSLHCRQEAIFDFLGGITSPAEIPAGTILELTFDDPPINLPQNNSKAFPNPEKFQDNYKIINLLLDGFPFEYTHNFIWNKNIFNIFTDNKISDEDLNRMMNEFLVPGSQLILGPH

SEQ ID NO: 942929 - protein, 191 aa, Homo sapiens
PVRTPLPLRFGSRSFGPWAPNTSPRQRVAHCITPPPGCRETEKDGEEEENGKKKKKKKSKGGWKEEEKWVKEENGKKKKEESDGRRRSERRGGRRKKRRCRERQQRQKERQRLWGNVFVAGECLGSESVKRGSSDREAIVDGNLKRILGVVWKLIIYYFIFMPVWEDEGDDDAKKKKRKEKVVGLIEKKMG

SEQ ID NO: 942930 - protein, 212 aa, Homo sapiens
MLVDGPFQIPPGYYSFPIFSVPGAQVLGFDVEFFQVSGVSFGICWWLRKVQVGEGCDGALSIPTLRPTRPSSCAAPLLGPNQGVGAACQGLCLCVSPPTVHKGPFLLRLGYPSPGPLAPHHLLHLSPDPQLAQQCPQPPLGRPRRLPRPQEQGRSGAGRYAKRAPCPRWLPSAAGRGRRDPHSRATPGAQQVEGPHVHMVQLRGAPDPRLIA

SEQ ID NO: 942931 - protein, 310 aa, Homo sapiens
  misc_feature (12)..(12): Xaa can be any naturally occurring amino acid
FPAPVHSPPEAXPRLAGFAPERCVLRVTYPISGFLFLSSAMASESSPLLAYRLLLVEGVALPANGAGGPGGASSRYLFTFLGVVVPTVLSIFSIVVFVRIGFVVGHAGLLLALAMLLVAYFVLALTVLSVCAIATNGAVLGGGSSFLLSRTLGPEVGGSIGLMFYLAERLLLCVSLLGLVESVLDVFGADATGPSGLRVLPQGYGWNLLYGSLLLGLVGGVCTLGAGLYARASFLTFLLVSGSLASVLISFVAVGAEDIRLTPRPGPNGSSLPPRFGHFTGFNSSTLKDNLGAGYAEDYTTGAVMNFASV

SEQ ID NO: 942932 - protein, 179 aa, Homo sapiens
GCSTVLAKMKCVLVATEGAEVLFYWTDKEFEESIRLKFGQSENEEEELPALEDQLSKKLAPVIIYKMKMMEKLEEKYTCFSTENGNFMYVFDMDAGPRPGAGAPAVGALPEPAVDLQPPAGEKQCFAVEVITGLREFSRLEAVSQSAISLRSAELLALILLVQDLYPSESTAEDDIQEK

SEQ ID NO: 942933 - protein, 97 aa, Homo sapiens
  misc_feature (72)..(72): Xaa can be any naturally occurring amino acid
  misc_feature (86)..(86): Xaa can be any naturally occurring amino acid
APVPTATYDTRYCAYLNKNGQGSQGKPQGMLRTGKPVLLGTNGARGRRLPPPGLRNARQAARCPGIKVVSPXVVLGPKGGGHWGCXRGLPPTHRRGK

SEQ ID NO: 942934 - protein, 97 aa, Homo sapiens
  misc_feature (95)..(95): Xaa can be any naturally occurring amino acid
FCAGVAPWGRGRAATAVRKRKTVGGSGNRSPEEGNQPLLGSRNGQQSSALAYAIIQFLHDQLRQGGLSSVLRRVGSRLQCLEMQFGVTVEDSELXDT

SEQ ID NO: 942935 - protein, 299 aa, Homo sapiens
  misc_feature (122)..(122): Xaa can be any naturally occurring amino acid
GCTPYEVRFKKDHSLLGRVFAFDAVSKPGMDYELKLFIEYPTGSGNVYSSASGVAKQMYQDCMKDFGRGLSSGFKYLEYEKKHGSGDWRLLGDLLPEAVRLFQGGRARRRTLPAPSPVLGRXACATCLPNMLMGESEPAPPKRNPPGEPGPFACPACARSGPGGATHKALRKEEKALFREAPGTSDRRGASVSVGRGNKPEASKLDWRTKEQRAPESTPNVLPGEAFAGAGGTRAGGVRPPPAPTLLGPQFQPGPPPPLSEPPPETGLSPNGRFSMSVGRILWAQRTRPKDGSSVHSTT

SEQ ID NO: 942936 - protein, 129 aa, Homo sapiens
  misc_feature (11)..(12): Xaa can be any naturally occurring amino acid
  misc_feature (16)..(16): Xaa can be any naturally occurring amino acid
MVIFQTEVFPXXEENXGTPQPPPGDERYLLRREKIRGAALMIFQELYHRVEAAFQTGNNTPQEGERGFFSILFLFALVYHKLVVQKWVLLTAPRPLPGLPRASIRGCHHWGDAELPVTATRTIVNSVPV

SEQ ID NO: 942937 - protein, 170 aa, Homo sapiens
  misc_feature (9)..(9): Xaa can be any naturally occurring amino acid
  misc_feature (95)..(95): Xaa can be any naturally occurring amino acid
  misc_feature (113)..(113): Xaa can be any naturally occurring amino acid
  misc_feature (126)..(126): Xaa can be any naturally occurring amino acid
  misc_feature (132)..(132): Xaa can be any naturally occurring amino acid
  misc_feature (135)..(135): Xaa can be any naturally occurring amino acid
HDSTIFSCXRLGLLVCCLRDAHVPQSYCPKCQWAVQGMGSSFQMVCSLWDHAATIPFLSSSDAISGSKADLRGKDFKSTEVECAMLEWPQEVSRXPMTPVFVYISGRGLPVGXQKGGSVYPGANRXSEKPWXCQXAKARGTRTLITLQPFRMAGTLNQYSGNVGGKTKEN

SEQ ID NO: 942938 - protein, 174 aa, Homo sapiens
  misc_feature (5)..(5): Xaa can be any naturally occurring amino acid
  misc_feature (84)..(84): Xaa can be any naturally occurring amino acid
  misc_feature (127)..(127): Xaa can be any naturally occurring amino acid
  misc_feature (129)..(129): Xaa can be any naturally occurring amino acid
  misc_feature (131)..(132): Xaa can be any naturally occurring amino acid
  misc_feature (136)..(137): Xaa can be any naturally occurring amino acid
GEQSXDRGLLRGPAGDWGQAGKRGDGGRPPGGSGPPPPSSRRRLRPRRGGGGGGAAAAAPQRRRSPESRSEPASRPELPAGFHXITDPAKVPGAHTGNLEILLPRPQLWRNSGVEQRSFLVFHAGPXHXGXXGVLXXAWKELNDTDMNKKTQIVILMELDWKEKKAPWGPGGRT

SEQ ID NO: 942939 - protein, 278 aa, Homo sapiens
  misc_feature (112)..(112): Xaa can be any naturally occurring amino acid
  misc_feature (114)..(114): Xaa can be any naturally occurring amino acid
  misc_feature (117)..(117): Xaa can be any naturally occurring amino acid
  misc_feature (128)..(128): Xaa can be any naturally occurring amino acid
  misc_feature (156)..(156): Xaa can be any naturally occurring amino acid
  misc_feature (158)..(158): Xaa can be any naturally occurring amino acid
  misc_feature (160)..(160): Xaa can be any naturally occurring amino acid
  misc_feature (164)..(164): Xaa can be any naturally occurring amino acid
  misc_feature (181)..(181): Xaa can be any naturally occurring amino acid
GQTRRFLDASYAWRESCLSWHHHTAHDIFAGKPVDPLPGSTRGQDSAVCSQGQFLDVRPEAEDQEAAPKMGERKGVNKYYPPDFNPEKHGSLNRIPQQPPALGAGLEAITGXAXEAXGKSKKQLAEGXKNHNGKGVRYKSEKKKEGKYSTTPNTRXRXKXHPIXNNKEKQTDPANIDNENXSCAQRKEERVDSADKQQGLTTEQEKKQKRETDAMFRPEHAEADRSTHKKAPSTRCHNQEAQSAVKTPGPYSSRGEGSGKEKATQEEEERDRPSGKAS

SEQ ID NO: 942940 - protein, 272 aa, Homo sapiens
  misc_feature (51)..(51): Xaa can be any naturally occurring amino acid
  misc_feature (62)..(62): Xaa can be any naturally occurring amino acid
  misc_feature (69)..(69): Xaa can be any naturally occurring amino acid
  misc_feature (78)..(78): Xaa can be any naturally occurring amino acid
  misc_feature (82)..(82): Xaa can be any naturally occurring amino acid
  misc_feature (84)..(84): Xaa can be any naturally occurring amino acid
YYRWTRAHDLRGFLNFTLALSPSSFAAAHNRTCRYRAFRDDDGHYSQTYWXSSLPIRLGPSXNCCFEGXPKATLSWFXPTPXVXERPDPVLCLIRARGEGSVPSLPAVSSWSNQSSSLHLRFPCLASSLGCGVDIVGVSRSPRATKAGVASAPSGVPFPAQLLSDSTHSWEQVPEPRPPGPVKATLGVWVGVSAFLCSQHVVFSVGRLLDLLVPDPPHVCGDGGEERYYLGIAGLGDTFSCFLADRGHPASAGPLCTVLRALRGLRFGPWLA

SEQ ID NO: 942941 - protein, 312 aa, Homo sapiens
RSPCEELGPPGRREGFDLKKGTPGALLEVGVLWDLEGSGRVVSGRPFPGSSQLGWSSFLLRTVRTCLGARCPLKAPGRILAWSAGSVMLLECCGEREEKKGLGLLLEEKGLAELLLVSRLSRRGGGRFPEEGNKTGGWAQPGKMEEKIKKEEEMALSLTRAVAGGDEQVAMKCAIWLAEQRVPLSVQLKPEVSPKQEIRLWVSVEDAQMHTVTIWLTVRPDMTVASLKDMVFLDYGFPPVLQQWGDWAAAGTRPGDLHSHGVRQNGGSAYLYLLLIRKTSLNLRGAGAGHCRYGKSGFKTQLHAGPLEQPPN

SEQ ID NO: 942942 - protein, 114 aa, Homo sapiens
  misc_feature (16)..(16): Xaa can be any naturally occurring amino acid
  misc_feature (20)..(20): Xaa can be any naturally occurring amino acid
  misc_feature (96)..(96): Xaa can be any naturally occurring amino acid
  misc_feature (103)..(103): Xaa can be any naturally occurring amino acid
  misc_feature (105)..(105): Xaa can be any naturally occurring amino acid
  misc_feature (114)..(114): Xaa can be any naturally occurring amino acid
QASGQSLIQASAAGGXSRSXLPLGQAAKEKCHSRDAKEEALEPFQRRMEETMKLSTMEDTFYYFLFLIPYYSRDSDKHKEILQKYIERIITRFAPXLVPYIWXNXPFNLKYKPX

SEQ ID NO: 942943 - protein, 105 aa, Homo sapiens
  misc_feature (30)..(30): Xaa can be any naturally occurring amino acid
  misc_feature (34)..(34): Xaa can be any naturally occurring amino acid
  misc_feature (67)..(67): Xaa can be any naturally occurring amino acid
  misc_feature (82)..(82): Xaa can be any naturally occurring amino acid
  misc_feature (87)..(87): Xaa can be any naturally occurring amino acid
  misc_feature (101)..(101): Xaa can be any naturally occurring amino acid
MNRGYTGFWRAVQIEDHKHELHLGNTDSPXPPPXTRAGNLGPNSEDTTAGRGLQHARRTEVAGGGDXPQPLEPGIAPGVGYXPAPPXSQLLGSPMALPMLXAFAA

SEQ ID NO: 942944 - protein, 232 aa, Homo sapiens
  misc_feature (212)..(212): Xaa can be any naturally occurring amino acid
MRKPPILLLLLAVPLRRMPEAGWAPKLQGTTGEDMGYAKRYDVNHGTGGGWGGVDSGEDTYTQTLPLSGYSTGASISAPNSSHENIRERGGVQKDFEFFYHEASAEKGWVKVPGLCLQGALSLSKGGFFGGHQLSLFAFCVHVAIAFVLRVNQLPGYHHFKEPGGLGGALAADVQAAGELIFYLVLELKILGLVASSATINDSRTARAIRSXAATSAEERTPGATLTSHLDA

SEQ ID NO: 942945 - protein, 302 aa, Homo sapiens
RGSAPRGAGAPISRQDLGGPRPALIPSGFGGPQPPFPGPLAHPNPLFLPFPDSLALPILFAAPSWIASPVSFPSAPFPRDPEALLPRALPGAPRAAAAMAAVRGAPLLSCLLALLALCPGGRPQTVLTDDEIEEFLEGFLSELEPEPREDDVEAPPPPELTPRVRKAQAGGKLGKRPGTAAEVPLENTKEKGKKGKKDKGPKVPKESLEGSPGLPKKGKEKPPKATKKPKEKPPKATKKPKEKPPKATKKPKEKPPKATKKPPQEEDPIVAPQKPGLAIPPPPALARGATQEGGGPSQITGK

SEQ ID NO: 942946 - protein, 101 aa, Homo sapiens
  misc_feature (18)..(18): Xaa can be any naturally occurring amino acid
  misc_feature (23)..(23): Xaa can be any naturally occurring amino acid
  misc_feature (69)..(71): Xaa can be any naturally occurring amino acid
  misc_feature (77)..(77): Xaa can be any naturally occurring amino acid
KIKGKKGWSLLRAVLLRXPKKAXIWIPEVHDEKADVSAWKDLFVPRPVLRALSFLGFCAPTQIQALNLXXXICDKLXIFGVVETGSGKILYFLITIIYVVL

SEQ ID NO: 942947 - protein, 163 aa, Homo sapiens
  misc_feature (147)..(147): Xaa can be any naturally occurring amino acid
  misc_feature (150)..(151): Xaa can be any naturally occurring amino acid
  misc_feature (154)..(154): Xaa can be any naturally occurring amino acid
RSIVKVSLHPAVISNSDSPKDPQQLTNLFIGPFTFETTDETLKNHFHPWGTLSACVVITDPNTNPSKGFGFLTYPTVEEVDATINAKPHNLDERLVEPKKPLSTQHSQTPGPHLTVKNIFVRPIKQHTEEHHLTHYFQQYPKIQLIXIIXXPRXPNKKDFAFV

SEQ ID NO: 942948 - protein, 221 aa, Homo sapiens
NNPDPEWTGEEEEDLPRRGRCEERAQGRRSREPGSRAPKTAAMPARCVAAHCGNTTKSGKSLFRFPKDRAVRLLWDRFVRGCRADWYGGNDRSVICSDHFAPPCFDVSSVIQKNLRFSQLLRLVAGAVPTLHRVPAPAPNPGQKGDPPGRLAPPRALLATRPSVAAPGPVSSARPPTGKHAAASQVKRDHRSWCKDPWTLAGLLHLVSPWERHLISKVPVF

SEQ ID NO: 942949 - protein, 106 aa, Homo sapiens
MVTAAMLLQCCPVLARGPTSLLGKVVKTHQFLFGIGRCPILAIQGGNCYEMKIKEKKDGGDYEFWEKGKCKLMMEEIKDGKSKIVQKADPRSPGRCEAPFKKDMNR

SEQ ID NO: 942950 - protein, 168 aa, Homo sapiens
EPTMVLSPADKTNVKAAWGKVGAHAGEYGAEALEREEPSPAPTRGPRPPGPTGHPHPSWARAQGPPLTLLLPRRMFLSFPTTKTYFPHFELSQGSAQVKGHGKKVGDALNKAVAHVEDMLNALCALRELEGEKVGVEEVKFKLLSHCLLVTLAAQLLIKLKDAVKEEV

SEQ ID NO: 942951 - protein, 36 aa, Homo sapiens
MRASEMVWCHFSEDIREYQLIDNDSALQQQEDVEDP

SEQ ID NO: 942952 - protein, 251 aa, Homo sapiens
KGGNADSWQREKLASMESPEEPGASMDENYFVNYTFKDRSHSGRVAQGIMKLCLEEELFADVTISEEGREFQLHRLVLSAQSCFFRSMFTSNLKEAHNREIVLQDVSESAFQPLEEESYQGTVKLRAEEGQEKEEGADKEQRTARREEGGGGGPAQGKGETAGRGGGWQSGTGSAERETAAKHCAKTHLAQLQNTEEFLHLPHRLLTDIISDGVPCSQNPTEAIEAWINFNKEEREAFAEGGGGGGGGGGE

SEQ ID NO: 942953 - protein, 109 aa, Homo sapiens
MPRVYIGRLTYQARERDVERFFKGSGKILEVDLKNGYGFVEFDYLPDVTSFYFFSECANAFFVMYLFFIIAAAQCNIAFDVLLLIFFFIFYFLFIYISLLFSHFFFFFL

SEQ ID NO: 942954 - protein, 40 aa, Homo sapiens
MVDLTIPTYVVIPALEPSRFLSSLWVTAGLSTKAFCLFCC

SEQ ID NO: 942955 - protein, 204 aa, Homo sapiens
  misc_feature (156)..(156): Xaa can be any naturally occurring amino acid
  misc_feature (160)..(160): Xaa can be any naturally occurring amino acid
RLSHLSPWPFSCLDGVFLSSAENDFVHRIQEELDRFLLQKQLSKVLLFPPLSSRLRYLIHRTAENFDLLSSFSVGEGWKRRTVICHQDIRVPSSDGLSGPCRAPASCPIRYHGPRPISNQGAAAVPRVCPGLAVWYRGRIACPAFVCALWVSVASXKNGXLNLYPRVLKERWPQRVEGTTERGLRVCFGVCETPNLCTQGYSPG

SEQ ID NO: 942956 - protein, 93 aa, Homo sapiens
  misc_feature (11)..(11): Xaa can be any naturally occurring amino acid
  misc_feature (66)..(66): Xaa can be any naturally occurring amino acid
MALWRGSAYAXFLALAVGCVFLLEPELPGSALRSLWSSLCLGPAPAPPGPVSPEGWLVGSLGRVFXCAANPVLAPRGSGSQMHVLMWCSQGVK

SEQ ID NO: 942957 - protein, 109 aa, Homo sapiens
APPPASLPPCSLISDCCASNQRDSVGVGPSEPGAGYILVVRLFFKPVGKAQYLGRSDPIFQVPSVTPFFDSERELPDPLRFPSEDNASPCFGSRTVLAPTDLRPLSGTP

SEQ ID NO: 942958 - protein, 177 aa, Homo sapiens
GGPRRGRHTCLSRREMPFDLCFLEQSLAFKVLGERDPLREYFHRVPFHREDTISGNGSVQLSYISFQNPRTVPVQPAFSTEPCSQPVCVPPRPRGRRQKPPGAGAANPAPITQTVIHTVQSAPGQMGTTAAIPPMMYPHPAYAMPFITTILGRAVPIQVHPPVRHCPAQCSEGPHQP

SEQ ID NO: 942959 - protein, 125 aa, Homo sapiens
  misc_feature (5)..(5): Xaa can be any naturally occurring amino acid
  misc_feature (11)..(12): Xaa can be any naturally occurring amino acid
  misc_feature (61)..(62): Xaa can be any naturally occurring amino acid
  misc_feature (103)..(103): Xaa can be any naturally occurring amino acid
  misc_feature (116)..(116): Xaa can be any naturally occurring amino acid
GGRKXGSAAEXXCSSAPPGGPPPRAPANPPAGRADPAVPSPEEGARGGIQKPLKRKKKRGXXNALWGIGGSGIIVLLVLRSVLRPLATPLAKTKQNSIWGKKXKKREGLTITQNKXVIALKKDVR

SEQ ID NO: 942960 - protein, 227 aa, Homo sapiens
  misc_feature (133)..(133): Xaa can be any naturally occurring amino acid
ELGPRAGGKKLLTAENRTKYTPIYGNDNGGQLEEKKAELRNKDRKIEETEERHQVEIKVYKQKVKHLLNEHQEKPEQKYISDFNLLMKLAQKEHRIQESSDMRKDIEALKVELKEQELANEVVVKNLRLKHTXEITQDGNDFERQVREIEAKYDKKMKMLRDELDLRRKTELHDGGEEKNGQIHKLMQRHEEAFTDIKKYYNDITLNNLALINSLKEQMEDMRKKED

SEQ ID NO: 942961 - protein, 143 aa, Homo sapiens
MTGGKSNQMKTPKTFYVPAQYVKEVTRKALMPPVNQVAGLPNNSTKTKQSLHLQRSTENVNKLPELSSFGKPSSSVQGTGLIRDANQNFGPSYNQGQTVNLSLDLTHNKGKFKKDSHSPKFSSQNMTRSFGHFPGPEFLDVEK

SEQ ID NO: 942962 - protein, 241 aa, Homo sapiens
  misc_feature (9)..(9): Xaa can be any naturally occurring amino acid
  misc_feature (142)..(142): Xaa can be any naturally occurring amino acid
  misc_feature (148)..(150): Xaa can be any naturally occurring amino acid
PETESQIAXPFPDPYGKTNPGAVLERSKHLSGLFSVDPASSQAMELSDVTLIEGVGNEVMVVASVVVLILALVLSLALYLRNRQRYNQLLGAIVSAGDNILLHLGHVDHLVAGQGNPEPTELPHPSEGNDEKDEDAEVKVGXTPHWVXXXWGLVLSPAVEECVDMKRGEEKQRRWKEEEVQKAPLKIFRIRPGYLRSPGLITVRVKFVNDKEELAVARPEDTVGALKSKYFPGQESEMKLI

SEQ ID NO: 942963 - protein, 136 aa, Homo sapiens
SPPAIPRPARHIPSMVMLASMSSDTQLSESFVSTTFATVPLYSTENSQPAGYLSPPYPHQSLGNHRQPFYSSSFSAPFFWEEVRMFKLFWSSSFFPSLILFFSISLAIRVISDAGKSSPWSKIFPMIFRYCSAHFF

SEQ ID NO: 942964 - protein, 103 aa, Homo sapiens
  misc_feature (26)..(26): Xaa can be any naturally occurring amino acid
MGSMDIKIGQPPSQVGDRAEQSLSSXGNRLHTPPCHRTQERRSVRVQGAKRRKECGVVVSSTLNYNFVEEGKLLTNSLLIAQAAKQYEGAFDAFHPSRIVSPQ

SEQ ID NO: 942965 - protein, 246 aa, Homo sapiens
QTDAGLRAGELRSPAIPPPPGPPASFSPSEVQRRLAAGACWVRRGARLYHLSSFVRHHPGGEQLLRAKAGQDNNPDLDGPPHKHPANARRWLEQYNMGKLREEQQGSKENKPITLEKTQKTKPAKEPRFKMVDWDKDLVDKRKHLLWQVGHLGKKYKKWVHQPVTKPSRLFHSHLIEGLSKTVWYSVPIIWVPLVLYLSWSYYRTFAQGNVRLFTSFTTDYTVAVPKSMFPGLFMLGTFLWSLIEY

SEQ ID NO: 942966 - protein, 245 aa, Homo sapiens
PAVLRPRPAEAPRVLCHAWRLFASGANFEYIIAEKRGKNNIVGLIKLNRTKALNALCDGMIEELNEALKTFEEDSAVGAIVLSGGGIRHLQLELKLKKYEKLSFQDCYSRKFLKNWDHLNQVKKPVIAAVNGYAFGGGCELAMMCDIIYAGEKAQFAQQEILIENNYSAGGTQRLTRAVGKSLAMEMVLTGDRISAQDAKQAGLVSKICPVETLVEEAIQCAEKIASNSKIVVAMAKESVNAAFE

SEQ ID NO: 942967 - protein, 101 aa, Homo sapiens
DEQTEEKEKCTGGRESDEGVRAECRRKTTGLDRSPVAYFAAKRIPEVATVGWRPSSVLWSPRFKTCTCLCLKKKEKKRKGMRRKKENPRVKEEFRKKMPKK

SEQ ID NO: 942968 - protein, 112 aa, Homo sapiens
MNTSLSWFEKLDVLLNANDGNVVRNKKWLYNLGVSKEIIGMCICFFCSSGCIFLGSPPQNSTAVTPAVLWEESEIMQKELKLLQYQLSQHQELLLKQLAEGRQAQVGSWKDL

SEQ ID NO: 942969 - protein, 122 aa, Homo sapiens
  misc_feature (36)..(36): Xaa can be any naturally occurring amino acid
  misc_feature (40)..(40): Xaa can be any naturally occurring amino acid
  misc_feature (42)..(42): Xaa can be any naturally occurring amino acid
  misc_feature (45)..(45): Xaa can be any naturally occurring amino acid
  misc_feature (48)..(48): Xaa can be any naturally occurring amino acid
  misc_feature (50)..(50): Xaa can be any naturally occurring amino acid
  misc_feature (53)..(53): Xaa can be any naturally occurring amino acid
  misc_feature (65)..(65): Xaa can be any naturally occurring amino acid
  misc_feature (68)..(68): Xaa can be any naturally occurring amino acid
  misc_feature (70)..(70): Xaa can be any naturally occurring amino acid
  misc_feature (73)..(73): Xaa can be any naturally occurring amino acid
EFSELSFRISELAREPRGPRERKFCWLSGGDPVQIXFIHXHXPGXDQXRXTVXLLSLLLSLGAPXHPXEXLGXGPGDEGTKLQAGGPGKGGAAAPGHLAAVATEREQRQQQQTGGVGGPEEG

SEQ ID NO: 942970 - protein, 154 aa, Homo sapiens
MALNDLVDVEFRLKAVVKVEPDYSLFVVHLLPKLQELEESPVRTSERKASRMHFALKDSFDSKKSVPASLKKGKQNTPKTKCTEALAKQSLVMDADDEAVLNLIAECEWDLGRPPGSTSFSQKGREADSRGSQESRHLLSPQLVQYQCGDSGKQ

SEQ ID NO: 942971 - protein, 282 aa, Homo sapiens
AGPGGRRARWALGDAGASGEDWGPHAPGEQCHFWVRTGDLLDGVGLRQKMAGRDVHLVVRNLKERITVVTSVTALSEIVKMEKYSIMKSLNMPPKTGKRTLLEMTQIPPRPGYCPQGEAINRLDFSSAIPDIQSSIMWSNCCRKLPNPREPPVSGVAQKNYIDLLDKLIPQVLDDHHPPRLIKDLLQDLSSTLCILIRGVGKSVLVGNINIWICRLETILAWQQQLQDLQMTKQVNNGLTLSDLPLHMLNNILYRFSDGWDIITLGQVTPTLYMLSEDRQLW

SEQ ID NO: 942972 - protein, 88 aa, Homo sapiens
MHSFHIAGAKQILMWMGDGGSWTGRSELNSNVAGTTLWTQGNLPLMEDVCLGRGGQGEVPDLSVSGGRSHWLCMGSSVRAVGALLRVR

SEQ ID NO: 942973 - protein, 200 aa, Homo sapiens
RARAMEEGASSPGLGCRKPHLEKLTLGITGILESSPGETEETIIEKPPEERNMISSWGQKNNWEMPEDVKNFYLVTNGFHMTWGVKLGEHIIPLGSMEINSISKLTQLTQASMDLLPNGPTLGDLGGGTHEASDDQPERPHFGSRREEFELGSCNGGGEVCIVYKSGEPALAEDTEIRVLDRALYWHFLTDTFTAYYSLL

SEQ ID NO: 942974 - protein, 281 aa, Homo sapiens
AEAPRSALGLVWRPSEAEEAWTLAHTDPGTDERGFFHAHLAVHLLPGAQEAMGFWTAVVYIAVAEVDDYSTGEIVVSFSLSSIVQIEKEALHFVFSSITILEKGHAKHWFSFLRPSGNVVFSIMEHFLRELLLCEPGAVADASVPRTRGEELTGLIAGSQKRLEDTARVLHHQGQQLDSVMRGLDKMESDLEVADRLLTELESPAWWPFSSKLWKTPPETKPREDVSMTSCEPFGKEGILIKIPAVISHRTESHVKPGRLTVLVSGLEIHDSSSLLMHRFE

SEQ ID NO: 942975 - protein, 170 aa, Homo sapiens
  misc_feature (117)..(117): Xaa can be any naturally occurring amino acid
  misc_feature (121)..(121): Xaa can be any naturally occurring amino acid
  misc_feature (124)..(124): Xaa can be any naturally occurring amino acid
  misc_feature (128)..(128): Xaa can be any naturally occurring amino acid
DLGTFYVIFQGLQPMLGGARGGGWWNNIYFDKKLQLPAEEKHPLSFRPRLRPSFTCFLAHPAPSSFSLDGGPRLAETPCLPAPGTGSHIQSSEEGVWLVGWQLLPRAITPPTTPRLXLFGXVPXGSLXWGVVGRGGGTVVESPDTGCVKKKEEGKIGGWAAPQWEPRVFS

SEQ ID NO: 942976 - protein, 282 aa, Homo sapiens
LKHFHPLFEYFDYESRKSMSCYVLSNVLDFDTEIVSEDQVDFIMNFVYTLIQDEPDEPVEDPVAEDFSDEQSLFGRFFAVLRSEDPDQQYFVFNTARKHFGAGGNQRIRFTLPPFVFDAYQLAFRFEENSEVDDKWEKKCQKIFSFAHQTVSALFKAELAELPFRLFLQGALAAGEIGFENHETVAYEFMSQAFSLYEDEISDSKAQLAAITLIIGTFERMKCFSEENHEPLRTQCALAASKLLKKPDQGRAVSTCAHLFWSGRNTDKNEGGASRRQEGNGV

SEQ ID NO: 942977 - protein, 42 aa, Homo sapiens
MGAVVAPLTILGGPLLIRAAWYTAGIVGGLSTVAMCAPSEKF

SEQ ID NO: 942978 - protein, 200 aa, Homo sapiens
VWVFLIKKGYQDVDTSLQSAVITKVKGVGFTNTSDLGEGIWDVADYVIPAQNEGIPDGASSKDSDCHAGEAVTAGNGVKTGGCLRRENLARGTCEIFAWCSLETSSLAEEEFLKEDEDFTIFIKNHIRFKKFNFSKSNVMDVKDRSFLKLCHFGPRALLPPLLTGVRDELGGEGFPGYSPGGWGDRINIEWTVMLISCSE

SEQ ID NO: 942979 - protein, 232 aa, Homo sapiens
  misc_feature (122)..(122): Xaa can be any naturally occurring amino acid
LLLSSLHPLPSPTSKDPYPNPKPTPFSPISHTPPFIPTKPPFTLKIHSYINTPSLNLTSLSNHHIHHNPHHLNLQNHPIQHSQNQSLPTLTIQPIPFHYNPIYFFHHNSNNTSEVYQGSRTXLPFICFITFAQLKQSNTLNHPIIIIHTLLIILFIIFPIFLLLDKDDSKAGMEEDHTYEGLDIDQTATYEAIVTLRTGEVKWSVGEHPGQELRARSPHDLGAGSLASVTAS

SEQ ID NO: 942980 - protein, 282 aa, Homo sapiens
GWRLAQPGPRCPLPWALGRSGLGKAGTGRARRPGGSEAKKASGKRAPPTGLLELRAGAGSGAGGERRQRVLLNLAEDVLTVNPADGNPGPEPGAPREQEPAHSTPPRNRAPGPLNCQKRYCSNGAAFTLRKADAGGLGINIKSGREKKIPILISKIFKGLATNQTKALFVGDAILSVIWGILILCYPDEALQVLKKTGKEVVLEVNYMKDVSPYFKKSTGGTSVGWDSPPASPLQRQLPPLAPHPGNSSRPNTCPSKWHMSRRGAPPMTRSPGIWRSARQMV

SEQ ID NO: 942981 - protein, 153 aa, Homo sapiens
  misc_feature (134)..(134): Xaa can be any naturally occurring amino acid
PLYSIALPNLFFYPLPSHSISILSTTLSLPHPIFVDPSPHITPTTLTPLHPHTTPSNFLPSSPSTPPPFATPAHHVLNTNLTSPEPPSHSTSLVLETGSAITQAPPKQSLRPRTLHPRHRATSLSLLPFFLTYXPLHFPFPHPHYVLIFGCLG

SEQ ID NO: 942982 - protein, 89 aa, Homo sapiens
MAVIGEYLCMRTELKEIPLNSAPKSNVYESGPLDILLTLGPLNTLGCSDPPDEVQPRSERNPGNVKSLFVWERYEGLSKKAGSSQHDSC

SEQ ID NO: 942983 - protein, 52 aa, Homo sapiens
MPLRRGAGAVHAPPCQALHLGGLQAGCWHGPEPGGRPGPCGSGHILRHRALA

SEQ ID NO: 942984 - protein, 144 aa, Homo sapiens
  misc_feature (8)..(8): Xaa can be any naturally occurring amino acid
AVSSTERXRALTIPTEASDPTSESDQLGGPALHPRGCRDTHPDGSETAAELTRGPHKGEAFGIKGARAVLGPPGLRSRPPALPSEIAAEACVLEGAATPPGRDPGAHVAWIFNATTDGKDIRVAAESLNEKGGLFQVGLSQLHL

SEQ ID NO: 942985 - protein, 229 aa, Homo sapiens
LDPPIVKGSMVVGYPLVVGYEEVLPLEGLMDDQLVEGPMDTPILGYSPLELQKDHMAVQLSGSPYGQPPPSSYGPQQPGLYGQGGAPGNVDPEAYSCFQSMDSDQNGYIFIKKLKQALVNCNWSSFNDETCLMIINMFEKTKSGHINVYGFSALWKFIQQWKNLFQQYDRERSGSISYTELQQTLSQMGYNLSPRFTQLLVSRYCPRSANPAMQLDRFIQVSTQLQVLT

SEQ ID NO: 942986 - protein, 310 aa, Homo sapiens
MACAPPLLAVSAEPGASSGKAVTLPAVFLAPIRPDIVNFVHTNLRLDPSLPPAVSELAGHQTSAESWGTGRAVARIPRVRGGRDSPLWPGCFWKHVSWRPNVCTNLPLDAVGIESEHKPPPAAPPGLPWLPQPSLHWSCLKVIVLREVPELPLSSLEDKVDGYQKPQEAVLLLKKLKAWNEIKKVYASQRMRAGKGKMRNRRRIQRRGPCIIYNEDNGIIKAFKNIPGINLLNVSKLNILKLAPGGHVGRFCIWTERAFRKLDELYGTWRKAASLKSDYNLPMHKMINKDLSRILKSPEIQKAFEPTQEN

SEQ ID NO: 942987 - protein, 151 aa, Homo sapiens
MGTKDEGECVCVTVTKTLHYLAVRGCFRWVSGVGDKERKSRLSSSSGSSRGGGGRAGPHLLAGVEVMVATEARLLLGRGNKTDGPGPGVIKDESGSIFAKAENEELQPPPEFLFLVFFFLPSSCFFFFFFLRKKARDLNLASGGGLPVALY

SEQ ID NO: 942988 - protein, 259 aa, Homo sapiens
  misc_feature (70)..(70): Xaa can be any naturally occurring amino acid
  misc_feature (89)..(90): Xaa can be any naturally occurring amino acid
  misc_feature (97)..(97): Xaa can be any naturally occurring amino acid
  misc_feature (129)..(130): Xaa can be any naturally occurring amino acid
SGVGINFSIFCGQFPEINGYEFFFDQLNYVDPKFPPCEEYSQSDYLPSDHSPGYYAGGQRRDSSFQPERXFGRRAACTVQRYAACRDPXXSPPPPGXALPPPPPLVFPLSPSPGFSFSLLDEPFHLYYXXIIFSPPPPYPQEATTLQLMSFLVERGRRLPLDAQCSRGGGGGGLHLAFTQALSNRLHALEKKKKEEEEEEEPLPDPGPEVFYGYAFFLYVRRFYVVPNLAMKWKLTQVANTRSLGGAQLSRGPWRPMRP

SEQ ID NO: 942989 - protein, 174 aa, Homo sapiens
IEKFVKNQAGTVRNIPGIPEGGDGEELEAGAPLRSNSVFMSRQTKEKFLRQYKMSDPKTQAKGYKKYKKKAQFISKKNPKNIKKMVVWKGYNNFRKMHKKDGLQTQKIFRRLEKFPAFPRAQMFGRFENSIIKKWRKRAKNLLRFTVHIHALKNRPQLKEFFRGGEVTRPLEVS

SEQ ID NO: 942990 - protein, 291 aa, Homo sapiens
  misc_feature (40)..(40): Xaa can be any naturally occurring amino acid
  misc_feature (46)..(46): Xaa can be any naturally occurring amino acid
  misc_feature (144)..(144): Xaa can be any naturally occurring amino acid
  misc_feature (162)..(162): Xaa can be any naturally occurring amino acid
  misc_feature (179)..(180): Xaa can be any naturally occurring amino acid
  misc_feature (185)..(185): Xaa can be any naturally occurring amino acid
  misc_feature (187)..(187): Xaa can be any naturally occurring amino acid
  misc_feature (196)..(196): Xaa can be any naturally occurring amino acid
KLRRESELRTAGAGQTPKKGENITSPRKNLTEKEERGKAXGDQAKXGGSGAKKRKEPPGQEAQEGQRAAKGGKRAQGGAEAGSGQPRPGAAPGPPRPKKQKAAQAEEQKGQAAPDQEPNAGAGGQPTRPEATHPAKGQRPPPSXNAPAAPTRPSSPNPAPAXGERAPAAPERAAEGGPXXGAAQXAXERRGGRKRXISKQRSKAASSQIEGSTRNPQAQQEKDQQSADAQKASKRFKITAKETLEKAQPGATPAQAKTKTGARAQEAAQRQQRPREPRGPKTPSAQEETTK

SEQ ID NO: 942991 - protein, 114 aa, Homo sapiens
ADGVPGALRSSGRPRPRRPAQNPARPRRPASKAGSAPFPEGWKKGCFALQMVEKELTADSVEMVPAARAAKQLLACGKYETAAAGGPACRPPKTKVSKTGGWKKPSWAWQKAKW

SEQ ID NO: 942992 - protein, 202 aa, Homo sapiens
  misc_feature (1)..(1): Xaa can be any naturally occurring amino acid
  misc_feature (61)..(61): Xaa can be any naturally occurring amino acid
  misc_feature (112)..(112): Xaa can be any naturally occurring amino acid
  misc_feature (198)..(198): Xaa can be any naturally occurring amino acid
XLRNLTNLQAGNRVFSPLSARQNHPVHFQGPSREADLREVNSFSDYPVDSISAPAPAGLQXASLMWGSRALTRRLPPGFLVGGGFVVSGSVPLPLPGEGRVAIGGAGGQGAXGWVCFFWVRATVTCDGCCGLRPGAILPHALCGWLPSTLGSGMALPIVILSAFMQGVGHSLAPFRSAVLVPRLLGKDHVGARCRERXVQPG

SEQ ID NO: 942993 - protein, 163 aa, Homo sapiens
MGPKSMFCKNTGLNQIKKRNTVDKMAAMREFRVLHTALHSSSSYREAVFKMLSNKESLDQIIVATPGINSDPIALGVLQDKDLFSVFADPNMLDTLVPAHPALVNAIVLVLHSVAGSAPMPGTDSSSRSMPSSSYRDMPGGFLFEGLSDDEDDFHPNTKSTPS

SEQ ID NO: 942994 - protein, 277 aa, Homo sapiens
  misc_feature (112)..(112): Xaa can be any naturally occurring amino acid
  misc_feature (171)..(172): Xaa can be any naturally occurring amino acid
  misc_feature (178)..(178): Xaa can be any naturally occurring amino acid
TYLDGEDDLFTPAQSIKYLFSGFQVAVAALTLHLHVSAVVAQILQPVVLATVPTWGLITAPFTAPLLPFLLAVTVTVTIPVPELLALAPVVVSSLPLTIPFFFFFFLSPSAXLPWRPIIRGRVAASEGSAMSPPPPRSSSLRSRSRRARSRLRLLRRFRSRSLSLLRSLEXXRSFLLXLRERLRRSREREPRRSRSLSRSRLRSLRSRYGPGPGPSHRSGRCHRGLNAGCSHQPLLFWYHRGLLLAAGASSPSRFGPSPRPQGPSCHQSSCHLRVCK

SEQ ID NO: 942995 - protein, 139 aa, Homo sapiens
VLRGGGAGILVKSLLCGLVDLGGTTLRPKPKAKVSSGRITSTVKSDKCTQQKGSSNVRNVMAAFATKERLRAQHSTDTEEKMPCQVCGKMLSSAYISDQIKVHSQGPHHVCELSKKGTGEVCPMAAAAAATRTVSSGSS

SEQ ID NO: 942996 - protein, 207 aa, Homo sapiens
  misc_feature (66)..(66): Xaa can be any naturally occurring amino acid
MSLDIQSLEIQFEELSDARWAELLPLLQQCKVVRLDDFSITEKRGKDISSALRVNPALEELNLRTXELGDVGVHCGAQGLQTPAYNIQKLSLQNCCLTGAGCGVLSSTLRTLPTLQELHLSDNLLGDAGLQLLLRRTPGTPSAAWEKLQLEYCSLSAASCEPLASVLRAKPDFKELTVSNNDINEAGVRVLCQGLKDSPASWRAQAG

SEQ ID NO: 942997 - protein, 78 aa, Homo sapiens
EVPAGKLSLAAQLLFNSEELVVFGQAVRSERGKSFDVASEEPQNKVSDEGIFSFPRTMRKDDALSNWNGKAWKTEETR

SEQ ID NO: 942998 - protein, 305 aa, Homo sapiens
NYVGDGNRDPVSAPVAFASKSPATMRKYISIHVGQAGVQIGNACWELYSLEHGIQPEGQKPSKKIIGGGNDSFNTFFSKKGAGKHVPRAVFVDLEPTVIEEVRTGTYRKHFHPEQLIKGKEKAANNNARRHYTIGKEIIDLVLDRIRKQADQCTGLQGFLVFHSFGGGTGSGFTSLLMERLSVDYGKKSKLEFSIYPAPQVSTAVVEPYNSILTTHTTLEHSDCAFMVDNEAIYDICRRNLDIERPTYTNLNRLISQIVSSITASLRFDGALNVDLTEFQTNLVPYPRIHFPLATYAPVISAEKA

SEQ ID NO: 942999 - protein, 292 aa, Homo sapiens
  misc_feature (180)..(180): Xaa can be any naturally occurring amino acid
HTSYHSQAVHIRPVCRNARCTSISWELRQTLSVVFDAFITGQGKKDWSLFRMFSRTLTEPCPLASESRVYVDITTYNQDNETLEVHPPPTTTYQDVILGTRKTYAIYDLLDTAMINNSRNLNIQLKWKRPPENEAPPVPFLHAQRYVSGYGLQKGELTTPQYNNHPYRAFPVWVGVVQQXAQLPYRAFPVLLLDTVPWYLRLYVHTLTITSKGKENKPSYIHYQPAQDRLQPHLLEMLIQLPANSVTKVSIQFERALLKWTEYTPDPNHGFYVSPSVLSALVPSMVAAKPVD

SEQ ID NO: 943000 - protein, 216 aa, Homo sapiens
  misc_feature (123)..(123): Xaa can be any naturally occurring amino acid
  misc_feature (130)..(130): Xaa can be any naturally occurring amino acid
  misc_feature (132)..(132): Xaa can be any naturally occurring amino acid
PAPPPGAARKSRFRRRARQGKPGAARDLGPFLRTREAAARAAAPDAAAAAAAAPPSVLLSGAMEHRAPRLPLSPRRKAPPPLLPRRRGPDPRVLARHLLIDANGVFYTYTVQLEEEPRGSPQXEVPSRRXRXSVRAKAARSAHVVFASTLLLQSHRVLHSDLKPFTCGACGKAFKRSSHLSRHRPRTAPAPAFSTPGRSAHAAPGRRGLAQTVRLH

SEQ ID NO: 943001 - protein, 179 aa, Homo sapiens
  misc_feature (109)..(109): Xaa can be any naturally occurring amino acid
  misc_feature (131)..(131): Xaa can be any naturally occurring amino acid
  misc_feature (140)..(140): Xaa can be any naturally occurring amino acid
  misc_feature (153)..(153): Xaa can be any naturally occurring amino acid
  misc_feature (163)..(163): Xaa can be any naturally occurring amino acid
PARSQSPRRRPTVAHALWVELHGGTRRTPNRTYGYHETHMPCAQPVQLVHVATYTEHSMLSADEDSPSSPEDTSYDDSDILNSPAADEVTAHLAAAGPVGMAAAAAVAXGQTRNRPPVFASPPSLRPGPHXRLLRPLRAXFGASPPRVGRPAXVLCLSPSPPXPVFHVFGAAPLATVVR

SEQ ID NO: 943002 - protein, 177 aa, Homo sapiens
MAKTLPSWASKREPPSGTFRPASGRVFRVSSDKLALCHLGTAHGIDRIFLKGFAPLDGEGTSARTHNELQRRKVVSTIGMLCRVLSGRHSLLPQVPREITGNVAWDQERVAEGENQPEGDGQRRRLKPRRRKRACGAQVEKYNSARADFEQKMLDSALRFQAMEETQLRDMKGTAGL

SEQ ID NO: 943003 - protein, 186 aa, Homo sapiens
  misc_feature (9)..(9): Xaa can be any naturally occurring amino acid
  misc_feature (73)..(73): Xaa can be any naturally occurring amino acid
  misc_feature (122)..(122): Xaa can be any naturally occurring amino acid
  misc_feature (146)..(146): Xaa can be any naturally occurring amino acid
  misc_feature (149)..(149): Xaa can be any naturally occurring amino acid
  misc_feature (152)..(152): Xaa can be any naturally occurring amino acid
RSESRAQPXLGMGLSLRGVWASGRLGWEAPGSGRRAGGGEPAPGRSVELGQQHLRVQQLTRYIPVANLLFTAXCGTVCPPVQVHARQSGPLAGERVCSRRGVGCAGLLRAAPKLDRGLAKKXPCLLDTICEAFQVSRFSSRFHGGXWVXTVXVVQASPTGSRSLDVREWCGHSRGTGPEPYSTETW

SEQ ID NO: 943004 - protein, 287 aa, Homo sapiens
  misc_feature (36)..(36): Xaa can be any naturally occurring amino acid
  misc_feature (74)..(74): Xaa can be any naturally occurring amino acid
  misc_feature (109)..(109): Xaa can be any naturally occurring amino acid
  misc_feature (112)..(112): Xaa can be any naturally occurring amino acid
  misc_feature (116)..(116): Xaa can be any naturally occurring amino acid
  misc_feature (126)..(127): Xaa can be any naturally occurring amino acid
  misc_feature (129)..(129): Xaa can be any naturally occurring amino acid
  misc_feature (131)..(131): Xaa can be any naturally occurring amino acid
KKDGSGLIRARGGVTDASLRSSDPERGEADTTVKLXVPHPAAVLEDTEPSVVTRGLDWSKNITFFFLFLSHVLXPRHLGQNHCTPAPMGMAHGLADGVPGWGPLNWPWXRCXPFVXPCGALLLNGXXSXIXPCQTTTAHHRKEEIAQPGEGELRLLPPTTTLKPGVTPGKLDRAPSTRRASTQGRSFPRAKDPGVAFEGGTAGAAGGNREDTRESVTLFPKGGMVKHLTRKESDAKGELQRLESMEKHGRSDFPGRPMGGRANHTLSAAVGPCTGDGHVFLGTSIKV

SEQ ID NO: 943005 - protein, 183 aa, Homo sapiens
  misc_feature (66)..(66): Xaa can be any naturally occurring amino acid
  misc_feature (68)..(68): Xaa can be any naturally occurring amino acid
  misc_feature (100)..(100): Xaa can be any naturally occurring amino acid
  misc_feature (140)..(140): Xaa can be any naturally occurring amino acid
  misc_feature (143)..(143): Xaa can be any naturally occurring amino acid
MDPAPSPELPGYSFPAEFNLIFYNSFQFFKEMEELFFPTGAGGPWEVCRAQEGSGRDAVSAFGRMXEXEIFFSEDEMPRFRGTREGGRRRGATAQPRAPXRVTTKAPPGCALQRGHAAYNWAPRSVGRVAGGREEVGSGXSLXDPGVHPRRPAPGWLPWGGRQRGSGPAPPPKPPSVARLARR

SEQ ID NO: 943006 - protein, 203 aa, Homo sapiens
  misc_feature (128)..(128): Xaa can be any naturally occurring amino acid
MQPGLGVHPAGGGPGKGRGICPVFSLWFLDSFGIPACHLPMAPTYCFLGGPPVPAFWGGGGGFFECGRGGGLFPFGWASPSPLGGRVPPPFRFLAGLGAGPLGPLPPPPPAPFPLGFRLPLSPGALAXRPPSGPCGFHYGQISTCLPQSLLHQLFSTCTFGFGMMERHRDICPRPASLSTPRLGPHPSRLCLAHYVAGACFPS

SEQ ID NO: 943007 - protein, 192 aa, Homo sapiens
QKDVIIKEDAEDNLLLEKHADYIASYGSKKDDYEYCMFEYLRMSGKEEEEKEKKLIPKSKTINKEHSPPEKNPKEQQAKAKKKTKPKQKKKEEKKTQQNSSSPQQTKKLKDKKKEEEEEKPKNKQQALAAGDIWGEIADKQSPFAERCAKEELGLPQQGRQSKGGQKRKEQEGGGESRGKGGKPAQGAGQTK

SEQ ID NO: 943008 - protein, 117 aa, Homo sapiens
  misc_feature (30)..(30): Xaa can be any naturally occurring amino acid
  misc_feature (35)..(35): Xaa can be any naturally occurring amino acid
  misc_feature (39)..(39): Xaa can be any naturally occurring amino acid
  misc_feature (43)..(44): Xaa can be any naturally occurring amino acid
MVVPYLLFFACKRLVWGGSDSIWFRYDILXEGGSXAAVXGGCXXEVVSFAVGMGGAGGRLSFSDLLRDGDQIFRVLASGGGVAWARGGAVLGPAWGWGVGRGRGRGSGCWVLGLVPG

SEQ ID NO: 943009 - protein, 46 aa, Homo sapiens
MRDPPSKPLRLPPVLSQPSFEKRAPKTAELKICRVKRKPGNCLGGD

SEQ ID NO: 943010 - protein, 127 aa, Homo sapiens
  misc_feature (31)..(31): Xaa can be any naturally occurring amino acid
MRARGLSVSQGYGGGKGGGARPIPQGGGGSXAGGAGAGEGTATASLTLCSIPLLKKTRLSRVGQPLFIGLAGVPSGKLRQSFLSCPGSHLPSPGGSSHIPGGESVLGRGGRQSGVKTPGLGSKWGSG

SEQ ID NO: 943011 - protein, 140 aa, Homo sapiens
MYSAARYWHCTQDLLLAASISFARELTAQKRKKRARRGAGDSSQSMGPPRPKSSGEKVYNQETRSIPHTEQGARGRVSLAYVLLELLLNPPFGVGIFLPAFDPKEPDAATAELFPGCSAGAFCRMCVLRRFIVQPAGPIR

SEQ ID NO: 943012 - protein, 265 aa, Homo sapiens
MGQKELMGTAEEFAEQFLRVKKKYLPQVARLCLIINFLEEGIRMWFQWSEQRKYNRKQLEMRLNAGLVLRLPQIAGKAEWLRPGVDEEIRAVSLLRALWNNTSAEDCLKNFMGIEVFDEEPGPGRRPVAAPEQNPVLNGKACLRASPPGVKAPPNSKCSSEAVVLLVLMFMNLLQFEASFFSIVQKIVGTALMILVAIGFKNKLAALTLVVWLFAIKVYFKAFWTIPVYNPMHDFLKEDFFQNMSVIGGLLLVVALGPGGVSMDE

SEQ ID NO: 943013 - protein, 113 aa, Homo sapiens
  misc_feature (63)..(65): Xaa can be any naturally occurring amino acid
  misc_feature (104)..(104): Xaa can be any naturally occurring amino acid
MLSRLRCVGVTWETVKVVIPGSGGSGGRGGGEGEGRAPNCRHFWPFPWEIVVHVRRLCFPKRXXXRGLGGGLRDLGGGPSLRWAFGGGVERSAWRATGLWHLGXGWWVGGGFG

SEQ ID NO: 943014 - protein, 272 aa, Homo sapiens
  misc_feature (95)..(95): Xaa can be any naturally occurring amino acid
  misc_feature (97)..(97): Xaa can be any naturally occurring amino acid
  misc_feature (109)..(109): Xaa can be any naturally occurring amino acid
  misc_feature (114)..(114): Xaa can be any naturally occurring amino acid
  misc_feature (130)..(130): Xaa can be any naturally occurring amino acid
  misc_feature (138)..(138): Xaa can be any naturally occurring amino acid
  misc_feature (146)..(146): Xaa can be any naturally occurring amino acid
EPRTWSVGANMSLRRHIGNPEYLMKRIPQNPRYQHIKSRLDTGNSMTKYTEKLEEIKKNYRYKKDELFKRLKVTTFAQLIIQVASLSDQTPEKYXLXENSNGWKQIFFXLTPLXASTTCQDQMGKENKVXMLRGPDAXSITTARRXGTPSRLNIFKKCHQVGVGGTGIQTKGPSEESRAPIPKTNPYPDCPFLLLDVRDRDSYQQCHIVGAYSYPIATLSRTMNPYSNDILEYKNAHGKIIILYDDDERLASQAATTMCERGFETSSCFPEV

SEQ ID NO: 943015 - protein, 152 aa, Homo sapiens
  misc_feature (48)..(48): Xaa can be any naturally occurring amino acid
  misc_feature (53)..(53): Xaa can be any naturally occurring amino acid
  misc_feature (71)..(71): Xaa can be any naturally occurring amino acid
  misc_feature (93)..(93): Xaa can be any naturally occurring amino acid
  misc_feature (96)..(96): Xaa can be any naturally occurring amino acid
  misc_feature (101)..(101): Xaa can be any naturally occurring amino acid
VFSYIIQLIFQVFFMYKELLYLERKFKKKGQGRLCILWRRGGGGGRAXVPVPXTPRAADSLPLGSPHPPRXQQRWAGETQGSGNQQHFCAWGXKGXHGGEXAWRKLMAGQGQGWSSACVCTHPPCVQLGAQLAPPPQDGRVGSLCPLVHPHC

SEQ ID NO: 943016 - protein, 82 aa, Homo sapiens
TIRTGNFQWAFQKLVAMTKSTIYSSVPYHSYDHRPYKLTPLFSIRFQNSSSLPEAFCSPNSNGMTCQSLHDNSINAVAKFRP

SEQ ID NO: 943017 - protein, 210 aa, Homo sapiens
  misc_feature (80)..(80): Xaa can be any naturally occurring amino acid
  misc_feature (96)..(96): Xaa can be any naturally occurring amino acid
  misc_feature (98)..(98): Xaa can be any naturally occurring amino acid
  misc_feature (101)..(101): Xaa can be any naturally occurring amino acid
  misc_feature (126)..(126): Xaa can be any naturally occurring amino acid
  misc_feature (129)..(129): Xaa can be any naturally occurring amino acid
  misc_feature (143)..(144): Xaa can be any naturally occurring amino acid
  misc_feature (152)..(152): Xaa can be any naturally occurring amino acid
  misc_feature (154)..(154): Xaa can be any naturally occurring amino acid
  misc_feature (157)..(157): Xaa can be any naturally occurring amino acid
  misc_feature (159)..(159): Xaa can be any naturally occurring amino acid
  misc_feature (166)..(166): Xaa can be any naturally occurring amino acid
CAQNPLHPSPSHSACKEPVVYPWMRKVHVSTVNPNYAGGEPKRSRTAYTRQQVLELEKEFHYNRYLDPGAGRVGVRPARXWPSAERQMQKMWGAKXPXGLXVGNRDHKCGPTPMIRLLGWVAGMAXAGXGPLGQAQLEGPRAXXLPPHAGSXRXFGXGXGIELQGXGRGGQEGAWGLGPRKIYIVPCPHTFIYRINRRRRWEGEALFYRK

SEQ ID NO: 943018 - protein, 215 aa, Homo sapiens
  misc_feature (39)..(39): Xaa can be any naturally occurring amino acid
  misc_feature (105)..(105): Xaa can be any naturally occurring amino acid
  misc_feature (193)..(193): Xaa can be any naturally occurring amino acid
EQPQPAPPPPPPPPPPPPALRRPPPAPGSLSPFLLPLLXTPFLLRTPAGPPSPYPPAPIVPPPASRPFSFRPLTFYPQWPRACIFWLSPPTSDQKLYHPKSSIPXTLLDMDTGVIEGGLNVTVTIWLFIHGKEVGSIIRKKGESVKKMREESGARINISEGNFAEKIMTFAGATNAIFKAFAMIIDKLGRGHXAALWTNKHSWPVEPPVTLEAVW

SEQ ID NO: 943019 - protein, 78 aa, Homo sapiens
LLLLPPLLLSAAFARAAVVTGAAAEECHCNQDRSARRREIEAAQARSIAARGVRSGSGPGREGKCKMAAAMETEQSGC

SEQ ID NO: 943020 - protein, 164 aa, Homo sapiens
GAPRSGRPNPIQLGEDTGGRAGHQDGELHMHGRETGARREAKQEEEEPETRGRNAQARAGTRSISGIKQQALSHSTGSVVFLWHTAKGNFGIPPRAPTGGQGGAEGDTRRASSKASRGCLSREEGGVTSNGRAITTFRDFGRGPEGLSQGPQGPRRAPAYQQTS

SEQ ID NO: 943021 - protein, 266 aa, Homo sapiens
LPGVKRVGNAPGGDGAEFTSRRGSSRKPGAACPGCRGAGSERAPGGMGRRRAPKLYRAPFPLYALQVDPSTGLLIAAGGGSAAKKGTKNGVHFLQLKLINGRLIASLLHSHKKKRRATINLALAGDILAAGQDATVSSCASRHINSRATKQKKLVPRSRGFEKRKEQPQTEKKCGAETQHEGLELRVENLQAVQTDFTSDPLQKLVCFNHDNTLLATGGTHGYVRVWKVPTLEKVLDFKPHERDIEHLALRPDGNLVTVGGDLKAS

SEQ ID NO: 943022 - protein, 258 aa, Homo sapiens
  misc_feature (85)..(85): Xaa can be any naturally occurring amino acid
  misc_feature (89)..(89): Xaa can be any naturally occurring amino acid
  misc_feature (149)..(149): Xaa can be any naturally occurring amino acid
  misc_feature (151)..(151): Xaa can be any naturally occurring amino acid
  misc_feature (172)..(172): Xaa can be any naturally occurring amino acid
MGLRFAARATGEGAVGRGVGGGAPGGPRAVGRESGVGEWGGGARWRRGAWDMARPDDEEGAAVAPGHPLTKGYLPLPRARARWEXKSVXLEKRAQAGTFPVNGAPRDTFDDTPPGVIGRAYKNYQLGPRKKENPAPALSASRGAESWRXPXGPRGRPACPFTGALPRWRFRXLLLDLSDLVLRWGQPPFQLDSSYKHSFSKVLSEGLSYGCSPLAGTIGLGLSLGGNMSGPLRCPPPSFPGPTLGCLGTPSRALRAST

SEQ ID NO: 943023 - protein, 259 aa, Homo sapiens
MEYEKKRREKGGGGDGSKNRGKMCEGGRKWRVVQKSKEDSSGVKKGEVEWRLLEGDGTAPPELDVCGINEKRMVIKREQLAKTISKKLESRSFCGGGKKRGDLFEGMEMMEFERLVVRVVWVKMEKNLAEFGRRGEKNLLIMCKEKEKVEKKGEEVKGRVVVCERKGERRDVVDAKMEMVSPLEGVETGFKEQYRTFATALDTTREELRVRPISFQVDGEELLDALEDELVTTQRVLGELDVGDWEENVEVLDLLSELK

SEQ ID NO: 943024 - protein, 99 aa, Homo sapiens
  misc_feature (24)..(24): Xaa can be any naturally occurring amino acid
  misc_feature (51)..(51): Xaa can be any naturally occurring amino acid
GGRGRGPTSPRGPGDREEDGVGLXPAAVARYLLIGHIYHVILGTVGIAEPXLGLKRTNNWKLETFLKNNVREENIENTFFKNKQKLLEISTKIRLPFLR

SEQ ID NO: 943025 - protein, 75 aa, Homo sapiens
  misc_feature (6)..(6): Xaa can be any naturally occurring amino acid
  misc_feature (31)..(31): Xaa can be any naturally occurring amino acid
  misc_feature (72)..(72): Xaa can be any naturally occurring amino acid
  misc_feature (75)..(75): Xaa can be any naturally occurring amino acid
RKSYSXFLCIKVRVVGNSSSPVRSKVVSPVXKAKSYVNAANVRVLNAHPLRSNAVMSTSAVSQPVSVSVVQXLQX

SEQ ID NO: 943026 - protein, 106 aa, Homo sapiens
  misc_feature (24)..(24): Xaa can be any naturally occurring amino acid
  misc_feature (26)..(27): Xaa can be any naturally occurring amino acid
  misc_feature (36)..(36): Xaa can be any naturally occurring amino acid
MLFCLYHRRGGGCFFRGCGYYVYXLXXSFNNFSAFXMSPIPTNQRSCAGGSRCGGPVICHIGVPSCRRFCWCFAVPSLCCFRWSAGAVCWPPVSHVFTSHKCITLS

SEQ ID NO: 943027 - protein, 291 aa, Homo sapiens
GTDCTMKAKKKKNKSNVHVAKINLKDHHERGEQPWLGGGSAELALHSLANFWVQWWGVVCASVDGQAGPGEETTMGGGVFGGGVGLGVGGGLGGAGIKGLGAVLRSGGGPFPEGDCPGTGGGGLGTIPGHRGGEEVCSQVGGVRPPPGASLFPGGVCMGWLLGPEAGEPSSQEAGGNLDRHTASKPTALLQPGRGWQRGAACCLQILPESRVCFPTGLPLARKVTKLSWVGYKLQGRELQWPVYREELELERLLWRRRPGDRDLRRTGDLRLGERDLLLIRGGDLRHIGGG

SEQ ID NO: 943028 - protein, 240 aa, Homo sapiens
  misc_feature (130)..(130): Xaa can be any naturally occurring amino acid
  misc_feature (138)..(138): Xaa can be any naturally occurring amino acid
  misc_feature (155)..(155): Xaa can be any naturally occurring amino acid
  misc_feature (158)..(158): Xaa can be any naturally occurring amino acid
  misc_feature (163)..(163): Xaa can be any naturally occurring amino acid
MCFDPSSQIRYIPPPPPRVCRPAVIHRELCPGFFKGTHIGMGVGGGRRVGGLGGLGVKMEQGPGGYSMGGCWGQGGGRVRLLGGGAFRGGEWGWWGGGAGGAAAGGRGGGCGGVGEGVEFAPGGLGSGGXEGALEHFXLYPFWELCISPTPQATXLAXAGGGXAAFGVGDFIFLSMARLSWSLDISGSYASLTSVPLWSKNLAMDFVNSASRCCFVLPLLKVSFQVYLSSNLLRLEASCQ

SEQ ID NO: 943029 - protein, 44 aa, Homo sapiens
  misc_feature (7)..(7): Xaa can be any naturally occurring amino acid
  misc_feature (30)..(30): Xaa can be any naturally occurring amino acid
RPGHCNXERPGEPLCYLSQVEGETQAPSLXPAILSRPPIPKPWP

SEQ ID NO: 943030 - protein, 153 aa, Homo sapiens
  misc_feature (136)..(136): Xaa can be any naturally occurring amino acid
MSRSSRRKAQVLMFSEELSKAVTVPGGWSSKNHFGTLRSSFISQRAPVGKAKGPDWWVAARGVGAYFSGVLVPKPPCVYAKARRVPAAILVLLGGGILRGGKKGPVMAVAEVVPRIRWSNCTLVGFSKTFLRVGGXVKGSSGVPGSPILGKEL

SEQ ID NO: 943031 - protein, 262 aa, Homo sapiens
KSEGSRGKSGGEEAGTREAGKGEGSRNEARQGGQERPGGAGAGGTAARRPRGAGGGGTNRDRSGGPGQQGRGRKTGGHGGGASAEEGGGGERGEKTPGAHRNRKTHKERHKGEERGGGTRGARRGGNDGPPGSHQAGASPAPEPGGGRQGKRRGQGGPREGKTGGGGGTEGGTKKRGQRGRKQPGESGEAPREEEAGRRKRSGAGQRRGGGAEEESARNAGRDRSKGKRDRTERETKRAGHGGERDTSRQAGGGARGGERGE

SEQ ID NO: 943032 - protein, 141 aa, Homo sapiens
MWLLLLLCSMRYMVSLISWTHEAATGEGLGTYIAGVTATNGVCRSLPHLTRLSYTSSIRLSIKAEQYQSRAQALQDTSQTQGPEELRSWGAGVGESRTTFGQGSHILFLGSHSGNVPGGRGDGSHTALPSQTRGTPGIMRD

SEQ ID NO: 943033 - protein, 200 aa, Homo sapiens
  misc_feature (3)..(3): Xaa can be any naturally occurring amino acid
  misc_feature (42)..(42): Xaa can be any naturally occurring amino acid
  misc_feature (44)..(44): Xaa can be any naturally occurring amino acid
AAXGREGGAQGPAGAPPAARPAGEGGAPKQEKAGQGGGDSNXAXAGEGGGGTGAKTGSGKETAKERAQRGARGEGAGREGEKGEGGAKESQTTTGNQQGGGRKRDRAETKARRAGAKGGGAEEKHRHGGSNKAGGRRGPDAKTTEGGERHRGGNHGGAGGRRRRDTRAQAKRNGGGTQRAGEGGGGAARRGQQDAAAWTP

SEQ ID NO: 943034 - protein, 130 aa, Homo sapiens
  misc_feature (2)..(2): Xaa can be any naturally occurring amino acid
  misc_feature (10)..(10): Xaa can be any naturally occurring amino acid
  misc_feature (55)..(55): Xaa can be any naturally occurring amino acid
  misc_feature (100)..(100): Xaa can be any naturally occurring amino acid
MXTISTNTLXKTWTIRYTRSILRTHFWVPSVIAKVLLALGELVVYVRGDSVPGIXSSGAVEMLWQCQSVGLGEATEGVGQVTFGGVCLRVYDGSGMCLVXVWTRVLQRTVLEIQLQDGALLIQAATGMQH

SEQ ID NO: 943035 - protein, 275 aa, Homo sapiens
  misc_feature (46)..(46): Xaa can be any naturally occurring amino acid
  misc_feature (138)..(138): Xaa can be any naturally occurring amino acid
  misc_feature (190)..(190): Xaa can be any naturally occurring amino acid
  misc_feature (193)..(193): Xaa can be any naturally occurring amino acid
KGLPQPSALKPQPHPDQACVLCSWQAGLRGEGGRLGPLEWGRVRGXTATSCPSPRGRGPTIDHVLHSSLIPSRGEPWTFWWCPSGEGSRLRPRLGQRACREGPDGTSQWRLNLPSFRRLPPGKTWGPSSTQRRLAVLXMQWKTLQKNSYEKNMKPVERAAFSKRGDRPLKKPRAPPFCSTCLAQSMRPLXLRXWPKAALACSNPPTCSRFLKRSSGYVRVLLMTPAPLPHSRFWRFSFFFPSAGMAHLFRCFKELVARELQPGVGEDGDQGGSNP

SEQ ID NO: 943036 - protein, 140 aa, Homo sapiens
LPSRPPRRELGRPWQPPYPQDLAREGVWARKRPLCAAQAEKQRAAVKNWKRPVTCIEGGGAKGGRRRCWPVVWCGAAGPVWSMQVPGGCAACPAALRGEQRRLPMGPWGVLCCTALAEATRQPAVPHPTQHALIQCIALI

SEQ ID NO: 943037 - protein, 115 aa, Homo sapiens
  misc_feature (43)..(43): Xaa can be any naturally occurring amino acid
  misc_feature (53)..(53): Xaa can be any naturally occurring amino acid
MRHHIVELVQNFGGHVLDGGSSQGQMNTRPSREQRGRGRGGRXGGGAQGTSRXQSLCASSFCASFHWPSSSSFHSLMRLSQPPDANLYDVIGFLPRWVVYEASRYNSRGPADGIA

SEQ ID NO: 943038 - protein, 225 aa, Homo sapiens
  misc_feature (21)..(21): Xaa can be any naturally occurring amino acid
  misc_feature (159)..(159): Xaa can be any naturally occurring amino acid
SYLFQPPLLEGPHFGGTARHXITHPSHPLKAPTGSGKSPLPPGRGPGVAPGGSEDSPSTHPTRAWNLPTRRKPTAHGNWGKQIGQRFRGRGPAPPKGWEPCMRHASHRQGRSPNRGPTPGVKDLRERSSKTLVIPGNIIVDENGIDTGRGFLELLHFAXKGQAKKTTAIPGKAEYPHTIGQRGLSKDKIPRAPGVKINHCYSHNTEGIFRFLLFQELQDVPCMNL

SEQ ID NO: 943039 - protein, 148 aa, Homo sapiens
  misc_feature (10)..(10): Xaa can be any naturally occurring amino acid
FRPKLTANNXHCRQLNLRSGRTTVVFQEFSPEGTGCWVGGLGGGGRARPGCVFRVSESNSYSCRGTTLTGARVKNRSQAGLGGSCLLSQHFESSRQEVGLSPGVQDQPGQKVRSLPIPISSKIKNNLLGVVALTFSPNHSEGWSRGVA

SEQ ID NO: 943040 - protein, 326 aa, Homo sapiens
  misc_feature (3)..(3): Xaa can be any naturally occurring amino acid
QPXPNPGNPDPQPNPEQPRTAQKPRKPRKKQKKPPKPQQRPPKKKPPQQKRKRGPEQAEESANQSTRAEAKPQHQKTKKPAKETPPTNNRKPPKPKQQTRSAPAPPTKTNSKTTNERAETSGNHSPTPTPTKARTAPQPKRKQEKPEPAAPGQPNPHKGKSRTPEPKKPTKKKPQNTANKKEEAHTEDGQNQEEENVSPEEEDAQKRSEKPKQYLLYIRTKATSHTQAQAEKTKTKNGPTTQYEPPPPKAKPKTRNSKETPPKREQSEPSRQPSDKTKATTPKPPTKRPPKTYIAASKATNPSEAKQDQSPKNKKHHHKFPNPQAQ

SEQ ID NO: 943041 - protein, 82 aa, Homo sapiens
RNPKELASNLEVVSEAAGWLDWAQPLSCLNLAKERDYDDYADFYIVFISLCDYVFSFNKAFVPMALGLGGRLKECVEILSKM

SEQ ID NO: 943042 - protein, 163 aa, Homo sapiens
MNGSGRMQPIFQAGGTTGLRPLPRAGRERLQEKKARCLSQSCSPLPSCLEAEMLGTSENRPCGTRTMGIEKRHHPKAASRVSAARPGRLRVHKCPIEKQCSLHRWRSKRAGASKASKVKPRAAAGPPGRPKRPLQGSSSSGLEARCVAPSDGSKAAHGDLCPL

SEQ ID NO: 943043 - protein, 203 aa, Homo sapiens
MRPKTWPRYKAWLCCSRPLLSRLPCCRRGWSWGGLQGLGRRGWEEPVLKSLQKQQGPQCQRPAVLVRVFLSHVRQPGPGFQQIVHQVLQQARKEQAEQDGGDGRQQPLAHVGIDVEAKGPHEFQQGLAHGHSHRGVNSQAHQGPYGVRHLSENQLVFSQEVEGHQRTVKALKEGGKKKWPATELNLLGLPAGPCLWAALESRW

SEQ ID NO: 943044 - protein, 282 aa, Homo sapiens
RLLILVAGQETKESPPPNHGPTVAKPDLPNPAHSHLSLTSYRWHTGGGGEKAAGGFRWGRFAGWGRALSHQEPMVSTQPAPRSIFRRVLSAPPKESRTSRLRLSKALWGRHKNPPPEPDPELEQEAPELEPEPELEPPTPQIPEAPTPNVPVWDIWGFTLLYGNLIFFGGYYYFFLMFLSFNCSSEGSIHVAMGNFRDPDRMPGKTEPETAGPNQVHNVRGLLKRLKEKKKARPPSALGSRESLATLSELDLGAERGCADLATAPQPPGGAHCFQVAGRVEA

SEQ ID NO: 943045 - protein, 61 aa, Homo sapiens
  misc_feature (16)..(16): Xaa can be any naturally occurring amino acid
MYRLSPLAYSFPELRXEGLDSKQGYVVENEPALDQQENEPTDCKPAQGQSPPSPQWDNRST

SEQ ID NO: 943046 - protein, 293 aa, Homo sapiens
SVCSQTTCDEAGWAAQVVSPLRSGCFEGLGWFLRPPRPWRELQALVQHPSAEPEFSPSHLGGAPGFSECALHCLLGCALNQNLILPARSLDVQILQLAPQCSFCSVKARIWVLIDSTRRDSTFCSSRIAATSHCSSANFFTGWCVPSALVSVLRLFYFSLPGYGGFRGSEAESIVGCWALGAGPMLREPLGRGQGPADWRRRAGRRTGTLCVRCTGRGRRRRRSSSGRGGPNSLSGEPAQRLALGDERGVLGEVPGGQEAGLLPCREAGVDLGRGQCETHCTDTSTGWLSQWL

SEQ ID NO: 943047 - protein, 122 aa, Homo sapiens
  misc_feature (5)..(5): Xaa can be any naturally occurring amino acid
  misc_feature (22)..(22): Xaa can be any naturally occurring amino acid
  misc_feature (34)..(34): Xaa can be any naturally occurring amino acid
MGNLXFLPSLPYWCDELKVERXTQGRCFPLPGPXPKLRPHIVDAKKNNLPKTHCPGAPSLFGKFISLWIPKSWSRGQLLLSGQYFYFVGVEVASGQKAGKTPPGLLQLQARYLAGEKEILSR

SEQ ID NO: 943048 - protein, 113 aa, Homo sapiens
  misc_feature (57)..(57): Xaa can be any naturally occurring amino acid
  misc_feature (96)..(98): Xaa can be any naturally occurring amino acid
  misc_feature (101)..(101): Xaa can be any naturally occurring amino acid
  misc_feature (112)..(112): Xaa can be any naturally occurring amino acid
SAAAGPRERNTAGGSNFEGLRPKGKGVPMDQSPRGQDKPESLQPRQNKSKSEITDMXRSPTITVSDKAQISSMQKFGLRETIVKSHLLQKEEDYTXXXNFXFFAGTYNLNGXS

SEQ ID NO: 943049 - protein, 130 aa, Homo sapiens
MYLKHSNTKSTQIRFPNTFSSEGGGGHTSSGPEEATTDKEEITTAGAKNGGEAIPPSPNSSAAAAQLNAATQGKKGFLQAAAAAKNKTNNKDRELLTQANPSSTRQPTPHPPPPLQGPNNHPPPSQTHPH

SEQ ID NO: 943050 - protein, 140 aa, Homo sapiens
  misc_feature (25)..(25): Xaa can be any naturally occurring amino acid
  misc_feature (47)..(47): Xaa can be any naturally occurring amino acid
  misc_feature (68)..(68): Xaa can be any naturally occurring amino acid
  misc_feature (98)..(98): Xaa can be any naturally occurring amino acid
  misc_feature (103)..(103): Xaa can be any naturally occurring amino acid
VQDRAGGECARGRGREVAQSRHERXPSGMRLARKHEGIGAQARAVRXEGVQHRVAYHAETMHLAQGGXAPPAPPARRSARPKRLPHLERAQGCGVVVXCEGHXGPTVSPERLRRRQPRGRLAAGRALRSQRAARAPAPAP

SEQ ID NO: 943051 - protein, 110 aa, Homo sapiens
  misc_feature (65)..(65): Xaa can be any naturally occurring amino acid
LFCCGFLGVFGSLFLPGLLPLSLLPLLLLRPRGGPFSLFLRCRGFVVGPGFVLPVRLCRFCFFAXLLCFLGFLSCPLWAGLRRLVAADTLHGLSYNLQYRFILIDKCSHI

SEQ ID NO: 943052 - protein, 317 aa, Homo sapiens
  misc_feature (14)..(14): Xaa can be any naturally occurring amino acid
  misc_feature (27)..(27): Xaa can be any naturally occurring amino acid
  misc_feature (133)..(133): Xaa can be any naturally occurring amino acid
MRVGLVWGAKRRAXPGPWFLLRTNVNXGPTGKKLGAAERMECRPRLLGGALSSWQGWRVVAAGLCQPMVRWHLTLFSSFTSGPARSCTVNQAQVSFTACLKGVNLEVGQEGPQLAVTGCFLKLPNRLGCFKGXFPMEVHGLHHRLGCLLEGELNSLAHGEDEGLHFIVLPQTQKKSWARTSEYINCLRGFPVPHNVRPSRCFGQEHLVDYARKHVAILDVEVVVGPEDVGGDDSSEGAAVLLEVGPVLHVDKPLGKRVPKIAVVGRPWWIKVSAVGEVVLLGKKEEDRKETTLRAPTLKAEFRTFVVHVHPGIRTGT

SEQ ID NO: 943053 - protein, 251 aa, Homo sapiens
  misc_feature (156)..(156): Xaa can be any naturally occurring amino acid
  misc_feature (162)..(162): Xaa can be any naturally occurring amino acid
  misc_feature (170)..(170): Xaa can be any naturally occurring amino acid
ERCVDEECGCTSRSSLLRWSSGPPLDSPVPQRLTLVRVVLEPHKLAPQADLLDADATRGRGLLGQGEATAATRARCPGRLGRCPRAPPPPAAPAYGGPGARGLDKPPLLPEVARERVTREDGLGDSLSLSSSPSRSFREAWISMSRASLTSSSPWXSASRCXITSRISVXSCPLASSISRNLSRSPAMASSSPRMQIFSGTGLLLEAGELVAEGLQAHAGLLQLLASSTGRLVVLVRAQLGAVQLGLVGLL

SEQ ID NO: 943054 - protein, 147 aa, Homo sapiens
  misc_feature (124)..(124): Xaa can be any naturally occurring amino acid
MPIQVLKGLTIIIKNRGGCLLLMVLHPSKNSAVSCLGVAAAWLGKRCHPPTWAKAGSAPAAGKLSWLSRRFGQELQQALLGPGGVKLGSCLVPSSRKLLLLGDLMEPDKVPSSATNEGPEGKTXKALPNWLLMDWCQLGVLPALGGH

SEQ ID NO: 943055 - protein, 231 aa, Homo sapiens
  misc_feature (24)..(24): Xaa can be any naturally occurring amino acid
  misc_feature (31)..(31): Xaa can be any naturally occurring amino acid
  misc_feature (33)..(33): Xaa can be any naturally occurring amino acid
  misc_feature (35)..(36): Xaa can be any naturally occurring amino acid
  misc_feature (126)..(126): Xaa can be any naturally occurring amino acid
  misc_feature (130)..(130): Xaa can be any naturally occurring amino acid
PTGEVGGRHPSIPVPLNMVSGCGXLEGHRTXPXGXXCPRFFASPKMSRTFLMQLKQGAAPPRFLFASSLDHHVRWCLFLISKFRFHGGVMGSSSPYVWLQYVNWVCSSPSLQETLGISLIHLLLGXLLNXKVLFHLVGSQHEHGGMAGPGTMENSLLPVMAWISKTASSTVMPLTSYCWYRTWGTGMSLGVTGSGAEDEVEEEAGYLLSMVGWGWKGGSVASKCREDSSWH

SEQ ID NO: 943056 - protein, 145 aa, Homo sapiens
  misc_feature (63)..(64): Xaa can be any naturally occurring amino acid
  misc_feature (69)..(69): Xaa can be any naturally occurring amino acid
  misc_feature (74)..(76): Xaa can be any naturally occurring amino acid
  misc_feature (78)..(78): Xaa can be any naturally occurring amino acid
  misc_feature (92)..(92): Xaa can be any naturally occurring amino acid
MTKITPIPGADVQLPEAMGASSLGWKPQEPPSYCLIFPALPRWPRLISQKPARPPPTGTGAPXXVSSSXALCFXXXSXVGGPASAPPPWAPXQYEAVLLVLALPPPPQHPPSLGHVAPPPHPRCSKVISCPRITSFWQFGQVEGR

SEQ ID NO: 943057 - protein, 169 aa, Homo sapiens
MTLILLLRNVLEYSGFVRFCEVPACKRHLLGRKPGAQEKFWYDYPACDSNINAETIIGLVRVIPLAPKDVVPTNLKKEKTLFVKLSWNEKKFRPLSSELFAELNKPQESAAKCQKPVRANSKSAESPSWTQQNMWPKGLNQGTPPPNLAKLLPILLPKSQKEAGAWQLR

SEQ ID NO: 943058 - protein, 216 aa, Homo sapiens
  misc_feature (92)..(92): Xaa can be any naturally occurring amino acid
  misc_feature (99)..(99): Xaa can be any naturally occurring amino acid
  misc_feature (118)..(118): Xaa can be any naturally occurring amino acid
  misc_feature (141)..(141): Xaa can be any naturally occurring amino acid
  misc_feature (161)..(161): Xaa can be any naturally occurring amino acid
SGDIAPEQDTSADVECDRHQGMFALPKKGDRPWGDLYPALQDPKTCPPQGPGLKHQWEAPDGKKLRREDGVTEPRQQKQQRGSGPLSKFSQXLTEVMPXRPFPSNPTCTQLRIFRGSXTAARMKTASSRTYYPGKMFWWEXNYGITKAQRTLIQGAPPRAXLLENLPVWVGVEGLSDVLWFSQPRVALIQQGEGDTAGKGPLKEIVKGTRQHTNVQ

SEQ ID NO: 943059 - protein, 315 aa, Homo sapiens
LRRRQPRYGCALREETSLEKDFKGHRDAVTCVDFSIKKKKLATGSMDSCLKVWEMKPQSRAYRFIGQKDAVTCVNFSPSGQLLASGSGEKNVGIWVKNVKGESTVFRAHTATLKSVNFSSDGKFFVKASEEKKLKVWENDRKKFMFSLSKHIKWVRCANFSPEGRLMVSASDDKTVKKWDKSSRECVHSYCEHGGFVTYVDFHPSGTCIAAAGMDNTVKVWDVRTHRLLQHYQLHSAAVNGLSFHPSGNYLITASSDSTLKILDLMEGRLLYTLHGHQGPATTGCLFKKGEYFASGSSDEQVMVWKINFDIVDME

SEQ ID NO: 943060 - protein, 211 aa, Homo sapiens
  misc_feature (3)..(3): Xaa can be any naturally occurring amino acid
IPXQSWCGASPQLLQQAVDRAQLLLEVALVLTILQLQAGQPLVLSLQAGQSPAELGVLTVAVPAGGQEDAQCLLHLLTGMMLGLRQGVGRGLAPALFRTGLAGGVRWGYCCGLLWGHFLGQLSLLLGEHASPERVVEECEEECGEGLRAASPGPGSLRACCRLELQELPLGKGKWRKGEHNANRTFFFAVSGCSVARMTSSFCRAPPSMAF

SEQ ID NO: 943061 - protein, 329 aa, Homo sapiens
MKTLPSSQRGRGPLAGQQPLCGLEAFLLQNKKKKKKEQQPPILNTLDEPQGCLEYTEKGMQTNNLRYGIGAGIRKGSSATKSGGKHQRGPGPPPPQKIKGLKKKLDGSGVAAKKYTQGYVEKYGKEKNHTGRSAKPPEYIKKELYFISKDAHKHLYSKTPYRTTKHPPYLKKAIEQHPYNTVLQSQGEDLSKVKGTLPIPPALGLGMSPQPRVLGRDVRANAQLVGDVAGPLLDPLSSPEPPSCVQHPRLSAVSQQEGAMEENGAIPPGSCPLPIVLINLEQMQGSWETARSKHLSGQATGFPSHGPGPKLVQSEHALAIYPKQKAVNK

SEQ ID NO: 943062 - protein, 203 aa, Homo sapiens
AGVTLDGARPCVAIRVLPLNGVAVEEMNLVGGPAEAGSEETALKKFGGLTGYGVFWWPQHSLSAWGLSKVHRLIGPPGAGHSPSGATGWADHQSPSGWSWGCYSPCQQLLSAQQGAGFEAGWAHQGLGGSRYRALWAGPFGLLKFPTRLFLQWSHHSLHPLFGNDGEVSRESQPGEGSGKAGNWPLDWLDRVDQAWDLGQQPF

SEQ ID NO: 943063 - protein, 116 aa, Homo sapiens
  misc_feature (6)..(6): Xaa can be any naturally occurring amino acid
  misc_feature (24)..(24): Xaa can be any naturally occurring amino acid
  misc_feature (49)..(49): Xaa can be any naturally occurring amino acid
TPQNCXRNVTKALVLGTSCWPRRXKACGGRCAPELQGSWSLTRSREPLXNSTSGISGGGITQKGESLDSEPGGARVVGEQNKGEEGLEAFAGALQPQLVVHLFVDVLQRWQPRAVL

SEQ ID NO: 943064 - protein, 199 aa, Homo sapiens
  misc_feature (97)..(97): Xaa can be any naturally occurring amino acid
NNLGEWRSGGGESLTVESHFALTLSVHNPQGYLEVPQEEPEEEEEEMDVRKKGPKVYHHALLALCSCRSPVVRAAALAMPPSSLTPVLSALLAGRAXDSALFCLQGKGGVSEAGCCQGSALGWKSQKSCPGAGGRWRKLLGETPEATPGPLRGVFFFPPSQEIGPPTPTPQCHRDCGFQRFPRLQAGLGWWAAGPRPGS

SEQ ID NO: 943065 - protein, 194 aa, Homo sapiens
  misc_feature (12)..(12): Xaa can be any naturally occurring amino acid
  misc_feature (25)..(25): Xaa can be any naturally occurring amino acid
  misc_feature (27)..(27): Xaa can be any naturally occurring amino acid
MFLALHLLATSXFLTWKVLANAKWXCXKCSVDLGAVQQELKGRKVLNIAGSIHPWLDFTFQELPTGTTPSAHMAAFILRVPFGTASGSVSTTYDGDAAPRGGFQQLIYESFGSLGKSFPFKYPHRTILQNVISPSESLSILLAAFRTKVKADEESRYARSNSGLASLGILINLVSSGKVNRQGNLHTILLSFGH

SEQ ID NO: 943066 - protein, 114 aa, Homo sapiens
MRIHSDPPALHILVIKNRNFSADCVRVSKGGARWNLGTYWAPLKQKEKLENVKVEKYPLPPEDEETREINQQHAGDEVTKATILPTAQGDFTPQDLLPGPTPTKGERKQHTPAP

SEQ ID NO: 943067 - protein, 182 aa, Homo sapiens
WNHEGFTGENASELTGNPLGEKEEVIPREEPQWGRCVSYATPEGWRVPRAAADRLVLQELGAGEAIMHCGVQRQKHNQQEPRRRRLSSYNACLVPSTDKAYPLSKNSQLKKLNLEHKVNKSITSNTMGPGVPWPLVSGVGRRMLHVLQWAQRPCTGENHPCKVSVVPPVSVRVPARYGSSLT

SEQ ID NO: 943068 - protein, 151 aa, Homo sapiens
  misc_feature (2)..(2): Xaa can be any naturally occurring amino acid
  misc_feature (69)..(69): Xaa can be any naturally occurring amino acid
  misc_feature (112)..(113): Xaa can be any naturally occurring amino acid
  misc_feature (120)..(120): Xaa can be any naturally occurring amino acid
  misc_feature (125)..(126): Xaa can be any naturally occurring amino acid
KXRKGAGEGRGPRGWGQCTRGSSALQRGQHLHLLLLLLLLLFLLLLQLFLGESLVLALFLLEGAEEGVXLVPQVLLQAAQVAFHVPRMGAQFLPELFHLLHQGFVEVFPVPXXGVAPPPXAGPGXXPALPDEFCSPSVLPLRLLRTCSAKG

SEQ ID NO: 943069 - protein, 151 aa, Homo sapiens
  misc_feature (55)..(55): Xaa can be any naturally occurring amino acid
  misc_feature (64)..(64): Xaa can be any naturally occurring amino acid
  misc_feature (105)..(105): Xaa can be any naturally occurring amino acid
  misc_feature (109)..(109): Xaa can be any naturally occurring amino acid
MSSRFAAAPGVRTVFKAFVSPSPELEGDVGDGSLAAQEGIWARQVRPTPRRPVLXPEKGPSTCXSKLLLGAEPRKVALGPRRRSCSWRSQPRKCCAARRRPRSQXGSGXGARGARPCPRAPGRKRRPPGAPGTAAARPCRHSGSVGELRRG

SEQ ID NO: 943070 - protein, 212 aa, Homo sapiens
MTDDECYVLLRLGGEQAIPQGTHSLRALAPRAAGSLSPSFVCRSGKTRPRLNLQSQTETKTLCLHPHDQSQPPVRASCSTPCCWLDTWCFKAKTHLDSYVHVNDFGKKEGSVESCSTKVRSKNRKMLLIMIICLQWSCQHVLIFFKNKTLSSESSLNWKDLCLDVVFTGLTHCLVEHVGDFVRTEIFHSLEDLLEVVPEGGAALHGPHRLVQ

SEQ ID NO: 943071 - protein, 133 aa, Homo sapiens
MRKVACFVATGFLASSAKLVSLLYALLHFSTKAAKSSITAFSCSFVALGLCFTSSTSAVCFLICLSFSESVHISAWKVNVSALNSLGTYVSSTSRAEKHGRLFTKDSVQHLVTLSVTGLFSCNTHNWFRTTDR

SEQ ID NO: 943072 - protein, 164 aa, Homo sapiens
GGEILDSVKRQIFGVKRSRPVQCAQTSAPQSTSILPGRRGNNSLAKGLSSAGSHGPSKWPHCGRKSLSVPPWYPDFISRYSCPWRPSWSIPPAKKRVLRPLLVGTQTANWRMTDLLEASCFLGNELGQASSYGGWFCIDRSVPGSHLQWEQGGWEVAKAKSLLR

SEQ ID NO: 943073 - protein, 141 aa, Homo sapiens
  misc_feature (133)..(133): Xaa can be any naturally occurring amino acid
AGLRSCAGVTMPEVPRPPLVQLGLLQRKKLHLLEGSVGGPRGLAHMKKLRPKLGPGFFTVRITHGSLEPPQRGVRKAPASTDFQNEVRNSFSSLASEVLACPFSTLATAFSSGVFGVMRALISGRLGSSMLGXAWGQLALG

SEQ ID NO: 943074 - protein, 82 aa, Homo sapiens
  misc_feature (14)..(14): Xaa can be any naturally occurring amino acid
LLAYEWLKHSTNKXTLMKSSFIKPTRNITAKTHQNQSIAISREDGNSDSKTIIIIIVKSFITVFSNTLGTCLSWVSFFLMNI

SEQ ID NO: 943075 - protein, 178 aa, Homo sapiens
  misc_feature (108)..(108): Xaa can be any naturally occurring amino acid
MLQFAAFQFVILGEQTEESCGPSETPRSLPSAYESSPIRHLVASIKIGSMFGQTLHDVVVAPGRGCQEGRLSFSVLDVQVKAGFTKGFGHRVIAVPSSTVQGGFFFLXLDIGIGAEAAQSLSHVSMAIASSHVEAISPDLSFTSKGHLFSLRDFQGIDVAMPSSPVDGIGPALILDID

SEQ ID NO: 943076 - protein, 101 aa, Homo sapiens
RERLFHNFTNYRKMIFPLLYRNVTPKSERALLWLKPGGEEGAENTARRAPALWVARRLFLHIKAQADSQRPVTPLKEAPSTWLCGTLGLASVLLASWPQKT

SEQ ID NO: 943077 - protein, 183 aa, Homo sapiens
  misc_feature (170)..(170): Xaa can be any naturally occurring amino acid
PWHCFHPLVPAGHPGTTGEDVKPPEHAQKEGASSQPIIAGLMIFYKLCFNSKCFCFKKELISFIENVLTLFKIIFNIMKNYSDSKFLAFSVYFFLSSHHYYIDCDVSLLEISPSTHAWHLFHKRASLGIFLAHDPALSQDDNSSSSKIQSSVSGEEKVDKQARTSAHHSXSLQTASPSALFTL

SEQ ID NO: 943078 - protein, 178 aa, Homo sapiens
  misc_feature (90)..(91): Xaa can be any naturally occurring amino acid
  misc_feature (118)..(119): Xaa can be any naturally occurring amino acid
  misc_feature (122)..(122): Xaa can be any naturally occurring amino acid
  misc_feature (133)..(133): Xaa can be any naturally occurring amino acid
  misc_feature (166)..(166): Xaa can be any naturally occurring amino acid
  misc_feature (173)..(173): Xaa can be any naturally occurring amino acid
PSVGDYFHMAYNVITPFLLLKLIERSPRTLPRSITYVSIIIFIMGASIHLVDDSVNPSLLFGGFLPPLSVSENPIFKTIIAGDAARLPCXXLILKCIPGSLPVVPPILPPTLHVLPAXXYMXLLLKRWLHGSXQLLVGPVGCPHRSMDPRGTLFKLFQFHFFTLLXLVLNTAXTGVSL

SEQ ID NO: 943079 - protein, 87 aa, Homo sapiens
MFLTPKPPPLTLAQKLGLIGPPPPPLSSDEWEKVNSALSCKGTPCNHAPSVKKNSSFVLRCLAYEGELESSWAVSKGRGPELEPKIP

SEQ ID NO: 943080 - protein, 106 aa, Homo sapiens
  misc_feature (106)..(106): Xaa can be any naturally occurring amino acid
LKKMGFKTGGEMQFLFTFRPISQTICEAGSRRGEPKDPTRLIAIRLKDLLWIPIESIIPTPEKVFGWQERDGEAEAQGASDPKPHGWSENRVGPNVDFYYACMEQX

SEQ ID NO: 943081 - protein, 354 aa, Homo sapiens
  misc_feature (68)..(68): Xaa can be any naturally occurring amino acid
AAPGAGGDLMAEPEDSAELADELGMEQQTVVGAVKSLQALGKVMEEELLSKKDFQLNEEGEEIAREEXHKARIFRSIPPEGLEEKKDYIRVPNGKVGFTKAMSKKIGKNTDNGPRVFRVGGQHGGIKYSGGSSWSGGGQAEKLGEKERSELRKRKLLAEVTLKTYWVNKGSAFSTSISKQETELSPEMISSGSWRDRPFKPYNFLAHGVLPDSGHLHPLLKVRSQFRQIFLEMGFTEMPTDNFIESSFWNFDALFQPQQHPARDQHDTFFLRDPAEALQLPMDYVSGVKRTHSQGGYGSQGYKYNWKLDEARKTYCEPDHISQRPCALPPCPEEAFTPVKYFSIDRVFRNETWT

SEQ ID NO: 943082 - protein, 103 aa, Homo sapiens
  misc_feature (38)..(38): Xaa can be any naturally occurring amino acid
  misc_feature (47)..(47): Xaa can be any naturally occurring amino acid
  misc_feature (54)..(55): Xaa can be any naturally occurring amino acid
  misc_feature (68)..(68): Xaa can be any naturally occurring amino acid
  misc_feature (72)..(72): Xaa can be any naturally occurring amino acid
MLTLCALLLPCLIMVDLGQVTSFHASVPHLSNGVNNTXLPPRGVVVXPCQSKLXXFFRVLCGGCLAPXFPPXPQALVLTELSPRLALLSDSAHFPPPPPPPSC

SEQ ID NO: 943083 - protein, 288 aa, Homo sapiens
RTLHRGGGVGRAEAACPGSQVPARCFRPGLRRGRLNWADPALEARRKTGRALPVSSPRSARGSRATGGGAGRWDSAQLPRPASDQGKKKYRLLPHWKIKKEDFLAAKNELNGIVAREEAESAQCLCPSLTIPNAKDVLRKRHKKRSRENQRFMARKALLQEQGLLSMPPEPGSSPLPTPFGAATELKLPAVEKQCLRAGSGSAPCSRRPAPGKASGPLPSKCVAIDCEMVGTGPRGRVSELARCSIVSYHGDVLYEKYIMPEMPIADYLTRWSGITRQQMRKAVPSRW

SEQ ID NO: 943084 - protein, 97 aa, Homo sapiens
GGQRRRRRRRLGGPEVNTMSSLHKSRIADFQDVLKEPSIALEKLRELSFSGIPCEGGTAVPLLEDSLELPSQSGTVSCFMIPLSITLPALLCWGALS

SEQ ID NO: 943085 - protein, 141 aa, Homo sapiens
  misc_feature (98)..(98): Xaa can be any naturally occurring amino acid
  misc_feature (101)..(102): Xaa can be any naturally occurring amino acid
  misc_feature (118)..(118): Xaa can be any naturally occurring amino acid
  misc_feature (124)..(124): Xaa can be any naturally occurring amino acid
PSVGCKRGGRRPPPAAMGLKAAQKTLFPLRSIDDVVRLFAAELGREEPDLVLLSLVLGFVEHFLAVNRVIPTNVPELTFQPSPAPDPPGGLTYFPRGXPAXXRPPPYCPASTRPGLPXAARPTXSPHYPSGERGGCLPSQL

SEQ ID NO: 943086 - protein, 141 aa, Homo sapiens
  misc_feature (32)..(32): Xaa can be any naturally occurring amino acid
  misc_feature (34)..(34): Xaa can be any naturally occurring amino acid
  misc_feature (38)..(38): Xaa can be any naturally occurring amino acid
  misc_feature (41)..(41): Xaa can be any naturally occurring amino acid
  misc_feature (45)..(45): Xaa can be any naturally occurring amino acid
  misc_feature (64)..(64): Xaa can be any naturally occurring amino acid
  misc_feature (67)..(68): Xaa can be any naturally occurring amino acid
  misc_feature (95)..(95): Xaa can be any naturally occurring amino acid
MVAVASSVVLLIAGVAWGRGAILRGQLAGVLXGXGGAXRNXAWAXCERVRRIANRPQLMGQQGXPPXXLPEPTMASGPLRAASTAPVNAPLVKKXQGSSLPRSRTRPQSMVENRPPHTAKYPPIWGARILKHWHYLSTRCR

SEQ ID NO: 943087 - protein, 210 aa, Homo sapiens
  misc_feature (102)..(103): Xaa can be any naturally occurring amino acid
  misc_feature (106)..(106): Xaa can be any naturally occurring amino acid
  misc_feature (119)..(119): Xaa can be any naturally occurring amino acid
  misc_feature (123)..(123): Xaa can be any naturally occurring amino acid
  misc_feature (125)..(125): Xaa can be any naturally occurring amino acid
  misc_feature (128)..(128): Xaa can be any naturally occurring amino acid
  misc_feature (130)..(130): Xaa can be any naturally occurring amino acid
  misc_feature (141)..(141): Xaa can be any naturally occurring amino acid
  misc_feature (144)..(144): Xaa can be any naturally occurring amino acid
DPSVDVLKATALPLLKQFGIDGESFELKIVRRGMPPGGGGEVVFSCPVRKVLKPIQLTDPGKIKRIRGMAYSVRVSPQMANRIVDSARSILNKFIPDIYISXXPQXSFNSGKFPGLWVXHSVXWXPTXGXFPHAELASNPXGPXEQQVPSRGPWQELCPAAAGSKSHRGGLRRFDQPKPGATTHDPWTAGCFKVLLGPLSPYTTRIFCGI

SEQ ID NO: 943088 - protein, 296 aa, Homo sapiens
KDSGSSTHTYMAMRATYLVGNREEANLEAALNELIQQKRRKGTQIHRLPCAKGERAGGEPGMDLGKGEIEGGGGGGGGGGMEEGGAWVGAWGHSVGGGLAARERRGKWGAKIQGASGGGGAQPPGQMMNHLFPVCRTEGQNRNSTLSELSAFPGQCDPHHLHQTCHSGSVNSFTPMGFSPGRVWAENLFPVINPQRFPPRSRWFPRLLGKEALVMGFCLLFPHTRGQGVHSRTWGASLAAPEAPERTPRVGLVPGMPKAPSMKAVMPVAGDSSSDRAAVPRLGPLVTTCFHNPPKA

SEQ ID NO: 943089 - protein, 98 aa, Homo sapiens
LEHEHAQLPRVGQQQLKVHLPEELVIQDTLSDRSVSLSSSQSRIWSEMEGGSTGVCVNITGWPLVLRKEIKYGAVMPLAIACCTLSRVTCATTMYGNR

SEQ ID NO: 943090 - protein, 76 aa, Homo sapiens
  misc_feature (33)..(33): Xaa can be any naturally occurring amino acid
  misc_feature (69)..(69): Xaa can be any naturally occurring amino acid
MVDGCPVLGPFRMGEDLRHVPAFRRRAACNPKXRYILGVYRWPRLYLGGPRWVPGITWYLPGAGRVAPXEEIGGGV

SEQ ID NO: 943091 - protein, 213 aa, Homo sapiens
  misc_feature (21)..(21): Xaa can be any naturally occurring amino acid
  misc_feature (31)..(31): Xaa can be any naturally occurring amino acid
  misc_feature (151)..(151): Xaa can be any naturally occurring amino acid
  misc_feature (158)..(158): Xaa can be any naturally occurring amino acid
GRGWEHCTGRTHSSKSFPPNXEEVPVNNKIXYSLVLCPWEGGEMDVKSNVVCPPVIQRSSPEHSPCNPPVPQGETQAISFSALSTESLPCIKFLPTCMQKSPRMAPGLESAGLGSPSMTGPVSTTLSPPQTMATTGPECMSLTRPAKNGLXLQVNVVXLEKSSGSLHEFQTNKAESFLPKTLENLSHKTPLDPIWFDRNEGTLTVGHGSCFTA

SEQ ID NO: 943092 - protein, 71 aa, Homo sapiens
PPPPPPPPPPPPPSPLPPLPQPWLNLELVQNSPVESADLSMPRCGILVLDSHVLCKSLIYHDYILSQVLHN

SEQ ID NO: 943093 - protein, 115 aa, Homo sapiens
  misc_feature (110)..(110): Xaa can be any naturally occurring amino acid
MKVRIAGPEVYRKGENVRGPLTGGKMPAMAPQQTKRHSGAWGLGEANPVRAVLEIRRVVSGVLQSPTQPLYNGGSISETPKVWGILEARPTLLSINSRTFPHDGILRKSXGQPMH

SEQ ID NO: 943094 - protein, 239 aa, Homo sapiens
MAFMDEKKESNHKEKEIAGFQLKINLEKCTDYWNKSLPLGCTTEGEIPQDYTTLFPQDYTTQIVFIPFLELEMDILNIIVLLQKNPLTTKPGYGQKYLDFSEGLSPSKNEYLALEFIQGNHHHPWNTQAALLFLAPARLAAVPRRPPWAATLGSPRLGSPPFPGPPFAYEATVAPWSPFINPAHGRSRTKARPPPPGRRPSQARRPTPATPALREAKADGSQGQVFETSLASMVKPRLY

SEQ ID NO: 943095 - protein, 145 aa, Homo sapiens
FPIVSTYTQTGLQKNFKYQIEKLSIHAPHDSSQFFQSLNFRPANNTKLNTVFVESVNQLSFGKARPPRQDPTRLRQTTSITQKTHGCLTQSHGGSHTASLWSFHLSPNLDIWFVLICPSPSAVSLTKECQPESGSINLFLCRASS

SEQ ID NO: 943096 - protein, 361 aa, Homo sapiens
  misc_feature (281)..(281): Xaa can be any naturally occurring amino acid
GPASVPLPLGDPPIWSEGSKQLVTEEGAWLQQPGLGGDSPKNTPAGWVPGGLGEAGVGAAGSTASLLQAAHSTGDLQACGHLEAATPYRESWERRLCEPGLESVRPLFGAGVVEGQGGCGQMVEVQAPGGGRFAQWLEAAQAAVGHAHAERLAVRLVRTSQLCSPPSISVCSRTVWDLAVKRSRPPRPEGILLGEGVPLAGEWMGEAVRAWPPFSRALKSCTFPPIASHFTERASTRRCWWDVDASRRNKNAGVFRVTGSENSSATALLQAFTRKSMYFMXNLRPVRVSSVCRDALDDHPGLALLEAGRGPEVGPPVLQPVCSNIAVLSRDAQTRVKSYFQQGLSKAITGPRAQEGLEFLL

SEQ ID NO: 943097 - protein, 198 aa, Homo sapiens
  misc_feature (64)..(64): Xaa can be any naturally occurring amino acid
MYEETVGEGTEPPAGLERVHARATSMLGQWEQEGSKGRFLKQPEDQDLVLHALLEDRVPPGLAXDQIGPLDDNNAHKEGRVAGELHHLPLLVCSLLRVTVFQVIDGAVIPVQPDAHQVAGQEAIFCQAHKVRKEATESLGHSNLPVAQAEEFLIDQFVRARVPGLSLHEVAFGSFVRYEEGRDHVSSQIDAEDGEGAQ

SEQ ID NO: 943098 - protein, 58 aa, Homo sapiens
MVCAIFQLITMCVFLGFGGMLLCRVVHAEVGRPVDDDALHGDTEALVQPRMPSDLVIF

SEQ ID NO: 943099 - protein, 113 aa, Homo sapiens
MKHFPPFTQKVFSFSAHFTRGLVPVVDVDVESLGAVWRLVSVVCGWVADLGVLTSGFRVGEGKDGAVDGKKEKAKYDYSVWVPLRAQRREQLCYLALLLEPHFQIYPQRQVKC

SEQ ID NO: 943100 - protein, 104 aa, Homo sapiens
  misc_feature (5)..(5): Xaa can be any naturally occurring amino acid
MERRXKGQTDKAILTINAQEAARGSPSLAQEHLHLGVLGGGERLQGRTGKADNLLTVLQGHRAQAPRDTADDTGVCHHLCIQVGVPHLHLNVSGYPVAGVLLDA

SEQ ID NO: 943101 - protein, 210 aa, Homo sapiens
  misc_feature (126)..(126): Xaa can be any naturally occurring amino acid
  misc_feature (143)..(144): Xaa can be any naturally occurring amino acid
  misc_feature (147)..(148): Xaa can be any naturally occurring amino acid
IQKDHKPHINLASKRPHVLKLSPVTIILPPVKVSRRKSLNIKKLPPKPTETFSHKPGYCTNNKVLSSIVNLFNFIHVCSVEWLNTAVKVVLDFHERGQPTYFNHVEGKAFFPKAPRPPQAVEGGLXVRLPSLFYRETKVHNNXXPPXXNPSGTNISGDENLLFPIPKPLNEGSAPRHGSAPLNKDTWRPSCIISTVNHLAFRRVLQKKKA

SEQ ID NO: 943102 - protein, 73 aa, Homo sapiens
  misc_feature (4)..(4): Xaa can be any naturally occurring amino acid
TQEXWVWVTATSQQRQRSGFRIPQRDCVTGSNNYCGVTRGHFNTTETPIQLSSVNTVRVLFSMLLQVLKMEKL

SEQ ID NO: 943103 - protein, 176 aa, Homo sapiens
VGIAKIPWVELMPGPFSSLSGEKGKDEKEQQEKPPPQEEEGDLELLLELGTCWDVTSCQWSTVSVGQDGCGDTQVLWARGGPDGGGPGGGRGWGGLVLPPKVLGPLGSVWEGACLFWGWGGGASHLAVSPQTMFMWVWKDDFPFTQPPLPGAAGPSGVVGDLGSGNQNGVATQHTG

SEQ ID NO: 943104 - protein, 265 aa, Homo sapiens
  misc_feature (79)..(79): Xaa can be any naturally occurring amino acid
  misc_feature (105)..(105): Xaa can be any naturally occurring amino acid
  misc_feature (108)..(108): Xaa can be any naturally occurring amino acid
MSNRIEQRMPLPARISAAWVVLHKQKREKSRELEVNPFLRECSLNPNTSHAPGSQQGSGGTLGYSSRVPEACLSLRNVXREEVNTGREKHQAFTSLMASIRRAPXVTXVVRKMNLEPFSLPRNRRAEITENVQPPKNTTKKRRRDSLEALSSLVISVNAKSLQLEQPSHLTKALPASPPQHLPNDSAAQGHKSTTEEVSKVSGHFQNKPAVHTWDQIEPFAEGTKIAPLGQRTEGISDLSCSLVGDQPAHFTPHGSEGVPWGLPR

SEQ ID NO: 943105 - protein, 175 aa, Homo sapiens
  misc_feature (85)..(85): Xaa can be any naturally occurring amino acid
  misc_feature (102)..(102): Xaa can be any naturally occurring amino acid
  misc_feature (111)..(111): Xaa can be any naturally occurring amino acid
MRKESTKTLCFSSRLGNSTKKGEGGLRTQIPSDPVQSSKLLRIWGGLLSKTPFQSDLKMGVPLGRTLPRTRLIGICEPTPQTQVXWGPQAGSQLVRDGQEGXGLFLGAQPXGRGASGACGLTPLLTAPSHFLHVGMKNNCYWLAGQETPVNSLGAAHPNVQAPLSESDYGLRDRG

SEQ ID NO: 943106 - protein, 306 aa, Homo sapiens
  misc_feature (215)..(215): Xaa can be any naturally occurring amino acid
MWAGLVKQLKASTMPPTVTTLPHRQGLPPQVAERSKDTGGGKPTNKTERARTELKAPPQGGQEQEGVATEVHQRPKEPFPQMSMGTACLAAKRGCGPPRWTGEAWTLWPSSHGKERFLPEWRAGRVREGAWEPTPAEPSQRGSLTLALRKEPVPAETGVGVGKDPPGSRAPEEGGPEKVGEQRRKEVEVGESTPVLGWEALADHRDFQWEVMWPXPGYVPGWPLRCSEQQKVGHFGGPPSPPSDKRREGGGRMVVRQDVLILARGGQVAGEQLGVARRRENGPCWGVQLHLVQDGLLEGGWGKLPL

SEQ ID NO: 943107 - protein, 173 aa, Homo sapiens
  misc_feature (91)..(91): Xaa can be any naturally occurring amino acid
CGVGGAGRPLSPHVQGVAALGHQFLDVVHRLFIFPGPELSHDVVEGVLFFAGHFPCIPTDVDVGSAFDQLPQVLSVLLQQVLDVDLVGLLXDVGHVVLGDLSAPEELRQASRYRKSSSERRQLRYSSVSPTSLLCCRSLDRSWDEAYEGCHPGAGAHHDDRGGGLEGQAELGL

SEQ ID NO: 943108 - protein, 38 aa, Homo sapiens
  misc_feature (2)..(2): Xaa can be any naturally occurring amino acid
  misc_feature (32)..(32): Xaa can be any naturally occurring amino acid
MXTVNFKYEAVSSSPKFRTGDEVLGTTRLLGXPQVEVT

SEQ ID NO: 943109 - protein, 136 aa, Homo sapiens
  misc_feature (33)..(33): Xaa can be any naturally occurring amino acid
  misc_feature (44)..(44): Xaa can be any naturally occurring amino acid
  misc_feature (97)..(97): Xaa can be any naturally occurring amino acid
MATSTITSRRLMSGSPFLPVSSFSMSSSSAPTXSVTLITTFCIXPVSVSFFIAVENTWRVTVITRPLSLSGASSFSVPITVSLSVSVSLSISVFLSXGIIVPLLAGVHKTRPRRSRTRKRGKGNNAIRKCTFRTTI

SEQ ID NO: 943110 - protein, 127 aa, Homo sapiens
MGVQVLFELGGKGLEPPFRHGQLGSGVGAPGLSHTLLVLSRVWGDSGGSAVAPKAATGASSISLSSDSLGPGQNVSPRPARPSTAIQRRCSSSVSGLKYQLRWLWVILKTCLLSGRSPASGGPPRSQ

SEQ ID NO: 943111 - protein, 195 aa, Homo sapiens
  misc_feature (36)..(37): Xaa can be any naturally occurring amino acid
  misc_feature (69)..(69): Xaa can be any naturally occurring amino acid
  misc_feature (155)..(155): Xaa can be any naturally occurring amino acid
RCAAQGTKLLHTVPVVPHADHVARKQGAEGLQPLQXXPVEGEPLGLGQEHSLPGGLVGLAEWHPFADQXIGKGSCQHVGAESLSQVLLVNLQRRDDASCHLEHGTYNVLNFKHSLLVPLKVYVEGSGKILKGKQEPGTPPKHTPTPCTVNITKPXGVFLLGHQAASRAVGILDLHEAEFLGAVEDEVLGHPAEMG

SEQ ID NO: 943112 - protein, 194 aa, Homo sapiens
MPRKDMGPENTSTSGRPRKTIHKDNRSKPEADTAMKSVGRYRSDQCLYWTRTSLRPRLCRFQSIRDHETELARASLPPPLPLAQPASGPPDPSPETALGATSDPRLQPFTVPVPGPVCPAGAGGYHGDPVETRTPESVGEEASQSSPPTRSRVSVTHVSFCSHGASKRVSNKVIIDYPGVCEYATHQQRDTTKL

SEQ ID NO: 943113 - protein, 256 aa, Homo sapiens
  misc_feature (126)..(126): Xaa can be any naturally occurring amino acid
GTQFTPPYDHSCVRHCAKGEWRGAGGGWEEVMGDKQRWGSAKDWGRGPPQAQCPAAQQPQPPAPPSGLARDRHFPVPRNNSGCCPSPLLPWHLFLLSPPGGELGSSGLLATGGRCLAASLPPPEAXFYPPFPFSGFPATVVLVFDRSVGQFGELTCPHTLGALGVPGPVLQEADRWGLLHPHADDLEIQCPAEPGGEAGEGLSARGRPPSATALFLGEFLLSGPLSWVWEKSCKTKPAGKLPSVKCRTSAGAAKVS

SEQ ID NO: 943114 - protein, 149 aa, Homo sapiens
AARSDSFEKKGIRPGLAPQGCQPLRLRNVPSGKLGWGLNETWGAGMALSAYSAPPTLHLCPSAGWGSQIPSIPELPETGTLLKVRAHSGGGRLNWGHLRARGPVVGAGWEEKALACLKLEASAKEKGGQAHAPPRPGLPRSGLGTVSIF

SEQ ID NO: 943115 - protein, 148 aa, Homo sapiens
  misc_feature (52)..(52): Xaa can be any naturally occurring amino acid
MGKCLQMNALFYMSVRNLPLTGNYRVPRKVKFKKDLAIAKFFVDYGKKMALXGLGSKDGPRLNGNASPWGRNVVDLGSSGLLEAEDAVCASPGAFWCPFPGGLAVSGSLGVFGGWGLWRPWALPRSSRAAEVNFRTRHNVVTIAKSKL

SEQ ID NO: 943116 - protein, 114 aa, Homo sapiens
MIKNIKIYDRMRYLDNKHYNVIFAKPNFTCCSKKQRVTRMQKFLIIIFNQLSQNSPLLNLPYNSYFSPPLQASEIKKKGNNSPSENTASFFFLFYSNLNCRQRFLRIQRTILKL

SEQ ID NO: 943117 - protein, 214 aa, Homo sapiens
  misc_feature (86)..(86): Xaa can be any naturally occurring amino acid
  misc_feature (90)..(90): Xaa can be any naturally occurring amino acid
  misc_feature (123)..(123): Xaa can be any naturally occurring amino acid
  misc_feature (145)..(145): Xaa can be any naturally occurring amino acid
  misc_feature (147)..(147): Xaa can be any naturally occurring amino acid
  misc_feature (149)..(149): Xaa can be any naturally occurring amino acid
  misc_feature (152)..(152): Xaa can be any naturally occurring amino acid
  misc_feature (169)..(169): Xaa can be any naturally occurring amino acid
GLGASAQGSPGPGRQVGQGTSVVLHPAIVRYECFNYLLHSQVGDELFLAFGAPGHGVKMTHTLQVLLDVLAVVGKATWRKERLPHXHKAXLAKKVVGDVSLLPLLNHLKKKRVHVRQELVVLXLNAGLQGPDVAFVLITLVVSLXLXQXPLXLRGNKPGEEGVQHALLXDAPLLNAVPALLLRDLKSAGDVVPEVQPLLLGQAVSSLQNGEGLT

SEQ ID NO: 943118 - protein, 153 aa, Homo sapiens
GGGIGCGGLPSGPPGAPGGGWRWGVRPGGPGGGGLWWVGWLLGPPPLLGEGGPAWCGGAGGRQARARRGLHKLCLKRMQKVLLPVCKIETGVCRLSSGLLLLCRCSACPHGVPGSDQETAGSGGSSSQGQSYGDADQEGCRGSPAAAQPPRVT

SEQ ID NO: 943119 - protein, 128 aa, Homo sapiens
MGWAGRREEAVLPECDAGGGGTLGSPDGLPCPRGQFARLPSRLEQDGKEKTADGGDTEFCSQSQPGWLGSGWGRGKEPKKKKRKPPSLPQSGSKKDSISETFRAPYFCPQTQLSAKWAGKQHQRPWMW

SEQ ID NO: 943120 - protein, 197 aa, Homo sapiens
MPDPPGMAMAEAAQLPEDVVHSTSPGQGSEGKGERQILPETAQQPTDLCAPAPTTVLHWVHVTPRVREVEAWSHSVDRLRDKNTVNFGFVGKLLQKHNFRPLLKMIVFLAGALFFRRGLLLELAVLLKLGHLAEDLLRGFDDLGAEVGGAVGARFLQGVAVVGHQGAEAGDAFEAHIRHPVEAPQHRPVLQVGFGHG

SEQ ID NO: 943121 - protein, 258 aa, Homo sapiens
  misc_feature (97)..(97): Xaa can be any naturally occurring amino acid
  misc_feature (102)..(102): Xaa can be any naturally occurring amino acid
  misc_feature (132)..(132): Xaa can be any naturally occurring amino acid
  misc_feature (139)..(139): Xaa can be any naturally occurring amino acid
VGLWGIVQESQASVEKTKVLQTLHGGHVLTFKTLNTNRSNAIMYTFVLEPFFCSHLEKGSLFYVTNKLVGWLSFFLTCPALHTGSSLLSPFVFFFDXALGGXLLPLRDSAAHSMLLTLSLVGGVLFSSVWGXWGGGRGXGGGGSVVCWGLFFAGGFCFVGVGAGALQGAVFWGTGLMVCSAGWARGPGSAGQWRFDHKQPTGMGGSGSLQDLMLVNLFGRLCGLSLIRFKLKKNAVTTSPTLDAVIAQFLQVQLGVQN

SEQ ID NO: 943122 - protein, 118 aa, Homo sapiens
CACICHLLPGECFSSGFCLVFLWGRGCCGSGKGGVLLESSPGNQLPSHHAGQAHSHLFKIRADFPSHPQTGTPQDGLRRLESLPVWRDTLAAVKDPLAGGGGRGGGAVDSFVFFLSSN

SEQ ID NO: 943123 - protein, 107 aa, Homo sapiens
ELGSRGAPAALLVVLHVEARDAADLALQRPPSKGTAPSSSSSGGGGGGGETAPGAGSGGTGGCAGHALCALGDGCCFAMPKIFKGKEIRIIMLILLLGAVGERVLEN

SEQ ID NO: 943124 - protein, 39 aa, Homo sapiens
MDVTTGSPPNAPDWIRPQYRAPSPPQTSTTFSPRLTAVL

SEQ ID NO: 943125 - protein, 280 aa, Homo sapiens
  misc_feature (221)..(221): Xaa can be any naturally occurring amino acid
  misc_feature (226)..(226): Xaa can be any naturally occurring amino acid
QEEAWTQVKRRWGVNPSAAGFSGIGGDILPPHVPEVGTFPLTHDLKTYRPATHIAGGERDILEGQPHRSPSQQQLLHKIFHHLMAVDFGWCQAQELFIPGDIWVVDGLHIDAMLGEQEITELAFDCCIAHPDGDDVAGAGDDRKAPVHEELAHVLDIALVGSPQGLALLSLEQPHRFQSSREHHEGQRSGKDEACSIGAHHVHQVTGAGNVAAHTAKGLAXSSRDXVNLMHNSITLPNPSAPGTQQSYSMDLIHEGQGPILVGHITQLLEGTDGTIHGVD

SEQ ID NO: 943126 - protein, 31 aa, Homo sapiens
MGGQSAEIPRLRQCTSHPDLPLLLHPRLQRE

SEQ ID NO: 943127 - protein, 205 aa, Homo sapiens
  misc_feature (36)..(37): Xaa can be any naturally occurring amino acid
  misc_feature (126)..(126): Xaa can be any naturally occurring amino acid
LQTPGRALLAAVQQEQEGNEMRGAFSRVSQFNNVHXXKEKRGKGSTHECRAGWAGGSRAERQYMDNAHAPLPLLFSKSKCSLMIGRGKISCSLVWAECSVAWAPNTGEIVSKGLVKVTGSSSCPRXTDERKYVCAGNKAVLETRDSLEGKSKEQSVIRYWTAAKCWALSSLQLRQLRLLELELGCQPPWAWQNTLLTAPQGFSLG

SEQ ID NO: 943128 - protein, 67 aa, Homo sapiens
  misc_feature (57)..(57): Xaa can be any naturally occurring amino acid
LTQGLATLPIEDNSVQRNFSYKNQETPVGLEIHPVGVYPTASNHNSGTCCCFNAFIXYLKTCLMECF

SEQ ID NO: 943129 - protein, 35 aa, Homo sapiens
MAIDPSPPPRARPGAVATSLSQFRAACSPPGSPGE

SEQ ID NO: 943130 - protein, 158 aa, Homo sapiens
  misc_feature (4)..(4): Xaa can be any naturally occurring amino acid
  misc_feature (112)..(112): Xaa can be any naturally occurring amino acid
ENQXQKKENKSITGSHENPYHNTWTLLNRMLPPKKREELPCLEEQELECCEETPLMSQQAPLKANEKIMEFEYTAPEPPMLNKESNKEEELPKCTQMHSLSRELQHEKFPYXKQSKAQIPKISGYSGLEDMLQIVEIANDCKGACRAHRLSFGVHSLE

SEQ ID NO: 943131 - protein, 151 aa, Homo sapiens
  misc_feature (9)..(9): Xaa can be any naturally occurring amino acid
  misc_feature (15)..(15): Xaa can be any naturally occurring amino acid
MLITAPPPXLNAGEXQKEKKGSARVCRYGGAAPAWGEPVLPGPKDPCCTSWGHGQVDGPGRQFLQPEERVLLESETLHLVQVRGIVRLDQQQAGALSEGHLSHREVVLDVTPVLEGAHAREHGKDTEVLLSPRTPGARQQGEAFIFLGVDV

SEQ ID NO: 943132 - protein, 67 aa, Homo sapiens
  misc_feature (2)..(2): Xaa can be any naturally occurring amino acid
  misc_feature (67)..(67): Xaa can be any naturally occurring amino acid
GXKVGTGHHIPPLGVRSEMQREGQEWAAQGPGSPETQLAAEEKAEKARVSEVVLLKAGQIFNNIYWX

SEQ ID NO: 943133 - protein, 341 aa, Homo sapiens
DKKRWTAGFPGAQNGAVGGASKMGPGLRRLRGVEWRGPANTQGAYGTGVASWEGYENYNYYGEQNTSVTTGGTYSYGAASGEEAKANDGGLEGGEPAMDMGSYGPEPCTDNSDSLIAKINQSLDMMSKDGGWGGGGGGGGGIQDRERSFRFQQFESYDSRPCLLEHNPYRPSYSYDYEFDLGRDRNGSFGGQYSECRDPARERGSLDGFMRGRGQGRFQDRSNPGTFMLQSPFVPPAASSEPLSTPWNELNYVGGRGLGGPPPAGHLLSLFSQSMAPDYGVMGMQGEGGYDSTMPYGCGRSQPRMRDRDRPKRRGFDRFGPDGTGRKRSSSSLRGADTNWP

SEQ ID NO: 943134 - protein, 224 aa, Homo sapiens
  misc_feature (60)..(60): Xaa can be any naturally occurring amino acid
  misc_feature (64)..(64): Xaa can be any naturally occurring amino acid
  misc_feature (85)..(85): Xaa can be any naturally occurring amino acid
  misc_feature (136)..(136): Xaa can be any naturally occurring amino acid
MGLAEVVGTFVSHQMPGLIYGIHDSRLQGPFLCGCQVLPQPPQAGQAQDDRVPVGPLQPXVVVXPPEGSRGHTGGAGAKSGLQGXLHQRNGLEVVLLPEAIPVGLSPAIPKEAAHRLFPVLVLILVLASQQAPSQXVVGIEPQSKVPEAGEELRFHLPGGGVVHALVHSGQDPAIALAEGTDLGHCPASIVGEAKLHELALLVLLLAGMQRLFHRGAVVRCVWV

SEQ ID NO: 943135 - protein, 105 aa, Homo sapiens
MVAFVCTVPSFSLHKVVLVVLQTTVHGGNPTWAAVRCGGSLSSVGNIHSNCWQAAGRPPGEGVLGRAGLAGVLSAFGKCWAAKGLVHPSRECPVLDVHLFPSPWR

SEQ ID NO: 943136 - protein, 205 aa, Homo sapiens
  misc_feature (59)..(59): Xaa can be any naturally occurring amino acid
  misc_feature (194)..(194): Xaa can be any naturally occurring amino acid
NCLKDENLEEMMENREQAKGKQERGHSEPAGSRGERSHKAQQGHSIWPPYATTQSFQPXGDLSLSRQPPCSCASATSSSLLGLLQQASTGSPPPLPHSVPQGTSATRRGGQGCPLPCLTLRPFLGCLMSLGPPPCKGCVAGLPLFSRGSMHPSGQGQAPWLPRALHGPVLHHLSNLYNHLYNPVSPTVPCKTLXPPFPLLTAVFL

SEQ ID NO: 943137 - protein, 147 aa, Homo sapiens
MRWVLKKVTRSDGKSSSSSAAFLRITQQQRRDMEKNGGYEGKLNFFPFEDFGDIEVEDIAVEDCVDQTYHNGDEVEKPWNGSAEPVEEIERAVNAKRKQVVAGEGLRLAGLALHEQLRQDGHFLQVDGEGPEDLQKGEVMIDQAARL

SEQ ID NO: 943138 - protein, 308 aa, Homo sapiens
PVRLRDQKLQTLPCLEGGKEANPNYKKLCAAFNPPKQTSSKQVERSLACLEEEKKEKKGEEGKEEWKKPKQKKKKKMNGAGLWGKGGVARKKENNPSNQKKLLLQKKMEKAYRHWDQKNQQLVGPEPSLGIPQVGAWQALRTGPAVTFDSAPHFILWSSLLKHYLEKEGSAGAYPAKRGILFQHLGIPWDHSVTSLLVQMGKLRPESRGELVQSHNLSWGQDPATTCPEASTVCQDTPVWSGSWKETPGFWTKCIYRRCWCQACRSKSRAGMEAGPRSFGTRVSMPAAETLPRLRTQSSAGELLILTE

SEQ ID NO: 943139 - protein, 154 aa, Homo sapiens
  misc_feature (12)..(12): Xaa can be any naturally occurring amino acid
  misc_feature (28)..(28): Xaa can be any naturally occurring amino acid
  misc_feature (30)..(31): Xaa can be any naturally occurring amino acid
  misc_feature (33)..(33): Xaa can be any naturally occurring amino acid
  misc_feature (91)..(91): Xaa can be any naturally occurring amino acid
  misc_feature (117)..(117): Xaa can be any naturally occurring amino acid
  misc_feature (121)..(121): Xaa can be any naturally occurring amino acid
  misc_feature (148)..(149): Xaa can be any naturally occurring amino acid
YYFLMHEVDRHXKSLDSVGKTNPAVKKXLXXQXPPPANPRALKKQLKKQPSKTPINSPPAKDKRTPRSHKTPKQSINKNNKTFAHEKRPGXTPTDVPTRMEPSTPPPPPPPPPQAGXGQEXEGRGGGSTPRKEVTKAPPPARTRPTTXXDPPPP

SEQ ID NO: 943140 - protein, 130 aa, Homo sapiens
QNASLSDGERVVSHTPSPEPSLSGRKKQSPCAPLHCATQQRRWWGGPWGLGAATKGEEKDSKKPGAHSNPAEELATCLLYIQMIYFQPGSAFPKMWVPGQLLFPLAVASHFSLMPDHELLCRSQASTRPG

SEQ ID NO: 943141 - protein, 102 aa, Homo sapiens
  misc_feature (26)..(26): Xaa can be any naturally occurring amino acid
MVLSVLAVGLILFVSISVGYEVFEIXVCDCTLFALLLLPCLSGLVGFGSGGPVGVLFFRFGGLICGSGCGGGRAGAAPAGLEPFHSCLWGVGPVWLDHAFKV

SEQ ID NO: 943142 - protein, 123 aa, Homo sapiens
  misc_feature (14)..(14): Xaa can be any naturally occurring amino acid
MSPQTRWAEGRKGXFLDRATWMLAGPQGMKKANYRSRILCRLLLTWVGSHLYLDDVEDGDVAVVGLAARPVDTIKFLGCSSSLMKTRTVVFLTLATDWSVVKRGVAGHEEVELWGGNERGDEA

SEQ ID NO: 943143 - protein, 283 aa, Homo sapiens
MSWSLHPRNLILYFYALLFLTSTCVAYVATRDHCCLLDERFGSYCPTTCGIADFPSTYQTKVDKDQQSLEDLPPPVENQTSEVQPPITAIPRPYNPDESSPPNMIDAAALKSRKMLEEIVKDEATLLTPDPRIPNLPDKNPSPHPPPVTPPEKVAHACRTVPGTLPNTVPIPDITGKDCQDIANKGAKQSGLYFIKPLKANQQFLVYCEIDGSGNGWTVFQKRLDGSVDFKKNWIQYKEGFGHLSPTGTTEFWLGNEKIHLISTQSAIPYALRVELEDWNGRT

SEQ ID NO: 943144 - protein, 104 aa, Homo sapiens
MVGILEKFLGFRIYGMHSELWGVVHWATVLSPTAFFGTLASLYVGALEQHNDKLQAILGVPWKDKNCTSRLDAHKVLSALQAVQGLPVAQGRADSQAQLLLSTV

SEQ ID NO: 943145 - protein, 181 aa, Homo sapiens
  misc_feature (98)..(98): Xaa can be any naturally occurring amino acid
GQEANFATHDLQASPWGQGLGDQANGLQTNSRSFLRQVTCGPNYGTGVPREGVGFVFTLEASGMENVLFCKDEAGSGRPRDPRVRPVWRQGCAEFLAXDPKLAASLVYRPFDQHRLHLALQAGVLPLLLLHVDDQQRVADGERCPEPHGLRGGQEVLVDEGHSCQVTHGKGYGQGTAQQLG

SEQ ID NO: 943146 - protein, 148 aa, Homo sapiens
QLLSLGLDHAAKAKGARRLQRQICRLYDYTKPKTNCGVCLGLLAHRTKPPPAAGACPGQSAFASGDDHEQAVALNQTQDFLNTTSGRPMEVLGTTSSTYLAKTAELGRSNMTREEASGPAPPGLARSPGWQERIAVWRHESELCFQSL

SEQ ID NO: 943147 - protein, 162 aa, Homo sapiens
MVRDVVFLLLPVSNIERLVILQPGDGQYQGGVRDSDPTLPPAAVGAPSLGQLCTSRHPAGFLCEESFYLRGRAFVILLLPKDVEWRHKKYNDLNPLLRIILVSTTVRSPKHVVVATFLVASLPLLKPSQYGGWENQKKGQSSRVRLLRITRMIRFRGDTSEA

SEQ ID NO: 943148 - protein, 244 aa, Homo sapiens
  misc_feature (125)..(125): Xaa can be any naturally occurring amino acid
  misc_feature (133)..(133): Xaa can be any naturally occurring amino acid
  misc_feature (138)..(138): Xaa can be any naturally occurring amino acid
  misc_feature (147)..(147): Xaa can be any naturally occurring amino acid
  misc_feature (219)..(219): Xaa can be any naturally occurring amino acid
WPGPSLTGSWSTPREREECQPNHEGEEDDSDVRAQQACVEAKHVRVHPTHMWVCLCARGVGASPPCVGSVPQGGGRGGVCPKHSTELFQDKFMADMDELFSQGDEKRKVSVCGLLPRAGRGACSXPFQPLTVXTCSTXASNPDYLCXKTSFELRRERCIKPSGITYERKGIEEHLLERLRLGEQGQLHGPGPHDFSLPFLLVQRVGYFDPVTWSPLTQXQLTPNLAMKEVIDAFIFYNGWVEDY

SEQ ID NO: 943149 - protein, 139 aa, Homo sapiens
MALQQGTHVQERLLQVMRQAGGVVLRALLLGPQKEVDVGLHGVIADTIAFGDHGPKEHDTVCLGRDLAGGEVEVHGDGVGGVHEDVGHAHQVLNGLQLQAQQVSIKGLPADGPVGCSLGWACTAFRSSSTFWCSVKLES

SEQ ID NO: 943150 - protein, 337 aa, Homo sapiens
PQAFGTMKWVTFNTLLFLFNLAYAKGVFRRNAQKNEVAQRFKKLGKEKMKTLVLIAFAQNLQQCPDEEHVKKVNEENEDAKKCVADESSENSDKKEQSLSGEKRSTIATLRETNGEKAEGCAKEKPEKKKCFLQEKKKKANSPRVVRPEVDVMCTAFHDNEETFLKKYLYEIARRHPYFYAPELLFFAKRYKAAFTECCQAADKAACLLPKLDELRDEGKASSAKQRLKCASLQKFGERAFKAWAVARLSQRFPKAEFAEVSKLVTDLTKVHTECCHGDLLECADDRADLAKYICENQDSISSKLKECCEKLCWKNPLHCRVENDEMLLTCIISCDL

SEQ ID NO: 943151 - protein, 106 aa, Homo sapiens
VEKKNPGFYVSFRFHLTAGLSRHQAQQRHFSEAPLERQPWAHLAQPRGQQEQQLFLQEEHLHFLHFQEALQAQDVTSLQEQLGSIASRGEIGVPKREQQAAPAGNT

SEQ ID NO: 943152 - protein, 123 aa, Homo sapiens
  misc_feature (69)..(69): Xaa can be any naturally occurring amino acid
AHHGQGPAPSCRRSIKWNKELGKGGAGSLLQAGGRRRDLGAVTSPEAPSLKLYNIQVEIELVPQLGGSXLQWRGGLSRPPTPWPCQQKVHKHNRRKLKNSLPPVLKKTDEQKFLVCLAPHIAF

SEQ ID NO: 943153 - protein, 136 aa, Homo sapiens
MHREAETGERRAMSPRTTLQPLEARHERPRAGRTEPTQAREASEPGASLLGLQRRPQVALCPNLSHVPAAPWPSSAAGKGAGPPPSFVPGRQGPGARDLGGGGGPQHDAAPGGREGGPLRRGRRRLPNRGTESVTV

SEQ ID NO: 943154 - protein, 227 aa, Homo sapiens
MEFEKLGKGSSGPLTSPRSFPRDALVPKDQLVEEIRHQVPTLARGSNLLLLLLLLFSSFRSFMLRTWPCRCPQLGGWTLAEWPSHRRGRPLPWELPGLKEKCCCCCCSAWRLGLQGPRFRVGVGGHWPAPQELGVVGGAVGGGVSSPPCEVLVWKVGSSGIVPGGRGGNAGAQVGNVHEGVGNAGQVRKVGWNNNFRDLGQVWHKEVVLWDLQFQPPFFAEGQGGIK

SEQ ID NO: 943155 - protein, 283 aa, Homo sapiens
  misc_feature (6)..(6): Xaa can be any naturally occurring amino acid
AAARGXSGGRQAAAEARARPSLVPPGARLAATPPPAPGPVLSRPAAASPRPPLPASRRTSAPAPPPQALAMTNFKLGIVLLGRVAGEVSGAPPPPGPSRPSRPPPWAGGSCAGRGRGGGPDPGWAPPGRGRCAAPAAGPARVLLPLAGRRARTPRLSGPPRHPPPCPAGRRAHGPLPSRVRRCVARARAAFSRSPPSGVGDPGPSAASGLPVRPHGLNTAPFPRQRHFHTSRRGGSGVGSSVPPSSQQGFRLVLTLPGVGHVRLSLRLGAEEEEAWALMLQTQ

SEQ ID NO: 943156 - protein, 218 aa, Homo sapiens
LLTPVHAGLLERTRGWSRAGTRENKKPGKKKKYWRRRKIKKSSHQPASFSLPKKHKKGEPRELWKLNSKESGKYWAWATVPPSWRMQYKSKIKKYEPEKGGICYGKARHPRSSVCCAAFVSGSIFPGAGGNKHKIILSSVYYMLMLVMVEGFGGKEAVLRTLKDTPMMVHTGPCCCCCPCCPRLLLTRKKLQLLMLGPFQYAFLKITLTLVGLFLIPE

SEQ ID NO: 943157 - protein, 155 aa, Homo sapiens
MRVLLLPLSEFCSRKVSLELRKGTWPWRERRAAITFPRADSDLLKFCAFRRRLPWAPELPTRSEPAKFTRFSFPVVRRPVLQFTPCTVTMSSAFEREQFSFRLVNSVVRIVLAKSNTLLKLFTRCTWNSVSPGTDSSPLPFGHSRIFSFFLKIFP

SEQ ID NO: 943158 - protein, 120 aa, Homo sapiens
  misc_feature (89)..(89): Xaa can be any naturally occurring amino acid
FFLIIFTSPLCHPRATSSLVCYLDNLVCFFSGVSFFRVLVSFWLSVLVEGPGFSLFWVLCYEFWVWFFAACWDFLRCGILVCAFGGWCXAHFEIYQLECSPNGKRKKKSYDSFCLRQMFK

SEQ ID NO: 943159 - protein, 224 aa, Homo sapiens
MPLGRGGLGARALARPRSLRRCWVWAPPCPGPPDPAGGQKEKREARKLGCWEGPQEGGEAFGVYEARKLVLVRGTPWGQSGELVPVRGNAGAGWGRGTWGVVSIRPGNGLRLKEDLCILGVGWGGNDGAVGGMPVTRGWESVQGALEGVRGKSCGGRLQMLGAQVLGKEDVGGGPLPPTSAIAPHPILAGSKLPWRPLTPGERNFQGTFRIFWVLRETPTNQPA

SEQ ID NO: 943160 - protein, 30 aa, Homo sapiens
MGGTNGGPVAALAVVVAMRGERRVPCEYGG

SEQ ID NO: 943161 - protein, 203 aa, Homo sapiens
MGPSCSSRWEKGWPWSLTRALRARGSCITSSSFPASPAVARLPLGVASAAVVVEAGAPRWEEPGAMEGGLSENTLRRLIFRSRCLLGTEASRSEDEDRVGIPPAHPLLSLQGCLGPGCVGVQIILEEVRLSWHSHDDGLTLALMQFVEPGDLALADLQAPLGHAAHTPLRLLAGERVQEVDVGRLLCDLKVPDAGVTLAADVD

SEQ ID NO: 943162 - protein, 120 aa, Homo sapiens
MGSRETWGWRGRPLTAQQHQAQGDAVVPGYRQDAHIASEDGRLTQVLLVGVVVPVARARSDCCQFWGPGTQYSSHCHFCGDLVGCHKLDRAKVTGPWGDDAVTPSRAQVTWQHLTLRSSR

SEQ ID NO: 943163 - protein, 71 aa, Homo sapiens
MESRKTWWVAGGHYTAQQLQAQGDAVVPGYRQDAHIASQDGRLKEVLLVGVVVPVAREDVTAASPGVLVLS

SEQ ID NO: 943164 - protein, 191 aa, Homo sapiens
MAPTLTAPALGLALGLLQARRCRTRASCGTFSRGLIKTGVELYKKPSFSKLLFNGTWTDFNEVTVRWIIFMFDRENKAGVNFSEFTGVWKFIKDWQNVFRTFDRDNYGMIDKNELKQALLGFGYGLFEQFHDILIRKFDREGRGQIAFDDFIQGCIVLQRLMDIFRRYDTDQDGWIEVLYEQYLFMVFSIV

SEQ ID NO: 943165 - protein, 124 aa, Homo sapiens
MPIFFFFFFFFVFFLIVCIVFLFDPLLPAHEHGVFLALSPEGHHSQLAHFLVRVPSSCVGLALPQDSGVAEVLVLPHSQLASARCCISGGVGSPGAQTPQGWASWVRDGDGWVTCFFGVYRAPQ

SEQ ID NO: 943166 - protein, 236 aa, Homo sapiens
GAAGAYYLAWTVSSSLYKRFSGSSCPVAWSFRIYSSSRETASRERGSATGLWCCPPAPGVQAPVDPELPALWGYVAILEREKRRGPASRAPNHILSLLRVRVRALRWVGTGPPGTVRLSRHCNGNGAHTSAQCSLLNLATSHLFTIQATFGHVAHAPLGLLGTEHERDSDRERGLVSYLKVTESAVTLVFYVDDVEPGSKKGSQTPLLEASSCRDIGSSRRFVYHSATCRSLMRLK

SEQ ID NO: 943167 - protein, 105 aa, Homo sapiens
MPVRQIRQIIMLVYYITSEQEREGWVKKKKGDRKGVGYDTISGGVWGGEGRRGGGGRAGVGTRAEEKKRQKNGGGCALGKGGGGGPGCWARAGTQTVDSCALRKV

SEQ ID NO: 943168 - protein, 148 aa, Homo sapiens
MQEKSLTTSFTGAGISVHPMPLGQRGQQDQEDHSQALGSASEPPPAASPNPQSPEGGEFLRTRSRALSFSLCFTKGAWTAPKLLLACPSGVPGPHLCSSGKKRAGTEEWRRDREAGTQRKKSGERRDIRREDPSHKERGRENKGEGGG

SEQ ID NO: 943169 - protein, 148 aa, Homo sapiens
MSCVSVRNSGAGARLSYSLPRVFREEVNEPVIFSGRGSAGHCALPLPPRPVTASVYGRLARLRGCLEDSYPSALSAQVFLDSPAVGCGLETRLFIEAALGPPCRATVTSRGHLPDISITKSPGKPCFLCEDIAQPTFASFSSLCHTRI

SEQ ID NO: 943170 - protein, 173 aa, Homo sapiens
MGTVEAYSLVRSSFSLEGGRLSSQAWDGGGYRGHSGSIMKPLCCSRVRGWDLRCWSGAVTRVEQLSHSITSPERKRQQARIQRGRPERLPRPAGTTQLPRPGPGRPVPPVPPPSHPQGPATHREMQLRKSLSCGSADSSLALLLVLTQILAFLTLSRGPKGSTCTSRASGWEL

SEQ ID NO: 943171 - protein, 61 aa, Homo sapiens
MAVPNQHWQLTQPNPVHPLNLSKHFQRPSRNGRMGYVQSLVAQQPTEARTAPQAARGLGRA

SEQ ID NO: 943172 - protein, 152 aa, Homo sapiens
PGCLHPLPGGPKAFIHLKLGGKKGGGGGGGASFGIKQSERVLGRGWGAVVLRGLRGGGAAAAPERARGGGGPVSLGGGGGELGGEGGFQRRGVTCLGRLLGERRGAGGVLGRIGGWGGGPLRPAAVAFAVPVFGSGVGPGGGEKPGRGGKNK

SEQ ID NO: 943173 - protein, 148 aa, Homo sapiens
LRRRLKIEFSASTTQFTRKAVLSPPLCGLGRGLGLSPLRAVGWLLGWQGASCDNASPLWPDYSYNNECAIRVLGRLVDVWGLLAPTGCCHLRPFRVFEKSCVKPEEKKKKKPSLGGGGGLVKANAKSQSLFYRRKSGFFSKKGGVTAN

SEQ ID NO: 943174 - protein, 185 aa, Homo sapiens
PFLKRQASILEKEKKNNKTKTKTTLVPSTLFGKGRGNPGSPPPALRRPAAGGSPAPRAPPFVGAGRGPGAAGGGLEGGGGGGGGGGGGAGLGPGVRGGLGVPRTGKGQLALRACCTRVRGLRPRQTVGYTCSKWGQGRGCCASPGLPPLGPGLPSDPPGLSLPQISGQVSTKPGCRGGGGKPGMG

SEQ ID NO: 943175 - protein, 215 aa, Homo sapiens
MQTASNSKQVTALGVLAKDLSSARELGPPAWAFPPCPPRQAKRLVLAGLSAAPPRPLSPAPLVPCPRSGARWPPTPSATAPDLSSSAGACAVPLAPPGPRRPSSRLGSCSVPGVTPSPGGRVGLSVLGRAAATRSRGCAVLLLRYMLSRNNFYFEGLFQFREASMRSVHLPGANFYSQLTHAANATPLLGPFSSICGGQMEGPDSSYSCLLILIC

SEQ ID NO: 943176 - protein, 122 aa, Homo sapiens
RGGRTPLVWGSGGGGGGPRGGGGGGGVVGAAGFSLWGGGGGPALASGVGAGAALSVSGGGVAAFLPAAAAAPPPAPGCQRPFVGGGAAGLGGGGSLVWGGGLLFRRRLCSRLLRLGFRRLRW

SEQ ID NO: 943177 - protein, 36 aa, Homo sapiens
  misc_feature (5)..(5): Xaa can be any naturally occurring amino acid
GVWGXVRLAFWAFWGGLVALLAPAAFLSPALVAPPA

SEQ ID NO: 943178 - protein, 179 aa, Homo sapiens
  misc_feature (26)..(26): Xaa can be any naturally occurring amino acid
  misc_feature (119)..(119): Xaa can be any naturally occurring amino acid
  misc_feature (177)..(177): Xaa can be any naturally occurring amino acid
MSLWSEPEMQLKGKKVVHAVDGTAEXRDPPPELLRGGRTHPQSGRGHAERGRVQGPGEEEIRGAVEGGSPGPGPPGREDHLVVARKRKGRGRVRGEGGDDEDGKGGARAGEEWMLHGVXPEEWEDGGAEEEEGGGGVWQDEEWRGRSWVGGMAKSGGVEARKEGGQAGASGEWVGAXGG

SEQ ID NO: 943179 - protein, 176 aa, Homo sapiens
  misc_feature (1)..(1): Xaa can be any naturally occurring amino acid
  misc_feature (58)..(58): Xaa can be any naturally occurring amino acid
  misc_feature (79)..(79): Xaa can be any naturally occurring amino acid
  misc_feature (96)..(96): Xaa can be any naturally occurring amino acid
  misc_feature (115)..(115): Xaa can be any naturally occurring amino acid
  misc_feature (119)..(119): Xaa can be any naturally occurring amino acid
  misc_feature (123)..(124): Xaa can be any naturally occurring amino acid
XDLVLEDKAKLTRLFKLKALLKVSSTFLFKKRRQISIFSSKVPLIRYFLKLTQIKNLXPRFIVGIPNALSSSGDIGFGXFDLGMVFWQVHLVDPVXVPDYLFYLVLDQATYAVVXAYGXYGSXXSWFFVYSVPKRSPDIPKSLLVAHITWVLWGSGSLSRLRTLRYQTDFSNTDSM

SEQ ID NO: 943180 - protein, 44 aa, Homo sapiens
  misc_feature (13)..(13): Xaa can be any naturally occurring amino acid
  misc_feature (37)..(37): Xaa can be any naturally occurring amino acid
  misc_feature (41)..(41): Xaa can be any naturally occurring amino acid
MLYHDHRSDIKNXQNNKTPNVPSNLRRITEELRIQSXQKNXRLL

SEQ ID NO: 943181 - protein, 113 aa, Homo sapiens
  misc_feature (67)..(67): Xaa can be any naturally occurring amino acid
  misc_feature (73)..(73): Xaa can be any naturally occurring amino acid
YYFNNNLNPRSSRYCPHSLPWAAFRRHLKETKPWWGVSRAASYSPKPSTAPLSLLAGWGLVPSQRRXPLKTRXEALPPPSRLGMMRRWGRAWGTRPLLSLELPPRGQGDIKAA

SEQ ID NO: 943182 - protein, 142 aa, Homo sapiens
  misc_feature (21)..(21): Xaa can be any naturally occurring amino acid
  misc_feature (33)..(33): Xaa can be any naturally occurring amino acid
GVVGVAALVPGLKGALLKPLXRKCIEQGSPLGXIFGGVLPLVLKQLVFFFHSFVCCFVPCLGTKSGILVRFWVILEVLVFSLFGVGVGIFLDGEIGLLPGLHTENAESGLVFDSCSRFNGHFFFQQRMMFQKAEVGGIRFYS

SEQ ID NO: 943183 - protein, 248 aa, Homo sapiens
GDIGKAVVGGVFCPTLYNIEDSHIDTLYVSHVSSFVSTYWLAGQGKLGEKEAGVFAPAPGPPPGPLPLAVPWGGRFGSLVGAWHGSSGRATFPVFSFPRARGGGPFNVCARPASRCVVVGVLLFTGALRAGPGRPLRSVFSSGGGGLPAKTIKSSGVKAPPPGPPGSPASCCCLRSRAMRRAKYLERWSTVAFPVVFTYLVWQSSPFSTSPWWGRNTSSISPPGSGGLGAQEGLGGQRSPSQSPSPVT

SEQ ID NO: 943184 - protein, 89 aa, Homo sapiens
MGIGDPSCERRSKEALGEEENPREDGGRTGGLKDAGGLGSEVGELLLAPGKGPLLRQGSGPEGLPWAPFALGATEVKMTEDAECLRVTR

SEQ ID NO: 943185 - protein, 171 aa, Homo sapiens
MVCILHCTNNILLLLKENELLIGFSEIVTPYSKDFDPLAIATAEGIEALRTQVFQWCLYLLPLREEPLRALSGPGPSPAPGPPGPAEGACRWVLFLFFVFSKPPSPLRKLTPLHGFRLDRQALGTDGQAHNENAHHKCHQGPEEAMQEANLIMSALQKHIIWSLMLIKIAN

SEQ ID NO: 943186 - protein, 114 aa, Homo sapiens
  misc_feature (31)..(31): Xaa can be any naturally occurring amino acid
  misc_feature (35)..(35): Xaa can be any naturally occurring amino acid
  misc_feature (66)..(66): Xaa can be any naturally occurring amino acid
HLSCEGESSAREGMSGRNQRPPQAAFQLPAXAMAXRDCKQTNTSKQSLFSGRGDLKAHSGMCESDXLKSLHSPLHAYDTNNNPVYTRLLPAGPAPPLPSCHITSSAMVQRVFDM

SEQ ID NO: 943187 - protein, 169 aa, Homo sapiens
  misc_feature (28)..(28): Xaa can be any naturally occurring amino acid
  misc_feature (129)..(129): Xaa can be any naturally occurring amino acid
  misc_feature (139)..(139): Xaa can be any naturally occurring amino acid
MATPSYFVILPMAKSSLANPQFTKEKAXNCPSVHQYGPFGLFGAVSGGAAALGWGGHGVGPGCVFLGGFFLCLSFVCFFGFWAVRVGVGLGSLFLWSRVFLLCSGFSVLPSWLVFLVCVSFFGFRWGVXPFFPLPAPLXVAGSLSPPTQQYSPGCDKTLLLRSLLSLHC

SEQ ID NO: 943188 - protein, 255 aa, Homo sapiens
  misc_feature (196)..(197): Xaa can be any naturally occurring amino acid
PVPAIRHSVLPCPGVGTQRVGGLLLGLLSGPRWGGLPLFCAVSPCGAGWGGPVGAAPCALAGAPHPCLGLDGGCDALLLVARAAALFPAHGLRLPAANVVTAQPVPGGLLGVYGGCGYAAVLPPLGLWGLGGAVLFSAFGCTVPVLRLLLVILLWCFWLVFWQVGSPVDLRVLLVGPWGLLVLGGRLFAGGLASAXXAGRLLPVGELLLPLRAPTLLLLLNVTLPAVGCHQSSRRAWAVVTGQFREIHAGVLSLG

SEQ ID NO: 943189 - protein, 193 aa, Homo sapiens
MVLLSVAGDPTVSSYQLRGYCSVQLVILSPRFYHLYDVVIFCACSGWAQGFYGPERRKKLLLLHCAPLAGPEKAPRVSTLVRGAWQPSPQNSGPPWPEGGALLAAPTPFLLLPFMAAGLGSASPPRLAQLLAWREARQWKQTPLRLQGWRVKGAVLPGMAAGAGYRDALDLCLGGQPQLHLASSHPANLEEAG

SEQ ID NO: 943190 - protein, 187 aa, Homo sapiens
MVGAWEIGVLQRAPNTISPLISVTNVESYLLGGTGGTDGGTFILLGTPLSIPASLSCSLEMDGSRRGPQSAGAAGTPYGTSLQGEGRSVLAAVAHMACLHCNHRLGCSQDLVSLEDRSDVWPIQSFRPCLKLVSYVNLKNKMHFYPDLAPRTGTTGPRQIRSFPSTDRCVEFSTTSDSMHSDLSLSI

SEQ ID NO: 943191 - protein, 112 aa, Homo sapiens
MGGRASPCINQQAEVGGLCELLFAEERLGAESPGGPPAPAPAAWFFGLWPKPRFLVTTTPSLPHPLTHPPTQSLPTLPQPEPHNPPPSPPPPPLLPTPPPLPPSPCPRPAKQ

SEQ ID NO: 943192 - protein, 77 aa, Homo sapiens
MVAFRFDGTCDGAVIFQVLGGKLHEVRGILGSNEVQDLSDKLANDCNVSFQLFSDTFGCNCQQEVHNLDLAGEPSCP

SEQ ID NO: 943193 - protein, 189 aa, Homo sapiens
SYDPIWGIFYHGPRSLHGYSQGLGPNFQEKNHKEENEGGYENPPVENEKAGTEKKKRGKKTMQRLKELGKNWWKVARYTSKVTGLRMARLLHWQPLPRAQVLIMPAGVIPSTPYPICLPYSIPPSSHPAVAGLCLPPVAFPTTVGYMVPYTFFDFSCVVFDLFVFKAIQANSSRGFDWGGGWSAGAGLL

SEQ ID NO: 943194 - protein, 128 aa, Homo sapiens
  misc_feature (8)..(8): Xaa can be any naturally occurring amino acid
  misc_feature (50)..(50): Xaa can be any naturally occurring amino acid
  misc_feature (54)..(55): Xaa can be any naturally occurring amino acid
  misc_feature (57)..(57): Xaa can be any naturally occurring amino acid
  misc_feature (63)..(63): Xaa can be any naturally occurring amino acid
  misc_feature (70)..(70): Xaa can be any naturally occurring amino acid
  misc_feature (73)..(73): Xaa can be any naturally occurring amino acid
  misc_feature (77)..(77): Xaa can be any naturally occurring amino acid
  misc_feature (79)..(79): Xaa can be any naturally occurring amino acid
  misc_feature (82)..(82): Xaa can be any naturally occurring amino acid
  misc_feature (85)..(85): Xaa can be any naturally occurring amino acid
  misc_feature (93)..(94): Xaa can be any naturally occurring amino acid
MCQQGGWXVLVTSWWAWPTKRPSGLTRPYLAAWQPGDEGGRTLTVRKSGXAGGXXVXILAMAXREGKWWXRAXWRGXLXWYXYSXDLLGRWGXXGQSKPACWVVACHALFLFFLDLVLRGFSRLQKYR

SEQ ID NO: 943195 - protein, 101 aa, Homo sapiens
  misc_feature (27)..(27): Xaa can be any naturally occurring amino acid
  misc_feature (79)..(79): Xaa can be any naturally occurring amino acid
  misc_feature (88)..(88): Xaa can be any naturally occurring amino acid
  misc_feature (91)..(91): Xaa can be any naturally occurring amino acid
  misc_feature (96)..(96): Xaa can be any naturally occurring amino acid
  misc_feature (99)..(99): Xaa can be any naturally occurring amino acid
FLHFQCLTLIFVSAPPFATAFFPPQKXNKFWLVLWLDGFFSLCWHFLCHVLLLAFSLSGQVFNVHQHGILLCVPLISGXKQLGQLFIXAFXLGVAXFGXLL

SEQ ID NO: 943196 - protein, 171 aa, Homo sapiens
  misc_feature (137)..(137): Xaa can be any naturally occurring amino acid
  misc_feature (143)..(143): Xaa can be any naturally occurring amino acid
MTSWKNLKNELSEEIFGKDPPRLLQTLSPGPPGSATLPAVSICGPATSHSTRLFGLEEEQLLYPNGTAKQIPLHGPCKVILGSSVKATDSSAGPQGPPAGRLSAGWREEGTELEAKGGGQLGAGAPSPFQNRARYSXLLTLRXKYKNSFHCRSIPGLKPWEEFTTLKSEVK

SEQ ID NO: 943197 - protein, 80 aa, Homo sapiens
MTLEMHTKPNNVSSAEENSYEKVGFEVTQRKGITLEETRSSPGAMRGLEEQRARGALGPSERALHRPCAPYLCRHAHRSP

SEQ ID NO: 943198 - protein, 267 aa, Homo sapiens
IPIQILELGLLLTSPVNVQAALDREAGPALTGAEEEAPSSLVVGLLTTSESWEALEQLPQIHVPFVWGTPEWPLKATDWYKERIQMLASKTLSMEQGASAWGMFAPSYKLIDLVMFLDFWRWEEMANYTASSFPNLLKTNYGGKENQGMDGCAPQFASTAPKLTNPGVSQKGGGDEEIGMQMPFGDFELFWPLSHFRAHQTGRAKRSHHECQIDWYWLPRTLCWEEFDITHVLHLIGDVCHGHSHSPSLIFKLGCPLSLNQRQFTSL

SEQ ID NO: 943199 - protein, 121 aa, Homo sapiens
MGGGVPLDRMPLSMVNSPFPQRKWRKGAKKSMNPWNIVPESFQGWYTTGHQSTNVTGKGSSNRGWGWVGSSAGCFDPSSSFDLSLGWGELAWLSGRVHGGGIWFEHFLITGVGFFSTIIVK

SEQ ID NO: 943200 - protein, 141 aa, Homo sapiens
  misc_feature (8)..(8): Xaa can be any naturally occurring amino acid
  misc_feature (19)..(19): Xaa can be any naturally occurring amino acid
  misc_feature (29)..(29): Xaa can be any naturally occurring amino acid
  misc_feature (40)..(40): Xaa can be any naturally occurring amino acid
  misc_feature (42)..(42): Xaa can be any naturally occurring amino acid
  misc_feature (44)..(44): Xaa can be any naturally occurring amino acid
  misc_feature (78)..(79): Xaa can be any naturally occurring amino acid
MGHAPPFXSAGEGKRTFIXIESLLVLREXAARVVGSGIRXGXRXGVVESFSVSGGPGLGVFLKDPGQELHDLHLGDFXXGPGAPKELVLGRLHVWDALVLQVIHLDELLSDELPHVPEVGVLLPGPQPRMRTVSRRRSLWR

SEQ ID NO: 943201 - protein, 202 aa, Homo sapiens
  misc_feature (64)..(65): Xaa can be any naturally occurring amino acid
SWYCWYSDTRSFMLLSASVNSIWYMFSPVYQCWVVLYRKMEENWSEMGFFSSWLGVLLLMFVGXXFRPGGGMLHTAVFTLLGIHYTKKLLFLFCTLSICSSTSFMDMRPRKMAATVSSGRGAGSEAAIMFLESNICWVSSGSERPVLLAAPAGQGRDRGMKKCRRGKGTCSPPACAGLRSLAREAQQVVTRSWWATQVVEVP

SEQ ID NO: 943202 - protein, 74 aa, Homo sapiens
  misc_feature (74)..(74): Xaa can be any naturally occurring amino acid
MREATGTKPGGSTAKASPGARSTTKGSASIWSTAEASSCARSTAEATGAWSTAEANTSAWSTAEANNRTGSTTX

SEQ ID NO: 943203 - protein, 101 aa, Homo sapiens
  misc_feature (98)..(98): Xaa can be any naturally occurring amino acid
EKAFENAPMDPGTRSTVAARHRLEASGVLEVRQVSQQHCWEDLGLTLLGLNIGRVHAMAFEPVSKFGGWEEDESAWASCGPSATPMSKVWFKNSSRSXPTP

SEQ ID NO: 943204 - protein, 273 aa, Homo sapiens
  misc_feature (108)..(108): Xaa can be any naturally occurring amino acid
QQSDTLDRAVEAPMGLLSADVVSQLVTFRIDLTHPPPWAPGDPGRGLEPPDTRRGGISPRAKPPSPPSLHIVLQAARQPGRLALHHNPDPPLPAAAPPQTIPDTQGLXQLCLFSHPSHLIQVAPGSLHYLAALLLGHKGCTFAGLCTAGLRTCKGKEAWFIPAHPQEPHPPSPASRAACSSLLSLCKGRAGANGLSLQQGGYDCKGTASQRGEKRWAMVLPPLSPHCNAAWGEVGALTCLASDAKCGQGQEGEECEGSHGVSVAALGCCSGLS

SEQ ID NO: 943205 - protein, 117 aa, Homo sapiens
MDGSRTEAPCWSLSNSGCTELWGGVVAQTWAFLLSWDTEISAPTSLLHYGVSLWCGLGGSYQKRKALATATSPGGRTDLWPAFRQEGSWPCLADRQRLAPQREGVVGPSEPCFQPIW

SEQ ID NO: 943206 - protein, 168 aa, Homo sapiens
  misc_feature (3)..(4): Xaa can be any naturally occurring amino acid
  misc_feature (22)..(22): Xaa can be any naturally occurring amino acid
  misc_feature (56)..(57): Xaa can be any naturally occurring amino acid
  misc_feature (61)..(62): Xaa can be any naturally occurring amino acid
  misc_feature (66)..(66): Xaa can be any naturally occurring amino acid
  misc_feature (68)..(68): Xaa can be any naturally occurring amino acid
  misc_feature (96)..(96): Xaa can be any naturally occurring amino acid
  misc_feature (103)..(103): Xaa can be any naturally occurring amino acid
MVXXERCPALRKSPRRHALIIXVQLFHCLKHGWSYTDDNDRDGQCGGADDGLLGLXXVSVXXISVXVXNIVLGAIRDLGCCPGHLDEDRGKGGGPXELHCAQXLEIALQHTLDARTVGVLIIVVFGELVGDPSLWGQLGPKAISWEELITVIVLDDLSHCLEGHGIGR

SEQ ID NO: 943207 - protein, 256 aa, Homo sapiens
  misc_feature (183)..(183): Xaa can be any naturally occurring amino acid
SPSSSSNSPCSSTVVSWYYWYSDTRTLMKSFASKKSISSKDSPVYQSRKALPRKKAVNCSEMRLSSSSLAVLLPMAVADIFRPRGGMSHTAVFTLLGIHSTMYVVVFLLHVDPFLFHFLHGHAAPEDGSYRQEGGRGAGSRLPSCSWSRTSAGQTRAREEPVLLAAPAGKGRDRGMKKCQLGXEAFSPPSCPGLSELAREAQPGGDPAHGGRDQVVDVPVRLGWSSSGCGKDVIKGLVINGVGFICVFHQLVDPRG

SEQ ID NO: 943208 - protein, 136 aa, Homo sapiens
  misc_feature (89)..(89): Xaa can be any naturally occurring amino acid
  misc_feature (97)..(97): Xaa can be any naturally occurring amino acid
  misc_feature (102)..(102): Xaa can be any naturally occurring amino acid
  misc_feature (108)..(109): Xaa can be any naturally occurring amino acid
MLFRGLHQVTEFLVAAFLSVLFALQFFGVHIPDVKNPIIGACKCIVSVRDGQSFGPVRTTLEAIGPEHLGGVADKKVDDLECVVSGPAXLVQLVVAXAQGGXPALHRXXLGAVGPPAVPEPDFLVIVGTNDDMVPT

SEQ ID NO: 943209 - protein, 117 aa, Homo sapiens
  misc_feature (42)..(42): Xaa can be any naturally occurring amino acid
LVPVGSRSYLGPSYLPKPTRPLILRLPTLPTTIKANSPVTLXCRLSQLLHYVGIISLAGVEACTVALDFFSVSLALPSFLPKRGHSLMNVTHWHNFCLSAGISWELGGTPVASCGPL

SEQ ID NO: 943210 - protein, 171 aa, Homo sapiens
  misc_feature (2)..(3): Xaa can be any naturally occurring amino acid
  misc_feature (52)..(52): Xaa can be any naturally occurring amino acid
  misc_feature (55)..(55): Xaa can be any naturally occurring amino acid
  misc_feature (59)..(59): Xaa can be any naturally occurring amino acid
  misc_feature (69)..(69): Xaa can be any naturally occurring amino acid
  misc_feature (90)..(90): Xaa can be any naturally occurring amino acid
  misc_feature (93)..(93): Xaa can be any naturally occurring amino acid
  misc_feature (101)..(101): Xaa can be any naturally occurring amino acid
  misc_feature (105)..(105): Xaa can be any naturally occurring amino acid
MXXWALKARAVRLPRPPLPGSSGFFPEHGSGWGRRAGWATRSQMYGGNRSLXSAXENGXRRRRPPVLLXSGQPRAWFRPPHPANTLWGPXFDXCSKPGLLXFSRXGRGSTGSCPSWAPARPCRAHWEGWNEPATEGQQGGARGYRGGDGRRTCTHAGVEAQGSQVLAALQL

SEQ ID NO: 943211 - protein, 256 aa, Homo sapiens
MLPGDNLNEGARRQGPPVPSAAEEKPGKFPLLAVTRLLQPRSFMAVHCAWRVLVTGFLRLAFMGLERVTCARALLRGVLGRVRGRRSPVSPGPQWHLEAQDLWEAQARWEHRPGRPCWCRARLGVLGAPGLLQARPALLLPRLCLLCHPGFLWARGLPAPQWDRGIQGVLERQGDQWSLGVLGARGAAGPGRTMDPGAKGFLRCAANCAICSLIIPHTAPDALLAGLLPRNSRLPRDARNTRDALQAQRTGGPGDT

SEQ ID NO: 943212 - protein, 145 aa, Homo sapiens
MLLSASVNSISSMPSPVYQCRKALRRNMAVNCSEMRLNSSWMAVLFPMKVEDILRTRGGMSHTATFTLLGIHSTKKLLFLLWMASICSSTSFMDMRPRNTVATSVAAVARVAGGHHVLGIEHLLGELGHGQGPVLLAAPGCPGGD

SEQ ID NO: 943213 - protein, 274 aa, Homo sapiens
RIQGWGRLGGVGGLEAGAWLLGDVQSSSGGLQLILGGPGLRCPRKYKTNIYFSLFPVLFVVFLLPFLRHAFHKFEFLPGDFYRERHSDGIRVKGLQGHLSDTGGGEGVRGVGGDRGDPQIVLVFALREGCQEGHPVKLLVQLLQQGGGVEHLPLEDFSSSLYFLVNLSATWRDSSSSRAQLSLGGVVGGTVHRQDLPALVTLVLHPQQPVELWRISRHTVLVIVAFSYEFCWRVLEGRAVEVDVHGLLSLVYHLKEGLEHGVEVQGLYGEKGIK

SEQ ID NO: 943214 - protein, 260 aa, Homo sapiens
MFQNALECKDKKFSKISTNLYKPGEEEPFYFKETCSDENGESLSSVSLCEESTIQGLKRARPQGYTGKEDGEKVEGFQGVPFLSVYLLFVLEGPGEEGELGEGGWGGRGFGGRGGGGGGAWGEGSGRFIHFRRTFWVTSIAIEMEHNLGGGFSQRARGQGGGGGVFEVPEGDGLDDVSGTGSPLGDLRIPSSPSSICMSLKSAFPTPTMMTDMGRWEAWTMASRVSAMSVITPSVRISRMKYCDASLVLVSSDADLATFW

SEQ ID NO: 943215 - protein, 131 aa, Homo sapiens
  misc_feature (1)..(1): Xaa can be any naturally occurring amino acid
XAAHPDPMNEMKSKTCLQGSPGEPGWVLWASRPGALGGSLLALLPSSLGGSSCPSSPSGSVSSSLFLSLWGVRLWAGEGAPGPGGPWAGDGVGVGALGLGGVLFGGGADSGGLLSLGAPALSALGGGGLGG

SEQ ID NO: 943216 - protein, 152 aa, Homo sapiens
  misc_feature (79)..(79): Xaa can be any naturally occurring amino acid
  misc_feature (84)..(84): Xaa can be any naturally occurring amino acid
  misc_feature (123)..(123): Xaa can be any naturally occurring amino acid
  misc_feature (128)..(128): Xaa can be any naturally occurring amino acid
  misc_feature (152)..(152): Xaa can be any naturally occurring amino acid
AAFATSMPSSRLAATVAGCGIPDSKGLRKYGNWWYRSLEIHKTWQLRLTPHASDSSCTTLFEEKIDKKGKRTPFPEGGXTFKKXELEAEALAAGGEPGLVYYLGLQLRLEPADKTKKPPHPNXRIARXKDLRGTKNRKSKKQPKAQGTKKPX

SEQ ID NO: 943217 - protein, 200 aa, Homo sapiens
  misc_feature (28)..(28): Xaa can be any naturally occurring amino acid
  misc_feature (75)..(75): Xaa can be any naturally occurring amino acid
LGAGERDMELEGSGEETMRVLGEARSSXSTNSTGTNLCVFPGIMYKFRVFDAFSPLLSLPLRAAHSGGILFFHIXGKFCCVEEIFFVFLFLPHSLDFGFFFLFFVFFHVSLVLGGPFAFLPGLRSMAGSLMICCTSGSAMARGFTSSGLSCRLYCAIIQRWQPSAASLQLVSRSRAFWYTSMALVESFIASSAGLSVYNP

SEQ ID NO: 943218 - protein, 78 aa, Homo sapiens
MASMRKGWFSATARRRASFVALYTANTSLPSTRIDMMPYPGPRAAMPSPRYCSQVGVEMASSCFRQKKMMGHSSVAAS

SEQ ID NO: 943219 - protein, 43 aa, Homo sapiens
MAQEDNSERERWQHLADLADFALAMKDTLTNINNQSFNNFMLR

SEQ ID NO: 943220 - protein, 169 aa, Homo sapiens
  misc_feature (2)..(2): Xaa can be any naturally occurring amino acid
  misc_feature (62)..(62): Xaa can be any naturally occurring amino acid
  misc_feature (73)..(73): Xaa can be any naturally occurring amino acid
  misc_feature (119)..(121): Xaa can be any naturally occurring amino acid
FXSKRLTVVAFGWSNLILSNIPIFSLISSNYNSNGKLFLLVPSAVSLSNKLQWLWPQFLWWXSPLAHSPPIPXRACAPVALLGASVLPPPSASLPLASCYFFSLSFLIREEAFLPREPXXXSVRWHFIFFFFETEFCCCCPGRGAVARSHLTVASAFWVLAILLPRPPM

SEQ ID NO: 943221 - protein, 181 aa, Homo sapiens
  misc_feature (59)..(59): Xaa can be any naturally occurring amino acid
MGMETRSTALSVVGRRRTEAKRGERRTQGFVFLKGDVRKCYESRVAFAKVLRSGGDRAXLLPPRLAPPALLIWVQKIARERAVLVIIASVSLPAIQLHIHFVPWIQVQHHAVTGVVVVLVGVLCNGAGPDLPVLAEVRPHAGAVAAAHEDVVGEEVDAAHLAAELARGGVIVIAEVGDHVI

SEQ ID NO: 943222 - protein, 292 aa, Homo sapiens
AQTPPGYRLTYSAQAPHHSYTRFIQTTPPKRGREENYSQRTGLEDDNDSKQECSLEATSRLNNDVCLDAVWQKRGVLGFGGSRGPQGAAAGWDREHSWGQTRATSEVKAITQESSAGLEAQGSCAPQGKGEIRTVGPFLVGESGLPTERAPFLVRVLPGPVHHLNPWARGGSFVFGWVDPSLAQMQDSLTKLSGGVGAGGLQELGLHTLTRDRTEQMSAHTGTGNCTSTAGKQHGKCYAWGLGLKASSSSTCMGLFTPPKLLCTAMPCFWSLLGAKWPTLRAEGQTLGPGHT

SEQ ID NO: 943223 - protein, 293 aa, Homo sapiens
FGMAGLTISKISLVGDTTGTRAATGAGTCSTKAREEPKCESGGEDGTSPEATTGAGTGTGTVIGTGTGTSAGTATLLGFGFSFCSSLDVGFGPGSDISFVPVAGGGSILRAEANAHSSSNLGPSLGFSCSLSCSLQIRFHRLWVLSCPFLGILLLYLAGKLEDFDLAGLIVRAQAPEELIFRGIAIGDSGIVQVLLLHKLISDELLHVPKESMMYPRAHQTCADLPDDSLTGPISIHEDDAKKHMSRPAWVSLSRSSMPASVGLSVRECTVVFLSFLQLNPILLQDSCSFMIR

SEQ ID NO: 943224 - protein, 151 aa, Homo sapiens
  misc_feature (3)..(3): Xaa can be any naturally occurring amino acid
  misc_feature (17)..(17): Xaa can be any naturally occurring amino acid
MSXQHGLLCRIDSNKPXFLVVSKLLSYGPRIQIGSVNNVNDARTTLFSLLEWKQNEGAPKALQTPRPPPLGPAGVGHSSHEEQAAGAMLVDEEKKGAVDSEADLGGQRHEPHRGHSGGLGAFLVHCDRALVLEQVDGDPFVLDACHVVIFV

SEQ ID NO: 943225 - protein, 258 aa, Homo sapiens
MALGHLLLSLLLELAARRSAVASWYCWYSATRPFMWLSASVNSISSMPSPVYQCRKALRRNMAVNCSEMRLNSSWMAVLLPMKVADIFSPRGWDVTDSRFHIVGDPLNKIAAVFVLDIKHLLIHLLHGHAAPEHGGNRQYRPWRGSQAAIMFLASNICWVSSGTVSARYCWLPRLVSGAKRDEEVQPGKRDHVHSQLPQSSIELAWEAQAGGDPTHGSRHQVVQVTIGGRGQLEGSEANVVESFVINAVGLVCVFYEL

SEQ ID NO: 943226 - protein, 168 aa, Homo sapiens
  misc_feature (70)..(70): Xaa can be any naturally occurring amino acid
MAVNCSEMRLNSSWMAVLLPMKVADIFRPRGGMWHTAVFTLLGIHSTKKLLFLFCTLSICSSTSFMDMRXRKMAATVSVAVARVAGGHHVLGVEHLLGELGHVSARYCWLPRLVRGAAGHEEVQAREGHMFTASLRRSAFTGPGSAAGGDPLMVADTGGGGPVVGVVS

SEQ ID NO: 943227 - protein, 64 aa, Homo sapiens
  misc_feature (1)..(2): Xaa can be any naturally occurring amino acid
XXFFCPSDDLKLLKNGKIQSVKGLAVSDEANYTQRVGLKQLFDYGYKTEYVSKIPKIQETYNIK

SEQ ID NO: 943228 - protein, 155 aa, Homo sapiens
FNCSQVSVQVNLAASTHTQGEQKPSYISSWGTKKEERGARRLIIQHIKENKKILKPALRKMFAFTTNLHERRDAITSPVSDLGSRTGTILLTTRTWGVFLSWAGTSCNNAFHFLDDYYKEQKCANRKVSRAHLVDFGGCSLQPPAVTFTVPVFKS

SEQ ID NO: 943229 - protein, 151 aa, Homo sapiens
MEGPYSSYSCLLIHICWKVDSEARMDATIQTEYLRSGGAMILIFMVLGARAVISFCILSAMPGYMVVLPDSTVLAYRSLRMSTSHFMMELKVVSWMPQDSIPRKEGWDTPPDTGTLIANGDDLAIGQLVALLQRRGGCGGGHLLLEVQGDV

SEQ ID NO: 943230 - protein, 115 aa, Homo sapiens
MDWGGREELLARRRLGSLGIKPRGFSILCARAKIDLGENEEVTSKKIVAGERWRRAIAKGREECLLDNFCVLRDALVHSNWKRGVARRMERREARPSDSTYLKRLSPEDYVNTHP

SEQ ID NO: 943231 - protein, 222 aa, Homo sapiens
  misc_feature (123)..(123): Xaa can be any naturally occurring amino acid
MLIALFFLAFPLFVGGGVLVFLVFGHQVVDVVVGFGGFHFVDDLALYQWRKDLGWNMAVKCSEMGLSSSWMAVLLLMKVADIFRPRGGMSHTAVFTLLGIHSTKKLLFLFCTLSICSSTSFMXMRPRKMAATVRSGGWGGSQAAIMFLESNICWVSSGTVSARYCWLPRLVRGAKLGMKKCRRGKGTMFTASLRRSAFSWPGKRRQVVTPLMVADTRWLRSP

SEQ ID NO: 943232 - protein, 246 aa, Homo sapiens
GGAERWQQRAARVDLGRWGLCGGSRGQRGRDVGGSQLAQAGCQVAQQVVSSFGGPGLAAGQEFIYLFYIFFESGAVFSQKDGLSSDRGLYLHATQAPQFFMVIFIFFAFSSFYFLYSYGGDMWDVQVSCYPDSGSRAFAPDLPLFLGLQDEGFYLSYSSRYISTRGRFSMTGLEDCGSGTGCFPRPSRPPVAPLTPGRDPTLECSAALRGLSGVRLELAGAPAIGEELGFPGVSAAMVRPRLPVPG

SEQ ID NO: 943233 - protein, 109 aa, Homo sapiens
SSSDSPSSSAVASWYCWYSGTRSLMLLWASVNSILLLLSPVFQWWMALGRAMAVNCSVVGLLSSWMAVLLPILVAGIFVPPGWGVTDSRFHIVGDPLNKIAAVFVLGIE

SEQ ID NO: 943234 - protein, 192 aa, Homo sapiens
  misc_feature (2)..(2): Xaa can be any naturally occurring amino acid
  misc_feature (21)..(21): Xaa can be any naturally occurring amino acid
  misc_feature (31)..(31): Xaa can be any naturally occurring amino acid
  misc_feature (43)..(44): Xaa can be any naturally occurring amino acid
MXSHRKCYSVYINPTPYRRQXPPPGTLPPSXWLPVPILTVCCXXAQALPSSIVVHFVCISTDLFVFVFFCQSLPSLFASLLVLLLFVSFFFGFWGRFRLPGGLPEFLSPRRIFDVFWGDIWVGHVGGGNFCDFSWVLLLGVCGFCFVIAVCFFLFKSWFWPRPHMGAHQRVSFFCFLPIPPASCPEQEDYIT

SEQ ID NO: 943235 - protein, 114 aa, Homo sapiens
  misc_feature (52)..(52): Xaa can be any naturally occurring amino acid
  misc_feature (68)..(68): Xaa can be any naturally occurring amino acid
  misc_feature (72)..(72): Xaa can be any naturally occurring amino acid
YKIISSSLKHFNNADRFHFANTNKADYTMFEKQALFLDGLSLYICLTAHHPXVTVSSSISSSPSSNGXDLGXQGGVCAECSNPFSVSTSARVEAFEMGFEIASTSPGEGPPFFL

SEQ ID NO: 943236 - protein, 270 aa, Homo sapiens
  misc_feature (5)..(5): Xaa can be any naturally occurring amino acid
MEIFXKLPRQTSYRGPPPLLLWHPSTFDTHRRVFVHIALTLGELHLVHALPCLPVEEGLPEVPGSELLRVGLYDLLACFSISNEGDFYLLATRWDFTDGCLDIFGDPFHKVAAVLILHVKHVLIDLLHGHPTTEDSSHGEVSAVAGVTGSHHVLGIEDLLGEFRHCESSILLASTAGERGKARHKEMETWEGDHVDCQLAEVSIELARETEAGGETLMVAEDKVVQIPVVWCGQLQSAEQYIIKGLVVNAIGLISILYQLMDGEGGMVGL

SEQ ID NO: 943237 - protein, 96 aa, Homo sapiens
  misc_feature (21)..(21): Xaa can be any naturally occurring amino acid
  misc_feature (23)..(23): Xaa can be any naturally occurring amino acid
  misc_feature (28)..(28): Xaa can be any naturally occurring amino acid
  misc_feature (93)..(93): Xaa can be any naturally occurring amino acid
VSWYFWYSDTRSFMLLSASVXSXLFMIXPVYQSRKALPRNMAVNCSEMRLNSSWMAVLFPMKVEDILRPRGGMSNTATFTFLGIHSTNSCCFXSGW

SEQ ID NO: 943238 - protein, 195 aa, Homo sapiens
  misc_feature (14)..(14): Xaa can be any naturally occurring amino acid
MAFHKHEATIATKXPSHTYYKVELKDMYRVLNKYQGEQLTSIQGQNQQQVLQSSADIRYKLQGQFLFEGLFQFGEASMRCVHLPGGNFYSQLTHGANATHLLSPFREHLRWTMEGPDSSYSCLLIHICWKVDSEARMEPPIHTEYLRSGGAMILIFMVLGARAVISFCILSAMPGYMVVPPDSTVLAVKVFADVH

SEQ ID NO: 943239 - protein, 85 aa, Homo sapiens
  misc_feature (24)..(24): Xaa can be any naturally occurring amino acid
  misc_feature (44)..(44): Xaa can be any naturally occurring amino acid
YFALQKGKWRQVNLQDIWNQNISXYHNQCFAHETIHRYTKDNTXPLFRHYSTLPKASEILGDGIRGGLLGASGLLRQQNRGTIFP

SEQ ID NO: 943240 - protein, 130 aa, Homo sapiens
MGSVGVFGEPRLTDGDERGEQANGYFTYARGVNILYQSRYALGSKAKPLVDLLANSKAVPWVRLFSSKKCTGGILLAKRGSEMAGGKGTRVGSGNFLQVKHSRDSHPNLQGKPVDGEGHQSGLNKGGFKG

SEQ ID NO: 943241 - protein, 230 aa, Homo sapiens
  misc_feature (54)..(54): Xaa can be any naturally occurring amino acid
  misc_feature (57)..(57): Xaa can be any naturally occurring amino acid
  misc_feature (70)..(70): Xaa can be any naturally occurring amino acid
  misc_feature (72)..(72): Xaa can be any naturally occurring amino acid
  misc_feature (161)..(161): Xaa can be any naturally occurring amino acid
  misc_feature (168)..(168): Xaa can be any naturally occurring amino acid
  misc_feature (171)..(171): Xaa can be any naturally occurring amino acid
  misc_feature (175)..(175): Xaa can be any naturally occurring amino acid
  misc_feature (189)..(189): Xaa can be any naturally occurring amino acid
  misc_feature (194)..(194): Xaa can be any naturally occurring amino acid
MQCVQKVTFKSLFKGFGLGVSGHHSAPHVYVILAFSSVFMYFVCCYFVVFIFTXPAXPGPSPPGGPRGPXAXLGWTLVVSFLCQVFVAGSPPPPGFVPEFFLTRLVGASSPRPRPGPPRIPLVRRPWRRGFVGFRSLWSFLLLSASVNSFSSMPSPVYQCXRALGRGXGRXLLGXALAPAPGWRVLLRXWRWAXSSSRGAGCRTRPSSSCWGSIQELLLFLLCQLKHCSS

SEQ ID NO: 943242 - protein, 209 aa, Homo sapiens
  misc_feature (87)..(87): Xaa can be any naturally occurring amino acid
  misc_feature (89)..(89): Xaa can be any naturally occurring amino acid
  misc_feature (131)..(131): Xaa can be any naturally occurring amino acid
  misc_feature (134)..(134): Xaa can be any naturally occurring amino acid
KAGCGERDGSGGLDTAGFGPGRHLPFIPVASSFTWGPGPPIPGGGFSIFGPVPGLWRRGISITRTPGRSFCSGAGWNSMSSMPLPVXKXRKALHRKMAVNCSEMRLKSSWMAVLFPMKVEEILRPRGGMLXTAXFTLLGIHSTKKLLFLFWMDSICSSTSFMDMRPRNTVATVSSGRGGGSQAAIMFFASNICWVSSGTVSPRYCWLPR

SEQ ID NO: 943243 - protein, 135 aa, Homo sapiens
  misc_feature (104)..(104): Xaa can be any naturally occurring amino acid
  misc_feature (113)..(113): Xaa can be any naturally occurring amino acid
MRESQGAVRRKGARASPQGGSVWRGCCPGQGGEAAAVAEWDVRRGGVLVPRHEWGDGFCARNWILGMGAVGFDSGGVEAGGFLLIFVAEGPSASARVRRGRPLXGITFAPPSXGSPLFNGCSLPPVFPGSMPWAR

SEQ ID NO: 943244 - protein, 197 aa, Homo sapiens
  misc_feature (21)..(21): Xaa can be any naturally occurring amino acid
  misc_feature (54)..(54): Xaa can be any naturally occurring amino acid
MFMSLWASVNSISSMLLPVYXCRKALRRAMAVNCSVVGLGSSWMAVLLRMFVGXIFRSRGGILHTGVFTLLGIQSTKKLLFFFCTLSIFSFTFFMVMRLRRMGGGRVGAVARVAGGHHVLGVAHLLGELGHVSARYCWLPRLVRGASGHEEVQAREGPMFTGSFAQVCVQLAREALQVVTLLMVADTRWLRSRSGGW

SEQ ID NO: 943245 - protein, 215 aa, Homo sapiens
  misc_feature (25)..(25): Xaa can be any naturally occurring amino acid
  misc_feature (46)..(46): Xaa can be any naturally occurring amino acid
  misc_feature (48)..(48): Xaa can be any naturally occurring amino acid
  misc_feature (87)..(87): Xaa can be any naturally occurring amino acid
HQPYFGGPGQYGSFPGPSSSRQATXLCQGKRPQAIHIACEGGPPAXLXHAQTQLLEDYFGIDIKGEFFVGWWVELGSAVGGCVHKQXGHGGLVMGLGGASVRVKECSGFKNFKGDVKKRKCFVKNVVNEEKKGKWLQLLLDEVEVLGYHCVAFLRALEVPSFKIGIMKPCPLLQQAAAQVFWVHVEVSTQQNHVCLLGCVVDDLGQFPSLGHTMC

SEQ ID NO: 943246 - protein, 107 aa, Homo sapiens
  misc_feature (1)..(1): Xaa can be any naturally occurring amino acid
  misc_feature (52)..(52): Xaa can be any naturally occurring amino acid
  misc_feature (86)..(86): Xaa can be any naturally occurring amino acid
XIFSQSTFNHFSHFFRYTQVAAYYGHVSGWWPGKDPSPCLGRAVAVGLGLIXIHFVCVHGGGVYRPLGDGVPKFFFLCFFGFLLGXVNAFTGAGSVFLKGLLLAGLV

SEQ ID NO: 943247 - protein, 304 aa, Homo sapiens
PIFVVISSKNRVLRTKKTLHILKMYTFAGVDAYRFQLKASDSPLCSGQRHLPGEETGSWGLAFPTLTDPQVKKPGSCQPLEISQYIFFFFFFSLHFFLVAGHPVSPGHSVVFHKPVLTLATKNQATRTKGELKVVYRVLNKYQGEQLTSIQGQNQQQVLQSSADIRYKLQGQFLFEGLFQFREASMRCVHLPGRKFLFSINPCRKCYSDLLSPFRSICGWTMEGPDSSYSCLLIHICWKVDSEARMEPPIHTEYLRSGGAMILIFMVLGARAVISFCILSAMPGYMVVPPDSTVLAYRSLRMSR

SEQ ID NO: 943248 - protein, 258 aa, Homo sapiens
  misc_feature (15)..(15): Xaa can be any naturally occurring amino acid
YFFYYTKHGDIASLXKRFQTRWGDETDDGDKEGREGALRAEEERREGGRGEGLLPASMGRNILEAFSIFFLRRSGRELGARGVRLPRPPLPGSSGFGPKQVLGGGERAGWATRSQMEGGNRSLESANEDLIRRLRVLFLLSSSQPRPSCRPPHPAKTLWGPEFHGCSKPGLLAFPRAGRGSTGSCASWAPARPCRALLGGLERAGHRGTAGRGQRIPWRGRAEDVHARWVEAQGVTGSGTLQLVWALCVRGGRHCIST

SEQ ID NO: 943249 - protein, 70 aa, Homo sapiens
  misc_feature (40)..(40): Xaa can be any naturally occurring amino acid
  misc_feature (45)..(45): Xaa can be any naturally occurring amino acid
  misc_feature (55)..(55): Xaa can be any naturally occurring amino acid
  misc_feature (58)..(58): Xaa can be any naturally occurring amino acid
WAQVGVGEAVHPRRSWGGVGSGPCPLRVDRQLPDIPSLLXGSVVXGVLRNLAFPXPPXPSPQPCPGQGAG

SEQ ID NO: 943250 - protein, 274 aa, Homo sapiens
GGKGALGRGESRVSAARWLRGFRHCWLLPPPPPASHSSCQQLHLLPWASYSSSSSSYISPSSSAVASWYCWYSDTRSFIFLSASVNSISSIPSPIYQCREALGRNMAVNCSVMRFISSWLAVLFPMKEEDILRPGGGMSHTATFTLLGDKLHEVAAVLALDEQHLLVHLLPGHAAPEHGGHRQVGGRGAGSQAAIMFLASDICWVSSGTVRARYCWLPRALRGANGDEEVQAREGPMLTASLHRSALSWPGERKEVVTPLMVADNRWLRSRSGA

SEQ ID NO: 943251 - protein, 101 aa, Homo sapiens
MSGVVGGKINRKDIPEFVKLVFHPKKPVELWRISRHTVLVIVAFSYEFCWRVLEGRAVEVDVHGLLSLVYHLKEGLEHGVEVQGLYGEKGIKLRTMRDLGK

SEQ ID NO: 943252 - protein, 249 aa, Homo sapiens
ETPDTLKTENIVIHIIMWGSVSADRGCLRALSVPSKIAPFTPFINAAAKGREKRLSQRGIHLEHESPPKSCDMFENVPRGKELNGKWIKKARESEQDVVLKENGEDVDNEPPVIAQGGKQPRVRRGEVEGIDAVLVLLVGGDHVVLQGLLALLFRTVVLLVTDVIVVYKVAEGSDEMDTMLEKDDSAVTAAREDQLVMRVVVADVPHPVGVLLQGLHGFGDISDVPELHLTVVYAAGQVVLLIGIKVKV

SEQ ID NO: 943253 - protein, 144 aa, Homo sapiens
MGLPGTISTMAASPDFKNFGASSSFLPERRSIFSFSSANLHAMWAVRKSNDRGMAGAYLAWVVQGNHLACEASSFHWWVIFAVTSYVATTNILDRHILDIEAHIVPRKSFTQSFMVHFDRVYFLCNVDWSKGDHHTGFENTSLH

SEQ ID NO: 943254 - protein, 204 aa, Homo sapiens
MAVKKKNKMSRRQRTVRFCWSVIGGPPELRTVSKCVSNITVSPMNKSTLKWKLEKITGGKELLHTKLREEQKKLLFQLEQLCIQGHFVRLCCDVNVQQQQEEAGVGTELRCQLVVVRQQGEELNNKKNAGRGVSGLKHFGSTWNTHWNLGKKSQEVFSANFTKTLRHWGQDTGLKVTCCCRRESQQVKKHLQQWVLSLVISNPP

SEQ ID NO: 943255 - protein, 116 aa, Homo sapiens
  misc_feature (32)..(32): Xaa can be any naturally occurring amino acid
  misc_feature (47)..(47): Xaa can be any naturally occurring amino acid
MRFRKMAPQKAGRLATAAAHVEMSSEPMPRKXINFSGAVHNSGGGYXQTTCLYFSSSLFAIPCRPGPSFPLLFFPPRHFPSSPPPSSSPPLPLVPPPPPPPPPGLTTTSPWAPLTF

SEQ ID NO: 943256 - protein, 271 aa, Homo sapiens
  misc_feature (113)..(113): Xaa can be any naturally occurring amino acid
  misc_feature (130)..(130): Xaa can be any naturally occurring amino acid
  misc_feature (146)..(146): Xaa can be any naturally occurring amino acid
  misc_feature (165)..(165): Xaa can be any naturally occurring amino acid
RGKTEHHSLQVETPMLEDNRSSLRLHDFSEKFLDIDLALLFLVLPLFVGRGVLVFLVFGYQVVYIVFGFGEFHVVPGLARVPVQEGFAPEHGRELLGDALEQLLDGRAVADDXGRHLQAEGRDVAHGRFXVVGVLFHDYLLFFFCXFCFFLFTFFMDMRPRRLGXTVSGGGGAGLQAAIVFLVCEYLLGELGHVSARYCWLPRLVRGAKRGMKKCRRGKGTCSPPACAGLRSAGPGSAAGGDPLMVAETRWLRSRSGEVVSFRVRNRCDTG

SEQ ID NO: 943257 - protein, 168 aa, Homo sapiens
MAVNCSVLSFFSSLLAVLLEMKEAEIFRPGGGMSHTAVFTLLGIHSTKKLLFLFCTLSICSSTSFMDMRPRKMGATVSAAVARVAGGHHVLGVEHLLGELGHVSARYCWLPRLVRGAKRGMKKCRRGKGTMFTASLRRSAFSWPGEAQAGGDPAHGGRHKVVEVPSWG

SEQ ID NO: 943258 - protein, 135 aa, Homo sapiens
MGKENAWEEAKKKVGVGARPSAPRSLGSAYGFPGMDDSSLPSPQSTGQGDSHAWAAPRPRLTTMWSEAGVRGGGVLLVPVDTIPMTVLYCMLEVKVEVKDIKAVVPGQRRLVEVPFNHIPPQGACQGLELWQEET

SEQ ID NO: 943259 - protein, 251 aa, Homo sapiens
  misc_feature (31)..(31): Xaa can be any naturally occurring amino acid
FFYKYFKYYIDVINITKKEKKNDRQHLRAPXTQRTPKVDHVSFLPLPVYAPGKAPTPSFSSSAFPNPFRGGIFSSFYFSSFLFSPSSSAVVSCYFWYLDTRYFILLWASVNSIFFIFWLFFQCRKGLGGNMAVNCSEMRFISSWMAVLFLFVVVVVFRARGGMWHTAVFTLLGIHCTTGFFFFFLLLSFFFSLYLWTFGFGFWQPPSVAAVVRVAGGHHVLGVEHLLGELGHREPPVLLAAPAGQGRDRGM

SEQ ID NO: 943260 - protein, 95 aa, Homo sapiens
ATAQEFWGLGTEKGSFLLHPNLGCLGVGWGERALRRLLGKSLLFLLGAEAPPLHKGVRTCALIKHVHTSYYHTQAMFLISGLYCGVRYQPQSRGV

SEQ ID NO: 943261 - protein, 282 aa, Homo sapiens
  misc_feature (47)..(47): Xaa can be any naturally occurring amino acid
GGGDERARENLKKTMLFSIPMKGYCPGKNPTPSLSSSVFAKQSRGGXYAYFLFFYFFFFNCLLEEEAWYCWYLEHQVVYVVFGLGEINFVHAIERVKVKEGFGLEHGGELVGDGFEEVLAGGAVGDGGGGDFEGGGGDVGEGGVHVVGDAFEEVVVVFVLHVEYFFVHFLHGHAAPEDGSHQSVAAVARVAGGHHVLGVEHLLGDLGHVSPRYCWLPRLVRGAKRSMKKCRRGKGTMFTATLLQVCVQLGPGSAGRWVTPLMVADTRWLRSRRWGVVIFRVR

SEQ ID NO: 943262 - protein, 112 aa, Homo sapiens
  misc_feature (110)..(110): Xaa can be any naturally occurring amino acid
ELQVTTVTISSTTTKVSERKWLLHPSRVVYKIPNKNLGITLDGILTSHCWGDFESWLLGGVYFLGTFGERDFFGVTIRLLHFAINSMGCKKENLHFNPLLGCFKLSTEQXLK

SEQ ID NO: 943263 - protein, 306 aa, Homo sapiens
MCILIIRLTQLKNLILFLLFLYSSSSSSSPKSSSSSSVSSFYFLYSYTMSFIFLSASVNSISSIPSPFYHFMKSFLRNIAFNFSYILFKISFISFLFPINFTSIFMPLFWISHTALFTFFCIHSTNYLLFFFFTLIIFSSTSFIDILPRKTSATVRYRPLRGSQASIIFFSSKTFWFISVTFISRYFLLPLLFIWAKPVINKLRRGKGTMLTANLRRSALSWPGKRRQVVTPLMVAETRWFRSPYLVWSASECGTDIIEGLVVNAIGLISILYQLMDGEGGIVGLHHGVRHFVVKAHTEGIMMRSG

SEQ ID NO: 943264 - protein, 141 aa, Homo sapiens
  misc_feature (141)..(141): Xaa can be any naturally occurring amino acid
SSIKKEKTFADILKPTLLYNRFEDLNLKMPTWIIMFLIHIYFFFEMESRCCPGWGTVERAWLTATSASRVQAIIQSQPPKLLGITGVHHHARLIFLCLVQKGFHHVGQAGLMHISYRYIGKLLPNHNKHCVQVFKMSLDTX

SEQ ID NO: 943265 - protein, 105 aa, Homo sapiens
MGDYENDCAGEASGGLDENGCYYEGYVADEEYAMSDFRSVCRRQMELVIIMPHRDEYKEGVGYVFCKGVENECKEYYTISRLVLKILRQVLLTQEGGFDMGFRES

SEQ ID NO: 943266 - protein, 177 aa, Homo sapiens
GATSVACLLRVINCFLLGCRLLPLGNTGAAGGLFKIVTHHTPPLEEDFFLLGLEKEIFGSSILFLLGDLLGLLVFVFFEFFTHLLTLLWGTFVVFEEERASAASRLFFFFKRFFCCFSSFLVNLSSRFLCLNHCFLHDIQILSWYLSSLIEGQWLFNLFSKLLPEYTRGHLREAIDS

SEQ ID NO: 943267 - protein, 255 aa, Homo sapiens
  misc_feature (65)..(65): Xaa can be any naturally occurring amino acid
  misc_feature (151)..(151): Xaa can be any naturally occurring amino acid
  misc_feature (158)..(159): Xaa can be any naturally occurring amino acid
WHMHYTPINSQLCLNNVVREAKKRRIWNNAPGVPPPISLNTVTFRRLLARGMLGGVNASLCWVGXEGVGGGGGGGGGIGAPGHCALTQRRVLISSGGEWEWLGRDSVFTGCEENIVKMAIPSDVIYRFRAIVSGSQRGFWETEGLILSSYXGSEGLAXXTVLGESIGELTFFSFTAYYKSTVIKRVWYWHKTNRLLDQYNRTDLRSYKLVLTYMVNDCSTRWPSLVKGGKNSLFNSWMSVHRREIRPLPCSIYKN

SEQ ID NO: 943268 - protein, 320 aa, Homo sapiens
MNTILPGFKKNKTKTFRKCSTASRLPALPLTSCAWALPLCPHPSFPQIVWVAVVCWDVVGDSQSRVAQVAQEYVGTCCGVGVCVLVYGEGRGVGGCGVWEGGWGEPDEMNRKGEKTQTTELPTLTYLSQRRKSEARARIMLSAGGVWGQAGGLREEAGKRARSTDVRKRRQVTTEKREVLADQDAEAAVAAVPWAAGRQDCFLAECVLLRAWWGPSSLSPPFSYPSMVLNKMKVLRAIEGKEKKREPAPSKATIPTSIPRTGPQGGGCIVRRERHGMLAPGIYRTARERFRNAGKSNLQSGQMSSPHPAKPQKANQMVSE

SEQ ID NO: 943269 - protein, 175 aa, Homo sapiens
SYSHMPSAYQEIKREGENQKKKKILSHQEATLAPNQMGDSAHMEKDNSAIVFLGFRSTHSLAGAFKCHWCLAPNVVFPSSGLDGRSATWQGHSQFMAPAGHSVVELGSAPIFSSVAVSLCHDDGARGWGSLELANGICYEYGSGETAQPSCCAQALVHAVGGQQRQVEFIDLLGA

SEQ ID NO: 943270 - protein, 126 aa, Homo sapiens
FLQLLNCESQSLKIEAKYIPLVNEEINLFKSPPVWLPHSKKAWGHKRWEARDNGQICLQPAHQPAPTQGKHQSPGHGPGARVPALVTGGGEVSAPWEPWRNGSGCASNIIDARAGGNMPPSPVAAP

SEQ ID NO: 943271 - protein, 107 aa, Homo sapiens
MSVPNKGHTEGLLQAMSDKGLVVGRWQPGWEVDAGEEGTGGGPEPMQLSVAGKGGCMARAGIVGSHTMPAIATGWGSDRSPESMGAVVPGATAAYPPSVHGPPAQAS

SEQ ID NO: 943272 - protein, 209 aa, Homo sapiens
FSLLVTTQAPWWKDMWGQKMLRTGCELCSMWKLLFSCWVPSLFTTLLSSNLLRLALMSSEGFGALRVFQDRAEMLVTGLPSCTTKRLVLVSFPVAIIIEEREDTATVITRPEQPARGIIGQSKVKVCYLAGALLDFLACGDVHDMHVVLGVPHHSEVVVDRLEGAAEQFSAIGGQGISRMQRPSSEAQMRMVASSEVERGCLGEGQASR

SEQ ID NO: 943273 - protein, 225 aa, Homo sapiens
MRQAGRVPEGSRAPNTNSVRRNQGSSLHCSGATGAPEQWKCTFCHLPSRRYHTRVSSDWLVRGRPCPSMYCVKDVSNAGGILSNDVHVWVQDGRVDWIAVLGQQVLEVESVEVHPFNQVNQCFRLKRSQPWVTDFGVDIKVTVVDGLDELLRGLNDLLLPGFSVFILYGGIGTVRRILNPVHWVMDDGGLKIQGGRRKRPFGAGGGCTVFSAIRLELESICFLVE

SEQ ID NO: 943274 - protein, 250 aa, Homo sapiens
  misc_feature (67)..(67): Xaa can be any naturally occurring amino acid
  misc_feature (90)..(91): Xaa can be any naturally occurring amino acid
  misc_feature (98)..(98): Xaa can be any naturally occurring amino acid
  misc_feature (112)..(113): Xaa can be any naturally occurring amino acid
  misc_feature (120)..(121): Xaa can be any naturally occurring amino acid
  misc_feature (132)..(132): Xaa can be any naturally occurring amino acid
  misc_feature (142)..(142): Xaa can be any naturally occurring amino acid
VNICHPMTGHNLVKRCLSCLLLFFTKVRVLAWQSGILLASLWWPRNGGVPRSASTLDPIVNCSGLEXRFSGFLLALLHTGYMLMYVQIRXXPEEHSEXNGPPPDVTIAHTQXXEKLEKGXXHHTQTRFLQIXPLPPPYPSSXTESPPIFTPPPHTSYHTTHPTPPLPISLHLTPHISPSIPNLSHILLHSSQLNTTHTSPPYPLPVHSHDELYTAREKWRYAFLREAFPGVWITVRQTLGSACSGEDMRR

SEQ ID NO: 943275 - protein, 276 aa, Homo sapiens
GSFVTCFAHIKAATGSSQQLCQERKGCPCSSCTLGGSAASSLLILRTTIRPRALLSSFSSRTVRESPSSRSRSLSLNDIVALHPSSRMCTSPSVQQQHSQRVHLRGVPDEDAAIGLDSQERQQPAPPEPGGRPGKGRRGPERKRALQRRAERQQAGGRAGKGKGKRAAKGKGKTKARQPGPRAANPKKQSKGKKAERKEGKAEERAKAAATQTPATKHPREKKNPTQESKGGEAAKAGQARNGQANTNQAPARKQPGGRKPKGENPTGTRRQKATK

SEQ ID NO: 943276 - protein, 268 aa, Homo sapiens
DLLKIFGIVPPSHSFLNCLAEVLNVYDVNARENTERSCEMTQEPLIGGLQNIMAFPGGGSAALLRGYAGFFRGEGERWAACTFPGVWRAGRPPRVPFPSCVAHAFFLLMGNCWGVSLPVLGGLGRVGEPWWGGGRAGWDWVRGAGGCRLLICLAVCGICHRGGLTGASHTTCRAPGGQRWCDNQSPMMSCSWTKYRWRGWPMQGLGVRFTRTSCRGTWLHSVAQQGFTKWTLHVTWAERWSRDWVGVSVARCGVRGRGSRASVLCTVL

SEQ ID NO: 943277 - protein, 128 aa, Homo sapiens
  misc_feature (22)..(22): Xaa can be any naturally occurring amino acid
  misc_feature (112)..(112): Xaa can be any naturally occurring amino acid
  misc_feature (114)..(114): Xaa can be any naturally occurring amino acid
FFLNLDILVRLCQLSLFLPFHXSIWVIPFNGELQVTTVTISSTTPRFLKTMASAPKQVVYDFQIGPGFLLEEFLFGAVGGLFGEGFGVGWFLKAHWKGGICSASRSDCYILXSXAWGAKKKICVGALC

SEQ ID NO: 943278 - protein, 154 aa, Homo sapiens
MVTRGSRSNRAMLISWQGIFHNAPEGWRGRDSIRTEKGQRGACAVLITQGSWQARDDRQPEQCWNKDSHPAPLVEQLLVMGSSTSAPPPSLQEMFCIGPMNSVFLAWRCLDEGRGQGIQVGMLQLASLGLPNLEFTWGQGTPQSHSPSCQRRRR

SEQ ID NO: 943279 - protein, 157 aa, Homo sapiens
RRRGEFFQNLTERKETNGSDGTDGGRGGGGEWEPGGLPGVGEYIAIWDEFSSAPGKFLLLKDAFEKIVSAYNVRNFSNVKSPKPKFVMWDGWLGSRGGWAYEVVAKSTKGGGGGLRDGQGDGVEFVQPPGLTGEGEAESVDDLSNSGGPSLFASPFT

SEQ ID NO: 943280 - protein, 137 aa, Homo sapiens
MPYKPPVAVFRKHARHFLKASQPRGWQGKEDCKESECCPQVEGNWANSTFEANKEPGSPGTLSLCIHCPRVASEVQLLPEMEGEEQTWEHQRDRADGLTLSSGGHTQGASASSVPPELYQQRGVFQPKGAVSKTNRF

SEQ ID NO: 943281 - protein, 115 aa, Homo sapiens
  misc_feature (21)..(22): Xaa can be any naturally occurring amino acid
  misc_feature (44)..(44): Xaa can be any naturally occurring amino acid
  misc_feature (51)..(51): Xaa can be any naturally occurring amino acid
  misc_feature (55)..(55): Xaa can be any naturally occurring amino acid
  misc_feature (68)..(68): Xaa can be any naturally occurring amino acid
MSNNRGGTPKHKAPREPQAGXXRSVLGPISSSQSQGQHRGQRVXVSLALVXSFLXSPGNVLGDSGEEXLREEDTQLQKNKQPLAQIYTGKAEVVLMTRDTSDQSLGSQEAHSMCL

SEQ ID NO: 943282 - protein, 248 aa, Homo sapiens
  misc_feature (125)..(125): Xaa can be any naturally occurring amino acid
  misc_feature (127)..(127): Xaa can be any naturally occurring amino acid
  misc_feature (130)..(130): Xaa can be any naturally occurring amino acid
  misc_feature (132)..(133): Xaa can be any naturally occurring amino acid
  misc_feature (142)..(142): Xaa can be any naturally occurring amino acid
PGLIEFGAQEVRPPPAGPGFRGGKAGSRWVFKSFPGAGFKKFVGSSRVKLGEAGRNPRRGPGGGGSPGRRGAGVGSGPYVLGFTLFGGGGPLGIFFGFADRCVFFLNTSEFSGFRFIPMSAPQLXGXFRXPXXFMFGFFFFXFDCLFLAMSSVGLSWQPFSTKRILSPCDTCLSLGSRRCQQLSEQAKRNDDDADGPNDHQHHEERAYSLRTWLARAWQLLVLEYFWMPISSRLLRMSPSMEKDILSG

SEQ ID NO: 943283 - protein, 102 aa, Homo sapiens
GCRHRQILVKPEPCLHRSGQCHEPFYGTRCALNHHVLAFCSSAYGAQFPSADAQSPSYDERLPLHGVFPKLPVVLYSVLYKDTVAQGLISILHPKDISKHNL

SEQ ID NO: 943284 - protein, 133 aa, Homo sapiens
  misc_feature (25)..(25): Xaa can be any naturally occurring amino acid
  misc_feature (32)..(32): Xaa can be any naturally occurring amino acid
  misc_feature (34)..(34): Xaa can be any naturally occurring amino acid
PTLRPPHIPYLPVTCGYYCCASWRXWGWGGGXWXGVGLCVGGAAGEPFWGFFFLLPSNGFALGESHYLGLVWVAAAPGGRRSLSGGDACVEHFCTTGEGGGHSRVRLLRGPLIGAGGVSIKFFWVVLLLCICW

SEQ ID NO: 943285 - protein, 135 aa, Homo sapiens
  misc_feature (47)..(48): Xaa can be any naturally occurring amino acid
  misc_feature (96)..(96): Xaa can be any naturally occurring amino acid
  misc_feature (120)..(120): Xaa can be any naturally occurring amino acid
  misc_feature (122)..(122): Xaa can be any naturally occurring amino acid
  misc_feature (134)..(135): Xaa can be any naturally occurring amino acid
HGLQISPRIPLITRYWARPHCLCLPSHMGAMASLKGEATEEEEGAWXXTGEDGSSKEGCEQSQDEASGASAEDTCSDDVVLLDLLSQVKAGKEEGXQVDGLEPALQYHLCYSSPNARGLXEXVTTEASSKVHVXX

SEQ ID NO: 943286 - protein, 127 aa, Homo sapiens
MPSRLQVYTTAVPASQQQLHDARLVLTLMPKSLRTRVIDGQGPIQVANSCQGITLQKPKGSTELASLSSPSPKLGWEATVSGLKTPTTLPAGALTSLGWQSTEPVRIKLAILVGSNTGEWALVTLSP

SEQ ID NO: 943287 - protein, 76 aa, Homo sapiens
MRQEDGHWGAGWSLAQVLLIALDGLLDAHSNVVVSHWSSREMESYSFTDSVWLSTFCSSWASSNFFINLHSRESEK

SEQ ID NO: 943288 - protein, 267 aa, Homo sapiens
CWERGGCGGLCHVSQMRGVCQALEAAGLGPGPGRGLRVPGGGLACVCWGGGGGGGGREGGSLGLGAGAMPFLEPPRTQLLQGGFWVPGALGVLGGVWEEGLALLLTRGGGGGPCIPCLPQSQGHGRCLRQIMGCPRTEACLSGEAVTGFFPDRVTLGFLRASAPVAFQIIHWQKHHFLHVVFREVPNAERKGGVAGARLYRYTEVTLYKAGEAWGSLRWPKAVAVLLKWAAPTQGPHLPTAPESRGERPEGGPGLPCPGLRTRDVCL

SEQ ID NO: 943289 - protein, 97 aa, Homo sapiens
ANIPLPKNNIETGNRYLSNPPAGNSQNPASSQHHKFDKVIFVCVSYTGYPPPVHVPLLQKPINDIITFHVEIQKFQRAIPPSRHPPPGSPVAKAPPI

SEQ ID NO: 943290 - protein, 167 aa, Homo sapiens
MISGFTGEIKPRAAVNVPSQVPELAPGRAVRDQEEGLPGLKAMILEETCGAEREVEVVKGSEALEGWATPPAESSIEDWGVRGWGGRGSQLGSGWGLCCQSSLLSVTEGGKSPLLFSFTLLLVLLPLLLFLPLPPGCLLLPFPCSLLCLHFWCQWSWHLEDFKYKTL

SEQ ID NO: 943291 - protein, 263 aa, Homo sapiens
MGNWYSSPSSSPSPSTESAPASSWCVVGEGGIFTGVCEETFLHPLTHVPVNKGTLGIHQDKLVVQESPGLSNGCGVAQHAHSSLYLGQVSTRHHSGGLVVDANLDASGAPIHKLELRLALMVRNGSIGIFGNHVTTVQQAASHVFTMARVTFHHLVGWLKASIGDLCYRKLFMVGFLSRDDRGICGQKEVDAGVGHQVGLEFCQVNIQASIKSQGSSDGGHNLANKAVKVSVGWALDIKVSMTDVIDGLIVYHEGTIRVLQGG

SEQ ID NO: 943292 - protein, 74 aa, Homo sapiens
  misc_feature (6)..(6): Xaa can be any naturally occurring amino acid
FCAFSXDLVTLQAPPLFFSTFLMKPKDTVCIMSRTEKGRKEEYWEKLSTHMGFPETISTMAASPDFRYLGLSSS

SEQ ID NO: 943293 - protein, 114 aa, Homo sapiens
  misc_feature (2)..(2): Xaa can be any naturally occurring amino acid
  misc_feature (87)..(87): Xaa can be any naturally occurring amino acid
  misc_feature (101)..(101): Xaa can be any naturally occurring amino acid
SXNDRHKISGIRKTQKAVFHFVQILSPGIKCDIQLLPLLFSKCPMCAMTDNNFSLGLINFPVHHFTTYGVNAKVLNIISTNQKSLLXCVKRPPPIFLCHAXQAQAPHFPHILCM

SEQ ID NO: 943294 - protein, 188 aa, Homo sapiens
  misc_feature (138)..(138): Xaa can be any naturally occurring amino acid
GLLSSFCFLFGAGSSLAGPSSAGGGGAWGGALGGAVGPALGAVRPFFFFLGLFLVFWCSFPPFSVAFGAFGAPAFGFLPLLFAAGCLSPFLCFSSFFLFPLLLRPPFPPFVPRPPLLLLFRSLLLFPSSVVGHLPQLXLPAFFGGGGGGAIFGSSPYVNFLYSRLVLPACSSCFCCLLAFFELMLLRL

SEQ ID NO: 943295 - protein, 68 aa, Homo sapiens
TRALEAAVGAHGDTKQGHKYSNYELLTYIYFFHERRILIVLVGGDLIRNCSIGFLCCHFIFINTSDLA

SEQ ID NO: 943296 - protein, 140 aa, Homo sapiens
  misc_feature (3)..(3): Xaa can be any naturally occurring amino acid
MVXGFGFVFPLRSEQLLEWRDARKWKQTPLSLQGWRVKIAVLPGMADGAGYRDALVLCLGGQPQLHLGAPTPPTWKRQGFHLSLAPACAAAAASGRANSACSRLPQEQRGSDAQLQFGVAVSPAQEGGAPACSIEQNGWV

SEQ ID NO: 943297 - protein, 261 aa, Homo sapiens
  misc_feature (131)..(131): Xaa can be any naturally occurring amino acid
  misc_feature (137)..(137): Xaa can be any naturally occurring amino acid
  misc_feature (183)..(183): Xaa can be any naturally occurring amino acid
  misc_feature (187)..(188): Xaa can be any naturally occurring amino acid
KTPHEPQGGDVLSREQHQRLQKHSSDKQNNSLRTFTCLSQSPQSNAGGHREGKGAGGLFVDQGACPQFSHAHNSAIPSRGLLTKYKTTERAKMGKDGEGDGNTKEHAATDTQLALLGGGIWRGWPPIQFVXPGGSGXGGRGGGGEGHGRGGMGSPTWARGAEQGFEREGTLCQGSRCTGLSGXGSHXXPGCAFPGWHKTKGRGMLPALPGTVLERKFKIPTAQPATQEQHEDEVAPTGHLQRGQDRGHRHNQKPRGKGLKV

SEQ ID NO: 943298 - protein, 260 aa, Homo sapiens
  misc_feature (29)..(29): Xaa can be any naturally occurring amino acid
  misc_feature (44)..(44): Xaa can be any naturally occurring amino acid
LGNFFVLGCPILMPFRPFWNPFPASFAWXASLSIGGTFDAGVAXDTAPCRRVESVSGGWYTGVIAGETSVFVVFFFESLGNRAEGSENPLGLGQGWLESPLGPPGAVVEESTGSGLEERKPREDTWYTHRLGPASIRSPQAPEKVSQFLVGLGARSLRLGRGRVPAVVTLGNVPHMDIHGHSLGAVSRAIRQMQSATLVPTPGRMQRALWASSYEDSRSCCSQAEPALFFQDGSGTGTHVTGTIAQAQLPEMSLHLLASQ

SEQ ID NO: 943299 - protein, 147 aa, Homo sapiens
MSHTAVFTLLGIHSTKKLLFLFCTLSISSSTSFMDMRPRKMAATVRKRPWRGSQAAIMFLESNICWVSSGTVSPRYCWLPRLVRGAKRGMKKCKKGKDTCSPASLRRSAFSWAGKRRKVVTPLLVADTRWFDVPVVGGGQLQGAEQI

SEQ ID NO: 943300 - protein, 254 aa, Homo sapiens
MIWPYGHLPDSDDDSEVSVEEDELERQALFDFIMLLPEAQKIQVSDLLNVIYGVVGAGPAFFTYSRPWPAGPSRWCYLKKQIGAPSGGAHRKGRSAFTFPGLSVPAAPRVGGARSCLVRKSALQCLQVMFASWCRFRPFSHCFKEILETSYFVKKRGLVGSQFHRLCGKHGAGICSASGDASESVTVKAEWEQACHVATAGTRGRGRCCTLFFPFLFWRRISLCRPGWSTVARSRLTASSASWFHAILLPQPPE

SEQ ID NO: 943301 - protein, 270 aa, Homo sapiens
WRSGGPGRRPSKQRCWPCGTRARLEPWKEETQDPRLQGPGGGARDPADEAVEEAGLRQVVIFVVFEYVGAVTQAVGGDGVHVHVAAQGQLGGYHVVVVHGVRRFVQFVVARYAVRDYTKDSSACLRAPPRGMRTMALMACTTLAHVREGVQVLCGLQRLVDGREGVAQREGHLLLAGATKLQQRHACVERVVVPPGQRHRPRHLLHEAPGLVEVLLTQPLGAVQQEDDVHGPLRALCHGQLCLAGKVWAHDLRVRAEDVLHVIDELLSDQ

SEQ ID NO: 943302 - protein, 128 aa, Homo sapiens
VSCDERMVSIESPFNLLSRLGRKEQDLGQTNEDAETPCTPPLDLPPMWLQSHLLCSLLGCFLVKGPEGEGDGIFRNQNEVECSAHIAEVLDFNSEVLQHFDEEDGHFYSAIRRPPPCRTPQPKPKFRK

SEQ ID NO: 943303 - protein, 93 aa, Homo sapiens
VYYSVRVHIVLLGCLTIKKKNSSRRVCALCGVRVALLIAAASVRGECCCASFVALRVRENALLGFGPFGLCCVAVLFSVVAVVCERLILEKKY

SEQ ID NO: 943304 - protein, 246 aa, Homo sapiens
MGTGVTVDTRVGCLSTSSHYANRAADTFRCLCRKRCQKLLKSGRGGVKKSCISVPHKKAVSGFSSCERHFRALGSVAARRLCVAPSFFTCSVPPTHHSSDHSSDDHNCYGGQASYNAHDGDGGLGRRLSSDDIVLRQPLMLYMACVSLLFSRLYHHSCPLLEGSISCWSGLHKLSVLSLVLAITLPGQCDLRRVDTQGPAPQGGLMVRYGVVGACVFWGSARSSLFFPFSRYLRITPRTRPPGRLS

SEQ ID NO: 943305 - protein, 286 aa, Homo sapiens
  misc_feature (5)..(5): Xaa can be any naturally occurring amino acid
PAPDXNPLPPPGKARRSRCGICSWEERGRGGAELGAGVFANINTCVRTGKFSSTHHPSTFRFLPLFVEEEGAGAPGTGWLRFIASSGCSPRENSAAHCRRNDIGVPPDAWGSLVYFPGVGVYTPALPTLPVKKYLALFDVVQAMFVTVSDVQGVEVLYMPPLIWEVHGGDPLQDLVQFLLEGSAGRGWSQLLGLLQAKVMLATLAHLPVLLSDLLPEHGQLLHTRLEGLPASTASPAQHVHGAVHVVLHQASFCVVIAIVCYLLRAGAILGVPALLTSALAHDQRL

SEQ ID NO: 943306 - protein, 163 aa, Homo sapiens
  misc_feature (32)..(32): Xaa can be any naturally occurring amino acid
  misc_feature (47)..(47): Xaa can be any naturally occurring amino acid
  misc_feature (153)..(155): Xaa can be any naturally occurring amino acid
LWQFLSGIQNQFFRSLPLRDVQIGWGAECYNXGGSTGEQCRAKAGQXSELPGDHLGCGVQSFARVWFWDDAKQEEERTDKEEGGGTLYTVKKLSLYLRGSRRFGAKEGDGEASFRKWAPAAVGPEQEDWQLSTLEQSSEYVQARAVGSYVGWXXXSLFCGRTF

SEQ ID NO: 943307 - protein, 218 aa, Homo sapiens
MVLVPYFAFHVGTGLTVGFGSPGLVGALQVGVVVGCSQSKVVVFGPHSTPPVGGIIAMNLAGHKRSWKLLEELKQKGIQRYRMSARMSSRGPKRVEVGYSSQSNKRKKTEKKKNNNKLQLRLGPTHHPNEPLKGPGLQLYCFCVVPKVCKDSSSGAQCGDPGSLLPPVKNQWANSAATSASPKCSASRVTHGHPVPPNIAGPGAARLLKGVKPGGSHP

SEQ ID NO: 943308 - protein, 105 aa, Homo sapiens
MSSSQGCRNSPNKTTRSGGPWSWPLLKPPRPPPRPNPPLPPPLKLPPPPPPPPPRKWLLLPPRLKTPPPPPRFKPPRPPPRKDILSPPGATCPSGPGLAHIPGIP

SEQ ID NO: 943309 - protein, 170 aa, Homo sapiens
MGPYRSGRFRRWCCTKLWPGRGSSEHLIRSRTCEVSTLKKLLIVLKVQNPRLLLLLLLLQERGLVTLLLHLILGSIAATWAHGHSHVPLWGQLIASAGGGCIWGVSQKISGLLEFMEGQLVGRCHGRSGASPHPSLATNCTHGGLNSSSLPTGARRPPSTEATWAGIRGI

SEQ ID NO: 943310 - protein, 114 aa, Homo sapiens
  misc_feature (21)..(21): Xaa can be any naturally occurring amino acid
  misc_feature (52)..(52): Xaa can be any naturally occurring amino acid
  misc_feature (71)..(71): Xaa can be any naturally occurring amino acid
MAPPREEECLNFIRVKLEKKXWAWVSLPWVSAKTKPSFSRSLLFPPAPTPRXGSPILPWHPPGSLSGNPAXLCLPSLSPAFLGVWGGGGSPCWAPSAFFRPAPAALPFSPSLYR

SEQ ID NO: 943311 - protein, 108 aa, Homo sapiens
MRREEKGHDPKGCPVQKRRGESPVKLPLSQDSSLSRCTGRANYNGPILLGQVSDYCRGEVEITSLERAQDHSVGDIPSRGNPVPFDIEHSRHNAKVFWREGIIREFHV

SEQ ID NO: 943312 - protein, 158 aa, Homo sapiens
  misc_feature (18)..(18): Xaa can be any naturally occurring amino acid
  misc_feature (103)..(103): Xaa can be any naturally occurring amino acid
MGGASDNNWVSSRRGSLXTRSMLIIGLGCRAQWKGRLRTDWGVGGQGMATEGSCVGTFQTWLHILCGTVFSSLLDQILQKENNSRTESYIALMMRNRDVQSWXSNQYQANSAISWFGREEYLNRNSLHCFHVGSLRSRSLVTMSSPELSSCRGQMVWM

SEQ ID NO: 943313 - protein, 307 aa, Homo sapiens
  misc_feature (87)..(87): Xaa can be any naturally occurring amino acid
KPALTHPGSLCIDLLAADLEKSTNTTSPILAPVGLLLSTHCIDCIIWTKMMTHLKEETNADCLSKNGPSWQEKAHCIHRIENDRSSXCRSATFHFFCLLTIKKASVGEAVSTEQTKWQLMILFVLFLRPSVLIRHPGESLRGRHEVQLMPLPMGIFFGDDCDHDIFVTPAGHHVQGAFSFDDVADIIGGDHGLSIDADYEVVFLETTSFCWGIRNYFNYYAPEITSGKSRCRSFSSLALLDVSDIIRIPIYFFLVMAFPLACRSWDSVRNFLILSDGIAKEIPAVTFKVLIPITSPSRFTNGPPEFP

SEQ ID NO: 943314 - protein, 105 aa, Homo sapiens
MSVASCYFLSYLPYPSAGHSRGSERGVKQQAGADWVELGQGELAVLGRDPWWGLRLDPGERPPRAGLHTCACGLLQLAKPGTTLSQSTLAGVSAPGQWQMGALAG

SEQ ID NO: 943315 - protein, 117 aa, Homo sapiens
MARKKKEKQNKTGGGRSCLESGQWLFSSLCQSRTRYYLHRGTHRCPSQILQTVVFNILWFFVRFPFFFEVGSRSVPPPGAQWCLLGLLRPPPPWLKGFSCLSPPKYLGLQAPATTPG

SEQ ID NO: 943316 - protein, 173 aa, Homo sapiens
MREWTSPSDACSCRPGCPARVAIFNTFRTPSLVLAEQLKVAKGTVVVRHVPAFLRPNGLLLFLGQLSPGVLVLPEVLLFDHQDDGHVGADVLNLWGPLLRNVFQAVRAVDGEAHEDDISVRVGERPQSIIVFLPCCVPQSQLHLLAVHLNVRNIVLKDSRDVDLRKLILAEDD

SEQ ID NO: 943317 - protein, 244 aa, Homo sapiens
  misc_feature (13)..(13): Xaa can be any naturally occurring amino acid
LTLLSAGHVMGKXLPVFLPGCRGGHWSATPSRFLVVGRRGGGCLQLCGQGGGSSLLFQGLCVPHRAYYAQPGPTCWHLPILGCGLLLLWLMGDQDSVSDCSFLDTKQPQNTFLHTVMAAGKLKALLARLKALDRDTRYILLPCCPQRPQGTLCDHPLSSGPLNPAPPYCWAMKRTGACLKGPWFGGSTGEEDEENKKGAGDLAKEQLQKDRRARALEEAKAAAEGSQLSHERPTAVMFAGADAE

SEQ ID NO: 943318 - protein, 273 aa, Homo sapiens
  misc_feature (17)..(17): Xaa can be any naturally occurring amino acid
  misc_feature (37)..(37): Xaa can be any naturally occurring amino acid
  misc_feature (76)..(76): Xaa can be any naturally occurring amino acid
  misc_feature (95)..(95): Xaa can be any naturally occurring amino acid
MTWAALLASGRGDYLPXPKEVRGAEGVRKFLGCFQSXKAKAEVELGWSGSKEGFIVPFKADGKSRVGTRLDVLPWXNWLLEQGPKPAVFFSKNPXGSPIAKWVEKSPPEAPSAEKPPPNQSHPEDLLAAMAGVMLGGELGMEEDGRKEHASAQMGRWVELPCPQDWAPLGPNRAVLRKICRVGLCSSVEARAQLALPRLAPGLAPLAMESFVCSSCIPSSSSPGLRLSSGAAMVLGRKLCACRTREQKAVMDGMRLADFNLQEVSVRVVAGGE

SEQ ID NO: 943319 - protein, 110 aa, Homo sapiens
CDFFFLTKNNLSYGSMFNERKVRPNFSISVSQIIRPIILALHYDTIMALRAQVPLGGDGASYVFIFGGGPPFGGIGIPLIILLYCANDFSPTRAASSNFHFGKLSRHETE

SEQ ID NO: 943320 - protein, 107 aa, Homo sapiens
  misc_feature (22)..(22): Xaa can be any naturally occurring amino acid
  misc_feature (28)..(28): Xaa can be any naturally occurring amino acid
  misc_feature (52)..(52): Xaa can be any naturally occurring amino acid
LGPTCPTQKWPSPGGLGDRGGXVGGAPXFLVCWGVGAHHPLLLPSSGLQEGXQLKSRACGFSTPLPPRLEGALRDGRRGGGQRKDVDQERCEPGVRAEGESKIKYQF

SEQ ID NO: 943321 - protein, 132 aa, Homo sapiens
  misc_feature (59)..(59): Xaa can be any naturally occurring amino acid
  misc_feature (82)..(82): Xaa can be any naturally occurring amino acid
MSCTCANQKGMGVSEEQRGLQTLGFSEFRKGGKIVSPGSKTQDKKGPPWTAFYIANAGXGAVGGPFVRGGAIARVVVFEAFXFLLGVLLGLWVGLVLPWWGLLGWLGQCVAKLSTKCGSINPGDGTFEPGSP

SEQ ID NO: 943322 - protein, 134 aa, Homo sapiens
KTPYGHNPGSSTMPELKTSYEWYWGFPTKRPGEDLGPPSALPPRWGACSRSDWERYCPMDLSTGNSQRQDTMQDMDKMNTPSLLPPGLRPPASPPPPTPSPAPAPPPAGLLKPPPPLAPGHPRALPPPSLLPTT

SEQ ID NO: 943323 - protein, 260 aa, Homo sapiens
  misc_feature (196)..(196): Xaa can be any naturally occurring amino acid
MVYTKAVPHFHNFLMDIVFLIVLLHGFGYCHLKVFLGDMDSPFSEGINASICAHALHFSPCCCCDELSNFSQVDAPGVVHLPRMNVQNVQPGLLIGGWEFNFSVNAPWAKSAESRISILLVAMITLMFLVASKPLSWLTNSSIVRGTSLFPPEPPSSSEELMEWILSMRMIDGACARAMRNSSLTIFAPSPMNFCXNSEPEKLNKGTVRMKSPSPGQQCLPSAWRSIQQHSLGLSNAQCFEELRMLKRQLDHFFDLLDLF

SEQ ID NO: 943324 - protein, 169 aa, Homo sapiens
  misc_feature (28)..(28): Xaa can be any naturally occurring amino acid
  misc_feature (34)..(34): Xaa can be any naturally occurring amino acid
  misc_feature (70)..(70): Xaa can be any naturally occurring amino acid
  misc_feature (125)..(125): Xaa can be any naturally occurring amino acid
KAAKKHPPPPPAPPPPPPPAAAAPRGRXRGSTGXGDQLAGPGPQLPGGWAGREEGGGRVANRGGESAGAXGATRAWGQGARGLGAGGGGGGGGGWRLEKDTDQSVCRPSPSLSSAFSHGVALNKXLPFPGSSFLIWEMSESRDSPKSLSPVRIYDPLNKRHNFNLDIPY

SEQ ID NO: 943325 - protein, 158 aa, Homo sapiens
  misc_feature (110)..(110): Xaa can be any naturally occurring amino acid
  misc_feature (116)..(116): Xaa can be any naturally occurring amino acid
TSPRSFPRDALVPHDQIVEEIRHQVPTLARGFHLLLLLLLFFFQFFFLYVAQLELLMPPAWGMDSSRVAQPLEGSTTSLGAPWTEGDVLLLLWSCLGPWPTGAAVDGGKXGALDRXSGPGGGGGGGGGGVSTPSCRSALRGSATSVWKVGSSGMVPGE

SEQ ID NO: 943326 - protein, 120 aa, Homo sapiens
  misc_feature (7)..(7): Xaa can be any naturally occurring amino acid
  misc_feature (41)..(41): Xaa can be any naturally occurring amino acid
  misc_feature (59)..(59): Xaa can be any naturally occurring amino acid
  misc_feature (64)..(64): Xaa can be any naturally occurring amino acid
  misc_feature (69)..(69): Xaa can be any naturally occurring amino acid
  misc_feature (73)..(73): Xaa can be any naturally occurring amino acid
  misc_feature (77)..(77): Xaa can be any naturally occurring amino acid
  misc_feature (79)..(79): Xaa can be any naturally occurring amino acid
  misc_feature (81)..(81): Xaa can be any naturally occurring amino acid
  misc_feature (83)..(83): Xaa can be any naturally occurring amino acid
MSKATSXCFQNAYAIKVGITSFKKPDYSRLLIFHIKVPLFXCFVQLRGPGNLGGSLIRXGGHLXSPGPXVQKXMLGXRXRXQXKGFMASSQETVAHASRALSSSSRRHAKGRLKDLQCIN

SEQ ID NO: 943327 - protein, 146 aa, Homo sapiens
MPLSGGLGDSSPRTKYIGNTNFKQKFIILGGDHPSTHDKNIWLARGERDLEGFGDLGFMASGEGAYAHSMHIRIHSLLGHFTRSLENTAYVHIKTKISKSCSNNFGPSVMAIWSHFPNKKTLPATFTFHEFMNPLDRRCYLFTFSK

SEQ ID NO: 943328 - protein, 85 aa, Homo sapiens
  misc_feature (6)..(6): Xaa can be any naturally occurring amino acid
  misc_feature (56)..(56): Xaa can be any naturally occurring amino acid
  misc_feature (67)..(67): Xaa can be any naturally occurring amino acid
SEIPQXNLRQTERSHLPLRTLPGLAEGKNPEAFSTTARFGISLALRRTPSLSPCWXGVSLKDGYFLXKSMNLGFNFWYEVGEYRE

SEQ ID NO: 943329 - protein, 119 aa, Homo sapiens
MGVACGSVGMSLELSWIIEVVPAGALRGHVVLGFSHHYSWESCSLTRAVLGGVRSSSGVYSERARGRLARQPPPAFSLAGSWSHPLGLRGEWPPHSSSRIGVRAGPREGRERQSSSWRE

SEQ ID NO: 943330 - protein, 178 aa, Homo sapiens
MATEGIPHFWVFLPGNFRAQICIQEEEDGSASEGIFQWDLGGQCAHTSLGERGQSVVKLMTSNQSGGGLNDLVFGSLYVKEFGARGTGGVSLPEPSEEEVVCVGCFQDLFGGDHNKNGFKMFDSSNYHGQDLLFKDATVRAVPVGEKTTYRGWLGLDYVAALEGMSSQQCSGAGRTGP

SEQ ID NO: 943331 - protein, 187 aa, Homo sapiens
MAWGGKKGKKGKRGKKIDHWDEGGEEENGKYLHYKDLLLEPGCATKLLMDIRKLNFYPLLHEAPICVGSAPGAHYLEDMMQDSAPSFGTVLHKERENVLLEGQEKKRCPHTSLTLRSQVRSLVHSTLHRWLGHSIREAVMVTKSSKLSRMLPCTAVSFSRKGSVSTCSWVHTWMKRSSCMAGLEERG

SEQ ID NO: 943332 - protein, 69 aa, Homo sapiens
QIEFLRSGGAMILIFMVLGARAVVSFCIGSAMPGYIVVPPDEDIVSIEVLPDVNITFDDVVVGGFMVVS

SEQ ID NO: 943333 - protein, 226 aa, Homo sapiens
  misc_feature (27)..(27): Xaa can be any naturally occurring amino acid
MPLFHWFTHMISRVHEKLKFLLKIHAXDPIRGVVTLQTLYLLGAWPPGVLQRAPNTISPLISVTNVGGDLDGGAGGTGGGAFILLGGLPSIPESLFCSLEKGGWGGGAQSAGAAGTPYGTSLQGEGRSVLAAVAHMACLHCNHRLGCSQDLVSLEDRSDVWAIQSFRPCLKLVSYVNLKNKMHFYPDLAPRTGTTGPRQIRSFPSTDRCVEFQPPLLIRFHSDPVL

SEQ ID NO: 943334 - protein, 129 aa, Homo sapiens
  misc_feature (2)..(2): Xaa can be any naturally occurring amino acid
  misc_feature (64)..(64): Xaa can be any naturally occurring amino acid
  misc_feature (68)..(68): Xaa can be any naturally occurring amino acid
  misc_feature (70)..(70): Xaa can be any naturally occurring amino acid
  misc_feature (96)..(96): Xaa can be any naturally occurring amino acid
  misc_feature (101)..(101): Xaa can be any naturally occurring amino acid
  misc_feature (103)..(103): Xaa can be any naturally occurring amino acid
  misc_feature (108)..(109): Xaa can be any naturally occurring amino acid
  misc_feature (116)..(116): Xaa can be any naturally occurring amino acid
FXWEARKTALSHGGAHLTGSFAFQEQIRGKGKTAPGQGLPVAAVGESARQTRQAFSPPAIASRXPVRXPXQTNTIRLGLHCKHSVSYEARLYFRFXSGIDXPXIVAQXXVQRSFGXKSSGPVNPSKKED

SEQ ID NO: 943335 - protein, 116 aa, Homo sapiens
MYVQSSTSSGLPNTFSMKAVCTGPHSIRLKLLAGEQRVEGGGRSEAQAQPHPSPAPPRPGPDREQTAGWEVRRKALEDNKNLNAGAAEQPPNHLSYREPGVRFDLRVLALCDLGSN

SEQ ID NO: 943336 - protein, 263 aa, Homo sapiens
MGSLNWAQLQLVEDVTFDDFSDFPWDTRLFGGARRNHSDQEPSYTATSGFAAEVGSKGHVAGGDSLGERGNERLREIHLLGLEQSTELFWALLEAILSEEVHERDVDGTTDMARVQFYCIRLRLGAQEPPLRPWIHQLEPLRFKVLQHLLVGLEQGAGASVALKTAGSGREGSDVTGWPSFSQYRKPPLSTDTVLVAKHTEHPPDPGSIEAAQVFTIIHHHVRFVAGAQEAHILGEEAIAGEHHLVGRRRVPALFYVKERGGR

SEQ ID NO: 943337 - protein, 295 aa, Homo sapiens
  misc_feature (293)..(293): Xaa can be any naturally occurring amino acid
AGGRGGRGAAAPRRDPPEAKAGGGQAGGCPGSQAKPRAPWSSTRGPDTPTDRVERAQAGTTPESIEPPWGRAVPGTRKGFPSSVRLSTPGSPSGGGALGRLWQRRASTLSLAGSPLGTCASPANDRVRECRALDHMHLGAPGFTGARKVVAEVKAVGLHTCRRAVRAHACGRLHSCVAHARFWMAGNLWGQRAAISPRSPSPGLSDRSRLVRAGKARTCSQEKAGEFAWAMLSTLRPGLSHYCSSASQERPVAHDTLRRRNRESASSVASRGSGGMVPVIFRSSSVSSLRREXAS

SEQ ID NO: 943338 - protein, 139 aa, Homo sapiens
  misc_feature (1)..(1): Xaa can be any naturally occurring amino acid
XRGWGGIQSNLEGVLVLTTWKLERRGGGGWWVGGLEGRGWEWSGRRGGGGGGGGGGGEEGWGGGGGGGGVGGGGGGGGGGGRGGGGGGGGGGGGGGGGGREGEGGGGGVGWGGGGWGGGGGGGGGGGWGGGGGGGGGGG

SEQ ID NO: 943339 - protein, 150 aa, Homo sapiens
  misc_feature (118)..(118): Xaa can be any naturally occurring amino acid
  misc_feature (120)..(120): Xaa can be any naturally occurring amino acid
LLLGLGGGEGGLGGCGVCCVWGCAAVSSYATFSGSAPHLFDFFFFFDVFLLFLPFLRFFRGRGRRGTVIGAGTGTSAGTATLLGFGVGVGAGLGLGGGPGSDISFVPVPGGGSFVGAXPXEEEGAELALGLGFSRSLSCTFKSASIASRY

SEQ ID NO: 943340 - protein, 100 aa, Homo sapiens
  misc_feature (48)..(48): Xaa can be any naturally occurring amino acid
  misc_feature (51)..(51): Xaa can be any naturally occurring amino acid
  misc_feature (72)..(72): Xaa can be any naturally occurring amino acid
  misc_feature (76)..(76): Xaa can be any naturally occurring amino acid
  misc_feature (81)..(82): Xaa can be any naturally occurring amino acid
  misc_feature (88)..(88): Xaa can be any naturally occurring amino acid
VVVMMEQVRGPKYTTVIKMKLLTQGTGQPKEQDVIDDGRVPFSKAQEXPEXPSEQDSHSQQQCRPKVDVQHXVVGXCLVMXXDVVLGXITESITGVAFLV

SEQ ID NO: 943341 - protein, 148 aa, Homo sapiens
  misc_feature (86)..(86): Xaa can be any naturally occurring amino acid
KFVSKLTRTGTGSSCSSLGLSGRGAVLEEEEVRAVWQAPAPYSTGLVWMCSYVGRSVRIQGGYCGLARSILEATLVHIFRLHVADXRAQLVRYFLERVGSTCLPTSSKITGLDYRFIMSIDVSCVLARASSTVSTVPPIKINSFVMIY

SEQ ID NO: 943342 - protein, 268 aa, Homo sapiens
  misc_feature (60)..(60): Xaa can be any naturally occurring amino acid
MFSWSLFWMLWRNRLWAYGAFLSVVHGQSLGIAGSVKGCFFVINCTLGVHLIGKVVFSVXGWGGVWGGGGGGGGGGEWGGGWDGRPQFRLGLLMGSAVSGGLLGGGTALGPTEVLLLLVSRGVEGRCGEGDVGNEEGKLAIGCWYRLGASEHLSRLFSLAAQLCVGAPPGGGAAPRWMGTSGGGGANGACWGPPGPGGGGGGAARRVRLPGVGHGINLGHAVGQVAEQPVRTSVLTPSHVDRKRVTSFMHSLKLARYFPSTLGSVLSA

SEQ ID NO: 943343 - protein, 296 aa, Homo sapiens
  misc_feature (260)..(260): Xaa can be any naturally occurring amino acid
SAQSPEKKSGSDKRDGEVILGSSYIADGLLKANKNTRTAPTPATAATTPTKKPQSAANPAKEAPKNNKQEKKEAAEEGGQPGEATNRAEEKRNGQRPETGQGNRAGNGAEPGEGKNQGHHNASTPAAEPRKTPKRQCRETTPMNIEEPAFVAKPSAEARRNTVTSASPAKAKPRSSSSAAAPMAAAEAPAAREEKPEKKATQAPKNSPPIPAAKGARKSNCAKTRRKPPPPHRPETTENTKDKKAGAPRAEPPPRPGRRXRNEKRYPGLASRLRAQALSAPNAPEAPMGREQVHKR

SEQ ID NO: 943344 - protein, 146 aa, Homo sapiens
  misc_feature (127)..(127): Xaa can be any naturally occurring amino acid
EIPSSPSAHHASVSLQSDPGLPAKAFGCSFLSPAPPGGTVCPSSKATSTGCLCSFSLSSPKSPLGSAQHPTADTVAWAGVLCEEAATCLPGGSGQRCSAGTDGSGLLPRASAWELRELLAKLTKIRXVCTAPAQLLCPLHQRVQTE

SEQ ID NO: 943345 - protein, 272 aa, Homo sapiens
  misc_feature (150)..(150): Xaa can be any naturally occurring amino acid
TFRNHVQVSEEVGGGEPEEKNQPEVDMSDRSISNIQEVNGLFTLSQITQVVLSHNKQTMVPPNIAELKNSEELNFLKNKIKEQPTQISSFEKLKHLNPGMNRLNTLPRGFGSLASPEVLDWTYNNLNENTLDGNFIYMTTLRTPNERKNXFEILPPDIGKLTKLQILSLRDNDLISLPKEIGELTQLKELHIQGNRLTVLPPELGNLDLTGQKQVFKAENNALGDPIADQIQLGVSHVFEYIRSETYKYLYGRHMQANPEPPKKNNDKSKKI

SEQ ID NO: 943346 - protein, 228 aa, Homo sapiens
  misc_feature (86)..(86): Xaa can be any naturally occurring amino acid
  misc_feature (99)..(99): Xaa can be any naturally occurring amino acid
  misc_feature (175)..(175): Xaa can be any naturally occurring amino acid
  misc_feature (178)..(178): Xaa can be any naturally occurring amino acid
FSLVVFSGSRRVPCSRLLAGGWWALGFSSWVPGACFSLGNVFRGDVNTGREIHRAFSSLMASIRRALFVTAVVRKLNLLPFSLPRXRGAGFSENVQPPXATTKMGRRDSLAALSSLVFSVTAKSLPWLRRPPSSLPCPPRRSGSCSLFRQLWGSFAPLRTLAVSGELFVIILAVXTWXLFVLFADGTILAPLGQRTEGISNLSCCLVGHQLAHFTLHGCEGVPGGLLR

SEQ ID NO: 943347 - protein, 208 aa, Homo sapiens
  misc_feature (152)..(152): Xaa can be any naturally occurring amino acid
EDEQSLSSGIQRWTQLGPLYRGHTITVSLDAILGSSGKKLNGRSRKPTEFPGVAVLGMSSDWGMCRKPTVTQATKVIIFNVLVVVKKLLKANGRVPGVALVVAAEAAQICLQVIDPCQGVPCPSAWQCSINDQPWGPDTHGRPMEWISQTVXAAIVDPRGSSRGMVKRRSLGQFLLKRKAAWRSPDVLRLIQSWLEKAVSRAPGVGAI

SEQ ID NO: 943348 - protein, 304 aa, Homo sapiens
MDGNWNENPAGTSRKTQQSVVTVADPTWLPHVLQALHKKLPIQRVAALRLALRGEQQPTLLALVTANVKTWIQSNNSHSVLLTWLRDYGPTAHSAFWGKLPVKIINVVDFFRGIHCVGDAVEVAVTHHAGEDARVVGLPHSPQIRSRMGWEHVAHFSRVATSSPRNMPSSPRRRNAGRELGPACRTHKAAHVKDAIKGHNPSSIPNHIFSAATTLAKVLPAGRVGSCREPASSSAYPAHPLEAGSGALGPVLASSSSSCRPETQQLLFGPGLALSGLQQAPDSLGWERKWGREGQRLRGPRWVA

SEQ ID NO: 943349 - protein, 274 aa, Homo sapiens
  misc_feature (25)..(26): Xaa can be any naturally occurring amino acid
AGSFNHLGTLPRLLFTGWAVPGMDXXGTSAPSSAAGSDLGAGSGAGNFEGDPAALDIFLATSSIGRRWGDGMLQQARLQVDTCRLLGSQVHQSGREEVRLKEGLRVVVQDCFWRGDEQDKMTARGSPGGSSQKSRKFPTVSLGRKKPCRTQRSGNRTLRATFGERSSFSFICASLKALVTKGASSRRFRSLLSWAKRLLTSSTVSSKNSSGSSAGQACSRSSRSGWHTPGSRSTGSRSTGRSRSCSCLGIPLPLLLLLLLGDPGPTWTSFGLEG

SEQ ID NO: 943350 - protein, 108 aa, Homo sapiens
  misc_feature (24)..(24): Xaa can be any naturally occurring amino acid
  misc_feature (60)..(60): Xaa can be any naturally occurring amino acid
  misc_feature (79)..(79): Xaa can be any naturally occurring amino acid
KQLKRSNRKFSQRLGQTQFAMKKXDINEKSESKEICVKKKAKLSPTIETTNEKDKKFKFXKKAKNKKQKNEEKEENYYXDHRTTAVIQNTIISENEEEEIDSNIEKIE

SEQ ID NO: 943351 - protein, 75 aa, Homo sapiens
GGGRKGGTCQKPYDNHPNVREEQPIHQLHFNNFTTLYISLLTLAFLAATAWQSLEPLGGALALQKPGGEKPCWER

SEQ ID NO: 943352 - protein, 220 aa, Homo sapiens
  misc_feature (80)..(81): Xaa can be any naturally occurring amino acid
MHASGTKPYHAPLRHGTREHVNVRPLQENHPQRQQKLTRGRHCHEECWLKPQLPVSLLDANIPKDTAVLLPKQRDHDTVXXRVSLAPSLHQAQHASSPPDPSPETALGATSHPRLQPFNVPIPSPVCPAGAGGYHGDPCVDTDTGERGKGGVSELPTHTLKGQQSLMFPSVPMVPPKGFPNKVIIDYPGVCEEAKHQQPETTKIVTTLKEDELENEQLSD

SEQ ID NO: 943353 - protein, 123 aa, Homo sapiens
  misc_feature (49)..(49): Xaa can be any naturally occurring amino acid
MSRWTVVSRNGGVSRFLCFFLWGLRSAGVGGLGRRLPVNIWTWAGAGAXVGQSWGSRLEKQGPLQTQPWGDSACAPLPSSQNKTMVKNQNRCPEGGTWPLPASQTRAGFKQGGLLEPLPYVWS

SEQ ID NO: 943354 - protein, 223 aa, Homo sapiens
  misc_feature (3)..(3): Xaa can be any naturally occurring amino acid
  misc_feature (136)..(136): Xaa can be any naturally occurring amino acid
  misc_feature (138)..(138): Xaa can be any naturally occurring amino acid
  misc_feature (140)..(140): Xaa can be any naturally occurring amino acid
  misc_feature (162)..(162): Xaa can be any naturally occurring amino acid
  misc_feature (196)..(196): Xaa can be any naturally occurring amino acid
MGXGKKKKQKALELDLGEQQKKRSIIPPCQIKRFPNIWEKNNRNVVGHPHRGTRLEQEEHRGSQMEVGGVQREGGLKKANRANGHTKVLSRTTNVRGGNSHNREAHSPAGPRPKDRRAPPPRASRATTPQNRGGEXTXPXSPEPTLTRPHQPQGPPHNPTGXIHGGKAMLAGKGRGGEARRGEKSKECQPHIKDNXRKFRIAVAKPKTHHPRTRQTKRVSSQH

SEQ ID NO: 943355 - protein, 111 aa, Homo sapiens
  misc_feature (17)..(17): Xaa can be any naturally occurring amino acid
  misc_feature (39)..(39): Xaa can be any naturally occurring amino acid
SPPPPQRAQRRAETQAXSNRRVGQAGQGRQDRRWRQPPXGGDEEAAPQVEGKARRRASKGGGGLLAKPDRERKEEDERCNPCATATGRRKSNSRGAQRKEGTTKKTYKRGR

SEQ ID NO: 943356 - protein, 75 aa, Homo sapiens
  misc_feature (40)..(40): Xaa can be any naturally occurring amino acid
MTHVLHAHAAPDAQHEALDVALIDAAHDAEVAPLAPGWAXGVGAVQYLSVFHLERLLSPSCDLDLSGSMQAVSLW

SEQ ID NO: 943357 - protein, 164 aa, Homo sapiens
CGGLCRGVVRSGIPGVKKAATTGSGVKVPRDFRLLGGLEEGQRGVGDGTVSWGLEDGEDMTLTRWTGMIIGPPRTIYENRICSLKIGCGPKYPEAPPFVRFVTEINMSGVDGSNGVVGPGAISVLAKWQGSYSIRVVLRELRRLMVSKGNMELPQPPGAQCYGD

SEQ ID NO: 943358 - protein, 312 aa, Homo sapiens
  misc_feature (75)..(75): Xaa can be any naturally occurring amino acid
  misc_feature (198)..(198): Xaa can be any naturally occurring amino acid
SILLTIYGNRDLQNKYEDSSKTKECKSTAHRLIFFTLILSVSTKKEGLLIILLKESYVLKGIWQLAFFHPLTQVXVNGGTPGVRRELVFVLFFSGFGNFCGFDQLAHSSLYLGQVSASFHFWRLVIYANLEASWAPIHKLDGTLGFDGGNGSIDIFGNHVTTVSQAASHVFTMARVTFHHLVGWLKASFGDLCYSKLXMVGFLSRDDRGICGQREVDAGVGHRLVWNSVQVNIQGSIKSQGSSDGGHNLANKAVKVSVGWALDIEVSTTDVIDGLIVYHEGTIRVLQGGVGGEDGVVGLTTAVETGERVNGD

SEQ ID NO: 943359 - protein, 190 aa, Homo sapiens
  misc_feature (32)..(32): Xaa can be any naturally occurring amino acid
  misc_feature (35)..(35): Xaa can be any naturally occurring amino acid
  misc_feature (38)..(38): Xaa can be any naturally occurring amino acid
  misc_feature (78)..(78): Xaa can be any naturally occurring amino acid
  misc_feature (80)..(80): Xaa can be any naturally occurring amino acid
  misc_feature (86)..(86): Xaa can be any naturally occurring amino acid
  misc_feature (103)..(103): Xaa can be any naturally occurring amino acid
  misc_feature (173)..(173): Xaa can be any naturally occurring amino acid
  misc_feature (175)..(175): Xaa can be any naturally occurring amino acid
  misc_feature (177)..(177): Xaa can be any naturally occurring amino acid
VQKGEPPGQSKSKDTGREDGAGRGTQHSSSPXQAXGFXASQAGPWSRGWGLLIPFSLLIRIPVLLSLLLTGAAQLFLXPXSRPFTXLGPTLALQNHQLRGLWXGTPRCFLFTVAWGMKTQAEAAVHCAAARDCWLLCTHHSEPPWLSCNHVSLPRLHRCPRHTRGWFRLRGPXAXLXCAGWSKAMQGKFG

SEQ ID NO: 943360 - protein, 140 aa, Homo sapiens
MTLLEADSEVDMLSISKSSQLSDSDYRKSSAENVSPDYAKPAPELPPPKAGATGAQPGPGAKDAGSPENPGGPKLEAAGLLDENDAADVTSGFPNPKAGAEVEIPELVEAAAPNAGELPKPAGLPEEAAANPEFVLKLKF

SEQ ID NO: 943361 - protein, 109 aa, Homo sapiens
MLEMLSSLPHKVGHKFLVVPSHLGSSGTSHACRGVLSGQTMSVLGPGTAKPLLIQVSPRFLVPMGKDDPSSGWYPPSHYPSDALTLHQVPILASLFTNSQRKGWINLNK

SEQ ID NO: 943362 - protein, 121 aa, Homo sapiens
MKGRKRHRYDSVPGKDSPLGPGRGADRRPPVLVWTCAVFVVLLVFFFFVTDNRRTEKQKRRGKKSQEKEKRREAGDHPGERRARDGEKNENGTAARDTGKAANGTSTPGTGDRAHTERAPR

SEQ ID NO: 943363 - protein, 314 aa, Homo sapiens
  misc_feature (196)..(197): Xaa can be any naturally occurring amino acid
GGGGRRGEAGAGKAGRGTRAQPGRADQPRNGEGAREEEKNKGEGEEKEEQAKNRRTSQPKVLGKNNRGTIATRARGQRAKAHAVGGLAGRKQPVMPDSPGEEPGGAIKTEDDNARQEARTTALITVMPVRSKGVTNHPMGKRNGTERVRRNGVGTVAVGRRARRAEESPRMRALQGLPLVNHGRGPGGGMERAHHXXAIAKNFFFNSGGRGRPGAHRQATGGSPQAAKTRKGKEHKGGRGKEEGQTEHEREKGKRQGGGKAEPSRARATQGPRRQGAKRQRGKRKRGRGRLGEKAEEGRDTEKGRAGRKRGKGD

SEQ ID NO: 943364 - protein, 237 aa, Homo sapiens
  misc_feature (1)..(1): Xaa can be any naturally occurring amino acid
  misc_feature (39)..(39): Xaa can be any naturally occurring amino acid
  misc_feature (72)..(72): Xaa can be any naturally occurring amino acid
  misc_feature (143)..(143): Xaa can be any naturally occurring amino acid
XKFFYTIAFMQWFTEFMELFFSVWDLFKTLNLCFVCFSXHKPGQLVPAGPSSQLLCWALSRVLLCSPPPRSXTPPPSWVPPPLLWGLGSGRLVAPVLPVGGFCGPRVGGAVLGVPPFLPFVLLCGFFLCLPAVFPGLHPPAVXASLPLGGFIFFWGLEVASILKKCPQQLLMALGGDQLIGQVLLYLVPLPLQGLWQGWVHQQSVGVADKGGLGRQRVDAGARLGHMGQPVAFSTRQ

SEQ ID NO: 943365 - protein, 178 aa, Homo sapiens
  misc_feature (109)..(109): Xaa can be any naturally occurring amino acid
SVPLAPFVQPSRLVRSGIPGCRGFPNLTTVIQATYGTDATYVGADGGFAPNILENKEGLALLTTAIGKAGYTDKVVIGMDVAASEFFRSGKYDLAFKSPDDPRRSLSPXLLADLSKSFIKDYPVVSLDAPFDQDAWGAWPPFTASAGLPVVGAALTVPPPKRIAQAVHAKSCHCLLLK

SEQ ID NO: 943366 - protein, 128 aa, Homo sapiens
MDSPRGWGQGWEYWGRGRQRNLSKVYWNHSRPSHRGPAQAVLSLSLSLLEAGLAVSLLSRGGWRRIIYACLSGTMLQGPRGGGSSQGRKEEASLYKNTSFPLLLEEALFGFKADVEFPGSRVKEGRRN

SEQ ID NO: 943367 - protein, 138 aa, Homo sapiens
MYTWRYGMITCQLQTHAHCWVTFQVEEANITGVDGHHYYHQSNNVDTQASFHHSFDLAEPIAEDDGIRGIAHRQHHRKRNADDDWDQGVEGVNMQGFRQAEQDGQEDGDGCWVAHKLSDNGHEDACQQGDSPRWEAAQ

SEQ ID NO: 943368 - protein, 187 aa, Homo sapiens
RPPLSPKSKISEPKHPPKQRPAHRPAAFFLTAKGPQGKEPSLEEEKRTTAQAGRQQPRGSAAATGGEGGGQRAGEREGGPPGAFPFPRSQAGEGRKAEGAEGAATERKRGGEGGGQEGQRKRKPGEKDNKLSCVSDVEGRYGGGPAMALSNPRRHRPQIGIAKPNSLRKGEREGRETRERAVLWIFI

SEQ ID NO: 943369 - protein, 257 aa, Homo sapiens
HERTRGDKKAGAGPGRNARESRHHVPRGPPQPQPPPAPPAAGAATGGAGRGEGAGPRHPAGGPREEGGSERDHSPRAGPREGQRGEFERDHDNGTLEEGKKIDSSDERNTLGASGGGGGRRITGMDRGRMGRGGNERRRLIVPPHRGYGSSGLAGRIPPEATLYIEGELLEGGNKEDTGQGSTVLRPPHSPRKAQDGDAVRDHYNGTLLDGTSFDTSDSKGGTYDTYVGSGWLIKGMDQGLLGMCPGERRKIIIPPF

SEQ ID NO: 943370 - protein, 307 aa, Homo sapiens
  misc_feature (76)..(76): Xaa can be any naturally occurring amino acid
MIRGPIPAGKKLSHHSERELSCLEAHFFLTIFMKETSPPPPDAVVSELLSRLLVQLLSLCRGHHPYAPPHATTTLXVLNAPPHAPPLTCTLSLDPLLQVQDCGTLHNNHGHYFSIHLAHSDRHCLAVFYGYLGVAFFQSNLDRQNAEQRVLHHHSQTLLEHSMASECGTPLLRAHLPLAPRAHPRPPSPPGPPLSAGLCRTASPHWEAKRARSELGPAPARPPSHWRAGGDGAAAVTNDKLRDILQQGRERRIALPIGWFVSLEDARINVSPRRAAIGPERQLELREWELRTRDMRCAARLLERLIV

SEQ ID NO: 943371 - protein, 262 aa, Homo sapiens
  misc_feature (88)..(88): Xaa can be any naturally occurring amino acid
  misc_feature (128)..(128): Xaa can be any naturally occurring amino acid
  misc_feature (130)..(130): Xaa can be any naturally occurring amino acid
  misc_feature (132)..(132): Xaa can be any naturally occurring amino acid
  misc_feature (135)..(135): Xaa can be any naturally occurring amino acid
  misc_feature (149)..(149): Xaa can be any naturally occurring amino acid
  misc_feature (154)..(154): Xaa can be any naturally occurring amino acid
  misc_feature (156)..(156): Xaa can be any naturally occurring amino acid
VRNSRDISLVTCPLQCGIMWQLLLPTALLLLVSAGMRTEDLPKAVVFLEPQWYRVLEKDSVTLKCQGAYSPEDNSTQWFHNESLISSXASSYFIESCQSRRELREYRCQKKLFTLSDPVQLEIHIGWXLXQXPRXVFKEEDAIHLRCKXWKKNXLXKVTYLQNGKGRKYFHHNSDFYIPKATLKDSGSYFCRGLFGSKNVSSETVNITITQGLAVSTISSFFPPGVTSLFLLGDGTPFCSGHRTIFLCEDKHSKLNKRLEGP

SEQ ID NO: 943372 - protein, 119 aa, Homo sapiens
  misc_feature (1)..(1): Xaa can be any naturally occurring amino acid
  misc_feature (51)..(51): Xaa can be any naturally occurring amino acid
  misc_feature (53)..(53): Xaa can be any naturally occurring amino acid
XAGKGFRKSRSTGSLEMKPESVRGGGGGWEEVGRGGGSWGGLGGRARRRGXPXGGSPPPGVSGGGRGPWGLLQDGGVRDFSGPEGVGSQEAPAACLFTPGKFLNWDAGILSSRFWSTFS

SEQ ID NO: 943373 - protein, 180 aa, Homo sapiens
  misc_feature (158)..(158): Xaa can be any naturally occurring amino acid
  misc_feature (168)..(168): Xaa can be any naturally occurring amino acid
MRLLRVTLGRESCRSHLIQSCFDLRWGLGEERKGGGEGGGPPPHKTTRAQGQSLGLPFHSIQRDGGQGSKSQGPGKGPDCWGQGGKEQADRERGQGPWAGKLGGRGEERSGGGKGKRIGESQGTNREPQSRPGREELGTIERKSGEEDLEASGAEPLXQGEVIAQELXQKREGPWTGLTS

SEQ ID NO: 943374 - protein, 39 aa, Homo sapiens
  misc_feature (1)..(1): Xaa can be any naturally occurring amino acid
  misc_feature (15)..(15): Xaa can be any naturally occurring amino acid
XVPEVNEGFWFDNWXGYITRSFHQLEREGMGTSPQTTRH

SEQ ID NO: 943375 - protein, 214 aa, Homo sapiens
LHRSRHLSILHNISPAFRVSRNRKESPTVSLTVIQVNQLDVNTALLQGKSSYLKLIGKGVKRLRSALEEEVLFAYEKKPVSPLRISNGSILQSSTCFGVKNSDVALLVQAVTLFLLLRGAPFIRYHKAFICGIQNVYNPLQYRVVFPLVLLANQFNVPWLSEVEIPLFLQVFNSRFQYVDLRQQPSSLVVAVAHTGVLSHHTRASLRSRSASLC

SEQ ID NO: 943376 - protein, 286 aa, Homo sapiens
EAGVILIAGKSGFNVFHPTLYRCIDFTHCPDFILSCSFAWVQCTGPNKQEWARGRHCSLPPNSEQYKAAWGEWGGERNETPKGRRKDSGGEGWGGGGGGRRGGGGPRSPRARGPYATAQGCAQRGGEGDYKGPGSGGHRLLSRGSCEHRQWGTGSDCPPPPFLLPDPANIGEAFRPGKAEQAPVSLTLSLGLKVPDPAFKDDAETLSFSHGICDLGPHNSAEHHCVPLTWRGRGLWRSWDRASVKDSEGVLESPEDGRRRPQVGKDSDQACALQVLRQDAALLAGS

SEQ ID NO: 943377 - protein, 128 aa, Homo sapiens
TALLEAGLARVLFYPTLLYTLFRGKVPGRAHRDWYHRIYPTVLLGALPFRILCAIATGRYFRGVITINEDYYMRLLFNSSQDLNILLFYQLWLITLDITGITTFYNFQNLFQFSVNYHLLFHFFYFHF

SEQ ID NO: 943378 - protein, 117 aa, Homo sapiens
MGGSSDRLSLSGASWWPPRAFLAPRSAKTAGLCERAPRQQQLLQQHAEKVGGRLYRRRAAAAAAGEERGGGRKGSGRALVEVPQAEEVLLSHAERTGRACGCWGCSDCGGGWKKYKG

SEQ ID NO: 943379 - protein, 243 aa, Homo sapiens
LGPVAAHSQWRLGLKHRALMKSPPSSVSRGFPPLKAHSLAWPSLPPEAQRDAIWGGSDRVQIACVANVVGLQLAVSQAPYLDQLVPATGEDEGLLLWGEKRTQDTHSEWLSSWTVYLHTPRVFHSLMVLSRDPETICRLSEEKATVSTALVWPTNRLVVVPVVRTQKRRVPSQEPERANWPSEEITTSLTKWELPAEHAVEFHVGLIPGQFPHDDGLISRGGEDHVRELRGSSDLGYPAVVAL

SEQ ID NO: 943380 - protein, 191 aa, Homo sapiens
  misc_feature (113)..(113): Xaa can be any naturally occurring amino acid
  misc_feature (118)..(118): Xaa can be any naturally occurring amino acid
  misc_feature (123)..(123): Xaa can be any naturally occurring amino acid
  misc_feature (148)..(148): Xaa can be any naturally occurring amino acid
WPVSGPGLPAGLRRQGQWQGRSPLEEDHPGQDGVAQHQEEDLQQTVILLLQLLGQDLQEGDEEEGAARQALQQHGRHAARHALGALNAQAQADAQGDHGAHGDRQLGRVPQGXGTSGXAWLPXGHGHQDVLLTGHPRQNRLYHISSPXLPARPQGPGPSKGPGVGPDSAEGPGLDARRTGGWARETALDRS

SEQ ID NO: 943381 - protein, 72 aa, Homo sapiens
  misc_feature (10)..(10): Xaa can be any naturally occurring amino acid
  misc_feature (38)..(38): Xaa can be any naturally occurring amino acid
  misc_feature (59)..(59): Xaa can be any naturally occurring amino acid
  misc_feature (64)..(64): Xaa can be any naturally occurring amino acid
  misc_feature (68)..(68): Xaa can be any naturally occurring amino acid
MRKFEKKRWXGRNSGIRIRLRPGLICAGLSDEPTGAPXPFRQAGQLEGEIARGYGAKEXGGRSXGIVXWAPG

SEQ ID NO: 943382 - protein, 33 aa, Homo sapiens
MSRRRGAVRLVLFSVVFSVLLEGGGGDMLIRKK

SEQ ID NO: 943383 - protein, 138 aa, Homo sapiens
MGPASAGGSETVPVWELELVAPGAWDHGGVHIIRVLHWLGCFLPSSLHSEDEANTEENQGCDASPPGCSQDTTSPAFWFPMHKETQRDLQGAQRMLSTAGEISFFCRPYLRQPQDPGIGDGGGVQGGEAWNQLRCAGG

SEQ ID NO: 943384 - protein, 286 aa, Homo sapiens
  misc_feature (36)..(36): Xaa can be any naturally occurring amino acid
  misc_feature (77)..(77): Xaa can be any naturally occurring amino acid
  misc_feature (82)..(82): Xaa can be any naturally occurring amino acid
  misc_feature (93)..(93): Xaa can be any naturally occurring amino acid
EAHMTLDTWWKVRREKHIDLGQLNKDKDRTAKKSQXALDSVEVLRKLYELHGGGALTEQGPLQVLAGGLELPGLTLXLGSVXPTGDRFIACPXLTGQGVSDVPAGKLSLAAQLLFNSEELVVLGQALRSARGTSLDLPSAQPHNQVSNEGIFSLPRTMRHHDAPTIGLGQLARLKRLGHGANLVDFEQEAVAGLLVHGLGDPLWVGHCEIIPHYLDSCTGCELLPSSPVILVKGIFDRHHWVVLDEGLVQVSQLVRRDVAAGVIGRIEVQVNFPDLNNSEPLRPCR

SEQ ID NO: 943385 - protein, 116 aa, Homo sapiens
MLSEEPWGKTKHWASHRNSFVEMNWFGFCGFQVWSQDPSPKIPSALLKDGASKHTQYQACHAFLAEPILGLSVLQQFLPLSALWVFFQGSPKGRRVGPQGTLPFEMGSVKCSPAKL

SEQ ID NO: 943386 - protein, 70 aa, Homo sapiens
FCGALYGGDIYQCGNIAVFKSHSDLQWFECLSDTAGAGGLKLNSSHACAIPSEVLPHHRRTSSHSGVAGC

SEQ ID NO: 943387 - protein, 137 aa, Homo sapiens
  misc_feature (33)..(33): Xaa can be any naturally occurring amino acid
  misc_feature (47)..(47): Xaa can be any naturally occurring amino acid
  misc_feature (51)..(51): Xaa can be any naturally occurring amino acid
  misc_feature (87)..(87): Xaa can be any naturally occurring amino acid
  misc_feature (92)..(92): Xaa can be any naturally occurring amino acid
GGWGACPQQKQRVSAATCALGLGWGAKVGGGGXPASWLGWSGVRGPXAGPXSPAAPLANGSVFKDSVRLVFGVGGTFGGFIYWAGGXGCGGXGGWLCGRRPGPLAPLRAGPRGHLPSVARGSPRVGFVGCSPAGLGP

SEQ ID NO: 943388 - protein, 182 aa, Homo sapiens
MGGGKGAWGGEGRGELNGGGLVGGRVGIGSVTRVEEFGAIFQLFSRAAINLLVQLSKLACDVSGVGIQEGGIAGAYLAWMVQDNHLSSEASSFHWWVIFAVTSNVATTNILDRHILDIEAHIVPRKSFTQSFMVHFDRIYFRCNVDWSQGDHHTGFENTSFHSANRNSTNTTNFVDILERQE

SEQ ID NO: 943389 - protein, 144 aa, Homo sapiens
PSLSIFCFIIFINKADYNVALFCIIISCYKTLHILLKPHNDFLGPSPLFQSVTAEPTGRPRATSCVPMLCLTYLFARGAWLMWTQFQRNFHYTFGRRLPNLILLLVFLCCIFVKEYYFPFFCLDQGRLKYFVQNFNQIMSYFLS

SEQ ID NO: 943390 - protein, 257 aa, Homo sapiens
  misc_feature (28)..(28): Xaa can be any naturally occurring amino acid
MERVRRLCLGPIHSLQLLKVFVGIGGAXGGGAQKGSTDLDMITITYVYGGEDVDESSEVGIPNFHALEGSGQFTAAQLELFDDVADLLKPVDVALLFALVVGNNQECSSLEQQNFIGLNDLGKIPEVHLQLKNVGNELVDDAGPGFVERLITDGRAKASTLQRAERDASCLSLALYKSGHADPPEPDPFCAQGEDSGVKRVLEDGLQTRLVIMHVFFQCAALHVTHVNENSHVTEDIVSLAGEVIFMKVSDRTVHRS

SEQ ID NO: 943391 - protein, 109 aa, Homo sapiens
  misc_feature (43)..(43): Xaa can be any naturally occurring amino acid
  misc_feature (49)..(49): Xaa can be any naturally occurring amino acid
LVFSFPPPSSPPSPWLKKKKVKKAPLSCGGVADSRGGGLEGEXGPVGGXGSQVPGKPGLVAYREERGYGQWLLVSSATPAHCPGDFNTTGGAGLCGVRSDKRGAGKKNR

SEQ ID NO: 943392 - protein, 118 aa, Homo sapiens
AQSIGDVHLFPEEYTILLGLLVKRWSSLRLCAPGDFRAFSFQDKRDDVQLVVMSDIEGSYKSGCGDKIWKGVGGLGGGIFRIVRIKVIFFATRGIGKSSFRVLTGGRTGHLLFVFFGG

SEQ ID NO: 943393 - protein, 140 aa, Homo sapiens
  misc_feature (139)..(139): Xaa can be any naturally occurring amino acid
RGAAMDLEKSEEFKERCTQCAAISWGLTDEGQIYIALLATMLQRNIRKLQTLELNPNTQKKALNRGLKKKNNTEKSWDWYSDVEGIQEIQYQEAEALKENLRVGPEIKKRSFTKFEEAPPSEEQAGHIVKNPVYTTEKXT

SEQ ID NO: 943394 - protein, 216 aa, Homo sapiens
GIPGIAGRDSRRLKWTAGMAERAALEELVKLQGEPLPGPQLQKASPQLIQEEVAKHQKLKALLGPDESKQKFVPKTPQGTRDYSPRQMAVLKKVFDVIFPCFQPPGAEVIDTPVFEQKETLMGKYGEDTQLIYDQKDPGGELPSPPYDHPVPFAQYLEMNKLTFIKRYRIAKVYRRDNPPKTPGPYLEFYQCDFDIAGNFDPPIPHAECPKIMCEI

SEQ ID NO: 943395 - protein, 111 aa, Homo sapiens
MRGYRVLFQMTKMLCRGCACEDILVLETSALAGWGQQRSRGLDLSRRFQPLLAGYPQPLLSFTILGGQARLKVVAGAVTCPASRGQYAGLWQNSAPRRLGVPGGFPDHWGQ

SEQ ID NO: 943396 - protein, 69 aa, Homo sapiens
NYTSETEDGNIAKPQLPVKQKVMKTPELPPPTYPICSLNATITRATAPFILYRQPESHTVIAPRRKQLL

SEQ ID NO: 943397 - protein, 237 aa, Homo sapiens
LSDQKSNGAVGQEVLATDVADLLGLHSLGSGGVSDLLIQVPPDGTAAFFSNVQAGFIPAMELLLPGWYFLFGFLQQRFGAISSDSSHALLMKVVAMSVFEELLGVANPVYIVFNLFWYVIIDDVLDGRVVQVLGGNVCCYQDIFLALSECFDGLSPFFLVFVPMDGYGLNPLEQQVLVDGVHVCLLLCKDEYRRGCLLQALEQVHHLGLLLHIFYLLDDIQAGSPSAPHIDGHRLYK

SEQ ID NO: 943398 - protein, 116 aa, Homo sapiens
MLFLGSGEGKLALAVFCSVFFFLTRCFRGFERWVNGRWMEQTEETADDSVVEEGGKMLGWLANVPPFQRFTGNGAQLGHEVGLLPLCDALLRNFEVSLQLLEDFLLGLELLIWLAF

SEQ ID NO: 943399 - protein, 66 aa, Homo sapiens
LNPSCNQSGAIQPGTEPTEPIDLSPTTGALLAGIGKEEAGHPPQGLSDVLQFALDARGPHLYPKPP

SEQ ID NO: 943400 - protein, 104 aa, Homo sapiens
MEEQLAKNSQDTPRKNNFHVILETEVKYATVITPPGGILVFFRPFPKEGVIRAVLYWYKFSEIAVSESGDHQKGHTHTQKFFFCYLQCYTFFGKGCYFLLILQV

SEQ ID NO: 943401 - protein, 74 aa, Homo sapiens
MSQGGGQGTHQGPALASAPPSPLLHGYQKMSGKNRLALSRECGQVQRRAGARILAQKHSKTESDPEMIQIKQKL

SEQ ID NO: 943402 - protein, 158 aa, Homo sapiens
  misc_feature (134)..(134): Xaa can be any naturally occurring amino acid
  misc_feature (148)..(148): Xaa can be any naturally occurring amino acid
MLPKGHCQYGVHYLGQESSFPNVVYIVPAVIKRFVINDKASQSYSQTDYTKNTVSKCFFFWNLLRKFYAEEILKHFLLNLFDKDVNNIISGGGFFGVFQGLDVIGGGGCDPPFPSRVAGSSFFVIHFLAEVSSXTLAMPILLQDVYRXPSVIPAHRGG

SEQ ID NO: 943403 - protein, 138 aa, Homo sapiens
MSFSKVIIYANRQIVSQADPQVSAFPWRVIGKRALRQDSMLDVPQHRRDLLSGFQSYYSGWHFLFAAVSSSPSSFLSTPGGGGPACAILTAFPTCALLPAKFVSGGLLVGWTAPFLPHLASSSLLTDENMVTAAFDEP

SEQ ID NO: 943404 - protein, 312 aa, Homo sapiens
  misc_feature (24)..(24): Xaa can be any naturally occurring amino acid
FSFSFFSSSFPPPGTWEGKEREPXTATPHIQILTSMAHTSKLFVKEKQVHPSLLRAHQVWAWVGGPWAGSLNRCKGVGCKSFEEAGNFSRAPPSSSLCALLPLLAYRRKGPFVPSTPVTLAGDAAINGLAFGHKILLLFGLLTCSPPGRHLFCGPTPESQPFGPGFQLAGGRSGASHRRPMPSLLQVYTTAVPASHSSCPCPTAAYTDAKSLRTRSYMAKVPSWYPTAAIGITLQKPKDSTELDSLSSPSPRLGWEATVSGLKTPTTLPVVALTILAWQSTEPVRIKLPSWYGSNTGELALVDLSPFQYMDE

SEQ ID NO: 943405 - protein, 256 aa, Homo sapiens
  misc_feature (12)..(12): Xaa can be any naturally occurring amino acid
  misc_feature (27)..(27): Xaa can be any naturally occurring amino acid
  misc_feature (201)..(201): Xaa can be any naturally occurring amino acid
  misc_feature (218)..(218): Xaa can be any naturally occurring amino acid
GRGRGRGRGGGXQPPAHEVEVQEGCLXQQAVRGRAVAGRAQCGGFPGELLVEIADDGEPGERGDKRRCQAPGQQGFPTKKAEEGLLPHIFCISLLDPSLRSGITSEAAYLMMPMSFGRQEAGSRRTTSLTMMSKTSSSSSPGNGDIANKDLVEQHKKYPHSPQIEEYDVSISTSRAKKSGVPENVVVWAPYPIPFLAEAKXCDLDVALGVQEQIVQVXVPVDETVYNEETVGHNTTQADKDWQGLREHVAVDVHIK

SEQ ID NO: 943406 - protein, 233 aa, Homo sapiens
GAEQERKGPGGQGGGGGGRAGGPQTQEEGAKTRRRRRSEAQPPLGAAEGTKRGEPGAARARRRRAAPAKRGGRKKSGGHGQSDGGGGGGQSHRGGGGGAKERPPPPKGPEPPPPKAPPARGPKEEDGEGAAPKAGELATTAKKAASRTKARRASPTATRATTTTAATKATTTTEGAARRPKGAVSQPKTTVHDPPPKVSRHHVRTSFGKDEALANLVAFDRLRFLTSQVVAIH

SEQ ID NO: 943407 - protein, 139 aa, Homo sapiens
MIWSEQGSEPDVGVTKDEEFVGNGFVAVINNAVIMLWFPSREVGAGRGLQPDESQLKEDSASPFLSPFPRSAPPPKPKTTPNKVRMLILLAGSAVPHEGIERVAALTPLSPYTRVGGQEHVATPSKGKWEISKKGIKFE

SEQ ID NO: 943408 - protein, 102 aa, Homo sapiens
  misc_feature (72)..(72): Xaa can be any naturally occurring amino acid
  misc_feature (101)..(101): Xaa can be any naturally occurring amino acid
MTLLWSLLFFAAIFPHPHGNVCHHVKPPSRQLWLQSSPLGRKRSEGNVTPGFPCFLLPLRVGVLRDSPPPPXLPSSLVASPKPFLKAVTMHSIPGRYFRGXI

SEQ ID NO: 943409 - protein, 101 aa, Homo sapiens
  misc_feature (8)..(9): Xaa can be any naturally occurring amino acid
  misc_feature (20)..(20): Xaa can be any naturally occurring amino acid
  misc_feature (22)..(22): Xaa can be any naturally occurring amino acid
  misc_feature (24)..(24): Xaa can be any naturally occurring amino acid
  misc_feature (39)..(39): Xaa can be any naturally occurring amino acid
  misc_feature (68)..(68): Xaa can be any naturally occurring amino acid
  misc_feature (75)..(76): Xaa can be any naturally occurring amino acid
MGPPHAPXXSTRSFARSSSXGXQXLGANRMQGRPQPSQXRPTQQGTQAQSTPPWDRGKRGGGGASQMXSRTLSTXXDTREGKPLGRTDREDAIIPERSVKV

SEQ ID NO: 943410 - protein, 151 aa, Homo sapiens
MKVLEYHGDIIWRGKLCGRSAQASVQPWRQASLQLVLGLAGDIFLLIFLLVLLILLILIFVLIILLVLCLLLLFAFLVFFLLLQPLLLVLFVLHLFLCCLSYAPRLVAKLLSVCFIVGDEEVVKDGARLDLPEVQAQHAKVIIGIDTGIGR

SEQ ID NO: 943411 - protein, 274 aa, Homo sapiens
  misc_feature (70)..(70): Xaa can be any naturally occurring amino acid
  misc_feature (73)..(73): Xaa can be any naturally occurring amino acid
  misc_feature (93)..(93): Xaa can be any naturally occurring amino acid
  misc_feature (136)..(136): Xaa can be any naturally occurring amino acid
  misc_feature (143)..(143): Xaa can be any naturally occurring amino acid
  misc_feature (152)..(152): Xaa can be any naturally occurring amino acid
  misc_feature (156)..(156): Xaa can be any naturally occurring amino acid
  misc_feature (180)..(180): Xaa can be any naturally occurring amino acid
  misc_feature (184)..(184): Xaa can be any naturally occurring amino acid
PGACMSRPNLVGEFTFRSSGMDLPQPHQQIISPCFQEGTYSPTSGLYGPGRMIGRGVWGSRSLQTEKYEXENXQVSIILLIVLLLPRCETEGXRRKGRGVLQPLWPLLGCADCHSCYYDGLSDQQVAQEGLLDAGXFFLLPPXHACEVVGTXWNPXACLELQAQRGPVTFPRSHSLKGKXGCSXCFPSNTLGPASCWMLLLSPLLCVTAPALCAGRPWLCGSVLGLGRLLLFLVPSSPQYPVGPCVPGYFAPALSLCSCPLLCALASLAPFPSV

SEQ ID NO: 943412 - protein, 323 aa, Homo sapiens
  misc_feature (1)..(1): Xaa can be any naturally occurring amino acid
XFPGWTAQLTAVLRQLLDPKLISTEENTQAAETKGPLPTPSCTQTQHLEGLLLTTSHLNFWNPPTTAEITIEAQPPKISEGKDVLLLVHKVPQNPPGYFWYKREKKDLNQNKKTEKIKGKKKKYGPAYSGRETKESNASLLSQKVTRKDAGTYTLHIKKQGEKTKKKIRHFTFTLNLETPKPYISSSNLNPREAMEAVRLICDPETLDASYLWWMNGQNFFVFFLLQLSKTKKTLKQIGVTKYIAGPYECERRNPVSASRSDPVTLNLLPKLPIPYITIKNLNPRENKDVLAFTCEPKSENYTYIWWLNGQSLPVSPGGKSTH

SEQ ID NO: 943413 - protein, 139 aa, Homo sapiens
FSPLGRPLSNQQGGKPPQCSASAAPSPPGSAPRAVHVAEVAASRRGVEPHATVAGPRPSLRALAFRAAVRRGREEGSPARALDPAQRAAAASASAEEPLCPGCPTVGPQIDALPASEDFCAAVCRAWPSSAAPAGRSGT

SEQ ID NO: 943414 - protein, 237 aa, Homo sapiens
  misc_feature (3)..(3): Xaa can be any naturally occurring amino acid
VPXPVFPGCCLPASICPGPFCCLLGAAGYQPAASAALRAGGDIPRACGGPCLPGCAIPPGPAFPGFCHKGPGVPSAVCVFCLKVLPPQLVSCVGWAYPLCIFFVPCASALFLLGVLAFAGRYFAARLLCCFLLRCCLYRFLDVRSPDMALYPEKKLRCLCAEALRLWAVAASYGQGGYLYRELYPVLMRALQVVPRELSTHPPQPLSMQRIASLLTLLTQLTLAAGSTPAETISDSK

SEQ ID NO: 943415 - protein, 183 aa, Homo sapiens
MFFSLPLLLLSLPHPHIDPRAGGPWVGIVLLVEQVIGLVFDVTEAIHQMAWAVIVITRDVLAAPWQLLFRRAHPNLHIFSLVGLFEELEGIIIIHADVIGIALDPTLGHMGAFHPDPLKFHLLGMAEVESLAPRPPSLNLGFRRPLELLGFFHIGFSIVYAVGSCKDMLLCHLGAGAAVDNFT

SEQ ID NO: 943416 - protein, 183 aa, Homo sapiens
  misc_feature (110)..(110): Xaa can be any naturally occurring amino acid
RSCLAELVGHQRGLLQAGDGDRREQVPQVQGSGGAQVTSGILSYGKLVLQAHSTISGPQLASVSRCTEGGRSLRTLKTACAEEPRNCRRRRHLEPAPPEGPGPPAPPGHXCPAAAAWAVSSSTRWRPRTHAPDPFSIELKQYSASIVFEEHSVHHELQRAISQAAAPWERSVSTVSCMCAFVM

SEQ ID NO: 943417 - protein, 188 aa, Homo sapiens
MGDLSFLENFLVEVHKHSTVFGKVWLTVLFILRMLVLCTAAVSSLGDEQADFLCVMIQPGCQYVCYDQAFPFSFISYLVLLIFFVSTPSLVYMGHAMHTVFILWKRKLRVADMAKEVLSSGFYEYPLADEGIYCPAWRNGMEGLSLGILLNIYVCSIVIRTIMEVVSSLWASIFIYGIFFYHPACLSE

SEQ ID NO: 943418 - protein, 217 aa, Homo sapiens
  misc_feature (13)..(13): Xaa can be any naturally occurring amino acid
  misc_feature (18)..(18): Xaa can be any naturally occurring amino acid
  misc_feature (42)..(42): Xaa can be any naturally occurring amino acid
  misc_feature (45)..(45): Xaa can be any naturally occurring amino acid
  misc_feature (117)..(118): Xaa can be any naturally occurring amino acid
  misc_feature (120)..(120): Xaa can be any naturally occurring amino acid
  misc_feature (128)..(128): Xaa can be any naturally occurring amino acid
  misc_feature (130)..(131): Xaa can be any naturally occurring amino acid
  misc_feature (143)..(143): Xaa can be any naturally occurring amino acid
  misc_feature (154)..(154): Xaa can be any naturally occurring amino acid
MNDSMTAATVFMXPMMAXSPVREFVKDLFFSVSFTIIFEIFXEDXDSGKLLVAQYPIGNLLMSGHIELICSQYLSVHLHVHSGHHLHKVLVHSGGLGRSDIGVVQGVHNAWIGAPQXXGXGCVWVMLXLXXPKLCKLWTCTWXFWKLFPGAKWXFSATLLSFKSIHLAAFILLLLHLLAEALSPALLNSIWVLEGTASTAICLPHIFTGVTALDIFC

SEQ ID NO: 943419 - protein, 359 aa, Homo sapiens
TGPALPGTPPPPATTAPTYCGRSCPLHGRPRAAHPRLGATRSGNVTHVTDALALDPHAAHLPWAPRTLHAGRGLTRLPTPDGLFSRVPCLAPFWWTLDPRNPWPVSAHGAFGPLFRPDHLSSLVRRGAGTHTWATGSPTTGRGRTLVDFGPGAVVRNGRVKHLRPACTGFHADPTSLGGGTGSGLGTVAHSRPVRDGRTPDPHSCTPFQRRALTQRCQTTVVEPYNATLSIHQLVENTDETYCIDNEALYDICFRTLKLATPTYGDLNHLVSATMSGVTTSLRFPGQLNADLRNWAVNMVPFPRLHFFMPGFAPSQPGAAAVPGLTVPSSPAMFDARHDGAATAHGATDVARVPGDVMR

SEQ ID NO: 943420 - protein, 123 aa, Homo sapiens
  misc_feature (111)..(111): Xaa can be any naturally occurring amino acid
  misc_feature (113)..(113): Xaa can be any naturally occurring amino acid
  misc_feature (117)..(119): Xaa can be any naturally occurring amino acid
MPVIAALREAEAGGSRGQGIQTILANMEKPRLYQKYKKISRACGQAPVVPSTGSPNFPGGWGRKMESTRAAGPAVSRDYATALQPGRQSQTPSQKRGRYRNLIFQIFLFSXLXHSSXXXFMPF

SEQ ID NO: 943421 - protein, 288 aa, Homo sapiens
  misc_feature (7)..(7): Xaa can be any naturally occurring amino acid
  misc_feature (56)..(56): Xaa can be any naturally occurring amino acid
  misc_feature (181)..(182): Xaa can be any naturally occurring amino acid
  misc_feature (184)..(184): Xaa can be any naturally occurring amino acid
  misc_feature (186)..(186): Xaa can be any naturally occurring amino acid
  misc_feature (194)..(194): Xaa can be any naturally occurring amino acid
  misc_feature (221)..(221): Xaa can be any naturally occurring amino acid
  misc_feature (228)..(228): Xaa can be any naturally occurring amino acid
  misc_feature (235)..(237): Xaa can be any naturally occurring amino acid
  misc_feature (239)..(239): Xaa can be any naturally occurring amino acid
  misc_feature (243)..(244): Xaa can be any naturally occurring amino acid
  misc_feature (246)..(246): Xaa can be any naturally occurring amino acid
MESAKIXIRCRFLPVAFHLPVSLVFCFAGPQNSSPGYSLHPKSREDGQARSRRVSXRGPIRFTGGPLYLLEMSASISFCSSLVFSSSRSSLGSRAACSSSASCCFCTISSFFKASSWDCFSFCWRNSVTRSTYLGEAKDHKQVLQLKTGKLANQILQHCHHGNHLLFGLALQDGWSQLELXXRXDXCLLTNSTXLWAKKISSSHELIKELIPGLSVFKQCXGIWALEXLLEPGVXXXKXVIEXXSXVSPVYPITSRIFESDSGKMPSRFSSLGRDARVSALRNGSTLK

SEQ ID NO: 943422 - protein, 148 aa, Homo sapiens
LVPQSPTSLGRGVFSHSEERREPRKEKLFFEEKKQSFFFYFRFFFPGSLPQSLKKMNYSFKKQGREGLGEEGGRRKLSGPPFRLLVGRGAVVDFDKPPFIGRKKGTGILKTWSCLENPVRTESGLWTGSNTAFTPKDSGKAPQGQGNQ

SEQ ID NO: 943423 - protein, 281 aa, Homo sapiens
  misc_feature (29)..(30): Xaa can be any naturally occurring amino acid
  misc_feature (38)..(38): Xaa can be any naturally occurring amino acid
  misc_feature (148)..(148): Xaa can be any naturally occurring amino acid
SHTPVGLAHLGYTAGPGPGLARAVAPAPXXGTHTSSPXPGYLRPPFCFPGPPPPLCHPPPPPTPAPLSPPLPAPHPPPPPPTLLLSPNLPPPITPAPTPTLLYRALLLFPTSVLLPLSDPNLPSSPNPAFNFFHPNLTAPLPNLLNFXPITPLHSLLTTRLHIYFTLLTEGGGEINFLCPLENPSWNAQITLSLVNFKNQQAIQTLRARQILRDRDPRVLNHQAHHLSFMLPTTSLLKTNFIIPSGLWGHGCAPCGKVENINVWRRRWSCKKWTTLGGGQK

SEQ ID NO: 943424 - protein, 267 aa, Homo sapiens
MLGLLSFPGGLRYWQQSVAQCCGGLGPSRSQGSLGPSSGRDSLTLGGDGVALRGRTGPRERGRVRELSWVQWFLVCLLAGNGSSRSVGPEVVFYMGHRIRELGASLATDNFQASTRVTEKAAEMECVRFRASQAGPSFSPRRACGGEAAVGWCSRCLALSSLCRCLVTRPHLRCGMYRREEEGQPVLARTKSLLATPERLVLATVSVLVNGGCRGSPSPEKPAPHVAYEIPQMAVGSVPTQGLGGGTLGLANDSKTGANGGQYEGET

SEQ ID NO: 943425 - protein, 204 aa, Homo sapiens
  misc_feature (28)..(28): Xaa can be any naturally occurring amino acid
  misc_feature (145)..(145): Xaa can be any naturally occurring amino acid
  misc_feature (153)..(153): Xaa can be any naturally occurring amino acid
MASWYCWYSDTRSFIFISGLGEINKVHXLARVTVKEGICAGKWTVNCSEMRFNSSWMAVLLPMKVAEIFRPRGGMSHTAVFTLLGIHSTKKLLFLFCTLSICLSTFFMDMRPRKMAATVSSGRGAGLQAAIMFLESNICWVNSGXVSTRYCWXPRLVRGARRRMKKCKREEDTMFTASLLQVCVQLARAARQVVTPLMVADTGG

SEQ ID NO: 943426 - protein, 71 aa, Homo sapiens
TYQVNNFIKVLKVSLRKCWVKQITGKKCKNNLIIYKKEQSIEGKPSVIKPSLDVHGKEYGEPFPFSRLSPS

SEQ ID NO: 943427 - protein, 175 aa, Homo sapiens
MGKSPDQTFQNKASKEGGPAESYVQTQKGEEAEQGEEPGSASARLEVTIALPQGMYRLLPGSLQEGQHPWLSFFWFRASYSNLLVMMLLDYEVCGEVAATVNLTEDAPSLGLLVWVRAIPVRDNFYIAVTHQIHLEVTKELCCERIRGSNHTSDTYRQPAAQNPFIQIHDGVVLP

SEQ ID NO: 943428 - protein, 233 aa, Homo sapiens
  misc_feature (57)..(57): Xaa can be any naturally occurring amino acid
  misc_feature (74)..(74): Xaa can be any naturally occurring amino acid
  misc_feature (117)..(117): Xaa can be any naturally occurring amino acid
  misc_feature (120)..(120): Xaa can be any naturally occurring amino acid
  misc_feature (134)..(134): Xaa can be any naturally occurring amino acid
  misc_feature (136)..(136): Xaa can be any naturally occurring amino acid
  misc_feature (167)..(167): Xaa can be any naturally occurring amino acid
  misc_feature (181)..(181): Xaa can be any naturally occurring amino acid
AGAPPGLWRDSSGRSEPSAKISGVTWGWQPQIQVASGGCPFQVSPMTQCRFQGPKAXMCNSQMDFYECLRGAPXDPAALTALEFLSSAFAWWWWLGCPGLQSSQRVSCSGWAARPPXLCXTRSPPPSVWASWAXAXAGSSPPDVDVLLACFSPPFSRPVLPLLLRGXGCRLPLSVLASPGXLSSENGQRDFFFWYKSKEICPSPAPAELRRASLQSPKTLRRARSNTSEETRT

SEQ ID NO: 943429 - protein, 111 aa, Homo sapiens
MCVSTEVGISATRSHVAPQFIRLCLPLPALLSAPQVGGKDLALKSRVPGMDPPTQQWSIRSHEKHESSHEDVQGLARSSASHGLKEGLARGLDVSDSDLSGADLHTGKATQ

SEQ ID NO: 943430 - protein, 157 aa, Homo sapiens
SPPPPPPLPHSPPPRSHTIFPPPPSLHNHNPNPTTLSPLPPPPPPPSLLPFTSYPPLYNSPNPTPHSQTPLNSSSHFHASLITKPPLQLYNNSSNFHHSYFNHLTTPFTQNHLTYYSSYSHLSHFDQHLQNPPTSLSHKTLLLLLTPFLPPASSLHP

SEQ ID NO: 943431 - protein, 158 aa, Homo sapiens
PGMGLRGDRRPLLRQLAQNLGSRVRGTGNRRKGTRTALEMYLATRHIGRKWGNGMIQQAQGCAGRHLPGSSGSQMDQRGREEVRLKVSLLLVIQDCFLRSEEKLKSQLGVPQVAPHKVSQVPNCLAGAEEDLEEVAVGEQDPQSHLWVALKLLLYLRL

SEQ ID NO: 943432 - protein, 258 aa, Homo sapiens
MEQKERKEIDEYMADGKDEGARIRVEDIIREEYIVEGMEILELYCELMLARFGIIQSMKELDSGLAESVYTLIWAAPRLQSEVAELKIVDDEICEKYSKEYGKLCRTNQIGTVNDRIMHKLSVEGPPKILVERYLIEIEKNYNVLYERDSVVMEEAPPGVETDLIDVGFTDDVKKGGPGRGGSGGFTAPVGGPDGTVEMGMRMDMPMPSANTPFSYPLEKGTVDDINADKNISSAQIVGPGPSQKPLQSFFPDLQITM

SEQ ID NO: 943433 - protein, 50 aa, Homo sapiens
  misc_feature (49)..(49): Xaa can be any naturally occurring amino acid
MGLLLLVLILTPSLAAYSHPDFPLRKKLSNCSKVQDPLTPPIAGYVTSXS

SEQ ID NO: 943434 - protein, 281 aa, Homo sapiens
WEGYFLDTVKKKKKEHTHTHTHPHSRAALPGSKATLGEGQCQEALTGGMGGPSPSPGSQLSHGPVQGVHRPVIIIPAKEPALDGGWARALVHHGDGRPPLPVGWVRLDVTCLEEVKASVFSCFLQNPLPTQTKTWSQVSSSMRSSVAQVFLHELTRNLFVSRKRSNLVGGRQRGEEGWGIHLLVPSAVGDVREAAFPPRASQKPSGSLPSATCTGWARSTLSSSWAPVFSAFLAPVPTHRYAAEGVFRTKASLEFSAPALGNTSTARVGSSAVGADLEEAG

SEQ ID NO: 943435 - protein, 263 aa, Homo sapiens
MPVATQRSVFGSLTAKAPPLSPWQASCFERWVSSTEHVLKEHIHPIPSPAPSPHSACALSYGQTDKPEVMFYLLLHDPEATDIAHQAHGREKECVVGEAEGEEVGTQGDTIFQLQQGDVPLKIVGLILTVVRVDADPADGVISSFMSSSTFVWPRNTSKEALLCASCSLGYRVWAAVRIQRSPSRAPPPRPWMLVNTCQGKLPILGFLPSDDALPLFHGVHGLPTHWQAPRNLLSLLFILPNDLCCAGVHPLLRLPAASSGLH

SEQ ID NO: 943436 - protein, 144 aa, Homo sapiens
NHIPAPKIYNLGAAIAGRQRDCLESNAAPPWRSPAAPGPHQREVGMLTPPVSRQAESGRGRIDPRPAKGSLVSPLQSPNFTKASAWEMALSAAGRKLAQCASRANPHQTGAVCQLCKPPPAAPPPAAKENNFQSSPQDFMPRGW

SEQ ID NO: 943437 - protein, 338 aa, Homo sapiens
MSSGICVHTGGLLGLTGAGHPSVLGARTCAWVGTHLAIVLIAGPWCGFGGCEEVTSLDDCDPEEAWEERDVGVLALEQAAVGGDLLLQARLQAQLDVVLLVLAAPSRSGAGASCSSTRAKSSPGLGQLHAVATFGLLQAVLQGCFHAELGVQLNLQVLHGAPELRDLALAALHHLAVGGYLAVQLLCLGEEPFLGILAVLLCHLLILVTHLVQNAAQVHARCSVHLHIDISSHLASQGIHLLLVVLLQVGQPLLQALNLHLQVSSGQGQYVQHPAQAIDVGFHTHAQVQLCLILGAGVIRGQKGIVNLQKDIGNVHCGCENLVPQGLNGLEVGTVVFD

SEQ ID NO: 943438 - protein, 111 aa, Homo sapiens
  misc_feature (35)..(35): Xaa can be any naturally occurring amino acid
MVVRRLCQTCCRCWPEDLAPGPGRLPSFEASAMRXLDALVYGPLGGDSHRCPEVSYTRLLEKLLLRNRTGSSHGSDEQEGDAESSRLDFCGGSCMLEGVGIESEKQKEVWG

SEQ ID NO: 943439 - protein, 108 aa, Homo sapiens
MPCTELAHAKSLLTILNYIFGQGRWFMPIIPALWVVKVDGFSVVRCSLAAWLTLCDPVSTKDAKSLSDDSGACLLSQLLRWLRQDNRLSPGGRGCSELRSCHVTLQPG

SEQ ID NO: 943440 - protein, 114 aa, Homo sapiens
MTAYTSMSAEGEGECLEFSEVGNDKTNLLKNLEEGQHSPQYKMKSDPEEIFKNKQTNKTKNTTPKPPFSQSRRRAKGSRPSPLRQHLWAQVSAEGARAPGSDSSVPSLHTEGDG

SEQ ID NO: 943441 - protein, 74 aa, Homo sapiens
QRISGGEGDTKICKTIFKDLTQKEEEKAKKYFQTTSYGVSKENEISSNQGLNENLQKEAGISKEALRNKNEFHK

SEQ ID NO: 943442 - protein, 141 aa, Homo sapiens
ARQGNEEPPGEQKREAQRTGAQNGGETGGERGQEKGEPGEAEGGEAANNKRGGERAQRPHQTAKGDEDNKKEENGGQKQRAKKKKGKGRAKERNGPPHPINDEEEIQGDIKGEEKKSRPRPGPGAKTETLGLSLERYKGDK

SEQ ID NO: 943443 - protein, 50 aa, Homo sapiens
  misc_feature (34)..(34): Xaa can be any naturally occurring amino acid
MLQVSFHAEGVGQENLVVVVAEPNGDGSGWTAKXGRYAIKVDEDVGHPLQ

SEQ ID NO: 943444 - protein, 122 aa, Homo sapiens
DAWDTTASFCLPHTVDFTVTVLSSSGATGFRAMSTAATGCCGYFCGLTVYTGLRLFFHFTNVTRGWAWGHSGYDCVSLPMGTLYLNSETRHKRVAQDSITSATHGTGSGCYGGLRDGRLGFG

SEQ ID NO: 943445 - protein, 207 aa, Homo sapiens
  misc_feature (75)..(77): Xaa can be any naturally occurring amino acid
MASTSISNIIKNSLGPIGLNKILVDNISDVTITNDSATILKLLKVKHPATKILYKLAKLQHKKIGHQTTSIVIIXXXLLKNTDKLIKHKIHPTSIISGYRLACKEAVRYINENLIVNTDELGRDCLINAAKTSMSSKIIGINGDFFANMVVDAVLAIKYTDIRGQPRYPVNSVNILKAHGRSQMESMLISGYALNCVVGSRACPRES

SEQ ID NO: 943446 - protein, 175 aa, Homo sapiens
  misc_feature (171)..(171): Xaa can be any naturally occurring amino acid
GRGVVRAFLITAPVRKQGEEGASYSFSGLSGGSVPPMAEPAAEPAPSFLCLLIHQSPHLQSHVPLVRRNRGCPAWRIQEEAEVLVGLDDKARWCPKRFFGFLFYIFFIFGAGFEILGKFLANFKFSRSPGHPCTPWLSNRWRSQLVPFITTVHVCIPCPPSELRSHTCLNXLCSH

SEQ ID NO: 943447 - protein, 299 aa, Homo sapiens
  misc_feature (171)..(171): Xaa can be any naturally occurring amino acid
  misc_feature (181)..(181): Xaa can be any naturally occurring amino acid
  misc_feature (183)..(183): Xaa can be any naturally occurring amino acid
  misc_feature (185)..(185): Xaa can be any naturally occurring amino acid
  misc_feature (213)..(213): Xaa can be any naturally occurring amino acid
KTESTLESGHRGRQEAIAGGHLSLDGSSLVHTVPKKGLPLGPRNPSQPSQAEPHPGFSQRGAQEDPSCPKSEEQQETASEVRHSSVLLPENVHFLFGDHGNQKTMAVQCVWDGGAPSSLGTWGGDSSDQEKRGEPWEMLEGPREDGGQEKGEICSQVMAPLGLRGKWWVSXARGRKEWSHXPXSXAPGCLSIWWPDSSLKSPPQGLRGSSEGXKGVWGKQGWPTRARGRWGLAKTDGRVSSGQEALQGEVIPLTVLPGLWRQARALGLEQPPLAVAEGPHPIRHKDEMQTSRWGIIRTA

SEQ ID NO: 943448 - protein, 118 aa, Homo sapiens
MHLGALACCAGGGQQCSARAPSSSLFFSASLSAFFSLPPTWGGRVRRHCRRVQTSNGSKELEGDFKNLPPSLACRGFQATLFNPFYFSKKLGNSNGNSEKLAGGGNIRARGSNWVNLP

SEQ ID NO: 943449 - protein, 120 aa, Homo sapiens
  misc_feature (68)..(68): Xaa can be any naturally occurring amino acid
MVFGRTWSRHNIGVGSGGAGPPTGPSCGDGCLSPSVPRGSGYGWLPVCLFSRLSHPEKGVEQCICCYXEVGGNGVCDWYLCFSGGLQADGGRAAPGFLWAGLASRDPECLHALGDSGWQV

SEQ ID NO: 943450 - protein, 121 aa, Homo sapiens
  misc_feature (77)..(77): Xaa can be any naturally occurring amino acid
GALAPPSKSAPPAAVSLGRGPSRLEFNSAASVSPESSSMLMKMPGVSHSGPSSRKSMASSDGGGPGPGRRRGRGGGXEGCAPTPPGLSLLFPPQLPLEGLLLGQLQPMRSEGGRGGWGRRK

SEQ ID NO: 943451 - protein, 50 aa, Homo sapiens
  misc_feature (3)..(3): Xaa can be any naturally occurring amino acid
KSXYYYKGLYQATAVSSPIPSDGSRQEHASNFVFDVKSCRSEHPNAKPTE

SEQ ID NO: 943452 - protein, 180 aa, Homo sapiens
  misc_feature (165)..(165): Xaa can be any naturally occurring amino acid
SKVAPFCVLRTQKSRSCTFTKAPCFCKSRFCQITIRLRFFGVWLCVFPGSSQVFPLAPQFRLSPFDPSISFVLFLGDSRAAGFSSFVWGGYLDWVGGRGGFFVWWSVGRGFVLHIHETSLIFAAFLLDLGYDDTRYKPVAAPGVWVALAGQLARLPNASGSPQLXFIWHMTDNTGLTVAG

SEQ ID NO: 943453 - protein, 86 aa, Homo sapiens
  misc_feature (29)..(29): Xaa can be any naturally occurring amino acid
  misc_feature (65)..(65): Xaa can be any naturally occurring amino acid
MREGKAEPGKTRGGEDEQRRVEKEGDRAXERQPGWQGKGNKAKRKTEQAERNVKMAYPVKHLSVXGACNCEKYVEGKRSDTEDIPG

SEQ ID NO: 943454 - protein, 169 aa, Homo sapiens
  misc_feature (62)..(62): Xaa can be any naturally occurring amino acid
MEGTCMLSIQDAMQQTPGSTEPLLEHFLPLPGGLRQKCFTYLKKVNTVSCMQLKESCQNINXPRHWKLKDKVSSESQSPGTQLSAGSQKLFALQHSSPESSTAGHVRLRKPAVEEHKLLSDVANVPHKWEQCLRRMKNLKTKFKKLILIQEFHFPPRQAFNMDAAPEVL

SEQ ID NO: 943455 - protein, 153 aa, Homo sapiens
MGVLSFLVSAFFLVVDAYFPQKSKRQLPDNNWSFVNCTTENKENDNWFVGFCFLINPKGSHQTRRILLVGADSVRAAITFSFFSIFSWGVLASLAFQRYKDGVDDFIQNYVDPTPDPNTAYASYPDASVDNYQQPPFTQNAETTEGYQPPPVY

SEQ ID NO: 943456 - protein, 211 aa, Homo sapiens
WVWQGKRDGCCQGAGGGPGSGLALSALTVDLAGSSVAFHAGLGGPSFAAHLEANVILSLLPLALYEFPLMLLRFLHKPVGISTVVPIILGHCQAALSHPGPLPCCHVFAFKEVNILEHVSVDDPIVLSRLQELSHLLICFKTMEGGFSGTFTGLEPSGYRAVHQLAQNHAILQPELEAQAPKVWEATAGAQCTMITPPPAPPAPRHTSSRF

SEQ ID NO: 943457 - protein, 97 aa, Homo sapiens
MGLVEDVGLTGAQVEVVTDVVEATVVGSGGGSRTRGGIPGEKEFLLLRSELQRDPWQQEPLSVNPGPVIPYRVQNSSWTQPRTGKDTVTLAGVKVTC

SEQ ID NO: 943458 - protein, 299 aa, Homo sapiens
PQGEEGGCQYELAEAGQVLSGPRLGQERRHCALGAPVPGQRPGLPGEGSAGSALRGLAGFPAAAALLIRRWGLIGVAPRAVLWGENQGAGSGRWPPGALCKVGDSGTFDMHYGGCYGSDEGLPSWGQGSGAPGTELYVASMGCRCVLLFVVQYTGSNLWGLPSAASASASSLCGAEGTTGVWPQEAAPGLAGGSWGMVHSNIANEDREGHSSFRRLQRDLSVVVDVDEAAARQAALGQGRHQDLLVPLRPPPALYARTLQLRNGPYVVDTALGLIRHFLQQTGYTGLVSLPDWFSTSAC

SEQ ID NO: 943459 - protein, 193 aa, Homo sapiens
MPLCFEKEVGHPLNARGMCLDFYFGPSTRNRKHCLSELWLVNATHIWEAEEASPPFSSTTIEKGNGTDHDEGTCFCSASPGGLGVPHPMEHKQIFGSVVGWGGEKHKLHQNKEGPGEYRGGEGGGKQDPPSPPPHTHQPQFSLLRPWEPIQRTLCGVGALYPSQSCDLGELGLIPALLEEAALVKNGRKPGDG

SEQ ID NO: 943460 - protein, 136 aa, Homo sapiens
  misc_feature (34)..(34): Xaa can be any naturally occurring amino acid
  misc_feature (46)..(46): Xaa can be any naturally occurring amino acid
  misc_feature (71)..(71): Xaa can be any naturally occurring amino acid
MTDFLSQALLRKTSCGNQARDKNSSLMQLGDRAXARDFFGKLFHTXPFMCECSASGTVRSLQGRGEVQGGXGTFDPAKCAEVIYVVCLFPLPVPAALQQLLTTPMDWNIELKAKAELADAVVSIEKEMDEMEQKNT

SEQ ID NO: 943461 - protein, 209 aa, Homo sapiens
  misc_feature (76)..(79): Xaa can be any naturally occurring amino acid
  misc_feature (86)..(86): Xaa can be any naturally occurring amino acid
  misc_feature (99)..(99): Xaa can be any naturally occurring amino acid
  misc_feature (112)..(112): Xaa can be any naturally occurring amino acid
  misc_feature (185)..(185): Xaa can be any naturally occurring amino acid
LPIRPGAVGVGCCPLCAAPGFVSSPILELPDMQHGGLSVGGGCLCWGYGWGWGRCVGHLLRSAQPEFIARENAKVXXXXNFVGKWXMVDGLVAFCMGGXYDVKGIIYVSRGXRGIFWLRSFCQSGEAKLQGEKNESGCGGEPGPGLGVVKTLGGFYVRWLRAAGSAMLGIGGWDGREDVGPVLWXAGGGKCEWEKGGCDVKEYEEKIGG

SEQ ID NO: 943462 - protein, 223 aa, Homo sapiens
MVLFSLGIHLFLVEVGHGRLHQGEASRGSLLSTRAPLARSPPLLLLPFVGWGHMIGRQGVGCFLLLGSKHSHVSVKRSSSSLVSQPTSATLQPRVSSTSVAGLMDGLGEGGGTGAGGGALGSITAQEQQHGVGEAGARAPSGQHNDHISLLEEASGLANIHGKVHPEVHVLSPGLLDWVLAQHKEDATVQVGLDELSGGFWVTAMMGARGRYLATGEQTAILV

SEQ ID NO: 943463 - protein, 182 aa, Homo sapiens
  misc_feature (151)..(151): Xaa can be any naturally occurring amino acid
  misc_feature (182)..(182): Xaa can be any naturally occurring amino acid
FYLNKILIRMEAMDATFHLGEDVLFSIFSSPEFFLARAWVKLLAPMFWPECGLEAIISFLPFFLSGRGVRCGSRGVWRVLVCWGCPPAVVVGVLGVALLFCRARLRGGAGSGPFPSFGRLLGLFLLASLWAASVFLGPLAFFVPLRALFSXGPLPSVPRPCGLPGVAAFALLLFFGGRLAAX

SEQ ID NO: 943464 - protein, 185 aa, Homo sapiens
  misc_feature (63)..(63): Xaa can be any naturally occurring amino acid
  misc_feature (164)..(164): Xaa can be any naturally occurring amino acid
MGIGIISMLYNLFTLDILFIDKREKCELEKISSKRGVVEINEHMKCPLKEESVFLGKNQDSLXEATLCRGQSRTSINISWFTAFPKDTSGGAAFLSHWCRLSTELAFAETANPNPAVLSAETDEKKRPPGGDKISGKQSPTDAGKEEEANPYPRPPLTPALPPXAPYPPPPPQRSSCPPLSLPSA

SEQ ID NO: 943465 - protein, 238 aa, Homo sapiens
  misc_feature (35)..(35): Xaa can be any naturally occurring amino acid
  misc_feature (46)..(46): Xaa can be any naturally occurring amino acid
  misc_feature (48)..(48): Xaa can be any naturally occurring amino acid
  misc_feature (59)..(59): Xaa can be any naturally occurring amino acid
  misc_feature (69)..(69): Xaa can be any naturally occurring amino acid
  misc_feature (84)..(84): Xaa can be any naturally occurring amino acid
  misc_feature (93)..(93): Xaa can be any naturally occurring amino acid
  misc_feature (104)..(105): Xaa can be any naturally occurring amino acid
  misc_feature (122)..(122): Xaa can be any naturally occurring amino acid
  misc_feature (135)..(135): Xaa can be any naturally occurring amino acid
  misc_feature (150)..(150): Xaa can be any naturally occurring amino acid
MIAPCSFQWPCSPSIPQLWPLLPVGQEELPLPSGXPGRDLPIRSTXQXGPRRCPWEERXCRSGRSLDGXNWARRVFEPLGRTQXGVAAALSPXVYGMGPSYVLXXRRIGLGGRGRGAWIPLXVSAVQILWAGSAXMGFNLLRIFLCNSRXAGRKERPRPSSSAPQRGLVVLGRMGMQFWGAVRGVDPHSCPSLLRKPSASAQPRLGTPQPPSPRSPLDNPPAPLARSLGTAPRRILGL

SEQ ID NO: 943466 - protein, 240 aa, Homo sapiens
MQGAQEASASEMLPLLLLLLWAGALAQERRFQLEGPESLTVQEGLCVLVPCRLPTTLPASYYGYGYWFLEGADVPVATNDPDEEVQEETRGRFHLLWDLRRKNCSLSIRDARRRDNAAYFFRLKSKWMKYGYEYFKFFVRVMALTHRPNISIPGTLESGHPSNLTCSVPCFSEQATPPSSPGFQLPPPPWAPGPPSPRCSQSPHGPTTTAPTSPLSSRSLEPLLNMQSTIQLNVSYAPQK

SEQ ID NO: 943467 - protein, 144 aa, Homo sapiens
MDAVLVLLVGGDHVVLQGLLALLFRTVVLLVTDVIVVYYVVAGFVEMDTMLEKDDSAVTVVRDVQLVMRVVVADVPHPVGVLLQGLHGFGDISGVPELHLTVVSAAGQVVLLIGIKVKVPHQLSVGILYAVDLAHAPGVQPGWG

SEQ ID NO: 943468 - protein, 316 aa, Homo sapiens
NYSQYSELVAGRQQSPERLQGSYQAKASTVERGDTTLPPKDPKRPLKAYRTKTSFNWKELALFKEREDMRRFKKTIFSTLENKPLFPRPPGTEESLEKYRKQNFLQCKQICKYNFINIEECFKNTLKVPALIQCLDMYKSPLAAKYLLHSLVFSSAVYSSGSERHLTYIQKIFRMEIFRCFALTELSHGSDTKAIRTTAHYDPATEEFIIHSPDFEAAKFWVGNMGKTATHAVVFAKLCVPGDQCHGLHPFIVQIRDPKTLLPMPGVMVGDIGKNSGKTVWIMVSPCSTRSEFSPEPSEPDGRRHPEGTMSAPLKK

SEQ ID NO: 943469 - protein, 300 aa, Homo sapiens
PTFSPPPPPHPPTHHSPPLHHHFPTLSPTPPPHHPTHHPPLSPPPPSTSHTSPFLPSPSYSSSSLSTSPSHPPLPPTPPPPPPTTSPSPPPSPPPPPTSPPPPPPPLPPSPPSLSPPPPPPHSTLPPPTHFPPPPPPPPTSPPPHPPPTPLPPPPLTPPLPILHTHPPLKPHTPPTVTHHHLLHNFHLIPPSQHHHSILSHPITTYHPSNPLHLTNIKKSNHPSPIQLYTLLHTLPNPHHTSPQQISKFYLPNSNNNPFYHTTHSHTSIHPHPPLSSSLYPSNPNTIPPSPHITPHPTPT

SEQ ID NO: 943470 - protein, 97 aa, Homo sapiens
  misc_feature (1)..(1): Xaa can be any naturally occurring amino acid
XTPPNITTPTFHYLINTFTFPYTSTSNLSPPIYNINPPPSNYLKNYSLLFHFPFSTHYFSILFKDTPTTLPTPQILLLTYNIITTLSSDTNSHTTTH

SEQ ID NO: 943471 - protein, 312 aa, Homo sapiens
  misc_feature (94)..(94): Xaa can be any naturally occurring amino acid
AWLSARLLFSSSSFLFFVSPSFCSGLALFCMALANASTSPLLAASTASPGRSNWHMRGPSCPEAKAALNMPRACWYWGEVRVFWISSAVCGSDXPEGKLGSRRSWTSALARVGAIFSGVNHWPGPLAGRLLARLVRSLWPGCSGGQLSWMAWVGLAAVLAPFPELGAGLGLVAEAAAGAEGAGVARVEDVVDDGVTAADWLRELEEELLPGGPLLPSELARPGPVRAPSPPSSPRPAGPMNCMNRLLLMFPIWVCRAPSPPSAESSWPPLPLAPSSPGIGGVVQKLVDFAAMLLNLVCLGFLPPEEKPLGPC

SEQ ID NO: 943472 - protein, 129 aa, Homo sapiens
  misc_feature (1)..(1): Xaa can be any naturally occurring amino acid
XGSRIGIRKMCSRRCLSDDDESVHGRLSSDGGALSRPQRQRGHSLVEGLGLRCVHLHLTDTSYGGMKPGQEHMCAQAVFAFMYGMRVGCGGGWQMRDRTENGPSNPTSSPGVSRSLFSYYFASPYVTGT

SEQ ID NO: 943473 - protein, 103 aa, Homo sapiens
FIPYSSFYPLFPLLFSSLNPPPTPGKYETRPWRTSSLSTFFSYNKFGIVHHLSFHHPLSLPSFFIAPFILPNSTFSDTSQPIVPLASHSHRSSLCNTASPLMP

SEQ ID NO: 943474 - protein, 32 aa, Homo sapiens
MNVDLSPTAWRPRFPTDHRDTVTRDNGTYTHL

SEQ ID NO: 943475 - protein, 179 aa, Homo sapiens
TLNYQQNQPQEHRQTNHTKMEQKEACMDITPLRNNNGLSPLCANGLKTDIPARILKLPSFKQQHKEKLGGKNKPLTNLITTFKKNHDHLHALGKGTLFYLRLNNKRRLWNDRKKVTLGTQPTVLKTFRALSTINLFTCTNRPTVIKSSNHKKVFPKINLKEVNNMYPLKTEGYPDSLAQ

SEQ ID NO: 943476 - protein, 101 aa, Homo sapiens
MAFASTFLCPQEIHTLASMVYTHQARATGCARQSQEGLGHITAQVQVHQLQFSSVPFTSIVSQSRSRMEPSRGWVLPVWHWSCPQMASLRGAGHITATGGF

SEQ ID NO: 943477 - protein, 115 aa, Homo sapiens
MVVELSLLPAGAMQGQDKRPPVSQHPSMREKRGTEAAMSARGYGLLPDSNATIKDTEIGEVGEPYFYNKVKQICAFIPPDTQVEKNQCCGFCQDGIFLLLVPHMAFAMLEKHCTG

SEQ ID NO: 943478 - protein, 69 aa, Homo sapiens
GAAELHGMRSASEILGLYATPKSPELFQDTAAPPPPSWLELGREAYEAVISQQTAVQGWRQQLSSGGLQ

SEQ ID NO: 943479 - protein, 198 aa, Homo sapiens
  misc_feature (162)..(162): Xaa can be any naturally occurring amino acid
  misc_feature (166)..(166): Xaa can be any naturally occurring amino acid
  misc_feature (174)..(174): Xaa can be any naturally occurring amino acid
  misc_feature (181)..(181): Xaa can be any naturally occurring amino acid
SPLVLLSPLLFGGLRGKAEGGPTYLGERRPIFGAKTRWCGSRFREGRAYLGAGRGWGCLLECGGHRVLALWEGKEREAHKKSGRVDGRCFLGTEHVHCPGHEGQDKAWPEGVLEGIENVEEADLRGVAQPVPGAQQPHGQPKAGYLLAISQLCPTQLGIAGXVPGXEEEPGRCXVKDEGGXGLDIKVYKIRKIKKFGG

SEQ ID NO: 943480 - protein, 219 aa, Homo sapiens
  misc_feature (64)..(64): Xaa can be any naturally occurring amino acid
  misc_feature (69)..(71): Xaa can be any naturally occurring amino acid
  misc_feature (84)..(86): Xaa can be any naturally occurring amino acid
  misc_feature (88)..(89): Xaa can be any naturally occurring amino acid
  misc_feature (104)..(104): Xaa can be any naturally occurring amino acid
MEGAASGGEGEPSGLSTEELEEEGLAVGLAGALLEGPLGERAEEEGACKVVRVEAATQGRNAAXGYKEXXXCEQRTASCVEMVXXXRXXLVIKKAASREGREDXPADETVRVPERAEPEMYVIQDGALAALAARGEQLQEVPAAVGAALALVETLISEGLPATDAAEMLWVPVSAQGGHHLVSDGLVAEATSWREALKVARGAEGGSILLEKLLPPRAV

SEQ ID NO: 943481 - protein, 30 aa, Homo sapiens
MDSSILIVRSLCGEDSTKHVFVDWKPKVAQ

SEQ ID NO: 943482 - protein, 112 aa, Homo sapiens
MLRIAFLFPETLGLQANHSYSISFSLSAFLLLSKGYEVLKPYQEVTSLSGINTYPSVLKAHLLGIVLVVVVASVAGASERGLRRSDCFEQQKPTEAGSRSNASGSLSSPMQI

SEQ ID NO: 943483 - protein, 104 aa, Homo sapiens
SRPPVCWKATTALLIPYFLNISIDWKKQGEPLRSRFSEILSHSLTMVSLDSMSPVVNQDQAPTRLFSLSEERYSPKHTGSWSVMEANDKLDGELDREDRAFCMW

SEQ ID NO: 943484 - protein, 139 aa, Homo sapiens
  misc_feature (12)..(12): Xaa can be any naturally occurring amino acid
  misc_feature (96)..(96): Xaa can be any naturally occurring amino acid
MDVSERWGSVWXQAVPFTKSMGSTSLGGGQGHPHVVRGRAAACQALGPLVRAAVGWEALDLTVQVEAGDGIPMWPWLSAFQWEVGNEFLIILVERXKAKEAAHIVGSEETRVQLGRALEDCVLIGVVMKTVGLLAVTEW

SEQ ID NO: 943485 - protein, 239 aa, Homo sapiens
  misc_feature (8)..(8): Xaa can be any naturally occurring amino acid
  misc_feature (97)..(97): Xaa can be any naturally occurring amino acid
  misc_feature (105)..(105): Xaa can be any naturally occurring amino acid
  misc_feature (134)..(134): Xaa can be any naturally occurring amino acid
  misc_feature (152)..(152): Xaa can be any naturally occurring amino acid
LPRGTVCXQNGLRRPVRAQVPQRGLGYSRQARGADWAVGSPHCAPKVCPRLKEGPEEPHACNPQGCGSLTFYRIKGTWGWGKKHQVRQGLWAPDPRXARAQDASXTLAAPTAPGTGGCHGLAQAAAGHHATFGXLVPTEVSLEELLMGTHCXNTDLLVNDVHTAEAVEADLVETLSARSVCGVAAGARVLFLTAVKRPRLCGLQRCIFWFWGWGWDDFLLDLLLGLELELFLGGPRSDL

SEQ ID NO: 943486 - protein, 82 aa, Homo sapiens
  misc_feature (4)..(4): Xaa can be any naturally occurring amino acid
  misc_feature (33)..(34): Xaa can be any naturally occurring amino acid
  misc_feature (36)..(37): Xaa can be any naturally occurring amino acid
  misc_feature (42)..(42): Xaa can be any naturally occurring amino acid
IFQXKIGGRLGWFFFNGLLQERRREDLAHYPGXXKXXFPLVXPGRREERRRGQRGGRGAKAVMLWGKKLRLRLGAQGGAAQE

SEQ ID NO: 943487 - protein, 183 aa, Homo sapiens
  misc_feature (9)..(9): Xaa can be any naturally occurring amino acid
  misc_feature (22)..(22): Xaa can be any naturally occurring amino acid
  misc_feature (36)..(36): Xaa can be any naturally occurring amino acid
FQTSRKQQXEATSTQKHPCVCXTHSSKAIPLARTQXSPPSHLRAKENSRKQTSLIKGHTQVIFDHNGQEKEIKTKKKRKGRSFLESGQWLFSSLCQSRTLINLNTEGPNAKLQKYFRQLSSTSCGSSSDSFFILRWGGALPPRLVQSGAKLDLLQPPPPGLKGFSCLTPPKYLGLQAHATTPG

SEQ ID NO: 943488 - protein, 173 aa, Homo sapiens
  misc_feature (18)..(18): Xaa can be any naturally occurring amino acid
MGQRGGEGGRRVGLVAPXISLGLVVGRGSRVEEGPERQGMGGKRKEVPSCRKPPSSSQKEEERGEKREEVEEEEEGGVGEGLLEKAKDVKKGGEGGKGGVAVRGASGPEGEAQHPLQPLRHTRREKEGQRPTQPVYQIQNRGMGTAAPAAMDPVVGQAKLLPPERMKHSIKLV

SEQ ID NO: 943489 - protein, 116 aa, Homo sapiens
MSRGTFEFDTAPSTRGIKFSFLLMARKLLLLARELKASVIFPAALSVTSLLTLLSTAVRVSRGPAPLEPGSSQIGRRLAGAQGHSSADTVFSEIGNPWGSNLLSDGQKAHEALLSI

SEQ ID NO: 943490 - protein, 151 aa, Homo sapiens
MTTISWIFEDKMSKRAVKLEFIAFMLWKEAANLLQLSLNCLMMLADLLKPVDYALLFALVVGNNQECSSFEQQNFIGPNDLGKNPEVHLQLLNVGNQLVEDAGPGFVERRIPDGRSKTSTLQRARQTPQVFLSLFKNQVKLILLNQIHFVH

SEQ ID NO: 943491 - protein, 180 aa, Homo sapiens
MGYLNRQSQYDLIFFKNSTPTPFQSASFHCTIVEEMEEQDGFGWLESHLGEAGQVGFATGVVLISSHEDISFVSPVFSPAVFNYPVLVSLLDSISYCENRMVQIIAIAAFIIIHTFAVKLEGGQACINGHRDRSHSGHCPLQRLSHSPRGISLYPLDFSCLACWGCTYNSLPVLHMGRHL

SEQ ID NO: 943492 - protein, 46 aa, Homo sapiens
  misc_feature (12)..(12): Xaa can be any naturally occurring amino acid
  misc_feature (37)..(37): Xaa can be any naturally occurring amino acid
PLTVILRPLLVXDGVCRQFKLPPLAAVVAPLAVEWGXLEVGWVAGS

SEQ ID NO: 943493 - protein, 90 aa, Homo sapiens
FQAKCNTLIPCFRNDTDKPGNPRGVEQVLHTSLGSSTTFSPRVHHGGAPPVRPPFHSLLTVVDGVALYIHFRGQRLAAQCYNCRYLFDLE

SEQ ID NO: 943494 - protein, 128 aa, Homo sapiens
  misc_feature (64)..(64): Xaa can be any naturally occurring amino acid
  misc_feature (68)..(68): Xaa can be any naturally occurring amino acid
  misc_feature (71)..(71): Xaa can be any naturally occurring amino acid
TSPLTIVSASNGESFVLQYDCYWWGTSGDLGGGGLLGKDLPVICYTTGQISIYSNSHFQNERTXQEFXILXSFENVSWLDFDFLEIEITDKWSKNKLVKIVLGGVSVETWGGVDEEGGILEEARRHTG

SEQ ID NO: 943495 - protein, 103 aa, Homo sapiens
MHLLHPGSEAKGEVKRPPRPVPKGGQTAACDVKGQVGDTLAMDPLKALLLLAPPGIVEMNTTATGQGPDLGVGGSRPPGTARHPRPLQSGLSLASRGLLLLVF

SEQ ID NO: 943496 - protein, 113 aa, Homo sapiens
  misc_feature (79)..(79): Xaa can be any naturally occurring amino acid
  misc_feature (81)..(81): Xaa can be any naturally occurring amino acid
  misc_feature (90)..(90): Xaa can be any naturally occurring amino acid
  misc_feature (109)..(109): Xaa can be any naturally occurring amino acid
IITRTHVINGYQFVSPLLPPTLGDHPLGNLPYAASLGRSPSSFGPAPEAECHCPWTLFQSAPCCGEESLWDLEVTRLGXWXRFFFFFLGXEPAPGASANPQAKGVFCVXGSFF

SEQ ID NO: 943497 - protein, 204 aa, Homo sapiens
  misc_feature (35)..(35): Xaa can be any naturally occurring amino acid
MGPAGDIGAPNGKALPSFPSSSRSHHRSTGMRPCXLNTVAVLWQSADSLLSILHLYLCTFSISAGSCRILLRASKKKGCLMIAINNIFGSAETSHPGLQTEHFYSTIIDEFLYTSHCLILLIKPSALLEQESHSAFSANCSCTWLMQNLYPSFRFLTTCFTAAAGLSFPPLVCALARCREAASSCAALHVQEQLLQPPPVFAQL

SEQ ID NO: 943498 - protein, 191 aa, Homo sapiens
DCIGRQYICCFNYTQKPADTKITDIQNERRSCTCMKPDAEPQCMREGHGASIKKKNDQRTAESQFGAIPGKGAPGALVEPGTHTSWAGLGSPRSQPVFSHSFCVLIYHQQPQPLGAKPYTPPSSPLLVGYIITSPLPNLNVTSDSVITWGQAWQPPGGLVIHERMLALSHDDSSVDPVAQPSERLGRTSHR

SEQ ID NO: 943499 - protein, 72 aa, Homo sapiens
VRVSLFLWCSCWRLVVQRGLTPIGGTCGTMRVHHPVAVAKDDVIPGNELKKVVVKGNNNKQQSKSGESEEYS

SEQ ID NO: 943500 - protein, 164 aa, Homo sapiens
EEGGVLREKENISGSNKVREIYFIGDTGGNSHCVPELFNGNGGVKGGGGGGTFCKFHRDDACLRPTWQHGGWLDGPPRGSNHVDGLLDVHLFLILTAVELEEDVFEKVAPVQYFHGVNDAKIQWLQDSSSVGGQITNLNPFQVWKHVMSRAVVYEQEDPAFRPL

SEQ ID NO: 943501 - protein, 56 aa, Homo sapiens
MPLRFLHKPVGISTVVPINLGHCQAAQSHQGPLHCCDVFTFKEVNSLEHVSFEDPI

SEQ ID NO: 943502 - protein, 182 aa, Homo sapiens
  misc_feature (182)..(182): Xaa can be any naturally occurring amino acid
AHNKASKTRSRPGPNVKRRWGVNPRQLASQAEVVKKRRPHVPQERRITHIHELKVYRTATEIPSNHRHILEGQPHRSPSQQQLLHKIFHQLRAVVGGGCQAQELFTPGESFAVVDGLHIDAMLGEQEITELAVECCIAHPDGDDMAGAGDDRQARLSISSWRMCLTLRWWARAQGLGPPLPX

SEQ ID NO: 943503 - protein, 211 aa, Homo sapiens
  misc_feature (5)..(5): Xaa can be any naturally occurring amino acid
WFSPXRPQGQSPQLLVENMESAKITIRCRFLPVAFHLPVSLVFCLEGPQNNSPGYHLHPKSGEDGQARTRRVLQRGPIRFKGRTLYLLEMLASISFCSSLVFSSSRSSLGSRAALLLKCLLPASATHQPPFFKAQPAWRTAFQPFACAGNSSPLSSHIPLRAGPGIHKTRLLASLQALAKPCHNLASLPAPAHPWLTHPSSLWLWPLPGMA

SEQ ID NO: 943504 - protein, 66 aa, Homo sapiens
MHTLFPEPSPAIYKQDAAGKKTTGISRRLKVRTVRGFYVVLLVPHGVWVCEEEAAALKITILELIE

SEQ ID NO: 943505 - protein, 201 aa, Homo sapiens
  misc_feature (77)..(77): Xaa can be any naturally occurring amino acid
  misc_feature (99)..(100): Xaa can be any naturally occurring amino acid
  misc_feature (102)..(102): Xaa can be any naturally occurring amino acid
  misc_feature (104)..(104): Xaa can be any naturally occurring amino acid
  misc_feature (108)..(109): Xaa can be any naturally occurring amino acid
  misc_feature (112)..(112): Xaa can be any naturally occurring amino acid
  misc_feature (118)..(118): Xaa can be any naturally occurring amino acid
  misc_feature (121)..(121): Xaa can be any naturally occurring amino acid
  misc_feature (123)..(123): Xaa can be any naturally occurring amino acid
MTRLKRKGDCDGVVWPTALGGPQEASSPVGYGVRSYEPGGVGGRVGASSPHGPAMGMEGPYLGLEMIVWSARQLLPXSFLWVPAGVAWCPVSAVLLPGXXGXGXSAGXXLAXRPGGGXLLXWXGLLPWVGLMVQKINVGIILMLQGASCAPWGSDIRRCWDSIYPFDDAVVVQDVTCQQLHPLAASCMLAETLLGPWASVL

SEQ ID NO: 943506 - protein, 109 aa, Homo sapiens
MILSLGPETPSCPLGQPPHSGGGKGVTLSLVCGNAPIKVRGAPGERLGDVGHFLFLWSHPVLRERRPHPWSGVPRGGWGVIFPSYYGRTPKSCLSKLPTPHPKGSKCNP

SEQ ID NO: 943507 - protein, 215 aa, Homo sapiens
QLRGQAERQQKQTGQGGGTKGDGTKGGRKKGQKAGEENRQRSSTGEKKKGGKQEPGEEGGQEQGGGGGGGWKGRKGAAGAGAQGRRGGSQDGDTGRAPGQGPETVTGKEEERAGPGAEGGTEQAESPPGGPGSGGRKSGGPEGRNGPGRGQKHAAGGGEAGKQDKARGAPEREEGKEGEKAGEGGTREDREEDGGTAEATRAGPRGHRERALGQG

SEQ ID NO: 943508 - protein, 279 aa, Homo sapiens
DTREQGGTKKQAGPGRKAREQRTAGRRQRLEPRPSSTEENTQAAETRGPPPAPAGTQRTTGKGRRPTAARGNGGNPPTTAEGTTEAQPPKEAEGKEGRRRGHKGPQNRPGYFRDKGERTDRDQTGESEREDGKRSRVGAVRQWVRETVDGQLSPAEPEEHPEGGRNRLRTQHKARGGDERIKATWHLHRSGETPKPDSAGGYGNPSEAREAGRLIVEPVYAGRKRPRREEEAERPGGGGGAPGQNQQDPPARGEHKGEGRTRGRGKTEPREVQVQGPRD

SEQ ID NO: 943509 - protein, 254 aa, Homo sapiens
  misc_feature (99)..(99): Xaa can be any naturally occurring amino acid
  misc_feature (114)..(114): Xaa can be any naturally occurring amino acid
  misc_feature (116)..(116): Xaa can be any naturally occurring amino acid
  misc_feature (151)..(151): Xaa can be any naturally occurring amino acid
SECVFSNFATDRVGKLCSGVSAFSFCSNSVIFSAYLSSLVEYSSSEAIRDLRAWSMVRSASSSCVARLWATSALCSERSSPPSRITSFLATSPDLRSEXSAMCLASFSCIFCSXIXSSTFKARFSDELNSSVALISGLLGLLQLLQGCCEXLLGPVQLLLNQLNAAVQGGHSCLSISCLLLGLPQFLLGLLHGFRILFHLILCALDLLLEGLLLLLQPLARFLSLLFVGFGLRGAVDGVLLYSFSICISSEGVM

SEQ ID NO: 943510 - protein, 189 aa, Homo sapiens
GGGWGRGGVGAGEGGGGGGRGGWGGARVGRVVGGALCGSEECAPFPGGWAGGERGGVGAKGGGGGVGALALGAGLQGDDRPVLGLLSVTVLEKAQQRRGLHGLDLGSAVPEQTLELGLGPLSRALSGGFCRALGVAVQVVVSVHIAVQALCIQLLLPPSFFSMPLGLCQVLADSLSDFHIAQVTFYLCI

SEQ ID NO: 943511 - protein, 73 aa, Homo sapiens
  misc_feature (33)..(33): Xaa can be any naturally occurring amino acid
AEELVGKHSALLESCQAMPGHRIMGLLALSCQXCPGGVEDAHMRHLGLTTHQPTWERVLPQQEDTIIQQEPNQ

SEQ ID NO: 943512 - protein, 193 aa, Homo sapiens
  misc_feature (52)..(52): Xaa can be any naturally occurring amino acid
  misc_feature (74)..(74): Xaa can be any naturally occurring amino acid
  misc_feature (80)..(80): Xaa can be any naturally occurring amino acid
  misc_feature (88)..(88): Xaa can be any naturally occurring amino acid
MGLLGIPQGRVGLAQLEVGLDVVVVLVEDGRAVVQHLVVLLDHQLALAVVEXQRRDLLVQLDPFRGPRLFLHLXVLEAGXGIVVLGSXLLHMRLAVEPVALLVDKWHCLCLLFVCYGPWVLLVRSKTLHLQHLHVEEEGLGVLLQGVQVSMAQGAVFTHLFYNAAVPLALQGVLAHRDVAETFGHQRVQDHML

SEQ ID NO: 943513 - protein, 217 aa, Homo sapiens
  misc_feature (28)..(28): Xaa can be any naturally occurring amino acid
  misc_feature (79)..(79): Xaa can be any naturally occurring amino acid
  misc_feature (82)..(82): Xaa can be any naturally occurring amino acid
  misc_feature (135)..(135): Xaa can be any naturally occurring amino acid
  misc_feature (178)..(178): Xaa can be any naturally occurring amino acid
MVWAFVGTLPWEGGMRWLEKCSWRVFFXCPQGHGIFYSFFVPKGQSGGQGLFAKELSWGKRQGELPAGPKGEQGLDPRXEQXPRVLFSNRMKQGGRLWSELFYGFLHYWLFRMVLMKSFLYGKPHIFQLGEQQRXIYLYFKGTCSPEERFDLDARILLLQSTGQLQVGCLEAAGLQFXTTMRTPLPGSTSSGGGATDVCPGSPLIAAGSARAPAFGC

SEQ ID NO: 943514 - protein, 194 aa, Homo sapiens
MRRTQRSLWCGTCLRRAAAAAEPPACVPSVARGWRRRWQRRYWREVALAQERVSFMLLRAAVEHTIVVESLVLQPGGCHNYTLPVLEKGEFSVPGVQVHANYGALAEPRREAGLVALVVEEARFGEAPAVLIPAQQAAERVGVFVQVHIRRPDAHHHVGAVDGRGHLDLPEVLALPQPLGAPDGRRAAPVLHVG

SEQ ID NO: 943515 - protein, 222 aa, Homo sapiens
MGCAGGTVLERAEQARGERERQSRPGHGGEELRSLNFGPRGKEEASWSSVDGYGEGNVLVSMGERMPAGTSEVTGQAEPPTLTERSLRALGLSGNVTAKIYIYIYINHSWEGRGKAWGGIRGSGVASRSQLCLPETPRGWCPSVTRSRSCPLAAGYPRSSEDSPWIFREQLGIPRKEPIISGYCQPTQIHQRPLHTGHVLSFPEVHSLEDVSCVNAIALSCL

SEQ ID NO: 943516 - protein, 114 aa, Homo sapiens
MGRGPQLARLPTNMEAPLISQLRRGLLCGEPTEEALGEAEHMKGPRDLRIDVCDANELAEGDDGPVAAEAVTFGLCLHLDMRTFKSYMKYHGILYGLHIVLYNANGELLCSVLF

SEQ ID NO: 943517 - protein, 218 aa, Homo sapiens
CDGVKLHPPPDGYDVGVREGGEVGEGGIGHNFVHHGLGHHLAKGPGLGPLQDLCGALQGCRQRGWLLQDVADVVEPHVALLIPTEHNPLIRAGAEREVGQLGGRALQLRQDHHCHRGLAAPAPPPLPPAPQADGAQAAPLGGHDVLIHKCQLIHSPPDASEPSKKKNSYFTQPPFLGVVQPAVPAAAAEIAAGQQAGVRAGGDRAEAQGDRGGVQCEL

SEQ ID NO: 943518 - protein, 192 aa, Homo sapiens
  misc_feature (35)..(35): Xaa can be any naturally occurring amino acid
  misc_feature (46)..(46): Xaa can be any naturally occurring amino acid
  misc_feature (49)..(50): Xaa can be any naturally occurring amino acid
  misc_feature (60)..(60): Xaa can be any naturally occurring amino acid
  misc_feature (65)..(65): Xaa can be any naturally occurring amino acid
SRLPARMMLQELSGHKVLLGGQFLKTHRATWVTYXHQEKKEPQNQXRDXXNSDLSFLRKXLFFLXLYDGIITFLLNVGAIVTDSAILPPVSRCEEELQTSSSRSHSSFLSGNSCPCPSPPPSPAAVFSLRKAGCFPAMADSRLSTPRHNGDQQPLATSPLGQRPGLQAHAVSLPANDHSGGRLCAVRVVTVN

SEQ ID NO: 943519 - protein, 106 aa, Homo sapiens
  misc_feature (1)..(1): Xaa can be any naturally occurring amino acid
  misc_feature (4)..(4): Xaa can be any naturally occurring amino acid
XVPXQDVGVQQVSGREGPLAKGANISVQRVEVVLVVVQGIEHLEAAGHLAGKTRAPWGFSGTWATCMSTSSEVEVALHLPILEELVAPAGSARGRAKKRKGAAPAG

SEQ ID NO: 943520 - protein, 95 aa, Homo sapiens
  misc_feature (63)..(63): Xaa can be any naturally occurring amino acid
  misc_feature (66)..(66): Xaa can be any naturally occurring amino acid
  misc_feature (68)..(69): Xaa can be any naturally occurring amino acid
PFTDVSFHRPPGPTSHYHPICLPQQSAGTLGPLEDAGGGQLGIRGVAELGDQPLALSREELLXPKXRXXGDIDSLAALSLPRPAFRPRPLTWAYR

SEQ ID NO: 943521 - protein, 192 aa, Homo sapiens
MATRGTSSARERGQSRAEAPPRALLAPPPPPAPHPSPATQLFSSSTPPGTTPPAQPSDPPPRPQRHRQAQAQRTPSPPPLPTPFHNTRLRPPTPRSPGALIPTLPAPPAPRSVMDAAFVCSFVMKINVRSRKLSRCWSCSGVQPRVPATSSMSIMVTPPCTKPCRVQCEGPTRWIKLDWLSLKVYGSGLRTG

SEQ ID NO: 943522 - protein, 256 aa, Homo sapiens
MPNTQPGCKGGPRNCSRGKLGTGAPRRRILRRHTHRASHRISSKGLVKKSLSPTPERKRGGEKEEGKRLEETENKAQLFQAHAPSQGRRIPEGTQDRRRGGRKAAFPGGSKFWAGGQSCCGGGGGGKGEAPEPPSFTESTILPPTCMFNTPILTQQPPITEYCCRRRTPPPQNHLPTVHRHPAPPPATPTHTHPLPHNDRTQKTLYFGTVFVTRMLTKGPGEYPGKGPPTPKTKDPRFSFPWREPDRGTGERVEMG

SEQ ID NO: 943523 - protein, 99 aa, Homo sapiens
  misc_feature (38)..(38): Xaa can be any naturally occurring amino acid
  misc_feature (46)..(46): Xaa can be any naturally occurring amino acid
  misc_feature (55)..(55): Xaa can be any naturally occurring amino acid
  misc_feature (97)..(97): Xaa can be any naturally occurring amino acid
LSDKYIQTHYSERDLDGDKRPHCNRGITQTSGMVLRRXPTLCGKQXGLWGRPLRXLRMAGPERYRNRRSVLVWRKQEVTLITSFAQMIEFEIPPGLXME

SEQ ID NO: 943524 - protein, 142 aa, Homo sapiens
  misc_feature (55)..(55): Xaa can be any naturally occurring amino acid
  misc_feature (60)..(60): Xaa can be any naturally occurring amino acid
  misc_feature (77)..(77): Xaa can be any naturally occurring amino acid
  misc_feature (79)..(79): Xaa can be any naturally occurring amino acid
  misc_feature (111)..(111): Xaa can be any naturally occurring amino acid
VFWGWVWAVFDTNTSFTDLIFSTVCFFLLVGVDATAMRAGVLAVWWAGAWRRGGXSLGAXLFGCDPFRTASVPRIGXVXPWPFPLCVWVCVLAVSLLGVWVSGCFFLLLQXVVAFFIICAASSFIFTLNTHQFPKFDILVIV

SEQ ID NO: 943525 - protein, 203 aa, Homo sapiens
MPSTQTLLSPFSCLRVQIVLGGSVGTCTRMVFSVDVVYKAPTEYWIPVLEKAVAHIKGPDKLEAAVAVGEDVQQALVVTSPVLGFLVGHAEQVGFQLQTLQDAVGSAVHHHQAVVLAAWNDVPVIRQQGQHGSGVYSLVLQGGWAGSRVVDGQLLVIGASKQDVRQVEEAQHGELDFISPNCCPSDAMSQSFTVLSQEPEHTR

SEQ ID NO: 943526 - protein, 179 aa, Homo sapiens
  misc_feature (105)..(105): Xaa can be any naturally occurring amino acid
  misc_feature (113)..(113): Xaa can be any naturally occurring amino acid
  misc_feature (124)..(124): Xaa can be any naturally occurring amino acid
MRCSSGICCWGIIVEEVVVVDVNEEGSWVSDDEPHHTAVLKYVEMEKEEKEGGQWDVSNDAGERPEENIPPPQDKKVIVEEGPGQEKKYFGNKIDDAKLKNGLFXVFVAQFVXRGVPVLQEVGXRLGVEKVKVEIKVEKMHELSKGIKAGVEEPVEEDEPDEVIGDASFRRRSMMRELS

SEQ ID NO: 943527 - protein, 143 aa, Homo sapiens
  misc_feature (29)..(29): Xaa can be any naturally occurring amino acid
  misc_feature (34)..(34): Xaa can be any naturally occurring amino acid
  misc_feature (40)..(42): Xaa can be any naturally occurring amino acid
  misc_feature (45)..(45): Xaa can be any naturally occurring amino acid
  misc_feature (61)..(61): Xaa can be any naturally occurring amino acid
  misc_feature (77)..(77): Xaa can be any naturally occurring amino acid
MAASPDFKNFGPSSSFFPERRINLFLQLXKLACXVSRVAXXXRGXAGAYLAWMVRDNLLSXEASCFHWWVIFAVPSXVATTNILERDILDIEAHIVPKKSFTQSFMVHFERIYFRCNVDWSKGDHHTGFEHTSIHSANRHSDK

SEQ ID NO: 943528 - protein, 98 aa, Homo sapiens
  misc_feature (62)..(62): Xaa can be any naturally occurring amino acid
  misc_feature (64)..(64): Xaa can be any naturally occurring amino acid
  misc_feature (72)..(72): Xaa can be any naturally occurring amino acid
  misc_feature (89)..(89): Xaa can be any naturally occurring amino acid
ASGVSFCSLGSRPSGLWHARTSGPWSGGRAWRGRCPGGPPAGKLLPKNENLEEKKDEKVKEXSXRKTITLLXPPKQKEKVLEKDEKEPXFFFFFFFFY

SEQ ID NO: 943529 - protein, 192 aa, Homo sapiens
  misc_feature (1)..(1): Xaa can be any naturally occurring amino acid
  misc_feature (7)..(7): Xaa can be any naturally occurring amino acid
  misc_feature (9)..(9): Xaa can be any naturally occurring amino acid
  misc_feature (84)..(84): Xaa can be any naturally occurring amino acid
  misc_feature (108)..(108): Xaa can be any naturally occurring amino acid
  misc_feature (134)..(134): Xaa can be any naturally occurring amino acid
  misc_feature (136)..(136): Xaa can be any naturally occurring amino acid
XYINPCXVXPGFLAGGLGFIEKFTDLFDMLFLNAVLPVDFSKQVGRGQLLLWVPECGLGANLPQVVQCLLTDVDSFRLGTVFVXLFHFLWGIQHGPVSHHSVQKVKRXAVRGCDVLSASDDTVASVGCQDDVGXVXRLQGAVQVGEALNVQHVDLINKQHSRDQLSNALVMYLFTTLLISPRSLSVISVFFG

SEQ ID NO: 943530 - protein, 280 aa, Homo sapiens
FLWWFCHFNFKPVLDVIGVFGIILVRDKGGGQGFGAKEACPGHPVRVGVRVLRYVVVKEDVGSLVVHPPAKQIGGHQAPPLEIFGLLKECVGLLLGHAPVDGDGREVLLHEELGQGHAALHCLDEDYHLVKLQHIQEIKELAVLLTVFEFDVVLLQAVQRELVSSSTNTSMGSCMNFLHTGRMSLLRVALNIMHCFSCGVRRKISCTSRRMSSCSSILSDSSSKKYFTFFEAEAPIPHERQDAARGPTTTWGQFFFNTSSSFLMERHRRHRNLTLGMYWK

SEQ ID NO: 943531 - protein, 257 aa, Homo sapiens
  misc_feature (34)..(34): Xaa can be any naturally occurring amino acid
  misc_feature (56)..(56): Xaa can be any naturally occurring amino acid
  misc_feature (215)..(215): Xaa can be any naturally occurring amino acid
  misc_feature (221)..(221): Xaa can be any naturally occurring amino acid
DKKILQYPSGKGVGWGVLIVHFLAGSPRDRPSGXRKPPPEEGKENDSGNRPGGGGXEKSKKQTPPPQMGKRDRELEDEKGGVGGVAKNKNKGPGRTGVLEGLVGGLVLDKGGGNGLVPGENGGRVGGLWERREERIRGLGGGAEYVWGGTRKGDTGTLRGEGTEREQKAGAQGVAPERWWGQGGAVERGESRDGGAGRRREELGGAQGHGMELGXWGASQXLHDVLPPPAKPITKTGAPKVVGRGKQKRVPLPQRGA

SEQ ID NO: 943532 - protein, 148 aa, Homo sapiens
GGLASSSGLLVLCFVDPPRNSLSHITDGKAAQRRIVWEALNTHGLAGGRITNGSLTRLQEFGAIFQLFTRTAINLFLQLSQPACHVSRVEIRYGGRAGAYLAWVVQDTHLSSEASCFHSGVIFAVTKKVATTNILDRDILDIEAHIEK

SEQ ID NO: 943533 - protein, 112 aa, Homo sapiens
MGQLALLWEGLIEAGLAIGLVILLPDIALRQLCQAESTHKVLRMELVPHGTDTTASDGLPTPMAERSPAVMVMELTEWTSIQFKEGASRKTGEAVPTNKALWGARQCPWAER

SEQ ID NO: 943534 - protein, 138 aa, Homo sapiens
PDSRDGAAIVGSKKGDTGEGFLPQLLQWLELSNVEFAALDGVCDFFGEAFVCVPQGPAVLFIVLPDVWQYHSVFLLFGVVSLFFFHHKGSFGQVSEGVLGLGLSSQRLLTFIPLLLRSRGSSLFLFLPLSLGLLLLFP

SEQ ID NO: 943535 - protein, 165 aa, Homo sapiens
MKAPGFCCSASCTTFFFCSWQREHVVVDEPLQGRESERVAQGSLLEPCQGMQTHRARCACPGLFQLFVRHIRATAGRIQQDVVDLMVAWIRGGDRQEVLLSQYTARDASPGQQCGHGCQPLGIQVKGKDLPLVLQKSSQVTGLIAWGGTGIDDMGAWRGVSSMAG

SEQ ID NO: 943536 - protein, 123 aa, Homo sapiens
  misc_feature (87)..(87): Xaa can be any naturally occurring amino acid
APVSEGQSYSRTLGAWVLGGGRAQGPQAVPGERAPVSQGHSYSRTLGAWVLRGGRALVLQAVPGGWCSGISGSLLQKASGGPGFCRXGRAVVPRTPLEDRALAALSVLTVQEGGKSRVMLCGI

SEQ ID NO: 943537 - protein, 80 aa, Homo sapiens
MFLAGPCADQSHRKWATFGAPSPPSDKTKEGGGRMVVMQDVSILARWGQAAGEQLGVAKKRQSGPCRGVQLHFVQDGLLD

SEQ ID NO: 943538 - protein, 259 aa, Homo sapiens
METASNSKKVTAQGVLGKEIGEERGLGGGGWGLEPWEGSKEEEVAVASVWGDLSELSPGGLVACTDEGVLGTQTHQATVSVFNKWVLTLATKDQATGTKGELKDMCRVLNKYQGEQLTSIQGQNEQQVLQSSADIRYKLQGQFLFEGLFQFREASMRCVHLPGANFYSQLTHAANATHLLSPFEKHLRWTMEGPDSSYSCLLIHICWKVDSEARMEPPIHTEYLRSGGAMILIFMVLGARAVISFCILSAMPGYMGGAP

SEQ ID NO: 943539 - protein, 197 aa, Homo sapiens
  misc_feature (58)..(58): Xaa can be any naturally occurring amino acid
  misc_feature (121)..(121): Xaa can be any naturally occurring amino acid
  misc_feature (125)..(125): Xaa can be any naturally occurring amino acid
GGPASTVWIYLYTREGGGRGSGGKLENKIVTMSKLGGRCRGGCEGPTKPQGTGEGGGXLGGQEEPPEQKRRPELGAFVLVGVWGEEGRWPGPRGWAGSSGPGLRWGRGWGGGAGRRGGLGXSGVXGFGRVRACQQGDGGVIGEVPTSEMWVPSPSSNSSGRSLLPVSKEPGPSRFSGCAVEFTSCFPESGLLFSALG

SEQ ID NO: 943540 - protein, 129 aa, Homo sapiens
HLRLPHFPRQTRGTLQAEGKQLPGAALQGRWGGGEGGGAAWRWGGGPGGRGSGGLGTPNPHLLVTGGHTPFFRGAMQTLDNLTGAGVSRGGLGGGEGMGSGPWGWWGGAGGASPLVGGVAGLGPCVLKL

SEQ ID NO: 943541 - protein, 312 aa, Homo sapiens
  misc_feature (28)..(31): Xaa can be any naturally occurring amino acid
  misc_feature (35)..(35): Xaa can be any naturally occurring amino acid
  misc_feature (51)..(51): Xaa can be any naturally occurring amino acid
  misc_feature (117)..(117): Xaa can be any naturally occurring amino acid
  misc_feature (128)..(129): Xaa can be any naturally occurring amino acid
  misc_feature (140)..(141): Xaa can be any naturally occurring amino acid
  misc_feature (146)..(146): Xaa can be any naturally occurring amino acid
  misc_feature (170)..(170): Xaa can be any naturally occurring amino acid
  misc_feature (187)..(188): Xaa can be any naturally occurring amino acid
  misc_feature (192)..(192): Xaa can be any naturally occurring amino acid
  misc_feature (195)..(195): Xaa can be any naturally occurring amino acid
  misc_feature (202)..(202): Xaa can be any naturally occurring amino acid
PRLRASWFLETCPATANTGKREGGIRKXXXXTGGXGKGGPPRLEQQEEGGXGEGPGRPGGPPPPEACLLEEREDLPPPPALRKRLLAGAPPAPPPPGGETGPLPPGPPQPPRSRARXSRGKKPLPNPXXPNKKAQEGAAXXTRGRXPAKSPLVPDSARSLLSSSQAESTXRGFTLTAASAPRATGRXXFTTXKGXVSTAATXPEKPPATKLMPTEVWAFGLSPLSQLFTSPELDQYRAEKGTSRRAVGPQPSHSERHHPGATAVRTQAPSSRYDTSRACSFVRISTRGLITVTVPRRPARHQPWVRRGQRAG

SEQ ID NO: 943542 - protein, 85 aa, Homo sapiens
AGLANLGVFGECGFSCDSGVKVGERFALRLALLSHSSRGPCWPWVRGRWARGAPRVCGFGAWGAPLPSVLCVPMTPEIINRNLHY

SEQ ID NO: 943543 - protein, 143 aa, Homo sapiens
VIAQGGKQPRVSRGPVHGIDAVLVLLVGGDGVVLEGLLALLFRKEVLLATEEIAAEEEAEGSDEMDTMLEKDDSAVTAAREEQLVKRVVVADVPHPVGVLLQGLHGFGDISGVPELHLTVVSAAGQVVLLIGIKIKVPHQLSV

SEQ ID NO: 943544 - protein, 145 aa, Homo sapiens
MERLATRRTAAQPCGTFSWEYTSYTPGGRTGPQWTHQPRRREPAQNRIGESQTEFWRAATESSPQEWICVLEPREGHSAGLKRKIRPEHASADTGRPGRGRGMAGPGGAGKRRENIESTGGDTVGGDGGNGKRSGRRTRVGDLGK

SEQ ID NO: 943545 - protein, 119 aa, Homo sapiens
  misc_feature (84)..(84): Xaa can be any naturally occurring amino acid
  misc_feature (97)..(97): Xaa can be any naturally occurring amino acid
PASNPQHQQTLQRHAALYQEARGLGPYNIHIFLEKRVKRSIYEKEEGCRLKQRLNSQGHVGNTSRHSAATTVHTLTQARPAGFXRASRLHSGRYPFXPPNPQNPKQGITKKDTGKPNDS

SEQ ID NO: 943546 - protein, 133 aa, Homo sapiens
  misc_feature (11)..(11): Xaa can be any naturally occurring amino acid
  misc_feature (46)..(46): Xaa can be any naturally occurring amino acid
  misc_feature (116)..(116): Xaa can be any naturally occurring amino acid
RPSPFPEGAWXGGNLPPSTWLDLGFGKAAHTISWAFPRRQAGFCGXEAEELGHCNSERPGEPLCYLSQEEGETKAQSLKKDILSRPPIPKPWPLGQSRQNQESQKQKAPSMLVHGXIAGRCGKLPPPTPGLGY

SEQ ID NO: 943547 - protein, 148 aa, Homo sapiens
MASNDAHDGDGGLGRWLPSQGEGLWQPLVLHMARVSLLFSRRHHHSCPLLEGSISCWPGLHKLGVLSLVLAIPLPGQCDLRRVEAQGPAPQGGLMVRDGMVGLCVFGCSRAAGLLPVLQVSAEHSTHVPPGRLSTARLTGRFHLRWVI

SEQ ID NO: 943548 - protein, 104 aa, Homo sapiens
GGLGGLASSGGLLVHCFGGPHSNCVSLFTDSKAAQRRVVWGALNTHGIAGGRFNNGGIPRLQDFEAFFRLFTREEVNLFLQLSKLACDVSCVAIQYRGIAGAYF

SEQ ID NO: 943549 - protein, 248 aa, Homo sapiens
  misc_feature (175)..(175): Xaa can be any naturally occurring amino acid
DIDTLHVLLKLGDLLLQQVCTHLVEIHQKMNLYFRIKYPTLTSLAAPQTSPSSWIERTQASSSAMSVSSSQGLKSSRKEELATSAGFLDFFSGYCCSSSSWSCAASLSSSSLLLPNRSMSSSSSSSAGVGGFLAGGSIWRMAVLCWVCGVVVSGRRVLFQHVQLGFQLGDDLLEXLFHATQIVVLHFQTGNPDDELTMVSLVPLEAPGPELPARDFWMFSLALAMSRRITLAPFSWGEAPATGPFICS

SEQ ID NO: 943550 - protein, 67 aa, Homo sapiens
TQAGPGRSCLLSQTGKREPDLLIQPPPASHAKAIPKIPGSDTASPLDPSWGCSSAGGAPKLAPYNVE

SEQ ID NO: 943551 - protein, 262 aa, Homo sapiens
MLPLAVGPSCPFASGTEAFAGAELFKGACERQLSSEETSRCQDEDELHGAGFGGSLRPGGGLGMAWAPGSDCSLPLFAVGGPRVDLPPGVEGLAGPDPEARRDAHDQRHKVLNHGGREVRAHGGVGGGGFGGWLWGGGVASSCCFEYPVVFPVVPAWVFVEVAGDDDGGWYSVQKLSDANVHHDLLQLLGLGAIVLHDGADAEDRHKAGQQKGRADKQVPFEGRHTKPLQRFHVVKPHEAHSAQHIAVHLAQRRAGDGLDGG

SEQ ID NO: 943552 - protein, 300 aa, Homo sapiens
ENITGTLGKDMITKRKPSNQKALPSVSQADPEIRGAGQAAGPKGKGELVFLSFFLTLSFNSIHTTLPIILLTGSHIFKGLSSLAFLHPLTQVPENKGLLGIHQVKLLVQAGPGLRKGRGGALQAHSPQDLGQDSTRHHGGGRGGGGKLVAWGGGIQKEGGGAGFAGGNGGVDIFGNQATRVQKAAGEEFTKGGVTFHHLVGWLKASIGFLCYRKLFMVGFLSRDDRGICGLLEVDFGVGHQVGLEFCQVNIQDSIKSQGSSDGGHNLANKEVKVSVGWALDIEVSTTDVIDGLIVYHEGT

SEQ ID NO: 943553 - protein, 199 aa, Homo sapiens
MDGLPPPTSHAPYPPPPLPPPPPPLPNLPPDNPSSTVGRCYWVAWFVGGEGVCVWSGVLCDFFAFFWVDGVGVLLGLLFGWSGGVVEGVGCGGVVFVGGGGGGAGGGSVWGPPGISASWSIGCWAIVSSTIMGPPCACYRRRVALFIGRVVRGLLVIISKIIVISTSIISSSIVVITTSVAPTLVAISRSWSEISTATT

SEQ ID NO: 943554 - protein, 292 aa, Homo sapiens
HYWAGKTEEPLYAEGISSSRYTSGRCRSTNTGSKTWSVTRPCRRISSTRSSSFSSLVASMNSKYLKIITKMQEIYIKALFHHLKSLPLHGHLIIETKEFHKIDEKKLYGDLAGDWGQWSGDLGGCLTNRGSAALKKKMQHQALGLAQETDDVAWPGETEGCWRPTLDLLPCQKHPHPLKMLLARQPQQYPGIPLLLQLCVFLSLFYPAGSLCSCSLHFTHTHTFFFHLFLCLFNSIEYGLYFIFSKETTAGPEEAQSKGIDLLCLSCQTLGMVSQGYSSAAQAHCSVSCDRQ

SEQ ID NO: 943555 - protein, 101 aa, Homo sapiens
MGGLDSSYSCVRIHICWKVDSEARMEPPIHTEYLGSGGAMILIFIVLGARAVISFCILSAMPGYMVVPPESPVLAVQVFAAVHVTLHDGVEGSFVDAEDSM

SEQ ID NO: 943556 - protein, 215 aa, Homo sapiens
  misc_feature (41)..(41): Xaa can be any naturally occurring amino acid
MPLKQREPGAGGSREWSMELYILKGDERRGEKKKKGEEEEXGGWCLVLRLGQAWGSGKFETVPPGHLVPPPPVLSQCERQRSGMIEVEGLVGGLVGLAGCRDWQGATCGIAWGWGWLCSERGGHCGGLDVNHPGVHDLTLDLHHLLIVPRGPTACQGLIGGHGRHHQGHLGPGGLVVADGWEQQVVPSERDNIKCVFPSVNCIQECWLRTVWVAI

SEQ ID NO: 943557 - protein, 147 aa, Homo sapiens
MPRRAQTLLEPQGARHSPAKRKKEKAARPGGGGREKTGANGAGRGERDRGVLGQDEALVDAQSHVSKSRGLSSKPCSGRPCLRALPPRMVRGAPTPISLGLWAQVTPGGSSGQRWRAWALPPSPVESRAGAWCHAPRAPGLTWTPAY

SEQ ID NO: 943558 - protein, 311 aa, Homo sapiens
  misc_feature (1)..(1): Xaa can be any naturally occurring amino acid
  misc_feature (204)..(204): Xaa can be any naturally occurring amino acid
XPNILCVLDIRSLSSHQPPTLFLASTLNATSLIFYFLTVSYSSSSAEFSHIVHTDFFFLVVAFSSSAFFPPPFFFPSGYILPHPFAPPFFSYFAAFPDFLLPTIATYLFFIPFFLLLHPEDLLTPFLSLKYFFLYSSPSPLRSFFYSFFSFLGALVFIFSSLSFPPGLSPSGLCLCLYSPRSLFASVPPLSPGGVSSVFFFVHXSSFFPFVDTLSRTRYAWCFFVVFRILFGECGESQLEGGRVLLEESAEVQSVVRGLRSQIKGLEDGGHRGGRQGCGVRGVLWRQGRRHTLFSHQDLAEDDGEQQKEKP

SEQ ID NO: 943559 - protein, 251 aa, Homo sapiens
  misc_feature (84)..(84): Xaa can be any naturally occurring amino acid
KGILRANITSGVPGQHDLHLDAQHNLYEQEVEDSSINVVVKRVSAVGNQAIHKLHGFSPLSSEFPRNHNLAAFGPTFHDEPQHXIAGPPHSQLSKEFVTQRLCVGNGTKTSSGHLFSIKLERKRGISCYHHEAVQLTVENVGFAKKVLFSTPSLRNPGPHAAQEMALIVAQHKFNIVIFCATSSSVAQDISSSNVAYGGQKIGHHHHIQHIISVSLNFLKHFYHLHTMQVLALPPWLLWPCKYTNGDSESI

SEQ ID NO: 943560 - protein, 296 aa, Homo sapiens
  misc_feature (50)..(50): Xaa can be any naturally occurring amino acid
PFGLFEGTRQTWKWNFVVSTRGSPQLGSATGQHMALLPPPESLEEELVAXGSLQDVTLMTLRFTDPLFTHNPCKHENGLVTPSTPQDKMRVRDVWLGFEAAQELPGFLLHEKLVPCAPTCYRLLGTVFFWHVSVLVASLLLATAAFSGLACKKPWLSKLLSSLIPDRVRLEEFEGAVVGKDRYLGSVDIISFIILIHNVKIQRLPDFLDGAPRSPGFLFCFSGLMSSSMMSSMPASERSTSFKSSSRCGVCGRGFRGSVLLQGVLERGWRVGSVVHGVLLIWGYNAACFWCRVSCP

SEQ ID NO: 943561 - protein, 179 aa, Homo sapiens
GEWIGGGGGGEKLTQKRERREVWGWGEKPAREGEEGDSGGGGGQGGATGGEGSSPQNTKLGGLTGAVLGLGAGEEMGDVEGLRSVVGFLLDPTPWVPAQDEFADFVVERDEETVGEGTEPPAGLERVHAQGHVHAGAVGQEGSQGRLLKKPEDQDLVLQALLEDRVPPGLADDQIGPVD

SEQ ID NO: 943562 - protein, 282 aa, Homo sapiens
  misc_feature (2)..(2): Xaa can be any naturally occurring amino acid
  misc_feature (54)..(54): Xaa can be any naturally occurring amino acid
MXEDCQRLIQLQHPWPPPHPGVKARGSALEQATGVAVETPVVTMTHDLPRSLAXGKGKAQACAGPQAWQPPAPLPGMGDTLTGSGSLHLPKNARAMIIMATLQAVLSDHVQSGSVPPTRGTSFSRGGLAKVEQIPCCRKMFKNPTDGIFKKRRNLPVAWRQRDSEHGSKHSWTDSCMKKYIMVSGNKPPPRVGCLEMDPLSQKPEKPEGRDGGVNGRCVGVRCHFREVPWVSGDALLQARPQSPEACAAAGCAAPEGSRQRPGLALRITVHLSQLSDHRLPP

SEQ ID NO: 943563 - protein, 225 aa, Homo sapiens
MSSFFRFSRLTNVISLQNPSNHLCCQGYLLLFANEGFYEMLLLHIICALVQMVDAKGGVHLLHLFGSGFGHSLVGFYATVFPGGHGVDLQCFGKRSHGILFFGGALIRLLANCQGTGYLSSPSSIHHTIIADEVPDDTQSIVKGSFRLLNDHLISSSNKNGYSSGVLTLLDDQHFILSCPNEISCTRPAKPSFSAVSSENLGTIRPPVAMASAQFQVSYPANAAS

SEQ ID NO: 943564 - protein, 190 aa, Homo sapiens
  misc_feature (29)..(29): Xaa can be any naturally occurring amino acid
  misc_feature (85)..(85): Xaa can be any naturally occurring amino acid
  misc_feature (89)..(89): Xaa can be any naturally occurring amino acid
KAKKPQAGPEGRVDGTAGDGFIAFLRLYXFIQIKLVMVVFGGFFKWWFRAGGMDSSTPIMYIGRKLNIIWIHKSHMVSFPEEEEXGGGXVCALPKARALLILHVNELFIIGANTENPNAKVGGRAPEFGFLREKLEGAQAVDVFVGGELVALAVQVSKLPVGAKVKRNLFSRFLMDSSMSFSDRSASSNL

SEQ ID NO: 943565 - protein, 203 aa, Homo sapiens
  misc_feature (59)..(59): Xaa can be any naturally occurring amino acid
  misc_feature (98)..(98): Xaa can be any naturally occurring amino acid
GPWSPRRRPSSLIMATPPMTYTMSRGPARCFYASLVLVASDRSVCTDSGLGAGRVCGGXGYEGPQDPVPAVSSTASSITSLMTGVSNGTAEKVGSMRXLGSSRLEVPEPPGLVDSSSQLLQVYGLSCCPPVTLACWIQLGQVLLTHTIPKRDVEQQDPDLVVGGHAQFQQHRNDSASLESFYVLPPLASGAHGAGSCSDTYTA

SEQ ID NO: 943566 - protein, 158 aa, Homo sapiens
  misc_feature (34)..(34): Xaa can be any naturally occurring amino acid
  misc_feature (58)..(58): Xaa can be any naturally occurring amino acid
  misc_feature (88)..(88): Xaa can be any naturally occurring amino acid
  misc_feature (111)..(111): Xaa can be any naturally occurring amino acid
GLVNFGIKAAQQAWGKGGGRKQPGSVWASLWLWXGPEIQIIISQPLQRLGYLVGVGRXVITTETFWGGRAEHYDRGCNASLCGQQNVXSQLLPSLVSRVSQPLALVLLFWXLEHRRTLGPHSSSPASVSWHQPPSRRDRLSQCGARCGPGCTEQEAGN

SEQ ID NO: 943567 - protein, 200 aa, Homo sapiens
  misc_feature (42)..(42): Xaa can be any naturally occurring amino acid
  misc_feature (120)..(120): Xaa can be any naturally occurring amino acid
  misc_feature (122)..(122): Xaa can be any naturally occurring amino acid
  misc_feature (128)..(128): Xaa can be any naturally occurring amino acid
  misc_feature (135)..(135): Xaa can be any naturally occurring amino acid
  misc_feature (149)..(149): Xaa can be any naturally occurring amino acid
MATPPMTYTMSRGAARASMPALFFCQSPKRALTAAWELAVGXGSDTKGHRFLSSRSSTASSIYILDDRGPAGQLKVGSMGSLGSSWLEVPEAPGLVKVPPSCSRLRMRLLCACTLACWIXLXRFFSLXPFRRRCXATGPGFFCRRAPRXSSSTGTISFMESLIFSPSASEPMARSCSTVHSFSTEPLKCFIQSSARCRCV

SEQ ID NO: 943568 - protein, 238 aa, Homo sapiens
  misc_feature (155)..(155): Xaa can be any naturally occurring amino acid
QAFLPPRPPKRAEITGLSCCMAIILLKAATEEKSTARNHRILKGGVTFEPVASDARAAGHMFTMAQVTLTAGPTSSVGHRAGLQVKREEPGTMPLVSSGVAAKTWGSRGEEGGLRAQREGKRRCDRIAEEALELPKAFNAAESRAARLPTRRSLXHESRVGQGPPLSSVVRAGNPRQELALPPWRKFGVRPGTMVTRPVEGGNSRSQLSSSGPATSSPSNKRTMGATCGTPPRRGRRV

SEQ ID NO: 943569 - protein, 34 aa, Homo sapiens
MGRKALGIYHQFHGRGAVVTCDHGCLVPPAGPTS

SEQ ID NO: 943570 - protein, 193 aa, Homo sapiens
  misc_feature (118)..(118): Xaa can be any naturally occurring amino acid
MAATEYGSRPYDSKFRTTVTFLLDSSLCQGDVNWTDSPYSSQWALVEEGSLDRQAEFFQTPGQKTVPWKLQECMLFIFVSDAVTSAGLTSPPLFVVWVPPVIFLGVVNELVRNITDLXTLPFLEKASWLRKDMLAVGRRGVLYLEGDRAVPSPPPEESGLAGRARVCPPMSSSGVSRPPPPCSAHLCSAPSPV

SEQ ID NO: 943571 - protein, 246 aa, Homo sapiens
GRKVTRSMGAESVSKYEGLGTEEQVRAHSPSQDSVAPSLEKGKSILGAQFQEHRGQRLEMAESPYLRRHQNRQQQLCGKLDELVSSGKWEGALGWPLGDGSNTWLGGTHENTQMFPSRGGQSPKPLSLQAFLRKKRHSEKKEFKEPPGKGCQNIVLKAQLRRTRHQGTTCGGKARAASKHKCQGHKRMQDRPRLIGVGLSTARTASANTSLTPSCCRAEHSRKRTVGICLASTWPCCGVMGAGPAP

SEQ ID NO: 943572 - protein, 192 aa, Homo sapiens
WGGGGGVWVLLCPASHPISPQIINSHPWEAAELRSLPTALVAYTPTGELVQLAQNPGAAFHGGKLVTKIWVGGGGVWGGKRKGNLPPFLLIVVLALGPLGGGGVLASSSSSESSLLLLFFLLLFSPEGLSSLDTNSLLLVLSLSCLGGDLVGEPLGGVDFFSIFSFTFFFFFDLSLLEDSPRPPSYSFMAFS

SEQ ID NO: 943573 - protein, 261 aa, Homo sapiens
GGGGGEGGGGGRGGGGDGEGGAEAPGGAPARGRRQRARPSREEGGRCPPGGGERGGAGGERAWDPRIQGWGTGGGGRAREGKGRRGWGRGGAEGEERGGGEEEAKNKGGGGPEKRAGGEERRGGRGGGTGEGEAKDRKKRGGSGEGVSDSGGKRREEGREGLGEGECGERGQGKGEIERGEGPGEEGGPRVDKLVEKILHCSCQACGKEPSHEGLSVYVQGEDGPGSQPGTHPPPPARPHPGGQTPEPEEALGPPHRGRRG

SEQ ID NO: 943574 - protein, 105 aa, Homo sapiens
  misc_feature (56)..(56): Xaa can be any naturally occurring amino acid
  misc_feature (68)..(68): Xaa can be any naturally occurring amino acid
  misc_feature (72)..(72): Xaa can be any naturally occurring amino acid
  misc_feature (75)..(75): Xaa can be any naturally occurring amino acid
GVSSPETDRRRYSPPLQGLRAENGFESRMISKNMQRGEGKGKRCIPLRRGGWNGSXEGAGRTSTRRLXPFPXWCXVRKQSKLGDSNELHLLSRTHGSSPVDVTEQ

SEQ ID NO: 943575 - protein, 321 aa, Homo sapiens
AQRPGPGSHESPPDALRTPSLAGWATTGWGQTMTRGKTAAQPPCQSQALCQSLPPPVPGAKAPGRRGRGPDWAVAVPGLRGPAARARGPRPAAPCSGGGRPAWGPGPGSASAWRWPPRDRRVSGCRFCDPCPPCCSGHPPACRACGACPWGTPRSAGPRRAGRRSQLPEGRSCRHVGSWRGREPEDLLAEPRILLGGVCVRLRVQGLVHLGEDDLAQVEEAPVLACRDSMSFSRSSRGTALPVRECRDSRSSGSCSHTQFSSICDGASTKSRSTWVPLNMAELRLGAELVHHVAKLMEVGLSSSCCSSEGASAVGLVKWAT

SEQ ID NO: 943576 - protein, 38 aa, Homo sapiens
MNSQGGGEQATKERCETRRRPTTNEKRDSSGKVANRSP

SEQ ID NO: 943577 - protein, 175 aa, Homo sapiens
MLFSASVNSIWWMPSPVYQWRKAFLLLLAVKCSEMRLKSSWMAVVLQMKVNAILRPGGGISETAVLKFLGIHSTKKLVFFFCTLSICSSTSFMDIRPRKTAATVRYRPEAEEKKKKHVLGIEDLLGEFRHCESSLLLASTAGERGKARHKEMETWEGDHVDCQLAEVSIELARET

SEQ ID NO: 943578 - protein, 314 aa, Homo sapiens
  misc_feature (65)..(65): Xaa can be any naturally occurring amino acid
AGGPTAKQAAVTPPVNPRGSHNSLHSQHCGERLLGRAPRKVHVAADRGAPPALRLGRCGAGGEEXTAGTATLAAVTGDQTLHKSALRDVHDCDPCSGVHKPCFLTKTAFLFSFNKKIQQILSNIYVPLVKEGGGQAKVSYTSRTTNTMYIFFNITWQVKIDNMIHIEMSSPLAATAVATKIGLFPELERVKGLSSIPLRTGSMDAGTCYPSWYKKSSRESAPFLVSTNTKVSEFLSVEIGRSSRNDRLSDSSTQTTFREMFSEVEPTLPTAKKIYSSKKSRASICISLGKVALNIIVWRTPFGGIVSCSTILRI

SEQ ID NO: 943579 - protein, 155 aa, Homo sapiens
  misc_feature (86)..(86): Xaa can be any naturally occurring amino acid
  misc_feature (105)..(105): Xaa can be any naturally occurring amino acid
  misc_feature (107)..(109): Xaa can be any naturally occurring amino acid
YFCRHCRSSRASRCTTSPAASRGGRSRRSRCDTPQAKDQARPTDEVSKKIGMEDHAPPPKRLPFLLCGCRNGLPPSHSRVRRILSXSIFMGFRPTEDVVPNSIVXAXXXPPWTTPGAAGGGGGTGPGGCRRRAPGHVPKRQHEAKPVMCEIHGGE

SEQ ID NO: 943580 - protein, 46 aa, Homo sapiens
MATAAAGTAIAPLAFLVLQSIGPRRHRGQSFCLQNFLPSWVQNLKP

SEQ ID NO: 943581 - protein, 112 aa, Homo sapiens
GGARLQQVRTLHPRGRSSGNQYFRCRGKRLLPEDRSGGLEGLGSSESRLKKSLPVRRICSSSFFYFFMYENTFSRLASRFLFRVDLPGVCFRLIRESFGVTGSSSKSNSLGM

SEQ ID NO: 943582 - protein, 166 aa, Homo sapiens
MLARALLLCAVLALSHTANPFCSHPCENRGVCVSVGFDQYECDSARTGFSGENCSTPEFFTRIKFFVKPTPNTVHFILSHFKGFLNVVNDIAFLGNAIMSYVLTSRLHLIDSPPTFNADFGFKSWEAFSDLSYFSGALAAVPDDCPTPLGVKGKKQLPDSNEIVEK

SEQ ID NO: 943583 - protein, 103 aa, Homo sapiens
  misc_feature (46)..(46): Xaa can be any naturally occurring amino acid
MRVMCNTNHILLVHCQKSLQFASYCTETVEHKVLPYTVDPFTKGKXGAANKVPTFSFSRAGAFCQSLLCHQGVHNNVMSILCKCCFVNWGGLATKFLQGFPRF

SEQ ID NO: 943584 - protein, 114 aa, Homo sapiens
QPAYEAPLQICTRCFKQRHHLMEICTSEQHLRDQPLALQCKYFSFHIIRETVQFTNHSFLIRDSVAVKFFFSFKTFQYFLIPKIRPPCGCGILGVGTLGGEAVFRMRWVGSYFV

SEQ ID NO: 943585 - protein, 128 aa, Homo sapiens
  misc_feature (5)..(5): Xaa can be any naturally occurring amino acid
  misc_feature (51)..(52): Xaa can be any naturally occurring amino acid
  misc_feature (54)..(55): Xaa can be any naturally occurring amino acid
  misc_feature (57)..(57): Xaa can be any naturally occurring amino acid
  misc_feature (59)..(59): Xaa can be any naturally occurring amino acid
PPGWXHHGLDPKWAWMLWITSFSPSTVFGDFGRKGRERSINVRSEGVLGQXXLXXRXGXADSGPHGLRGLLSVVLIPPRGFWLASGQTLFFSETLSSFPRAEPTKASFSKSKIGFGFLVAAVSAEKID

SEQ ID NO: 943586 - protein, 280 aa, Homo sapiens
  misc_feature (24)..(24): Xaa can be any naturally occurring amino acid
  misc_feature (63)..(63): Xaa can be any naturally occurring amino acid
  misc_feature (77)..(77): Xaa can be any naturally occurring amino acid
  misc_feature (86)..(86): Xaa can be any naturally occurring amino acid
LPTPRVPFPAPESARVSAATNLCXPHSFWVVTCSPPSLLSRLERWVGGEGAAGEARPPLTSLXFSQGFLLLAWFPFXPTSHKSPGXCHFLHPGSLLPASSAPPFSCGFSTIFYKGFSSFVVGYLLPTPPTPAGAPGQRRPAAWRRVVAGEVGGLGEGLSAVIALVRPLAIVEVVMLQKRGGAAEALAAHGAPVGPLARVGALVLDESGGAIEGLAAVGAAVGAAWQVGAGVDGQHRALAKALAALRALEGLLPGVAAGMGDKGRPLGEALAADATAEGPL

SEQ ID NO: 943587 - protein, 192 aa, Homo sapiens
RGVIRQREWGDAVGQGGAHPDPCAGSCGEFSEVSFFSGEQPLTTTAAEVSGSALPVVPRGIRRGGFCTKEAKALDFSGRRKSTIYKKILKMHSPSYELHCHSLPGTEFEEKAGFSETPLPSGQEKGAPFRHPRVFIWKDDFFGVVPPQLPQVEGRPSCCAAECELACHSGQQRLSGRLLASVHVLAGVEIGT

SEQ ID NO: 943588 - protein, 165 aa, Homo sapiens
SKTLKALSVKVGVGRGGVGFHPFFTLPVGFVGGSPAGGLAPGGWGGGGAGGGGGGGFPGGSAGGVGVSGGAVPPWGFPGGMGSGNEAFLCSLQPIPSQVEAGKAEVTGRVCGKEKRVFWVPVVRENPLPQLLDEASMISSFTFCNSFFTSSEAPVSPSVGPSNDW

SEQ ID NO: 943589 - protein, 117 aa, Homo sapiens
  misc_feature (35)..(35): Xaa can be any naturally occurring amino acid
  misc_feature (76)..(76): Xaa can be any naturally occurring amino acid
  misc_feature (83)..(83): Xaa can be any naturally occurring amino acid
  misc_feature (88)..(88): Xaa can be any naturally occurring amino acid
  misc_feature (102)..(102): Xaa can be any naturally occurring amino acid
  misc_feature (114)..(114): Xaa can be any naturally occurring amino acid
MGGGDNPCKWNAKMPKAPAFLIPKGVYIISVITVXCGSGGGSKKKKKEKKTELAKKNKKEERHITGGGGVGGDPQXAPRRAPXNPPPXGEGGPGGGGGGAAXGRPRGGGGGAPXAPP

SEQ ID NO: 943590 - protein, 44 aa, Homo sapiens
LGWALVFQRMGGYGEALSYTAKARAAEVPPGGAPGGPGSWASPA

SEQ ID NO: 943591 - protein, 112 aa, Homo sapiens
SLFPGMISFLWGRAQDSRAVFFFHTGLEVLILHKGLWGACFFREFLGWAANSTLFLPLGLWFLFVWGHIYMCNRPKGTPVGPSSGTWGLDLDCPWLPNWGLRDICNSQPVFC

SEQ ID NO: 943592 - protein, 102 aa, Homo sapiens
  misc_feature (21)..(21): Xaa can be any naturally occurring amino acid
  misc_feature (24)..(24): Xaa can be any naturally occurring amino acid
  misc_feature (38)..(38): Xaa can be any naturally occurring amino acid
MTDLTNILKKKQQRKKSSTKXVSXQPHSAPQLLHTLCXSQPLLEEEGGDAKKDFIFLVENANGIVDSSEDLELAFGGLLEQKICVTEDGETCFVAAGAFLLC

SEQ ID NO: 943593 - protein, 121 aa, Homo sapiens
THSKDVILSFHFGRCDWLSNVSREPSFQCPSFDPPQVEKALHGPLHSIIHGQYWLVAHGIFGFVAAVVVECASQYDPHGCEGGLQLDDRNLHHHQQGYLEGQVVGHPVGDVVFGGFIIEAC

SEQ ID NO: 943594 - protein, 178 aa, Homo sapiens
  misc_feature (32)..(32): Xaa can be any naturally occurring amino acid
  misc_feature (69)..(69): Xaa can be any naturally occurring amino acid
  misc_feature (71)..(71): Xaa can be any naturally occurring amino acid
  misc_feature (92)..(92): Xaa can be any naturally occurring amino acid
GGARGVRCNLRLVGPRDSCAWASKVAGITISXHHTKPFSVSFVETGFCYVGHTGLNLLASSNPPASATXRXGVSGVGGRPQPRPFINILNAXLGGEGQLGNLSTPAGQGRGLAWGQFKKSLGNVVETPSLLKIQKSARYGGRVPGFQVNEEAEAGESLEPKKWRLKRAKTGTLHSSLG

SEQ ID NO: 943595 - protein, 184 aa, Homo sapiens
  misc_feature (56)..(56): Xaa can be any naturally occurring amino acid
  misc_feature (80)..(80): Xaa can be any naturally occurring amino acid
  misc_feature (87)..(87): Xaa can be any naturally occurring amino acid
GGPGGEGQPGATGHQAQGGAGEEGGEPRDSGGGGAPPAGGGHEEEEEGAATGAEHXGAKGRAGTAEEQGPEGRERDGKPXTGRSAPXLFKKEKQKGTQKFYGGNRRRSQSKQEIANRYQKPAKERREKGVEEKRYRKGQGSLRRKQVKWLFKHPNNSQTYWAATGWANQIRIKSGANGRAGTAQ

SEQ ID NO: 943596 - protein, 65 aa, Homo sapiens
MVLLSRPLLPGGGRFLLDLLYLNLLLRQVVCALLPLLTVIVLRAAAGAFLFHLLFVLFLLCHQPL

SEQ ID NO: 943597 - protein, 121 aa, Homo sapiens
CGGAGGRWEPGGSACPGPRYLVLRALAQSTVVGGDGGLLGHPVTVPGGHLFPSVGQGFLEKAAPFARAPRLFEYPSILPPSPPPKTLWGPEFHGCSKPGLLAFPRAGRGSTGSCASWAPAR

SEQ ID NO: 943598 - protein, 82 aa, Homo sapiens
MPLPPWGSAGQTPRGGMLLTQEPTKSPGQFWAGPENPTPSPPACHSWPQMPLPASDATPSLRRRWAREVFLGNSSLSKTQYL

SEQ ID NO: 943599 - protein, 175 aa, Homo sapiens
  misc_feature (70)..(70): Xaa can be any naturally occurring amino acid
  misc_feature (75)..(75): Xaa can be any naturally occurring amino acid
WGSIKQNSFLLYSSNSYIFKFKPNQDNNPIHRLLYSSNAKKQQSCQYRLYINTQITGFNITGTNHKFMCXCSFSXFLVGNLVYFEKAYGVCKGFLPMAGGPGGENEEEGGGFICKEVHFREPPTLSKLTNILRGRTLPKLLIICHCIQGTNCPDFFFFFFVGGIIVNNLKGQITY

SEQ ID NO: 943600 - protein, 176 aa, Homo sapiens
LVFFVAAGPCLHCAWLGSQISSDLWLPCDFSGSPLLLGFVSYLGSSAAAVAAAAAGAALAPLVWWFCEVLASPAVGAGASASGFSSLRGSRVWGLVVVVPKIIVASTTSKIASIITKSIIAIPTATISTTTTAATKATTTTEVSSTTEVVIPTETTSTTTTKAFQNHFDLFGWMKH

SEQ ID NO: 943601 - protein, 86 aa, Homo sapiens
VMMAPAIVGAAPQGILRAPTLNIIQPDLPSASSHFVQGLSFGVTQHAAEENGIRILPLVIANFPPGTTVVNFSPASVITAENAEGN

SEQ ID NO: 943602 - protein, 211 aa, Homo sapiens
  misc_feature (159)..(159): Xaa can be any naturally occurring amino acid
MTKGCQAMCSSPTLHSQHIITPLLDDVCNVVLLVAYMLHGDLLQGVVGPWTPLSSILEPALLQSTRKELFSPTKAFESPAPLEVTLLASADALGIRYSQSLLAPWSLTPPGWLPSRLLPQGYLDAGLSPSPSPGLPPPVVGPPVFDAAHGSFPGPTGVXMIFFPSGVSWQSILTLDGPSMFAAPPLPGPARGGVNKEFRLGTCGAPFESRA

SEQ ID NO: 943603 - protein, 196 aa, Homo sapiens
QNQIALSHEHGSNRNSFALVHAVVRSQTHTHPPIFTLSLMPSSIHIPTIAGAKFGHNPRDSSLTSVRSWKEEVINEKQLGLLFASLLFQQCRGEGKTYTRGSQPPRHQNEQPTTSSRQCFQVTSRVLNTTFQHHKTVASWKAKHNNKNTIVSPPKTPEKKGRRRTYNLIPIILTNCSMTISKTSSVKLTASDCDLI

SEQ ID NO: 943604 - protein, 61 aa, Homo sapiens
MYVVFCVGGVNVADGVLQHVDIVYIEALLEFFREGLIDLDGVQAARAERFLRSSSSYSFMA

SEQ ID NO: 943605 - protein, 244 aa, Homo sapiens
LSPLWLILNIIFKNIHKAGFPVFKIIVETNRLKRNIKVQKMVFLLWGWWGGLRYVTAAVYTSPDAARACWDQLSLRLKLLVHRLSWLANTNPFDCDSQVIFQKADVVLGLWGQVLPPPGACGVCFPPRQGFIFNFDLLKHLLVSWEIGNPFPIQLYETPILTSPSTSRMSSFVRARAVKTLKRNTYFRIIRSSQPQRLFLPVVTPTLVAAGLQQASNLVDLLGGEGPDAHTCGIGFHHAIHVTY

SEQ ID NO: 943606 - protein, 164 aa, Homo sapiens
MVSFFFVIHLFSQLYSPLVTYVSFPNDALNEDFLLIDGDQGSKHEWCELDEQNKVGWAISFKDLMWQQPLKVLWTFARSLELLSGLFRRFSPHQGLCLGQEVGQEDLVMQTLPYGVLGLDRDEEVTGYHLGAFVDELVKSMLAIGPWLPHTMGPVWWSTRVFFL

SEQ ID NO: 943607 - protein, 30 aa, Homo sapiens
MELGEKWLEEVKMNGRIGRQWEVEGEKKMG

SEQ ID NO: 943608 - protein, 140 aa, Homo sapiens
  misc_feature (95)..(95): Xaa can be any naturally occurring amino acid
MGAGTFDDLQAKASGNISVQFPGIAPRGKSVESDLIIFYRFISTVHFNIHLFCISSSRQDVCHQCFSQFPAYLLYSLFLFLDVFICDNKSFAEGXRCVKPNSRVLCHSSGDLPCDWRRACVQSLATADKRVSSLLPGPTP

SEQ ID NO: 943609 - protein, 252 aa, Homo sapiens
  misc_feature (28)..(30): Xaa can be any naturally occurring amino acid
  misc_feature (38)..(38): Xaa can be any naturally occurring amino acid
  misc_feature (42)..(42): Xaa can be any naturally occurring amino acid
  misc_feature (90)..(90): Xaa can be any naturally occurring amino acid
  misc_feature (96)..(96): Xaa can be any naturally occurring amino acid
  misc_feature (107)..(107): Xaa can be any naturally occurring amino acid
  misc_feature (116)..(116): Xaa can be any naturally occurring amino acid
  misc_feature (121)..(121): Xaa can be any naturally occurring amino acid
  misc_feature (132)..(132): Xaa can be any naturally occurring amino acid
ATYLNFDSYLCLFNTPCSFPLLVLFCSXXXGDCALVVXHAVXYQFVGELGCGSDPCSGGLSLPFSVSPLLKPGKHSDSSAPRPLGPLPLXQAKEAXPPKEGPLQSQXSPPDGASRXQGLRXLSEPGKTPLGXSFVPGGTSGMLRDYSLYHGRLNPKESGEHFHSGGLEPVCLWLKRHQSPTRAGLGQGAPAPAAVALGADLAPGGDVVLVLICEVVDLVCQLLHRARPEAAAKAPEALEVVHALAVGLTRMR

SEQ ID NO: 943610 - protein, 144 aa, Homo sapiens
MATEDETQLLPHCLPAQEGGQRGGETAPGRPEPQSSPTGSRPAEKEGKEEAGPSPPAVGKQLEEGPPQKDPPPHQHSCPGTGSPQQQGDPGAMATFMTEKQLSGGRRHDFLGRISWGRGLGGPLGQTLRSLEGAQSGASECGPE

SEQ ID NO: 943611 - protein, 40 aa, Homo sapiens
  misc_feature (5)..(5): Xaa can be any naturally occurring amino acid
  misc_feature (7)..(7): Xaa can be any naturally occurring amino acid
MEGGXGXLPNLAPLGHFHVVSTVKHSGATGTTPKLETALT

SEQ ID NO: 943612 - protein, 106 aa, Homo sapiens
  misc_feature (27)..(27): Xaa can be any naturally occurring amino acid
  misc_feature (86)..(87): Xaa can be any naturally occurring amino acid
  misc_feature (93)..(95): Xaa can be any naturally occurring amino acid
MAALSPGYEGRGWSPGGVRLGLLLGGXKIPRVCPFMPHTIMRHRFKLHLHNSVHVSPTQNLGHFAKHIQEVKYEQVRFWEHKFFCXXGSVSFXXXQAVIYDILPLG

SEQ ID NO: 943613 - protein, 151 aa, Homo sapiens
MGDFITPYSPGLSPPLLQVSNQEFLFQDALLAQECMISLVWPLAQSTCFHNNDSSLITDVTPRCGGGLTLCASPTLFPLGVVLRTPAFVGRTHEAGVEAACCRQATAHFLLIVPHPKKSSQHQKRSYLQLKFAVFLRGREMSHRKYLQRRD

SEQ ID NO: 943614 - protein, 255 aa, Homo sapiens
  misc_feature (3)..(3): Xaa can be any naturally occurring amino acid
  misc_feature (34)..(34): Xaa can be any naturally occurring amino acid
  misc_feature (52)..(52): Xaa can be any naturally occurring amino acid
  misc_feature (57)..(57): Xaa can be any naturally occurring amino acid
  misc_feature (73)..(73): Xaa can be any naturally occurring amino acid
  misc_feature (84)..(84): Xaa can be any naturally occurring amino acid
  misc_feature (99)..(99): Xaa can be any naturally occurring amino acid
  misc_feature (101)..(101): Xaa can be any naturally occurring amino acid
  misc_feature (106)..(106): Xaa can be any naturally occurring amino acid
  misc_feature (114)..(114): Xaa can be any naturally occurring amino acid
  misc_feature (123)..(123): Xaa can be any naturally occurring amino acid
  misc_feature (137)..(137): Xaa can be any naturally occurring amino acid
  misc_feature (142)..(142): Xaa can be any naturally occurring amino acid
  misc_feature (177)..(177): Xaa can be any naturally occurring amino acid
  misc_feature (184)..(184): Xaa can be any naturally occurring amino acid
GVXVKVSGVSRYLLLPLLVLADIHYSPAGYTNLXETTSLVNYQGAARITSAXFGVSXGAHSSSTKGPGGDHLXDVLDFVIAWGXLGISLTAAFLIPILXVXLLPCXLFLLLRPXRGFDILCGXQLFLLLLASGSWGXPQSSXCSLGAGGADGPGSLALFRLILGLDRGGVVVLFFWXSCFFFPXGVVVGVGWDYFISRSRFSPPTLTLIECSLSSTVKQCAAVSTKYSDTTAPIQLSCPFEGRMTEILACHGCLW

SEQ ID NO: 943615 - protein, 54 aa, Homo sapiens
  misc_feature (25)..(25): Xaa can be any naturally occurring amino acid
  misc_feature (33)..(33): Xaa can be any naturally occurring amino acid
MGDIAFVGGIPGVVLGLRFPPEMSXMGGFECQXSGVWAFAFESAGGPRLNRPWF

SEQ ID NO: 943616 - protein, 277 aa, Homo sapiens
  misc_feature (124)..(124): Xaa can be any naturally occurring amino acid
  misc_feature (126)..(126): Xaa can be any naturally occurring amino acid
  misc_feature (148)..(148): Xaa can be any naturally occurring amino acid
  misc_feature (155)..(155): Xaa can be any naturally occurring amino acid
MGGHLGPPLCLVPFFLGLLSGGVTPPPWSLARPPGSCSLGGVGFLGGSFRLLPGGQALGFVCPSGFSPFPVRARSCGSSGSWGPLGAQGPGAVGGAGCGAFPCPGPRGFGAGGSWPRSPFFFVXVXFSFRCYDGCALRGSAIRSCPVXGRWCGRXAICDNGAGYCSNPGIPIGTRKVGSQYRLEDSVTYHCSRGLTLRGSQRRTCQEGGSWSGPGPSCQDSFMYDTPPEVAGAFLSSLTETIEGVDAGGGLGPGGPLEREIVLGPSGSLDIFLVLDG

SEQ ID NO: 943617 - protein, 34 aa, Homo sapiens
  misc_feature (1)..(1): Xaa can be any naturally occurring amino acid
XTKTAQSQRKNPNTTQNIEGESRPGTRRGPPPRA

SEQ ID NO: 943618 - protein, 77 aa, Homo sapiens
  misc_feature (8)..(8): Xaa can be any naturally occurring amino acid
MDVHMGLXEALPRGKVEVSGHLIDFQEAIHLAAFILLLLHLLAEASRRHCSIVSGFLKAQPLRRYASRTSSQVSQHL

SEQ ID NO: 943619 - protein, 220 aa, Homo sapiens
  misc_feature (104)..(104): Xaa can be any naturally occurring amino acid
LFIFYKDNLLKSQRERQFFTSRLLIKPSGSGNSFRDVTGGLGGGEGGFDKMGEDVLLSFLSWGLKIKNLGLKNILSHTYLFQWVLSFSILGGGRWLVVGAGGCXWVPGFGVGWVALVIHGGVVDSGLGLELLLLVLNAGARALISFTGELKMLRNANSPSQKFCVALSPYSAVVVLAHHPVSWPVVQPLHLLQLPRDTFTRQLPRPLTHGGNTSGHFFFL

SEQ ID NO: 943620 - protein, 111 aa, Homo sapiens
  misc_feature (82)..(82): Xaa can be any naturally occurring amino acid
  misc_feature (95)..(97): Xaa can be any naturally occurring amino acid
  misc_feature (108)..(109): Xaa can be any naturally occurring amino acid
MPPLVHGVIGALILKAYSPLLLVCTLEISPELAGRAGHWSVPWLQESLPVQKYFLLALVRLGGEAQVEEEAAEASLGLLKDXDVTELHLVSGRKXXXWMSTLVPNESXXLL

SEQ ID NO: 943621 - protein, 252 aa, Homo sapiens
SFGVVPCSHLLPLLHWLGSPGLGAQKELFTMHRKKEDNRIRILIEKGVAERQRSLFVVDGEREKKKVVKLHHKLPKAKCEGSALQCCGVIKKNWGLAATGKKKKENAKEKKEIGKLKIKQDDPFETSSEQPETFATAKNNEIHKILGNTFGICVLQDFEALTPNLLARTVETVEGGGLVVILLRTMNSLKQLYTVTMDVHSRYRTEAHQDVVGRFNERFILSLASSKKCLVMDDQLTSCPSPPPLHHRRPAS

SEQ ID NO: 943622 - protein, 112 aa, Homo sapiens
  misc_feature (107)..(107): Xaa can be any naturally occurring amino acid
MVILHHEESDVLRGGDLRLQLPTQGYPLLCQLDGTLHCHLFIPARYFSDDVEVHFLCFLVSSRPSGVAVPIPLGGTVPPGKCYLRDRLGEAGEQEQLSQAVWTPARXKPCVC

SEQ ID NO: 943623 - protein, 170 aa, Homo sapiens
RGKAPSGPLPVVLSGSRDVCIGLSFSLANLLFLGTSRCKAPPPTLPAAPPAPLSPRLAPLALLSRARQPPSPPPPPGAGQSLPCPPPSAGPSQPRPRPPPPTISCPQSPPWRPNPALVRKATPGAPGLPGGGGPGCPYHVPPLMCYPPPSRQTFPKDSVPSHTFSPYPCP

SEQ ID NO: 943624 - protein, 186 aa, Homo sapiens
  misc_feature (4)..(4): Xaa can be any naturally occurring amino acid
SYLXRLSGVKGSKTIARICFKFLYFNSVKMSSVSIPIFLPISPASLHCSTAILSPSPCSVNSCPLFSCNLFLLLFMNSSCTNCKGGGLGKEEGKEEEAPLSSLLSRASEKEGEAAALFSESGGAICFFSSVSDCELCSRRRTVFSTFQDVLSFLWCAQLWVSPYVSAVVLEKNPPGQTGNLLISPS

SEQ ID NO: 943625 - protein, 53 aa, Homo sapiens
  misc_feature (5)..(5): Xaa can be any naturally occurring amino acid
  misc_feature (14)..(14): Xaa can be any naturally occurring amino acid
  misc_feature (39)..(39): Xaa can be any naturally occurring amino acid
  misc_feature (41)..(41): Xaa can be any naturally occurring amino acid
  misc_feature (46)..(46): Xaa can be any naturally occurring amino acid
MVGPXGLVFTLCSXLSAYLGFITFLVALFLRGLSLFHWXLXFSFSXRLSSRRS

SEQ ID NO: 943626 - protein, 38 aa, Homo sapiens
MTTTKGLAQLRTCPPTFPAGAPLPKSAWEVLNEGTFAQ

SEQ ID NO: 943627 - protein, 145 aa, Homo sapiens
  misc_feature (69)..(69): Xaa can be any naturally occurring amino acid
  misc_feature (90)..(91): Xaa can be any naturally occurring amino acid
MEGSFFLVIHNYIWNSASPFEHHFVRIDMNWAKGLDVWSCFNNSFQVDVVYTKEFLSVATIMGVTSKEXHHTLMGPDDCPALSVVPGQAXXVGGVRGGGGVAITTFSWFVSDTVSPSFIQFSCSWLSPPLNWTDWGSESPWLSIL

SEQ ID NO: 943628 - protein, 180 aa, Homo sapiens
MWACIRGIQHQRGGGRVTAHAGMSQAWLRGGRSQQARMASRACRGDAGNGWSVGEEDAGGGVFEGWTGLGVYNSNEINKKIEEEKEQGQTPLAHKAQPGSCGRQGSTQNRSIQVGGSGVPDVPREAAGGWDTPEAHVYSLGGQWHWAWQGPIGRTLPALLRGGEVGMADGSPVAGGGEGL

SEQ ID NO: 943629 - protein, 57 aa, Homo sapiens
MIVAVLLLVKCAALLQLRVEHPTLGLLKNQVDPPPVIKIVVETQDVGMAILQVGLDF

SEQ ID NO: 943630 - protein, 240 aa, Homo sapiens
  misc_feature (175)..(175): Xaa can be any naturally occurring amino acid
SLSSDMCWVRAISCAVDNSPIHPIHKFCCYKKGTAALPEKDPPGTRVTSKELRLFENLPRRKPLNKTWITQARKYSRMWYFKTLDTLWITELPVITQEGKQPRVNRGPVHGIDAVLVLLVGGDHVVLQGLLALLFRTVVLLVTDVILVYQVAEASDEMDTMLEKDDSAVTAAREXQLVMRVVVADVPHPVGVFLQGLHGFGDISGVPELHLTVVSAAGQVVLLIWIKVKVPHQLSVGILY

SEQ ID NO: 943631 - protein, 113 aa, Homo sapiens
EVSPFPTMLLVLLFFLRCTVPSPSDADSHSESESDELVFVVLVVWLVVLVAVAVAFCKVIFVFQVCYLVVLFFYDVFPFFCLLYFPSYRLVPYHREVGAAGKIFFDGDSCVDI

SEQ ID NO: 943632 - protein, 147 aa, Homo sapiens
  misc_feature (1)..(1): Xaa can be any naturally occurring amino acid
  misc_feature (36)..(36): Xaa can be any naturally occurring amino acid
  misc_feature (40)..(40): Xaa can be any naturally occurring amino acid
  misc_feature (70)..(70): Xaa can be any naturally occurring amino acid
  misc_feature (75)..(76): Xaa can be any naturally occurring amino acid
  misc_feature (82)..(82): Xaa can be any naturally occurring amino acid
  misc_feature (91)..(91): Xaa can be any naturally occurring amino acid
XGNEKKRGDGGGDRFYVVFKVTSEKEDEVIVEYASXGHEXQEEYDAFPKYVARGALRSLFKVTDKVLLPXKQVHXXSKRSRXLAAKKPRRXEHSKESGVRIFTVLVGSLEPLKGKSSGPLEAPPIVGSAFVLHFMGKESILDHADEG

SEQ ID NO: 943633 - protein, 225 aa, Homo sapiens
FFLYSIPPSITPFSPPGKARGSMVWVFLFGFERPGRCRARCWSLSKYEYVSYDWKILQHPPPKHSPFSAGVWRGAGGRGARYRLAAVYCIRWVLHPASLLLLIVEEMTLGVPPDGGGSLDELPGVGVDTPALPTLPVQRHLALFEVVQAMLVTVGDVQGVEELQKAPLIRKAHGGDPLQDLEEYLVGREFWQGGGRSFLGSSRAKVMLATLAHLPVLLSDLLPEH

SEQ ID NO: 943634 - protein, 174 aa, Homo sapiens
YLFINMVYTEEMGNWTGQGGLTGDGEAPLAAPSGRAQALWRLGTPVHSSLRLSGRLCPWCSESCVPLNSGIPPGTPGPLGMLPLLLRIPKRHSVPESPPQLLEWRGNYIPQSNPDPPVDDFLLLDPFYTLSQGELGLGLGYRMAYNAGAIRAQPDGEAKATLKLVLAVIQGGPK

SEQ ID NO: 943635 - protein, 135 aa, Homo sapiens
  misc_feature (49)..(49): Xaa can be any naturally occurring amino acid
  misc_feature (53)..(53): Xaa can be any naturally occurring amino acid
  misc_feature (104)..(104): Xaa can be any naturally occurring amino acid
  misc_feature (134)..(134): Xaa can be any naturally occurring amino acid
PPIFLLAGLKAGSSFVSDARYSDKATACPHVCCGKKGKLTLEGGKLGCXKLGXLQAPRPGGSLLPPPELTTFKGLQGSPRFLPSCDLSLKAYRSWGDKLLKGLXWVPPPQQAGWLPVLWLVMSQSPCSEKLPSXK

SEQ ID NO: 943636 - protein, 154 aa, Homo sapiens
  misc_feature (117)..(117): Xaa can be any naturally occurring amino acid
  misc_feature (147)..(147): Xaa can be any naturally occurring amino acid
FRPKSIAGNKHTIFFNICKPVELVLWFFSDKIYFVKNLQWQNSFWLFKQLYTESPTSLYIFKYLREKPGKTFENRLILQSSMGLRGRHLKRVREGHYQSGLQNQSLLGCISTAFQKXERVHFSNALASKLGGKGKGYIAALRRKQRXISQDCFG

SEQ ID NO: 943637 - protein, 210 aa, Homo sapiens
  misc_feature (23)..(23): Xaa can be any naturally occurring amino acid
  misc_feature (115)..(115): Xaa can be any naturally occurring amino acid
  misc_feature (117)..(117): Xaa can be any naturally occurring amino acid
  misc_feature (137)..(137): Xaa can be any naturally occurring amino acid
  misc_feature (149)..(149): Xaa can be any naturally occurring amino acid
  misc_feature (151)..(151): Xaa can be any naturally occurring amino acid
  misc_feature (154)..(154): Xaa can be any naturally occurring amino acid
GKSRFSATMSPNSSALNWGKPHXFEKLDLLAARKLEPGPAQGLNHMPLVLQPGADGQDNLANVNPGHSALGPSKGTTHAWLEPVSPSTGQHLVEADDVEGVEPHPDIEAIPATTXYXVLIGTNSGSLQGFRGQQPNXSESMWPQSGNSXTXAFXRPRRKNANLGIRDTSAEARVWVRLVLTIPVTTGGAAAMATPGSSVAHEGKEALLRL

SEQ ID NO: 943638 - protein, 138 aa, Homo sapiens
FPSVLLHQPVRTRVLQGGSAQGHLGFPSGGLACWSDKPQSVEQMAWDSQTWQRVLLGPAWAAPFHPSSLTQHSSSLEFSVIHQLLCTPQRLLPRTSKHQKEQWPGGGQESGGQGSLQIQTIESTRWKEEKEGENLQKT

SEQ ID NO: 943639 - protein, 99 aa, Homo sapiens
RPQAQSPQLLVENMETAKINIRCRFLPVAFDLPVRMVFCLEGPQNNSPGYHLHPKRGEDGQERRRRVSERGSHQVDGEPDDLLENVSFNQLLQLLGLFQ

SEQ ID NO: 943640 - protein, 168 aa, Homo sapiens
  misc_feature (81)..(81): Xaa can be any naturally occurring amino acid
  misc_feature (132)..(132): Xaa can be any naturally occurring amino acid
  misc_feature (144)..(144): Xaa can be any naturally occurring amino acid
PQRMVYYRFTHMKRRSDRTAGSAALGRTSRSPFLEPGGGFLSEMFGFQLPPLPQAPLQGPAYPRFLGAPGGRPPAPPTPPXVPPLFTDKETCPRGVLHRAGQLWVVFLLRRSVACGDNKLVAMFADAVFSLXNCSCTFTDKSSXKKKINFFFPNNKKKMNDYNRKGKN

SEQ ID NO: 943641 - protein, 172 aa, Homo sapiens
  misc_feature (43)..(43): Xaa can be any naturally occurring amino acid
  misc_feature (82)..(82): Xaa can be any naturally occurring amino acid
  misc_feature (138)..(138): Xaa can be any naturally occurring amino acid
FLPWAAPAPASPPIPGCPSGPPPGLGSLGLFLFVGELLVTKAXPASFLLAPVQIAQLCVGKQFLVGLGVLVIFGRLALRLDXFLVVFFFFFFFVFLLFLVVVFFGFLVASFFFFRLVLSFALLVLLSLGFVVLFALFXLGLLGCLCAFFRSFFSLASRLACRSSSVLLPKLW

SEQ ID NO: 943642 - protein, 113 aa, Homo sapiens
MEGPDSSYSCLLIHICWKVDSEARMEPPIHTEYLRSGGAMILIFMVLGARAVISFCILSAMPGYMVVPPDSTVLAYRSLRMSTSHFMMELKVVSWMPQDSIPRKEGWTAPPDT

SEQ ID NO: 943643 - protein, 218 aa, Homo sapiens
  misc_feature (182)..(182): Xaa can be any naturally occurring amino acid
MIYTEEMGKRTGQVWTDRRWGSSSRGPLGANPGPLEDEDAKGLLPEVLSPPLPLALRILRAPQFRNPSRDPRPTGHAAPATQNPEEPFSSRIPSSAAGVGGSILSNVPPRPPRKKGRSGGSGLPSVAGGGGGGGGIEKGVEGGGQEGSADGEAKTTLKLFLAVIQESPKGQCQGQGWELLLXRGTHDPVAIHRAFEEEVGLGQVQLVPEEDAGVLHPC

SEQ ID NO: 943644 - protein, 204 aa, Homo sapiens
  misc_feature (24)..(24): Xaa can be any naturally occurring amino acid
  misc_feature (57)..(57): Xaa can be any naturally occurring amino acid
  misc_feature (72)..(72): Xaa can be any naturally occurring amino acid
  misc_feature (78)..(78): Xaa can be any naturally occurring amino acid
  misc_feature (80)..(81): Xaa can be any naturally occurring amino acid
  misc_feature (90)..(90): Xaa can be any naturally occurring amino acid
  misc_feature (99)..(99): Xaa can be any naturally occurring amino acid
  misc_feature (102)..(103): Xaa can be any naturally occurring amino acid
MVPVGASSFPTQFFASPRRTGRRXWPAAAPPAGSQRSCLWPVQTHPCHHLFRPSSLXPAAPTRWLFSPDWLXSGGLDXGXXSCQPHCAPXKAWQMSEGXASXXASRLHSGPWLKRRFSISRMTRGQFGLLWKKYFVFSKTRFWTSALLARSKSSMTFFEGFESLPQFILLPLGDDFSGQGLSKVSDLPLHILVWSSLSFTLASM

SEQ ID NO: 943645 - protein, 119 aa, Homo sapiens
LALTDKAKQRALSTGRAPNGPCSQRLPGFWAPGPRHDWWSPIWALYPTSAGGPFLGRTQEAGREFPTLILGLRRLGNKRAREKLEFETSLAAHLGCHRREKISCFLAPGPSRPTATNNV

SEQ ID NO: 943646 - protein, 270 aa, Homo sapiens
QAGGGGGGGGGGGGPGRERGGKGKEKHEGAGGGRRAPEGGGAQAGQRGRGQQRPQAPPEEGRGGSESGGRRRRGEDRPGQEEKEEEAAGKPSEGRNGGQRAERQNRPGGRRRDRKGAGEGGEGLRPPKEGPRGKEEASWSSFDGYGEGNVLVSMGERMPAGTSEVTGQAEPPTLTERSLRALGLSGNVTAKIYIYIYINHSWEGRGKAWGGIRGSGVASRSQSCLPETPRGWCPSVTRSRSCPPAAGYPEKFRGISLDFLGNSWDPREEP

SEQ ID NO: 943647 - protein, 239 aa, Homo sapiens
  misc_feature (71)..(72): Xaa can be any naturally occurring amino acid
  misc_feature (119)..(121): Xaa can be any naturally occurring amino acid
  misc_feature (145)..(146): Xaa can be any naturally occurring amino acid
PLPGILLPDLTLAWRAQVSLLGPASHQATLTQDGRLRLRHIYSGGPTPSGGHVPTLQCPPCESFGAVGAAXXPSLLQARGVPCPLRTEGDSWGQIAALTAHSRFGRKLKFGGDPQVSYXXXLLPLLCPVLPSMAGAMWARALFLXXALVVQTCSTATSSSTAKLTADQKLTRSKLPSCRLRSRASKARSSVSIWMLRSSRVRMVSMDSLMSSILKSSISSGSTASAHPSTSSSSWRLSK

SEQ ID NO: 943648 - protein, 166 aa, Homo sapiens
  misc_feature (62)..(62): Xaa can be any naturally occurring amino acid
MAEFLSFVGTWTKLEIIILSKLLPGQTTKHRMSSPIGGNLNNENTWTQEGEHHTLGTVVVAXAVGSTAFSDTPDAKGRVNGCCTPAWHMYTYVTLLLIVHMYPEDLKYKPPPPAAAPQAEGKVAKCSGVQTEGFQRAEALGVNSMNDLACPPPIRGQNWEEKSPNI

SEQ ID NO: 943649 - protein, 156 aa, Homo sapiens
  misc_feature (134)..(134): Xaa can be any naturally occurring amino acid
  misc_feature (136)..(136): Xaa can be any naturally occurring amino acid
CGLVGFGAGVLGRPFLFFSFLFLLRFLPSSSAFCVFCCCLRSLSSFPLSAPRRAVWLFLFFRSSPFPAPVFFAFFCFFFFFCLLFLWFFFFGAVLLFPFVLLFLPFFFFSAGAGASAFGWRFVFLVRFRHLSLXWXRRHFRALGLFFAFLFLALSS

SEQ ID NO: 943650 - protein, 127 aa, Homo sapiens
MGVVAVGSSLTHAKLVDSGGVDAVDPPLVEVDEENHIVPQAADPVHNGHLDDKGEQVVDECVEGLVGEHAPGKVGHKLELVVDEELGRHGDEAEVKQEAESMLSTQEYQPLCSRYRDCRGIQPRNGK

SEQ ID NO: 943651 - protein, 79 aa, Homo sapiens
EPGCLALPRRPPSVSPFCSSYAFQVLHLAEGAVGLPPALDWLGIFRANALKTAEISGCAFVQQLQYFEEAISQLLRADL

SEQ ID NO: 943652 - protein, 266 aa, Homo sapiens
  misc_feature (63)..(63): Xaa can be any naturally occurring amino acid
  misc_feature (70)..(70): Xaa can be any naturally occurring amino acid
  misc_feature (72)..(72): Xaa can be any naturally occurring amino acid
  misc_feature (74)..(74): Xaa can be any naturally occurring amino acid
  misc_feature (77)..(77): Xaa can be any naturally occurring amino acid
  misc_feature (91)..(91): Xaa can be any naturally occurring amino acid
  misc_feature (130)..(130): Xaa can be any naturally occurring amino acid
  misc_feature (133)..(133): Xaa can be any naturally occurring amino acid
  misc_feature (137)..(138): Xaa can be any naturally occurring amino acid
  misc_feature (195)..(195): Xaa can be any naturally occurring amino acid
ICSILFSVSSDSTCSRMSTGQAQLILSEEGLSICRRSTLDLDTLVHGQDEDGIFKELLDPAGXFPPFLPXGXPXVGXDHEAVVRLAPDGPXHTLGRVEHGIEGKKVILTNLELVPQVFQPRFENAALFVXVGXAKHXXGPPVVVHKSFLRSLCSGPLTAGWPRGHSLLASWYFSRVILVLVPSWVSIKSSLFLWXFSRIPAHTGGHGALHVLVAGEEGHDAIRDHSGHLQQEVPIVPDQTNILQGLKFGADGHLVIATADDHREEA

SEQ ID NO: 943653 - protein, 113 aa, Homo sapiens
  misc_feature (40)..(40): Xaa can be any naturally occurring amino acid
  misc_feature (44)..(44): Xaa can be any naturally occurring amino acid
GTTAVENEFSVQGVDGEGVQHADVDLFFLQQFGSSQGLVXGHPXPDNGHLVILALQDYLGLSELELLIVVIDDGIFWAGGPDEVYTLCIGGEFHCLLCRNDITWDKKKLMWGL

SEQ ID NO: 943654 - protein, 144 aa, Homo sapiens
MKSCSPPPAPPGCPGFSCLLGGTGGLLATAGGGLAGSGAGAGAERGRADGRRDGEAALSHAIHMRNRTAGARGTKVWGRLHEFRGRRRGQRVIEGRLRWRQRQEIFGWGRQAPAACALGLEGRGGTAAGVGGPPHRRERRKAGL

SEQ ID NO: 943655 - protein, 129 aa, Homo sapiens
MRICFLHCPASHPISPQIINSHPWEAAELKGLPTALVTYTPTGEHVQMAQNPGTAFHEEKLVPKYGGGGGGCEKASAKRTFLRFYSSDPDAESSERGGVFPSSSSSESSLLFLFFLLLFSPEVLFYTIH

SEQ ID NO: 943656 - protein, 160 aa, Homo sapiens
  misc_feature (153)..(154): Xaa can be any naturally occurring amino acid
EEQYENILMQCCPTELSVVMEMFHIFGANTESTTHMNTQNVANAIQDMDFSSNLLSISRVICDWWLLTAQCSSNASGVPTSGFLLGVFLSFGAKGLGVGCCGGGKHSEFFGHLLKYAVSSLSGGGGVGSGWSGGLSTGLDIVGGNGRVRILVXXIVSGIK

SEQ ID NO: 943657 - protein, 101 aa, Homo sapiens
  misc_feature (97)..(97): Xaa can be any naturally occurring amino acid
MGLACCPQTVAPWRWGVRPAFVCRGRRDKGPQAGPLTPQKCFFSQFWGLEAPDPGVRRFFFSVSLSWAFGWPCFFVRPLLVFPLHTFVCPIFLFLGXLLFW

SEQ ID NO: 943658 - protein, 269 aa, Homo sapiens
MVDMGVGWSPHLLTLCLHEHRHMQVPLQKQSEGSSSDNFLVWYNFCFSVPHKVAVSHFTSCEGHIRALGTVTACSLSVLPPFVSELFLLHITAATTAPVITAPRRTRPAMMPTMGMVGWEDSSHLRVRGLGRPSCCTWQVYLCSSPEGTTTAAHFWKVPSPAGLVSTSSVSWVWSSPSRCQVSVISAGYEAQGPAPQGGLMVRDGVVGHMCLGGVRALHVSFPFSRYLRITARTCQPGGSQLLRLKGRLPLALGDLSGMSARSKSAVSF

SEQ ID NO: 943659 - protein, 73 aa, Homo sapiens
  misc_feature (6)..(6): Xaa can be any naturally occurring amino acid
  misc_feature (19)..(19): Xaa can be any naturally occurring amino acid
  misc_feature (25)..(26): Xaa can be any naturally occurring amino acid
  misc_feature (49)..(49): Xaa can be any naturally occurring amino acid
  misc_feature (63)..(63): Xaa can be any naturally occurring amino acid
  misc_feature (68)..(68): Xaa can be any naturally occurring amino acid
MLGKEXLDVLRWGSSEKVXVKYMAXXSKPLPNIPPKNLKGVTMLMRWAXIQFRTNLVGPSWLXNTLGXAGCYF

SEQ ID NO: 943660 - protein, 225 aa, Homo sapiens
  misc_feature (89)..(89): Xaa can be any naturally occurring amino acid
  misc_feature (99)..(99): Xaa can be any naturally occurring amino acid
  misc_feature (105)..(105): Xaa can be any naturally occurring amino acid
  misc_feature (118)..(118): Xaa can be any naturally occurring amino acid
  misc_feature (120)..(120): Xaa can be any naturally occurring amino acid
  misc_feature (123)..(123): Xaa can be any naturally occurring amino acid
  misc_feature (140)..(140): Xaa can be any naturally occurring amino acid
APYDSQLSSYSSACGCCGGGRGGMESETRAKDPPETSPAPGPFPEMPKGKRLSEGGWRENLDKPAPGELNTGRKRQDRIKMCRPREDSXPASYPVHLMXSLLKKXDIKYPPWLVALTXSXSFXFFFSSFRSFMLLQLVLXMPPVWWMDSSRVAQPPEGVDHFPGSSLDWTREEGNKARRKGCSGRAGEAYCVPEPAGREVNSPQKRSPRWGGGPLEMCGAGQDFG

SEQ ID NO: 943661 - protein, 186 aa, Homo sapiens
PRQGAGGPGGGGGARRAAGELGGGGGGGEEGDRVGSRGGGAGGGPGAGGSSQWRMWGTRVGTQRTKGLANKEENGREDEKATDDENDFEGYFTGQRNEGGESGNKQCGGSSDLHEITTVFENRIKHVGLARSSVWSRGGVECCIFAFLVVDFCPDGSAFICTFSMYYNPVEVTNKGVFFLSAYQSD

SEQ ID NO: 943662 - protein, 104 aa, Homo sapiens
MLSESKEGYGDEGKEVGGGGSDEETKELNRHARLLRIPPSYATLLQWENEVGKNEQPADCCTVDQHHAFEPHFSGVVISIFIHGKTIYNEVACPQTHRVNRISS

SEQ ID NO: 943663 - protein, 297 aa, Homo sapiens
  misc_feature (12)..(12): Xaa can be any naturally occurring amino acid
TQKCKKNKQEPXRKTREGLSLQPHQLPEKRPTAKTSMKATLEDRAQQQFLERKGGFQKGKKRTKAERKIKKKKSAKETAKKKKQEGKRSSGKKTKRKKKDGQPVFESKLKAQTKKKKCQEKKKRSKGKKKLVVETASNFESEAETQKLKKKNGDCYLLSDPGAHHVLLLVIQTGAFTLLQDTMANKKEKKDIGTGAMKQMVNLFNHKKKGGQALDDYVANTDNCSLKDLVRECERWYCAFNNWGSVEEQRQQQAELLAVIERLGREREGSFHSNDLFLDAQLLQRTGAGAARKTTSS

SEQ ID NO: 943664 - protein, 147 aa, Homo sapiens
MVFQSPWHPHATGEVPDLEEAIPGPCGHSHAIVSDAQAADAVVMPSQDTCPVGFEFISDVALKRTRTQEEEAPALGEGDRGDPADDVVMGVSHELLVSRRSNSLQVASSEPMCKCIAIWKEANGIDVRLVASEGLPAHAFSHIPEFG

SEQ ID NO: 943665 - protein, 59 aa, Homo sapiens
MAQENMKDEGLEPAVTRWRYNAGSCYQCLVTRVQAPDELAMAAKDTGAGGTTGACKGTS

SEQ ID NO: 943666 - protein, 116 aa, Homo sapiens
RKKKSSKKKSGNGRKTGNKIKKINKGRKIKEEAKKTKQKTSKKSHSVAQKINTKKKEGNNKINNVKTTKSDKGNTRTTNTKTISIYNFTQKRKRLPDKTKHGMTEQNTGKGNPEKQ

SEQ ID NO: 943667 - protein, 226 aa, Homo sapiens
MNRVCFQQKKNIQKNVGGGACVGGGGRSGRRVGGPESSVVCCAPRVQGWVLNVCYLDPSGKCVPNRPNQGVYVKGQGTSEGVSLDPKQQLTAVADVGHDLLFDLGHLLPEEAGGIDSPAFSALSVFTLSSRRAMRSNFRFRHLVAASRFSSRLRSTLMRSWSSMLMGDTGGVASRLRAYGTVCGSSLKVEAPRPKPSCAGGHREGRRVWEVADGGRRVQLPVPTAA

SEQ ID NO: 943668 - protein, 220 aa, Homo sapiens
  misc_feature (99)..(99): Xaa can be any naturally occurring amino acid
  misc_feature (102)..(102): Xaa can be any naturally occurring amino acid
  misc_feature (111)..(111): Xaa can be any naturally occurring amino acid
  misc_feature (120)..(120): Xaa can be any naturally occurring amino acid
  misc_feature (135)..(135): Xaa can be any naturally occurring amino acid
  misc_feature (140)..(140): Xaa can be any naturally occurring amino acid
  misc_feature (156)..(157): Xaa can be any naturally occurring amino acid
  misc_feature (162)..(162): Xaa can be any naturally occurring amino acid
  misc_feature (164)..(164): Xaa can be any naturally occurring amino acid
  misc_feature (170)..(170): Xaa can be any naturally occurring amino acid
  misc_feature (174)..(174): Xaa can be any naturally occurring amino acid
  misc_feature (182)..(182): Xaa can be any naturally occurring amino acid
GGLWQRVSGGSEKPGPQVQLRPLPLVAIIVEHVVVVDVHEDGYWLSDDERQPHSCVAIVALEKAAHEPGQWDLAIMPVNAQRRNIRRGTLTRYSWKKAXAKXTPVLAIHLXLAFFPAEAXLALALRHHELTSREXKSFKXRMVFAISPSREPTGVXXSNQVXPXPLGNTXLVAXLATCSSSXACTVRAPTARRFSTWIADTAKTFGRNNQAWGGANNRDL

SEQ ID NO: 943669 - protein, 315 aa, Homo sapiens
  misc_feature (115)..(115): Xaa can be any naturally occurring amino acid
  misc_feature (119)..(119): Xaa can be any naturally occurring amino acid
  misc_feature (150)..(151): Xaa can be any naturally occurring amino acid
  misc_feature (186)..(186): Xaa can be any naturally occurring amino acid
YTIFYKKSPSSAPEFPPSPPHSASHSHPPPTTPPLPFPIPFVSNSNMATLNNHLIYNLLNKEQTPHNNITVVDVSPVGMACPISILMKDLAHELPLFDFIQDKLKGDMMDLQHAXLFLXTPKIVSGKDYNVTTNSKLVIITAGARHPEGXXLLNLVHHNVNIFKFIIPNVVKYSPNCKLLIVSNPXDILTYVAWKISGFPKNHVIGSGCNLDSARFRYLMGERLGVHPLSCDGWVLGEHGDSSVPVWSGMNVCWCLSEDSAPRFGTDKDKEQWKEVHKQVVESSYEVIKLKGYTSWAIGLSVADLAESIMKNLRR

SEQ ID NO: 943670 - protein, 308 aa, Homo sapiens
APAGVIEKGGKKAGQDRAKRKERKRPRGQGQDKQKKAGAKKKKPQNGKNLGGAEKTKEGAHQQQRNKEKKENPGRKKARGEEKGGRNGKGTNEGKPGSTDGAETTQREQERERGNIKKGGGRKRQGSERRPRPPGAEENRKEEERGNQAKAGSRAREGNRPSRKAGHGGPKGERPPKKRTERREGDPGTPQEAPKQSGGKEEDRKRRGNKGSQTGTEAGGARREGKRKGGRANGGTGGKAGGGRADGPGRGETAKRGPAKAKGKHRNRRGGGENAHGRGRGGDRGAPPAKRNGNRDGGGRDGRGTPGG

SEQ ID NO: 943671 - protein, 103 aa, Homo sapiens
YKHNHQVCAGRRRSVLPGGGNKSPLTTPPLTPSPPPGPTQGLDTSPKVGGGGAGRNRGRRPRWDSRKAFRRWRWDPVPPGSLWVMDSKTCWLSVETKDTVPLD

SEQ ID NO: 943672 - protein, 102 aa, Homo sapiens
MRGARYSEQLTIVRSRPRGRFKAKGRTPWCGGIRPGRGASSWNAALVLGDESMAYFLLIQKDIPNFNLAEKQAFLYLLLRTARIQDKAGIKLFSKHMPAIPV

SEQ ID NO: 943673 - protein, 151 aa, Homo sapiens
WTPHSPRALDKGNVVILLSSGLSWWDVMWLAKLGLLCLEKRKQEGVPALGTGPGAGVVGQGEGSHPGERVGQGEQGEQGWAPGPPPALQCGYRDQMQVDVACAWGPYLVVSLSGFFIDVGFLFFLVGLGLGCNARQNIKSGKTNTSHHGSE

SEQ ID NO: 943674 - protein, 261 aa, Homo sapiens
  misc_feature (163)..(163): Xaa can be any naturally occurring amino acid
VGEATTTAPACCCGSIHSRAGVLDGFIYRHDQARSLRGCCQRIAPHHSWFPHESFKVVSNVLVVDVFSLPCTPLGMPGPQLVENVCGIKASFVTQLAWDNLQGFGISPNQQLLFSWNSHCVIPQYLGSSILMAPPPATTEIILDGPPDDHDGIMQGPLCLLHXTARRQRRRIKVDVLALGQTVKKLYLSPPIWVSSNTWHRPSTSADREFTLVWIDPTEAIIVLFRSSSGTGPTKKMSLSKKYWVATSPMGSLDKTTLAPE

SEQ ID NO: 943675 - protein, 109 aa, Homo sapiens
GAWLFLLALGWGIGVRGHGLLRVGLAFNIVSSMFFMWVLSFWVLADWFFLCCGASEGASFGISWGIFKEFLPKTLYLNQSLVQWGKICMLPPSLGSWPLQPKFSVQIQS

SEQ ID NO: 943676 - protein, 165 aa, Homo sapiens
MGKVCSQVSRVKPPPRASLFPGGSATELTLRNRKRMSFVARKPEGILTGTQHPNQQHFCSWGAAGERGAACCLQILPESRVCFPTGLPLARKVTKLSWVGYKLQGRELQWPVYREELELERLLWRRRPGDRDLRRTGGLRFGERDLLLIRGGDCATEAVVADSPG

SEQ ID NO: 943677 - protein, 167 aa, Homo sapiens
MLRLKPATVPQLCLSWRAGGRPQHIPGTRACITDSCTAISSTRPWPHLPNHSARTACKGGEFTLMAFLQRLIEKKQGILSWVRNTQQHPFRPPRVGCAGCTGIPLRLGERGDPGIQSSPGSPGVWKGHSSGGGGGNSSSEPVGTPHGGPSQLEAGSGAAPVLVVPTI

SEQ ID NO: 943678 - protein, 150 aa, Homo sapiens
MPDPAEQGKQGLPQGPPSAQGLRCHAPQHTPGPRLLQHRQCQQGLGRGPQLGVWLQHHDKDRTQLGRQTGSELRGQVALAHCLPALPTVGQLHVACHFQDGEAQTEHIRCCPIGALQQLGGHVAGVSLLDLTSSCCSQLHQQYEVTQLAA

SEQ ID NO: 943679 - protein, 80 aa, Homo sapiens
  misc_feature (42)..(42): Xaa can be any naturally occurring amino acid
  misc_feature (63)..(64): Xaa can be any naturally occurring amino acid
TPIFQIISGFTGKKKPRAAVNVPSEVPDSAPGRAVRDDEEGXRACGDDAGGNVLGRKKSRGSXXELGFGGMGQNYRRVEY

SEQ ID NO: 943680 - protein, 225 aa, Homo sapiens
  misc_feature (119)..(119): Xaa can be any naturally occurring amino acid
  misc_feature (121)..(122): Xaa can be any naturally occurring amino acid
  misc_feature (124)..(124): Xaa can be any naturally occurring amino acid
GVFGACPRWKGLGHSNGGSKLGLQLPLILEGGGGGPSGGFGGEGGEEEEVWVWVGGGGAGAKGGPSVAFEWWEAVWGGRAGGGGGGAAVWAGGGGGGEFRREEAGVFACVFKIFDFFFXFXXYXVIFLFFVFSDFHGIRVGWGVRWPGFLASLAHQSSDSGGSWQPSSHFFHTAKQAWMTRLSGKPSTFNLSIASFSCGVTWMYFICGASSPMAPTSPSTSEMSA

SEQ ID NO: 943681 - protein, 132 aa, Homo sapiens
  misc_feature (6)..(6): Xaa can be any naturally occurring amino acid
MQFIHXNGNATIAWRRSEKRSKPTSSPSPSSRAIKTSLGEKHITIPKAEAPPDLPHPQHLGRTRWDEGDPRARVAREPRAGAILCKLQGFIGMCVHELHRTCLKAGRKLRSQPWVLVRGYDWARRGKQHIPS

SEQ ID NO: 943682 - protein, 121 aa, Homo sapiens
  misc_feature (37)..(38): Xaa can be any naturally occurring amino acid
MGTKGHGGQAAHGFFCGRAEGGRSRLPPGSRHNPSIXXGSPAPEIPSPHSSWTARAGSIGRERRQYEEERVGCWAPVASMPVLKSSPGPWMPGPGSLATFLALGTDCSQGSRGWGDLSSWA

SEQ ID NO: 943683 - protein, 151 aa, Homo sapiens
MTLFCLLGVEDFPSERKIEETSVCTTPAAGLEQLLQGSPGPLRPSYVGRGVQSHTWLHPQVDTGSKLLRCSLGSFPQHRRASMHTHSTGPTGPVTLTRHALGAACCLPSTWGYKRSPKGAGVQGLLDLLAAIGVLLQDLAEVLLLLPLQDT

SEQ ID NO: 943684 - protein, 120 aa, Homo sapiens
AVENEFSVQGLDGEGVQHADVVFFFLQQFGSSQGFVQGHPSPDKGHLVIVALQDYFGLFELDVIIVVIVDGVFWGGGRDEADTLCIGGQFHCIVCSNAITWVKEVDVGIDRNIARFSRAI

SEQ ID NO: 943685 - protein, 297 aa, Homo sapiens
  misc_feature (13)..(13): Xaa can be any naturally occurring amino acid
  misc_feature (59)..(59): Xaa can be any naturally occurring amino acid
  misc_feature (79)..(79): Xaa can be any naturally occurring amino acid
  misc_feature (83)..(83): Xaa can be any naturally occurring amino acid
  misc_feature (86)..(86): Xaa can be any naturally occurring amino acid
GRQSRFNKTNSLXQTTMIHSDFGPNSAKENSLRSLFPRVILKGGGHHPLEAGGRVGGGXGAVGGEEFLVVVVFVFFLQXGYCXLGXGHRQGLVQYLVRGKSKAFLEGWGMQEGCVGITRPLLHLGCQAEFAKLEGALRFHLHWGFFSWKSAEMLTPRPPLAALRKLCFRGEGQDVPSASLNELHVVGREHAKMAIRPIATPPAFVDHLDARDEVLGVKGDLCVVGCLVVVQGTGTEPLPTEPLALNVVVNVLRASTLLLHQWGLLVEGLLLWRFLIDSLLFCLHQTWRSAGRLLLSR

SEQ ID NO: 943686 - protein, 109 aa, Homo sapiens
  misc_feature (62)..(62): Xaa can be any naturally occurring amino acid
  misc_feature (106)..(106): Xaa can be any naturally occurring amino acid
MSILKNQAREIIDSRGKPTEEEEHYTSKGLYRAAVPSGASTGNKKAQQHREKEKTRKKGKGXSKAVEHKKKTKAPALERKKQNDTEEEKKEKQKNDKEGTEKKKKXGAN

SEQ ID NO: 943687 - protein, 77 aa, Homo sapiens
MEGPDSSYSCLLIHICWKVDSEARMEPPIHTEYLRSGGAMILIFIVLGARAVISFCILSAMPGYMVVPPDSTVLAYR

SEQ ID NO: 943688 - protein, 139 aa, Homo sapiens
PKINLCRPGGMPSLSWIFALTFSMVLLGSTSRVMVLPVRIFTKICIPPLRGGPRGRVDSFWMLLLDRVRPSSSCLPAKINLCWSGGMPSLFWFFASSFSMVLLGSTSRVMVSPVRVFTKICIPPLRRSTRCRVDSLWMS

SEQ ID NO: 943689 - protein, 212 aa, Homo sapiens
MAFFHPLTHVPVNKGTLGIHQVFLVVQESSGLSNGCGVAQHAHSSVFLCQISTRYHFWRLVVYANFEASWAPIHKLDAALGFDGGNGSFDIFGNHVTTVQQAASHVFTMARVTFHHLVGWLKASLGDLCYRKLFMVGFLSRDDRGICGQREVDAGVRAQVGLEFCEVNIQGSIKSQGSSDGGHNLANKAVKVSVGWALDIEVSTTDVIDGLI

SEQ ID NO: 943690 - protein, 129 aa, Homo sapiens
MWKTASPALTWGLGPDPAWSHPAQKKGPPVPVTFSVEREWGFCSKEFLPISKRSKWCIQPLKTFQFMVSMVFFKEFEVLREAPLQWRVHLQGVSILEQVHKMVLCDVAIFGGILHGPLGQGSHGQPLLH

SEQ ID NO: 943691 - protein, 250 aa, Homo sapiens
GPIFFGGASSSSFFIRRSVFILPGPLPWKRRDGGGEPPWEWVSGPSHPRFDLNVGFVAVLLLVVLCEASVFLPQGVLVIDGHLILDAVHGWGQRLVGGLHPGHLLHCGLQQPFVLTQERGSCQPPIHDRFLVQEVVEEAEKSCCCFSSSRFTVLQPMFSSPSDSEPPLAERSSSRSKSMSSSCSSLIASQPVVGDLPKVRQNSDVALNTMAPFRSGSSSSSQPRWRDFSFFTISTTFSPLSRSCCSCCDC

SEQ ID NO: 943692 - protein, 155 aa, Homo sapiens
MGLPGTIINNGSITRLQEFRAIFQLFTRTEINLFLQLSKLACNVGGVEIQYRGIAGAYLAWMVQDNHLSGEASGFHWWVIFAVTSNVATTNILDRHILDIEAHIVPRKSFTQSFMVHFDRFYFRCNVDWSKGDHHTGFENTSFHSANRNSTNTTN

SEQ ID NO: 943693 - protein, 180 aa, Homo sapiens
PNVPVNKGTFGIHEVKLVVQASPGFSNGCGVAQHAHSSLSLGQVFTRDHSGGLVVEANFEASGGPIHKLDGTLGLDGGNGSFDIFGNHVTTVQQAASHVFTMARVTFHHLVGWLKASIGDLCNRKLFMVGFLSRNERGICGQREVDAGIGHQVGLEFCEVKIQGSIKSQGSSYGGHNLTY

SEQ ID NO: 943694 - protein, 146 aa, Homo sapiens
MVKLACSLGSTLRMRNAGLVSENRSRFTGHSFSQQRMKVPEGRGRGIRFDSVLTGVGELQPEVSVEEGRPQEQEAWCFEVDDAAQLVQGVVQRHVRELLSDDAQDPSDPLRGVEAAGVSAHSLQDTAHKIQVMDGLCHMGPPSWCG

SEQ ID NO: 943695 - protein, 219 aa, Homo sapiens
GRGGRGTRGTDQVGVGGSLCLGEAGGKGLRGPDSLWGWASAETEDQRQVPGGRAFLRLRRKNVPAQQAVPGQGQCVRGVKALPPVDVVPVRGPQDRQREAHPDVRGLRQGPRALLVSRCPAQAAGGTGIHRHREQAPVDTVTVHAFMVFLHAAATALTQAWQLGSRMAADTLLLVGFPKLLLPGEEGLRLAGEGRAGVQRPCNPVIAQVWPEAPPPLRN

SEQ ID NO: 943696 - protein, 48 aa, Homo sapiens
MQVGYSVLQLPLLAFQLGSFPVQFFLLPEQACLGCRHHGLGGRLGWFT

SEQ ID NO: 943697 - protein, 32 aa, Homo sapiens
MKASISRWMLAFSGALVSTAGVKTEGTENKRL

SEQ ID NO: 943698 - protein, 260 aa, Homo sapiens
  misc_feature (79)..(79): Xaa can be any naturally occurring amino acid
  misc_feature (97)..(97): Xaa can be any naturally occurring amino acid
  misc_feature (115)..(115): Xaa can be any naturally occurring amino acid
  misc_feature (117)..(117): Xaa can be any naturally occurring amino acid
  misc_feature (125)..(125): Xaa can be any naturally occurring amino acid
  misc_feature (133)..(133): Xaa can be any naturally occurring amino acid
  misc_feature (137)..(137): Xaa can be any naturally occurring amino acid
  misc_feature (141)..(141): Xaa can be any naturally occurring amino acid
  misc_feature (148)..(148): Xaa can be any naturally occurring amino acid
PIFPSLFNFLSLFMLISSAAPSSQTVPFSLPFPFSFFYFIFLAVLGMEEKMLLQGLSEEGFAKKAFTIFMISSTFALFXIIFLSPTLNSIFLGPIIXQAATFPYLTLWMGSVSPXRXRDMAFAPXPRHSFFLXPPPXSVLXSRTSYLXSPNPVHFSSISIYSSISSSRPMPRSRFQPPSTAAAVPAPPPPSRAMLPAVRPAPPRRARSARLLARPGLQSALASRAEEGGGLGVGPGGSSRCGAGAGQGGPRGAGAPSEKT

SEQ ID NO: 943699 - protein, 215 aa, Homo sapiens
  misc_feature (53)..(53): Xaa can be any naturally occurring amino acid
  misc_feature (60)..(60): Xaa can be any naturally occurring amino acid
  misc_feature (64)..(65): Xaa can be any naturally occurring amino acid
  misc_feature (167)..(167): Xaa can be any naturally occurring amino acid
SGNEVKPAFPWSGQNWDTPPPVSRAQGAGRPALRRQGMRLGLCLCLPSCKPSXSARAASXASFXXQVFYSVCVGGRPLAGGGGKLSSGLQSIFRNLLFQANVLRSIAWKEVRPLRLHTAMRLVSPSSSTWEEAASPRSPRKVIPPSTGGSNFPTSARKSKRSSLQGXETCRVLDGQHALALLQPASLFFPFSSCDATASGPFFQQGTAFQMAGVL

SEQ ID NO: 943700 - protein, 133 aa, Homo sapiens
MFWAHQCCHRVLAAALPVEQLLHRAPPVTVEGAVQPSSLRRLRSTMRPRARRQLLQQAARYESNPPAAERSLSAQMRWWPGARHHGCATVPRRSAAAKKEGSSSEESRKKTLALDLNAIKYRSAIGSVTVWAA

SEQ ID NO: 943701 - protein, 293 aa, Homo sapiens
  misc_feature (1)..(1): Xaa can be any naturally occurring amino acid
XVVDKTPDIYKYTYRSQHHQHQNVPQPGPCQKDQESGKIEDKKGEGPSLCQVSVITCYGPHVRRRNYPFPWIFDTVVHEDELDPLEAPPFLSPACALNAKATEAKYQQEQLGECETLQGPPSSSSCLAWILGPMPGVPITLESPPFCVVALVIPLFSRMFRLRSLKLLISSTYAWATHPFSPSARRTPSSQPSLVQVLTDRMSVFSKVQLIWVQCLVCPNTLNLGAIFPLTDDLLVLLGAGGAQGWDPSLLLTFRPGPQQELVLHVLPVEELEEEHVAGDALQLQAQVPHLQL

SEQ ID NO: 943702 - protein, 60 aa, Homo sapiens
  misc_feature (50)..(50): Xaa can be any naturally occurring amino acid
SSRVLYSNPISNAGMGSIWYLEDDHRKQNEDRSIFDLQKRREKEAGGAEXQKKSRSTKKE

SEQ ID NO: 943703 - protein, 145 aa, Homo sapiens
VVALSSVKNTDQGHRKSALQGGAGSEDVWAVVPDTASSLGLGFEGSSIVQVLLKSVGLGGLQGSGIQQQHRAQAKDVTEYLIVLEMVVHARTQHFLEGSVDPVPSPAVHVEPSKPKRTISSSHSPPSTECSTARKVERWRRRSAF

SEQ ID NO: 943704 - protein, 115 aa, Homo sapiens
  misc_feature (6)..(6): Xaa can be any naturally occurring amino acid
  misc_feature (23)..(23): Xaa can be any naturally occurring amino acid
MNYDEXEHKGAGGYNPGVGAAGXYGAALRGRRLEKKERATRIELFIRYCYTDQEPSKGFLKCQESMQESAQMLEEFVTAGSVVKGKDSSLSIYKEATVNCSTCSKRQQAPVSYTA

SEQ ID NO: 943705 - protein, 107 aa, Homo sapiens
MRGGDIPGQGCGPKMGLLVNEASLLELEVEELLQGAGSGQSSLSGGLYSPQLAMTRCMSDTKSFRVNVVAASPPLSHGLQVNGEADDLVVVRGLRLLHRLHEGQALR

SEQ ID NO: 943706 - protein, 68 aa, Homo sapiens
RKVSPYSHGAPRYASCPALTLFSAPILRELALGSDPWVQIPGPPPTHCETLARVPELGSIIPASLTWG

SEQ ID NO: 943707 - protein, 136 aa, Homo sapiens
MRETQGTLKGTQKGGCILVQCQSEGGAAGAWTGPPSPARDRRVKPPGTKAQRLERRRHVPRLHGLGVGEMRGQNWHSGQDLGLYSMGRGEALGLHGAMGEPGAERDCCCAKAQSSCSLQQRQRQGLASGSWTGERG

SEQ ID NO: 943708 - protein, 167 aa, Homo sapiens
MAAAHQGSRLAPQPGASQRAIKGLGLILRCGRWGGRKNRAIFCLGLFSVLLLLRVALGKIEEEGDCGVLSGWTLYLSPGPHFEKAQSKLKFIKGIASSLCFHPTGGEAGGEMLHFFTPWGGKRKDLSRSSPDICTCAKYSFNFCPLKSVSWSLFALLLRFRFASGNS

SEQ ID NO: 943709 - protein, 269 aa, Homo sapiens
  misc_feature (45)..(45): Xaa can be any naturally occurring amino acid
  misc_feature (69)..(69): Xaa can be any naturally occurring amino acid
RPSGDQAREVHWGGSALLLVLITCYFSSTTMIFPPESQILMLGAXAAHSQERLGLKHRALMMSPPSTVXRCLASLRSHNMAWPSLPPEAQGAPSGVTVTVFSLPVWPMWLVFSLQLVRFHTLSSFSQPQVTMLELLLLGELGTQGTHSEWLSSWTVYLLTPRVFHSLFVLSLDPETICRLSEEKATLSTSLVWPTNRLVVVPVVRSQRRRVPSQDPERANWPSEEITTITNKVGVTPQSTLWNSIVGLIPGQFPHDDGLISRGGEDHVR

SEQ ID NO: 943710 - protein, 305 aa, Homo sapiens
KRRRREEEGEQRGKGRSTTPRGPGGEGGGGGGEGRAGRDPTKGTAPGPRGRAPPSDKTPQGSREPLSPDAPARAPGGGGPAQGPGSQRSPPGPQAQPSRRQNRKKAGAAPAPRRPGPAGGSSGQGRAAARGPPQEGGQQARGREEAGAREPGGALGQEGPKGTPGGATEPRARHAPALSLNDHICLQPPRTTLYPGPAQGHLRKLCLPERLSPLASVPGHLYHQGLLQGCRCLEVHWDDALPSLLPSRELNGGLGTGWGQRRAQVPCGPVQAKAAKDAHEKDAQEAPQGREKMSHAETARGGSAG

SEQ ID NO: 943711 - protein, 349 aa, Homo sapiens
GDRENKGDKKAGGDGPEGPGGEQEKGDDRTSVAAAHPEKRTGGATARATDHWGGKATAAGTPHHAAAKKQSVDTVAVDWAPARRSTGPGGPKEDGVPLAEKKTANRRQSSPEQPTETQVTRSGLRAGAANTVQERADTAWLRGDWSQTQRGSSGQGAERRSGGAALGSGRSSRRVGGRGDRGQNRAARHLCPPPPTPWASAAIEYPGGKETGQWINPVDFQEEASLQEALVEEMSWDKGEKTEPLEKTEPPEGALELGLGYRVVLGRMETDVMVEAQRRRVTRPRRRSTHRRDIGDPNEPELPQATVHLPAVLPRAWGHPSCRGNPDAGMKWNCCTRLGWHPWGRTDLA

SEQ ID NO: 943712 - protein, 87 aa, Homo sapiens
  misc_feature (61)..(61): Xaa can be any naturally occurring amino acid
PQHRNTNRQPFLRRHFFGVESKALNEATYMEHSIGYTQLEPQPLMTRTEARLYTEAHTRRXAHADPHSTLRNTPAPVVPDIRHLYSA

SEQ ID NO: 943713 - protein, 168 aa, Homo sapiens
  misc_feature (28)..(28): Xaa can be any naturally occurring amino acid
MATKKQHVPSQGGKRNTKALLKRRGLKXIKFPRVFCSTVACEFWNNVPVGKHYAQEFLGVNVGKPLKFSVAVRGEPENCLWNPVDVQAPGDERKHVCDFLYHFGCGLPRPVARLGVHVDKQGVALLPAAAHDVLKGGNELQGVKGDHAVIMVSSEEQHGRVLDVICFW

SEQ ID NO: 943714 - protein, 110 aa, Homo sapiens
  misc_feature (5)..(5): Xaa can be any naturally occurring amino acid
  misc_feature (18)..(18): Xaa can be any naturally occurring amino acid
MSHVXALWVQVVKKAFLXKSSQGVACTLPSANGPFPGIHLRGFHCFPETIHVDQCALPSAWYLIITPSMHILVLSAIYGLSRSWFQLCLVSSVMTLQGHGPYQPQSSKEP

SEQ ID NO: 943715 - protein, 194 aa, Homo sapiens
  misc_feature (109)..(109): Xaa can be any naturally occurring amino acid
VPRSLRWHCRALFHHRGTETCRRLKTITNIFNQLSGQRQQKQPEYSNSRQEGSSSPDIHVRRLTPKPHAGILNSAALIQGTEWRQSTGGGKMFSNQVRHTGKASHPKVXSTKQAWRNKQSCQEPPDILLYALPLVPRVHHVLWFSLHKAQKAADHPKPDSQGILIVGIGPQICCRIIFIFRSWLNFFILKISLS

SEQ ID NO: 943716 - protein, 44 aa, Homo sapiens
MLPTGTLKPAQAVGRHRSSTGLCQLWPSWNQPSSHLEGHAIKRV

SEQ ID NO: 943717 - protein, 171 aa, Homo sapiens
MASVQASRRQWCYLCDLPKMPWAMVWDFSEAVCRGCVNFEGADRIELLIDAARQLNRTTVLPEGRSPGPPALSTRPPKTWRRQHQGAPAAAPAGPPPAVRDRRRRVGQDRYDRATSSGRLPLPSPALEYTLGSRLANGLGREEAVAEGARRALLGSMPGLNAPWAAWQLQC

SEQ ID NO: 943718 - protein, 65 aa, Homo sapiens
MPISCESSNKYTQRLLGRHKACARLQLRRLFCACACGHCLPVWAPGQQLLGTVRPADGLMQLRPC

SEQ ID NO: 943719 - protein, 347 aa, Homo sapiens
  misc_feature (13)..(13): Xaa can be any naturally occurring amino acid
PPPPPPPPLPPPXPALRPFPSVLPAALPGSSPAPCAPGCRRPVLPRRCLPAFFSSCCGAGCARSSASLLFPWSSSPRLVAPALVLSSLPSSPWSLSSCRPRAVWRGVCGPPLAWLLPGWFLPCVLVRLSVGSVFPRRRLRCLASSAPSAPSGLGPPSWPRRLLLFLPGALAWPVWASPGGPPPRRLSLLPPRAPLSPALSSFSGPRPSGAPSSGVSPGVCRAFWVVSFAPPPSVRFLPCVFLLRCVASVFRLALSVGPVLAVPPLAGRAPLPPSLCRFSLRARLVAPLLPPAAPLPPFPAFPAAAAPRLPWCLFSSPSRLPPLWGPPAACPFWSPSCRALGLSSRRF

SEQ ID NO: 943720 - protein, 387 aa, Homo sapiens
VRSGLPGLCPGGARLSPPRAPRPLLPVCPLRPFVPPSPPAPGSPPRPVPLLPGWGVSAPSGRASLFPFPPGAPRRARLGPPLRAPRGALAAAPAAAPGGPVPPPVAPGGPGLGGAPGGLRAPPPSAVPAASPLSPPVLGLGVPGPVLASFPRRPGPPCALPLLSARPPARPAVAPSLAGFWRPPSCLPPGCVCAPAPWPALSPPPPGLPGLVVRCSAGFRRVAPRLSLRAPLPRSCGLLALPSRFCPALPLPPALSRLPPSSPPLQAPAACFRSPLLALLRRPPPLPCRPLLSSLFCGPCGPGSRARLPRPVPCGPWVSSCPSSFVASPPSPPPRARPSPRGCRGGFAWAVRLPPSCVVRVFLLPALRRSCCRRPPRGALLRSAPPG

SEQ ID NO: 943721 - protein, 119 aa, Homo sapiens
  misc_feature (119)..(119): Xaa can be any naturally occurring amino acid
HGGGDGDGATAQGPQGEEEIDKLGVCVVNLTKCIKNLVFLYINKNQMLQDRLYIQNHGDIASVANKFQTRWGDETDEGDREGREGALRAGNVGGGGRGGEGLLDFKRRLLIYLGMSDDX

SEQ ID NO: 943722 - protein, 99 aa, Homo sapiens
SLFSVEANSSNSQKNEKALKNIQKCMAENREKDVDRESAESMCLFYTNQASASVYPNPPATNRLPLERNLKDLQQEIEDKMKGFSLPHTTDTPLPVDYA

SEQ ID NO: 943723 - protein, 327 aa, Homo sapiens
  misc_feature (130)..(130): Xaa can be any naturally occurring amino acid
  misc_feature (288)..(288): Xaa can be any naturally occurring amino acid
SLAGRAQKRSRAWHRPLLTTCTRLPVRCRSLFQQLLYGLIYHSWFQADPAEAEGSPETRESSCVMKQTQYYFGSVNASYNAIIDCGNCSRLFHAQRLTNTNLLFVVAEKPLCSQCEAGRLLQKETHCILXPLSPPPAPPAAPRAPSVPPPPSASFTPHPCPADGPEQCELVQSTAIPERPAHLLRLQRDRRYLRLWPRGLLPAVAGRPGLPATAAPPGPAAPAAAFSFRPRLSPPLSTLGHPTSTPTSAGLFAFATFCPTLPPETSSSYTEGAELARPENLVCAWDGXPSGNAVFGTNQAHSNVNVPSFCLWLPSGWKEQSMCKQLC

SEQ ID NO: 943724 - protein, 253 aa, Homo sapiens
  misc_feature (125)..(125): Xaa can be any naturally occurring amino acid
  misc_feature (136)..(136): Xaa can be any naturally occurring amino acid
MTVSPESSGGVTQSHKPASPAVEMGSAPGRATDREDKTNYSPKKKPLPDSGQTQSVGKWTTTQAEGRAQPVTLGTHKTVGQGPSHVFKARNKNTGEPVGMKLYTSPVTAVPKGGCAGLCCAVGVXPPKLVQQLAVXGDGGSGQKVLVMEYCSSGSLLSVLESPENGFGLPEDEFLVVLRCVVAGMNHLRENGIVHRDIKPGNIMRLVGEEEAEIYKLTDFGGGRELDDDEKFVIVYGNEEYLHPDMYEREVLR

SEQ ID NO: 943725 - protein, 123 aa, Homo sapiens
  misc_feature (100)..(100): Xaa can be any naturally occurring amino acid
  misc_feature (108)..(109): Xaa can be any naturally occurring amino acid
  misc_feature (115)..(115): Xaa can be any naturally occurring amino acid
  misc_feature (121)..(122): Xaa can be any naturally occurring amino acid
GGGGYLAAAGLGRGLFGLICGLNCACVGGLEAVRAGRPKNSWTSRTVTRTQARPSGEPLAPLIWVGNFLAVAASTPSFSLSQGFLNARKFSFFFNKPGPXLARRILPXXEENVFXSEIGVXXK

SEQ ID NO: 943726 - protein, 313 aa, Homo sapiens
PVDSFAPFHNVNCPRGFLYFNRQGELRISVLPAYLSYDAPWPVRKIPLRCTAHCVAYHVESKVYAVATSTNTPCARIPRMTGEEKEFETIERDEGEMEEEEEGFSIKVIFLVSWEDIANGRMELEEWEDVKWMKKVFVGSEETVSGLKRLGGGWDLDDEGEEVKCRGRILIMDVIEVVPEPGQPLTKNKFKVLYEKEQKGPVTALCHCNGHLVSAIGRKIFLWSLRASELTGMAFIDTQLYIHQMISVKNFILAADVMKSISLLRYQEESKTLSLVSRDAKPLEVYSVDFMVDMPAGFSGVCRDRNSWCNLLP

SEQ ID NO: 943727 - protein, 130 aa, Homo sapiens
  misc_feature (26)..(26): Xaa can be any naturally occurring amino acid
  misc_feature (101)..(101): Xaa can be any naturally occurring amino acid
VCIYPIYIKESSWPNLPKRFPGGSQXGGRGRKDIHLSLSPELLDKEGKLPPDPRQMFKPSPTKKALLFWPVGLPQTQEHLANTSITGRGNGGGAAPPPTPXKPPPSPPHTYMPTQTDTVWLEHAVAAPGV

SEQ ID NO: 943728 - protein, 121 aa, Homo sapiens
KFVIVDCRYPYEYEGGDIKTGVNLPLEREEESLVLKSAIGGCSEAKRVIIIFHCEFSSVGGGWMWGFIREGDRAVKDYASLYHDEMYMVKGGDEEFFPQHLTFCERQGYGGMNQGGFKDEL

SEQ ID NO: 943729 - protein, 157 aa, Homo sapiens
GLTFKAASSLPVSPSLAVNMKAFSPVKSVRKTACRTTAWASPGDKTPVDEPMNLLYNMNDCNPKLKELVLNIPQNKKVNKIEMLQHVIDYILDLQIALDSHPTYGQPTSHRDPGRTKRPRHRGPPSTQISASCPYRLLNALLNKNKRQQNTVWLNKQ

SEQ ID NO: 943730 - protein, 56 aa, Homo sapiens
TTEGELQHENIVALYDVQELHNSVFLVMEYCNGGDLADYLQAKGTLSEDTIRVFLH

SEQ ID NO: 943731 - protein, 69 aa, Homo sapiens
RRQKGESAANAQVLAAPSPCSPFAFTPSKVNMSLKNEPRVNTSALQKIAADMSNIIENLDTRELHFEGE

SEQ ID NO: 943732 - protein, 33 aa, Homo sapiens
  misc_feature (11)..(11): Xaa can be any naturally occurring amino acid
  misc_feature (31)..(31): Xaa can be any naturally occurring amino acid
MCYLMVLRGIXFFDISFVLGDGIILFLSHEXKE

SEQ ID NO: 943733 - protein, 114 aa, Homo sapiens
GWDESKMKDYDLRADAISIKSAKASRDIASDYKYKEAYEKQKGHHIGAQSIEDDPKIMCAIHAGKIQSEREYKKEFQKWKTKFSSPVDMLSILLAKKCQTLVTDIDYRTYLHKW

SEQ ID NO: 943734 - protein, 129 aa, Homo sapiens
  misc_feature (98)..(98): Xaa can be any naturally occurring amino acid
HLTLPCPTPPSFCIVGIFPAVRVKTQVHPHHCLVFCLASGHFPVSALSPKSVPSLAAWHHLSPGPWHHYTLQCKQSDFPLKNYIWPGAVGYTYNPRTXGGQGKRIAWGQEFETSLGNMARPHLYKKFKN

SEQ ID NO: 943735 - protein, 64 aa, Homo sapiens
  misc_feature (26)..(26): Xaa can be any naturally occurring amino acid
  misc_feature (38)..(38): Xaa can be any naturally occurring amino acid
  misc_feature (48)..(48): Xaa can be any naturally occurring amino acid
  misc_feature (53)..(53): Xaa can be any naturally occurring amino acid
RWRLIFAAAAVDFLGLESRAFFVRSXAGFAPFSRLGAXRLGKGLEGAXDRRVXVALGAVMLAGE

SEQ ID NO: 943736 - protein, 157 aa, Homo sapiens
DDIDSILVQCGDSIRPDPEVLGAASQLKDILRPLRTCDSRFAYRYPDCKYNDKSEGLVSSWPWGQHAWLSILPVGLLQGRKKQLFFKDEKKGTLISSGTERGVVRYHVAVSAGWDVLAKPAVGSEDLGVDAHSMSLSLSFLCSPPDSPEGERRHQME

SEQ ID NO: 943737 - protein, 68 aa, Homo sapiens
  misc_feature (1)..(1): Xaa can be any naturally occurring amino acid
  misc_feature (5)..(5): Xaa can be any naturally occurring amino acid
XAGAXQKQYLDGMKENETSGRKEGKLGYYWDGPDKREHRLKGLAYNKEEIIFETKQKKCSLKKYSLSS

SEQ ID NO: 943738 - protein, 68 aa, Homo sapiens
DSVRNSGDRRGARVLGDSDTLSSPAEPRRYRLKGSRGWGTDSSQVSVFLWLADVWHHFTGHTGQTGPR

SEQ ID NO: 943739 - protein, 64 aa, Homo sapiens
  misc_feature (8)..(8): Xaa can be any naturally occurring amino acid
MVMFKKIXSFEVVFNDPEKVYGSGEKVAGRVIVEVCEVTRVKAVWILACGVAKVLWMQGSQQCK

SEQ ID NO: 943740 - protein, 67 aa, Homo sapiens
AFLGAVYMYHKYQNRKLNAPFCTIELKEDGISFSSYHDSIPNANLSGFLEDDSNEVAPNGQLTLTTP

SEQ ID NO: 943741 - protein, 43 aa, Homo sapiens
  misc_feature (34)..(34): Xaa can be any naturally occurring amino acid
  misc_feature (37)..(37): Xaa can be any naturally occurring amino acid
MAGGSGGQDIDTILANTVKPRLDSKWLKTDLQPXIHXRWALRS

SEQ ID NO: 943742 - protein, 30 aa, Homo sapiens
MGHPPLEFSDCYLDSPDFRERLKCYEQELE

SEQ ID NO: 943743 - protein, 31 aa, Homo sapiens
MAGTALKEADGLEYKTINTGILRKGFVAGPM

SEQ ID NO: 943744 - protein, 31 aa, Homo sapiens
MAFPTVLAAQRRTRRMRLAVGALLCLCRPGA

SEQ ID NO: 943745 - protein, 35 aa, Homo sapiens
PRPSTPFYELSLSTPGLLEMAAAQEADGARSAVVA

SEQ ID NO: 943746 - protein, 34 aa, Homo sapiens
AKLMLLGIARFSSLLTLRMAMVSSLQARLFPGLA

SEQ ID NO: 943747 - protein, 75 aa, Homo sapiens
  misc_feature (11)..(11): Xaa can be any naturally occurring amino acid
FRFSEHCWPTXQNISRKTRSSISTSKLGCWVGTSFKAEGASYAHARRRAPPAKQRLGDHSGCHSGPEADQPCGMA

SEQ ID NO: 943748 - protein, 31 aa, Homo sapiens
  misc_feature (6)..(6): Xaa can be any naturally occurring amino acid
  misc_feature (8)..(8): Xaa can be any naturally occurring amino acid
FFDFNXLXAREPFGNMYDADEDMQYDEDDDE

SEQ ID NO: 943749 - protein, 52 aa, Homo sapiens
  misc_feature (1)..(1): Xaa can be any naturally occurring amino acid
  misc_feature (38)..(38): Xaa can be any naturally occurring amino acid
XCARAADPQARHAAQPGPARAGRATPALGSDGVRVTMXSALTARDRVGVQDF

SEQ ID NO: 943750 - protein, 42 aa, Homo sapiens
TPPPPPPPPLPLPLPHLRELTRYSLKMAEAHQAVAFQFTVTP

SEQ ID NO: 943751 - protein, 35 aa, Homo sapiens
ATRQVPARKKRPKRLRTGNMVRSGNKAAVVLCMDV

SEQ ID NO: 943752 - protein, 46 aa, Homo sapiens
MAFVLILVLSFYELVSGQWQVTGPGKFVQALVGEDAVFSCSLFPET

SEQ ID NO: 943753 - protein, 99 aa, Homo sapiens
TAYWRDAPERSTCRCLQAHEDDGDHNEQVAVLSAVFLDMYIKRTTQETRPPKYLHYDEETSNQLPCDISPPGTYLKQHCTAKWKTVCAPCPDHYYTDSW

SEQ ID NO: 943754 - protein, 33 aa, Homo sapiens
GSARSAAAEERSVNSSTMAKNLEGYVGFANLPN

SEQ ID NO: 943755 - protein, 99 aa, Homo sapiens
YLSVCSQLSWVFLRRPGASLRMSFSLTATALTVSVASSSLVHLKAVKMGLADLAREITSALLSLSNATIINDKVSECYAKRRLYRFDGSRCYIKLVKQL

SEQ ID NO: 943756 - protein, 68 aa, Homo sapiens
MRHHLQDHFLEIDKKNRWVPRDDFIAKASPPEPGPERTSGLLGNGLAPRIYRAHLKPWKSSRIVPANL

SEQ ID NO: 943757 - protein, 99 aa, Homo sapiens
  misc_feature (25)..(25): Xaa can be any naturally occurring amino acid
SKAKAQRTVPKQPLTPAAAEGAAAXPGPRGDEGGGTAFTQPRTPETGKLRTRQERETSDPDQPEDAGSEDEPEEGGQPKEGNAHGAARPPAPAPAHRRE

SEQ ID NO: 943758 - protein, 99 aa, Homo sapiens
RGPTGHLASGGRLPQLPQGADHGSPQTGGDSLPARGGQVAATFGCRRDALGRTAARRQLPAEQGLRGSGRLPHPGLPSPAGPAHREENAYQGSTRTPDD

SEQ ID NO: 943759 - protein, 55 aa, Homo sapiens
MRSCPEEQYWDPLLGTCMSCKTICNHQSQRTCAAFCRSLSCRKEQGKFYDHLLRD

SEQ ID NO: 943760 - protein, 49 aa, Homo sapiens
MGKVKVGVNGFGRIGRLATRAAFNSGKADIAAINDPLIDLNYMAYMFHY

SEQ ID NO: 943761 - protein, 83 aa, Homo sapiens
MGYAQERPLETIDRQRKRLVETLHADSQLLLDALLTRYVLTGPEYEALDALPDAERKRARLLVLVQLTGKACLAELLHCAQST

SEQ ID NO: 943762 - protein, 67 aa, Homo sapiens
MSLIPGAEDSDFPIHNLPYGVFSTRGDPRPRIGGAIGDQILDLSIIKHLFTGPALSKHQDVFNQPTL

SEQ ID NO: 943763 - protein, 99 aa, Homo sapiens
LLETDPRLRSGSAVPLSANVSPSPASPAPSDSSPAAGTRDPRVRPTPDPARDMYTPARRRLMRDSKRLQEDPPAGVSDAPPENNIKVRNAAIFGPEGTP

SEQ ID NO: 943764 - protein, 52 aa, Homo sapiens
MAAQFDGGAALAADSRTTTGSYIANRATDQLTPIHDRIPCCRSGSAADTQAV

SEQ ID NO: 943765 - protein, 53 aa, Homo sapiens
MTDQEAKPSTEDWGDKKEGEYRKLNGTGQQRESLQREHDNTYQETQRSILPKT

SEQ ID NO: 943766 - protein, 55 aa, Homo sapiens
MSSSEEVPWISWILRGIREQKQLLSCETQDRKNYMTATNMNPYEHSMSRTLTIDK

SEQ ID NO: 943767 - protein, 99 aa, Homo sapiens
TAPFPPLSAPGGGGGLGSLTKTTARDLRGTKKEELLKQLDDLKAELPQLRVAKATGGAASKLSKIRGGRKSIARVLTGINQTQKENLRKLYKGKKHKPL

SEQ ID NO: 943768 - protein, 60 aa, Homo sapiens
MGSERTGAVPMPMLVVLALSQGILNCCLVYNVGLLEVKIFFGSLSEQFGYAVQQFINSKG

SEQ ID NO: 943769 - protein, 100 aa, Homo sapiens
  misc_feature (47)..(47): Xaa can be any naturally occurring amino acid
  misc_feature (95)..(95): Xaa can be any naturally occurring amino acid
SILGRKRYPSRMRFVVALVLLNVVVVGAVLVLVTKALSKKKLEYGLXQETFSPTLVRVNGLEALPSCIRSRETPKDSPSKLSAEAQTPEDTFNKXGCGGK

SEQ ID NO: 943770 - protein, 51 aa, Homo sapiens
MWNDIELLTNDDTGSGYLSVGSRKEHGTALYQVDLLVKISSEKASLNPKIQ

SEQ ID NO: 943771 - protein, 107 aa, Homo sapiens
MLVNDINRLFSPPLKNRGSWELNHINAIFSTLLTEEKWVLFKLFFFKIRKQKEVRRSQIWTVRCIPNGFPSKLLQNFSFLMRGMSRGIVVQKSLVKLSQAFFCRSFG

SEQ ID NO: 943772 - protein, 147 aa, Homo sapiens
KLELKIKKPTQNHTTTWKLSNLLLMNDSWVNNDIKAEIKKFFEINENKETMYQNLWDAGKAVLRRKFIALNTHIKNLERSRIDTLTSQLKELENEEQTNPRASRRQEVTKLRVELKEIRVMKNPSKKINASRSCFFFKINEIDHQRD

SEQ ID NO: 943773 - protein, 121 aa, Homo sapiens
MSHIEAMLMEEVGSHGLGQFHPLWLCRVQPPSWLLSSWAGIECLWLFQAHGCKLQVDLPFWGLEDGGPLLTAPLGSALVKPLCGSSRPTFPFCTALTEVLLEGSAPAANFYLDIQGFPYIL

SEQ ID NO: 943774 - protein, 289 aa, Homo sapiens
  misc_feature (267)..(267): Xaa can be any naturally occurring amino acid
  misc_feature (270)..(270): Xaa can be any naturally occurring amino acid
  misc_feature (279)..(279): Xaa can be any naturally occurring amino acid
IKQVLRDLQRDLDSHTIIMGDFNTPLSTLDRSTRQKVNKDIQELNSALHQAYLIDIYRTLHPKSTEYTFFSAPHHTYSKTDHIVGSKALLSKCKRTEIITNCLSDHSAIKLELRIKKLTQNRSSTWKLNNLLLNDYWVYNKMKAEIKMLFETNENKDTTYQNLWDTFKAVCRGKFIALNAHKRKQERSKIDTLTSQLKELEKQEQTHSKAGRRQEITKIRAELKEIETQKTLQKINESRSWFFEKINKIDRPLARLIKEEKERRIKXDAXKKNGLEGDXHHRSPQEIPN

SEQ ID NO: 943775 - protein, 138 aa, Homo sapiens
  misc_feature (22)..(22): Xaa can be any naturally occurring amino acid
  misc_feature (51)..(51): Xaa can be any naturally occurring amino acid
  misc_feature (96)..(96): Xaa can be any naturally occurring amino acid
  misc_feature (114)..(114): Xaa can be any naturally occurring amino acid
  misc_feature (138)..(138): Xaa can be any naturally occurring amino acid
MPAGALLCEVLTVPQSGGTGVXDPLEGAVCPLAELKLCAGRSTALFRASRXECLSLLKLHPQPPLPPGVLSQGDGSFICKPLTGAAAFLSEMPCPXRRNLEMQSGYSGFLWLQXGSTQFELSGSFGYAVKGKLLIHAX

SEQ ID NO: 943776 - protein, 79 aa, Homo sapiens
MQSMVSLVRCLTECLQATQGVAYCRVSGCRHSALYGIAEQCPRGPESAICPLLRVGDPYDGLGNVCCSCPNAGLSLASS

SEQ ID NO: 943777 - protein, 178 aa, Homo sapiens
  misc_feature (5)..(5): Xaa can be any naturally occurring amino acid
  misc_feature (13)..(13): Xaa can be any naturally occurring amino acid
  misc_feature (22)..(22): Xaa can be any naturally occurring amino acid
TSTRXPVRILLLXGNYQEKDIXPKTPSVVTIIKGQRKMNPKDGEKPEQKNENSKNQSTSSPPKECSSLLAMEQSWTENDFDELTEEASDDRYITNFSELKDEVQTHRKEAKNLEKRLDEWLTRINSIEKTLNDLMELKPWHKNYVTHAQASVAEFDQVEERVSVIQDQMNEMKQEEKF

SEQ ID NO: 943778 - protein, 111 aa, Homo sapiens
  misc_feature (32)..(32): Xaa can be any naturally occurring amino acid
GEPHGACLSSMWRSPGYPCNVGKRRGWPHTSXCNNPVFSLWSIDFSPTPWPLRHKVLLMWGCSWWLAPGPNHQVPPPGSWFTGSSKTEVPQFPTTGFSRESPAFQFCMEFA

SEQ ID NO: 943779 - protein, 244 aa, Homo sapiens
TNNRQTESQIMGELPFTIASKRIKYLGIQLTRDVKDLFKENYKPLLKEIKEDTNKWKNIPCSWVGRINIVKMAILPKVIYRFNAIPIKLPMTFFTELEKTTLKFIWNQKRARIAKSILSQKNKAGGITLPDFKLYYKATVTKTAWYWYQNRDIDQWNRTEPSEIMPHIYNYLIFDKPEKNKQWGKDSLFNKWCWENWLAICRKLKLDPFLTPYQKSIQGWIKDLNVRPKTIKTLEENLALPFRT

SEQ ID NO: 943780 - protein, 260 aa, Homo sapiens
  misc_feature (245)..(245): Xaa can be any naturally occurring amino acid
NPRANRRQDKNKLRAELKETETQRALQKKSMNPGAVFLKKINKIDRPPARLTKKKKEDSNKHNKKDKGDTITDPTQIQTTIREYYKHLYANKLENLEGMDKFLDKYTLPRLNQEEVESLNRAITSSKIEAVINILPIKKSPSPDGFTAEFYQRYKEKLVPFIPTLFQTTEKEELLPNSCYGAIIILIPKPGIDTTRKENFRTISLMNIDAKILNKILATHIPIAPTKKDLSRPARAPVGFTPGKXPTLFEKGPKAGPGIN

SEQ ID NO: 943781 - protein, 102 aa, Homo sapiens
FIKTLEENPGNTILDIGLGKDFLTQTPKAVAMKTKIDKWDLIKLKSLCIAKETINSISRQPTERVKIFRNYASDKDLISRIYKELKQINKQQTTPLKNGQRT

SEQ ID NO: 943782 - protein, 274 aa, Homo sapiens
  misc_feature (249)..(249): Xaa can be any naturally occurring amino acid
  misc_feature (261)..(261): Xaa can be any naturally occurring amino acid
  misc_feature (268)..(268): Xaa can be any naturally occurring amino acid
MLVVGNIVIKPDSQTITCENCRLLTCIDSTFNWQHRILLVRAREGVWILVSMDRPWEASPSVHILTEVLKGVLNRSKRFIFTLIAVIMGLIAVTATGAVAGVALHSSAQSVNFVNDWQKNSTRLWNSQSSIGQKLANQINDLRQTVIWMGDRLMSLEHRFQLQCDWNTSDFCITPQIYNESEHHWDMVRRHLQGREDNLTLDISKLKEQIFEASKAHLNLVPGTEAIAGVADGLANLNPVLGLRPIGKXYDFKSHIKSLGXLVWPVVXLKGDPK

SEQ ID NO: 943783 - protein, 206 aa, Homo sapiens
  misc_feature (160)..(160): Xaa can be any naturally occurring amino acid
  misc_feature (170)..(170): Xaa can be any naturally occurring amino acid
  misc_feature (184)..(184): Xaa can be any naturally occurring amino acid
  misc_feature (197)..(197): Xaa can be any naturally occurring amino acid
  misc_feature (204)..(204): Xaa can be any naturally occurring amino acid
MNNSRRAALRAVTLTAKVCSFTPKPARPRTHQKEETPNTSEHKKEQTPDAATLRAVTLTARVHGFILEVSERPRTHQFRTHFGDHEGTFAYCQAVRQSLSSETITYCRAVRPLPIAKQIEAIKLQMVLQMEPQMSSTNNFYQDPWTDQLALPWPREFPLXDTTTAKPLLXPYSAGSTRAVIGQXSNSSWGVLVIEGXQMLQSYXLT

SEQ ID NO: 943784 - protein, 250 aa, Homo sapiens
  misc_feature (228)..(228): Xaa can be any naturally occurring amino acid
  misc_feature (234)..(234): Xaa can be any naturally occurring amino acid
NPDMLLAVFEDAVKACTDESLAVEERIEACLMASCSRCKNPLYTNMIALHQLLERYEAAMELCKSLLESCPINCQLLEALVALYLQTNQHDKARAVWLTAFEKNPQNAEVFLSYVKFFILQNRGDNLLPFLRKFIASFFKPGFEKYNNLDLFRYLLNIPGPIDIPSRLCKGNFDDDMFNHQVPYLWLIYCLCHPLQSSIKETVEAYEAALGVAMRCDIVQKMWMDYLXFANNRXAGSRNKVQGIQIFYWI

SEQ ID NO: 943785 - protein, 146 aa, Homo sapiens
MNNSRRAALRAVTLTAKVCSFTPKPARPRTHQKEETPNTSEHKKEQTPDAATLRAVTLTARVHGFILEVSERPRTHQFRTHFGDHEGTFAYCQAVRQSLSSETITYCRAVRPLPIAKQIEAIKLQMVLQMEPQMSSTNNFYRGPLD

SEQ ID NO: 943786 - protein, 172 aa, Homo sapiens
  misc_feature (43)..(43): Xaa can be any naturally occurring amino acid
  misc_feature (109)..(109): Xaa can be any naturally occurring amino acid
  misc_feature (135)..(135): Xaa can be any naturally occurring amino acid
  misc_feature (149)..(150): Xaa can be any naturally occurring amino acid
  misc_feature (162)..(162): Xaa can be any naturally occurring amino acid
MNNSRRAALRAVTLTAKVCSFTPKPARPRTHQKEETPNTSEHXKEQTPDAATLRAVTLTARVHGFILEVSERPRTHQFRTHFGDHEGTFAYCQAVRQSLSSETITYCRXVKTIAYRQANRGHQATDGLTNGTPNXSTNNFYRGTLELNXXHFPGPKKFPSEXTYTAKAPFFA

SEQ ID NO: 943787 - protein, 182 aa, Homo sapiens
  misc_feature (117)..(117): Xaa can be any naturally occurring amino acid
  misc_feature (132)..(133): Xaa can be any naturally occurring amino acid
  misc_feature (137)..(137): Xaa can be any naturally occurring amino acid
  misc_feature (140)..(140): Xaa can be any naturally occurring amino acid
  misc_feature (160)..(160): Xaa can be any naturally occurring amino acid
SLGERVVTGWATLNVGRSFAYCLTTCVQPPLMSALEKSMHLGRLPSRPPLPGSGGSQSGAKMRMGPGRKRDFSPVPWSQYFESMEDVEVENETGKDTFRVYKSGSEGPVLLLLHGGXHSALSWAVFTAAIIXXVQCXIVXLDLRNHGETKVKNPEDLSAXTMAKDVGNVVEPCLGTFLLQLC

SEQ ID NO: 943788 - protein, 134 aa, Homo sapiens
HPSPPPPPPGGGGGGGGGAGGAPPPSSLPPPPHEGGGGRPTTKKYLKGRPPPPPPPPPGGWRRPAGGGFPFFFFFFFFFFFGGGEIFFLNPPLPPPPKKKMGPATPKKKKNPPPKKKIFFFWGEKKVLFTKFFF

SEQ ID NO: 943789 - protein, 273 aa, Homo sapiens
  misc_feature (89)..(89): Xaa can be any naturally occurring amino acid
  misc_feature (204)..(204): Xaa can be any naturally occurring amino acid
  misc_feature (223)..(223): Xaa can be any naturally occurring amino acid
MLLSVVSSVLPSFPAAASVFSPVPLSPGSSSFRVASGCCAPLWGLRGRAVRRVAWVVPVGVLFGVCLRVCRSLRCPGCFSCGAVFVLGXVVACRAARPCPPSRAARWSGPCGCSVAVSPAPGPVCGSPRVPVPVCLVSVVSCSVLRCVVLPRVGCPSWCGPPLPSALRAGALWGPSGAPRSCVVSRLRGWVLCGVCGAAVFLCXFGPPLGSRGPAGLVPGVRXTTRCSPSVLLLVGLGLARCVLRLSRVGRCPRLPVGCFLLVVCLRLVVSAP

SEQ ID NO: 943790 - protein, 131 aa, Homo sapiens
MYYLCWEQLGLGPHLAGPDKLIGDGVTRKAKTPWGGRAVQGHREAEVLTGSEKGELMRPGLPRHARGCEKGRKPRLQSGLASRKFRVEAEGFSQTATFTPMKVVMRSFLRMRNPDFMYGMSYGYTQGTMSQ

SEQ ID NO: 943791 - protein, 92 aa, Homo sapiens
  misc_feature (51)..(51): Xaa can be any naturally occurring amino acid
  misc_feature (55)..(55): Xaa can be any naturally occurring amino acid
  misc_feature (74)..(74): Xaa can be any naturally occurring amino acid
  misc_feature (82)..(82): Xaa can be any naturally occurring amino acid
  misc_feature (87)..(87): Xaa can be any naturally occurring amino acid
TINKNNSQGPQDIINWFKIEVEQAFHSMGAKTVVPRSAADKSRAFNGNFKXSGIXTLKHFLELKQEMEQDFTSXILKTNHNXSNGYXEVEVA

SEQ ID NO: 943792 - protein, 227 aa, Homo sapiens
  misc_feature (225)..(225): Xaa can be any naturally occurring amino acid
LIKVFVDIEFTGDPHQFEQKFNYRRPMYPILRYMWGTDTYRESIKDLADYASKNLEAMNPPLFLRFLNLLMNDAIFLLDEAIQYLSKIKIQQIEKDRGEWDSLTPEARREKEAGLQMFGQLARFHNIMSNETIGTLAFLTSEIKSLFVHPFLAERIISMLNYFLQHLVGPKMGALKVKDFSEFDFKPQQLVSDICTIYLNLGDEENFCATVPKDGRSYFPTLFAXTG

SEQ ID NO: 943793 - protein, 193 aa, Homo sapiens
  misc_feature (187)..(187): Xaa can be any naturally occurring amino acid
ASVCERGREPPSVTHHSIGDPSNPGLGIALCFSQALEEFGESLGDAVRERHREKLQAFSQNWDQEHHASFNLGAYKVSHSLMTQKCGSAGILFSSQRLEGLLLRRVGTSKAIIVESTLAVWLELHTLPNCKPGTGGELLQLWFLLAEETCSRGQLDNLALFCMCHCWVPQPAPLKLWCRGASLIHSXAELQGI

SEQ ID NO: 943794 - protein, 146 aa, Homo sapiens
  misc_feature (11)..(11): Xaa can be any naturally occurring amino acid
  misc_feature (19)..(19): Xaa can be any naturally occurring amino acid
  misc_feature (26)..(26): Xaa can be any naturally occurring amino acid
  misc_feature (30)..(30): Xaa can be any naturally occurring amino acid
  misc_feature (53)..(53): Xaa can be any naturally occurring amino acid
  misc_feature (64)..(64): Xaa can be any naturally occurring amino acid
  misc_feature (131)..(131): Xaa can be any naturally occurring amino acid
SWISYRKEFKXSRKVQCKXSLLKATXGQHXGLGLWSKHFGRPRWEDHLRSGVXDQPGQYGETPXLPKITKISRVWWPAPVVPGTREAGWDSRLNPGGRGCSPAEDTPLHCSLGNSSETPSQKTKTKQTNKXEFKTNVANTVRPCLY

SEQ ID NO: 943795 - protein, 71 aa, Homo sapiens
GDQSLEDEECSGQSSEIDNDQLRTSSKLILFNYKRAAQELNVDHFMVVRHLKQIEKVKKLNKWVPHELSEK

SEQ ID NO: 943796 - protein, 209 aa, Homo sapiens
  misc_feature (190)..(190): Xaa can be any naturally occurring amino acid
  misc_feature (206)..(206): Xaa can be any naturally occurring amino acid
LSWQARTGHTALRRVVSGCRPKSATAAGAQAPVRNGRYLASCGILMSRTLPLHTSILPKEICARTFFKITAPLINKRKEYSERRILGYSMQEMYDVVSGVEDYKHFVPWCKKSDVISKRSGYCKTRLEIGFPPVLERYTSVVTLVKPHLVKASCTDGRLFNHLETIWRFSPSLPGLPKNLYLGIFQFLLXFDHFYIPSLPQLFFDXVVK

SEQ ID NO: 943797 - protein, 167 aa, Homo sapiens
  misc_feature (155)..(155): Xaa can be any naturally occurring amino acid
VPKYPLPASLINPSVAAHHDPIRIQLKDSSKFPSVPQYPISLTHQKGLQPIVNKLCSCSLLRPTHSPYNTPILPVKKSDGSYRLVHNLQAISQAVLPIHPIVHNPYPLLSLVATNTTLYTAIDLKDAFFTISLHPDSQNLFAFTWTDPDTLHVTXTHMDCPPSGLQG

SEQ ID NO: 943798 - protein, 154 aa, Homo sapiens
  misc_feature (1)..(1): Xaa can be any naturally occurring amino acid
  misc_feature (8)..(8): Xaa can be any naturally occurring amino acid
  misc_feature (12)..(12): Xaa can be any naturally occurring amino acid
  misc_feature (21)..(21): Xaa can be any naturally occurring amino acid
  misc_feature (47)..(47): Xaa can be any naturally occurring amino acid
XTGPSELXHHGXHPFDLWPTXPKPRNGKGSPIPVNGAGKTWLAICRXLKLDPFLTPYMKINSRWIKDLNVKLKTIKILEENLGNTIQDIGMGKDFMMKTPKAIATKAKIDKWDLIKLKSFFTAKEIIIRVNRQPTEWKKIFAIYPSDKGLISRI

SEQ ID NO: 943799 - protein, 138 aa, Homo sapiens
  misc_feature (130)..(130): Xaa can be any naturally occurring amino acid
MAAPPPPPKKKRCFPPPPRGGKRLFFKTKDFFFFFFSPQKKRKKKGGVFFLKGAPKGGGKDPPTLFGCFKKKEFFFFFFQKRWGPPPPPPLGAPKRPFFPQILSPCGKDAPSGFPNLKGGGKTFFKLSQXSLICKKAR

SEQ ID NO: 943800 - protein, 34 aa, Homo sapiens
  misc_feature (4)..(4): Xaa can be any naturally occurring amino acid
  misc_feature (7)..(7): Xaa can be any naturally occurring amino acid
  misc_feature (28)..(28): Xaa can be any naturally occurring amino acid
TDKXSEXKKLAQHAAIRKMSFKAGNETXESSEKQ

SEQ ID NO: 943801 - protein, 73 aa, Homo sapiens
  misc_feature (2)..(2): Xaa can be any naturally occurring amino acid
  misc_feature (10)..(10): Xaa can be any naturally occurring amino acid
  misc_feature (15)..(15): Xaa can be any naturally occurring amino acid
  misc_feature (25)..(25): Xaa can be any naturally occurring amino acid
  misc_feature (41)..(41): Xaa can be any naturally occurring amino acid
NXRPDNGQQXANTQXKQARGCAGSXNPFQKKISVRLQQVRXRVSPLETSQLAGPGVVAHAYNPNTSGGRGGRI

SEQ ID NO: 943802 - protein, 109 aa, Homo sapiens
  misc_feature (37)..(37): Xaa can be any naturally occurring amino acid
  misc_feature (39)..(39): Xaa can be any naturally occurring amino acid
GLLAQKSPFPRAFPQRFKNHSTIKTHAYICLLQHLFXIXKTWNQPKCPSMIDGIKKIWHINTMEYYAAIKKNEFMSFAGTWMKLETIILSKLTQEQKTKHRMFSLISGS

SEQ ID NO: 943803 - protein, 253 aa, Homo sapiens
  misc_feature (244)..(244): Xaa can be any naturally occurring amino acid
  misc_feature (249)..(249): Xaa can be any naturally occurring amino acid
EQSWMENDFDELREEGFRRSNYSELREDIQTKGKEVENFEKNLEERITRITNTEKCLKELMELKTKARELREESRSLRSRCDQLEERVSAMEDEMNEVKREGKFREKRIKRNEQSLQEIWDYVKRPNLRLIGVPESDGENGTKLENTLQDIIQENFPNLARQANVQIQEIQRMPQRYSSRRATPRHIIVRFTKVEMKEKMLRAAREKGRVTLKGKPIRLTAGSLGQKTYKARRRIGGPNIQQSXKKKEXSTQE

SEQ ID NO: 943804 - protein, 134 aa, Homo sapiens
  misc_feature (10)..(10): Xaa can be any naturally occurring amino acid
MRKGKLQVTXKLNLESVKCDLEKSMKAGLKIHSHLSGIQKEIKYSDSLLQMKAKEYELLAKEFNSLHISNKDGCQLKENRAKESEVPSSNGEIPPFTQRVFSNYTNDTDSDTGISSNHSQDSETTVGDVVLLST

SEQ ID NO: 943805 - protein, 170 aa, Homo sapiens
PPPPKKKVLKFFPKPKGLTTRLGLGGKKQKKKRFPTKVYPPRVWFLFPLAGFQEIPRVKNPLQEGGGKNNSFVFKEFGGGGQQTALYLRGVYKNPPFLCKKGTPKPLRGGEAKPGCCPQKGHKRGNCGQNCSWVVFEENKGPWGFSSLYPEGSLAHAEAWYFPPPGSVVE

SEQ ID NO: 943806 - protein, 31 aa, Homo sapiens
MLSMQRQALHDATQAVQALQERLSEIVLVHG

SEQ ID NO: 943807 - protein, 137 aa, Homo sapiens
LGDFEAFRKKRQNPPEKKRGIQELANPPALKRKRAKGTYSNKRTTTITCYKAVNEKKKITGRKNTHSRKDNTLPLQRIKTPKQVKALQGPPNKGKKQGPPTWGGEKKTLYGDKVVTEAKETAELKRITGQAGTIKKN

SEQ ID NO: 943808 - protein, 87 aa, Homo sapiens
MRCLKSCNTAKVCSFTPEPARPQTHQKEETQENSRTSEGINSGHTTFKNCDTRCDVCGFILEVSETKNPPILDTIALSLGNKSETPS

SEQ ID NO: 943809 - protein, 99 aa, Homo sapiens
  misc_feature (27)..(27): Xaa can be any naturally occurring amino acid
  misc_feature (31)..(31): Xaa can be any naturally occurring amino acid
  misc_feature (72)..(72): Xaa can be any naturally occurring amino acid
EEVVSPPCVSPEVNELLMEAQLFQVSXLEIXELYQTLLAKPSLVQQIDRSSPVRPSSEKNDCCRGKRDGINXLERKLKRRLEREASPVSGGNELRKCGP

SEQ ID NO: 943810 - protein, 105 aa, Homo sapiens [sequence omitted]

SEQ ID NO: 943811 - protein, 122 aa, Homo sapiens
  misc_feature (1)..(1): Xaa can be any naturally occurring amino acid
  misc_feature (14)..(14): Xaa can be any naturally occurring amino acid
  misc_feature (20)..(20): Xaa can be any naturally occurring amino acid
  misc_feature (27)..(27): Xaa can be any naturally occurring amino acid
  misc_feature (30)..(30): Xaa can be any naturally occurring amino acid
  misc_feature (38)..(38): Xaa can be any naturally occurring amino acid
  misc_feature (44)..(44): Xaa can be any naturally occurring amino acid
  misc_feature (61)..(61): Xaa can be any naturally occurring amino acid
  misc_feature (64)..(64): Xaa can be any naturally occurring amino acid
  misc_feature (82)..(82): Xaa can be any naturally occurring amino acid
XPRFPLGVAPFPVXLLAPLXEAYFDLXPVXTHRWDGSXSQAQGXASSNTIVQVKHPKPKLXGLXTEVGSGFCPQGTCLPLPXQLLWPSQLQIWSWRALARTPRLLVCLALAPPPCQIPGVWS

SEQ ID NO: 943812 - protein, 72 aa, Homo sapiens
  misc_feature (6)..(6): Xaa can be any naturally occurring amino acid
  misc_feature (8)..(8): Xaa can be any naturally occurring amino acid
TTYQLXKXEESFTFIPRSREELPDNFPKEIPGICYFLEVRTGPKPPKPSLSSSRIKKVSYNIGTMFLRETSL

SEQ ID NO: 943813 - protein, 175 aa, Homo sapiens
  misc_feature (9)..(9): Xaa can be any naturally occurring amino acid
  misc_feature (17)..(17): Xaa can be any naturally occurring amino acid
  misc_feature (22)..(22): Xaa can be any naturally occurring amino acid
  misc_feature (29)..(29): Xaa can be any naturally occurring amino acid
  misc_feature (37)..(37): Xaa can be any naturally occurring amino acid
  misc_feature (47)..(48): Xaa can be any naturally occurring amino acid
  misc_feature (53)..(53): Xaa can be any naturally occurring amino acid
  misc_feature (55)..(55): Xaa can be any naturally occurring amino acid
  misc_feature (69)..(70): Xaa can be any naturally occurring amino acid
  misc_feature (77)..(77): Xaa can be any naturally occurring amino acid
  misc_feature (86)..(86): Xaa can be any naturally occurring amino acid
KAKGFGENXEVQICLVXIPERXSYEIGQXTYLRINGXNLAEIKKGSXXEIVSXCXVLSKIDEEEMILRXXLVKFWNXSDKEKIIRXFRERREITYQGTRIRLTADLSLDTLDARSKWSNVFKVLLEKGFNPRILYPAKMAFDFRGKTKVFLSIEEFRDYVLHMPTLRELLGNNIP

SEQ ID NO: 943814 - protein, 235 aa, Homo sapiens
  misc_feature (170)..(170): Xaa can be any naturally occurring amino acid
LTHQKGLQPIVNKLCSCSLLRPTHSPYNTPILPVKKSDGSYRLVHNLQAISQAVLPIHPIVHNPYPLLSLVATNTTLYTAIDLKDAFFTISLHPDSQNLFAFTWTDPDTLQSQQLTWTVLPQGFRDSPHFFGQALARNLTSLNLSPSHLQYVDDLLLCSPSLKDSQTHTXTALLNFLAIKGYRVSPSKAQLSISMMTYLGIQLSPGAQAMTPARAALIENLPPPFFKSEILSFQG

SEQ ID NO: 943815 - protein, 140 aa, Homo sapiens
HTATALLNFLAIKGYRVSPSKAQLSISMMTYLGIQLSPGAQAMTPARAALIENLPPPSSKSEILSFPGLAGFFRIWISNFALLAHPLYEVAKGPPNEPLNPSHNILPASTNSKLLLSLRQLRPYLISPNLSLSILLKAEE

SEQ ID NO: 943816 - protein, 100 aa, Homo sapiens
  misc_feature (23)..(23): Xaa can be any naturally occurring amino acid
  misc_feature (42)..(42): Xaa can be any naturally occurring amino acid
  misc_feature (50)..(50): Xaa can be any naturally occurring amino acid
  misc_feature (63)..(63): Xaa can be any naturally occurring amino acid
  misc_feature (73)..(74): Xaa can be any naturally occurring amino acid
QQGPGDQGNSKQRYVSNAVSEAXIREVANKVKVPLQDFMVRXDTPCGTTXGLILVFRLGLRVXDLGSPQLAMXXIREMACTTGVFQTLTFFKGFLSCSFF

SEQ ID NO: 943817 - protein, 225 aa, Homo sapiens
VNKLCSCSLLRPTHSPYNTPILPVKKSDGSYRLVHNLQAISQAVLPIHPIVHNPYPLLSLVATNTTLYTAIDLKDAFFTISLHPDSQNLFAFTWTDPDTLQSQQLTWTVLPQGFRDSPHFFGQALARNLTSLNLSPSHLQYVDDLLLCSPSLKDSQTHTATALLNFLAIKGYRVSPSKAQLSISMMTYLGIQLSPGAQAMTPARAALIENLPPPFFKSEILSFQG

SEQ ID NO: 943818 - protein, 122 aa, Homo sapiens
  misc_feature (6)..(6): Xaa can be any naturally occurring amino acid
  misc_feature (16)..(16): Xaa can be any naturally occurring amino acid
  misc_feature (20)..(20): Xaa can be any naturally occurring amino acid
  misc_feature (32)..(32): Xaa can be any naturally occurring amino acid
  misc_feature (42)..(42): Xaa can be any naturally occurring amino acid
  misc_feature (66)..(66): Xaa can be any naturally occurring amino acid
  misc_feature (74)..(74): Xaa can be any naturally occurring amino acid
  misc_feature (76)..(76): Xaa can be any naturally occurring amino acid
  misc_feature (100)..(100): Xaa can be any naturally occurring amino acid
VPSQLXKQQDKFKPRXTFSXVCGGIPPAPVLXGFPVAMWVFXKQLPTNLLGCGDQGLKIKWGPWYXTFAPLLTXSXSPVSLGLENTGFFSQSLFLSNQDXIYIKHLGSGPSTLALITEKELQ

SEQ ID NO: 943819 - protein, 265 aa, Homo sapiens
  misc_feature (242)..(242): Xaa can be any naturally occurring amino acid
  misc_feature (248)..(248): Xaa can be any naturally occurring amino acid
  misc_feature (255)..(255): Xaa can be any naturally occurring amino acid
FPSVPQYPISLTHQKGLQPIVNKLCSCSLLRPTHSPYNTPILPVKKSDGSYRLVHNLQAISQAVLPIHPIVHNPYPLLSLVATNTTLYTAIDLKDAFFTISLHPDSQNLFAFTWTDPDTLQSQQLTWTVLPQGFRDSPHFFGQALARNLTSLNLSPSHLQYVDDLLLCSPSLKDSQTHTATALLNFLAIKGYRVSPSKAQLSISMMTYLGIQLSPGAQAMTSARAALIENLPPPFFKSEILXFPRLAXFFRIWDXQLWPSKLIPL

SEQ ID NO: 943820 - protein, 191 aa, Homo sapiens
LTWTVLPQGFRDSPHFFGQALARNLTSLNLSPSHLQYVDDLLLCSPSLKDSQTHTATALLNFLAIKGYRVSPSKAQLSISMMTYLGIQLSPGAQAMTPARAALIENLPPPSSKSEILSFPGLAGFFRIWISNFALLAHPLYEVAKGPPNEPLNPSHNILPSFHKLQTALVTASAPSLPDISQPFTLYTAES

SEQ ID NO: 943821 - protein, 72 aa, Homo sapiens
  misc_feature (4)..(4): Xaa can be any naturally occurring amino acid
  misc_feature (56)..(56): Xaa can be any naturally occurring amino acid
  misc_feature (71)..(71): Xaa can be any naturally occurring amino acid
TPHXVFLCSRTSTFSEARGPAEERQPTPSLQERQPEARYLLAADDQFRSEQRGPCXDGLCGMEHGFSPKCXT

SEQ ID NO: 943822 - protein, 121 aa, Homo sapiens
  misc_feature (75)..(76): Xaa can be any naturally occurring amino acid
  misc_feature (84)..(84): Xaa can be any naturally occurring amino acid
  misc_feature (88)..(89): Xaa can be any naturally occurring amino acid
  misc_feature (105)..(105): Xaa can be any naturally occurring amino acid
MCSKLTCLQKSDPNPVIKKEKRGQVWWLMPVIPALWEAKAGGSRGLELETILANMVKPRFFTKNTENEPGHGGMXXYSQLFRRXRQEXXLDPGGGGCSEAQIVPXHSNLVTERQSDRARLC

SEQ ID NO: 943823 - protein, 227 aa, Homo sapiens
  misc_feature (159)..(159): Xaa can be any naturally occurring amino acid
LTSSKPDSSPVTPPTDPADDSSSFDPVDFLPPRQHHDPPPEHHDPPPYVPAPALPLSPTLSNQPTSDSETSLPPPLTRSRAQCAQQPAPLLPLREVAGVEGIVHVHVPFSFYDLLQIEERLGSFSSDPDTYIKEFKYLTQSYELTWHDLYFILSSTLLXEEKERVWLAAQAYADDLHQQDPTKPVGAAADPWEEPSWEYQPTEPGQVYCSHMITCLIAGLNKAAHRL

SEQ ID NO: 943824 - protein, 154 aa, Homo sapiens
  misc_feature (10)..(10): Xaa can be any naturally occurring amino acid
  misc_feature (22)..(22): Xaa can be any naturally occurring amino acid
  misc_feature (33)..(33): Xaa can be any naturally occurring amino acid
  misc_feature (41)..(41): Xaa can be any naturally occurring amino acid
  misc_feature (73)..(73): Xaa can be any naturally occurring amino acid
REVHPALKTXGRLIPWRGGKTXAKRVEISKTRXPFFLAKDXNSLPAREQNWMENEFDEFTEGGFRRWVITNSXELKEHVLTQCKEAKNEKRLEELLTRITTLEKNINDLMELKNTARDFREAYRSINSCIDQAEERISEIEDQLNDIKCDVKIR

SEQ ID NO: 943825 - protein, 281 aa, Homo sapiens
  misc_feature (264)..(264): Xaa can be any naturally occurring amino acid
  misc_feature (269)..(269): Xaa can be any naturally occurring amino acid
  misc_feature (275)..(275): Xaa can be any naturally occurring amino acid
QVRKNQATKPTVNIDADQLLGTGPNWSTINQQSVMQNEAIEQVRAICLRAWGKIQDPGTAFPINSIRQGSKEPYPDFVARLQDAAQKSITDDNARKVIVELMAYENANPECQSAIKPLKGKVPAGVDVITEYVKACDGIGGAMHKAMLMAQAMRGLTLGGQVRTFGKKCYNCGQIGHLKRSCPVLNKQNIINQAITAKNKKPSGLCPKCGKGKHWANQCHSKFDKDGQPLSGNRKKGQPQPPNKLGHFQFTGWSSRVSRTQPLXKYPHXRESANXTIQQLS

SEQ ID NO: 943826 - protein, 42 aa, Homo sapiens
  misc_feature (22)..(22): Xaa can be any naturally occurring amino acid
  misc_feature (29)..(29): Xaa can be any naturally occurring amino acid
GSNIVRKLLYHKAQQSAMAVSXRPFYRRXPTSGHDSVLPQSL

SEQ ID NO: 943827 - protein, 136 aa, Homo sapiens
AGSPAASDSPGGSCGPIRKYSAPHPPPTRKSARFAGSYGSARSLSAPRKSSKSSTHPNARGSSPHWHLHGSAPNRYCQHKCHGVAGNPTGPASAPTAATPPASGAATAPPTADNTKTCPSRWGKIAAAETNGPAPR

SEQ ID NO: 943828 - protein, 41 aa, Homo sapiens
LSDMGSSVIEVEYIRRRYNYRLRRVMVAPIAGMTRPLALPV

SEQ ID NO: 943829 - protein, 48 aa, Homo sapiens
MGVDAFRCAFSFQRCPVTKRNAVTCFLHRTRNIKPGFEGSWCVLGHIF

SEQ ID NO: 943830 - protein, 129 aa, Homo sapiens
EHCSMEPFLIYGFLVAARELHTHPKNTKVEYVRSEISKNSNSALTINMIILKVRKNMLSQKIKSTHMLFVTHRINGQNHLIHTAGFKRSECDYNIIRCTNHDRWAELYEFVKGSLIFYNTLNTGKVLIP

SEQ ID NO: 943831 - protein, 48 aa, Homo sapiens
  misc_feature (15)..(15): Xaa can be any naturally occurring amino acid
  misc_feature (47)..(47): Xaa can be any naturally occurring amino acid
PYRHSQIALPGVNGXNFQTETNCSSLILESSLTEIPCQCSRKIPLNXK

SEQ ID NO: 943832 - protein, 101 aa, Homo sapiens
GPGFGFLCGLSFRGFPVPGGFPFVISLGSIGAWLLCCQPFLALYCLAFVSPPWVFLPVFFTFCSLLYVLLGLLLPPRVGSILVPARRRFARFSPLSFVVRR

SEQ ID NO: 943833 - protein, 105 aa, Homo sapiens
  misc_feature (7)..(7): Xaa can be any naturally occurring amino acid
  misc_feature (31)..(31): Xaa can be any naturally occurring amino acid
  misc_feature (45)..(45): Xaa can be any naturally occurring amino acid
  misc_feature (54)..(54): Xaa can be any naturally occurring amino acid
  misc_feature (72)..(72): Xaa can be any naturally occurring amino acid
  misc_feature (98)..(98): Xaa can be any naturally occurring amino acid
ARKSLPXHSRSLWGMERRTSKLTVIKSLRAXQPDWTTEALRLRSXRGLVPSQLXAPAYDTAKLRLLIGCGAXRPPGVNPEASSLKAWRLCLRRWSSSXVAQAEVQ

SEQ ID NO: 943834 - protein, 122 aa, Homo sapiens
  misc_feature (68)..(68): Xaa can be any naturally occurring amino acid
  misc_feature (105)..(105): Xaa can be any naturally occurring amino acid
GQGAKAYLKKKSLGSFGKNLKSGKNFVAGQDLPSGGSQATRRRKKEELEGFGYDFYPGKMMCTDLGPXRSRSLSYGKMFFTMNGTYQSWVWLQVPPQDTAPYSCXVQHTSLASPLVVPWEAS

SEQ ID NO: 943835 - protein, 177 aa, Homo sapiens
  misc_feature (9)..(9): Xaa can be any naturally occurring amino acid
  misc_feature (48)..(48): Xaa can be any naturally occurring amino acid
  misc_feature (58)..(58): Xaa can be any naturally occurring amino acid
PICLSFKRXPISDSHKIPVARLKRLTSPLPRFTIAQVFNSSSDEGYFXKFSPVYTKVXAPVQGMLTIVIIQSGLALMTISPSLTSQFNVLVNLAVVTNIIPYILSMAALVIIQKVANVPPSKAKVANFVAFVGAMYSFYALYSSGEEAMLYGSIVTFLGWTLYGLVSPRFELKNKHG

SEQ ID NO: 943836 - protein, 132 aa, Homo sapiens
MNCAVTRSRRGCQACHCVRILLQQDIGYQSVVSHSPRGGLLPSDSYQLINPWFQLMLTAFDRHKSFSIHSVVPAEALAWTEGHLVQSVPLLASYDCGHGDLGMTTYRQRWAPSLSISEMRVMPGVLIITMSH

SEQ ID NO: 943837 - protein, 160 aa, Homo sapiens
GGPGVWRVRWSGFRVGGRKAGRENGAVRSALWFRLVGWMSAVCGDAVEGSGSGGCLSRHWRRPSFGELEAASVHLPGCTGLPEPSSSHYYLISALHCSALGFPPVCAVAASETPPGSAAAANLFIVPSSCSAGAPVVLERQTALQSPGGQRGASVWFGAV

SEQ ID NO: 943838 - protein, 66 aa, Homo sapiens
KKPSLLSPSLKARGHDQSSWNPRPSGFNISRAKPSKYLEIRVCPPMPSNFGFLGKPKVSPCNPACS

SEQ ID NO: 943839 - protein, 51 aa, Homo sapiens
MLVRCMRIRIEAQWVFSVHVLTLEDWHVERQRKGLLVALREKVSLEWRSGH

SEQ ID NO: 943840 - protein, 101 aa, Homo sapiens
MIVLLCCVRCVLAWVVVGGVWWFRVWGCVVLCGRCVAGCGAGGRVSRVAGCLRFVFAAWGCIAVGCGGFGFALCASLSSGGRGVPMVPVDSPLLGVAKGGY

SEQ ID NO: 943841 - protein, 100 aa, Homo sapiens
  misc_feature (71)..(71): Xaa can be any naturally occurring amino acid
MAVRVVVLCMCCVCEFLYRRWVRSLVVLSAWFALESVGRSASSVCAVLRVGVERSGVSVVARIILLRIVWXCVVGEYIGVVRDRVGLCELGSAGCPFRLL

SEQ ID NO: 943842 - protein, 130 aa, Homo sapiens
NQRAKGRPLSLGTIKAGLQGQHSSVDLWQDLSLTWKLVLTQPWQISWLKREYRPCFESAFSKLLQPGTHESPCVSTSLTFMPQFIEHEATVKQTVGVPRRNSKDVFGPFRIRILTKMSRHCQEEPTTWHQ

SEQ ID NO: 943843 - protein, 132 aa, Homo sapiens
CTVSTLEICVGEAIDTCYEVDFLAQSCSAVSMMGFSIVIIQVVMMIIMGLVDNYPIIDSSTLSVIQIMLAISKHHWYSTRYQYIMWSDTGVTIHVIGVILDTQTVWTLVANPQHRTILAKAYAICRDLCRAL

SEQ ID NO: 943844 - protein, 143 aa, Homo sapiens
HSSCGASIKALMLSSNVSCMSSTKSLVANASNSLQSISAYHTLTALAQEIVYIWSHTHSELGETEWRPQLLSRHSCQYARFMLSHRLSSSTCVCRVFMMLPHTYVSAYGFCCTLKPAALCPVLSTSERSRAPALSCSVTKTLA

SEQ ID NO: 943845 - protein, 135 aa, Homo sapiens
ELLAFFAAHWMASATSVSADHILLSRPACLASWSEIRSPVRTISIARVFSQARVSLWVPPAPGMVPIKMLRLCELGVLIGIDDITRHGYLRATAKGIAIDSSDEWLLDLGEVVPVLQDRAGVSVLQTQVLHFVDI

SEQ ID NO: 943846 - protein, 126 aa, Homo sapiens
SVTPEPSIILKFLEFMFLEDSLPGRGIYSLLPLSIICTLIGTGAAVEPHMLEYQFVLQHQVSGSYQARVDLLHDRILGRALARAPASSLSLSLSLSLSLSLSLSLSLSLSISLSLSLSLSLYLSLS

SEQ ID NO: 943847 - protein, 77 aa, Homo sapiens
EPSPSHTGQSPHPLAQGVRAGSLAPAGVWGPHESRSPLCPGSVSMADTFMTLDTAGSAFEVAGGAEAGKMARRREGW

SEQ ID NO: 943848 - protein, 67 aa, Homo sapiens
GTLTIVYRAQRTTSPLMCAVSTMVSASVTTAKHEQIVVLDSPIDLYFQGPFSDVVTTNLKLRNPSYR

SEQ ID NO: 943849 - protein, 39 aa, Homo sapiens
MYPNKVKKPPVSRVLVAHARTLSTLADLDGLITKAQQLK

SEQ ID NO: 943850 - protein, 42 aa, Homo sapiens
MCETPQCNYSPRVTCDCVSDTPAAPLNTSDMEAVWNQAKPHE

SEQ ID NO: 943851 - protein, 39 aa, Homo sapiens
MPATGVRDIRWPSFDLHVRPVVSWRSAAACAQFGTSSCR

SEQ ID NO: 943852 - protein, 137 aa, Homo sapiens
PVPLGRSGVLSKGSKDVWDDIISVGTIDEYNHIVVMQTPGDLNRRFLTTIVASGFVGSEPEWMSDTSYPMGWKYCVNSPCVRDDIQMTVQHIVAQEVLVDRAPLRHLVQINLKGATVSTDTTRFLFFWCRILQPGGS

SEQ ID NO: 943853 - protein, 34 aa, Homo sapiens
MTFFPRIKTLIIAIVRLSLSILLGPFLYAFPLCT

SEQ ID NO: 943854 - protein, 164 aa, Homo sapiens
MMLIKRFTLSGAVGWIYWSEEQGVEDWGAGTGALAHSSDAGMSSWKYSACECCHRRRFPSHELLTIFSSKGCQLTSRTQAMWLVSFFTMCPLETVAHNPFASGAASVDELLASPMNGGQPPPHEGVQHSVALGHLLPPKSQFCCVAAWREASMPSRLQERRISQ

SEQ ID NO: 943855 - protein, 216 aa, Homo sapiens
  misc_feature (65)..(65): Xaa can be any naturally occurring amino acid
IWPELLLIPTRLPFRAFNSCEHIASVCRYESFHEESHLSSETIAHLRIRPASPSRSSKLCSFDLXIVSSSIEWAYVEDVSQHNISNHRVGDYINEPHSKSLEHILQGSRVSRVTLNHLAISIHSGSIFTNGIGPLGDVQCGQHQSGISRVTTCIFNMSRAGIKHTPSIFACSVPFYFVGPVTSFCQHHWVLLRSSSRVYYQLFPLISIDPGPKSCS

SEQ ID NO: 943856 - protein, 139 aa, Homo sapiens
MKTLHAGLTRNLGLMRDIFLRAKTLLRTTGSELLYALTHGPLELFSSPLRVRPNVLYPRPISKKRTGVSAICGPGPGSKRAKKPSCVNPAFTQTRSASPIPSKTFELLDLACARAGHLILNESYNLNFLSPRLEGGGRV

SEQ ID NO: 943857 - protein, 149 aa, Homo sapiens
EKTLYFPTKTLPDNVFRRSAIKVPPKSSFLYLEFPLKKNLGSLSFPSLPKIKNFWIFPKGKSLVLETPQTRGKNPKKPKRFPLPGFEALNLLRWPPLPQVEPEIESVLAKKGFFDFGPSINPPTKPKGFLFKNKKTLLKFIGILKDLEC

SEQ ID NO: 943858 - protein, 107 aa, Homo sapiens
  misc_feature (33)..(34): Xaa can be any naturally occurring amino acid
KKNNPPPPKVSQKKKRFLLIPGGGVNKRKKKKXXPPFFSPPRKIFFLWGPPPPKGEKQKNNKPAPGREKKYYVVDFLPPGGGVFFLPPPPPLYKKKGRREGKNPPPL

SEQ ID NO: 943859 - protein, 140 aa, Homo sapiens
RLVRDICRMSVQVCPLLVLIRQSMCACNPEASPLAYELVFVVQQRFFQCFELCISTMRCEPTYSVNTGRKCWPNRVKNLGIFFNSNWKMFPMMGSGKGPGGRFQIMCTCLHMDSSCSKSAHTSRPSVTPRAYMVPLGPCC

SEQ ID NO: 943860 - protein, 71 aa, Homo sapiens
  misc_feature (61)..(61): Xaa can be any naturally occurring amino acid
GQQPPSSTQLTQLTLPYEHASVGSAVRVIMARCLIVKITRLRSAQCSNLMQMYQQTNVLMXRDTALSSSIG

SEQ ID NO: 943861 - protein, 98 aa, Homo sapiens
KLEVVMVLNEEYEYEDQDCIPMYIYAIGIVLSYIIFLCNSQAHVSVTLLRKYRINYISSSYMIFICDLHFSCSPKSISSIVLTELVLIISVHSSLREF

SEQ ID NO: 943862 - protein, 143 aa, Homo sapiens
FQQYVGLRLDQDLNAMCLHPIVPKAGQGSPPDVPPGRSIIKNDSPVPVRMERGEVASARELVPVVQQRFLHCLVSVHHHHALRAHVQRELRPEALGHPGVGLGNILQFQLEEVPDDGKRARAWGQIPVAVHLPPHGHQQEEGR

SEQ ID NO: 943863 - protein, 77 aa, Homo sapiens
MTSPGICGRGGSCVKPRHPDVGPKEGLVLEDLILELVIFLAAPTTVLRLSFPFLVLMFGSVLSHHVTEVLLLYLSLL

SEQ ID NO: 943864 - protein, 133 aa, Homo sapiens
VQMLNGSGVSRQGILSLVYNMLRCMCAKVRPQDTVSVCHTGYEYIDTIGAQCNISLTGSSDVSLASTQVTQCMSPYRAILCPMHRDGVSARSTGYSSPTNGINQYDSLGLAKCQKDTHQSLRLAERHLKSILL

SEQ ID NO: 943865 - protein, 131 aa, Homo sapiens
IHQQGYALSVYSSDVSTVRYDRIPDLGSHYVVMSLDPAVLSSSLSFSNIGGNSRPPGQLAFMTGSTLGQTMEYSPGPSSPSMQQSRRQYKARRSAALVPCQSHTVSHDQDQAINRRNRVSTSRLSKEASIG

SEQ ID NO: 943866 - protein, 175 aa, Homo sapiens
LGLILWETYPCRTNSSGLCWGRGQTARSWAGTLLYTVNGEDELFIPGEAPLNTHSLEPVRRRRPQTSCTCLGCRWPDHAARCAGQRPHVRFNGCPADCFDRPGSAPDMVTVMIPGRSPSSSVRWIWRGPEHEASAFPLYHMGCQGLFTLAPFQIRPMSTESLEEKSLTNFVFWVW

SEQ ID NO: 943867 - protein, 118 aa, Homo sapiens
NAKGKKRTQTSLKEEKEKWAPKTKRRSKRSKRNQAYKAVFSTNPQQKVGRDRRYRKGRPQEEKVRTMEASSRTPERIKSSMGANNQGEGTRGTILLCKQKLYEGAQEDHNPKIQQAPP

SEQ ID NO: 943868 - protein, 244 aa, Homo sapiens
PSPQALVRVICPVNPPSIGPQTMVFLQVSPQEGFVGIGPRNQLGALPPKNRFSVRDISPKHAENLSLGLHSRLPEMLKAKPPQQSINYGYGPPPLLPPPLCLVGTLLQKQLTLPASWSSAGPVWRLRTADPWHPEVQLCRTRLGSHPGHSHTYPLTDALELHMLPEHGLRLLQVEASGSEPTQEKIVTWIRQGRQHILDILPKLGQCLLLPGAQIADSAAHRGSTAGMGFGGGRRRVRHLTSTD

SEQ ID NO: 943869 - protein, 97 aa, Homo sapiens
MDTRSIIRLVVGYHSDPVQSVISSACSPGFRVSSSRLWSAPLSNPRASSSPYVCLSAHSSDVAASYVLHPSAVAVDGYALAESDIGHILVLGIKERL

SEQ ID NO: 943870 - protein, 103 aa, Homo sapiens
ETKSRPIPQAGVQWHDLGSLQPPPPGFKRFSCLSLPSSWDYRHPPPRPANFVFLVETGSHHVSQAGFELLTSGDPPTSASQSAGITGVNHRTRPVMDYYDKIF

SEQ ID NO: 943871 - protein, 120 aa, Homo sapiens
MSTEYHDSCMRSIRRCTSVRHWQLMSSGVSLIDVSWSVWSTNWDRKYTFSVCMLTSFAREFVLVRRTAHPVPVLWWAALTSLARVIEVSRSALVSPSMVLSGVNISRISRGSSRVSSMHD

SEQ ID NO: 943872 - protein, 72 aa, Homo sapiens
EVSVKSDLEGNVNPYQGVKGPELIQNKRKKWKEFQAEVKQRKEPEGGSIRPGVPGITTGHGGAIIIVVKKCK

SEQ ID NO: 943873 - protein, 168 aa, Homo sapiens
LFGCRKYADIYYKETANTNYKGGTIKKSVPAAPMINSIFLRRSECTGSNSNCMNKNDSTTSINSLKLNLKDEGPASCGEWQKGQEATYTRCRGELSGRPRRPNYLAKQTYSKASLILLDEPGKAFGEEISTSGRTTARVNNREKRRTGDATQAFLPENDQEGHRAQSA

SEQ ID NO: 943874 - protein, 169 aa, Homo sapiens
GEEKRRRKGGKERRKRGERRREKKKRKRKEEGKGKERKEKKGEGREKGEGGKEKGEKKKREGGERGRRGEREGKGEGGKKGEGKGGGKGRERERKGKRKRRGKEKEEEGERRRGRQGEGGERKEGKEGEKEKGEEEGSRERRGGKREKKGEEKKGGGRRGKGGEKSREG

SEQ ID NO: 943875 - protein, 76 aa, Homo sapiens
PNSTNVSIICSILCNVLGVLSPTVDYPVCMDCITSFIHHPAPSSLDHCIMGSDVTQPSLSLSYVLKIMQLYMVMVL

SEQ ID NO: 943876 - protein, 167 aa, Homo sapiens
KVAIRGYQKPLLDTCGNSKTTEQDVHSQCNGKAFSDGRNYNCYSFIPSLSCINLPEGSNIIAKSQLCAVRVILLWELTHLESSGKWSEPMTGFSCDRFSVLFLTQVTAAQAIFTISVKASVVAVKCGMTFLQGRNQGAENMTNGRVLFFRVSRQLDINMCNTLDRWY

SEQ ID NO: 943877 - protein, 219 aa, Homo sapiens
  misc_feature (71)..(72): Xaa can be any naturally occurring amino acid
VSFRYTVLEKLELALNVRVAADALQVPVCSPLISIQLIEHVVAFSTSLCVYTLSLSLIHSADNIYVAQLLXXAVCINSTASMIISRFRVSVIAASRSYCFSIYSRPSLGMCSQLFQPPVSEAFNVRPDKYICPLIVETHIGRLHCNIHTDPIALIAGDKDSCQTVQISNGLTAEVYTSICHIEYIFLNGYLEVLRVEALSSTQFLCLLNFLLVDIHFND

SEQ ID NO: 943878 - protein, 114 aa, Homo sapiens
FFAHSMVHCPQRYGALAYTFSCDCDIIIDRGLFCSQKTGRFSVHTVSDLGAPTGQLKAHIKVQFMVVSGDRLVLRQGLHHHEGGLGTAIATKVVSLYIDQPCYARRIVTVYYPQ

SEQ ID NO: 943879 - protein, 67 aa, Homo sapiens
TCFKIIANMSSAILMHSNRPFKGLSRMVMVSFSRKACMSTLCASQSSILHSVTIDLKYLVLKSQTIQ

SEQ ID NO: 943880 - protein, 177 aa, Homo sapiens
MDGEAVSDPSLVKAFLQLIDALDEEFGQLNESILHMLHLCLPGMNDHQPRHCLGSDSLHYAGEVPVQEVVILILLAHHGYRIHSLGGHVEVLILGALVIKACLSLSLKDNVIRHDRACIAIEVLKQVNDHASSSNAISPAFSRMRMPELPKLVATVCIRVMVIQVLDTESCRLADRS

SEQ ID NO: 943881 - protein, 76 aa, Homo sapiens
GESLQSLQQCVRSAISVLSAQVKLLNLLHLGFLLVAVSGLLPCNEKMLFSIRLVSVSFTSLSNLPRTCFAYAHPVS

SEQ ID NO: 943882 - protein, 109 aa, Homo sapiens
MYEQLVHQVVVREVDLVSHNDGLASMVLGQQGLNRLQLPDQCLHIVILAGLIVGVDEGDEFPLQVLYAVNHHVYCGCLVVVLPIEPKGSTQVTQDGIVLVQGQVTVLEL

SEQ ID NO: 943883 - protein, 202 aa, Homo sapiens
  misc_feature (6)..(6): Xaa can be any naturally occurring amino acid
MHVRLXCRHHLLSGISSVSLSSKGIKHSNGRVIISVCSLMVSLRILVVGLASSAFGTGFTRRSTTVVAVQAKLASRACAEANGTEIFLQPLCSYVVCLPIIIPCCFIRVTLSVTVPLLSNLVVHTIVMARCRSITYQMTTSKASALSTAVCSLIQTFLPLISNGIMEICVGVKARVIRRLVQAFVDTVAHGTFLFRTYASLV

SEQ ID NO: 943884 - protein, 77 aa, Homo sapiens
MLQYPSVWVNSGEQRILRLTLRGMYVFTGKFDGVMEEAVLRAHERSAGCRRIRSLHQGQCRKELCTVHALCQAIAVI

SEQ ID NO: 943885 - protein, 100 aa, Homo sapiens
MGQDLVLHAISLFVGTHGDSDHMSPPFFTHSLNSNVWSHTLLIVSLKSAFIVHFNQFLAPTDLEVDVQLEPSSWSADIQTTPRSRTQLTLCKPSLPLATI

SEQ ID NO: 943886 - protein, 43 aa, Homo sapiens
MHRRDSVRSKQLGHVHGPVGDILYDDLPGGATLLENIISHFTG

SEQ ID NO: 943887 - protein, 114 aa, Homo sapiens
HKSATFINSWATSFSNSFELLSIEVRFWGINAQNVIWQFQIVNCPKSIAIVINISAHHISHGSHQSCEVRELIIVFQLAFISARFQFCTAVSHFTIGVSYVCNCAYLVTSHGMQ

SEQ ID NO: 943888 - protein, 202 aa, Homo sapiens
HISKSLLIRSPINSGPSSKGLYMDHDLKVPRFMLNELQLTSTSVDYCSDDVHMVTRSASSTVCLALTQYRVCRARIGIVELISILDMGSRDLLIHVHSDCGTMSIHQLWLYLLSTHYKWHRWQCLPVPPWHAVAIRTRCSAVGTIEDETSSSVSGIGGIDDIMVRGNDGISAYLQLGITVACNSTLSISRCTIDCHTDFMSS

SEQ ID NO: 943889 - protein, 149 aa, Homo sapiens
MCGLVSHSLLRFQAVAVISSAFEVITFLYTHIFSHVSYNCHGTLVFVRSAWSEGPTAVQTNDPAVESSCQYSAMLTTLQVVFQLDPICPIQLTDFCAMSAWRGFRIIDTAIADGVIRMCWSLVIRQPYGSLGPPVPSSVCSSPCRVQGC

SEQ ID NO: 943890 - protein, 183 aa, Homo sapiens
MADISFWKSSKLPILEGSYGAQPYSLEAQPVKQNPAPVFYKSPVSSRCFRTSDASNVQFCRPFSSSPGSVARMPLMQYQTEVPMGNDLVLHVKSWFVVSRSTRSYMTPPVFTHIVEQLRLRILPHHTENEVGVQSATSISSCQPLSGNEMCSYTHDPGVLTFRKSCNMALNSRSPSSVYQTPL

SEQ ID NO: 943891 - protein, 201 aa, Homo sapiens
EIDGYASVLRTIALDTCSVLIGRKHNPSVDVTVKFSMSRIMPRKPWIKAEVYTRVALMSIGSQYYCLYDPSTYSLCSERPLYRHPIGTLPAHFRYLPSVISLSSRLDSLSWSTFPFTVSPALREGSAGHVARHTVVVGSIQHGVEVRAGAVLSQNSLAVQSAVLLGKVHRGISSESPVAQDHSLLSEVQQQFLHGRRSHPS

SEQ ID NO: 943892 - protein, 132 aa, Homo sapiens
QTSTLTSVLLGNTRISGIGNGVLALDCQRSKCKPNKFSQSFQYVRFGRALAAMGALGVLAYSHHECCQGASFPSIPLFTWICISIAPIEVSQVVHIEHDLVPQKWSRCVVSTVNLHYMSPTVFWQIVNSSVW

SEQ ID NO: 943893 - protein, 88 aa, Homo sapiens
  misc_feature (46)..(46): Xaa can be any naturally occurring amino acid
VHLSIPVRCNAFDIADSVPEYDVSSMASNSMSQILQLGHHCDRCVXRQCVRILLCIHAKECCICHASRDADCADDAIMIIGISIVHGK

SEQ ID NO: 943894 - protein, 120 aa, Homo sapiens
MSSTVTGYLDCTVRDGLSRMMASSLVLTSKEEPAMPRVVEAHSSVPVGPHMDVSINANLMCWRPRTRVKLQHSRVADRQSQVVLERHPQLRHEELGVMVHAYNPSTFGSQGRRIASVWEY

SEQ ID NO: 943895 - protein, 67 aa, Homo sapiens
MALALKRTANEPYMPWCRAILAALRGRYRRLPGNELLLRRLPRGEAKSSLDGVSIDAIPNGLELDRL

SEQ ID NO: 943896 - protein, 168 aa, Homo sapiens
SLNVDFDAQSIVVRLASVRNGYMAPPACSNLLATLILQLGQRKRYLITWLPRSTTMHASVVQYVTGPVAEYQHGHFVYDLGEVSEVIGDHSSDVVLDPLKRAVDSSMQSRYVYQHPQRMAFHAFAREASTVLQAMVYLYLCLIFLLVRFSVRISFFIHMALIAHRFPQ

SEQ ID NO: 943897 - protein, 117 aa, Homo sapiens
MQFRGIKVSTSHGNAILVLFQECLFIVIASSAHRNIWWSQQLDQFWVVLFVLQEACHVSKILVVHSIKPLLYTIQDEGQLCIICLHRWYEVICNNSQMSQEQHMSMQTQLLHSLILQ

SEQ ID NO: 943898 - protein, 107 aa, Homo sapiens
MQCLCSTAQGMLNCISGYAKCHKERVSEPRVISVIFDVGSMSEDACILDVSEIHKFSDRCCSVQLIQLLTVVRSVMEQQLPQVTVLYGHTLIFVSASYALSDDIFRL

SEQ ID NO: 943899 - protein, 119 aa, Homo sapiens
FIADGFCSVLIQSDRMHSYVLDVQLVRVSRETHRSKRIGIWPMSENLGVTCTVSYVWISSAASLCTSVHARPNGKHHDSCQFAMEYLHPQAVYSPGAVHQDELHELSSGLVIASSQQVR

SEQ ID NO: 943900 - protein, 132 aa, Homo sapiens
FIIGTFTVVILVHVVVLFHGVIDCKGSVPFAFKADVIPLSALLHVIADMILGLFGVPIVDSEALCVVQLFNIRLHLIHELQALSEEQAIAGGQLELAAGMVSGMEEFLEAFMVLSLRNLREVEIQALKDFFV

SEQ ID NO: 943901 - protein, 115 aa, Homo sapiens
MFVNARAYTVVWLRGSALLSVISVLMPDSCPSRDLSARPARSVISQVLPSSGTDTVMSVLEIRAYLFNHAFMRAVAQRLAGYRRLTSQACYGGRSACQRHICWDSGPELSRPVPW

SEQ ID NO: 943902 - protein, 206 aa, Homo sapiens
HCLLSIGLSWLQNSTNEESAMTSTAARGEDSKAATVSKIRRAIAILVSFINSLICCREYMLCNLNFRNGSSSSDCNRDSKSVNSLLTHWGITVSIFTIFVSQANSASKDSTNSNIFTKYYCSRILSEPVLPGLRIWLESSMSHLPPVGRILTVSAGCKKQRASSAPGSRRQCPSAPAALSLSSQPAAAATTAIAAHLRDSQAMQPH

SEQ ID NO: 943903 - protein, 102 aa, Homo sapiens
MLWINQDNLLNGVCVIIIISVIIQLSQSSLVAFSSLLCQYLKASTTLYCVHAMMDRLAVSRTHRNWTHAPSAANTNPIYNVTLLGPVAQSARYTRARAAGSA

SEQ ID NO: 943904 - protein, 218 aa, Homo sapiens
EGEEERGREGRGKKKEEEKREEERERERKRGKERERKEKRGKEKGGWGRRGEREGKEERKEGKKEEEEEEGERKRGKRGKKKREEEGRREIGKGEKEGREKKREEKRREGKKGGRKRKRERREGEEEGKRRKEKEKKRKEKEEKRKKGRSKEGRKGEERRRGKEEREKEEREEKREKGEGKEEGKKRNEKMINRYQALTLSLSLSLSLSLYTCRIPAA

SEQ ID NO: 943905 - protein, 181 aa, Homo sapiens
EKREKKGEGEERRKGRGEKKKEGGKEEGERRRRGKKRKERRKEKREGREREKRRKKRGGGREKRRKEGQKRRKEKRGKKEGKREGRGERKKERGKKERRGKGEKERKKRKDRKRKERIKKRRKEEVKKEKKSGDTRAEREEEEKERGGIEKGVEGVKKVEKKREEKGERKRGEKGKGGERE

SEQ ID NO: 943906 - protein, 141 aa, Homo sapiens
VGRCSSASHVVKAHRRVKGAVRKVFEGHWCSQAHVAYRPRLVPLEIFRHYDGFRPLPQPLDFRLYLVIGSSYADSPEDLCFYQVFEAQVLTPSYYSYFLLHETTPRANAVSGPTIQGSESARVAVTQRHPLICPDTDPLMR

SEQ ID NO: 943907 - protein, 112 aa, Homo sapiens
MVTVDTRRFCLCPLSLPLRVPIRCKKSKASPWPELQCLGATCPEVPEESRSCLGALESSLHPSCQGSSKPRSNVVHRLGAAAPAAQTPHPQHRPGPGWYTRGMFLAYWAASV

SEQ ID NO: 943908 - protein, 105 aa, Homo sapiens
  misc_feature (103)..(103): Xaa can be any naturally occurring amino acid
MVPTVISWDSRVHLVPDRCPRKSMPGRGRKLKVDRRGNDGVQAAVAAVRAALHPQRPATAAQRCPTPARGIPKRRDRPQPSCETQGQVCADSPRAAGLSEGHXAK

SEQ ID NO: 943909 - protein, 139 aa, Homo sapiens
MIFGKIMPAGATGKMARTFSYVLAFTTMVNGGSQGVCLLWALSLPLRGLIRCKKSQGSPWAEAHWLCRQLHSSPARKPELSGCSGKFAATILSRFVQTKIRCSAPPRRRGFRRADTASTASYWPDWYTREMFLASGPRR

SEQ ID NO: 943910 - protein, 109 aa, Homo sapiens
ISSIAVLSMMISCPCITQNRVSSLLSAELLEFRATHTCSMDAWTHGSGFIKVTSIHENIAVSLIMLDSRLEPVLRVWEQVHWLLTVSGVHTDALHTLLSQWLDGRVSLY

SEQ ID NO: 943911 - protein, 158 aa, Homo sapiens
  misc_feature (94)..(94): Xaa can be any naturally occurring amino acid
RRVTSHDLDIVHHDHQSAIIHCESVSVIDCELIHVRSYGHVSLYCVSSHHLLIQYVCSSSEYDHLQIMLNSPLLSILSVCAQGLRHPQASQFLXDCAVGYDWHAWHVNTEPVSRMSLLQASVSSHVQNRRTVSQLASNISVHTAPAALQLGSIKRKLL

SEQ ID NO: 943912 - protein, 113 aa, Homo sapiens
MVLVAIKYWQWCSYTVQMDLRIDGPTAKSEVYPHYACELVSTSVHATISSTSHPVHEVCTQVWMVESADYIGYAFESFKKEAYGGIRRHHIGHLVGKVHQIINPVADKVKLHH

SEQ ID NO: 943913 - protein, 112 aa, Homo sapiens
MVQAEITQFALTIMAYHRKDHTGPNYANHGGLQYVLDPFQKLRDQSESRITLSCLNRSRTLSLREQKQYDEMTSSFIACTFIIITPDNILVKVQHDIVHVHYLQYLIQAHVF

SEQ ID NO: 943914 - protein, 97 aa, Homo sapiens
MASNREDDTGLSWLDMRYASRSGTRSRSPVFKHELDYPYLLSRTTTESLCDEKDKIPAFIMDRVCLHNQGTFNVLVTVLHDMVHLHYLQDLIQPNVV

SEQ ID NO: 943915 - protein, 84 aa, Homo sapiens
DKNHCVKVLQVHKVSIFNSGHFDDLQVYQSCDTRKILWHFVQTQIRLLVLSKMALVIVRGTLGLGRAEIAVISSIGAYPRSLIF

SEQ ID NO: 943916 - protein, 114 aa, Homo sapiens
PGTAGLCPEESPSCVSQGYGSPKIGYSEPAGVVSFKIYCMVPILCESILSVRERVVSAREKDVIPCGSPSRESRPFLSTRGCRLVTDIVRYIVYLASASVSRSFRHACSSGRFA

SEQ ID NO: 943917 - protein, 40 aa, Homo sapiens
MVSIRLLLRMMMHAVQVISITNQLTAIENVKQRAEPPRVV

SEQ ID NO: 943918 - protein, 136 aa, Homo sapiens
LVSMHGHHLYWGLSDCHNVESCREALLASISGVMAVQLHMLGTLSYRKELVHRPPNFLNISQAVMFRSPGQTLSLHFRIMAGSRPLRRVQHVSYHVLRFTCGASVARIAGAVDRYWSVLSLQVFGTCCHCYRTRCA

SEQ ID NO: 943919 - protein, 106 aa, Homo sapiens
MTACLVICNISAYNAYYVCYFVSFEYQKRLIEILSSNRQYSASVANVCRASHMIMAPVSVEFHNRVCDSSPILGCTVQHCMPAPAYMTLDVYPGGEFGSSERIRHE

SEQ ID NO: 943920 - protein, 154 aa, Homo sapiens
QYDGIMPAVAWVTLSQIHTCLQLERLMGIAVGGEDAYGLSIIPNEVVEAIGITKWLESRSALRSWSLALRSRCSSNRGILGLLAPSSIKRDNLLSADPSFTTLDTHTVLAVSPVSDEDMVISTGGHSHWPQLIEQSPDIYYIRRSRPLRTARHL

SEQ ID NO: 943921 - protein, 130 aa, Homo sapiens
SSMYGHLCVSSQDIEQTHTEPCQSTSAWATAMIFILTAITFDCFTGKFGDITLIVPDLSYPTYPAILKYVSNVRRQWLGFVSHSRDLGRACPASLYGVAPLEGRSNSSRRAVGRALDTAVVVSSENPAIL

SEQ ID NO: 943922 - protein, 117 aa, Homo sapiens
  misc_feature (1)..(1): Xaa can be any naturally occurring amino acid
XYSPARFNIATSCCSSGAIGYSSGYIKGRVCSSNVELTSVLSMSASFTPCRYVSLLPVSSSACAGGSCASTSIEKSSPGTTGAEFGIARAIKPSDILDHPLRSSFHHKHQVAISLVL

SEQ ID NO: 943923 - protein, 89 aa, Homo sapiens
MAVWLVEGMEKFLEAFMDLSLGIPVRLKSSALQDFIVSVSVGPQGEQCIGCSDAHWGEDHIGPVALVCQLTVEAEVERIQVSGGHVEGW

SEQ ID NO: 943924 - protein, 153 aa, Homo sapiens
ILEGCALLLAQKHHNDSWHVQHPADEGKMVCLTDERDSHQGPCSVHSVPLDDVADSLSGYGQTLGMAYGTTIVIRSGILTDAGSPSHYDEVWQDSKSESSWFGNLQSESSLVYATQSSWLLVQHSKSPSSPWIVLSLLVSALLAPSRATVVQV

SEQ ID NO: 943925 - protein, 105 aa, Homo sapiens
MEGSISSNESLKRLILRRVSSNNKQSALWSLIAGIPVPGQSGTRRSAYAWLRLDLNTQPVIEPLGPPLGPDTQLAARASEEVTVSSRECRGSGSTAVLKGQMRDP

SEQ ID NO: 943926 - protein, 70 aa, Homo sapiens
QLSISQVIPGTPNLTGSAWFPPIDLDQICRREMTSAPLSLVKGATFTVEARIKVAEQYPLSNDFFIANIS

SEQ ID NO: 943927 - protein, 139 aa, Homo sapiens
MVSRIGQVHAGEGTEDLDSKGGGQLAGDLRLCLKSLCIEAYQIKDCVMQSWVVLRSYLQTLPVYTQELCLWKSDWWSAEGVAYMLQKKIVLKGQFRSTVEMYGSSLTDSVYAIQNAPVPQHRESLNMFYGIFKHPLPRA

SEQ ID NO: 943928 - protein, 139 aa, Homo sapiens
MIILRLSANWQKDLEGAIGHLIADLCYDLGHTEYSWLGRLVASAYQSGHCFPTELAVLCQLLIVSTTCFRPVIGGSAHRVVTSHLGHLLVYSPLQHIMNGVLLYESALANAILCFVESNRSRHRLLSLAEVTVSIDDKG

SEQ ID NO: 943929 - protein, 80 aa, Homo sapiens
IGPPNDGAVLEIANPIDKCRIERRLKAKVMLDDKLKYELRMKQIVGKLSHNDVKSVEALATKNVKREMPSEMVKVDSKDS

SEQ ID NO: 943930 - protein, 98 aa, Homo sapiens
  misc_feature (73)..(73): Xaa can be any naturally occurring amino acid
RQWFSTSGSNSGWHSLLSPSKVILSIVLPFQTHKGRCTLQRLDSYGYVIIVHALSSSSPIVNDWSVMPSDSTXIASSRAKVVGTERQAALLYPSVMHS

SEQ ID NO: 943931 - protein, 85 aa, Homo sapiens
  misc_feature (44)..(44): Xaa can be any naturally occurring amino acid
VDIFFQRSPYISSGSTWSFQEMSVGSKVVTKRFLSGYKEHRRLXKGYVDRLRVSSATRSYRSSHDVASSLKVLCANTGLVFPAVG

SEQ ID NO: 943932 - protein, 186 aa, Homo sapiens
GNSIMTSERIGAQFFGIIWSSALTVSFRTLVISFSWARSSCRVWAFALAMPPANSWTDKVVTASLKVSMLQDYCANHTVAKNMCVKVLQDLIVSISDVVKVLICRSSRVVSEGSPCGTLSRRESDHWAQDDGIDSVRGTLALGRARSRGHQELLGLLQKPHLLAYSQISLSDETVQPRKLVQAEVA

SEQ ID NO: 943933 - protein, 253 aa, Homo sapiens
  misc_feature (36)..(36): Xaa can be any naturally occurring amino acid
  misc_feature (39)..(39): Xaa can be any naturally occurring amino acid
  misc_feature (66)..(66): Xaa can be any naturally occurring amino acid
RNPFLRKPLTEPSINDVITCALTQGSPCMQDLIHAXQSXMDIVHHGVSLQHYTSLPSLGVRKGQQXTLDHECSLSEYSHKAAIAECISSHGNVVTGDKQQELILHAVRCVTQQHIRTCGLTITLVAITDGGQLLQVSTHSVKSALEADGIDDRLNQPSALRYLVMCTCVLHLDFKLGYCGVCAPSSIDSYDLLISCSDLYRPQNSIRSVRVCSSQYSQSSQYTCAPTVSTAWPAVVTPICRSKLVVVLMRSPL

SEQ ID NO: 943934 - protein, 102 aa, Homo sapiens
MSWTCVMQQNERGQRSPDDSMGSQEASKLIHLCLQVPDSSDSSTAEHTYYAVDVDHQYTCIRAICSLGDTVTYAYLSAALRLMDIEDDGNNAEADAAASNDK

SEQ ID NO: 943935 - protein, 104 aa, Homo sapiens
SVATGTLKLGLGLSPFPYRRKATSGRMPSVIDRRGPSPLVYRPPSSYIYVVKGIQLLSRVGTSYCMWKLALSQHDQHRSADMLLLALYPANSILISGKLVLNRN

SEQ ID NO: 943936 - protein, 75 aa, Homo sapiens
  misc_feature (30)..(30): Xaa can be any naturally occurring amino acid
  misc_feature (73)..(73): Xaa can be any naturally occurring amino acid
GGGPGNLAVGKLKNGQQWANYHPTIRSAFXRFPSKLLRLVVKATSNRAFKVAMLFIRPYCFNTFAVLELCNLXHD

SEQ ID NO: 943937 - protein, 33 aa, Homo sapiens
MAVEYTIVRLRLRIRLLLSHLVANSAPRHEFGT

SEQ ID NO: 943938 - protein, 169 aa, Homo sapiens
  misc_feature (1)..(1): Xaa can be any naturally occurring amino acid
  misc_feature (11)..(11): Xaa can be any naturally occurring amino acid
  misc_feature (56)..(56): Xaa can be any naturally occurring amino acid
XGPSILILLLXEVGQKADIAQILSSQKKKKMAENQKEGILPAEGWVTLSQIHTCTXAERLMGIEDGGEKAKGKSTNTKGEVEAPGITKWLEKSGILGLLAPSPIKRDNLLSADPSFTYLDTLAVLAVSPATDEDMANSTGGHTTLTTASRAVSKHILHSKVAPAPHRSR

SEQ ID NO: 943939 - protein, 116 aa, Homo sapiens
MKFHSQCPGGISSRTGHTVLSVRHCHAQYRVCLSQARLPVSHVLLSDLAFSMIVAHQVLNALPFYGSLLTSSGMAHLTEPSLSATNESFGHGSKLDTVKTKSNWYRSQADVGIGAN

SEQ ID NO: 943940 - protein, 71 aa, Homo sapiens
LTKGLRCLETKSSASTEYVFFPQGVTDGHSSEILVSSALPKVTQTRIVLISHLCQLAGLNLRKASMTFKGV

SEQ ID NO: 943941 - protein, 43 aa, Homo sapiens
MIQFGADVHEHFFRLSHIPGLRDRAACTCDVLEPVNDIVRARL

SEQ ID NO: 943942 - protein, 134 aa, Homo sapiens
MRRQVHLVDPDCLPAVYETFKLLHIFVNTDCCAIFKLLATIVSGVVSGPHILITVTEHLCHLVLKQATEVVVAAEVSHGSGHILVICVQRTKRSTDITKSILDAHITWVLWGSGSLCRLRTLWYSTGFSNTYSM

SEQ ID NO: 943943 - protein, 126 aa, Homo sapiens
MVDHGSKHFKVALRYGAKNSEIRYHQSSAITGKKSLTLSRSCDCTATLPPHCNLRLLGSNDYKAAASCVAGITGAFHRSRLIDSMSVESGRHHVGQAGHGLLPQVIHLQQPSKVLGFIAWAAAVSQ

SEQ ID NO: 943944 - protein, 84 aa, Homo sapiens
KGILRACGLSQNYGYSPAKHVSELSITSKHDANMSDLQHKGVFVLCTIIDRHSVISRAFSSTYSRQSSPFTGAGLRIDQYLAIQ

SEQ ID NO: 943945 - protein, 67 aa, Homo sapiens
ESRHLNHIHATVLRLGSLLSGDGYSVRFSLHSLKSFISAIFIIFCTEVTVCTCSFSLRGYRTIFDSV

SEQ ID NO: 943946 - protein, 214 aa, Homo sapiens
  misc_feature (64)..(64): Xaa can be any naturally occurring amino acid
  misc_feature (99)..(99): Xaa can be any naturally occurring amino acid
MTFISTASDLYPTHYSRSWVRALLRVQRFNKLMICWFKLKSTDDAHGLDCQQLEVAQCLTEIPXAKAGDTYLAWLTWYQSQSLWVSIAVISDPNDVGCXSSQTAVRSACRRGMPCVLAMSSQGYNVLVADHAGLPLEVKGRIASWHYRCGIIIISARGADRRVPQLQEDHVPPVVVFRVTCSTRSVPLMLDVDRRRACRPNPWLWTGESAPGFF

SEQ ID NO: 943947 - protein, 50 aa, Homo sapiens
MLGPHLDFQYNMVHLIIRVWQLRISSLDLEQSSSVSQHQMNLFTEGDPES

SEQ ID NO: 943948 - protein, 31 aa, Homo sapiens
MPLTKRAICECKVNAPASNSYGTLGEPPTSA

SEQ ID NO: 943949 - protein, 143 aa, Homo sapiens
GKKGEREKRRGGGGKEREEGEEGREEGKGKEEVRRRRRKRGERGEDKRREEKRRKEGEREEGGYEREGEGGRKRRKGGSEEEGEGDRREGRAGERRRSRKKWKRARKVTLSHTLSKSISLSLSLSLSLSLSLSLSLSLSLSYS

SEQ ID NO: 943950 - protein, 70 aa, Homo sapiens
EENACSPKFHGVWDHKGVWCAARGLPQGELSDSSPETEQLRVSSEGVMDVIQCPVTGLALDVGWLRWLGV

SEQ ID NO: 943951 - protein, 133 aa, Homo sapiens
PLAVVVKLEPRLVKILIKKSIKFRPSKLVTPLPESIPIPIVRPKAFKDNPTWITTDMAWVFKVSNMIWVILLRLALGFKGASVNNPGFSLGTPSNSMEKVLVQIFSMLVQFVTIPCPIGVFKVKKPFLLWAPL

SEQ ID NO: 943952 - protein, 202 aa, Homo sapiens
  misc_feature (83)..(84): Xaa can be any naturally occurring amino acid
  misc_feature (92)..(92): Xaa can be any naturally occurring amino acid
  misc_feature (127)..(127): Xaa can be any naturally occurring amino acid
KAILAHLNPLNVSCPGQVQNLSQDQIEVSNANILYTQPQYILIALPFPTIPPFPLTKSAIVIKGRSRWVLSLGTVGYTSKMGXXGRGALLFXDRVVGQRHSSHPRRWVAGQRRSSLPRRGAGAEVLXTSQMMGGRAEALPTSQMGWPGRGAPHFPDRAAGQRRFSHPRRWVAGQKRSSLPRRGGQAETLLTSQMVRLGRGTP

SEQ ID NO: 943953 - protein, 95 aa, Homo sapiens
ESYLPVVHICDGTFRNGGPFDEDAGPVRLGPRPCPRHPCRRHRDEDTVGAPNSYRMQARLLRACFSSSDCISFLLGQRVLNIICLTFCAIITWCL

SEQ ID NO: 943954 - protein, 224 aa, Homo sapiens
  misc_feature (15)..(15): Xaa can be any naturally occurring amino acid
  misc_feature (28)..(29): Xaa can be any naturally occurring amino acid
  misc_feature (33)..(33): Xaa can be any naturally occurring amino acid
  misc_feature (50)..(50): Xaa can be any naturally occurring amino acid
  misc_feature (65)..(65): Xaa can be any naturally occurring amino acid
  misc_feature (78)..(78): Xaa can be any naturally occurring amino acid
  misc_feature (113)..(113): Xaa can be any naturally occurring amino acid
  misc_feature (154)..(154): Xaa can be any naturally occurring amino acid
  misc_feature (181)..(181): Xaa can be any naturally occurring amino acid
MRRAIASTVIFPLLXEARYMTVHTMDRXXVSLXLLQSVSDKKIIYRFLVXLQMITDVRDYLVCLXSGPFLLLLQIKCXITESINTYSILTSSYLKSHTLLYTEFPETGYLITXRGSTDSQFCMGGKASGNLQSWQKANGKQGTSYTVAEEEGGXNGQTLLKHQILRELTHYHKDSLGKTVXIIQSPPIRSLPLHVGITIQDEMRVGTQSQAILLRFSVTHNGCS

SEQ ID NO: 943955 - protein, 44 aa, Homo sapiens
  misc_feature (22)..(22): Xaa can be any naturally occurring amino acid
  misc_feature (27)..(27): Xaa can be any naturally occurring amino acid
MVAFRCTRLAYAFVSQVVLQAXRLASXLLQFAFRSLIGLFSSIS

SEQ ID NO: 943956 - protein, 98 aa, Homo sapiens
ERKRAKGRNRVEESEDEDGQAEEDAEENKTKKDTDKEEIGGLREREIVEESHRNSESEGDKRRAKRRGREGKGEENKGMGPEEGARKRWQKKDDGNER

SEQ ID NO: 943957 - protein, 63 aa, Homo sapiens
MGRARLRSSPTAVLDIQVWVVTATFSTAGDINVVHAEGVTQVGMLAALRRLHSLLPYSFGFSS

SEQ ID NO: 943958 - protein, 140 aa, Homo sapiens
SLRDTYWHCNWVQSVVDPAIESGRKSSAHQRYQGIRLIQLGVHCDLMLIISTVCTKCRSSISSISERISSAQSWMPPDATDRDTQSTRVGPHSALFHQGRQALSDGHLSALCALAGLGLVHQQELMQVIGIAEEPLTQHA

SEQ ID NO: 943959 - protein, 175 aa, Homo sapiens
  misc_feature (154)..(154): Xaa can be any naturally occurring amino acid
FSVSSISLRQGPYSVSRLDSEEKFWVSVLLRLVVNFVALAVFSMPFLDDDFFEWRAPPSGPHTARVPGHAPPLSPTAAAPVFLRLTSISWSWRRWQQVGAQAADGTSVDAEPAAVQQRLQRSRLVGRRLAAKAGATALGVDAARLALLSAHVRXPKHPYKIRHNRTPPPTLPHHP

SEQ ID NO: 943960 - protein, 41 aa, Homo sapiens
MILRASERGSSLMPEMLSNGSPSVKSRASVSTAAFIVKVRV

SEQ ID NO: 943961 - protein, 157 aa, Homo sapiens
SCLELHLVLPGNLLCEERVVTTVLLRPLTKPANDLPVPPPAPNSPSTSFSTTPPTCRSACTLLSLVTDPAPRAATLSFRLALDLLVVLQGGHAWQKLLAAVQAQGLCQEFQADGAGHLLLYINQDSRSHSSYSTATPVVYAVPAAPTSHPPPHAPHP

SEQ ID NO: 943962 - protein, 79 aa, Homo sapiens
NPKRVTLGGYESTYRTRRNTYRHSKTGRTPFHQVKDNQAEQPKDHYSHSEPKNAGFDASEGYKNTRMKSDIIEHTISRT

SEQ ID NO: 943963 - protein, 209 aa, Homo sapiens
PARKKKWVEPAPKNRGEHIAFGPLAINPGPVYYSVSGAFLVRTFATPGSQCIGLQGHSIKDPEFPGLWYRSKVDSSKVEIGIMFTHATCQIADARNICRSSGAGMSCSLHVGLYQGALQVYMMVIQGIVDSRQHFLSNILAVFQVMVSIRNSLWFNNRYQSILLTDAGVARQGVGVLLHSEAGWTVVGNRQHSTPLPKVNAIFREVSGT

SEQ ID NO: 943964 - protein, 110 aa, Homo sapiens
MTDEEAHDVQLQCTIVKSVYMLHNVMQSASGSIIAATQRSTVTSNSVSDQSAVQQSQRHLGNHPYQLSDDRLSLQRLWLTSSLSPVHINKLYTIRARMLVPHHDPYSMVA

SEQ ID NO: 943965 - protein, 117 aa, Homo sapiens
AYCFVNESGMQRHHVGLVEPVPTGTERFFCLSLPSRWDYELMPPWPVHSLRVEKRQQMRVLTTIALHYRPHDTSDLFYLGYDNTGVSQTTQPILMFRMLTLYVKRTFGNVYLRQWLH

SEQ ID NO: 943966 - protein, 118 aa, Homo sapiens
  misc_feature (30)..(30): Xaa can be any naturally occurring amino acid
QPIDITVDYNCWLASEFFKVEPALFSCLIXYVLTIFVSDIMDMHRVYARLLPLCSKLAAFSVRLAIFRDYELDISCVDRTLESCVNIDASCARIYSNIILDFTVAASIISGSDDSSAL

SEQ ID NO: 943967 - protein, 202 aa, Homo sapiens
  misc_feature (1)..(1): Xaa can be any naturally occurring amino acid
  misc_feature (5)..(5): Xaa can be any naturally occurring amino acid
  misc_feature (11)..(11): Xaa can be any naturally occurring amino acid
  misc_feature (18)..(18): Xaa can be any naturally occurring amino acid
  misc_feature (56)..(56): Xaa can be any naturally occurring amino acid
  misc_feature (60)..(60): Xaa can be any naturally occurring amino acid
XRRAXSTRHTXQRSDEDXRRGEKTLGPVSDAPHTYVDTIPQESTQIRNWKIRMRNXPARXVIGEYTTPGTGDISKDETIACHFIGDQRQCICNRGAHNNTGTTTTEVQAIFKEKKNERQHNASVRAPHKEKSTDGHTTRGRRITQCDREDEKRRPQLGDIKHEKDDTRSAHNPGERSPEESGEHAEHICAAALYEKNAARST

SEQ ID NO: 943968 - protein, 146 aa, Homo sapiens
VAHLFAQWAQLLFKLVQLLARDLVELCGHWLDIRLVQLKSAWQVLGKCTVWQHSVLDLCHINAHLQPQDFCLSFRVNIMLPGHRYKLFAQLSEGTGSCVSVVKKLKGQSELTKCGQSEVVRIVHDSVFEHIQVHNGQVIDQISVAL

SEQ ID NO: 943969 - protein, 138 aa, Homo sapiens
MLDSLVIDPKPQHVPSMLASYSASIPGCKLLLLNQLSSLVCTRSMNGIYSANSLVDYGTLYVQLYAGNVDVMQVITSVTVEDDLNNTLTVNDQTVLGTVLIMGVGVWIIHNSISPYCIVWRFRTDISQHQDDRRACAV

SEQ ID NO: 943970 - protein, 187 aa, Homo sapiens
MDTLTKASLLSSDTHLTSLNAISVHHLDSVSIRAFLLHSHQSSCNHPMLQVYVIDYIPNHTVGVNSHTVSALNLAAHVELSGSIDMSELCVLRSFPATTICSLTAAEHDTSISSLYRSICPVSLAASAAIGRVDPETGISPMTTSICSVYTDRYVMAAFMQPHLHLYIHVSSVYQALSEPRSASKTL

SEQ ID NO: 943971 - protein, 74 aa, Homo sapiens
DRKCQSCSQLMQYQSACIIAQFHEYWPMHLCKPSIRETHYRLQHMTQMRSVEHRQCLFRAQRRHLETLNTVISR

SEQ ID NO: 943972 - protein, 141 aa, Homo sapiens
MFVVRQWEAGKIGLRKWQHLTFFLEEGVGTQIQFVCNGKDRVLYLGLAFLSAQVVGRCHGNSYLGYGVVRHKVHSPGNHGSWDGVHGDGVHGGGVHEDGVHGGWCPWGCCPMGIMFMRMVCMGMVSVRMLFMGMMLMGMEV

SEQ ID NO: 943973 - protein, 117 aa, Homo sapiens
GRCGVKVHTQSLHRRLLSAAVIRGSSTSRPQNCKGIDSLHCTPGKAADTQCQVTKAARREAVHHCDPNVRHAVKGDNFGALRLDFLAGFWNCMGPLVKLLWRTVWRFFKKIKSKANI

SEQ ID NO: 943974 - protein, 117 aa, Homo sapiens
  misc_feature (110)..(110): Xaa can be any naturally occurring amino acid
MHHHAQLICEFLVETWYHLAGQAGLRTPDLVIHLAWPSKVLGLQAGCTTPGRLLKQRNRPAEYADESINWNLHSNRLTIALNITGHLSGQIRPSRSIHADRLAMAYSTSXWILLLLA

SEQ ID NO: 943975 - protein, 66 aa, Homo sapiens
AAEGTVNALFVGDSFSHCIATIIFDRYQNAYQQARWTITALLLLHESVVSVIGGKGPPTVEAQGIP

SEQ ID NO: 943976 - protein, 97 aa, Homo sapiens
MRVHRITRLVATSVPVSVCTLMYSRYSLRGSSSRLLTGSLSSSCTPFRSRFSFTSCRTEGRSSLSAISAAISTAAEPPPTTTMNRERWTSPPSSSLV

SEQ ID NO: 943977 - protein, 144 aa, Homo sapiens
GTSIAMYSRTVNVRCLTSPGYRDSSDSDVGVEDEASVVRVHVRSEPVLLIPLDDTEGRFPSYDMSSTRRDLRSIRSSIMAVRIVHRKSITLASVMQGTVPFAVSADKECSEAEIAPQLSLKEGVIRTVGKLLEYIGASVLETHV

SEQ ID NO: 943978 - protein, 120 aa, Homo sapiens
RRGKDKKREQDREVDHKDRKRGGSGKEEQRERKRMRREHKEKVRKKRNRENWKKRYAKKRRRERRSVRRVEEEKERNNKCRKEWKKEGRRKKRRKTEREKKRREIRKEKEDERKKRITVD

SEQ ID NO: 943979 - protein, 116 aa, Homo sapiens
MRSPQNTVSQVCSMGQDVGQEGDEPMYLMAWPNHPVNVHHAASICSKEYFISISSPCFRGEVVVSVSAYSVSEAVAVTPSIVYECSTVCFSMSIYTNSQSLRSQGQWCYRSSGCYF

SEQ ID NO: 943980 - protein, 30 aa, Homo sapiens
MCYDCPIATLLHKTICMNGRAVNGQPDCTM

SEQ ID NO: 943981 - protein, 105 aa, Homo sapiens
MSRYGSKSTGNVTNCIKCHSLSSLNAKIWIVMLELKSGHYISGHENLSVSARHALVIHSKGKGFYTLCYVIKHDQVPIVMQRKALEQGAVNRYRSFHDDKFMTLD

SEQ ID NO: 943982 - protein, 91 aa, Homo sapiens
MMVIQALVDSSQHLLSNILTVFQVMVSIRNYLWFNNRYVNSEAEWTLVGNPQHSTPLPKVNTIFLVLSTALCEAIKPLNGGFCVCSCKRST

SEQ ID NO: 943983 - protein, 71 aa, Homo sapiens
SLLTHSCKGASSSQPFSADLPVTSSCALIQSSVSSHVTSRPRSQGIGRSDEHMVCSQPRYSVYAEYTPLSL

SEQ ID NO: 943984 - protein, 131 aa, Homo sapiens
MGVQAIEKYTHSNWEKLAKTTGLQASCKSKIQQGSQILKPKMISLDFMSHIQVMLMQEMGTHGLGQPRLCGFARYSPTFHCFHRMVLTVCSFSRCIVQAVGGSTILGSGGWWPSSHCSTRQCPSGDSVWEF

SEQ ID NO: 943985 - protein, 112 aa, Homo sapiens
MLSSVMYGAAKNVSIAISYTFVSIRVLRCSRACCTSDRLNSAEAAASSMSSVRCYCLSPWMQAADVNSSHVWFLVRLDQIESKAINGMIQAHAGKLGVASGSSGYTAPTVSS

SEQ ID NO: 943986 - protein, 68 aa, Homo sapiens
PVCLVKGTKEFLKAFRYLSLGILGEVEIRALRNFIVVSALVHSKSIAKPEAMLTGEKTILVLLDWCAS

SEQ ID NO: 943987 - protein, 124 aa, Homo sapiens
MAAEQLIATPFFTTRRRSGQRLWINPRLTIKNLMHYTELHTCKFTFCLLEHIPNTYTLSLNIHICVRHRVWDRKAKTWGRTMRAHIKTSLQKRAAGITDVLYVHAFANGESQETHCRDLAIYPT

SEQ ID NO: 943988 - protein, 71 aa, Homo sapiens
NKWTRLALVHSSVLSFRSDELCRGHCLASCIARLVMDGTVGIKDICVGAINSVFVLYVALYVNKWGVMCPR

SEQ ID NO: 943989 - protein, 104 aa, Homo sapiens
MVFNSMDDIVSVEYVDYRVYKRRTRRRTSNASMVGIHLLLETLQLKDQIVAICTKCLNDASSLDEESQLTNDVDYHTDVDRRPLMYRLATLVRPVSTSLGFKMR

SEQ ID NO: 943990 - protein, 78 aa, Homo sapiens
AGTVRYYASNSHDDVKRRPVDSNKTRYRTNWVPGHASSLLAIDQLAFLLQLESYFILKRIQARVGSRMQQLLGRGSSV

SEQ ID NO: 943991 - protein, 31 aa, Homo sapiens
MNLFHVQAQQQPQTYAISVVDDERLTLTLDK

SEQ ID NO: 943992 - protein, 99 aa, Homo sapiens
MKHGLGDRGMHNDCHRMWQAVLRYWCHTIQRSAPSVQQDSDKKTTSLQVGYMFKRLWVNVTPGSHESFKIPGLCVKHVQIPQQAVVPGHCSFLHQRVMQ

SEQ ID NO: 943993 - protein, 144 aa, Homo sapiens
CSKRVLQVHMSIMKSFSINRRQAHYSISVPFDVFCCTSHRNISCHSQRSLQIWSHKSVIHDRNNVSMLMDNMCTACNVIYMWVEFVRVSIHTRLVQGVRAAASNLILDRSPIEILNANPDATGLKYLCAASMHVIQTNNSVSCL

SEQ ID NO: 943994 - protein, 86 aa, Homo sapiens
DRFGPIRYYASLSPFVEIDGQSYDIQLTIGQIGCRDPPRVVLSSSKIMSPCNWTCIVYGKEFRLELGGVCKSSVQAEAQSEREGSG

SEQ ID NO: 943995 - protein, 150 aa, Homo sapiens
KNTTVFIMPLAHPNWTLETWPHIGLSGEIHELSPIRTMPKESASKSIINLAIGTFCLQSPPELSAQVSIDRNGYEHICTDIMYLCYTARYHPLGLRSSCDVSLLVVLNGQRVCRCAWHEDTVLILHLRHVPCRCTMPVKQLMPLLKRRDH

SEQ ID NO: 943996 - protein, 142 aa, Homo sapiens
QITLFLNLTSYYSMCFAISGIKRAWLRALDSCESLGRSHIGCTQLSVNCSRIMTTTYSHGSMWDTETIISGTSLKMGNLSIGVLCPCSLDSYSTDVYLGATSIRSPCFRAYTFSPFKLLRIEILSPISSCLSIIRGVVYSAN

SEQ ID NO: 943997 - protein, 130 aa, Homo sapiens
EAPLSPTLYLGIQMMSPYAKQTLRSQARCLVHKLFVFGNLFSTWLNNFIVDPYSWVLSLNFGQKFKINFACTSAYAYIVMSDFVSPIRPIMPDNLLSMHSCMRCCSVAWFTNLGKDSSSLTWSQTELLME

SEQ ID NO: 943998 - protein, 128 aa, Homo sapiens
MVQRSLCLPEKALHSSRGYSSRGNWQAALSSSLATFGYCSYMLCSIEQTFRSMTDRMSSGNVISVHSQECLLIVMQTSAHRNNWRSIHEYQILAASSVLQEAFISLRMMICAAVIRFTKGFENRCADA

SEQ ID NO: 943999 - protein, 139 aa, Homo sapiens
QICMYVGVESGIMVYCRRSMGPSGMSRGIQPLIGQLTLVHVVRRHHLDSLCSYDSSPVSHAFIVRSGFVVNVTHQRASRACSPSSHLKIIVQIRFTDVESPYFMNAWRILWSSPVISLWALTTCQAAYVPPVSRSVVRL

SEQ ID NO: 944000 - protein, 144 aa, Homo sapiens
MSQCTVNSLTSRDRSAADTGGTGAVKVAQRTARGVDRYGYGVVEHGWWCEVPRSISDMQGFQSLSASRDAVLGTLLQHMAHEAEVAIDDGSTGLRSRTGLVQHDSISPHQVSMTSGGWSRNYVTDSEPATISQHSRWSISSQCA

SEQ ID NO: 944001 - protein, 58 aa, Homo sapiens
MFLELTGFNLSFPVGGTIPNADTSSQPPSQLPRLHAMTVHCGFRGFLQAHDFRQRPGQ

SEQ ID NO: 944002 - protein, 62 aa, Homo sapiens
MLHTGYSTLMLLKEGGEDQHLLVRHVIEPRLTGTRFSRRTMYEAVRIDNTDHSAQVHGYATQ

SEQ ID NO: 944003 - protein, 69 aa, Homo sapiens
FHSEALAQQCKAYSDIRYRSSPRSNEVTVFVVTARVIRRLVQAFEDSVGPDDNLIRNSMPLLVCQCLRI

SEQ ID NO: 944004 - protein, 130 aa, Homo sapiens
SLTNVSSSRMDSGMHSAVSLLIMLVIAVRVRHANGCKVALIYLYSTRCSFNSQSVLHHSPRISRNTVAICSNFFAEQSDAVIWRHADLNCGLKSLGQVQRQRVSGTSMRSRRLQRTHALPDSEVFSIVGP

SEQ ID NO: 944005 - protein, 133 aa, Homo sapiens
SLSAGSGPGIEGRAHQAFNGVAAVSGVVGCEFHLCMFIDERRPSAFQYDLVFTSTDVHPVTTVYLARRVSSAAFGTRIARATCYGSSCLDTASRTCDHQISSGFPGGSRTTPQTPIHVPLAIGRAVDENRSCQ

SEQ ID NO: 944006 - protein, 44 aa, Homo sapiens
MYLNSVVRAAIFQPDPRPQISRVFWEGRPTRQGHVTSSKRGAGS

SEQ ID NO: 944007 - protein, 156 aa, Homo sapiens
  misc_feature (146)..(146): Xaa can be any naturally occurring amino acid
RYDHSCAEATVRRIMTADCRLILLRIKRYSSVRIRRNYNHEENATMTVITNNSSAKRGSSDTAQPEVELQISDNLSIMACQSIATTDMDYLHMSTRGHKQNQSYSRPLAAGTQSAINNIHEKAHTSESGKPVLESWLHWSPSVEAXAEMLHIPVTP

SEQ ID NO: 944008 - protein, 104 aa, Homo sapiens
TVTITVPGVSLIGIVKPIYSSVNCYLKLISVYIMRIKYLTVVMLSRLGTYMIPRLSQIERTCSGIGSELGRRISVFSVVAIVASQPEGHSVGDSDNGNSRECYA

SEQ ID NO: 944009 - protein, 71 aa, Homo sapiens
YSQCRYSISCSFGHHTHFHGIITALYSSIISIGCETFHHVRASSRFSQFGNPRFLLNDDLRVTAYLSTVRS

SEQ ID NO: 944010 - protein, 132 aa, Homo sapiens
  misc_feature (5)..(5): Xaa can be any naturally occurring amino acid
MRHSXMSCVMCKTLVSDVVFKARVMSGSKVTYQLLHQADSEKSSAINDVMSVQRVSTHNVEPYMRSEMVKGVSQYCDACQKGKIESLDYGELTQQHLLMRVIVMCLGVALSRGFSGLMPVAGQCPPSRVGRG

SEQ ID NO: 944011 - protein, 116 aa, Homo sapiens
ANYNLLAACTHEVTLAPDIGTLPHELEAYTVYESEVMSPIVNRWRGHTWSSRIFARRWFRPVSIDTHHVFIPKHFIRAHTLMTYSLSRWIFTHVSRLYSSIVCVCVFTQQVSVDVH

SEQ ID NO: 944012 - protein, 185 aa, Homo sapiens
  misc_feature (54)..(54): Xaa can be any naturally occurring amino acid
STLYKSSQSSCTGTKSSDDLPLRASVKLQESISELSKTISMWSTGVRHLAGAGXISNVSPVVLLMNDECITQYGVITLHPGQQEETRGSHAEVWLILASYHREGGIFCTESHMLCVCLGYYTDLSEQKLGIARHIQCGVCAIPYVCARSESQLSNVCPANFIFKDAGEYFPCVILHAGLIFFLVI

SEQ ID NO: 944013 - protein, 122 aa, Homo sapiens
MESPCVNNSTNEYMPASLIVKCNMAMRHILDSGIVYVSITVLQTATNRWRQSSMHHLVEPFERAESCQHYGFRPVVSQSKGGYSFMPFNTVLNLCKVSCTRWCQSNTGAHAVRHPRYLHMPT

SEQ ID NO: 944014 - protein, 70 aa, Homo sapiens
MRKNEGRDIHYCDGNMGKPSFMPYARIIAKLMANSRFMILENGSLVIIDMTDDETPEVSHSTQYILTSSE

SEQ ID NO: 944015 - protein, 106 aa, Homo sapiens
METFVGFSMQAGLHPVIHMLKIPLSAGSITLNHKGAPEASCPESLILLDRALLSCPVGYPGNGLKVLGSRGPLFWSHMVPWREVLFFNHWSPEMCMQTTCSLQDPN

SEQ ID NO: 944016 - protein, 103 aa, Homo sapiens
  misc_feature (16)..(16): Xaa can be any naturally occurring amino acid
  misc_feature (73)..(73): Xaa can be any naturally occurring amino acid
  misc_feature (75)..(75): Xaa can be any naturally occurring amino acid
GASVRLSDDLYIPSQXVMCSRAGDETQSIHSRPIDVTVERELLVSFQRYETEKLALLSSTIGDDTTIYLSDIXSXLRVSVRLRAECIKLGLLTSPALTNIRSI

SEQ ID NO: 944017 - protein, 134 aa, Homo sapiens
RILEKLVDKLSSTSISYGDFNKGSFALKVNRSFASTLSNMKTIIPPRTDKVLKRVKTNINVFLNVNSRFGSPQIGKLIPYDREDVQGKALNKDGIHGEPPAYPGGPQDAHILTGPTGKPKSMATPEVTALRRAS

SEQ ID NO: 944018 - protein, 33 aa, Homo sapiens
MRSAGRKGISHGRCDACDVVSRGVSEKRTAQLE

SEQ ID NO: 944019 - protein, 51 aa, Homo sapiens
MIISSGHRRLSLVIRGLFIRSPGLLSSFLTLSGRHAGWSSKNSMQPADQES

SEQ ID NO: 944020 - protein, 125 aa, Homo sapiens
LSLLSPRLECYGAISAHCNLHLPGSSNSPASVSRVAGIIGTCHHTWLIFVFLVETGFHHIGQAGLELLSSGDPPASASQNPGITGVSHRDWPVSLIFIQSSDLPASLSPIGLTIERTYLCPGIMM

SEQ ID NO: 944021 - protein, 110 aa, Homo sapiens
PHEQPLSVLMSIIVEQQRRTGHSPVRSKLTDCCTSPLHDSQQCSPSVRIRQQSTPPVHAPVPKGPGPEQPQRQGSALVRRAGPGAGAALSGWATYHARAVHSPLPQCQRR

SEQ ID NO: 944022 - protein, 76 aa, Homo sapiens
MRIKCRWSTNLLLKLMESSGPYTMEHDSLMGHRNSVVSHVEHAAVNGGLASERQYGRHGHIRQIGVDLDMANVAHE

SEQ ID NO: 944023 - protein, 88 aa, Homo sapiens
MKQGCERSLLARPRDTDEMSMETQPLYVQLWAQVRPQRNCIAKVKAFRRRRDWVYHGHKIGCAIGMVPVSMLFMAIMRMGMQVSEIII

SEQ ID NO: 944024 - protein, 82 aa, Homo sapiens
MLLSEVQAKDKWGRKGRYHWPWMERQASSKTLAGQGLLRLPWEQTRSPDSHLAKAESPHDVSEACPTPEGKLRLFNMRPEDQ

SEQ ID NO: 944025 - protein, 103 aa, Homo sapiens
SGGHTVHSPELSTYVCALEHEASSYNELSRVASYVQVEGQVGDAALTLILLSIQVEHLEPIIDGRNPAWPNHPAKVIRELLCQDMNGTHVTDRIPMQLCIHPS

SEQ ID NO: 944026 - protein, 76 aa, Homo sapiens
VQEVANHLHHMQQSIVAVLIMPLGHGDIVICVKGTLCHSRISLPDEQLGKGRLCISYSCCQDINGCRTKPCRNHVR

SEQ ID NO: 944027 - protein, 105 aa, Homo sapiens
MPGTVVYLHIKSARQYTPNVYKGQHSPKVTRLADHTLLSIGLLYVQFPRTLCESLTTMFLRLSTATSNYISHEVKGVAPTFGSSGIQMYIQRYELIGKRGNKWTQ

SEQ ID NO: 944028 - protein, 170 aa, Homo sapiens
VCRVFRVSERLLSFMIVVSRMVKSLFHSDLTCVHFARENLDRFYHWRFVFSFFITKIIIIIMVIIIFFIIIVIIFNQQRVLLLFCGTLHTPTGTDRSPDKLKSFTSSSSSSSDCASSSTANKCCPKICSGRDPHFNYKTTGGVISEPTRESVVCTHIFRVASVTLIAPPS

SEQ ID NO: 944029 - protein, 112 aa, Homo sapiens
MTVSQMYYYPDKNVDSALGWSFICPESLISLATRNGVVMAAIYGTTTPLLSQEAPSDCPDSSLVEEVEHQALVSTSSRHLFLLVDMGSDHNEQTWSRAQGLLVTNVRRPPEV

SEQ ID NO: 944030 - protein, 92 aa, Homo sapiens
YTLVSKAGECSLDLGPQYPTAKGHKRVSFLSLTCCWGYSHAPPSWITLHCEERGGFFLMKKLIVTSCPNVTSPTLPPKVLELTDESNRALAE

SEQ ID NO: 944031 - protein, 96 aa, Homo sapiens
ILSSSNEYEAADMALFERDEAITKASEVAQDYPSRSDEFYLCTVIMSLHVSSLAITNSQVLLGRIMLTRSRTSISPQATIVNGIGRRLCEWKGSAL

SEQ ID NO: 944032 - protein, 73 aa, Homo sapiens
ASLFSLSCVVAQVEAYYKCNNVVWIEATAISSIVSRIRIVKMISVEERLMVDSARVALPIRCMSEVAYSNVSG

SEQ ID NO: 944033 - protein, 74 aa, Homo sapiens
LRLLLAPLAFFNALACSVTMVSDHLRTKKGPRRTPNLTTDSLTRACIHINGMGKKERLLLQLIQDDPPCPDDMT

SEQ ID NO: 944034 - protein, 96 aa, Homo sapiens
MLFYDGQVTVIQLVKSLVITIVKECNSRYKMHNAAYVFGQSYVVMLAIPISPYNPPTVRLRYGTVNSKYHQLEGPQSRMMFNDSGYCLGQIIGYGW

SEQ ID NO: 944035 - protein, 112 aa, Homo sapiens
RLSNECIAISISSVLQLYAQVSVIYMQTVCTGISRAVGVHQQTVVHWCLALDIDVICSRLCDACIRRFGPGSLFLPIVGVQTASASRRVLDNADVVAVSYYGRVSFVLALLW

SEQ ID NO: 944036 - protein, 34 aa, Homo sapiens
MLEASRIASPVKGTQSVSQAMWHMQYTRGVPQGQ

SEQ ID NO: 944037 - protein, 62 aa, Homo sapiens
EYSVLQVIAALARRSPSEDAFDTRVQSMSRFALVILAGHQVSLAVVVIMTVYIGPIHHDSEI

SEQ ID NO: 944038 - protein, 46 aa, Homo sapiens
MGVLSLIVVYPKKDVHSAQGVRQAVVTSPCRIMWAYHSIAGSLVQF

SEQ ID NO: 944039 - protein, 57 aa, Homo sapiens
MRDLPIQYTGNAADTPFAVTLTEVTMVPNSTAGPDRGTWITGFSPQISSRRRNTRRP

SEQ ID NO: 944040 - protein, 145 aa, Homo sapiens
GPWLLPGGKGQYVPPVFLGVLSTSRFFQACNTYKGPMPATLAPGLFSRRAKRKHFFPHSWKLTQIKFERLEIQPMLNLKSKGEKINPLLKHKNESQGPVQFSPSSFLATLSAPHVPESPPKKIIGFKTIWAPHPKNNCCLKPPIT

SEQ ID NO: 944041 - protein, 105 aa, Homo sapiens
MVPGMLVGRKPDTTLASRPRQQTKLDAVTLDARYTHDAYLATNNLKPVVVEIYGPKDDTQTHYYAADAMNKDTGLHMNHLLGTKYMHTGLGTVHWVEHAHTLTLL

SEQ ID NO: 944042 - protein, 51 aa, Homo sapiens
MTQVDTGRALWERVRESLNHTAGYGGAIAALTDDDGTAQHPVITGAYALNS

SEQ ID NO: 944043 - protein, 77 aa, Homo sapiens
MRCRLPEAFHSMSSGQKTVFIKSDPPGHGLSNKSSLWQCLRQASNATVSDCLSSEGSQKVLTVWSTVHKYRAERVNH

SEQ ID NO: 944044 - protein, 125 aa, Homo sapiens
LELAFQHSGKTGPRAVQAGHSNSTSGDQVRLSLRPFAKPWPPASLVCLASPTRRPSIPKGFLRSTAQAKEPPFLCPNSPAKPQQAERLSCVPSKDRKIASISEHTLYSRFLHESPIPPMLMAASI

SEQ ID NO: 944045 - protein, 104 aa, Homo sapiens
CLIGSHVQRKARSDSVHTDAHAMQDQNNMVMCGSLVLCLKSIMQIPVTYRCVCEQVQICLGSYFKVHVRTAQKPYQIGAALRCDMCVWSASMVFTSPIRLSLIS

SEQ ID NO: 944046 - protein, 130 aa, Homo sapiens
MRPAMHATTSHGTQSQSRIISWVLSGISRGSAPEELLEDVLTAVPMHHGIVFILICQGVAVSLFLTGLVLELVLTVLFPHEEVYPLLSICSYGQGGDKVVYIVVLDAMGAVKDIYIVIMVQGTILYSARC

SEQ ID NO: 944047 - protein, 77 aa, Homo sapiens
RSWPSLISVAYKSLYNGSSGCYTQSLALSHRLERSRVIATHCNLHLAGSTNSTASASRVAGITGTRRHTQLIVVVLV

SEQ ID NO: 944048 - protein, 103 aa, Homo sapiens
HITSSSVIDPVLSLHVHGHPSCDVQTDIYAYVAAFTSSTVLPVSIQLNVASYSHGNPLLWIVAFMYSLHVSKVDMEADAVVEQVSTLLALKARQSISSNVRIP

SEQ ID NO: 944049 - protein, 152 aa, Homo sapiens
DKDWIINATWHIKDEVQVSYKTWAIAIMDMIKAHNRPELCEDNLRSRATQSQANYQTLPDLALGFPTTGIKRVCGDEGLINPRQQRLCGACKIQFVHNAIALLLGHIMTHEEGIFTRSSFYMRVWKSNMHLQLEAAVPGQLDQEYDTGLSTH

SEQ ID NO: 944050 - protein, 132 aa, Homo sapiens
MSGQEAHSVGLHTSLLHQGQQALTYVTESALGALTGPVLVQGQELLQIIGIAKKQHSQLAQVRVEEHLQLQSAMSKHGLHLAQVLLQETAHVLHVRAHQGLLHLQHLVQPCSRILLQQGQLFLQLRFVGPLL

SEQ ID NO: 944051 - protein, 114 aa, Homo sapiens
NSRAIEITDTGIMCREAANSDSRKAMADGIKGIHSGKPRRFRNSRAHFVIFQRAGHFCAIELHPTHAEDRQYRNRQHDDPHPAKPLQHLAIKEDGVRERIQPHQRSGSRSGQAR

SEQ ID NO: 944052 - protein, 85 aa, Homo sapiens
SAHVGLHAINGFAFPHMNEVSSPQSYCRSEPYGQAGCVNLLVQGQCKVHPLHVNHTYTDGDDSDIQALGMQPQSCFRIASLRYSI

SEQ ID NO: 944053 - protein, 230 aa, Homo sapiens
  misc_feature (144)..(144): Xaa can be any naturally occurring amino acid
AEKSSTPVAIIASILTINTNAIGGEKSPNGFEDTFRQCAIPQLNAIDGVRMHQSFQLTVPLLKQQQERITFRPPPVDPAQPPIKAEHKSSTGKKSGQRAMLSVVNPAVVAIDTTWKNAWLIVISAETVDIMKPQYEGTNNHQRXLYADKHAEIPDRANKPSDYAHLTVKSADLVTAGDQQEDSNDSGNKSAIEITDTCIMCREARNNDSRKALAVGHQSIHFGKNTTAGH

SEQ ID NO: 944054 - protein, 128 aa, Homo sapiens
LRSAARVNHLVVMILDFGMILCDVAVSNSGSSKIDALCMFKQQKSKKCQGNFVSVYHMHSVKYEGQKKPHAAVKAGKKAQLVLRRQNVSSKAPMLSTSSCALLAGGSLCFQYSLCLYQQSHVHSHPPR

SEQ ID NO: 944055 - protein, 106 aa, Homo sapiens
  misc_feature (15)..(15): Xaa can be any naturally occurring amino acid
  misc_feature (48)..(48): Xaa can be any naturally occurring amino acid
  misc_feature (79)..(79): Xaa can be any naturally occurring amino acid
MQIGERDYTLHIIQXASSAWEVNELSYILGNGGFHDYYEFLKKPALGXEYCVTLVNDNCAVVSDADLRSRCCPTDRQFXRMLNVPYTFFGQLKPFFLWDWDFSKDV

SEQ ID NO: 944056 - protein, 112 aa, Homo sapiens
  misc_feature (6)..(6): Xaa can be any naturally occurring amino acid
HFQQDXEGSAVSQYSIGVSIRCNRASPVSVDGTQRPVTLLSRLIHSPGCCKSSSYVPRLDMIVKCTALQTLSKGVHPLGLRYIVYPILYPTGQQHSSVPLRYSLPCNKPRYR

SEQ ID NO: 944057 - protein, 132 aa, Homo sapiens
SQQKDQRTLLINTPYICHLMQLTSTLVTFSDIECCMYLSVESQTPTWMYASSTRFSSLSPVANAGQLPGQQGPLGRTRLSVHKLHHPSSASVEGAHAWSKARQASRALLASANGESGNSASPVRDSFRCTSG

SEQ ID NO: 944058 - protein, 147 aa, Homo sapiens
MRCYQPKARRLASTRGFTLLGEAGALIVSLAALVYKSCKIIHNSTQLILCCPGLEIDELNKSNRLLDKAILMRKCAYICVERECIIVKLSVNRWCMDFHSCKAWSHCSPTIYGPDLVTLSITGGWYAGHKLGYDHRKNSLCTGNLLC

SEQ ID NO: 944059 - protein, 84 aa, Homo sapiens
MVLIGLSNRAHLASAGLILYQPFPHGVRLILRQSGCRFQWQRRYRQYPPGGCQCSRSVRALDCMWRYSESDSRVLGLSYELTLT

SEQ ID NO: 944060 - protein, 44 aa, Homo sapiens
MLGTAEMSSDQYVNAGLRMAQGGMRRDLRLVSVPEFVSKFAAVH

SEQ ID NO: 944061 - protein, 80 aa, Homo sapiens
MRYKTDIHGCHTVRSDVMFVYMQLIMFVGIIESCSTHPRSSHSCDKWLTILVRQCSPASVCSRRRLTFTPWFIKTSPQAH

SEQ ID NO: 944062 - protein, 85 aa, Homo sapiens
TRNIDKWQVACTAHAYTNLFRHAWFGQTIIAHDTPVNSGNIWGKIVSLGASLPLKCYRLRLELVFRTEDCGNWHTLAGSLEDCGP

SEQ ID NO: 944063 - protein, 114 aa, Homo sapiens
VFHVFKMMFQVLRYQDHQSQIVVELQLPRIGFQSLVNEIEVKGFHYGILGIKCCLPLGTQVDSIEQLKTGIGGQTVNIRLILLLVFLATQVLMSSKLASLVLLRTLGLLLYRIR

SEQ ID NO: 944064 - protein, 133 aa, Homo sapiens
SSGVDQEVKSRLHSIEYDTPTTYLPVRAMYGLSGKVSLVRPECVIDNPPRLAPLSFSTCSHWSVMHKPCSVSSQRVPLLRMHYASPYQILYCYCQMPQSPFLYTALTISYGCDATQARHQLYNRCSSPMLDHV

SEQ ID NO: 944065 - protein, 72 aa, Homo sapiens
LHQEAYFSTLVLAMRSSLPSRHSINEQALPHMIRSLKRYSDLSQSPVAASIRHEQLVQCTVSHIPYPPKMYD

SEQ ID NO: 944066 - protein, 137 aa, Homo sapiens
DLLMVGWTDRVNIAYQDELPYWADSTSFYIITQWLLLAHWKGKKFRMLGIISKEEATSFFGPKNRLLYLLRDFELVTARLEDNMVGGGGGSLPHMINENCLSTRADAKEKSNVTLFRRTGYLSKPTKGALGANSRFN

SEQ ID NO: 944067 - protein, 134 aa, Homo sapiens
MSQSEGTTIINLIIPSCGIQRISGQLETVIETAGLASSVVSQMHAQANLVLDKQQHFRFYCNHCSRVISPCQVDASYSSECSLCETINMSRETPSKAKSTFTVPSIVIVGYASDDKVRSEPSKIWVDPTMTIYQ

SEQ ID NO: 944068 - protein, 93 aa, Homo sapiens
SSVDHAARSSLISPEYDTPTIYISVRALACLSFPIEVVCADYVVDNAYSLRLLDPIILSHWHNLWISIPIIVLLQTEASRCVPFYSVSCSNRS

SEQ ID NO: 944069 - protein, 102 aa, Homo sapiens
MGTEISRYSWSAKVRLSSQSSQWGSIPQKGKLCVYKVTVHQKIVSSFCISRAHVNGRSYYSHYIIVTVCDYVITDGGSLCAAYSKVTLRALSGSVNEICPEC

SEQ ID NO: 944070 - protein, 156 aa, Homo sapiens
MNASNEYTEEYRTVLTEESVGCKYGMLPLPGIKPYRRTGKVPDGILRIKRDKRSAQLITNMAGVYTAVTVAQVQEDTCHILARTGDCRMSPLTNYAPITSYNDHYIDTAAIALSDVQVTDSTLEAYASRKTRPYTGGTLRINDDYWNKICNFVTPD

SEQ ID NO: 944071 - protein, 75 aa, Homo sapiens
IEPTRKPENEKKVPKSLSATLSLFSNSPADIILKFCENWAQESVNRLCLITMKLWGSIVFCPVKYTWYESHLQSE

SEQ ID NO: 944072 - protein, 83 aa, Homo sapiens
VRRELVSLQGSYLELSEQSLVRGRSVSSQVEDVSPGYRMRAERFSFSSPGAILRLHITCSYGQVGPEPHNVIPADVVPLAQNF

SEQ ID NO: 944073 - protein, 84 aa, Homo sapiens
MCTRVQSLTCLAEFDLSLNEQRLNHCGVHSNVHMILVHSAGLLSSPGAVELARPKVGRVHGQTENGPRQGARGRSSMQCLALRH

SEQ ID NO: 944074 - protein, 115 aa, Homo sapiens
MNVSSVTRVANEVVVSMALYDFFKVMEVAMYHVLYDQGKFGINVVSWTYVQKKDHFTRMCWTVYIHINQGSLLYVCPIEVVFAANVVENGSGLHQLRPIDLTHWHLLEHRISFIS

SEQ ID NO: 944075 - protein, 137 aa, Homo sapiens
GVTKAQRHEAQEPEMASSLDSCHSTDLQTSPRASDMPIAINMALNSTHVSRCARYSGFGAQTPVPIEAPPMTINFHSHIGRKASPVPPLYDAIQRRASSTETQQQTGIDEEFTRVNVLEEAPQVHGGDLHSCRIRHE

SEQ ID NO: 944076 - protein, 122 aa, Homo sapiens
MTSRQNGLVLVCHMRSVRCQVIDFQRYHIFRVHASYGQTCQSFECNVRDRYRPSPRVALQITDNLVIGFIPCKMHTMTTTVNVSYIFISLFIKVHSVNSMSLTHMLHLSHTTLFGTVLHYQK

SEQ ID NO: 944077 - protein, 44 aa, Homo sapiens
MIWTPVVTQVRILVTRAGVISRDKRLYMERGGHPLLCVDAVFGL

SEQ ID NO: 944078 - protein, 74 aa, Homo sapiens
NRASIHSSCSIPCTWYQDWVIITVICVLKTKVLGECFFIELKAQWLLFETEAQDWCYFHQMNQILLNPHKTDQD

SEQ ID NO: 944079 - protein, 119 aa, Homo sapiens
RNKSPIKVPLLTVRSESDGVQACKSMDLVDPCLDVGCLARVPKLWSDGSTELSVNLCMDIDLLFWWLHRQQVAIAQVDLDGTGGANHRGTTCVIYGSTKKNCGLGLVCLFVHGYEKVVK

SEQ ID NO: 944080 - protein, 150 aa, Homo sapiens
GTYVALSLATVFATCCTYFLFAFCHNWKPPEASPEAEQVLVPCLYSLENHEPVKPLFFINNPISARIAKHTGLLSRAIRAEDKRGSQAQMGDSPSSELGLLHPFCYLGRDASLALAPLQLMREPHALPRVESSLRVTRCRQMLQKTPEDN

SEQ ID NO: 944081 - protein, 31 aa, Homo sapiens
MTNGPVMTAIASGVHTTVVGPSKGIGGPMGV

SEQ ID NO: 944082 - protein, 75 aa, Homo sapiens
PLGPKFRKAGLKSTRQKCLQAFQPDIKSSTLEGGQPLGPKPGGGYGPLSEEFSKGDLVSTNHGVFPSTVKSPSSV

SEQ ID NO: 944083 - protein, 123 aa, Homo sapiens
YSNDQSMGSAPPYVSLLPFLKYGTFLQFQQQPFSNALWEIKALLACGKMPSPFHMCCAFTYMVTGGTQAFSALPTITSSKGVPFVCKKTQASPWAEAQWLCRQLHRSSERTRYLSGCSGKFAA

SEQ ID NO: 944084 - protein, 57 aa, Homo sapiens
QSRPKYAGSVTAIASHHFDRLKRSSERALWVTSVSADVSMADVDTLSLNRVFYFSLV

SEQ ID NO: 944085 - protein, 74 aa, Homo sapiens
FTGHMVTSMHSALGYNKNVEENYASIQREATQCLQTQFTPGLRRATRSEKVLDSPGFLNLWKYRPAWRMHQTEV

SEQ ID NO: 944086 - protein, 56 aa, Homo sapiens
MLAWLYSNAWGQRFSCLGLPSSGPKPAERGTPKSRWGGTPGEPRLGCLQWGGTMKE

SEQ ID NO: 944087 - protein, 137 aa, Homo sapiens
PCYNARVGSTGIGSFVTSTPAKLMPVSEIPAKGMASCSEDRWSSSRYTCSFSGPQLLPSRISRVIHQDTTSLDARSFAYGGVSLHNPFALTVNENASLSTTSFGNDTHSTICACGCEPAQTRGPHKKGLALVLMPVL

SEQ ID NO: 944088 - protein, 91 aa, Homo sapiens
MARFIKASWVASLFAALPPQTASACGLQGRSKENLSFQGFGRGQRLIALRLRVASSSLMPPDKKQMPGTAAGTVRWRAVTVAIATCSGVYL

SEQ ID NO: 944089 - protein, 86 aa, Homo sapiens
MYLYKDTTSHWLAGIGLVAQVARIFYLGVISHQLPTTGSFLFYGISSAFVTLGCKMGSGSCCTGTHSPRSAMVKMESSGIDRVMGS

SEQ ID NO: 944090 - protein, 78 aa, Homo sapiens
MSVSRQSILDINIDRMYHLSSQLCQNLVIYAMYSLDRKVSNPPRTWRTQWPNSSANNVCITVRVFRGFDTSPEGVRNE

SEQ ID NO: 944091 - protein, 142 aa, Homo sapiens
YLATCDSYSSKYWTLMKLSSHSGPLTFVSGNEYELIRYGIIGSLEGPKGASSSHPANDLGVPGLKVHQSCEQGLRGMGCIYLAVSSRLMMLITSASNRFLHGSPSQCVEDPIESFGVNSSLWKEPTVIILVLKVITSAGSYR

SEQ ID NO: 944092 - protein, 120 aa, Homo sapiens
MESYSSFHTFQSTNLFWCVQFVSQLQGASNTNYLQTLLCAKLLIPTVPMPFSVVTHWCFSVNLRTETRAGPVRSVRSAHTHSCQGLGAQGAAGNGTAHSVQNRARTLRTSRSHMFTGVRA

SEQ ID NO: 944093 - protein, 142 aa, Homo sapiens
LIFSWLLSVLKESAAATLVGYLQNTLVALAFLLGQFAKEVAHAFQSHIFACRNKSPEKGGVEGLQVQIAEPVHACFHVVWNNSDDIWEFMVGCARRSYPQKRCWQVPEAGDGREDGPERSQAERISERGQSLKESPRMCCVH

SEQ ID NO: 944094 - protein, 167 aa, Homo sapiens
QHADTSISKMSCMQHTVMLKNLVWYAGLTWSQQRGHGCAPQVWARRWLLCTCHRYSSSLYSRQLQHLLHLGMGVHIILDLRGLRVVLPFPPAELLLALAQLLAPGLSVCLSPSHVGREQLSAWGAQKGVAPVSSHVGKVDLLEVPAPLHGSSVSGHGSATLPAALHP

SEQ ID NO: 944095 - protein, 54 aa, Homo sapiens
MLPSDAALMLINFIMLDNTVLPVLLPVFTSTNMIQCDLQMGTPQSYGPKSPEPV

SEQ ID NO: 944096 - protein, 58 aa, Homo sapiens
MAAEFLGQENGILIIVGVAHIGLHAHKLQSVSSQTPFRQRVLVTLISACVAPSHSNSV

SEQ ID NO: 944097 - protein, 126 aa, Homo sapiens
MHFALNGLVQVDMTLLKRVQVRPPSEYGQVWRHQRIVWGCLSYQGQRQVPPNPECPSQAYAHIPPKILNYTQTAHCISITSDTSTLHLGGNTRQRSPITSFNTLQRCDHKESTSDSSQSISCRIPT

SEQ ID NO: 944098 - protein, 69 aa, Homo sapiens
GLVDVSIDYAWLSHLQFIPYPQESRAQPRPYTVGVDPWATPSGLTADAEAVDYSHAFSLSFYSVENVAW

SEQ ID NO: 944099 - protein, 71 aa, Homo sapiens
QLVDRLGVGTNLQIAFILIVLWPVGQPFPIGVDIASKVGPEKWGPKDGEELIPVVSITVLGFMYDEKLGRY

SEQ ID NO: 944100 - protein, 105 aa, Homo sapiens
GKEGRKKEGGEKGEEEEEKREGGGQKEEGRGREREGERKEREEGREREREEGKRERERKGKKGGKGERESRSHYDWLNSLSLYIYYYYYYYYYYYYIYIYIYNTC

SEQ ID NO: 944101 - protein, 90 aa, Homo sapiens
ALVEEHALPFDSIKCLQVDEDSSGALDYREIPGHHSQSDIQESLAVHVRATRGIPCCVIRMQGSASQLSCQQSSIKVHAGTSGSMHELSY

SEQ ID NO: 944102 - protein, 107 aa, Homo sapiens
MKRGPDVYTDSYSKFQNPSSNLNHFLKNKHRQTPNMELVPGAGHKGSTPRVAVLGGRWVWPGKWGQSAGPTRCLRSLGRVDRPGGLYQQCNKYANPSTERPSADPTG

SEQ ID NO: 944103 - protein, 59 aa, Homo sapiens
LCQASGYTPNVLYRSIVIVIGHSHCSSHCRIHLGSLLEHHTMVATTDDSRPHVLAHSTQ

SEQ ID NO: 944104 - protein, 116 aa, Homo sapiens
VVQPLLHVVQRKLAKMVAYWGIGTDTNTHILNQILQHFLGFNLSWGFSNKSSNLWRNEPQAAWLQKPMCQPMKTRHFQAEGMIKHLTQTNQDIVVPAFKSMWDGCTKRVTNWRTEA

SEQ ID NO: 944105 - protein, 115 aa, Homo sapiens
MVREEVASARVLVLVVQQRFLHRLVAVHHHHALRAHVQRALRHEALGLSCEGLANILQFRLEEVHDDGIAGECLWADSNCCAPASTWTSAGGRPPTPAGPGDSERTHGAAEALSC

SEQ ID NO: 944106 - protein, 32 aa, Homo sapiens
MSSAAQTSAPSSYCLCSSSLLLLKYVSRAEFL

SEQ ID NO: 944107 - protein, 73 aa, Homo sapiens
MTTPRTDGHMFPWIVDQVRVTLNSIISLSKGLTQYSSTVPSTATTESCSTAAQQARTDLSHAVLTRISARAEF

SEQ ID NO: 944108 - protein, 163 aa, Homo sapiens
HTYRALRSVPGHQDSLGECDIIISIHSYHTSTDDVYVTLRCTSGRLHDIASIATSDDLAMTELVCAEGHDYCRQIAEYEYTYPGSTDSIVLSGGSPRHRTSWICQRSGLYVVHVDSCTHLTISFCAQYVVVLTLVAYRVLHIAMCNLAGLRSAVICDIRDILA

SEQ ID NO: 944109 - protein, 80 aa, Homo sapiens
SRCDRCIMRIIVMTALWAVSLDSCRTVPISTGIMIACSAYLLVIIIQILDMSSYGNSPGSRCLRCPGGYGIFIPQLGVAE

SEQ ID NO: 944110 - protein, 142 aa, Homo sapiens
VGIIRVYDMKFVQADCVISGHKVIGSRSDHTDLARSVSYVACKYSAADDVQSSERKRHSLSCDLSVIGDSDQMPVCIIVGKFSGAIKAQHLIVLLTHILSPWFRDCTLSAVWHSMVYHKALFSLVKHTPYSACVAVVHLIDD

SEQ ID NO: 944111 - protein, 143 aa, Homo sapiens
QLYLAKGVNTVVKQKCLKNKNRLIQLQHAWAPGHPERKGSGYGLNRPQAVLERGQWLQCAHDWRWSPGLEKGEGPALCRAPWMYNTISSSQHGEHPGRIQKSPFTQKRKSHDQTWPHCKLYMSDHVQSGFVLCTQQTSSSYVD

SEQ ID NO: 944112 - protein, 36 aa, Homo sapiens
MAPDLQEYIQAKVGSLLSDRSGYSIVTPAAVSRPNR

SEQ ID NO: 944113 - protein, 71 aa, Homo sapiens
VASMCLICSSKITGLYCRFIMSIHDSCVLARSSYTVSQVPIINIMSSVMISNISRSCLRLALACMQSRSVS

SEQ ID NO: 944114 - protein, 207 aa, Homo sapiens
TNSCQTYSHGTGSSCSTLGLSVGDGFYWKTWYVLARRPSLLDRSVCMCSYVARSSSSPRSYTHGFPRRILEATLFTSSGFTFRMSVHSSCGSYLERVASICLSTSSKITGLDSRFIMSIDVSCVLARSSSSVSAVPPIKIHSYVMISTISRACLGSALACMQSRSVSSVAVVVEGRVIHPVVPVEHVEESLENMPLSGPPGEKDPPP

SEQ ID NO: 944115 - protein, 53 aa, Homo sapiens
MLMSKVSTEELPVGSGQNGLLKLVAGLAELLLRVACDAQLHPSTVRAPTPVEQ

SEQ ID NO: 944116 - protein, 51 aa, Homo sapiens
MASMIAVVGDPCIYKSVRQVSANGLDVAEALRGRHRIMDQDDTSRCCTTTD

SEQ ID NO: 944117 - protein, 120 aa, Homo sapiens
RRIHSSFSYHRQAFNVSCWCFYQSIKSFLKDRKSLRIWLHVNSDLTCFQLCFFTSFLLFYFFTFIQILIRFSLFLVCQCLPCCKNSKYRRLVWVSRRPELLQSVTQGVSDSNSGSSRRRR

SEQ ID NO: 944118 - protein, 100 aa, Homo sapiens
MVCRASRMSQVHLLGPVSSVRSGPVVFPADGLGSRQAQKALMLSGVESLVPVSRAEPKYCSRLVRVGPGPRTQAQRQHCLRGSESETRENRALCARSAPG

SEQ ID NO: 944119 - protein, 41 aa, Homo sapiens
MVHLSRACLYVLTRAPVSYSLAYISVNAVATILYKEALVHF

SEQ ID NO: 944120 - protein, 136 aa, Homo sapiens
MWVRAHPNGYVGLMTLKVSLYDTGIERYTKRPKHVSISLPVSSVCLQLSSPQPKQRAVRGQDLLLVQHHLREQHCGPYISDEAPYDDVGQGLCTLARTERLNMYSGCYNERIGLILRACHLIVVQCEVRVDAGELV

SEQ ID NO: 944121 - protein, 107 aa, Homo sapiens
EEREGERNGQIEPEDTERSEKKKVIYSTDEEKRKKGNNVEEEKACNRGQSGAARATGQRQLENKMSKREISVAQSLCLYLSISLYLSLSLSLSLYLSIYTIACRSPA

SEQ ID NO: 944122 - protein, 131 aa, Homo sapiens
  misc_feature (33)..(33): Xaa can be any naturally occurring amino acid
  misc_feature (80)..(80): Xaa can be any naturally occurring amino acid
SSAFISYIIHHIPRTNDIKPMIISIDADRAFDXIHHHFMLTTLNNLGIDGTYLKIIRAVYDKPTVNITLNGQKLEPFPLXTSRRQGCPLSPLLFNTVVEVLDRAIRQEKDIEGIQIGKEGVIVSSCRIPAA

SEQ ID NO: 944123 - protein, 120 aa, Homo sapiens
  misc_feature (1)..(1): Xaa can be any naturally occurring amino acid
XGIQLPHVLYNSSTLSLIGLSCCSTASCNSHPVGHNTYRSVVSVKTAYSIRGYSFYSLLSGSCFGWTSAIATSIDGRWGRPQAGSLFSLLVKGSMTTGTEETLLIVVDTLEVCESYEKSR

SEQ ID NO: 944124 - protein, 95 aa, Homo sapiens
GEVGSAGANGPHTHLSAEACSAQLSSSEEHLRTSFYKNLDTALLTSVSSCTEKDCSLKGEDEDDIRESFLGASATTTAASHSQGCSCDGEVGYIN

SEQ ID NO: 944125 - protein, 141 aa, Homo sapiens
VLLVLDMQVAEIGSFKKFVPNQRVRSSMPSQGQAGGLSSAGVSGVPRGPSSAVCAYSSPSYGTCGGSSHAGESSARSRGDLRRIRDAFSQVLGTFPYLAGRTLVGLRDSHSPYGPGMQSGQHTSVRKSALQGTYAHLSGAQ

SEQ ID NO: 944126 - protein, 93 aa, Homo sapiens
GVNCVGRKVLIKLTSGSTQLGVPLRVPYMMKSPHPATVFALRVTLYVNCCELLLMRISYLGAGYVDYGTHLPTEEMEALTHHEACTTPQVDWL

SEQ ID NO: 944127 - protein, 78 aa, Homo sapiens
MAPVQGGGIEYGLRVERVCVSERIRQYEPPLSISVINMHGHAFTQRGQSYTIAGRMSAAAADTMYRVYSRSSSHVSLH

SEQ ID NO: 944128 - protein, 111 aa, Homo sapiens
LLPKGYLLSVHTENLYPTELRSNFKPVCPISACFCTSPPFSLLIFKYSATGPATSESNACTYEPAPAFKAVSAYPRCMSECMRYCLQAALCSLLSFSHIAMSAIMAHVLRT

SEQ ID NO: 944129 - protein, 89 aa, Homo sapiens
YLYCTFMTLETISQNFVKSEPTGVHRQACKMHLDQPVTGKFQVGAVSQRADLQDTCALGPSFFLCSDKNLQTFKSPGPTKEKGFLLELR

SEQ ID NO: 944130 - protein, 129 aa, Homo sapiens
  misc_feature (1)..(1): Xaa can be any naturally occurring amino acid
  misc_feature (14)..(14): Xaa can be any naturally occurring amino acid
XGLVLLQSQPFHSXAEHLELNAYEFHSQREALDHEAVTQVLGARFTKPAKPELGCLEHSCWVYPFLMSSKAPCRFSEADLLPLLRFIQVMHSYARGRHPDHVLFPTARGGHNEVPHPFRVGGILCHLGH

SEQ ID NO: 944131 - protein, 43 aa, Homo sapiens
MAHSICARVFAITRAPPLPYSRAHIPLSDMVEIVLDTYRETRA

SEQ ID NO: 944132 - protein, 135 aa, Homo sapiens
MAQPTEKMKIQAHARHTHLKIVIRAEARVNHAGQDERELLTMRSVHVGRSMTCNTRENQHYRTHPIHTCAHGMVNLMLGVASSAMTSTTTGPIFKRRITLNLCATELQIQSIETTSSDVFELSSHCGITPCRQSL

SEQ ID NO: 944133 - protein, 115 aa, Homo sapiens
PVEGVVRPIPNVHRDPSELRLKHGVAQVSPGLSQDCSEIGDHRACIPQTHPHARCLVPEWKTPPPCHGSSPASHRIWWWATSCADSANSVQESFSLVQKAKGIVHASWTQMMFTP

SEQ ID NO: 944134 - protein, 67 aa, Homo sapiens
VGVVTVFTTFLTVVSVRQVVPSSECLHRDYTHGSLRILLGVRSPQSAPVLASWEWCYIEGACDLGVR

SEQ ID NO: 944135 - protein, 37 aa, Homo sapiens
MPVGVMPSHVLFPTARGGHYEVPQPLRVHGILCHLAL

SEQ ID NO: 944136 - protein, 89 aa, Homo sapiens
  misc_feature (70)..(70): Xaa can be any naturally occurring amino acid
MGAQRYVHLVVHVNPFRMVVQFLSLQGLSCHEPKGPVNVFEMNVLEDGITAFSSFHPTALRFDNIVVSLXTRSVVCAIARVPLFLQPGM

SEQ ID NO: 944137 - protein, 119 aa, Homo sapiens
  misc_feature (13)..(13): Xaa can be any naturally occurring amino acid
RLREVTLALSFVXISLSLNSHSYTFPVVPSTHYLGHVHSLVFLMSKAGYFSCRNLVTHMPEFGIVRTHHFLWSVYIFPTSLAIHYAAYTDPHSFSGKTLHSTVSDHSTRVFSDTLVLAN

SEQ ID NO: 944138 - protein, 31 aa, Homo sapiens
MSAAFSALMMCGGVHHPEDPCLRIHRDSGIA

SEQ ID NO: 944139 - protein, 109 aa, Homo sapiens
FYSVFPGLVFVSFGSVSDFFLSYPYPYYGWGAEKRASDSYTHPSQGRGSFLIKDPARPRSQEQSSPLIKKKKQHAGRVAVHPHCFKHSWNRTPDLSPVTSSLITLNKAR

SEQ ID NO: 944140 - protein, 112 aa, Homo sapiens
IGDKTSEVPHHIPYNTQVCAPDPWIVYRALQKEPVRRAVVCSSYAGRRPHCKVQFLREGAVWLMCQRPMVSMLRKRTCILVSMSSPDISSEAPQSVIPSYTCSGSMCHMHTL

SEQ ID NO: 944141 - protein, 76 aa, Homo sapiens
YVRATFAHRVAKLMAKVWAKDCVYINLQHHRAFPNEIRVNLLVPGTVQRRGNVEALPIQLELDHLRASSHPFSLDH

SEQ ID NO: 944142 - protein, 117 aa, Homo sapiens
KLWQAFQCISSGAPREPRPISWEIWAKLRSETKGTCPNSSWQMSGSGVSMGLDPCLMYCVQWKPRKARPPKNSREETQASYRSKAETSASLQDLQEVEICECTHSEHGFYTSTSESC

SEQ ID NO: 944143 - protein, 112 aa, Homo sapiens
NYISFRGLGFKTTFCNFGQWPLQLPGVADSLARSERDSHSAKMLILRPNSHHCFTPFPFIRPITDSFAAFFKFLMPQTLHPENVPIDARRLKACFNFEYRVQSCASCRTRRE

SEQ ID NO: 944144 - protein, 119 aa, Homo sapiens
MCHLVDPHLTLTAKFCYDPFLGKNPPSSCIQNVWLQTPCSDRSMAPLPCQPIYSSQGTQGTSASERRNGQTRKPLNAKYTSGLTLSSRVLYVYFSSARKYSRGTEERERGEKSTCDVSS

SEQ ID NO: 944145 - protein, 58 aa, Homo sapiens
MASSCSGSASNRSVSSSRFRSQRGGASNSEYSETTCPLYACGVMSHSARSPRVPYSYS

SEQ ID NO: 944146 - protein, 134 aa, Homo sapiens
LLGYGHAILHFSKHSGLNRVPAVNTIAPTTQQFGPFLLPRVNEPEYLLNLSFIHLRPVLVLAYQRGSRPPKTWRGQRSLHNLIIDVLVQRGPEGGTAAVAVVKAQGEVGVLRGTIHSGISHDYVGALPLVPSPT

SEQ ID NO: 944147 - protein, 111 aa, Homo sapiens
MHLGLHLWVLHATQEAYSAGWSPSETSVLGFFSSSGMRLRKKPIESRGKLGSSVRWLCSTFCGYEVLQPLQHLKGLFLCVLAVCFITEETLFIELPRRGSRDLKDSEPHAP

SEQ ID NO: 944148 - protein, 118 aa, Homo sapiens
PPVLIAYIDQDTFNLRIKMSQLSFQRRPLSSCGKSPVSLEVMWAQRVEHVAREEVRGHPQGAENAPLKLGRAQVVVYVLQDHRDQEDLKGECGTVYVVEKECLLPQKARDVVLCTALV

SEQ ID NO: 944149 - protein, 121 aa, Homo sapiens
VSSGPSNNFSDPPTVTVYPIILSPKYESLMCLCLWVRIQENPVPAVQAQFGVEVKAHSRAFERLGYRCFEGSLGSIRLFGNHKSLPPSVCRAKGYERAVVKTKTHHSFSHGQRSADSDTRA

SEQ ID NO: 944150 - protein, 128 aa, Homo sapiens
MVRAVVSLALFHFCHVLGPRVTLTVLIPHPRVFCFLEHIPCLKGIVCSRFVRLPTKLSVKPERPFLLESPGQAAAPVCVGSLRTRGRALLCRCLCSSSIFALHSYRTLLSLEHEFTAPHSALERAPHT

SEQ ID NO: 944151 - protein, 118 aa, Homo sapiens
FALSKFHTLYLCTVPQPTLQILSFGPRTIMSHTSGPTIPLRNAYSAFSVPTHLTNRLTWHVDISISFSGPMYSPCHSLNMRFFRSYNSQVSHLVPISHMSSVCTQLSVSRASSVLASC

SEQ ID NO: 944152 - protein, 130 aa, Homo sapiens
VVSGPREYDDSHIVNAVDPLAAFIALATRVKLVEVALCPLETWSQRFQESARDSEPVLCLARHIVSWLDHVVLCPEKFWAQSFMWHSLRAFVAGALSFILPQSLAHAHRIREESQSQGVHHSQCVVLSDV

SEQ ID NO: 944153 - protein, 132 aa, Homo sapiens
PLHRASSAIFLRPVKHSSLHRLWFPMPLARLHSVLTSTAKPASTSFTVKESYPGHSRECHSRSQGPHFRQSSPHGRHHITGLGHLSITLSVSWYQSDDVAEVTSDPGHIISCGLQICPNPCPSGQYPQCTFL

SEQ ID NO: 944154 - protein, 129 aa, Homo sapiens
  misc_feature (80)..(80): Xaa can be any naturally occurring amino acid
PLVSSDTAGMSFSNGSLLCSTSPEVREKSFFGGNPESTWAPYSFRTCSYSPRTCCVAHPTVQASIHVNVYSPRRRTRRCXRCGTRVSEYGKAMFLAARRARAAVCEAHSVCARSPSCAQRVRTASLPIV

SEQ ID NO: 944155 - protein, 108 aa, Homo sapiens
GAVAHLLAQWAKLLMQLVQLLARDLLQLCGHRVHVLQVELHLVLVLRLDVVQVRLHIGLRLLQILAHLVRQALCLRIQVIAKLVGHRAYLFTQLAAQGGAFTVAHIVS

SEQ ID NO: 944156 - protein, 123 aa, Homo sapiens
EWLTVCVAQSMLLPIFTQKNAHLAQVEVVRVFGSMCHIPPRVPPHDPIPGGIASLVKSLLDMTRNALLYVCISPALKYALPNVLLHLFPHVRIFDHALSLAHGPNVPEPVEKGSARLPRSPRA

SEQ ID NO: 944157 - protein, 39 aa, Homo sapiens
MRFHFLPRVLIREYRELLCASSVYLSSPAAQHISVSREC

SEQ ID NO: 944158 - protein, 124 aa, Homo sapiens
VNFHFPFFTQSVNSNFCAHTLLIESPKFAFMVHSIEFVTASAWKENVSVEELKGGKEFTTYHIQVIVKPIHKVNFLCKKPFMCASTQPEYIRCGVHSLRACENRVTVKERRTQQRVLACHIRTA

SEQ ID NO: 944159 - protein, 101 aa, Homo sapiens
RSLPFIPKFIDLCQQPDSKEKKFRAIKVRISSANFIKYFSQKCLFMVMKTSALHINLWSHQSGKVWVVIFVSQEAFISLRFLFCTTVSHFTIGLTKSRNCA

SEQ ID NO: 944160 - protein, 136 aa, Homo sapiens
  misc_feature (1)..(1): Xaa can be any naturally occurring amino acid
XVRVAPACRGTALAIPQALPDIWKAHSLNVSCKGQGPEKVPQANIVPVLLAVGVPKGKIAPVVDHSLHPHSQPVGRGLGRGTGNTLAFGTERGSAPEHSGRLSAPSPRENRYPPQSVCSLIAESHLPRTAAQSRSC

SEQ ID NO: 944161 - protein, 135 aa, Homo sapiens
SFVQGIPLHRAGTTLSKAPVPLRCKAYTQGIVLLQTRYPITQRKPDPEPNHCHLSRIVQRRDTPLKPECVARSQVYVVHSTPFWNSSCLEEILRYDQVLTSEVQRHRAAPYRAAHAALSLQRRDIALLRARGHPA

SEQ ID NO: 944162 - protein, 121 aa, Homo sapiens
EHGLSEMKAHKVLSHKDPAIVKKVQLSTTGQNVVLFFCLGPGEAQAFWPKGSENVGQYITSVGTINKSSPIVVNEPPGHLGPMPRVLAESFRKPLCDREAAVFLNNIVASGCVGSESVYMT

SEQ ID NO: 944163 - protein, 130 aa, Homo sapiens
ANRRQVVSTRKSAEFAGGICQHFWGEANSDPTLLDFIQSQVVNAPTHGADAFEIGPYSIQDLRVHVVEEKPDQPVGPRHTSLKLLDRNGLIQVPVLHLTVCRAGERDPTLGGYPAGHAHPHESPRSHPQC

SEQ ID NO: 944164 - protein, 100 aa, Homo sapiens
MGVFFPICSNPFALKYLVMSCVPLKVAKGPCSISETHFLTKKGPTGPSGNTIKFVSYWVPAPVVRTHAFCAALCSFQCCIWSLAGSRLSAIACGFLCSTV

SEQ ID NO: 944165 - protein, 72 aa, Homo sapiens
AHRIPELMAKVWHKGLLPEVPQKVGVQLQPSFNCVYINFDFTDAFLYELRCKPAVSQARVQQRGNVEAPLAS

SEQ ID NO: 944166 - protein, 117 aa, Homo sapiens
CGGNHRCKRFIIGAYTVMHLIDAHVISSGVEDSYRFLTISFESDAILTKCHSARYRRSVSGPYSVCSELPVKTFECPMLQPSYRDRPASFWPYGCIRPQSVRTYSWLRICKTVRRRL

SEQ ID NO: 944167 - protein, 106 aa, Homo sapiens
VTKKGKLVIIDWLRRLEEKLSETQRGGTIKFIGDDNRPLTKSRSYDVVIMTQLMNHLFNRRRTSRMTYWGIDLLNTKRRPHLLYIMCPIMRAKIHPSVLLKKNIAI

SEQ ID NO: 944168 - protein, 74 aa, Homo sapiens
CACYACLSGFLNSRYMIFTGVIAIIPCRNLARIVINLFSIQKSIVYPWMLAKCSFSHISGHSSDYTHTLYDRRA

SEQ ID NO: 944169 - protein, 70 aa, Homo sapiens
  misc_feature (1)..(1): Xaa can be any naturally occurring amino acid
  misc_feature (3)..(3): Xaa can be any naturally occurring amino acid
XRXSNLVTLEGIFRAKEITQAKSNTEPELQERDIAHRQIIYSLRMERPMIAWKGNGEKRLDINCERLRGA

SEQ ID NO: 944170 - protein, 95 aa, Homo sapiens
DGVSLCPPGWRGLVPSRVTPASGCRCDESFGTRHCECLGVHGLTASLDDGSFKDLVTFEYERSEPGVTSLAAAAGDTSYTTYRRLTSDRTCQVEL

SEQ ID NO: 944171 - protein, 89 aa, Homo sapiens
SCIDINSASSISSSRVPVLACDSTASRGFHRSISGSTETVPWVGGSSVASSYGQVILRALMANMLHGLTSQIVTVPWELLCISLRHRLM

SEQ ID NO: 944172 - protein, 33 aa, Homo sapiens
MGSHGCPSVLTRVARQSERGLGQPLIFHIEWVC

SEQ ID NO: 944173 - protein, 147 aa, Homo sapiens
MGEPRLQTAWVRRLLTNPKGSLDEKGHKALQMKQKAWKDDPKRALSLLKPGATKNGGPDMPLEKVNADLHHEGAWGRVQAIPTKTVIRRPKDYSVAGYMATHYGELMRYQWPELEKQMCQCVGPPCDRLGRSGFTFRGMNIRGKGPC

SEQ ID NO: 944174 - protein, 131 aa, Homo sapiens
VSPELVYSILVTIRAPSGAPGSPLGVSFLAPMSRCDVVLCTGPSFCGSQFVFHVCNGAESALAMSANMSVSAAYTFESRPREFKLETNASSVPLSVEASLPLQGDIRHGSAEFMIPCDSASDRASVCGWTV

SEQ ID NO: 944175 - protein, 117 aa, Homo sapiens
FHFESLRILIRSEYRPHSLPRPSSSYAASSACLGSSVFHKTIASVQINISDQSISLEDSLDVLISDRWIESTDEYPTSTHDVRLVLLSGQGLCRLRHRQVRSMSPSRRPPRSPALNS

SEQ ID NO: 944176 - protein, 68 aa, Homo sapiens
HCADTMISMSSTVSSSDLNYLNIHRVRGLQTHFNSRITSICKKFVTMASSYPYAICQDQLLLGQLQPV

SEQ ID NO: 944177 - protein, 84 aa, Homo sapiens
MPHSQNIDINNLNNYDTKRTKFRLSAGPEAIGGGNCDQERYGFPNKKCPPRIPGKLLSYMGRTLTPTGQDCLSRTAYLLHASER

SEQ ID NO: 944178 - protein, 50 aa, Homo sapiens
MLGVHRLHKESRVLQLVSVDITRHVDTFTACVLHLPAHQSLFSHDGRQSA

SEQ ID NO: 944179 - protein, 112 aa, Homo sapiens
SHWIRKQLWVSYLIRIVAYSQTLCSAFGNLVSYRAHGIICDIMDDNLTCRAQHVSIVIQGRSLKATPVGPACSHIWIGHWLSRQLQSAQHAREKEGLQCQDISIGSSTPAQR

SEQ ID NO: 944180 - protein, 80 aa, Homo sapiens
SSYTPESSVGSTITVQNLLGTTLAFTSLEDSHRNSNEPGRSVAELSGTNPSNSSASSALMTKKVEKSSSSSPYRMSQYPQ

SEQ ID NO: 944181 - protein, 118 aa, Homo sapiens
SLPGMRQVGSTFFALKGFSVLVLQEPLLVIVSASGLGGVNPWDSVDLILAENQGLAADIDKIVIILKLTKNRLNLFISQNCSPHSGNITKFNMGNYSIERNYMRLWDGQIPIDGGRCY

SEQ ID NO: 944182 - protein, 114 aa, Homo sapiens
EFELGCSRYLLTELSSLRIQIPQGELSPLQVNLKVPGHVNRFHSLNLSLQNGYTQSSLFPMVLVNAGEKTRPKAQFRRLLAKLVERARAYSTMYSARSSYSGAYSLATSLNSAR

SEQ ID NO: 944183 - protein, 38 aa, Homo sapiens
MPSTSSLVSCSGSIESALASSVFFSSPAAQHIAVSRVC

SEQ ID NO: 944184 - protein, 58 aa, Homo sapiens
MLCICTVLDSVIQVALHQGYKIVISDIFSSISGHNRVYISTKQTPGMNELQILKRQIK

SEQ ID NO: 944185 - protein, 71 aa, Homo sapiens
YSQGDRKGHVVTYIVGMISLSCTNSDQQARYVSRLDVYSCTLHSCIKRVDYIICCKVHCLGSRMLATSLLQ

SEQ ID NO: 944186 - protein, 116 aa, Homo sapiens
  misc_feature (93)..(93): Xaa can be any naturally occurring amino acid
RYSVSFAFSRYLRSHSTHVPSRKALSVLGLTARFPLALGDLTRGVRGGPEAQVLVQANVTLAVVAYRVMPAKKAPVGPQFTAIHPVNNVRPGXGPRGQPRPQSRATAAHNPRELCA

SEQ ID NO: 944187 - protein, 167 aa, Homo sapiens
  misc_feature (84)..(84): Xaa can be any naturally occurring amino acid
MRNGRYWFNIKLMVSYQEYMSDQRHGSSHLTHGYFNLSMEVEMIERCCFFYTSSGRVNVADTLVGEIEPSEVEAPNLPADTVSXTFTIMTRLNTLHCHRESIMRLQNTTCVCELLREAHIDLGDVLTKFFEAYGVLNARALDEDHQRPLVQFSQTLWDHPGLEAYNY

SEQ ID NO: 944188 - protein, 131 aa, Homo sapiens
LCCLGHIFVQSHPVGFFNDPLVKAGLVPPVPALLKCILQLLVTGIHTCHIEAFFHQHNEVHPSATGYVKHPLTPVLAQQPNQPSLVLAGAPPVCLQYTVATLRAASVCALWSESPSAATHRERVRYTLSNI

SEQ ID NO: 944189 - protein, 93 aa, Homo sapiens
MGHPGRQEEYLSVPNDLIPVFPMLQDSENHVSLQLVKYLFTLFDVIVLPGVGASDEHDCELLLVHELVADRGLEGATVLLHPGPHSQAALHDC

SEQ ID NO: 944190 - protein, 74 aa, Homo sapiens
LTFSICFTVIVSCSSDIQYSSSSVSASALLISITIRAMTSAYVSVGIHACALETIGYILDSILVRSLCMMAPEC

SEQ ID NO: 944191 - protein, 103 aa, Homo sapiens
KKRKREEEGKKEREKERKKIEERERRREEKGESEKKKRRRKKEKKREKRKNERGEREREERGKDKGKKRRRKKRGEREEKRRKGRKRKTEDERTKWGERGARL

SEQ ID NO: 944192 - protein, 101 aa, Homo sapiens
  misc_feature (71)..(71): Xaa can be any naturally occurring amino acid
MLPKCAIDHFSWCLSPTVEYIFGVYSVKAILNLCPFCGLKAGIVYKIHTTANHFHSSESVVHKVVQFQKHXANVLHPHGNHMNAYHTLVSIHVHTYFKIIN

SEQ ID NO: 944193 - protein, 116 aa, Homo sapiens
MPQGTLFCVQTQGHNCWRSKTYSESIKGGPDQESIPHENHNSIGGRSYDIRSISGTVEKDWGATTISRHEQTGRSHPPLPSVQKLLEPAKSGFHRLKQRPLRSTGSPSCRSSEQTN

SEQ ID NO: 944194 - protein, 76 aa, Homo sapiens
ALVRSFSYKHISLTVSLTVFVCLMICHVTHVSSYKRYLTTQKRECDSICGAQTRSVISRTQRVCYKIIVRFCANVL

SEQ ID NO: 944195 - protein, 76 aa, Homo sapiens
GRPVISTFKQISVAAFRVHFGKICHYLDNFCKLSFGILEPGTLESLLAEERLPFIPKFIELWPQAGSLYQQLATIL

SEQ ID NO: 944196 - protein, 121 aa, Homo sapiens
SSLINSGGATLIMSPWVGLPKSPLSRSCRHTFLLAPVTPSRGSFMSSFLKIMPILCAFLTQGFLLINLSRVAMATRQHSGLPVYVDPCSCGLMVSMMSLSHSSADTGYEPTERLFTRRYIS

SEQ ID NO: 944197 - protein, 110 aa, Homo sapiens
MWSQTNLRIFSIEAYKCGFTLSRGLPLVTRGPILSPILAALWPTFSGKARPSILDSIPCGPCMAQEGSIVVNEIFMSLGGRYFPLPIAEGLVRFTGDGCCAFNNCACARA

SEQ ID NO: 944198 - protein, 126 aa, Homo sapiens
  misc_feature (1)..(1): Xaa can be any naturally occurring amino acid
XLTGNRGGVAPSFHIVIYLTATIWDWPSLLKQSLLQLISCRPQHPQVWSASCLCLNEPYSPPPIMDVWDRHSGWNALFSLLVKGSMTAGTKNPLSTLSFTPWDLSRIAHNSSNNTCLMVISVWNLP

SEQ ID NO: 944199 - protein, 99 aa, Homo sapiens
CAPLYKPFTQFPRVGMRGIERMFGPHGCFGCFPVCQQVPSPDEDGNKKYWTRFLKAHISAAIVVLHAQLFLRGEALRVTLSVSRSLSISVSLSLSLSLS

SEQ ID NO: 944200 - protein, 125 aa, Homo sapiens
  misc_feature (10)..(10): Xaa can be any naturally occurring amino acid
KEVGPESNFXVLQLLARLGVGTNLQIPFFLVVLCTVGHPFPIGVSIATQSVAQKKWGPQSRRRAHRRVSPITVLVFHVLMRSLDGTETHHMEVGAPASLWFRATLTYGTLNITSAIEYRHRSLFV

SEQ ID NO: 944201 - protein, 115 aa, Homo sapiens
VFCGVLKIIIFTNSKPSQPSKNSASPKTIIFPSTFCQYTHIMPLTPRYLSVSSTTKHTLSLLPSPTTELEKITSGILLTVYLQTSSKCAQSVSTYVLYHKHILFSLIWCALVSRV

SEQ ID NO: 944202 - protein, 73 aa, Homo sapiens
YETIEDNAPRKRISEGPTAPTQGAERANTRKEAQETSNQEMQKTIQQQQGGTPTRQKRQAARASGNERNSVSL

SEQ ID NO: 944203 - protein, 111 aa, Homo sapiens
SRVRLSGLAVRAASLVHRALPIPCEACERIVNKAQHCAWGVINVNAEGIVFLRILDDEVGIPVHIVVGLVRSLEPGQLERGGSPRCDLCIFPRLVGNGPLILGVLSCGHPH

SEQ ID NO: 944204 - protein, 174 aa, Homo sapiens
RAEVRRWCGPRVRGWERVGCGGGGERGGEALGGGVGGWCRVWGGVGGGGGGWSGGRDRRRGGVAGRGRRARGGGCGLRWASRGGAGGRGRGGGGGGWVGWGGRWGVARGAGRRWVGGGGGARVEGVGRVCSGGGEPQLGGAPRLGAQKLLCCRLSCSRLGSLYSARRVLAERGG

SEQ ID NO: 944205 - protein, 88 aa, Homo sapiens
HNGCALGNEVVSTLSTSGQRMGHTGGNKFTVYVDLANYSLSVRHVSHIVHAWAPVSANHIINLFVDFILDLWVLQQNQQSISQSGAHY

SEQ ID NO: 944206 - protein, 132 aa, Homo sapiens
  misc_feature (30)..(30): Xaa can be any naturally occurring amino acid
  misc_feature (102)..(102): Xaa can be any naturally occurring amino acid
  misc_feature (107)..(107): Xaa can be any naturally occurring amino acid
  misc_feature (127)..(127): Xaa can be any naturally occurring amino acid
  misc_feature (129)..(129): Xaa can be any naturally occurring amino acid
MGSHLPFARSPFLYPPIYDVAGRAISPTRXSFLCCNTRLRAPLIEGSRAFRVSSSLEARPSFRPTSLESSTTLHSPRFPPTISRGTPRVCSSIVSSTCRQCXGADGXSPKVFSYFAQRSRAALHHIXDXALG

SEQ ID NO: 944207 - protein, 176 aa, Homo sapiens
  misc_feature (161)..(161): Xaa can be any naturally occurring amino acid
  misc_feature (169)..(169): Xaa can be any naturally occurring amino acid
RGIKCVCLAFLSGGPADSVFPYRDNRSSTPCRPLPLCFDMYNRISAIPQFSGQYPRSLSSKIQHLSVVPLYATLATLELTPHLLGVSIPGFGGPTPFCLVSQSSEPSALSVVTSIRSKSPCCLGSGDREIRKSRNGFTLVPLCHILVAPGSSPASSRRASXVFSMGSKXGVPVCPL

SEQ ID NO: 944208 - protein, 119 aa, Homo sapiens
TVCALENPLMFIPKAQYRANSLGYTGTQKLLHSREHLTRPSLGPLLAQGPPEQVLRAHTKKNVVVLPCQAQLSQSHGPGIESLFMSVRRLSNPMRIHKLFQFQSTYEVSAQFESQKSEL

SEQ ID NO: 944209 - protein, 131 aa, Homo sapiens
TFQCRHARQPWPLSFLNNSPSNDSRPVFWFQSLALLVVEHLCVVCHSAGYTRSRSSRRVKSARTARLPFRRRRSLMPGMATLMPDSMCDDWYSSCARQSINNRRSLQSYMCSLRHASVVLIDISHAKRTCL

SEQ ID NO: 944210 - protein, 196 aa, Homo sapiens
  misc_feature (35)..(35): Xaa can be any naturally occurring amino acid
  misc_feature (145)..(145): Xaa can be any naturally occurring amino acid
STHTRTHVYTHAGHTHISTISRYRQQRISSRTRRXHTSHESTTAAPRVYISLQRARRERCCVCAHRARAHERVCVCATGRSRYRVALVSLCAHQTLCRLSHTPRDTTVRAQSLCDHARLCALFVDTECEYHTACREPIGGPFCLXCDIRCARVSTRDAGEPLSEGTRRRITLLTMSLICSIVAVVADYSLRSAGSD

SEQ ID NO: 944211 - protein, 127 aa, Homo sapiens
VPYRFREKSPVCIICLQKGYNVFVTFSISLFSTPCFRKSGPLIPYFHVLSNCTLLKILTKATPPRAFEISFSQSFNPMTHPHSVCRIIAEHTPVDMTESREKEQGYRGPPPLCEKRARAVSHSPGDP

SEQ ID NO: 944212 - protein, 168 aa, Homo sapiens
  misc_feature (39)..(39): Xaa can be any naturally occurring amino acid
  misc_feature (118)..(118): Xaa can be any naturally occurring amino acid
MCNTRRGTRRTSPLSREYRSSGYRLHERPHTCTRHHSAXRVYISLSAPAERDARLCHEALPTESVCVCSGRCDIVCLVCSWHTRRCVLFSPHETPHVRAQSLCDHARLCALFVDTECXISHTSCKKRRYRGRPSRVSRCDIRSLCPHESGEPLQRHRDAHLSQSSLRR

SEQ ID NO: 944213 - protein, 62 aa, Homo sapiens
MARSFPYRSGSRCPCSTNVCKLDSRPLPIDTFSLDKGIVYVSAHKWLRYDVVIRPNNTLNKL

SEQ ID NO: 944214 - protein, 69 aa, Homo sapiens
CLFKGTKKFLNAFMYLSLRILREVEIQALQYFIVSVTLGPQEDHCKACSNAHWGEEDIGAVALVSHLAV

SEQ ID NO: 944215 - protein, 53 aa, Homo sapiens
MPHYLYSPYHVYCCDSSSGSSPVAGVSTGTSAMIDGCTEYPYWPKPNSCRILQ

SEQ ID NO: 944216 - protein, 79 aa, Homo sapiens
MLGLQFLQRIMHPALELTLLPTANRLQSGLMTALGLTQLLPEMFIWKSSSSVMIRSMFSAYAHRSISSQCCIGASPRHA

SEQ ID NO: 944217 - protein, 94 aa, Homo sapiens
PLRYRHRDSVFPQVNVSGHLGLSELITSTHEALGVEVTGFTSCIYYNFASTVIGDLFPTSADFWVCRGLIFMRSASTDWSDNVEEAVCNTVSIA

SEQ ID NO: 944218 - protein, 52 aa, Homo sapiens
MLYSRLIGWLHTSLTGLMLFILIVRYGYTESDLIALELSLTLTPSDRAALGA

SEQ ID NO: 944219 - protein, 116 aa, Homo sapiens
VYAGSLMSVQMGPYKLLSSVQLAQARLRCRDDRHASSERAGSSNAKADCAHTVSLAAVQSDRMIVAASDLVASAYPVPRIILGTGHSVRCWCACPRHVCLLVSMTHTAPCDLWRAQ

SEQ ID NO: 944220 - protein, 117 aa, Homo sapiens
EFQRSHYSLYSYPYNSPMSLYCNMHLDQKYLCVITSPHNLSDHFHKTYTHSNPANGIQIPDLEIPWPLCDPFEIYIETPVVYTMPQLRKPEVVNARMHTAESSSVCSRIVFSAQGIY

SEQ ID NO: 944221 - protein, 116 aa, Homo sapiens
YRQYENDVSSFDSNLTPATNLKKHGLIKIKVEMTIVMTSNKFLNHSTQAVWSKYISLSIQHMFSFYSSYVIVHGQHVSPMNKSSLHAVTVVNLPFNSLSVIVKLIKMVVELNTLCT

SEQ ID NO: 944222 - protein, 71 aa, Homo sapiens
ISSITQTQLYVNPSKRWLFDTVSTAQTRGAQKAQKARNVCAQCVHSPSTGHLCAYLHKTSLLVTAVHIGAP

SEQ ID NO: 944223 - protein, 102 aa, Homo sapiens
  misc_feature (12)..(12): Xaa can be any naturally occurring amino acid
DMDKFCWSRSVXTLMGTEYLGLLKSLFPTVWFFFHQSYTGTPGPEATGTNTHKGTHPFGWEHSPPVQPQRGQRCQNHQNPHTQEHGLKGSEQGLQHVHEGGT

SEQ ID NO: 944224 - protein, 67 aa, Homo sapiens
MASSGVLCFELPDITARELRNAFQHVLGERDYVSTTGGHFLREEPFRGLTDARLSLWRYIAIISDSD

SEQ ID NO: 944225 - protein, 126 aa, Homo sapiens
LPAIHSVFFGTMADRRLFSAPTLRVICYNRPESPMYISFTACVFLLRCFRITRLGLRVLLLGEQCPYCKSANYAAAHQGEPIAHAPLSCDPSEPGIAFRVWYPYQVCRYAAFARCGAHALKLHLAQ

SEQ ID NO: 944226 - protein, 75 aa, Homo sapiens
MMSFSLLDTLEELFRSACPVCSSACSQVSQILLHVGFSLPGMGREPVDVVLTGRYGVRSAPYMGFIEAPRTQAFS

SEQ ID NO: 944227 - protein, 129 aa, Homo sapiens
MLHRFCDSRSHVQPFLAMRKPVTVVVILPSVFQGLHKDVLRGFGKLTVVLPILHSSTVSPESHGLSLPVLRGYLKLWRPLSDPKGLKPGTSQHVAQPVNIGQRVTPIVVLLGDNRTQTQQQRHQHRHLS

SEQ ID NO: 944228 - protein, 133 aa, Homo sapiens
  misc_feature (123)..(123): Xaa can be any naturally occurring amino acid
AHALSLMEAMRCFHTRNQLSQEGTASPPGQNVVLLLCLGPGEAQACWPEVSEDVGHDILSVGPIDESSPIVVIDPPAHLGPMPRVLAVVFLQTSGDREPAVPHHHRGICLCGLESLGVSHTLXNRWGGNIATA

SEQ ID NO: 944229 - protein, 99 aa, Homo sapiens
EKNCYRQSRYLETISIEHTVIASKKRVKLYDVFLFSMNSGVSVRCSCHVLGSRLYTEGTSESPGYIILGHDLLLPTGPHHACAHRYNSSLAEHRLLIEI

SEQ ID NO: 944230 - protein, 48 aa, Homo sapiens
MSTRMSTCGQSTAFIQRSNTRIRAFSGSSETAVMCVQISTEHSVYHKF

SEQ ID NO: 944231 - protein, 114 aa, Homo sapiens
  misc_feature (11)..(11): Xaa can be any naturally occurring amino acid
SGCSRGHLGLXANGLHTSLGDSLCSKFHEIAQEVTKVRLGLGLKLWALDLLHQVLAIVSHGLKVLRTEVSPHMAPFLSRPSSSSLQMVRSSTVAASSFMLVTVESAAYDSVSVR

SEQ ID NO: 944232 - protein, 117 aa, Homo sapiens
GSLPFAFKEDVIPLSTLLQVIVDLFLGLFGVPEVHSEGFCVVQLFNIPKNFPQLQALSEEQAIAVWSAGSVCLLLGYEEPEAFMDLSLRNLREVEIQALQDFIVSVSRGPQREHCHS

SEQ ID NO: 944233 - protein, 30 aa, Homo sapiens
MRELSSPIAYPQYRFIVGIRLSDTKSEWAC

SEQ ID NO: 944234 - protein, 91 aa, Homo sapiens
KSRSCAHRVTTKGQIELRQALVVRDLQMAAAQDSGAKASITKALKPYAHKSLADEQPRSSVHNRGSHLWNKPRYTQREGNCRSPTAEAKRR

SEQ ID NO: 944235 - protein, 107 aa, Homo sapiens
MCTEHISLQSLWVYTGSKVTQGCTGTVPTPECEALGTRGCGHSSCQVGELAGHRVCAARLKGGHTVDCNALNDHEGTSPGVSQHVDGLDHVGVQVGPVKALVSVVTR

SEQ ID NO: 944236 - protein, 47 aa, Homo sapiens
MQVYFVTSDSHMSPEPARSTYDTGRLLPCSVGGVYHERSHTSQSQYL

SEQ ID NO: 944237 - protein, 90 aa, Homo sapiens
MTVWLLLEGRYVQSIVSLSVTSKVPLKVHFNLIFSPRITSNMGICTNLQEKADMSTLEDQIAHQRVESAAAAYSCSSLLHPGISSDACTP

SEQ ID NO: 944238 - protein, 115 aa, Homo sapiens
RHLSKFQAQTVFDSAHFAVHGEGLNVYMSMVKNGACRGLVDTSGLHSNEPVLLDVNTALTMLARDFVQYMKSSKQVWCVVPSLTLVTFTGTPSFELISRECQGVLRALTGSWVFV

SEQ ID NO: 944239 - protein, 140 aa, Homo sapiens
RQLGKLQLQWEPLSAPFTVNGEDLYVYMSMVKDGAWCGLCTYSGVSFHGSSAHGSQYGQLHASPRLRSGSYRAPSRCVAMCPIRALESLSQLTLGSRLSLENARGADTFEVVMGQRIELRRSQARVVVQHSSLVVDVHDV

SEQ ID NO: 944240 - protein, 119 aa, Homo sapiens
MIGREPHCLLAGEFSMRYDSPKVPYGRGSLWLQYKLSHRCLWKFVMSPLDTNSIGSGHCMNAVNAALRSARMSRKRWLPKTLRRANDDGAPDAESYGSTEFRHVYRMDTSTLCGTAEHQ

SEQ ID NO: 944241 - protein, 206 aa, Homo sapiens
QASTRDKTVLSRALISAVVMFCLAQAMMSGSLINDFISSVHMEQGRSIILKSISPDASASCSAERRHKICTQYTEIWVGSEASINKLSFPKCWDHRSKPARPAQMKPTWCHSSLSSCGHQFSILVSAAQARERPPVSIVTGPDGAHAPPKLPDGDLSLCHNVSKIGAHRGPCRGRLPQVAFPIPGAHLLQPFQQQCLPDARGPQLV

SEQ ID NO: 944242 - protein, 126 aa, Homo sapiens
SHFAESLLRLAKYEAHGDVITFKGNSEHVGLSATRRERNSPSWYIIDAEHVSPSALENSSFLVFSGLIFDFHRPLEVYGVTQHQNSELIDGFRGNDIGDSAFLRVQGLELGSIYQLTDVVVGLIEV

SEQ ID NO: 944243 - protein, 139 aa, Homo sapiens
MLSGLPILGDTSFKFTNSSSNTQVSTVSLKCPGNHVFDKVSVSWGTNDSHIVLSGLKFPQGDTNGNPTFTLSFLFSKTQRMLEGALSHLTSLLRKFCNGSLVNATAFLDQMASSGGLARIHVSNGDNVDMSLFLPHCGS

SEQ ID NO: 944244 - protein, 210 aa, Homo sapiens
AHLRKDKPTYSKLHLEYSSVWAQRASWLTTAMCCSRRTYTSSIVLDAGPRRANNPSPHSSSERGRDTHIVTVPFWVPSMSRMALCARMGAPSHINPTRFRCTVPLRWETMPWAPGKSITAGGRFPSVHLRLPSTGVVCSSMSFPYRQRPASQNSCCQVNCPRYRHRVLHTILSCVATAGHATARHAKHLHHSTGHKAQFPQVICHAGLEY

SEQ ID NO: 944245 - protein, 69 aa, Homo sapiens
EILLNIYQHTVCSTLSEFERSPSPFLVLRVDRVHRRTSLVSEPVEETRKPLILIAVRTQGAFGNAIQPR

SEQ ID NO: 944246 - protein, 63 aa, Homo sapiens
MGPMHPPSSRMVLFLCATMSVRLVPTVARVGGGSHRSPFPSRELTSRSRFNNSVFPTPVAHSS

SEQ ID NO: 944247 - protein, 85 aa, Homo sapiens
MLFSDRVVIPWALWVYPRQIGLPGPLSVGDLSLIFQVLARSQHSVEAYAEEELGYSRVGKPFGTLCTVILISLHTSLHAVQAVRG

SEQ ID NO: 944248 - protein, 147 aa, Homo sapiens
SEQGTCLFTLYEAVCKIQRGAPMEGATQSLSVTWNPYTCSADYMPSYINSFNSSPSSDKLNALLLLCRRKFALKRMHTTQQHWPYATSSLYDKTPMFPKENLLRSASHGNQPRDRTRKARTAIMMLEPCLHTQYKQTVVYKLTRAYA

SEQ ID NO: 944249 - protein, 209 aa, Homo sapiens
MRILLAGNTLCPHFPVTWRSYRVRVHFQYLVVSLISSNNIRDIAQVYHQQHTSGQLLTALNVRHACAFLHRLCHGAHLVHVEVLFLGVLDFKGSLPLAFKQYVIPQSKNCVSVKPFVQILTFPLSTFLHVIVDLFRGLLGVPEVHSEGLCVVQLFSFLHQFIPNLQALSEEQANSGGQLQLSVCLVEGTEEFVEAFMYLSLHNLSEYET

SEQ ID NO: 944250 - protein, 129 aa, Homo sapiens
GRGEEETRKKRSEEGGEKERREKGRGEEREKREEREGREKRRERGEKGKARREERRKREEGRRSRGKERSGAAGKKGAAEEQGGRTVKQRGRQKERREEEERERNERARKGRGERRMEIRQGGEEEIKR

SEQ ID NO: 944251 - protein, 138 aa, Homo sapiens
ALSSSNDLDLRCAGCQDSDLLMHPVANPRVHAGTASQHCVGVQVFAYVHVTLHDVVQGSLAYATALHAHKGSLNSASGQRNRFIANGNDLSVSQFVALIQAGAANTRGHLGLEVQDDVAQLLLNVTHNLALDRGVKPA

SEQ ID NO: 944252 - protein, 203 aa, Homo sapiens
MATVMITLKIVPIGKSGTFLLERFYAISLMLPWVLDADITFKLSSQLDLTHYLKSSYRSCSSSCPVESMNHALVVAPYRLAVGHSKASVMDVSDLILTSLNSPLEFRSEQGYVSDQSLLYQRRVIPTQVKDPGVACSFAVWPAVNEKSGHSQFHSSQCQHRSGVYEGPKSSASLLNVVHILNSQRITDPGAMYIVHRRHSGST

SEQ ID NO: 944253 - protein, 123 aa, Homo sapiens
VFLLVLLCFPGAQTAHSRRRASVRGPRPPGDRSTPQRPTDREAPPPATTRTTASHRPSAHTRAPSTPRPRTHASPKPPRAPADHRAGHARPGTRAPWHDDNGPPRHPPRAPTPPAGPGATATE

SEQ ID NO: 944254 - protein, 152 aa, Homo sapiens
MWTKPSRLVSQGRENSACNLLYSPFRQHARQPSSLSFLVNSLSYDSPTVISFQSMLLSSESSTVSVPQLRVNRSRSSPRVKSARTGRLPLCRRLSIMPGMATLMADSMCAHSNSSCGRQSISSSRSLPSSSCSLSHAPVLLIAISDEKGAGL

SEQ ID NO: 944255 - protein, 177 aa, Homo sapiens
MYPAVCSISLPMACTPRVPRGQSLGTQIKVTPVTLSVGKARCLQHQFDFTAEYQYSQYVFSQAVSSEALRVFVTAQATLTYSDEPRSPASQYGSFRYPKYDYKYVKLSPEPDSESSSPDTPRSYVGEHHSSPERMIYQLRHWCADTQQVQLGFAHVPNPVERVLEELPSASRAACNG

SEQ ID NO: 944256 - protein, 123 aa, Homo sapiens
MIYISTELAYFYTTSSESFVRVDPNISCSALLTGFIIINAGSIVTPFLRCWMFIFSSYILYRLWQRSSWPEVIFTRNLIFLAVVSICISENDKSSKVELIEIVQGTTCAGSSLSSIYSTVLWC

SEQ ID NO: 944257 - protein, 120 aa, Homo sapiens
HRCHKLGFYAQLLLKHDPAGTLEVLLKAGARVKELLIGTMNVWAPDQVIVESPVYDVFCSLLRSQREVREAGGHCDRRQKHVGRGALCWIAPGTGHSRSYRHPLSSVLTGSVNRGSSSSN

SEQ ID NO: 944258 - protein, 138 aa, Homo sapiens
DRNKEHKREGRQDEDVRKGGKAKEKGEDRVRGVKEERRQEKERTGRKRRRTRRDVEKEGGKKAKERRRERAEKREKERGQGEKKKRREKGKDEKGRKRSATEPLALALALSLALALSLSRALTRSHTLSRTHTHTHRV

SEQ ID NO: 944259 - protein, 72 aa, Homo sapiens
IERKGIGGNNRRRREMWEVKKKRARRGEGEKKKRDDRKRREETKRKVREGKTDKMRDGKKEKREVERKEYRE

SEQ ID NO: 944260 - protein, 53 aa, Homo sapiens
MENGLAPGIGHPQQPAEGGPELSHGERRLLDPHSAAAESLQHSVRTAERLALP

SEQ ID NO: 944261 - protein, 83 aa, Homo sapiens
MQFIDIAIEPDECGLESCEWMNTIGISVLSYSMSWSFIRYSLRRRHRSSMSGNKSACMFDRSEINRARVSFNKEVRCAQSHGV

SEQ ID NO: 944262 - protein, 168 aa, Homo sapiens
RETRRIFIKLGTTQGGPMERRQGLPLQAARRHEALKDVESQGCRLRRSVIVDAHMGYADAHGCLHLFHQEGLLALHDIHHGLEPNLDAEQEGLALQADLMGLLLQLGAHIDTCYFTYCKRTRVRENIIFMRTRSRSTQAWNRFCSYWPDSESTAENQTRTNSSRGYRH

SEQ ID NO: 944263 - protein, 127 aa, Homo sapiens
MICFLPSTVSPEFTVKASEWYTFEASSKVLSTESQALAEEQSFAGVQLNLPVWLVKGTKQFLNAFMVMSPRNLLEVEIQALQVFLEVSALVRSDSIAKVVAMLTGEKKILDLLHWCDSWRYSLESIS

SEQ ID NO: 944264 - protein, 138 aa, Homo sapiens
MPRVLNKELSIRPPEIPPQMNVSSQLATEGSSDFQKYTLALNARSQSYTLTLGPTLSLSAERSGSDPCPPRSPEESGVPRHQILQILHNGPSRTGSVSPTLMVSLNTVGGEAKITVFTQVFSHVDSSAGPHICTGPTM

SEQ ID NO: 944265 - protein, 136 aa, Homo sapiens
PRDRTLLYTGLRIVPRLVTPNFLCTPYVDIDSSAHSCCRVTHSKPQKHLSVNSHTQYPPRLDVLISRISEYARPFCKCISIQTDYSMLNTSNSSQVTTYTMCPMRNVSLPQTLQVGVQYAYQKHKELDDNDQGFAL

SEQ ID NO: 944266 - protein, 135 aa, Homo sapiens
MASGNRRQVVSNRELCEFGGGICQHIWGVANSDPTLLDFIQSQVVDAHTHGADDFEIGPCSIQDLLVHVVEEKPDQPVGHRHTSLQSSLAGMGSSEYHCSTSQCPVRESATLPKAGILRVTNALMTRSGLIHSAG

SEQ ID NO: 944267 - protein, 65 aa, Homo sapiens
MMSGERSIHSLIVHIGLCILEVENLPTEHYGSVKQALTFVLMWRKEHIDSLLYRDSFNKLCPALH

SEQ ID NO: 944268 - protein, 129 aa, Homo sapiens
TTSSALGTLAFSTNMVRNMVKFMVPGPSSIMSIKVCPSGILPYISMHITQMFHVDKSISVRISHVEGLYELRNLCLVKHGYHIGCCPFRTHDGGLDLRPYARHGGCLIPTPNNRIKVALREVTNHSKER

SEQ ID NO: 944269 - protein, 54 aa, Homo sapiens
MTGQAKSKHSPGTLISALSIPHGLVGMPILFHTSHISLKLAARIPFRCPSPKTF

SEQ ID NO: 944270 - protein, 74 aa, Homo sapiens
RQSALDNATLAYVIRTLSSYHSGNACTNKGIGSTKYTCMSLSCQVCKTYSSSYSIARRIVLRLIYRVFTPRTAI

SEQ ID NO: 944271 - protein, 104 aa, Homo sapiens
MSYATTLLCTQGVPKHAFVGFLSNVLILQMMQVSAVIHFVPTGVTPVQSRHVMRSLMICHMHTVSQDRATPRAGVGLPVRHTCHRSPEKSLSLYIYTLLSRSGL

SEQ ID NO: 944272 - protein, 45 aa, Homo sapiens
MSCNIAALVLNGGSGPLAPLLLITCYVSQKVAPCVRVSTTSTNTV

SEQ ID NO: 944273 - protein, 147 aa, Homo sapiens
  misc_feature (139)..(139): Xaa can be any naturally occurring amino acid
MGQKLARTTVKRPVKNLQSCMLHCGGTGCALHFRKDAYHVPRNVGVMIGDDRVVHEGLSLPGIDHLQSPLRHMRKRVYEDDRKSTRCSYSYTTLTQYCDPTYATYHHGRCSTSMTDASWAGDKLASSIMHKDHSHKRVXYSSYTNKL

SEQ ID NO: 944274 - protein, 103 aa, Homo sapiens
VATDAVIHNHALGQQDTPYPTPIIFILKGVLQPMQYSYEGDVKFYRVSRPLLLTCKVFADIQYYTVDYTYLKETPSLVNDELGRLNNLCENRGQHKDSLFHNT

SEQ ID NO: 944275 - protein, 141 aa, Homo sapiens
QHTYGAILCNSVAHFIGVSPECEFTWEQLEQLLTAQSNPLCCLSNHRIHLMVDANTTITRVPRMASLATSNVYNVQPLSSCRLCLKVCSCRSLVSSLVRRNLEMKVSTSRDLAYHGGGPCVEGMHGACVRSRPGATGTRPR

SEQ ID NO: 944276 - protein, 139 aa, Homo sapiens
AVDLVEGLVEKDHTGDALVDESVPEEEDFSELPAVLCSVCRLDPRQPVRHGTDRFMCSQDRLSIGNNALGNFESSLLCSWVRAEYRWAMVTGSLGDKSPPIYQELWVRQQLSLSLSLSLSLSLSLYLSLSLSLSLSLSL

SEQ ID NO: 944277 - protein, 117 aa, Homo sapiens
SAESALDSHCAYTTIILPSSFNSCKSQSPSTACSFSCLTLHLATGVGSSTWQVVSRVSISISMQLCGRLLRPHLLFINMVHGVYVSPRKVLIDVVYSLQSCFLSIWIIAVRLSINQP

SEQ ID NO: 944278 - protein, 42 aa, Homo sapiens
MNNPRKDQYVPCGTLEWLNLSRLVVAAARSRDQYALVYILSM

SEQ ID NO: 944279 - protein, 34 aa, Homo sapiens
  misc_feature (22)..(22): Xaa can be any naturally occurring amino acid
MPAVDHRITVAYLAKWFTYCRXCHADIHKLRWGT

SEQ ID NO: 944280 - protein, 108 aa, Homo sapiens
CFFQRVDIKNPRPAPKNFSPQKIKAPRVFSWPFFPKGVALKGFGENLGLTPLTNFKVNPCPGISRRANLNSACKNQVWPLKKGKFSFPFSKGFPPPLYSPLPSLLALK

SEQ ID NO: 944281 - protein, 102 aa, Homo sapiens
HCSPPGREFSKKYEATSRWLLATNIPVEWGHTWVQFQAHLWPWVCYIILSLSFLFSINPPCKCVLKIRPNIYLECLAHSRSLIAALLTILGAYNSRHRMFQQ

SEQ ID NO: 944282 - protein, 66 aa, Homo sapiens
  misc_feature (47)..(47): Xaa can be any naturally occurring amino acid
ELRNQGDCTLSSFGKLEPPFIRKVIELGTGQAAFTSSLQQSVKQLNXFSKEKESRALKKMVSGNFK

SEQ ID NO: 944283 - protein, 132 aa, Homo sapiens
MIKVCGMANHLPLFILVRQNMCVLDTSLVIYSPYSPLIVKPSSRIHLSVAVESSNSSGAIIFTHKGFIWFSIIGYVGVAKQFVRTGTLIPSVMSQYPQTYNIQDINGHQYEDRGLDVPPHQRNLLGRENPNC

SEQ ID NO: 944284 - protein, 76 aa, Homo sapiens
MKSSTNLLSCPEYVVSYSLRVIPEPVLSSGTVLTFHISAWYMSPASHSLSVSTRSNRTPQAKSLTHTSSLDLMLMV

SEQ ID NO: 944285 - protein, 51 aa, Homo sapiens
MDMLGRQYLFAQPSAYISNSTSGDHLYVSAVNVPHKVSIACQSRLVVSARV

SEQ ID NO: 944286 - protein, 119 aa, Homo sapiens
  misc_feature (2)..(2): Xaa can be any naturally occurring amino acid
MXVTFTYTPYSASAQLLSVLKISSRIPGVLIQVVFVIGTASIAIAGVFLVLRHASTEGVFIQYGLHPYRALRCLRIGDCAAFIMPYALVLVSHSQHGTLHMVSKFRIGISPTARNITHT

SEQ ID NO: 944287 - protein, 72 aa, Homo sapiens
LTGVVGRDACHCEVKAWDSLPGTCKRLSLGDESGLSIARRTAPIDIMSAIVDNSLQMLSRYFGHVYTLGLNV

SEQ ID NO: 944288 - protein, 123 aa, Homo sapiens
MLACSCGSHFWYSSANTESPAQVIRYATGCQRLFLSSAPRFLNTSTTVVVVLIVYFIGVLTYERILQCVIRYLLQQLIRFVYSTLRLSHRRFAFLARMGTAFISSHSGPALLNSALICLGQSH

SEQ ID NO: 944289 - protein, 47 aa, Homo sapiens
MASMVAVDGDRSIYKSVRQVAGNGLDDGEALRGRQRRKSTDDYSRSC

SEQ ID NO: 944290 - protein, 126 aa, Homo sapiens
CIKGTSLNSINMGLTWVITIQLLYKVGQYIASQLLLANYRECSHSLFFILNVTQRSISSFHAFERLINDILGMRLLAIVLSYDTCATIHFTRFHLSVYFSKAYPVSCFVLSSTLIRLIWWSAQSLV

SEQ ID NO: 944291 - protein, 117 aa, Homo sapiens
FFWKNNEHSPGIYSQPNLTQPTTVKNVLEHALIYGRPSTEIRYLEDDPLEAHIQLKARINLWIMLTKKKRKETDGHKSVTHEQILGMHKYGKKPVVVVRTQTQELTCEELSAHRVEL

SEQ ID NO: 944292 - protein, 78 aa, Homo sapiens
GAAKASALMMSGTLLVIWTLAPVRCAVLLRSRFTIAQIHVSHMDIRSILCKALIHEVKEILCSLFTFALSKREIRLLI

SEQ ID NO: 944293 - protein, 87 aa, Homo sapiens
VNYANLIRWDYFKGKSIVHAACKGATKYAEPLEQATCNILVPARTKPLLKGTHWSSLLKGGPGIRMEGGISSRDQYTPVIKTGLTVQ

SEQ ID NO: 944294 - protein, 85 aa, Homo sapiens
TSSIEDSDDQAVRYIKCMGIHWYVSGTGMRGENPPHDWMRTQLHWLPYKQLLAPDARTYQVLTELDDCGSHGHLGAQCDTPRSEV

SEQ ID NO: 944295 - protein, 86 aa, Homo sapiens
QVSHCYVGNLFANLVMYFEIGQLPVQTVQSSRSIYGRKCCDATFVSPTSCTYLPKERRKWYQVPGVAAMVMCSDIIGKLSGPALKV

SEQ ID NO: 944296 - protein, 125 aa, Homo sapiens
IGNHCASLVMRFVIGHATRSTRAVFLDNKGRKCCVATFTSLIRRMVFVKTVYNGINCRVCWHGHVYLTDFGKLWRPTLKVYSSQHAWSTWYSPVCVMHTYISLVCWVAFRVPEATQCWQDHRFNV

SEQ ID NO: 944297 - protein, 80 aa, Homo sapiens
RRVYYNKQGAVFSWGKSYVEIIGKADNNLSVIIQGWSKSGFCNTTNFMRITSRFRAYNLTLIMRVRKSRSERSSSGFLFC

SEQ ID NO: 944298 - protein, 141 aa, Homo sapiens
RVLRRVKASPSFNGGEVDDSVIVRADHLAFSVSQHALEGSPRRLIRDCLDVIIFGGYSRRRLRSTADTLAVGTRRAISVSFPYSSGMPMLHSFGSASIGRDDVLESPPAITSQFPYRPSTVFSLTVTAWTVVMSPSSIPQV

SEQ ID NO: 944299 - protein, 76 aa, Homo sapiens
LDRKKGILIFKHKGAFLKVQLPLIHTNSRPSFAGGASVQEETELYEPQSVMCQVQIVHPEAARISGSSCCTYGSRG

SEQ ID NO: 944300 - protein, 115 aa, Homo sapiens
  misc_feature (1)..(2): Xaa can be any naturally occurring amino acid
  misc_feature (6)..(6): Xaa can be any naturally occurring amino acid
XXNPTXPTGPKRGKRGFNRGKSGPILKIFRGINCRTNCMKLWFAPKISKNCPYYTPSHVTAKVVLFNPPGNASIFKPNGGTAYDRKTTWDVKLIQWGLNREDYLMLMQRVQGPSV

SEQ ID NO: 944301 - protein, 114 aa, Homo sapiens
MRNYWRNTYQPALSLINKRNLAKRLCHSYVLEPSVTEGITLSVIWTLRRDCIDIPIGSLPSLAKRLGHEEQTGALRQVKSNQVLTWGQFSLQRGPGSYLVMCGGVDMTLGIYMH

SEQ ID NO: 944302 - protein, 59 aa, Homo sapiens
MVPSDSWAARIAFPWATMLWAIFESSLFCSWVRSGNRWAMVPGSSREKSRPIYRKLWVR

SEQ ID NO: 944303 - protein, 79 aa, Homo sapiens
RGSTLFNYTEFIGFMGNFCVNWFPLWSSRIHQIEYVSHPPLYVFVQLCHKNSVLIQLLIGSSSGLAVLRCACRCQGIFS

SEQ ID NO: 944304 - protein, 113 aa, Homo sapiens
MYEPSRSPYLYPKRSDSTCYSQCATSYPITITQCKHSCVGKAIDIKVTCFLMLCALSDIPSTLHIPSNFISPQHGVVQACAAYCGDKRFEALKVTLLVSPPVRLLHGAPLTPE

SEQ ID NO: 944305 - protein, 133 aa, Homo sapiens
ARFWLHNELLCMEKMFFSSTDQFIQYLLQLLRIAVTRWGTELCIVLDYGLCPAGAHGVHASISTGDGDHMAALTSGKNCIGQSRCGFQHSVSPAFLVTDAARKCENSSQGENDGSSDIKPMFSLDRLQFSSVS

SEQ ID NO: 944306 - protein, 131 aa, Homo sapiens
NPVLEFFSASCMRLNKKSCEVPCGIGLQRELLVIRLSGYKVFQPCQHLKRLVLVVLQGVSSRKSTSHRVALWRLAVTCKFPSIMRHSQRHSLSLESKLVPKDNVTEYITDCAAQEHGRPDSGSASALEGVY

SEQ ID NO: 944307 - protein, 135 aa, Homo sapiens
PAKWARVVSLTGPHRGHTVPQCTSRSPAHVLVCLMSHSWLNITFSKATFRIGSLPVPLVSPQLAFSHLVPEAHHISFRRQPAQAHTLVQGHRSLQLEQHNLESLRAHTASWLLGPAVGLALHGVGSGTVCTNTSR

SEQ ID NO: 944308 - protein, 104 aa, Homo sapiens
MTKQGLSITILTRSCYICWNLPKWYPNHLTSWCEDPEDHIPAGDQLDLYQGAANNRKGDAEDATYGGLNTLYTYCPICGIICKTRWPKPFNDTRPKKNMDLKLW

SEQ ID NO: 944309 - protein, 70 aa, Homo sapiens
DKAGLECHHLDPLMRTFVGIKHIGTLTTKRVGQRPKDHIHDGDQLDRYQEAANNRKGLMLKYHLRQPEYM

SEQ ID NO: 944310 - protein, 95 aa, Homo sapiens
SYIYTGSGLVLKTTAGMSVFERARKPLKPYGEPPCPACLAGYCPGSPLCGVFDNNAAVAKGTDYHWSQDSIAGCHGRKPLGSSTTTLRKAIMAPP

SEQ ID NO: 944311 - protein, 112 aa, Homo sapiens
FVYLSAIFRETFQIRISAESSSTKYMGQHSHNTDLVLLTGPLANVLVNILNQLRRWAVIRNQLKGPGLNVGSCRPTVIIHRRLAFLKYLDDVGNPLIRYREARHVIDCSIHS

SEQ ID NO: 944312 - protein, 117 aa, Homo sapiens
MCVAPGPEVVACEYHLCMLMEWEDAKCLPVRFGVYFHLVYPFPRGKWLPGVISSLSEHMHGHINARTASDSIQTFDHQSTLWIHRACRDSLRHKSQYSETEEEQTMRSHPDELVPIP

SEQ ID NO: 944313 - protein, 115 aa, Homo sapiens
QKLLQSQICGFPEFIVFLLEEHLLKSHHPPGLGAQRCCSWEDKSVRCRAPLLNTDSAPQSEERCTYECMEVPALCGQLGTLTRPGGTCDSRSEVKSFRSHSRLDFPISQYVSSAL

SEQ ID NO: 944314 - protein, 100 aa, Homo sapiens
CREEHLFGLTYFPPRSPFPQNVYEQLSVAVLLVEGCVQKDRTSDDMVDESVHREEYFSELSSVLYSVFHPDPPQSVPHGPHPLICSQHPLSIGNNALGNL

SEQ ID NO: 944315 - protein, 136 aa, Homo sapiens
LCTKSCLVLASSFWYKYNHVSHIPPATVSITFARRFPGEVSDHRISVCSPAFHIVPTGKKAKSLHDVRSCSQEFHVKLANCIWVYYRYLCSPEPSLHITSHLQSNHKPAISNLRLPTVQALQNPLIGPWVSNTYHG

SEQ ID NO: 944316 - protein, 79 aa, Homo sapiens
ALYHQGTARIIAALSGKKESALVAKSPGVMFVNSKLVIWSQIRVNTQPKNIAFILSGLTGFRFQVKPETLPVRVYRYLC

SEQ ID NO: 944317 - protein, 43 aa, Homo sapiens
MLFMCISQFFKPMSNLTLVCISTTHTPGLSRAREKKKANKGYP

SEQ ID NO: 944318 - protein, 111 aa, Homo sapiens
PTIADLIEHETEDPGQLHRPSKSHQGAHQHQHRGPVCPQAPYQYLKCVEDAPEYAVGLIENSVLSQHMLHQPEDPCPTVKEKTREHLMPVPMSQSARYSRSRARAAFTYSA

SEQ ID NO: 944319 - protein, 224 aa, Homo sapiens
MGFKFWAIPAPALRESRCLLNIHPKHSKKPSLPQQCFAKLLSFTNQQLRSQATSHFFIFHFGKAVGIFQQRFFPGITSVSLKTESLISQDILGKSALFISSIQRFSMTASRVALVRSVTTWKRLQTQLWESLLKPSYCPCCESSFSKLLRLAHLSLCWQAKPSLHPKVLRAWQQQASFISSLQPFCKSSFIPLAKKKEFRGIKVSMSSGKFHISIFSKNVIITV

SEQ ID NO: 944320 - protein, 55 aa, Homo sapiens
MQDRIIGVHVTMKELCSKRTLGGALSVDVQIHERRAQPDGPCGPHKPQGYKGVVC

SEQ ID NO: 944321 - protein, 150 aa, Homo sapiens
  misc_feature (24)..(24): Xaa can be any naturally occurring amino acid
  misc_feature (29)..(29): Xaa can be any naturally occurring amino acid
  misc_feature (45)..(45): Xaa can be any naturally occurring amino acid
  misc_feature (48)..(48): Xaa can be any naturally occurring amino acid
  misc_feature (63)..(63): Xaa can be any naturally occurring amino acid
MPHDTGSVAKKRISATSEFLLLFXLRPFXGVQELLISVIVGTGHXLCXELFQKKLHYMKYPKXTCCFQTHESLVIGDVVMHIVDQFREYKIPLRLEFICPLPLVLHGETVSPRECLSSQCSPGPDSSKALSSAAAALSMSSGRGGGSLVP

SEQ ID NO: 944322 - protein, 94 aa, Homo sapiens
  misc_feature (38)..(38): Xaa can be any naturally occurring amino acid
  misc_feature (54)..(54): Xaa can be any naturally occurring amino acid
EGGSFTELKRVILVSMCAVATKWVGMSSMKNFDVNRRXSTKNRDRPVSPYDLSXLCEMHSVSPLYIVPNVLSAPNVYGYVIPDNCLETHSTRVK

SEQ ID NO: 944323 - protein, 118 aa, Homo sapiens
ASLIQKKETVSQKTTHCETECVRPSTHKSLFVTQHVGSQDRAGGTADHFHPPLERVLASRPKVVDVALKVQLEHVVFLNVLGLRGNGKRVPDQSQPAKGIIVLVCFVEDEFPQQVSRH

SEQ ID NO: 944324 - protein, 109 aa, Homo sapiens
MVAHGLIIVQYIQHYDFDPIDSRLFQYDIRQLFQQHGTMRYQCCVTLMSVAQALSSSSLFKSYNLWCSSGYVYFASTFLVRGVCTECVTVVAVAVRVNNARNSFSRSSE

SEQ ID NO: 944325 - protein, 45 aa, Homo sapiens
MTLGYNGRSPPCGTDIYVPQASVPIADTACGSMASLSAHSITLEW

SEQ ID NO: 944326 - protein, 56 aa, Homo sapiens
MKCSGQRAGPLCTNHAKMPAITRFHRYNGKMGKDAILYHPIYLASGGQWSSPRNTP

SEQ ID NO: 944327 - protein, 141 aa, Homo sapiens
KRGNETGSPYHSISRVHPSEPSGASGSSPVISSLAGSDHELSSGLLLYRVQCSCFKVHRIGVPERQVLLIQAPANSLRCIRALWLQSKSVRQCSLASSSCMALPVCCGTCISQLDRQDLVSGSLLWFTNVTLSAVSRRPDH

SEQ ID NO: 944328 - protein, 44 aa, Homo sapiens
MQACQTLVPLALSPGSCSQCRTALPPGRYSRLNGGPASDAQLRL

SEQ ID NO: 944329 - protein, 95 aa, Homo sapiens
  misc_feature (35)..(35): Xaa can be any naturally occurring amino acid
KKSEKEKVKKEEKGEERCGEEEGDERKEEKGERKXEEDKNGEEELGKEKEKEKRREEEEEKREEVWGRKRKGEKRKGEGEKKLFDEKGKKEEKEA

SEQ ID NO: 944330 - protein, 133 aa, Homo sapiens
MAKRKGRFTRLRSGTGCRPCLCPQGLAASGMQQAELAADSAAYTELAQCPTSSHPVPWQQTCTEATKTAPVHLEVGTMNIWPEMYVQYLDNDFETLLQALPPYICKAGEALPVGEGGLPEALQGTSLSIAPTK

SEQ ID NO: 944331 - protein, 119 aa, Homo sapiens
EPKNGSEDRPCDALMGPFWGIKHCAYCNPYTDGAENSIDHICLLYQLYCYQRAANNCMVDLEIKFTSAWIHEILPAKPGNTFEGPASLKLFIIPDAKKRLPALMETTNEGWICRPFTVA

SEQ ID NO: 944332 - protein, 129 aa, Homo sapiens
MFGLVQTHTYNGGEPVDIHQLAAINRKGPFGLYTKDRVKPCDTSGQVRDSMTAATGPIALIDHGRTIEKASPYGYVDIWVRTCYPENVRVHKSWNSMGHTQMKGTRGPVDSLDKLGMGNCGNLSIFQKD

SEQ ID NO: 944333 - protein, 116 aa, Homo sapiens
AHYTVHQVKLHSVIGVCEGVQQVGALAPVNQVTLVAKNDDAHEGGFDRLISTMYCQQIEALCPSYYMAYSSQTSYASLLHSIINSTSGDHLYVSAVNVPHKVSTACKSSLVVSARV

SEQ ID NO: 944334 - protein, 116 aa, Homo sapiens
AGYKAALTWPGLLLMMCMLSVQNIVIFAMYNVGLTVYVPMQHMESDGCGTCPEGDHNEASAIKVWLQVVVRPEQVRVLKELPVTHGSLRVSQLEGVQVDKCRARRCIWVRLGGGDC

SEQ ID NO: 944335 - protein, 100 aa, Homo sapiens
MLYTSSGLLFVITDSALGLHNFWTDQGSNDLVSHGRDPCRRLHRLSRSHHYVARTSMEAIDTERSIKWRVNKSHEIGRDYHEALRVRHRSLLMYDPSKKC

SEQ ID NO: 944336 - protein, 98 aa, Homo sapiens
MVLGCRPLNCTMYEQLVNSVWVYAAPEDTVVTTLSIGRLAVSYSQLHKTLMGALRVGIHACPGNECYVYKEPYIRQSYITWLWQRAKVDSVISMWLSS

SEQ ID NO: 944337 - protein, 131 aa, Homo sapiens
MNSGVKNLRSGSTGRRVSTMPGFGGGWSAPGSEGPVLCGGTGPAWTLQAIEAAGGSRVLAAWKPRPRPIPAQCAAPMQAAMPARVEFLQSGASASSRAAAPPVELLRVFQISAARLLPLRPRSANIPRARS

SEQ ID NO: 944338 - protein, 110 aa, Homo sapiens
MGDSWHGQICFQSTNCGIRTAIACCHRPWMLLNLRGPVISDVSKGQVAICLHIALLFCKFVKQVSLSQYGGPSSTPPRVCPFDKEAAIIPMVLHLAYMLRQFCLLHLICS

SEQ ID NO: 944339 - protein, 138 aa, Homo sapiens
INNHAGAIMKTSLGALMKVVDGPRAHKEDPHVRVCVDASGQKELAGGVEDSSAPQERLRKSAGRARVTYHAVLNQHVDHLRKVIVDHATSTDQETRGRRHSEGRAGSYSDRTAHRVWVGRPGRAWGALLQGPHRQPAS

SEQ ID NO: 944340 - protein, 107 aa, Homo sapiens
  misc_feature (22)..(22): Xaa can be any naturally occurring amino acid
GVVLRLHEQKSSRAVWQRREEXECLNIERSSAGDCQRDQPWDGQTPGEDYLLTPSAFQLPIHPAESLLHHSIKSLYSPSFKSVGPDSSWMLDKDPGTKRTGCKRLPP

SEQ ID NO: 944341 - protein, 39 aa, Homo sapiens
  misc_feature (18)..(18): Xaa can be any naturally occurring amino acid
MDTLVDRSYSWSGDILCXPMHRYFEAELDVCPRLFSKRA

SEQ ID NO: 944342 - protein, 104 aa, Homo sapiens
YACSALDSLCAVNSAKIIPTFLAMGSPPMVCLEEHGIQAIVCTLSAHAIHSIDMCTVEGHIFKEVLSRVKSRMWLIVIAAWFRHDVPLVPESDILRQVLMASSI

SEQ ID NO: 944343 - protein, 166 aa, Homo sapiens
MGQQVLFVAVPLLHYPDCRCFCHTVLKPASSGAIETDQMLHDLWKSVYGIFEYTKGTVTMINNSNIFIKYKTTTRERYIDSNYMHDLRIQSAGALTSIYTYTKGKQRTLVPYKVARPLLKTLRFIISQIISKITAYLPWIEGKSFLCDQWRNVCLSMENSELGNAT

SEQ ID NO: 944344 - protein, 91 aa, Homo sapiens
WVVISVMQEAFVSSRVLLSTAVSRFPIGFANSVHMCMICLQTGYEVICPSLQISLRHRMVQQMQLPQPRRLHGLQMYPDRDSEHRQSTASQ

SEQ ID NO: 944345 - protein, 80 aa, Homo sapiens
  misc_feature (1)..(1): Xaa can be any naturally occurring amino acid
XGARALTWLTTMTSAVMPSDSMSQNVIDREDSASEANGEAKILVRFSSLTFFPIKFSACVYMMLRAFYVAVVHALGVTQG

SEQ ID NO: 944346 - protein, 107 aa, Homo sapiens
LHRKSQHPLLKHPGATNEQWASYASHRGWCPYASSGVPLKTSMVPLSSRVVASKLQPSEQRSVTSGSGLVSPSAPFPWALVGGRGVPMPRAQHRLHNPQCTGVLTVP

SEQ ID NO: 944347 - protein, 139 aa, Homo sapiens
NPQTHPGASETPASRPPRCPCHKSLEGPCPQVGTDGHSRSRWRPGSTAPASFWGLPGTEPGSLDLLAHPWGPSCLVVQVALEDLGLPSPQDFLRAPGQLGRSTLFAGFQFPGSWTSGVFLGPQTDRPHKQEKPQRAQDP

SEQ ID NO: 944348 - protein, 101 aa, Homo sapiens
MGVECEISLAKSLNACSGLRAPVVLVFGKRLLLLLLPPPPLLLLLLSPEAQAADPPSPNIGFTSTSRPERYLKNHMELEKPTRESSTAASTAQDPPLRQRR

SEQ ID NO: 944349 - protein, 125 aa, Homo sapiens
KPLCTDITLMRLYACVNSHVAPEMVLHCEFLTADPTAVSPKPHTDKDTAVSVPENPKWNASSLIPVTIFNILTCNLLQRTASCLCPIRFPSDLSPEISSHGRAIEIHLLIISAFISVFIKLSFHF

SEQ ID NO: 944350 - protein, 125 aa, Homo sapiens
SSFSCVGVRDIRTQPLWLWVGGLGCDSCGLGRGNIWRSRRVCCRCGRVRGVLLARFVGLVCLAGPDQRFFHRGEEGSARPPLRVGLLGPLAPISYRWGWKREKSPVLCPYSHHVSHCERLSSPRA

SEQ ID NO: 944351 - protein, 81 aa, Homo sapiens
MGLASTFIEHILRLVTIPVFIDTQVGSQASQAREECFGISVLQRLDQRYTSRCTIVSAVEYNALEKQFTTHAVLICMLSVR

SEQ ID NO: 944352 - protein, 127 aa, Homo sapiens
LLYRFIDEAATGFRDNSKVLTADPSGIASYDQARLHCRFSKSGFAQPSYSYLWAGSWFPRQFVSSVRSVDRALQQMLMAAHHVFIGNICEYTVEAMAGEALGTLRLRKYLEHPGVSSLSEKLETGTR

SEQ ID NO: 944353 - protein, 120 aa, Homo sapiens
ESFIIIIWNCHLNDFLEGLLEKVLSLIAVSTHFGLFNDELNFGFVSKYLLQPRNAKSQWSSEWHTLSVSLPHKMSSGKDSNNASGTFTACLSPRASPHFSLKRFSTLCYRSVILALQASK

SEQ ID NO: 944354 - protein, 140 aa, Homo sapiens
RATVSGYSGEKRLGNLTLMPWNISVLVCKASTVVALTPGQSSSPQGQALHEGEGCRFECPVVNGTGNARQCQHEVEAHDVAILQLQHTRQKALGGPELAQGVNVLDLEEGIIITVHEALHMDRGGSVHQYGDVTHFLASG

SEQ ID NO: 944355 - protein, 137 aa, Homo sapiens
MNRLIPLVSDCHSMGMFSTIDPPPATRINSIDISFRRLVQLGSVICIHIANDDSLERLRGMFRGLHFLKVRRTVTYSLSPKIFFPHRFLSHNFGLLVHPAGEVQSGALSGVELMILLNCGDISVSVQELEHRYSARH

SEQ ID NO: 944356 - protein, 75 aa, Homo sapiens
MSAYSVPDKDDLANALLLLGLNRSHCQQPFGSARQPSAAGKGTAHALHVWPQADPFDRETHTLKADLAAISGLMA

SEQ ID NO: 944357 - protein, 117 aa, Homo sapiens
APAENPIWVSSLLTAIYLPLRYDCTQLSRLSFCKGPRKKALTLDALAEWTCPQISVFLGAAVGSLQCSAPCCSAAGYPWHLQIETFLSRAHVERTKMRWDSVTGRMGDQSPHRYVSL

SEQ ID NO: 944358 - protein, 128 aa, Homo sapiens
KKCLGPHGRSRPINESRYMLAMIQRDFIGSMTRALTVVLAIPLVHVSRRFLSTVGAAVNVGISLPECQSRLHHGPMLMRCTRQVHLLGESISGALVVQGLAVSAHGPSMNSNLLFARYREARHEFATD

SEQ ID NO: 944359 - protein, 78 aa, Homo sapiens
MAVSHCTGSLVLLWVLRLRLILQCLLSWVVCVTAVCPLLVQSGWSSLVTSLVVAAMVRRCIVRDSVRACREIERERES

SEQ ID NO: 944360 - protein, 146 aa, Homo sapiens
KKRKKKKKEGRKKKGKRKKKEKKEEKERKKKKEKKREERKKEREKEKKERKRREKKKEKEEEREREGEKRKEKERKRRKKKKRKRRKKDKKKERKKEREKRREKKEAQKKRKKRKRRGVSGSLSISLSLSLSLSLSLYLSLLSLYS

SEQ ID NO: 944361 - protein, 178 aa, Homo sapiens
  misc_feature (81)..(81): Xaa can be any naturally occurring amino acid
VLKKKIEGLQQWEPSNLSKLIRFSKVWPCVGSSRGRAIDVIGPVRLLHSNAHCGKDNLGPTPRHACHAYLDLSVDAMVNYXPSDKLLCIHLAMAGGPLRAIKSLTTIVRPMDVRNKVSVRESVRAYLGHVQIGLKQARTVAVAWQELELHAAQRTLGGRLQTNVNAQGFYPLCPPGQV

SEQ ID NO: 944362 - protein, 137 aa, Homo sapiens
MSCASLLYSIRYELVNARWELLTAYISIGSWTAPGYKAPVRNVKYMHDRTQVLIIGSVIVILGHVQEGLQQVNIVVVHQQAPGAHTTQGALTDCSVKIRLSLDHNPYTARHTRAELDRSAPYTCTGDTAAVGLRGTA

SEQ ID NO: 944363 - protein, 132 aa, Homo sapiens
WSSRVEVYICKSLKAGTVKYTPLVTEGSSEPSEQPYERAEHGHQQQSEGSPCPALLQGFKAGAGLGLLSLSSSGVVQKCGKYSGSVDSESDIPRDMLIQTLRQPEKYGHTVGKLRYRLRYKDNVAVGMVCAD

SEQ ID NO: 944364 - protein, 111 aa, Homo sapiens
RKNNDKMSSFFKLHPIVAGDLDSCEQQDLSVPPGTEINAVLLVVIPIAMVFSITKRRIGFLSWNHFFCNILPNAGLYDDHGIELSVYKRNNCPCCYHRDLNSLLVSPHLDF

SEQ ID NO: 944365 - protein, 203 aa, Homo sapiens
  misc_feature (1)..(1): Xaa can be any naturally occurring amino acid
XWNLCQLSYLFDKLIFLALQSISTFGNRKASTSSSVAYRHVCLLPLSYKHDLNNVLPMSCDTVTFASTFGLTNSFSISLHTLCAGSLSFLYASCIAMQTPFPVWVTQLLATVLPKTPCRVFTMQLHFRAASTASDVFAYTVTSQSIDFMITTVPPSQTVTTDCRLKPSGIIFCRIVGAMNPLTSVCFQPQPGNAITRSQCIRL

SEQ ID NO: 944366 - protein, 114 aa, Homo sapiens
  misc_feature (25)..(25): Xaa can be any naturally occurring amino acid
MASFGTSLGPDLGGLLSTQKCHVTXQFHFGSIPQSAESRDSSSMPSHVTAAPSTAAKGEGNPHVHQPMRNKLSVPHRRGATYYSALKRKKIRTHSTTRKRLGVVTPSGGNQPRD

SEQ ID NO: 944367 - protein, 125 aa, Homo sapiens
  misc_feature (67)..(67): Xaa can be any naturally occurring amino acid
  misc_feature (107)..(107): Xaa can be any naturally occurring amino acid
PQIYLLVEQFYFSQEGRCSWRNQLGKAGEKRNTHGGKIPASQRGKGAFSKITEILLMGRMKATSASXQGKQESNLLPRHTLDPEFWLFRPDRHLFSSAEMLMFQVEXNCDPISHASLNLKSAPPV

SEQ ID NO: 944368 - protein, 203 aa, Homo sapiens
FNNKNGKGDFSKRYKGETPVFSSAGLEPARLFEPPPQGGLGAGPPPRFFFTTGLFRGHSSAFIEPKVVGTGSLALASGCSRGQVGLKHNGLNSSVGGSLCSKSHKIAQEVSQFRSTFLEEGCQLLLFLYKVRLGLGIKLWALHLPQQVLTIVSRGLKVLRNQALHTWLLCLSQKKSSLKSADATQQHSSESIFMLARAIFLQP

SEQ ID NO: 944369 - protein, 119 aa, Homo sapiens
MERGKVASARELVLVVQQRFLHRLVAVHHHHALRAHVQREHRPEALGNREGLGISSIPTEKVPDDGKLEKGLGADSKLLCTCLHMDTSRRKPAPTSRAPVTPRPTWGRWGLLPAGRILK

SEQ ID NO: 944370 - protein, 167 aa, Homo sapiens
MLFQRPGINDLRPLWSVFPLNWFSLSRLYSCKSIVHHLLSYAASPIEQSFIIISPLARRAQIPHSVNFYNMFYIFGVNMMSFKKSAVTRAFQCKQLLQVLLEELRVSVPLLLELVRGGFGHHLHPEGAKAAVRGLATAGQLVRLAFAPGAAARPGTANLGPRLVLNS

SEQ ID NO: 944371 - protein, 152 aa, Homo sapiens
ALIGVETPHQNASLGSMNLANKQYYAIPRSRVFQGPWYSGNSRRFIRVGWGARIAIITPSISVIFRAPFSGIWCLPSGIVSVIRSEEQSDVKSKEPSFSHQCKRRSMSAQPAVPLQVFIEMWYFVGFILDRHSQKMSVYLDSCLQIMQSMLT

SEQ ID NO: 944372 - protein, 90 aa, Homo sapiens
MFYILGVNMMSSKKSPVTRAFQCKQLLQVFLRKLRVTVPLLLKLYRVVLATPPTREGRKPPSGRLAPVIQLARLPLPQVPPPASARPSRG

SEQ ID NO: 944373 - protein, 74 aa, Homo sapiens
  misc_feature (34)..(34): Xaa can be any naturally occurring amino acid
NLTCCGNSQESHKHTVHQDWATVGKTDRLSPFSXIVRSAPTGTVPHIRISRETTRVSQISVVLLSASGWSNAAI

SEQ ID NO: 944374 - protein, 157 aa, Homo sapiens
VYTYEVSSLPADSSDIILVIPLSTSASNATTQFCISISRRQKWILSNEVTFPRSAEPSPGFTELCSLVSSQINVKSSDYVLPCADRKLGIKSETDVIVLDCHSHRLIDDYITLVHLTTRYVSPYSAINSMQLRLPYESVIIVVNFFAMIIQCFNVAI

SEQ ID NO: 944375 - protein, 94 aa, Homo sapiens
  misc_feature (38)..(38): Xaa can be any naturally occurring amino acid
DAVRKCTDMRPGACEYNKVGLIKLMVRKRHSYKAWAVXMVLVLMWAVRTINPWDRLGFIISRRHDVRDSSELVMTLVYCALLIRRLANGGGLIY

SEQ ID NO: 944376 - protein, 116 aa, Homo sapiens
  misc_feature (10)..(10): Xaa can be any naturally occurring amino acid
  misc_feature (53)..(53): Xaa can be any naturally occurring amino acid
MGTPACEYKXNRFHQAMAQETSRIKAWAEIQVLESTVDTYGFFSSCIDTILGXDGACKGHQYVDKTEFHTSPVDMMYETAAYWSYSRASCTSHQAHSKGWRADLLNGVAGHHELVL

SEQ ID NO: 944377 - protein, 156 aa, Homo sapiens
  misc_feature (10)..(10): Xaa can be any naturally occurring amino acid
LAPCMLVTTXVGSPSTNAQETSPISAHDCTLGLEGTARHTDSSVNVETQYLIMLGLVNDINPWIDWVAYNSERHVVETAKYRTYSRASCNSHDTQSRGWKADLLYWRTRVTQSCIWTNIIFSDNQRCTTPADFIWAAIYAFIESQCLERVHTTGRH

SEQ ID NO: 944378 - protein, 134 aa, Homo sapiens
MRQQRTGLSPRHHANLMTRIAGGGRLISCMANAGHQSCIWTTLVFSDNQRCTTPADFIRAAIYASMESQCLQRVHHTGNHYSVCTWSKHTHFACTISSSISRYCWAHLRYESIGKELTDHGYRPIEGMSGPASR

SEQ ID NO: 944379 - protein, 204 aa, Homo sapiens
SNKKIVGSLSQSPAARPHSANDLLHVLEGSAKIPTSSVHGIIQNRQLLGIVQDLNPVVCMGRINSEGPSYCGSRVPYFLLGIIKTLCHVIQRLILRDSVILMAVFSSSIGISYVFSDNQSCNSPKHDRSTAPYAFTESQCLQSAHSTVTQYIVSSLAMYSPGASTKASPMSWQNWAQLRSECKGTCPHSSCPLSGRGYTWAWIH

SEQ ID NO: 944380 - protein, 111 aa, Homo sapiens
MREPIYTGSAYASMLGALFSYHKVTWGPLGTPSVTHSHIVCSNPLGPCVVGPIEVSGFPYVGPEWKSLLFRPVPWTAVIIFALLFNLLSGVLSIAPPGKVNIVSKVFVHCS

SEQ ID NO: 944381 - protein, 108 aa, Homo sapiens
MPGVPDNPIVCFIRVGAAVVYTIQVCRVTPVNHRARLILFCAVPFIVVMISVPRAEFHSLVTSPPLHLRMKLPRKGISSCPEYPNIARKSLILLDSHSVIRSLSPRSI

SEQ ID NO: 944382 - protein, 111 aa, Homo sapiens
MSFGPRFNNPDVQAFAPPMPGVPDMPVVCFIRVGATVVCTIQVCRVSLVNPAPRVFLFCAVPSIVVMICVPSHKFLQLVISPPGHVSMKLPRKGLSRCSRIFPNMCLEECM

SEQ ID NO: 944383 - protein, 201 aa, Homo sapiens
MFFSASTPLGKREGGGLKPLVEKAVLDGTHFEHGYMGGMESWEFSILNSVNQGGFQRLNGHTGQWVYVGPKSVGRSLIAIDYKESTQQANVGNTFTGFVYSLEGALVEPTVGVSYVPHVSPAARVIFFWAVPSIVGMFCAHGREFNLWVKRVTKIVRMDLTHKAIRDCSGTPLRGQVVKMVYVPVFEIQKRRIGGRYSLGR

SEQ ID NO: 944384 - protein, 212 aa, Homo sapiens
LFFSNPNSFTRSNQPPNPTLTPQPPPPIPLNHLTHSYIHPPPHTTPPPTPSPNTPPYNTPTPPPQTTHNKYSQSPPYSTPLHPHTHTQINTSPTSPLTYPHHTTTTSLYFPTPNSPHPSNHTHHHPPHPTLLSPLPPPPHYTRLTLSPSPKPTPTPHTSTHQHPTPPPQKTKPPPQHPHLHPTYTHPPTPSSYTKQTQQTPHHHHQPHIQTN

SEQ ID NO: 944385 - protein, 236 aa, Homo sapiens
GGRRGKRGGAPRPPVGRGPKGAAGRRAPGVRALCPVGSRRGKGARESGAHLRPGGARRCAPVGGGEARAPPGLGGPPSTKARRWGPGPPPPGGRGFRFRPQRALRPVEGPEARVGNVGCSPPWAPGGGRGRPGKRPTRHAIGLGCAAQGRMGRSEQSPKGRRGARPAGGRREQGDPMPSGVGHEEGDGLRGVPRAGGPACGAAPVPNSPRGGTRSGKRLFFKRTPRPGPPPPPSCR

SEQ ID NO: 944386 - protein, 115 aa, Homo sapiens
MAKKPRFNYLKARGKRESTRGFRVEVEVKFEGKLLKSAKNLARLKKEGYLRFQQGPRVEIEGINLLQTKAILNYIASKSNLYGKALKERALMDMILEGLANLGERILLLPECPPE

SEQ ID NO: 944387 - protein, 53 aa, Homo sapiens
  misc_feature (5)..(5): Xaa can be any naturally occurring amino acid
MVHMXLCRQGEVGPQVIHLEFHHLPHDHSRTRYKNLELSDSHMWVQGCSRSAE

SEQ ID NO: 944388 - protein, 196 aa, Homo sapiens
  misc_feature (35)..(35): Xaa can be any naturally occurring amino acid
  misc_feature (152)..(152): Xaa can be any naturally occurring amino acid
WPGGCPPLVPRVWGLPWPRPWVSAAAELRPPSRAXALGSRGRPAPRVPCLIIGVPPMVGRPNLWSHALVPRVAFSGVLGAYPFVFLSLAARWGCSLLCGGSRCVPFRFPRFGGIKRCPPVSPRFLGVKGSPPKAGADPACEGGGLWTKGRDXRPGAKGAAPPLTPSFFLCLFGAGGAWPGGPGPVFSLGRGGGFFF

SEQ ID NO: 944389 - protein, 125 aa, Homo sapiens
RRGKGDYFRWRLKAGKPIKGPPLVNSTRRTLGSRRFLFSGAKPFLKTYLVRSKLVLDPVYPLEIFNVRGETIRETKMVLRPSGVIWKGMGLIWKLMVPINRFHENRKSIASFRPVWQILSILGIH

SEQ ID NO: 944390 - protein, 71 aa, Homo sapiens
HYGRKRGINWFLKGGDQSGFSNALGEYSLREYYGFAEWLTTGHYKVNMEIMAWGKMEFQIKIRTSKIQGTM

SEQ ID NO: 944391 - protein, 124 aa, Homo sapiens
MRENTTLMPGVADNTIVCISRVEAAVVCAIQVCRVTPVKQPASLIYLWAVPLIVAGKCEHGDEFHHLEKAHHKGNRKKIPRKGIFTRSHNLSLSLSRTNSLYLTLSLSLSVSLSNYIPWCGILQ

SEQ ID NO: 944392 - protein, 51 aa, Homo sapiens
CGGLVVRECDDNLKALSDSPLLSTSFLAGGGFPVSYNRGSLGVRFSLSAPR

SEQ ID NO: 944393 - protein, 68 aa, Homo sapiens
PRKFGHNGLVGDCRHRGFCHLNLDPNLRSNQYNRGAKIFQHSFLWGPPFLGLHGLLTCQANGQLRIRI

SEQ ID NO: 944394 - protein, 129 aa, Homo sapiens
  misc_feature (50)..(50): Xaa can be any naturally occurring amino acid
MTFTRLQVCYFAALGGIFKFKSLLFVHEDSALLLGHLGASPFVPLELGGXTLTCTEYELRPGKQVMIHASLTSSLLTQWWTMKNALKLKLVAPKPKLKTKSKGKYKETANAPYIHSATYKSKVRLAPKT

SEQ ID NO: 944395 - protein, 158 aa, Homo sapiens
PPKNFFWGNGNKNFCEQKNLHPPLWAGAPLQKNTGGAFFYVPQGKRALSSKGVFSHQRGFGGRAPPPCLKNPAPPPPTNSGTKFWGGNTTPPRPHLHTTGGRPGFPLGGEIAHAPSGEKEKHQGAAPKLKNKSSLREYFPSPPQNEEFLRSTKRGFSH

SEQ ID NO: 944396 - protein, 124 aa, Homo sapiens
NRILMGKKPVSKESRELKGQLLNGSQLLHVRERQPPLLYFFYDGTHSGGGPVSWPKLWHFLCHSGFQCGDFSLIGCTLHRGRCASPISRLYTFVNIFSRWFSRNKLHISCSDTEHSVFIYHFAS

SEQ ID NO: 944397 - protein, 104 aa, Homo sapiens
  misc_feature (8)..(8): Xaa can be any naturally occurring amino acid
  misc_feature (56)..(56): Xaa can be any naturally occurring amino acid
KRLVSDWXSFSQRRQLFDKHEYPRFPPVVSNELLHTILAFFTTRHHACGGPVPFTXLRLLVRPIGTDLSGVTPPRVRALCGKVFRLGLHTLFAVNMFNTSLSDL

SEQ ID NO: 944398 - protein, 163 aa, Homo sapiens
MRIACSTVVFYIVLQSRGSVCQTQTLTAVAACQSIEIVDSSVPPASLRQASRAPCLLNVHLLQVFVGGVLIAMVLHLVQVPLLWGEHWIILRDPVADGAILLLRQPHQLYTLAVPLPTAITSWPMRALLLRLKSSRGGPQNSRSSQNPPLLGALNIIPLPSRA

SEQ ID NO: 944399 - protein, 129 aa, Homo sapiens
NSAIMAGKSSACWCWLLEDAAGETQGRRGKVLTLDLEEVKGNILGYKLDHKLKPCAQASRSRWKLPPEAVTMTGELEVKTMAMKPGYTLRITGRIADGTDGLEINLGQGTDKLNLHLNLGLSESTIAVN

SEQ ID NO: 944400 - protein, 99 aa, Homo sapiens
REIRPLWPEPEFLVMEVGKTTLILKSDSEKEKAWFNKLSPFIREIFLNLSMVPYWMEGFNLVTRANWINSLINRLDYLVTKGRIRRYQILSYKGPGSDP

SEQ ID NO: 944401 - protein, 110 aa, Homo sapiens
MDRPRKMKKMNKLMQKGEKPRPLEGGKAPQPAGNLRGQANQLALNFRWAIPNRQINDGMGAYADDMEIFMEGIRELRRYLREPPLRNCMRILMGELSNHHDHHDEFCLMP

SEQ ID NO: 944402 - protein, 112 aa, Homo sapiens
DNFKLRACGLGRFFPFQPGTFAETMLGRIMGQARRHPTWIPFLELMGTGATGAPLNLWRLAWLNPKVGGTRITPKPWTKRGPKDHSRFYSGKGDTSRLKEGFPEATSDQFST

SEQ ID NO: 944403 - protein, 114 aa, Homo sapiens
  misc_feature (24)..(24): Xaa can be any naturally occurring amino acid
MVFFEKNHPFFGFKRPKLGRNDEXMWCSTLMSFLRARYVQDLLLLLLMMILIATICQYLLHARHCTKQVTPGEEIYGTDINELGITLLGSTGEGNSNHGLSELYNCYIYLEVCL

SEQ ID NO: 944404 - protein, 87 aa, Homo sapiens
WRGLSSLLPLVSGSLSALRLQLIMVNLLQIVRDHWVHVLVPMGFVIGCYLDRKSDERLNCLPETKEVIVYFKKGGICQPQVKKFTWK

SEQ ID NO: 944405 - protein, 48 aa, Homo sapiens
  misc_feature (46)..(46): Xaa can be any naturally occurring amino acid
SVAVNQRAFNEVCNPTHIGMTMTRMILKYYDAEIVITIRLPRKTVXKP

SEQ ID NO: 944406 - protein, 74 aa, Homo sapiens
  misc_feature (46)..(46): Xaa can be any naturally occurring amino acid
  misc_feature (61)..(61): Xaa can be any naturally occurring amino acid
  misc_feature (63)..(63): Xaa can be any naturally occurring amino acid
QVTRNTFTIGRHGRWRQHAAIYRSMYADLIIAMTMTPDDTIIPEVXDTVSRIRITQKNLSXSXQSTDRKGPFLL

SEQ ID NO: 944407 - protein, 248 aa, Homo sapiens
  misc_feature (235)..(235): Xaa can be any naturally occurring amino acid
CHVASKWITCHHLLFKTVYLLKIYPCKWVKLLLTETYTECKGNLKYKLATQDPLDTWKYHRVHIKRISKGLLRKCKEKENRVNHRINLMINGRSQGIKAKFIMMVMEIKELPHMDTQTIPQLRLPKVSYEFSHLLHENFHIICICTHPIIDLAIEYGPSGFTICHRADLLSILHKLMHLFNFLAYPCRLLILRISREVHSVTLASRPGRFSRPNATRQVRPWELPWPILEPGDRXVKRPHPRLQFVLY

SEQ ID NO: 944408 - protein, 134 aa, Homo sapiens
MASGGFVRAKSTDTTLELLQMSACIEDIHLYLASQTCAIAETLPSFAHLEVTPYATIALSGNCKTNLNNVIEGNLDMVKPAKLAKPLRQRRLANPKACNESGCSLTIGRLHMDLTVSMSYRASTDNCQDHEVQT

SEQ ID NO: 944409 - protein, 108 aa, Homo sapiens
ALRPGNRRSRKGRCRFLGGKVRVPTFRLIWKVLAPASQNAREKPAGGLRPVEEDDQFEKFPAENWPALNEDEDAHVWKDNGNDAIVKDDFFNKFRPDLGNLGYKRETS

SEQ ID NO: 944410 - protein, 67 aa, Homo sapiens
RKFGHYGRKDGLIFEINGLTNFTIRFRVPFLTKFWPTLVIFGLADNTHFKGGKGKSNGAFNWNSPDN

SEQ ID NO: 944411 - protein, 196 aa, Homo sapiens
MEVVCIYFYFGPQSKYSKRCTRIRTFYLTQGLAYFAQENNICQVGPSLSKPERPFALKSIPTPLSSTGLTHPPHLHFSPLPSRTTANVYRRTSVSLPLPPPPNHPPFISSPSSLAHKFSRSPSSTIITVALFPLSPVRPTTRLHKYKASSYSPTLLFLTSLSHCPLILPLFPHTSLQLHFLLPLPLSPFPSSTYSY

SEQ ID NO: 944412 - protein, 69 aa, Homo sapiens
DPGNSAIMAGKVIEKGRELVAGPVVVMVARSLNPTRGTLRANRLFWVLIKKVLLTIIILMAKVPNLGVK

SEQ ID NO: 944413 - protein, 182 aa, Homo sapiens
PFVGVFFSHKPPCLPPPPPRARARSSFFPPFPPPLSLLEAPFPFSFPPVASPPPPWRRPLPPPHLSPLPPSPPPFFSLLAPPPPPVRPVRPPSRGRLWGRPLYAAAPPPPAALAFLLPPPPAPASLPPPPLGPPPLKSLRPPSPSPPALLLPPPGPTPPPSRRPTLFSSRASPPPPPPLPLS

SEQ ID NO: 944414 - protein, 124 aa, Homo sapiens
MAGAGPQGRSPCLAAFPIVPTLKLFEEPGLLLTIGSLEGVWVRKQAREPWVWEKVRSPKFKARAKSNFERSRDQLPPLIRKAEPERVNFWSYSGKLGPQPATQGRVQTMAFQPKLAFKPPTGQS

SEQ ID NO: 944415 - protein, 103 aa, Homo sapiens
MPKGRVLAKNLDEEGFESEDCVDDDNECMGGSDAGMIKVMNQLRFLAELAYELDAHDAPESSQQAPPKDNEISTSYNACNVHSPLKLINSMVISGPCCFIMAQ

SEQ ID NO: 944416 - protein, 165 aa, Homo sapiens
GPKIVYYKRNPTKMLNNLHRDPGPGHKGPIPGNQHNGALPEKKKKPPPNLGAWGNQGHSCFLGENVVPSQSLKPYSFFAARFHPKYPLKFPRDNPGKPPHRGICSKKPPPTFSAYAAPPCDVNARASLSILLGHPNTLGIIIGQRCSSGENGFRSKIHKNTTPEL

SEQ ID NO: 944417 - protein, 109 aa, Homo sapiens
RNKKDKAGQKEARAPQGPQTKKNEHKHTNKASKTPEETRADSPTHPTHTKDQATDRPRTTRQAEQDRTRRDTHRKNTQQPKRSPQRNHKKTHTKTRRKTRTKNPKHPRK

SEQ ID NO: 944418 - protein, 132 aa, Homo sapiens
MLQFQNQRKNCLKKGHDGRPGLYRDFLKLQELSPALMGRNAGSHTKGPLHGKKKKRSQRFGTGGQTGRWGFPGENGAPPQTVGVFVLFWPPVFIEKPRWEFPEETGALKFCPGGCGKKNPPVFLAYWHPPFR

SEQ ID NO: 944419 - protein, 214 aa, Homo sapiens
RFCFFCFGCPSDWGGRKGKRTPGPTGPLGETPTEDTAPGTNKKTARKERAWTDTRATGGPGEHAGRMQTAENSVKHGAVLYANTPREEPDGQTRGNPAQRPPGTTTRTRLPRPPPRLGDGHGARAREPPRAHHKGPGASPRRTPGTRGTMGGRRPTAPTPPRRQPIRGRAAGPRTRGAHPTPRGAPIPARHPGARTPARRGPSNNPTRAAEDGR

SEQ ID NO: 944420 - protein, 70 aa, Homo sapiens
QEPYILDSGGKDDVEGLLGHLRMVARKGPVDLALIKGYRRGVIEGSNGGQSAYNVNLHVLGGRQRHGPPG

SEQ ID NO: 944421 - protein, 122 aa, Homo sapiens
GSIYNPEGLDITEETLHSRFLKGVRIVARACLQMGYPTVASVPHSIINGSKRVLALPVETDYTFQLAEKVRAFLADPSAFGAAAPVAVATTVAPAAAAAPVKVEAKEKPKEPAKDMELGLFD

SEQ ID NO: 944422 - protein, 148 aa, Homo sapiens
GTIRGFKGTTELKGKSKVEEGSDMSTVTSQLMLKVHREDDGVQGICQVEHLAVTGNLQTQRNLEVQFKPKGHIQMTNPLQGLTRKGDALELTCEAMGKPKPVMETGLKVDDERPKHAELSGPNLLIINLTKPDKGPYRCEASTIVGKA

SEQ ID NO: 944423 - protein, 70 aa, Homo sapiens
PPSSEAALDPRLPKENCDWRLPKCYEPLVNSGIAQTNAGVLRSNVNGARIFLGCKALNSYYYTRLNIRTC

SEQ ID NO: 944424 - protein, 154 aa, Homo sapiens
MAGGGSARKPNMAVPGALILRESPSMKKAGALVNAIDSGRFPRLVNWILQKLHLKAESRFREEEEEKLYAGFSLEEPDLYLGLGTISFILEQAGDHNGKPGTLQQQLEDIHLRPGKAEAFGNTWASMGQGTGEKVRQRILASLKLETGGWQLNP

SEQ ID NO: 944425 - protein, 145 aa, Homo sapiens
QDQEMEDGLAFKTFLDHLVPKLIEAGEVKNAEILRLKEQLREMENLRLEGQQLLEKNWFLQGQLDDIKGQRETRDQNHPDIQQLKNDQEESFKEGLAKGKIVEKMLKMKADLEEVQSALYTKEMDCLRMTDEVERTQTLESKAFQ

SEQ ID NO: 944426 - protein, 68 aa, Homo sapiens
GLKEEFLGIQVKEESEEKEDQGVEFKRQKEGLRPYLDEKRLDHFLSKGEGRLPSRALKGAWMIYFTGD

SEQ ID NO: 944427 - protein, 105 aa, Homo sapiens
FWPGIHLGRESVLKVGPFMNGWGLKKCGVKWEPGRTHLMARIFREMVAPFNFWPLGPLLNSGGKILFKFNKLSPIAGTGLNWGVPGDYLVKWAMGKTHQMAYIRG

SEQ ID NO: 944428 - protein, 142 aa, Homo sapiens
LEYVLIPHGIIVDRIERLAKDIMKDIGYSDIMVLCVLKGGYKFCADLVEHLKNISRNSDRFVSMKVDFIRLDLSTLAGKNVLIVEDVVGTGRTMKALLSNIEKYKPNMIKVASLLVKRTSRSDGFRPDYAGFEIPNLFVVGY

SEQ ID NO: 944429 - protein, 192 aa, Homo sapiens
PWKKGFFPPPFFPALRAQFPGPHPRGPLPEKKKKAPPPPGPGEKRGKGGSRGKMGAPPHGWGPFFFLAPGFPPKPPGIFPPGNPVKPLPGGTGQKNPPRFFGFSPPPWQIKPKPPWGFFRGPQKGGGKQGQRGVPGGNGSPPTFPPKNAPGEKRGNPAGAPKGGATPHFVGAPTPPAFTGGKLWGPRCFKNR

SEQ ID NO: 944430 - protein, 112 aa, Homo sapiens
CVGPRKFGHYGRGNGQDISLEDSRLRFNLRAHYADDWGHVAPNSRLHQMCRVRDVLDSYKVPIQDRPKLDELRASNLPPNWPFPEQGACSLDLWILYHVKYYQNCSLNPLFL

SEQ ID NO: 944431 - protein, 118 aa, Homo sapiens
HFFFFFIPLQMRRPPKKTKQKTPPAIKKEYIHSAKWSPLPKKTRNSPPRFRPLARTKKGKLAPPKTFHPKRSPAKNIRAPEKPPKHPDLLPRSHRSKLTRGGPHNTHPTKPLSHPPPL

SEQ ID NO: 944432 - protein, 101 aa, Homo sapiens
FGHKGRGLWRPGQKGFQRLPDPGSLDSKALRLFFGPEFKSRLNPKPAKAGENNPNWNHMDQGVYNHGNAEVEINILKAEKNRLARQILRINLKKENWPESD

SEQ ID NO: 944433 - protein, 66 aa, Homo sapiens
FQNDAKVGALFDESGQTKERPEVVELEFHPLMASMEHLAVDINDVAAVVYKCLTDVARATWFSQYG

SEQ ID NO: 944434 - protein, 111 aa, Homo sapiens
QKLELPLRGKSVPGLRDLTGFRIPLNKFKIVLDIDQLSRTLVSHFLRGTKPFLEAWFIYQAHCLGDELLLIKIAKALFVWHEQHLFNCKKVYKVVENANDTRYGLAPYVFA

SEQ ID NO: 944435 - protein, 176 aa, Homo sapiens
GARSSFLSLRLLSPRNLPPLSLCFFPASPNRALFFGQKKKLSPFSSPLALILPSLPLSVIVPRPPILQVPFSFFASFPSQTPAVLYLPGFSPSYSPCCGGAGAHSVLSDHFAFFAPLFLCLSPSPASLFFFAAPPTFLPTLLFPFFSPSVNPVLLLSNLVPTILFSSPPLLCSPSL

SEQ ID NO: 944436 - protein, 96 aa, Homo sapiens
LPRPYGPITGILPNFPPTCYPHQKAPHPWPHPQALVTSFPWENLVTLHIPDHIFIFSPPFFLPQFSPPYSPLNFHPVNPLLRALLRKKSPPPISSL

SEQ ID NO: 944437 - protein, 136 aa, Homo sapiens
  misc_feature (66)..(66): Xaa can be any naturally occurring amino acid
PRCMWGRAPLATPGERAPRGCAELSHRQQHEPDPCIGRAPVECRLLREAGPTSARAVGQVRALGRXWGVGPRRGSFACPGPISFPVPRARVPGAQARAQRPPELPEGPGGQSVLEPPPVLGVGALREERDGPRVNG

SEQ ID NO: 944438 - protein, 136 aa, Homo sapiens
QTRARMCVGTYVDSEGHLYTAPIIANTGNIYKPNNKGMADELSEKQVYEAHTKEIDLCNRDPEHLNDDLVKNDFEDVNAEPRRDTQVVTRFGGRFTTFTVTYWVYRLVCGLFGIPMALIWGIYFGILSFLDIWAGV

SEQ ID NO: 944439 - protein, 143 aa, Homo sapiens
MAEVHVMVLDGHGHVMGRLAAIDAKQVLLVQTVVVVHCEGINISGNFYRNKKKHLTLLSKRMSTNHSRGPYDFRTRTHIFMADCATYAVSLNQTRPGRSGPSQSAGLNVMPYDKNKQMVDPANLDVRLKTTTVCLYGAPVSRV

SEQ ID NO: 944440 - protein, 73 aa, Homo sapiens
GLSRGAAGAPKRAYHKLGKFTRKRSRMPWTQWTFAEGGGGKLKSSRARGGNFVKGRGKCSRRQLNNITQMQLA

SEQ ID NO: 944441 - protein, 133 aa, Homo sapiens
VTFIILLYLFSALNLTGVGSRDAHSIEGDYRFKELSEENVIALEQNGWAHYHKQCACEDHVPLANEVTDTARTWHADETAEERDKRLYTTLWRHYYAQMLLCVKPMVKGLTARHNTIQRDDVLLAARLTAILF

SEQ ID NO: 944442 - protein, 128 aa, Homo sapiens
AERLECLRLRNEIIVEFDELLLKPMFRAVEKIKTIGRTYMAAAGLTLALGHENQELERQHAHIGVMVEVSIDLMSELDAVYRHFFNCFRLRVGIKPWASECCSDWGPPQSDIWGNTVNVARRMGTGLG

SEQ ID NO: 944443 - protein, 78 aa, Homo sapiens
QFLDPSVLQQVDDIRQIYLSRGLTKREIVAVAKPAKFSTRYIVAWPLSKIWLYDTAGICASYNLKGPCQLKAMPHVSR

SEQ ID NO: 944444 - protein, 69 aa, Homo sapiens
MTRHADRIISLITFAVGGNICLGFTAHRIKRAEGWEEGSSTVLSDFHWTNISGSCKDKCIELRGWTYWW

SEQ ID NO: 944445 - protein, 42 aa, Homo sapiens
MLEELVQFWRYYSLVLCVTLDGCPLLHTIVYLVSVTPDSLAF

SEQ ID NO: 944446 - protein, 129 aa, Homo sapiens
MLAQEDDNDYEPYSKANHMRIEVDLTLGYDHPGQEDSYSSYYKSVIATCKSNHYDLTYQMNAGALLTILAELMAEPGAKIDYSKHNWHMMIESEVMETMYDAFTITLSMKLITRRVTSITAMLHVPNVA

SEQ ID NO: 944447 - protein, 119 aa, Homo sapiens
MKAEQSTIPMDDRKIRAPSSIVDPSASPAHLVCYRLHATLKAMSRQPPELSHSNAALHTSDQHSVVVLAQLLSRMIHVIDIPETGPIASKAKSGTCAGPVDGLFESFRYAGDTPMYLLD

SEQ ID NO: 944448 - protein, 146 aa, Homo sapiens
DTLSQIHLAPLFVNPTLDWALGTMLGEQFPELCSSPCPPVEVTIEEPGTMDMGKHMSNEYYMRYDTAEAGFSDDDEDVNSRGMKSTCRMHPVKQTDLEDSVDITPYLGQLDEYLTHIALQFQLASHTEARAKSYTKSWPRCAGRLY

SEQ ID NO: 944449 - protein, 126 aa, Homo sapiens
  misc_feature (1)..(1): Xaa can be any naturally occurring amino acid
XAWANRKKISLVVIKCGLPVMEAAYFYHRRMGFLFQKHSPYLSLVQFVFSLCVPEPVTGRADKRAVIIIDYSGVRRMDAGKPPSIHPDFSFPVGKNYSNTWQDISLKGKSFQLDFFLQFIPIPKMS

SEQ ID NO: 944450 - protein, 115 aa, Homo sapiens
HELVVCTHRRRERERASRALRRSCAFRARGGSPLTQGTKGPTWLVIYHVTKKNTHCETLLNHNFKRHRKGYLLATKAPTPLEHKSIIRVQTTPDYRPQEGFTNGITRAHKRAVPV

SEQ ID NO: 944451 - protein, 116 aa, Homo sapiens
MLSGERVGPELMHAVKEVVKGVAVPEEFQEHHLSEVHKGAINGSIPQKEYKGELGSYEMPLKRKLDFNANVIHGSDFLVYELDNNYTWEHLEPHKGVQILGHGSKGVNGVEVDTSQ

SEQ ID NO: 944452 - protein, 204 aa, Homo sapiens
TRGRERYEVNDMDSMRKIYHETYMLTTRARGERATDLHIEHEFMVTIKKKRLVNTPYVDNFYKRAGGGILATVGELLKIGNAMVYEGTKVGWLRTQMEIFYLDTLNQKHMGMKWTPDPNTEKSWDKEGEYAMAWGVCGKQTHGSRIKRRDYASHTGRAQGATRVLGGLSEKLVHETLNNKGSPRGIIWSIICDMRTVGLYHRYV

SEQ ID NO: 944453 - protein, 103 aa, Homo sapiens
MAEDIIWDIRESYYGESLCLANYPSGFHSVMFNPVEPRMLATAHSKDGVALWYIRLRDVLLRYGGNLSVRAMSVLLNSDQTQLLGLRRHLSAVLYDIQSALPV

SEQ ID NO: 944454 - protein, 95 aa, Homo sapiens
VKRLPVSTSQMYPDEVHMLGIGDGTRAMPQSEIGAFEYLLWPLTLLRIYWWNRYTTWVMHELYVSHEGYPKLKSLRPDELPVYTDAPRICMTTVI

SEQ ID NO: 944455 - protein, 146 aa, Homo sapiens
  misc_feature (8)..(8): Xaa can be any naturally occurring amino acid
IGGGEALXAIVGSANTRPPFTLTPDYRRVGRTPPIVSDIPDVTVTPARLLFFAPTRRTVPLEDMAPAADAIMSTEEELDGYDPQPLGKRSNVLPMMELLREFGNNTSTDGSIPSLRRQQTMEDELYRMTMEIISQYPPEQSTQPQD

SEQ ID NO: 944456 - protein, 81 aa, Homo sapiens
VILVYRSHLIYSVLCLEGIILSLVIIGTVITLNTHSILANSAPIAILAYAACEAAMGLALLASISNTYGLHYVHSLNLLQC

SEQ ID NO: 944457 - protein, 84 aa, Homo sapiens
MSSISCFWDLPAPLLRLAPYCQPTMTSQRRHNHFIDVDASDDSLITSSLHAFYTYLSMRFYMHRHDLTLEGVSQFLHVDREPRG

SEQ ID NO: 944458 - protein, 129 aa, Homo sapiens
  misc_feature (98)..(98): Xaa can be any naturally occurring amino acid
PAGLSLALTECGRNRYGDSLLDSDRPPIFSPLATSGTIFLGIFCFWDLPAPLLWVGSSCQPTMSFQIRQNYFTDVEAGVNSLVNLYLEGSYTYLSLGXYFDREDVALEGVSHFFLQMCPEREGYQRLLD

SEQ ID NO: 944459 - protein, 81 aa, Homo sapiens
MKLITILFLWFRLVLRLTHESQSEEIDCNDKDLFKAVDAVLEKYNSPNPSDNHVVLCRITEATKTGGSDTVYFFKDVGGGC

SEQ ID NO: 944460 - protein, 130 aa, Homo sapiens
VGPYRQHLCCSTPPTVWVHTDSTCAVRLPPLCRCILTAPVLFDSPHWVGPYRQDLCCSTTRRVGSYRQDLCPSPSCQTVRVPLGSPPGRCIPTGPVALTFPPGRCIPTGPVPLTSLSGRCIPTRVCRLAR

SEQ ID NO: 944461 - protein, 124 aa, Homo sapiens
IPRAAGFGTSSIFPDGHLRAGGVRVQTQHTETFGARSSLPLVCFSKGQFTEHFIIYQDMFLEETRHHAQVVKKVNEKIVTGQYGRLFAAVHFASRQWKVTSEDLILIGELDLACGERIRLGVLL

SEQ ID NO: 944462 - protein, 227 aa, Homo sapiens
ATAGCLAGQPLQERTHAWCERLRARLEEMDSRTRDRLDEVKEHVEAVRAKLEEHAQQILLLAEDLQARLKKLVLPLVEDMQRQWAALVEKVQAVVGTIADPVPSDNQLNAEDCSHATSRHSVTPVSSQAEEGDPVPVPADLLVVDPSVIKMHQVSRSGAIGIMKRKNSWGGPVPKLPIVRRIKYTGRRLQRRDGKPCRSQLNVLRTTPFSAGEYKEADISSSKVTCW

SEQ ID NO: 944463 - protein, 169 aa, Homo sapiens
  misc_feature (137)..(137): Xaa can be any naturally occurring amino acid
MITQQEMAGLGFKPGSVCCHIPHSHCLGPSPRKLETVSFLPCSPGESTGTCAYVEGSSPRQAPPLSTHCEEKRAPFQAHLLTVRILLAELRSERSGLQPKGPLLLFRRCAQLGRDLGPCATPFYGPVITTPYAGARXPEHPSRDPASAVQATAMGWFLGTGRAQARQGP

SEQ ID NO: 944464 - protein, 100 aa, Homo sapiens
EIESHSKLSYSAPTLRSDYSLPFVAHMYRITPCYLRTLTTDFLPEHFDTLTPMCTTEGDTCLTYEGLDRQLISFRAPATDRHAYTHRKYLPEDFCNGLEH

SEQ ID NO: 944465 - protein, 102 aa, Homo sapiens
MVAIGEVISLVKVFTECRAYWGITWVGRNGQRYQKCDYGGNLLISFGSTVRPQLVPAENCRDFRNLGPEKFSTKLGKIGFCHKCGENSPFGGPQGGGNPFFF

SEQ ID NO: 944466 - protein, 163 aa, Homo sapiens
DGKRPGKCPAPNLALPGVLCIKPSPYRWGPKKPKSLGGPPGPSGELTPVGGNAQPLPPGKGVFSGEKGVPLKPRAPKKGVGKIPPRFFWGASAPQGKGPPGPPPPLGQKTLGNPFLSFPPPPPGEGFGAPLLGPPLFLKKKGGAELFLPLGNPRKNPPGEFGP

SEQ ID NO: 944467 - protein, 188 aa, Homo sapiens
KQQWTGHSKRVDGAVTDHIQAAEAMKGTEWLDPEDPTAIAENELLGAAAAIEAASNKLDQLKPLAKPKEEDESLYSEEQILDTANSIAAATTALLKAASDVHRELVAQGKVCAIPDNALYDGHWSQGLISAVRIVAAATNNLCEADNTAVQGHASQEKLISGSQQVAASTDQILVGCKVKADQDSEAM

SEQ ID NO: 944468 - protein, 126 aa, Homo sapiens
MCSLCSLLLLLTPCLPFSPCPVPTLPALILLHFRLPSPLRSLLCLFSLSIAFPSVPVSPLSITCLTASLLLFLLRLRFSRLCIIFSLSSLPLPFSFPILSSSLPFPPLSVSLSSSLFLSPLLSAFP

SEQ ID NO: 944469 - protein, 214 aa, Homo sapiens
  misc_feature (158)..(158): Xaa can be any naturally occurring amino acid
FPTLKTFILGPGKGGGGPPLLGVELFRAPPKSPKKANLEAFHNGQKALGEVLKRGLGLFDERAKMLGGLGVELGQFGPPVFFESLKGRGQALAQFVFLGGQILAQGFHMGAPRGPHFPAQGVKFFLQLGTFLAPPPFEEFGPQGSTFGGESSIFSWHXFMEVAKVGLHLGPNPPQDLSNSPAKGLGLFYRLPQNSWVQGPLFPQLCKGKSPSPI

SEQ ID NO: 944470 - protein, 114 aa, Homo sapiens
HEVLPSPRGQRVIPRITIEMKAEAEKRNRELRMSILKEALKKMVWNKKAYNKDYEKRQSREPGTQTKRQTTLAFKPIDESNIDVPLRETAATESSNTYTIHTWIWIQMDISDID

SEQ ID NO: 944471 - protein, 134 aa, Homo sapiens
ARADLRQRVYIACLLSRAPSYCWHACAAWSLSTWLRIHSEMLPRPQTHCTMIRSTHPATRSPPTLVQSDFNLITELYTRLRQHHYHHLITEHSYCLCDALHVDQRLTLTMRLCRDRISLTAMTEAQIHAGYRSI

SEQ ID NO: 944472 - protein, 134 aa, Homo sapiens
APRTDTLSRVTSARTGSPERSSVSDGLEKAMEVPPPAPWIFLCRAESLFPRVFAVEAVTVDSEVLEERQKRLAYVTEPYDPESGWDRLRELIGKDEQYRISKDLANICETAATAGIIGWVYGGIPAIMHAQLHW

SEQ ID NO: 944473 - protein, 119 aa, Homo sapiens
AGIRPKGHSLEHQMHKLKGGDRAYVTSYMRLNLTLLTINFLSLPTDQMLSSSEQHLPKPAAMTEVEQLDWLRDPIQNVGKVSRFGCHQHSFYLIMSQMPKKAFQQDPEDQRLPMSRLRC

SEQ ID NO: 944474 - protein, 111 aa, Homo sapiens
MGDHACSFLKDFLAGDVIADDSKTASILIQRVKLLLQVHHAVQINAVLLSLWWGNLDNVMGTYPTKLTTLGSRTTSSPSDYDDPICISPDDAILDRTYLSVDPVMPCLSCG

SEQ ID NO: 944475 - protein, 100 aa, Homo sapiens
AEAMLLRMRECARSSGGYVFVQSMAAGQADKDSERDNANAHLSHRELGYSTAVTRIHRHFTTTATSHGQQVVNADGFSGFILENLTANVLKIGTNAFRLV

SEQ ID NO: 944476 - protein, 97 aa, Homo sapiens
CTGSAVGLTVVVVVPYNNACMQKLNKNSSKGYGKTDSRSHTAGHKFPVDRIPSHMKTRSSIHDRVGATVAVYSVRCLENLTAQVLKLTGNASKDLEV

SEQ ID NO: 944477 - protein, 130 aa, Homo sapiens
RRRLERRAGSGRDRVTADRRLQDMLLSNAGSSDITSATKAGWTQKPKRRGQAKEVVKAQNWRMAEPKFMHQHVTLSPDKRRHNVSLRLSFRTDNHHDAKEPVLDTDVEMARWRMTETLGIKYLRPCIFRL

SEQ ID NO: 944478 - protein, 77 aa, Homo sapiens
CTSEIGHMTCRVSLQQHGETWAFTIRDYSVQDRHFNIIAGSDHFITPAWSLLSKDHTVINGTCSGVKDCTNARLPCM

SEQ ID NO: 944479 - protein, 71 aa, Homo sapiens
QTFTECYPPSTQIFMSYTAYYASMHPRMDLYAQMTSPGLYPMNGNVCKGRQQVEHPQKRSDRTMNGDHETY

SEQ ID NO: 944480 - protein, 121 aa, Homo sapiens
ANLNFVSTPNPDPFRDNPFTQPDQSTPSAFDSLESPDHTTENTSRSSTALSNGPLNGDVDYFGQQFDQIYNRTGQQEAQAGPWPFTSSQTQPAVRTSPYCGKPCQWTVHIEWTTATCALTV

SEQ ID NO: 944481 - protein, 126 aa, Homo sapiens
MPIYSWRLILQLTGQSDLGPGSLAEESHGDTATETDTCYHDQYNSTISMIIYHLADLTSEYSVSCLTRTKGPLTYSAEGASVQPFIAIHGDQGCQLGRNTERPEPLAYGHTIGSSSASTASYVPLA

SEQ ID NO: 944482 - protein, 33 aa, Homo sapiens
MHSPMSIGTGVATLSLMTKADTHDDDGFQASPS

SEQ ID NO: 944483 - protein, 98 aa, Homo sapiens
MTTSLKHPDFVAYPMLEKPVGSLTGIVAFLGKKLAERGFDMAYAVLVQFLVLKKDEYLLDYGWTLVAATPINPGTFSDAFESSARLLVMLSEVLIARP

SEQ ID NO: 944484 - protein, 75 aa, Homo sapiens
MPKVLLPLNYPTSGYGRLSMRATTRDRHSVTTAVRHGKKSQAENDFFESNPFNINQTGVRYTRGGDPESVAGELG

SEQ ID NO: 944485 - protein, 120 aa, Homo sapiens
MTSDLSGLLLSDLRYQTRQLTCPLRRLLTIHSYVTDRGLSLLMLLCLTILVIQGSPLTSCKYNALCFYVTAIRRDDARTYAVMVEQMSSSPSSPSVATAAQARATKACVLSIDALMILSQ

SEQ ID NO: 944486 - protein, 108 aa, Homo sapiens
QSLNSGHYGRTTIPRFVSCPPDIAYESHMTQQTQLDQMPSPSFLTHVKESLSQVLAVSEDKAPTNLYEKTYLTAVDELMDLYSHSATYMSTYTGILTGQGLSVLKGQW

SEQ ID NO: 944487 - protein, 124 aa, Homo sapiens
PVLQEDSQSLLGKVDNTLSVIPRPEVTAKARHPWGERNLAFYGPPDGEAWSQAKEMRKAVPEGCLRHTRHSKNDEEVHMEEMLAAAYTWTSQDATESSLHFTPALHKTPLGAAYTLHLDCTRRH

SEQ ID NO: 944488 - protein, 76 aa, Homo sapiens
MQNYYPENVKRFGIPEFKTSLRPWCFVAAKGYSPYWANAKPEIFAYWTWQDLTEQGVATFKASTKSWTKFEECMFA

SEQ ID NO: 944489 - protein, 83 aa, Homo sapiens
LIHELYQPRDGFQLSLGSDLFTDLAVYLRDTSVSALTTLYLAYSVPTYSRASDGAMKHINDHAADHTQGLIVDLLKTLDAMRT

SEQ ID NO: 944490 - protein, 140 aa, Homo sapiens
VGGHDYGILFIEDDHAGGEHLVFGRASVDFAGQLEQRRQLTDEAIHQAVRAQESISLERCLRNRAGEAAYPGRAILRATEALSDETRIAQRATHCIRAVQSHMRLDDSIQANPYPAMRTPVPCNGCNAITLLPTSRPALC

SEQ ID NO: 944491 - protein, 100 aa, Homo sapiens
MTIEHLALALEGQCSAQALHDAMRCAASISHGKECLSSHWLHQETAHEHLPKTTYTRSGDELMVYSSICTHPMISHTCICTDQCIAVLTVDEYQYDPPSR

SEQ ID NO: 944492 - protein, 110 aa, Homo sapiens
MPLQAVNCRLLAQRAASRVAPNRRRWDQRLRPGCHPRGAVAPHSSHMLLIFLQETVHELNIFRHFEPELTIGMLVISCVTVCYLCQHAMECHHRIEERSQSVLESTMTTV

SEQ ID NO: 944493 - protein, 233 aa, Homo sapiens
GLQEFGPSLSELCTDSRATCFRHYDAGEGLSTRNTSHWLLNARADSNYCNLHTGAIYDSVIDLNYLHNICQCDATPGTFDDTCLAHNAKLGIKVNAITIVQDCDSYTIQVSDANAKYVNWATVILTTIDKAAAHVIGAQRLIISAPSADAPMFVMTSNHDTYDNSLMIISNAFCCTNCKAPLTEDIHDNSGIMEGLMITVHAMTDIQKTADGPSLHCVVMLTGLCSIMRDYLA

SEQ ID NO: 944494 - protein, 112 aa, Homo sapiens
RERDRERDRERERERERDRERERERECELVLLRLSSSPSSPVCAFLFPFLPSCTSPILLCSPGLWLCMCSYYTYHDFHFLCTRTCLHVPSLVTDSSSPYYSVLSVSVHPHLL

SEQ ID NO: 944495 - protein, 101 aa, Homo sapiens
ADLSPRDTPQGEDMLNAIRRGVKLKKTTTNHRFSPLLFLRSQEMRPWGKNWFINPKLADPFHSIIKPKNLEATRNIALLKGLDTFRLEFKPTHGTGLNLDL

SEQ ID NO: 944496 - protein, 152 aa, Homo sapiens
MYASHYTMKKPGGCATIHFYLIPGSRPNNRRRRLETITVLGALIAQDHHERRCCMLLIHVMADLTHRLNCDNPWKLQQEPTICGDTYRPTPRARNVDHAPRPRAHPRKSRLGPDAGKPRETARNGRSQPTPHPPAPLHELTRRTLRQERPGG

SEQ ID NO: 944497 - protein, 107 aa, Homo sapiens
MRERGLDFGNQGLDVDGVKVKLLMWDTAGHERFRSVTYAYYREAHALMLLYDVTNMDLLVNIAGLDDRDSLSTPEQDVRPMLVVNKGKYGNDRVVSRLAGLNLFNES

SEQ ID NO: 944498 - protein, 148 aa, Homo sapiens
  misc_feature (96)..(96): Xaa can be any naturally occurring amino acid
SARCVEGAPVVCMSCGGDMSDGVLKEGLLFKRGHIVHNWKARWFILRQNTAVVLQAGGGSGELAPLKGRILLDGCTMSATDWNMLEDRALEERDDXAFEITRAIHARQPGKVQELHRLRNSFKVSPHKTGRIVDKMDRGTPGFLKVQH

SEQ ID NO: 944499 - protein, 135 aa, Homo sapiens
GHNRVLYQAVSQSSVTLEYVKGVDNGFGPDYQLAMKAGPIRVQKMSRPIYKRVLDREFNDGILENVALGANVTGPWMCDHCVAGNAWVYINVCLERDTVQDKVRELSAEYILQCFRRNYTMDNGVATSRVQLHGP

SEQ ID NO: 944500 - protein, 99 aa, Homo sapiens
MRPDYEFLQQDLSNADQIPEQTGWNLRPVPESLGESGSPFLGPSFQVALAGIPRQTGPLAPGQQTDTPPGLPEKKRKSADFQTGDGLAAVCYERDTSQY

SEQ ID NO: 944501 - protein, 146 aa, Homo sapiens
RCYTASYNRASDSGHLSHLFSASVDETRFANREILSTTKNYQSVVSTFIRQCEVFFYTGEIVQTTNIAGYFTTSNPGTVVGTNGATSAVVSIVALVVTTTSTNWILLVSYDSEVNADTLYLYRQSRHTCVRVQEYTVCFFQMDHIG

SEQ ID NO: 944502 - protein, 87 aa, Homo sapiens
MTSRKKVLLKGINLGESGVGKTLLMNQDVNKKFSNQYKGTIGADFLTKEVKVDDRLVTDLSNPSDLGRGLLVVCLCTHMSPRVWQQD

SEQ ID NO: 944503 - protein, 82 aa, Homo sapiens
GCRIRHEHEIETSLCNTARLCLKKKERVKVKKIMFLYYCVGLTLWNFWTILWELLLCIIRFSLTVVGLMNFHLYSDAKAICI

SEQ ID NO: 944504 - protein, 41 aa, Homo sapiens
  misc_feature (35)..(35): Xaa can be any naturally occurring amino acid
MSPEEELDRFQPETFGKRAAELAFIYVGGYTPYTXSCSLSC

SEQ ID NO: 944505 - protein, 161 aa, Homo sapiens
PRAVGILHETPFCALACRTCAEYCAVPTAHTRPYVNLKDELCVFQLWRASVSQALEGPVKPGARIFFFDGKDVLRAPHTGPNKNVWHGLDPNGRTLTESYCETWRTEASSGTGQGFLLLGGKLSGAQSRELHNTLVLWIENRLMTWLQVTTAWMHIGRGPR

SEQ ID NO: 944506 - protein, 137 aa, Homo sapiens
FCGSRVGDQPDPTDHMIYLLTTLSNCHQDLIVLQHEYADVCITLIVQSITRAEQQILSVQQYGSHLVADSSLDKEHYNDAQHLRDWYRTYANSIELGSLVASGIITPIHEHGEEANVCSRYRESLCYHHRGGLTPDD

SEQ ID NO: 944507 - protein, 77 aa, Homo sapiens
MPMSVYAFTGFWSDVSTWCEVESEVMKSDYESGDHGHFEERTIPALDFQQHPGSLTLNFPLCLTLEPRGDVSDRAVL

SEQ ID NO: 944508 - protein, 121 aa, Homo sapiens
MTAGVQQMRHLGLIPGVITKHLVMLAGTTPAKELYLSDNIEDDSIEPVVLCNSSPILISCYTEQQMLRRLVDGAPRIPVLVIHSSLHTSQPCETPLVRLAAHRRLLRTYEILRATLLLMIL

SEQ ID NO: 944509 - protein, 202 aa, Homo sapiens
FNFVLFKAEKREKKVRPPILGKDPVVSIKKLAPMEFSRRPIPGKAELKQLNLRDTAIPIPSFLVKELPRAQESEDRLGLARAKKTLNRLTSNIGDKTAPGRGDVHLPPGWVKASPISDVVRYRVLCPEDLRAYADPNTGRADPPGALIVRRRSRFIQEGAIIRVEEHVCSNRKRQQQVPAHALDFYNNLLQILHCVNHKPQD

SEQ ID NO: 944510 - protein, 140 aa, Homo sapiens
EPLSSRRCTVRCLGRSLEHQGYWTAADESCYRPGITRNRRSARASTSCTADYAITILCLLTMHAEYIRSETYIRYGADEQNATVLYTHGSYGTGVIHAVGDDAICDTTGDMIFISGSSSEGYPEPAHCNTPHCLRHYLLE

SEQ ID NO: 944511 - protein, 111 aa, Homo sapiens
LLPMWSIQCLELTELLKRPHEAAKSHLLAEVAVTCTVFPQPVTSQCYPEGANEALLTPVLDPDAPSSTTLGAPGLSIAGSPPDYHVLLAASTGYQMHRTHYDLCHTFMGEV

SEQ ID NO: 944512 - protein, 68 aa, Homo sapiens
MRHIGGKVEFNIALMSKLDGINRHFFNFFGFAWAYNHGPVNAGVNGARLRMKYGKHCECGQANGPVAW

SEQ ID NO: 944513 - protein, 127 aa, Homo sapiens
WPHHHYNSCGVNDPRWDIYCHLLCVGTRVESLLLRFTPRLGHHIPLPRTAHRERMYLDCGILRWLFEGSHEAVLMIGLGQVLAAAELVDGKLTVLAINVVLHLSEVQEAHLYTMTISCGAYDARHGF

SEQ ID NO: 944514 - protein, 163 aa, Homo sapiens
  misc_feature (1)..(1): Xaa can be any naturally occurring amino acid
  misc_feature (5)..(5): Xaa can be any naturally occurring amino acid
  misc_feature (23)..(24): Xaa can be any naturally occurring amino acid
XYALXTAVVSADSASPHQPSAAXXRADLLTTRSGRCFSVARRVVVLRLCGASCVSRRRTLRALVGVYSPHERLYTVYSARVARARDTRVGVVALSDAQSSGHVSLSLSHTCLCERTDTLHVTHPVEGGHTAKVESLRARGPRPVCRAPLVRGTLRSGSTCCWP

SEQ ID NO: 944515 - protein, 105 aa, Homo sapiens
DIEVKTAHEALSGETFSSEQGQFSVTRKHATYAELSGPVTGCDEPGRRLLTEVKCRGLHVILQDFRCTRRRIAATRKPTMQPMMPRPVKYEEGQAAIKARADKLT

SEQ ID NO: 944516 - protein, 106 aa, Homo sapiens
LKCKTSLGIDYRKPLSLQRAAKLAEHGGMCLQAELIRVLRLWITQAQQFKDAVSYDSVTVLLNGQQSTTLTLKLLLFNQWCTDNLFTRELLTLAMSQAEIIVHVIR

SEQ ID NO: 944517 - protein, 85 aa, Homo sapiens
  misc_feature (3)..(3): Xaa can be any naturally occurring amino acid
SAXDTLLQSIELPPLNSANNAQDFLRMVQVHGELNLAHNAQQRLKVALGASRKKLSENIKYRRFNSDIFHRADTYYHQIFTGHFG

SEQ ID NO: 944518 - protein, 125 aa, Homo sapiens
GPETERPVPDKSQQTQTSSPVHVSDRKPTMHTVCWRLLPELCCSPLLLDYRAISHGTTERTWLDTESIRVTGTKADVALLTVMLPDADEHTDILLMFKESSRAIDDRFGKQMIIEGFANSDCDVL

SEQ ID NO: 944519 - protein, 98 aa, Homo sapiens
MFNVGPDADTYRLTYAYFAGGDAGYAFDGFDFGDDPSDTFFTSHNGMHFSTCDNDNDQFERYCAAQDGSGWWMNTCHAGHLTGVYYQGGTYSQASLLG

SEQ ID NO: 944520 - protein, 71 aa, Homo sapiens
NFYKDISYRQDGRNMSTRGAVSCHDTLMSYTLITLSIHYALTKLFFLDRNRSKHLTQSEARHPENFLLSHM

SEQ ID NO: 944521 - protein, 200 aa, Homo sapiens
SCGGGCSASERLSPPFPGLEPESEGAAGGSEPEAVDSDTEGEDIFTGAAGGSKHQSTKITTSLLPINNGSKVGSMKNKTKSHRISLQMPQWSYTWTAHTIFETKVLVPTYEELEEDEQEDQFDLTVSITDPEKIADGLNAYAAYKGTSQASLPLLRCNRLQYNSRFSDCVERYETLCEQHSQNASLCCTAEESLICMTEW

SEQ ID NO: 944522 - protein, 33 aa, Homo sapiens
MLNFRLTTPDCIYFTLCNLAQSSRFLLITTMSS

SEQ ID NO: 944523 - protein, 127 aa, Homo sapiens
KEKPEGVELDTDEPSMGFKAHLSALTGVHTVRQKDYGERRKLYDDDVGKHQNKKWNDSTNDGVSRCSSIRTLRPVFVEYMTEEQLVSAMESPCGLANLGNTCYMNAKLNVFDVRLLDALITAVLRVC

SEQ ID NO: 944524 - protein, 111 aa, Homo sapiens
MNAKPTPMSELILVAVKLLVPQTVHAAFYNPVELHQPVYQRSYQLKFMLTYCGRITVTSLNSYYIIWHLIMDIFWLSYQDRILNVIPFFMTSFHGIGTRALLAYTLTCDSH

SEQ ID NO: 944525 - protein, 66 aa, Homo sapiens
MLAILDLRIAKLKMQLTKLDSEAMPGELDSDRDRMMLINGRMAADAMRLLAPAVYSCLELDRTRSR

SEQ ID NO: 944526 - protein, 107 aa, Homo sapiens
KGHVETFYVNAWRSIYAIHDVQGTPMFRYQVTERQHLVPLAVLDEEDNSVRYIILIGDLRPVRHSMIINCGIMTVYTQTLSRCIYLHAFSTGTSSEFSRLNLMHVVV

SEQ ID NO: 944527 - protein, 113 aa, Homo sapiens
MCNCHMHEPAPSLAGRARCRRGALNTGCCMLVTVVVDDQVTIVYYLYQQQRRMDLLTVNSDNLHMENLRMKLPKPCKPVSKKHMGLTRDEAGAVNAALPQMHMQNATKYEHDT

SEQ ID NO: 944528 - protein, 107 aa, Homo sapiens
EETASSLSLHGKGSYRLSYSKYDTYQLFSSYSSQKEDRDVVLTTTLVDDIQAMPTTYDEREYYASLAYGTHYSSSVSLGGLYELIYVSDTAIMMRIGVATRHTECLA

SEQ ID NO: 944529 - protein, 132 aa, Homo sapiens
ETHCVHGVDVEEEQNATVPDLEPLREEHAPPVIYYVPDFISIEDDEYLLRQVYNAPKPRTQLSVDSDRTGVGFLIAQGRILSGCHHGSQRYVDTVTDLNLCGGTHSYTMCYMNQHLPVEGIMSHTHSGRVRP

SEQ ID NO: 944530 - protein, 86 aa, Homo sapiens
ARGAADALQLRRGPKKSAAAKAAGPPPQLTLPTAAIDILREGRAPGLRLSRALEVARIAALPSAVAHAYTVITALWEAGWRCGIRE

SEQ ID NO: 944531 - protein, 111 aa, Homo sapiens
TLRTVTLYRVTYARTRSPERSSMSECLEKAMEVPQRHRGAVSVEHSAYFPVTLLSTLRLSTCKSLRSIRSSLHTYLSPITQSLDGTGYWSCWDATAGIIGCEHGVPAVIHA

SEQ ID NO: 944532 - protein, 114 aa, Homo sapiens
PFYCLAVANTEHQDAMDDSIMDDRMSKIYHERCLDYTEELSQVNLVPEFPVTTLNALCQPVTSGGLPIIDAEVKLPSCCDRMEIRLDYGLDGTAGIFGHDLDDLSLRTRAFGHW

SEQ ID NO: 944533 - protein, 74 aa, Homo sapiens
RIYRIQEEEAAVNQDCTTALQPGQQSETLSQNRSEKIQRTLEEIIRDSERQRLKDWWQGVMGKNYVNEPQRATE

SEQ ID NO: 944534 - protein, 55 aa, Homo sapiens
AAVSIYWNSGETADRCVEQETYMNDGYLHRDLYTNLTGSMSPYAGVMTDDVHALW

SEQ ID NO: 944535 - protein, 79 aa, Homo sapiens
VLCGPLPPSVLDRRGILPLEESGSRSPSSQETSGSLLPQSPVPTEHLYSNEMPEDSSTPEEMPPAEPPEPPQEAAAADK

SEQ ID NO: 944536 - protein, 236 aa, Homo sapiens
ESCASLLAECALSLNIVLTSSVYYPGDRSIDCQLLLPSDVIDDVTLFCHTKGTGLDLDVSFFLHSCCVCIHLYRCTCGVFVTAQLDWTGARVDTIAAGLLDMLDISDYPHDLSLNSRETVVTVTIVHLLHMTEILIIMPMLEGARFDASLYVHSDDSRDVWDHHYECIAGIHDLIMTAENRYPFLVALAVDADVDDAAAYRDDATPNDNDIIAYALGDAITVLKQVTLLVISGCFL

SEQ ID NO: 944537 - protein, 115 aa, Homo sapiens
SSWRCAEITLTIPITGAVSACTQHDIALMDAHTGAQMTSRVHMPGLALGQYMTVIQCSQTLVLKIYETFHYTLIYGKLKIQANLIACAQPESEEAADLRIAVQVVPIAISLGMWP

SEQ ID NO: 944538 - protein, 77 aa, Homo sapiens
MTNSLPRGTCTELGDAKQPWIVHGSISAKLALAIIDDNVTRKEPNGSLYDLNLTKNGEFQATLGLVTTAIARSPGAF

SEQ ID NO: 944539 - protein, 108 aa, Homo sapiens
WGRFLFPEGGQRPFMSARLGHLALPTKKKIYVLCSGEWCPFDKLEPAPPPGTFFAGSPRITPPSLFDVVNEHPGLKKMEEKGCQELSPVFRENPNPAPHKNNFLFERV

SEQ ID NO: 944540 - protein, 134 aa, Homo sapiens
GKPPAFFGLKNFPGPGPVLPKRGPMGLNRFKSGGGGEGWAPNSFQESWYLSPGTWQGKKAGGGFPDPNSKKKFNWLGEKTPKKPRGPLGGSPTNNNFFFGRGRGGGPYLGANFGRGPGIGSFPKSITRRGATPS

SEQ ID NO: 944541 - protein, 83 aa, Homo sapiens
LHPEGVLVLEPQPWTSSGKRKTLTETIYRNYYRIHLRPEQFSAYLTSPDVGLSSYELEATPHNTSKGFQRSVYLFHKARTARH

SEQ ID NO: 944542 - protein, 116 aa, Homo sapiens
MHAKARSNACTSMTCTLRHYITDDMILKTRHNNDYDAAIIELRGEILLYTQTEASQTVTLLIVKSNTECLILIHARLYNKTRENYRDLTHMLKKHYAVLCHTSEIIDKVAGLVITL

SEQ ID NO: 944543 - protein, 81 aa, Homo sapiens
VLGLLILKGLHEGRLSHVVLDQKGDQHRESARGHCALQSSCISRQDHLHLRTDRHGPFKWTACVRRGQQKKLNKLLHGVKF

SEQ ID NO: 944544 - protein, 81 aa, Homo sapiens
HKVISLKWSHTFHLPFLLNSVDVRGVEPETSSIIDDALLAHIISMCRWGRNGVDSMCIVGQYSGLQVHDAGSMQQSLWLPE

SEQ ID NO: 944545 - protein, 103 aa, Homo sapiens
MIKQHPKTRLCRVVLDAKIRITVNCCRIKAEMDESALCGHMGSDEYEHLASRTLEAARICANTYIVMKFLHWITYACAAIHITRNPDGQDVVLSQADRLQTSM

SEQ ID NO: 944546 - protein, 144 aa, Homo sapiens
QDGEMFMRTVKLYDYYPTPYPNSDAARAVNIGALAPDLMYIELTMHGGEDYIFSLLTGYCEPPTDVSLREGLYLNPYFPGQAIDMAPTIYTDVLELDHGTPSTMCQIDTDVCAFLSWASEPYTSIARMGLMMLMMMALLVPLGY

SEQ ID NO: 944547 - protein, 132 aa, Homo sapiens
MSPISGCGSPPFYVIRITNMLSCLVDNRLHTGMRCAFGNPQCTVAKVHIGQVIMSIRTKLQNKQHVIESLRKAKFQFHARHKSLISNKEVSTSSIFMNLKTWWLKIGSSHMAVWVKYINSNGPLHKWRALHS

SEQ ID NO: 944548 - protein, 142 aa, Homo sapiens
LQRRCVSCVAVSTLSEARLVSDDLRNGQGCVLYHYLGYCQPDRSVTACVPAESMNRDEHDGLLVHHPDMPEKSRFLEVVLLGAHCAGKFTVYIQILSRKEVPVMRTVILLDALLEVITEIETPVMLLDTPGIISPETQKKLL

SEQ ID NO: 944549 - protein, 117 aa, Homo sapiens
FQLMCVYCVAASDVCGDLLTFADHRNGQGCILDHSLGYLSPRLNLDVLLLVESLNRDEHDGLLVDHPDMTDNLRFLQVGLLGAPSAGRATVCPQLLGRKGIPEIRECAYYFYAKICR

SEQ ID NO: 944550 - protein, 66 aa, Homo sapiens
MQTTDRISTDNTVIRAVFSLTNALNHQDARLIRSEQLLCLPECLGGLTSGLSTVCTHLCTSSLSVL

SEQ ID NO: 944551 - protein, 61 aa, Homo sapiens
VDDYRDHCGTLSLDPEDDSCCNKAQDELITVAKALRRSYSDNAETLPMIYLRVTISMPSLV

SEQ ID NO: 944552 - protein, 147 aa, Homo sapiens
MSWSLVSDGTRSHLRTNGVTCANFSDRLRWHVDFSPPGMSRFALVYIQGSRVDIVSHPGRVSAKRVASMHVLVPWYHRPARSPTRGGTRTWGKQTPIPGGICSHWKTGRARNPLELRRSGGIHGGASLRRWEHEAVGRLGGTRLWDP

SEQ ID NO: 944553 - protein, 94 aa, Homo sapiens
APPGGGDPPGPRGPQPGGGHPALLGPPGSPKAPGFPWGPPPGGGPPGRGKRENPPKGPGGGGAGDPRGGGLGPRAPPGGGEGPVSPPKNRGRAF

SEQ ID NO: 944554 - protein, 78 aa, Homo sapiens
MNEDTVRSGTVIYGQKEYRCYHEALSELFLRIKHELRAISDYAKYLGEDLSQTREDSPSHTADIPDLQADEWGLSLAW

SEQ ID NO: 944555 - protein, 74 aa, Homo sapiens
NDYDRARSGTVVYGQEEYICCQEALSELTTAQKARIASCQSYYQSAGDDLSQAPDDSPTGIQVTYLTYRQTSRA

SEQ ID NO: 944556 - protein, 89 aa, Homo sapiens
GGPAARTRGERVSMADETDHLILLAIMAITFDVCSLPFTIFAYMNETSSRKEKWDLRALRVLSINSIIDPWVFAILRPPVLRLMRSDLC

SEQ ID NO: 944557 - protein, 178 aa, Homo sapiens
LCKCSQEKAMFSVSAKIAKPTVEKPDQIESAISQALMELEMNSDLKAQLRELNITAAKENGGAGGRKAIINFGSGAQLEAFQKIQGRVGRELDKKVSGKHGGYIAQRRILAKTTLNSRYDKRKRPRSRTLTGVRDAILEDSGFPSEIVSPRIRVQLDGSRVIKAHIDTGQQNTVDHTV

SEQ ID NO: 944558 - protein, 103 aa, Homo sapiens
DITVWVMLHRAVQGESAQGTLGARDHAELFGTTHRERGVQGLSGPFQHMQNDFSGSIVPFWPVYLVGFLSWPTLPWAVPLTHSGSARDLDSLPFHLPVHLTWP

SEQ ID NO: 944559 - protein, 156 aa, Homo sapiens
LRHSNSLWKIKSPSIKEPGKEVLEQTQCFLIKGPYRNHCAVIKKRASKETCTLGFKIINSWGKTPQYFYSLKGAYAAAVSCLGPVISPRSCKRGEMVAIHIQQSDNPASSIWVVPKSIDTTKVIIDELDSSVAHTQRASTLNSQCRKLTFPSSRHV

SEQ ID NO: 944560 - protein, 119 aa, Homo sapiens
RIPVGGELLTHDDFIGSYPRMLTINCHFNLIDPYSQVQFDHMLWPYISSWVCGYELFWAEDVYDEYDTECLQCQYYSTTMMACHKIIFFTLLCYSLGIFRWEQGTRQTLMIWSGELHLQ

SEQ ID NO: 944561 - protein, 184 aa, Homo sapiens
MRDSSMRTSLACDGTRDTLYLEATGIEHRRALIPGANGMEGDSVRYKPDEPRVKSTDKSNVCEVLTDSSGDLSAGLGYAGTTGLQGRHKCQAIMYFDPDHVPDVQPRHLWYMTCKTRSHCVRVHNMPCARYARSECFRMKENVHSYPIDGLCTKPLCVRSSTLRHNPCSCASRTSVARFCSGIA

SEQ ID NO: 944562 - protein, 138 aa, Homo sapiens
EVSFAERRDHSAAHKAVQQSSTLNRLDRSSFTIVANTGVYASLSHIPETSVYTMTEKFDPLTHMLLLANCQSVLKDSDPESICHSCPLTSSLTMSVMNSVSILRVTHASTVDAVIISLRKLCRSGYLNIGNTSSHRGA

SEQ ID NO: 944563 - protein, 85 aa, Homo sapiens
TCYLRTANTSQENKFRLITNKICKYAQCPHWAVPTLHKLTCNWTLYTALQLGEFMTDADDISENLMSYAIDIRAPCTYWVLPLRL

SEQ ID NO: 944564 - protein, 119 aa, Homo sapiens
ADIQPHMRPAFGQGEILFTPKRCQGAVVTGIRKSQTFHDTGEVDQPANIVVTVLALMPGQFMQPTEPLHLSSALRSNLLHTQVHTYSHGLLFLRSECRPPVLTQRAILHIPVSLFRSIL

SEQ ID NO: 944565 - protein, 61 aa, Homo sapiens
LTILELVLGHRSAVRNIAMLSRKSVWCHHWAGTPYKPLVMLTTELSAHYAREHYDSPPTGP

SEQ ID NO: 944566 - protein, 108 aa, Homo sapiens
RLLEQTVSASDADQQALRNQALNLSLAYSYDTPVTSMVGTIPDDQEQSQVAEKPMEGESRYRNGHSAGAAGSRMNVRPGVISSRQLGLLGPPDVPDHAAHHPFRRLAI

SEQ ID NO: 944567 - protein, 109 aa, Homo sapiens
MAHSIDGGYLFAEPIELDNPFEDPHAIHHRLSRQYATLDDYNPFETREPTPAYEPPAAGRLASPSAHSLQPSRKLSPTEPKNYGLYSTQASVAAVTAELLKQEELNRGR

SEQ ID NO: 944568 - protein, 102 aa, Homo sapiens
STANIVLAVLHVADRKMLLLHIGWSLRDTIEYRAEGFYDWMEGSITYHNTLIRVVDARAEVDMKDLRTHFKRLYGRAHDSSVKGDTSEDYGRVLLELCLGDD

SEQ ID NO: 944569 - protein, 116 aa, Homo sapiens
MTPETRRATYEQIKERTPVCSKIVGRDIGRGDKPTEPVDSWLAKIESQVNFKFAPQNPLNPLGNLTVRPKRNRSLDTWKKPCRESEKFNTHVGLQAPIKKAFKLNTHYLPIEELGR

SEQ ID NO: 944570 - protein, 101 aa, Homo sapiens
DIDQSMKSETSGSFEDALLAIEKCMRNKSAYYAEKLYKSMKGLGTDDNTLIRVMGSRAEIDMMDIRSHFKRLYGKSLYSIIKGDTSGDYRKVLLDLCGGHD

SEQ ID NO: 944571 - protein, 127 aa, Homo sapiens
PKTMIELNDNEHPGTIFLETADPELAAHGATLPKMDIHHDVDFLKMSDTIRDLLPAMCDRPCYIQDTNLILYEEVRPRLPERILDYDVYLDQAIDELLDGDILVFHNDDPDYDISELPTVQEFPEIY

SEQ ID NO: 944572 - protein, 109 aa, Homo sapiens
KIRINLDGRHRMLPLSRYMASVLACKSVILVENLDLMSGQPYFCTMYTVTLKSYKHSRSLMAQTLSSLIHVRDDLLLVSTMKANQSSVSTVRILLLDDFWQCGQYLLAP

SEQ ID NO: 944573 - protein, 103 aa, Homo sapiens
MLPGLISVQLYMQLAELMSDLCLLIDEHDHESLSVDAAYYDADRAPCEAMIDYEHHEDEDRISQIMLCYIVEQIQDYYLLDSRIRIDLIELRRGDELNDADRH

SEQ ID NO: 944574 - protein, 100 aa, Homo sapiens
QTDTAFRDEYEARKTERTSYATFQPATSTPYWPPGPIVLDSVLDESDLYSLTHSYLEVGGRIGRSNRESGVNTYRPCPGGHERNLVTNLQTSERTTRARF

SEQ ID NO: 944575 - protein, 109 aa, Homo sapiens
PARVWSLDTMGTRLLTTLLLVLLELGFEVQGTQQPHHDDMPSPTFLTQVQESISRYWESAKTAGQNLFEMTYLPAVHVKLRDLYSGTPAMSTYTGIFTDQVLSVLKGDE

SEQ ID NO: 944576 - protein, 145 aa, Homo sapiens
EREREREREREREREREREREREPLRSFAPSPAPCTCWFGPGIIGSSAHGSLGADRVSSRVIVRACSLCPRRFHSWLSGYALIPTPAPDLQASPAVAGAFFVVSLPDSWGHVVVLFFCPLDFAFVCPTEIISFSIRAEDFRRWAV

SEQ ID NO: 944577 - protein, 56 aa, Homo sapiens
MSTKHGGQSENIMNAWTGRIEGVKVHGLGGKPGRSVCGRVDGPTDEGRISDGGHRL

SEQ ID NO: 944578 - protein, 82 aa, Homo sapiens
MALRTQYRSNTNSVEMDAQPEDLTERPDSDTKSVVLSSLAEGRLQVCIHGMEEPALMQLRDVDRFQLKHTRSMMESAVQEAL

SEQ ID NO: 944579 - protein, 121 aa, Homo sapiens
GKRVQQENYKLRYQNDDLNGQILSLRLYEATVSRDELMEALKEQEEINFRLRQYMDKIMLDILDHNPSITRDQTLRHGAGCRAALGPWDQGQTLSKDARLRRASHSHFVYLVTMRYGYPCI

SEQ ID NO: 944580 - protein, 102 aa, Homo sapiens
MAEKQVPRQATEEQLIEHTPMWIILVFGSTDRADKPTETAIAGCPSENHYTNLSVPTEPCNSPRHLTASPKRHSSLCSTENSCTERLRVIIDSTRYCNRQFR

SEQ ID NO: 944581 - protein, 131 aa, Homo sapiens
GCMNSARGHTDREFHMEEKPNFSLWRGTDTYPLNGPDSRTLNRPTLCMTPGHELRELLNDHDHKLTGDLINDAGLQTRGNGPLNDLRTHVQRIQHMCCDSATNVLSSSHLDTCERTIVDVHLQVYRGLCVA

SEQ ID NO: 944582 - protein, 184 aa, Homo sapiens
  misc_feature (49)..(49): Xaa can be any naturally occurring amino acid
  misc_feature (162)..(162): Xaa can be any naturally occurring amino acid
MRLCTSYCCTYHYHAYGRSAVGHDLDFSPFLYPIISHKRLLACMNWGLXDISYHPVIMENNMTYCLLSLLYSSMLRTHLKKTYSSCNLASLPWEVTLNAYLWRTMIEHVRMTCVVEDKYSSSTLQEHANYYRHKADMWTSKPYESTVHRLLVDTHSLTQVVXVERTYLSPTSVHEWHSEYDMTC

SEQ ID NO: 944583 - protein, 133 aa, Homo sapiens
YWYTVHQIRSGCLSATKYGQNLLYLYGGILNMIYQRPELCILTCLDTYEAASGEVHLWQSFGIARTAPSTDEMISIDPEVNIAFNQAAGSSPVQLHLGSTIRLHGLSATRKWIYHMTEVSTDDALTVRLLCGW

SEQ ID NO: 944584 - protein, 237 aa, Homo sapiens
ANWKLAGKWCMIVEADEYMELSTSILPPRHNAMGAVWTDTSYHFMYRSDQWVTDAVRYFVIRPPRSVDKEPDPLYLCHHLGHPARTQCGIRTDFKEGLEPLSDPSLGGHLSFRGDPSLMTLRSLEPSENGRDGTRSQWGTAVSAEEPSTQEELLDNALRELGHTGWYRGSMTVNETKELREAPEGTVLIRDSSHSDYLLTISRYNISWTNNVPIQYLHREWGHLIDYYGNMCQDADG

SEQ ID NO: 944585 - protein, 84 aa, Homo sapiens
QGPTPIPFLDTPGVTVTFSDFQDSELIATMMRSYITRVHTELMTNGSLIFRYDPNGLSFNPISDFSDTSFPKCAGRPWKSVSEN

SEQ ID NO: 944586 - protein, 102 aa, Homo sapiens
RTVIVDTSRVQPMMLSRASMVLGRTGCQVLCTQVHVELMVYTAYASCAVYNAIRAEGDMLTIEESEREARRFSLSLADRWVSDVRYNHLYYGNGLTHSARAD

SEQ ID NO: 944587 - protein, 135 aa, Homo sapiens
HTCVTLWKDYLDGVGDTLYLWVIGAYLCRGKRAARDGGSLVASYDEDSEELEAICKLGTGFSDQELEEHHQSLKGLVLSWPRPYVRIDGAVISEHCVDPRAVWEVKCADLSLSLIYPVVRGLGDSDGHFLRVPLV

SEQ ID NO: 944588 - protein, 138 aa, Homo sapiens
MGMVSHFKHLSPPRVHHIKVSRVSKVLVMALSKGKCNSVRVELRRSQSGSFISSVEGSVKVGFVITHFDLYDNTERLDKIDSSLGLECWERALVFHGTVMNQCDPVLGPARVWGLPPEITPFCYNEIEVSLWVMRLRP

SEQ ID NO: 944589 - protein, 106 aa, Homo sapiens
RSGELAVRALEQFASVVEAKLIRTQKGIVNEQFLLQRLADGAIDLYAMVVVLSRASRSMSEGHPTGQHECSVTPGVIEDASRIREGMDALQSDPWYEELYRSFIGF

SEQ ID NO: 944590 - protein, 134 aa, Homo sapiens
SKFTSKNKAAVYKQFYDILLDFTDSKEMCINEYGSGRVLAYYPGQNVTPYGLTKMAKDAPLLLINPRGIDTLWVVMKPDTHALGCTGTWDTEVQILHTFELVQSKLTLKTYLFHCVPALYTLDTTLFKMKMLVP

SEQ ID NO: 944591 - protein, 153 aa, Homo sapiens
MSSLPYMPEPVMLQAVHLIAAAANVTNAAIGKNSDYTLRAEPSLRAQHAKTLADSAFDYTAIDPITGATLHDDVAITAHAYARDDTTTGTDLLRSIAKHGYETISIGAKQCKYKGLHDPVDAVVLHLGSSYSRDHPVLKCTRCYDYLHTRLTT

SEQ ID NO: 944592 - protein, 97 aa, Homo sapiens
RSISIGKWIADNQPRLIQCENEVGKLLIITEIPELILEDPSDANENLILQETSEIESLPADGSPGLKSALSTSRNLRINCDTGEKPVVTFKALRHEK

SEQ ID NO: 944593 - protein, 71 aa, Homo sapiens
MWPAVMESVKFDKDHDGLIGAYCGGLWLAAVAVKVHKAALCGAQDIQDKVSSILRRGQEAYERLLWNGRYY

SEQ ID NO: 944594 - protein, 66 aa, Homo sapiens
HARCHPSPEEHYLCPHTLFSTTSTATLCPIGSTLMGLSLSPFPGQGSWTQGKCLVLKRQAFGATHY

SEQ ID NO: 944595 - protein, 45 aa, Homo sapiens
MPDSLRYLHLAPEPVLRVGDAKSQGEARHSSAVEQNFNGFAVLAP

SEQ ID NO: 944596 - protein, 102 aa, Homo sapiens
LVDDTVKSQDPAYIFLKCQATYLITVELSPIAARLKLAFDSEYYDGLSVEYSTIASYDVGDYDKGYRFIEDPWTSTKLRVCHGQAFAIDKTMWKSESITGDT

SEQ ID NO: 944597 - protein, 115 aa, Homo sapiens
MHVRSEEWDIMTSEANPYDSVRVLLVCSKNLKPRRSLSSYGTDKEKNITLTLEGVKPTDEELALFLVESSEEAKKHLLQVRKCTSMAQGKAMIETETGIIPENQNVTCDGKRLEG

SEQ ID NO: 944598 - protein, 58 aa, Homo sapiens
MPLMLTVILIYDRCLLSWLSLRSCWHVKQYKLERGEALSDRAVQYVIRIQMVKRTVLS

SEQ ID NO: 944599 - protein, 33 aa, Homo sapiens
MLLMLSVLWIYDRCLLSSSYSSTTGYALSETMY

SEQ ID NO: 944600 - protein, 127 aa, Homo sapiens
VTFITVLFLYSSAYSTGVFRCYAHMIEAAHCDKDFIHDDFIVLEMSVFSLVSSAVFISKIMFKYWMNELHLRSVETNYAQLHLFVKAIVRWLTAVRFTILTVNASCHIDDDPDLSRLARPQVVVMST

SEQ ID NO: 944601 - protein, 95 aa, Homo sapiens
GVVTRTDFHDNEQTLAETYMNMPEDILTFMPRNSLALVQGIQLLLQNDGTLLFKLAAWCPSSFNFRMKGRIRLPNIDSSVPVFTNLEKEPSKHVL

SEQ ID NO: 944602 - protein, 95 aa, Homo sapiens
GCRNSERVLTHNEEWNLPYYVSIARLMPGTCHVLRRTALSALNGHKDCWTHQMILGEQSMETRDEHSHAKLLSQIRRRRPYCIAVQQQLMDTYHS

SEQ ID NO: 944603 - protein, 117 aa, Homo sapiens
GHGPVEQQMREQALDPAGSMNIYLVLDGSHSIEASSLTGATYGLVTDAPYPTICIGSEADRIKADCFTKHLNDSNSEDHKLKYGANTKKALQAVFSMTSWPDDFLMNVGRARHVIIL

SEQ ID NO: 944604 - protein, 104 aa, Homo sapiens
MRPSGHLRTSPKGSQIFLRKKGPPYCGPLPEPKGYAWGFNHINGWSLNKFRCVACESHKLFTNLPYYCTNIFRNKYRMLFSCEVDEQYVRKEFNIKTFSFRADI

SEQ ID NO: 944605 - protein, 68 aa, Homo sapiens
  misc_feature (11)..(11): Xaa can be any naturally occurring amino acid
AREAICEGNHXSFLDLFPGAAAGDDTEDTSTEFTDSIEEEAAHHSHQQVSQCQGLGLPGWTAHSPSEV

SEQ ID NO: 944606 - protein, 68 aa, Homo sapiens
VSPGWPGCSQTTDLVIRLPRPPKVAGITGVSHCARPGKKILYMKRGESKVWHSSSCNTETDLLSPPEG

SEQ ID NO: 944607 - protein, 98 aa, Homo sapiens
MCLLYLFSSGYTRGVYRRDAHSSVGAHRSTDFGEDYFIASRGMAFAQHLQLWPLEDDAYVESEVTEFAYTCDADELGGLFERPIVSWPAAVQQETLRL

SEQ ID NO: 944608 - protein, 99 aa, Homo sapiens
  misc_feature (9)..(9): Xaa can be any naturally occurring amino acid
  misc_feature (76)..(76): Xaa can be any naturally occurring amino acid
  misc_feature (86)..(86): Xaa can be any naturally occurring amino acid
MADYNPECXLQGNSDSVLECRMCSAAEDGPTVIDPLYNVNSCCWRRHLTVKAGSAVIACVCLCVHTVSVCEPVGEXEIEIDRYDGXAIRTLAVLHRMAL

SEQ ID NO: 944609 - protein, 129 aa, Homo sapiens
NQYPDTNQDAQYWKLICTLFPYTRLESDAHCADSYQLTKEALYETCAATCGITSYSLNSRNVRPRYTTYAGVSPQSLQGCMDSNKLQVMHASDSDARYVYDALYLVRVPHELFDSVTPWFTTLLVITWI

SEQ ID NO: 944610 - protein, 139 aa, Homo sapiens
MALTWVLTVLSLLPLLEAQIRLCANLGPLPITNATLDRITGKRYISYRPFAMEYMKSLQEIQASLVDSTHNKTDDTISLREYQTRQNQCSYNSRYLNVHRENGTVFRYKGGREHVAHPLILTDTKTLMSGYYLDDQICA

SEQ ID NO: 944611 - protein, 128 aa, Homo sapiens
RAQELLIHETRESHAQRHMDCGRSCLTPFCQKTQCQEGPRGGDTRSDAKMSSDNRSAKLDNYGDLSFVDISYITVLFAYSVMTKCKGNCSPPMALKDLQRFRNRPYEDLTGSRTQLVERQNLLAAEAA

SEQ ID NO: 944612 - protein, 42 aa, Homo sapiens
MTELRRHEARESPDAMRVSTALKRYSMRKRRSHTSPVTRMKT

SEQ ID NO: 944613 - protein, 61 aa, Homo sapiens
MDARICQGSDRERLPTCLPRSVCIVNCLILYDGLRGHHEIENHRRAVECMMVSTHTRAVSI

SEQ ID NO: 944614 - protein, 126 aa, Homo sapiens
QEQMPVMDDQRDLISNNEQLPMLCRRPDAPESKCSREALYTRSSILRTLLLAGQVTTVYFLYQKQGRLDTLTVTLSEPAAVEPAHEASQGYQACEQDAHGHTLLLMHALAMGALCQTPMHNATKLC

SEQ ID NO: 944615 - protein, 73 aa, Homo sapiens
HESRSYRATDIDYLVVNTLSRADIHLVELLYYVEELDSSLISSFPLLKVTHFTVFREADPHLPSCDLVSVPCD

SEQ ID NO: 944616 - protein, 168 aa, Homo sapiens
EGAARRKLLLLLMSLQVPATLHTLTHDHNMELSERAHRISSDDNLDSDWKLILRSIGNPMRNIMVCSIYQTIGGVILFLNTIYQNVCHRDLHRNMLKDMVIEEGIELDLRGAPLAATIAETTIQRLDGRLDRYSQSKTHGVNYGNGLLCWRMPIRIAYNRLSSITLTA

SEQ ID NO: 944617 - protein, 66 aa, Homo sapiens
RRKMSVDEVSDTQLMLGVVLIGSPGTEERETIRTDAHYTEEHMEAQADIVHGHSIRRTEPRVRLSQ

SEQ ID NO: 944618 - protein, 120 aa, Homo sapiens
MSYHRLLLLCLAGLTTVYEAGPTVTGESKCPLMVKDLDAVRGSPAINVSAHVFRKAVDDTCESHLPVGKGYTKSEYAPLTGRHLASAHSMSMHRCDSQADSGPRRYTIADLLSPYFYIPR

SEQ ID NO: 944619 - protein, 135 aa, Homo sapiens
MVTVQNSGVLTHTLLVLAGPWAKNPCVEPLSILFITMLHLSNPLVRLSTRSGAHRFSLTNCCVCRCQAYIALSSVVCCACHRILRVTSDVSSRAELNSVTTRIGDDCDCAVMFYGCQAGRPPYAPVYTQTSPDVS

SEQ ID NO: 944620 - protein, 71 aa, Homo sapiens
ASVGCRTEEGMVVAQGCVLCACATHNAHGSRITDALPLMIKAVAEVDEGGKFWGIAFAEYEDKLCIPPICS

SEQ ID NO: 944621 - protein, 145 aa, Homo sapiens
  misc_feature (125)..(125): Xaa can be any naturally occurring amino acid
MRGGGVETYADSRSLYDIKAVMNICIPHTARLSDGADDRLLALLLTKGVMLADKCVEDVIQTHHSQGLSVYYGDIEDAKTHIICYSRITCLTGYLRIRARDLTDTQHSPLLNHIFFTGQWERLFXVEDTEEEDFHWDQVTTVNGL

SEQ ID NO: 944622 - protein, 106 aa, Homo sapiens
MLLMPREQRRPNHASEGCATDTGDLAAHIYFMSVARRIGSMDHTVVGTTLYCIIYTVHRGISAGRARPEYRLPSCGNYSQDMTPIRIGLWGMLQDVSNQTLLKAET

SEQ ID NO: 944623 - protein, 204 aa, Homo sapiens
MEVYIMRIRVDHPLQYLPAIITPITVRNILRLLRKLTAITFIVHKMDGRQQYHASYYVSILICKTDIIKITEACLFRVNLKTQAAILTTLCRADPRHMYGEWLHYYYQMHSRRSMYHIKNGYCTGFISESQYTYALTVNAIYELQTTDMNMQTVKHQDQLHVRKMDGQLSPEHLIVGHPQYYECRDCGYESITGTHCYIMGGYW

SEQ ID NO: 944624 - protein, 131 aa, Homo sapiens
MFRLALLPEDVAHGIGVGRCPRYVRPLAPDCIVSRQLSGPDYNQRAHTATDLRGLGHPGHCRSMATVHGCDHLPPDEMTVKPTIECWTSPTRTMSGKTSIASYPIVSRGYTLLTPDVVADQFASAWALKAH

SEQ ID NO: 944625 - protein, 97 aa, Homo sapiens
QPVFIGPTGPKGLAKLSLQQVAIAQTSPCTDTVMDTVNTTLQYLSPATLKHHFLPGLSVIRQTLTHERSYFSPVPFTSTSYYSSHIIAYHTSSTCVL

SEQ ID NO: 944626 - protein, 105 aa, Homo sapiens
  misc_feature (75)..(75): Xaa can be any naturally occurring amino acid
RESREREREREREREREREIQRETQRATEIDSSFPLLASISLYCLLLTLSLCLFMLHPFLPVFLRHLLLLVRPFXLYGSCPTRFISLSDTMYSLTLASHTYVSFS

SEQ ID NO: 944627 - protein, 117 aa, Homo sapiens
ERERERERQSERERERERDIDTERARDTWIKFLIIDSSNLVTVSRSPLPLPNGVVLYLMPECRPFSHAGSDTESLITPGTPPYSTYPLSAAHLQPCASSSPIISFSPLSAYCSLLLT

SEQ ID NO: 944628 - protein, 88 aa, Homo sapiens
MDALMPLAVSNPKHDPTPLPYLCHDEPYTLDIYLSDNLGEGMSQAFTICMSNFKYMYWTMLQQLTHHSVNGCPAAGGPTGFWDHQRAR

SEQ ID NO: 944629 - protein, 103 aa, Homo sapiens
TVSTVLETYGVLAHWGAALEPASHVGDVRWIDVDGNLPTLVKPKVTAMGTPCHDRDWTLLSTYTQWPDNIRTFMPTDFLYVLQSVKQRLQDAPMLVILLAVCR

SEQ ID NO: 944630 - protein, 69 aa, Homo sapiens
ELDQSLGIGSEYFEATLCSENISSCIVYGRMTDASTIYDEQVRRSELEYSGFVNLKRLLAPAARIHVDS

SEQ ID NO: 944631 - protein, 68 aa, Homo sapiens
VCLALSAGEELYSGVAADLMGRDFTIFRSLRQRPSLRTEPHDSRWLNGERADGLVDRGRHPPTGQVPS

SEQ ID NO: 944632 - protein, 106 aa, Homo sapiens
MLEDLRDEEEGFIFHTVTEVCYLTNIGLQSLHRWSVAARPEDSKAEKPEVGYVSDRSSPKDTRNAAMEICLIVLDDEDWTLANIYPAKIMIDISCGLDACCGDLCC

SEQ ID NO: 944633 - protein, 66 aa, Homo sapiens
HSRVLCCGHRHRLCIRRLWTRCMSKPQSLMSKHIPQFCGVLVHTFMEVLKGSGDYWQAQHELYADK

SEQ ID NO: 944634 - protein, 119 aa, Homo sapiens
WNRALSRLKLNSTPDIGISVYINNLFETDLMPAAIKIYRDTNEPADTKRSHIYGSRQMILETEASDELKRCEDPRLMLMGFKPLVLLKHHYLTHSMCEHPEEHMWIVSFLVQRSADQAA

SEQ ID NO: 944635 - protein, 112 aa, Homo sapiens
RSLGVCCLIATDDDTYFSLEELDSLKYTDLLSLVKSMVLRSNLWTSKLIEALTGYINHARAGTQNHDVKPSFCITLGDETEIRNSIQQEAVRQALGHVTINKEMVRDSLRGP

SEQ ID NO: 944636 - protein, 115 aa, Homo sapiens
RKRALSRLKLRLNRDIVISVRIYNLVQKALMPAAIKLYRETNEPVPIPGPLIHVQAACFCLAIPRGLRSMGVARLYWRKRTTEELLKHHYLRPSMFAYPEEALAIGSLTLFSALL

SEQ ID NO: 944637 - protein, 80 aa, Homo sapiens
PRPTAPCYHTTLVKPFTHIHDTRKKMQTGAISIVPHGNDDRLEHKHNISRTNPYTFSILTLTRNFFARRAKAKTPRDQSS

SEQ ID NO: 944638 - protein, 125 aa, Homo sapiens
AVGPRVTELLRRLCSDSRYRARRQLCPDFCVFSCSEGSGLQNCDLANGPETGLDYATLVTFGSIFGYIAERGWSAFECVVFLVDVLAAYGAYTGFNDKRDVKVSLCTGFFLATMGVRFKRSDCVV

SEQ ID NO: 944639 - protein, 76 aa, Homo sapiens
MANTGGPLSQAQRPDLGFGSMSRGRCLWPTLAASGSKWTSTSLDPPLSDALNAVTTIPTTYASCAVLVSGELTSRL

SEQ ID NO: 944640 - protein, 124 aa, Homo sapiens
RHLLLHALGHLFAFHTLLTMTHGPLEFKMLYSVLHSMSLETLFNVVPWSSSHYSVEHPKHAITEVAILGVDEDGGYPLDLDEAVMERTPLWEQVVVYTIVPYGMPNQDTTVWVIQYDTESSVHN

SEQ ID NO: 944641 - protein, 136 aa, Homo sapiens
MVRVRSLYTPPLPGSDSVCTSPSLTIHVLEAKVRRWSSYTGCHEPHHEWSVSMYHVPKYRARPLFSVKSALRMQELLPARTKRFHSSRETGRSIALRHGAKWAWFVFSQSNMCLFTRRSRQRREGPGVDLTSPGSA

SEQ ID NO: 944642 - protein, 157 aa, Homo sapiens
  misc_feature (81)..(81): Xaa can be any naturally occurring amino acid
TEANLIVYIASVPLGQDAYAPDIVAAACRLTARYGHARYQTPLCSYYCKAQERTASGSIMLRHILDESYETYPYSELISCXQQLHGIFCMTWSDITGRRLCTQPRTEPFTDSKREMPGTGTKMTLQLPRIRPMLSENTSESHPEALHDSIQDAQTTL

SEQ ID NO: 944643 - protein, 105 aa, Homo sapiens
MNRYIKLIAHSSRSFNIRDRATELGRPLSRFALAIVRHMFDQTCPRLRISLDTYDRTCQSHILKDDSFTLTQSQLISQVNPARDELNTHSFFPQRVQTFRSPPFN

SEQ ID NO: 944644 - protein, 99 aa, Homo sapiens
YSEAVALMWVEGVCGIYQGRGDHIHEEPLSPGIDAERLLAESANPETTAPDNMQVQENLNITWTYGKWYNQCNGITWPWLYNIMDWKTVSTLVLLEGAT

SEQ ID NO: 944645 - protein, 102 aa, Homo sapiens
NYSAVGGTRISHVTAVLAFINYLDLEYGNPFMVIEPVVALYSVLSGHAHKLTHVYLHVPTIGLPTIVACTHSIMWMNAALTEAEYQNGVITAITLYPSLDID

SEQ ID NO: 944646 - protein, 135 aa, Homo sapiens
HSRLLCCGHRHRLCRRRLWTRCMIRPQSSMSEHIPQFCGGLGHTFMEVLKGSGDYWQAHDELYADKGTVETGYWFTKKPPYREGILDTRSVELKSTEHFTRESDLDGVLNAHFFCGPQNYRIEELLRLVRRVFTY

SEQ ID NO: 944647 - protein, 128 aa, Homo sapiens
AREAALHSRRAPGLFTHAHRAVSAQLEERRRDPHPRMTLQEGDCRGSQNVYLTKGTGDSDEMAPEAPQHTHIDVHIHHETVLCKILVTWWSALRPRANQARGSRLLWASWVMQRAGDLECAPRRIFLL

SEQ ID NO: 944648 - protein, 110 aa, Homo sapiens
GPSQVTAYTAYMAKANILTTHNQYLLRGCDLKILMNMHFDLKLTKWCLYRMQATSADDMTALYRGYQGPCIAQGGFNAISHGTASRMLDRFADIGPELVRARARIAMELG

SEQ ID NO: 944649 - protein, 243 aa, Homo sapiens
MGCRLYGSTIEQGYQNMESGGGDIFRICRFHTITRMTNTGSLQMYRAPTSLKAVARCLHNGLALVTHATRMGSDTDPARITASMQKKSNPVIELNMNFSNSLQKMDGDNLVFKNCRPALATVEPLPPSSGFKGSSSPGSLGELIYYYHIDNVRFFSHFGEPVSPEAFLSGATVGAQGPCVADFMCMGDREYWFTTMLSFLYSLSSHNTRDREMPLGASHRNLKTGGTRDYRRTGGETSRGSRD

SEQ ID NO: 944650 - protein, 129 aa, Homo sapiens
MVKGLSVLLLVLLLGLGLTPTTLGQDNCRYTHFLTQHYDAKPQGPDDRYCESIMRRQGLSLPCKDMNTFIHGIKRMIKAIMCMNVNPYRDNLRISQCLFQVTTCKLHGGYPWAPCQYRAHMRVQRRCGL

SEQ ID NO: 944651 - protein, 121 aa, Homo sapiens
KEWPVLEATPARALSNYAIKRPILLGELGYARVPAKPFTLCEHTVYTLFILDQALGQQVPAHDFIHIPSCVEALEDSLSPVEVDIGHARKLMWSALDGYFIQQIEAFCSILDSGQRVYSMS

SEQ ID NO: 944652 - protein, 101 aa, Homo sapiens
MSIPSLEELDSLKCSDLQNLTQSLGLRANLRATKFVKALKGYIKHEAKGNENQDERQTSGFSCDETRIQISNHEEAERQALGHVTPRRRCKTVRVDPDSQS

SEQ ID NO: 944653 - protein, 72 aa, Homo sapiens
STANRPECASNPTVTQHALAMEEELRREGSIETLSNRSSSTSGSIPRNFDGYRSSLSTNESQTLRLFPTGFP

SEQ ID NO: 944654 - protein, 83 aa, Homo sapiens
AKVMPFINCHWVIHYYELITLQTLLNALDNCICAELTIQDAVMPLVKSAHSNSVFAMISTCFQTSVWLSNVKGTARLLLTGAC

SEQ ID NO: 944655 - protein, 138 aa, Homo sapiens
RCYTAAYKLANDSCHLSLLFSASLDETRFRSSRDIVYYKRYQSVVVTFIRQCQLFFYTGEIVQTTNIEVYFLSFKPGTVVGTNGATSAVVSIVASVDTHPITNRFSRSYMPQKCADGLYLDGRFYTYLCPGSGVYCMS

SEQ ID NO: 944656 - protein, 85 aa, Homo sapiens
VPVVCLVTVCAIHRVDLPLFYRHSPRRDDTFTDGPYDAFASYLNAHLNIWCIRSAYWTGTYCLQEHAADDMHSLMAYMPKTSHLF

SEQ ID NO: 944657 - protein, 88 aa, Homo sapiens
GNPTRLWLNEECNPYVTSFSIYSDDSMAVVRRDAHTSEVAHLVTDSGEDFAALMLMACAEYLEQCSFEDHVTLVNDVTVCTCDAVDSL

SEQ ID NO: 944658 - protein, 136 aa, Homo sapiens
MVRAEDSRSGRYCSGLTDVRSSRVTCSSVSPNATGMACTDTVITPVETKVAVHRILITLTSRSVLTVNGPVRMPTKTLRITTRQTLVVKLLRLTDRYQIRIHKRVIDLYSRCEIGKHITIMQIEPEDEADVSIADA

SEQ ID NO: 944659 - protein, 217 aa, Homo sapiens
PETMLLPYLTKKLRLTGTKYGCGGGRCGACSAMISRYTLISNMIRHYPANACLMPICSLYGAAVTIVEGIGCTHTRIRPVQETIAKGHGTQRGLCTPGMVMSMYTLVSSQPEPTLDQTADATEREPVTLHWMQPIIDACKHFCKTSDCCQLAERSPTRSIRSGEYEYVPSYPAHDRILPSELRIIAYKQYGWTPVSASQTMRPGSPLPWTAEVFSLT

SEQ ID NO: 944660 - protein, 80 aa, Homo sapiens
MALLTAFSSSVAVTDKDTFELSTFLESSKAPQHDRNELAEHRGVGGGLDGPPLTRRVWGLKKALWLLDEYLEVAKPSLGF

SEQ ID NO: 944661 - protein, 49 aa, Homo sapiens
MHSLETHYAQLQLFEKPMVKWLTAAHNTNLREMNAYCNTEMTPLLRLVR

SEQ ID NO: 944662 - protein, 110 aa, Homo sapiens
MHSLYFRPIVAPPTVELNIMLSPVARNTAWRDFAGQERQEIRHGYRLGIKYLMLTTAIHMVRDPMSHCVESHIQSLHWTVLYTYADIKEEDDDYEDKDSGTTQTLVRVKS

SEQ ID NO: 944663 - protein, 103 aa, Homo sapiens
ARSDGVPILSDLCAEVHTLSDIDCNRELADYEVVTHVTATRVQAVKSYRRMAYGTSQDGYSSEHGKLCHDCEYGRSANDVTRTDQLTVQIALLAPGTARDERL

SEQ ID NO: 944664 - protein, 230 aa, Homo sapiens
PFSLNQRGPRIGPPPPHSAMPLSLESSSHLTVSAHFGRSASLLPDPFVSSLAPSHKGSPLACCDWQTKWLAQTPALSIVGYNSSVSRARWVCVGISGATIFVFVLKLRRALVPASVKWSKESQLKGCVRIQRHDAHRVLTRDQWRPSSMALTCNPSTLAVQDGQITRSQDQVATHGQPPSLLKIHKKLTGCGVGRLESQLLSRLRPKNGVKLEVVACSEPKVHLCTPAWA

SEQ ID NO: 944665 - protein, 117 aa, Homo sapiens
GCRNPDRVLTDNICHAINQDSYVINYIRWPTTIRVLSCIADALFIDSHIADRIYAYMIAKYGWIVTSQEMLSCIRESIISVTCDDSRLAKELNVSRRKLTFRMVALIDTSWNPPVVY

SEQ ID NO: 944666 - protein, 159 aa, Homo sapiens
MLYRSRTQPLHDRITRVWHRLTSGHASSDISGTWPAFGLASSLATAARASLTSAVLIPGIALMSRTVRKQCTRRKHRRLIRFLDHKSAWILNVNTGVHRPRLCLVGNVSGHSVRWKGFTQSPQMELKVHKVSHGGEGEQMRVCVSYWRDVRRELDCCCR

SEQ ID NO: 944667 - protein, 137 aa, Homo sapiens
VIKGRGCGGERIQKGEDGMSEGTFTLIEEQEEYIREDIEWAHIDYFNNAIIWDLIENNTKGILAMLDEECLRPGTVTDETVLRRNQVCATHQHDESRMSKCSRILNDTYLAQRWLRSQHYAGKVLYQGEGFDDAPWS

SEQ ID NO: 944668 - protein, 223 aa, Homo sapiens
MPRVTQGHAQRPTSSLRSSQLLDDDPKWTLVRTDLVLYDHMQQMLMYLPRTAVLLMGTQHHDALGRPRAPGKHPTSGETAASLTGEWGLVFTKEDLTEIRDMWLANDVPAAARAGAMSPMEDTAPTHSTGLGPDMTCFVQAVRCPRFSRGPIEILSDVLLIKTVHKPSTQRGTLLNMLNIWTLSYGLSLHRCCTCENLHPWELDVQHAPLLAWWAPPVGRGCL

SEQ ID NO: 944669 - protein, 111 aa, Homo sapiens
MRSLPYYNTPIMDTVDLKRLEAIQNDTRLTNFSALRTGWCLLAKTDVARTKRYYFRVDEENVDVTEGGEHQLRATEDRRATKDQCNELTNPGESCWTTREPYITSFDHSPV

SEQ ID NO: 944670 - protein, 121 aa, Homo sapiens
NTTIRDAVFLLPKGDDRLLVYAMRFNHSFLVSKVIAANVRDLNRGHRLRPAVMLVQRLLWLFIPFLRGGFKLFGLFAHVFLLGFITLDLVGVVLGVNPRNMGRQFRGSAGWIWPGSSSLVG

SEQ ID NO: 944671 - protein, 158 aa, Homo sapiens
QRLTRLTEWPTCVEGCHRGLIMPSEPTQDYERTLMFLQDTAGVLTARIESVETGLKLGLCGTLLYHLIGQETMADYLLNTLNKHQRYEYVQHYSLGSACDNVKRVLKSELLKLPKTHKVNVLTSTANMNSIYTNYAAGYRDCLKTLRRELLYIRDSCT

SEQ ID NO: 944672 - protein, 104 aa, Homo sapiens
MHRMVIVKLLPGRVSRVYLQCAVELDMIHSRMCAVAQTDGYCFIEQGTINALGEVYRTAREAELRVRELTDMDPSDLPYIELRHVDYESVGYGLMGTIELTDGT

SEQ ID NO: 944673 - protein, 82 aa, Homo sapiens
MGSDQMREAIMNHERARQMRAQARIAAKGTASDTNRDDHQTDTEDDAQDQACLRKLGRQTTSGTGERKTFTNQGTMTASHAV

SEQ ID NO: 944674 - protein, 109 aa, Homo sapiens
MAACTCSPSCSWAYGQRITQAHELRAAAIYQSVTALQYGQHDKTLTLRVLVASRWNTCNSVTNEHLALATCQAEVMVLVIRQPSIQTTTPCRSAADIGMRECIPAKILT

SEQ ID NO: 944675 - protein, 78 aa, Homo sapiens
SCAHGVNGALLLECTIHSAILVMSFTRIDYDKGVNTCLSEGRAYEGYYAIEAIKLESTAKAIDTSEALRVLDMRRLTF

SEQ ID NO: 944676 - protein, 123 aa, Homo sapiens
RAERLAHISALQPPNQLDKIFDTDLFAMGAARDLGSESGPLSSDQLSHEGGLSLSPTFVPQPSSKAHVGAETSCVCWGQASFTPDPRDYRTLHQALPIRMNPEPWSLRDFSQANPTPAPYLKL

SEQ ID NO: 944677 - protein, 182 aa, Homo sapiens
  misc_feature (154)..(154): Xaa can be any naturally occurring amino acid
GGERRASPRADWPITGTKMKVLWAALLVTFLADAMPHEEHAMETEPEPDLLPANRVAKPTALGTGTGSILGLLVRWVHTLSEHVQEELLISQVTHELKALMDETMKELNAYTSELEEQLTPVAEETRTRLSKELHAVHARVGADMEDVFCRLVXHRSEVHAMLGQSTQELRTRPWFPLLKMQ

SEQ ID NO: 944678 - protein, 103 aa, Homo sapiens
VLDICAGSLTVVQVVQMPETVSEAAAEEVRHLMTKSSLQAMLLIYADYKQATVPDISTERPALMYFTPKVTWDAWTELKGTDMEDAMKAYITKVEELVAKYRI

SEQ ID NO: 944679 - protein, 126 aa, Homo sapiens
ARVPVAMEDTAQSARIKECGLCLLDVDVTLTPARQIAEADGYDYCKISEQLPDDDEVIDTLEYVLDENGIVRDKYGRLMSKQTIQNQLLYQHRQELEHLCLNYVHLDNHAAHRHTSDELPDLMLDI

SEQ ID NO: 944680 - protein, 109 aa, Homo sapiens
ATMAVTTELLQMDLYALLCIEEKAEDKEVKKAYRHKGLFWHTRHPDNSKAAELFHQLSQGLEVLTEAATRAGYDKVRKAKKQAAERTQLDEQEDEEEEESPSTRTLERE

SEQ ID NO: 944681 - protein, 132 aa, Homo sapiens
KIPRKVVFSSGYFALKRLYKFIHTAGFSGFKILERMIILVTPQCLKKKKKLPSPENSTGLFSFYLCADVMYFPTKSTLPLVRALGDLFPYGTCDRTDPSLDRYSISRKALYYTSLGCSSGMRMTNSPRLPLI

SEQ ID NO: 944682 - protein, 111 aa, Homo sapiens
MFRARAKIVKPSGEKPDEFESGIFQALLELEMNSDLQGQLKELNITAAYGIEVGGGRKAIIIFGIRSLTEIFSRKSQCGLYANWRKSSEGSMSGFIGYRRILPKTLSRTRL

SEQ ID NO: 944683 - protein, 120 aa, Homo sapiens
TNYPLIYRPPHPIQHLRMMKLPLTPRRLPDPPNHHRTIPSHALLTIRLNRLFINRPYHSRRDLWLTHALPSRHWRLNIPNLPQRYTSHEAYITDQSSTPPGIGLIRLLATIVTAIIGFVS

SEQ ID NO: 944684 - protein, 114 aa, Homo sapiens
FAGAEDVLLGLQTTDFARQRADDCGEMLLRLVNTYGTSLENCCAAYNLMKAVPNRSTKCKPDGEDPRNILKRACYTKIDPKCQLQLLSKSEETFEMWSSYVVNITIRQGPWQDF

SEQ ID NO: 944685 - protein, 107 aa, Homo sapiens
ADLHQRVPVEGSSYEHVKGKIDTMKKFYRSIRGEDHPASYPAYPSCVKNPWDCEAAEAGTASADATFLLRWDMALDPLRPSVLNGWPHGTQGLEEKPSCAPDVSACL

SEQ ID NO: 944686 - protein, 135 aa, Homo sapiens
KRTGPDAGRETVLLCCKMYRTKVGLKDRQQLYKLIIIQLLYDGYISIGNGLMNEIKPQYVCAPSEQLLHLIKLGEIVNTNPYVPWQGMENDDTRVQYAIGRSDTVAPCTGIDLELDAYVQTMCAEASEYETCYVT

SEQ ID NO: 944687 - protein, 59 aa, Homo sapiens
MREPAEENRSNRRIQASEAYETLMDASVVASTREDELSGPEGDPSTPEEASTNAEGLGP

SEQ ID NO: 944688 - protein, 102 aa, Homo sapiens
MPLTLALQLSLGSNYYARVRLSSIKVLGVIPHLKRMEHHHEGCDILSPVPPAVDARVQVDNDVDEGRGTLSLIFVAVIIVLRRNTVFAFDHGKVMRFQKAVC

SEQ ID NO: 944689 - protein, 159 aa, Homo sapiens
  misc_feature (155)..(155): Xaa can be any naturally occurring amino acid
MPTVLSRQFIKEKLILSHVDIQLKYLDLGLPNRDQTDDQDTIDSALVTQNDSVADKCATISPDEVRERQFKLLNMWIGPNGTIRNILRETVFREPIICQYITRLVPGWTKPITIGRHAHGDQCKDTDFVADRAGTLRRSSLRCRGDKNGCPLARXGVAG

SEQ ID NO: 944690 - protein, 92 aa, Homo sapiens
GDYVFLQAALCVPRRDENDYLTSHRTVAHEHSEMYTQSMAFCWNLIGAVRYTTFEYPNTIRNTCNTGLYLNGAESAKRTEEGHTYVCNTSGL

SEQ ID NO: 944691 - protein, 113 aa, Homo sapiens
LDRGQVHGCEKRTWACLIEAYERESDQSCELKIRHGVDRQGKYPEECSTLRIMCITERRTERDTHAEREEEPITVTAELVRSDETACTHWQLSGTTIWKWLTSEHCKLLRVCF

SEQ ID NO: 944692 - protein, 120 aa, Homo sapiens
GFRIVHKFEGSRRLTPMLEEVLLWVVNQCDKLHCCLILRNYSQAWRLMPVISASRVAGITGTCHHAQLIFVFLVETGFHHVGQAGLELLTSSYPPALASRVGIIGVSHPPSPHVNYFNVS

SEQ ID NO: 944693 - protein, 130 aa, Homo sapiens
PATIYRWKVVPQGMLNSQTFVGKVIQLVRDQFPDCYIIHYVDDILCAAASRDRRIECFARLQEVVGLTGLAIAPDKIHTTPYHYLGMRVQEKTVKPQKEEIRKESLKTLNDFQKLLGDVNWIRPTLGIPT

SEQ ID NO: 944694 - protein, 174 aa, Homo sapiens
  misc_feature (127)..(127): Xaa can be any naturally occurring amino acid
  misc_feature (137)..(137): Xaa can be any naturally occurring amino acid
  misc_feature (150)..(150): Xaa can be any naturally occurring amino acid
  misc_feature (168)..(168): Xaa can be any naturally occurring amino acid
MGLCHQETTGSGHVWHRAAVPSGPLPMEVLCQPEHWSGPRDLFSGLGYHFQAMNLGAVSDEQGSTSPVTCTFPLLAAHSVRMEITTEVIQDLICSECQMCRLLNAPRDSHHIRQQLLLETYTHCEGXALCHCLCVPXCAQVSVCEPVGEXEIEIDKIDGFAIHSTLEXFDRDSL

SEQ ID NO: 944695 - protein, 188 aa, Homo sapiens
AGIGTRLTVNREPPLPEGVFICILMVDALCTTEPVSLLECGIMEEREMSRFTEADDTIEDLACYHLSSKLLAESCVVYDQMHIQPCAKAIYLFSASSTTASHVFVILGTNGVTYAANSFPEIEDALNPHKYQMLMATVDVMFVSEGQTLPDPIVGLNDTPSFIMADILDLHTGQCIDSTTLTWTCFSG

SEQ ID NO: 944696 - protein, 97 aa, Homo sapiens
RHLVKMNHLLITTQSATEMNDIREPQLWEQWSNLPATLFSIEASILDVVFETAYRRYYCSCAVVTVLLIRNDYSHLCVHPRDNSRTQKVVIYVQRQV

SEQ ID NO: 944697 - protein, 124 aa, Homo sapiens
MNMQDGFLITLLLLLLRLAKTYETTLEKCCAVLDPHYSYAKVFDEFKPLAEEPQNSIKQNRELLEQLGEYKFQNALLARYTKKVPQVSTTTLVEVSRNLGRAANVGNILKPRCTRQRQCDTVPA

SEQ ID NO: 944698 - protein, 168 aa, Homo sapiens
HEVFLCSDMHIYSIAGRDPQACAPCQDFSSSVWVPHSGPIFPMSPAGAGRHPSLLAVGPSWAGIGSPAEWGVVGQSPRSWAPATGTQGPRTPSGPPHRHTVGCWPYARRRAPTSCLVCVCVWFSRNDSNCCLDIEIYCDCECTRLDPVSYLHQFGKNAGLRLSHLNRM

SEQ ID NO: 944699 - protein, 38 aa, Homo sapiens
MEPNALLTFEDSNTNGFYCYTGVHVEGADSVKGTEGGL

SEQ ID NO: 944700 - protein, 201 aa, Homo sapiens
  misc_feature (199)..(199): Xaa can be any naturally occurring amino acid
GCRILHEGSWSQNGAVLCSYSPEPPTSAGSPYPIVCQPMTGAHDQRHPGHTSLGSGFISHWAFETRSTISRITRYKQPSFTLPPTRHRTRSFLESARPEQDQCVYNTTYLNVHRDGTIYRYLGCQEHFAQLVILRDTKTYMLAFDVNDEKNCGLSVYADKPQTSNGNCERVTALDCERIFQVRCRVHRLEGRGPYLDTXFG

SEQ ID NO: 944701 - protein, 81 aa, Homo sapiens
MCHRSTERHLWITPMYMLVIRRHTVSLYVRSQYVLTELYTTRTDITGNCKTEPSRATYSCELACHHIFNVLRSLTGLQAVH

SEQ ID NO: 944702 - protein, 126 aa, Homo sapiens
SDVEDATMHVNAARFINHSCEPNCFSRVIHVEGQHIGIFALRRILRGEELTYDYQFPIEDASNKLSCNCGAKRCRGSLTEAAAVHHEPLHLLVSSLSSWPYPGGFLDPSRAYYPHTLCVKVDVGCV

SEQ ID NO: 944703 - protein, 111 aa, Homo sapiens
RARTHILPWFILEGRDWLDQRARGLLPWSMPFNTGLILANELDRCNGNDCVGITRLTVALRHHVSVIAIMLRSAVLANREKELYQCDWRLRIEDTLLCIAKSLGFLIGEDY

SEQ ID NO: 944704 - protein, 85 aa, Homo sapiens
GAKRMAELWLWPRGKQHKRGWVVLEETGMVKTGLPMERGKERQKRGEKREKGKRAEKGENRRGLQQKAKGIKCGFLLKAGAHRLN

SEQ ID NO: 944705 - protein, 111 aa, Homo sapiens
  misc_feature (47)..(47): Xaa can be any naturally occurring amino acid
  misc_feature (62)..(62): Xaa can be any naturally occurring amino acid
MKVLGEKHLDLLYPTILRHVGAGIAESIGEGVSTVKPADKVITLFLXQCGECSSCLNSEGNXCIQFKQSETQLMSDGPSLFTCKRTSIYHFGNTSTFCEYTVITGNLTCHD

SEQ ID NO: 944706 - protein, 85 aa, Homo sapiens
QAGGEAHAQAQAQAEAQARAKAYYASQKAELLQHQHELQLLQPPPHFQSTGAAPNGGGGGDGHAVTIHHSGWLMTTTIVYGPMSS

SEQ ID NO: 944707 - protein, 120 aa, Homo sapiens
  misc_feature (119)..(119): Xaa can be any naturally occurring amino acid
MKLPTDASPIYPACCFLLIPFYLSPDSVECIIFFTYVPQLHVRIFLPLPQLPNLVHSSINQLQLTLDYAGHAAQPRTTSVHDESVIEYYDHESLIDLMPLLLDYSTTISSARLALTTDXG

SEQ ID NO: 944708 - protein, 66 aa, Homo sapiens
HEVPSPRVSPASEYSQSPWLLRHPHPSHPAAGPCLCGEQPALCPCPGLPNYRPVTPAQLVGLLVRV

SEQ ID NO: 944709 - protein, 108 aa, Homo sapiens
HEVVFAYGKQQQTNTKCQSPGCAIGLSVHVLVNTACSGTNTKTFEERLLVTFCDLRNPRPVRKAEIHIAVHDARNSTESSSHCGADLLSLSVHAILFCTVTLVQEVLV

SEQ ID NO: 944710 - protein, 67 aa, Homo sapiens
GACMDTLASVYEVVLLFIFVYALHGNDRLCHRRKPEESRIIVGAEPELAKVTDILSDSRLIEKARQV

SEQ ID NO: 944711 - protein, 107 aa, Homo sapiens
MTTACTLQMRQNYHQNSKGAHKPRRANCELYSFYGYLCIGYYFDREEGALKNFGTNSFHQSQEEEEQAEKPVKLWNQRGGPIFLQEIKKPDCEDSESGLNAMECAFL

SEQ ID NO: 944712 - protein, 123 aa, Homo sapiens
DTQCNTRAPVPPAEDGIYEEHSLNEQESIQGAVPVSDDEQVDVEPPEGEEKVETAEVEDRTEEPMETEPKGAADVEIVRDKAALDLTPIVLADKGQNIDIVQRHEAMLQNGETPKDLNDEQND

SEQ ID NO: 944713 - protein, 116 aa, Homo sapiens
MGSSLPRWAGLDLTFLILKENTICKLQMCFHDNRYDMSQKRYEYEDQNVLFPSALEIPVHNYRFELTLIGISCCSNCKDLSGAEATTSSGLFSCRKVHHVGSIWSHYTLFAAIPPP

SEQ ID NO: 944714 - protein, 129 aa, Homo sapiens
LSTLFCPKEDDLKGFNGDGVSTYKRHFGVVFEEKMPSTDTIFVMNSMVLIFKQWCRVALLTINGSIPRSQYGEIGNGPYSSCGAFTWMQYMTLSKRNASQHLPHIIFHDRCQSSSTSTFGCCVITQLGI

SEQ ID NO: 944715 - protein, 83 aa, Homo sapiens
MLFSHRTYFGVVETIYVRSYACMFAFAIATSHSTGLHSPYLHVEPVYDVMSYNPEVLYPDDVWTASPDITVMRYFSTTDYDRE

SEQ ID NO: 944716 - protein, 104 aa, Homo sapiens
MIMPEEILTCMPPNFLSLHCQLPQLEELRDDGKASTDEPRLACACLHEDGGALRRMSSSSPETEIMQQLRLLNVQVSDRLYHESTRDAAMENCLCAHDWEDLAT

SEQ ID NO: 944717 - protein, 114 aa, Homo sapiens
MGISACLTSRTLCLYITYAFSARQWYCTVIISSSGTFLFGGSSHISSSVPVCDAGACNGSPQAPCIRVVYLVVLWSSRQMLSLPGSCWTGSTASFRVRLDPLLGSLFVQSKNLI

SEQ ID NO: 944718 - protein, 112 aa, Homo sapiens
LEVLALKLGKQLSFGTRSLSLSGRETAMSGFLGTVGCALGGPSRRKMLQTINYSLVLSLQVLLLFYDLFVNYFSELLLFNIIIMVLMCLNTLIFQAGLDNLLYHKFRYHHTD

SEQ ID NO: 944719 - protein, 54 aa, Homo sapiens
MDALHVIEILTGTWEGYTKPDVTAYRTTTTGSHGLGEFFDCGPCWDEFLRFSGL

SEQ ID NO: 944720 - protein, 80 aa, Homo sapiens
PTAVMKKEVLLMGNSRSWKTTMMSILFDDYIVRDTRRLSASIDAEHSRVRLLGNLVLYLCHCGGLETVLDNYFASHRYGV

SEQ ID NO: 944721 - protein, 96 aa, Homo sapiens
MCRHWKLQDPKDNVCIYSLYLLLSYDQYPLLRSNEASGYAHVDYISTGLFHGELPSSDYYGNYVLLDWAYNERHNVEQANGIQSHRQDHQDTFVPL

SEQ ID NO: 944722 - protein, 87 aa, Homo sapiens
QTTSGRDKRVPVPLGDKSRPGAIPRCTPEILGSSPIQPSGFKKSRLSIPKKSYPPGGVKKQFKHLVLLIASKKRWGKVPKGSRHSEF

SEQ ID NO: 944723 - protein, 42 aa, Homo sapiens
MSGYWMFTRAYTNWMSVACILLIMHVSSDTYSAVHDPHSTQV

SEQ ID NO: 944724 - protein, 100 aa, Homo sapiens
DGLASTGRSLCETQLVLYADAQELKRSVGKLPSHRESLQIVQAQVHTLFSQDQCQGRRMTAKDLLDRLSSIDNLKASLSQVVADLKMLRTARDSLCAYSV

SEQ ID NO: 944725 - protein, 152 aa, Homo sapiens
EFGTRESLACSRSSLCNTTLVLYADAQELNRRCGKLPSHRESLQIVQTQRHTLVTRTNARAGCLTARTFSQTFFSDALKASRSHVVADLNMLRTAVDSLCAYYCKIYATENSLDSDTGLLDDLTNDPHMFAGAVAEITQIGLNELSVHCAEL

SEQ ID NO: 944726 - protein, 120 aa, Homo sapiens
MRRRTELETVSARRCGGTGGSSLIGSSMGSSGGGSIDSFSEHLITRKPRTALALPSALPEGGRLFMDHTGPDYQPDVSVQRRVEEWNKLHNYYVHNDNLNMQSLEIIIKESYAAPRRSCG

SEQ ID NO: 944727 - protein, 126 aa, Homo sapiens
  misc_feature (125)..(125): Xaa can be any naturally occurring amino acid
MSGWESYYITEGDEEADEEHEENLEASGDYEYSGRDRLIFEVDAFNAILESHSEHELTPFDMSIQCIQSVYISEIIRSDRDLLAAVIYGTEIDIYSVSRNNIYVLHELDNPGAHEFYSSTRFVPXG

SEQ ID NO: 944728 - protein, 124 aa, Homo sapiens
ITRDQKPGNRNLLWKSPRWISKLGAHLQKFSDTGENPVKLSLSVRKVAMRETNLLIESKRVHVEANPIMNVRHGGKSSTWASTLANFRGSHLESKPFQQQVTNLSFPIAISQPSRKNSQLHQEQ

SEQ ID NO: 944729 - protein, 101 aa, Homo sapiens
TNLRQMRLSDSLSPGSATAEYAELKKMELVEIYYYMIPHYACTRVMDHLRPLGRVRWYYMDMSRITKALTDTLSRDCSDMCNSDAPTHLMTCMACCETRTT

SEQ ID NO: 944730 - protein, 115 aa, Homo sapiens
GPIDRPPVLGLAPARRALPTPEPGRNSSDSSLAYTIAALQTGPVVRGSRADPEAGFAEPPTRAGPLEGAFNSRTRQANMTENFTFDPADKPKRAKASKKCTDSTPHSDMIVAVIP

SEQ ID NO: 944731 - protein, 141 aa, Homo sapiens
MVSECSICMCTSMLLLMSQLLIVTDHFIPYVYDKVCTVATFRDTYGAMAELLRHLYGLIRPEDDVMCTGLYDDAEALLHPYLDETARRHPYLDVQEHTLFDNGNQAGVTECCQAADAACLESSSMNSAMKGRLRLPVTEGR

SEQ ID NO: 944732 - protein, 62 aa, Homo sapiens
MGSLVYATTFLDITSSSCLIHYISIRLSSQGDIDDMYTVYDAFHPNERKSLLEGTMHLEYRH

SEQ ID NO: 944733 - protein, 104 aa, Homo sapiens
AQCIAVCETPALTSGGLLDKDLQKVAHSIHRAVELTLQIQSDTGVRATLKEFMERLAGDKYQTTEQALRKEVESFDSLFHMHCLPDFYRSAPTLNPPGATEEAG

SEQ ID NO: 944734 - protein, 112 aa, Homo sapiens
MLRDFDPMTHTEEPGVCTNLRSLRLLDNIELMICDHILNCIGNVTSVTSRNRVLLNSECPYCASWTRSNKMLALRISERIEHFKHHSEPISYLALVQGHDQITESMKKGSWY

SEQ ID NO: 944735 - protein, 115 aa, Homo sapiens
  misc_feature (98)..(98): Xaa can be any naturally occurring amino acid
MLRDHEPGGHAEQTVGVHESPHHDVHGQVLKISDTDPELWRDCLDWQSGKRQTRGKLHITYSALLNKEQDLLGIVLQTYSFRTSVKSTTAISAGSGAXTTAVSRNINVRELTKHV

SEQ ID NO: 944736 - protein, 134 aa, Homo sapiens
PRRGSLCGRTMLDFASFAVTFLLAEMGAVLYLYPASRQAAGIPGITSTEEKDGNLPDIVNRGSLHEFLANLHDRYGPVDSFSVGRRLVDRLGTVDVLKPHINPNRDMDPYETMLKSLLTDQSGGGSVSDHMRLL

SEQ ID NO: 944737 - protein, 264 aa, Homo sapiens
PHPGLWAAFPTGVTGALWSRVARAEALLRLHLAATCAWADEVAEQWVTKEDTCLCADFANHSGRASSHNGLLDKAVSNTIASLICGRRFEIDDPRLLRLLDLSHEGLEEESGFLCEVLYAVPVLLCIPALAVKGLRCQMAFLTQLGELLTEHMMTCDTNQTPRDLSEAYLAEMEAKGNPESRFNDEPARVVADLFSAAMVTTSCTLAWGRLLMILHPDVQSRVHQEIVDIVWLVLLTTEGDQAHIIYTTGVILTCRVCDIYPWG

SEQ ID NO: 944738 - protein, 92 aa, Homo sapiens
  misc_feature (75)..(75): Xaa can be any naturally occurring amino acid
  misc_feature (78)..(78): Xaa can be any naturally occurring amino acid
KCDVDIRKDLYANTVLSGGPPCPCIAQDAEEITACTHNEDKSLSLASLLVIAAPPVSCHFTDVITSRVDESALIXTAXASRRTMTYLRYTLS

SEQ ID NO: 944739 - protein, 118 aa, Homo sapiens
AAGAADPRAAFGRRRCLVRRGVVLRRLSVAVGVGCGMCSAGELLRGGDGGERDEDGDALAEREAAGTEWDPGASPRRSGQRSKESEQDVEDSQNHTGEPSGDDYLTRMYFWRTNSGQV

SEQ ID NO: 944740 - protein, 116 aa, Homo sapiens
ERFLRRQAPMLATCRDLHFYSQPEDLYSFLRELIHHCAKVTQPKAHIDPDFSQTPYALGSELDSKRRGRLLENSPVPVSDYVWTSLSLAHALVDRPICDHESSHRSLLLVLSGQRP

SEQ ID NO: 944741 - protein, 134 aa, Homo sapiens
MERLAQAGVCNTLYASLCRRVTFPVILTPYLCRPPLLEPDSRTWDSTWRIAYTHCAMVTQATADIGRPFSEGPEPWSGVCQHGPMSMTVEAYYGCECVWERQSLSGPFVFWRSICRPGLLPQMPTARILSAHRL

SEQ ID NO: 944742 - protein, 153 aa, Homo sapiens
  misc_feature (61)..(61): Xaa can be any naturally occurring amino acid
MIPLYEMEARCVQAVSGQSQLTATYTSQVQRDYTASASQVAGTTGVCQHTQLIVVLVVETXIDHVVQHAIYVCDLVSHLPEPHVLEITGMSQHARAARCLQSNRMHVAGVMESTCMLSYSWAELRGLFEPVRCRIEKSWHTTELTVTTTRSAN

SEQ ID NO: 944743 - protein, 71 aa, Homo sapiens
  misc_feature (3)..(3): Xaa can be any naturally occurring amino acid
PPXCRNSARALLSPSLLITRQLTDALVRSLLSGYAWMIHAHTSVTIQCHSIKVPYYMLAVQLDQYTFQHAL

SEQ ID NO: 944744 - protein, 112 aa, Homo sapiens
MTYKGETESDSEEYPASERDVIWVVFRAVFLCKKVATTAVVIKATSVSEGNIGSHMGQSHGQCLVWAAMGIIGPSSPLTSAKATFCPTESPRSIDQPVSAVCDRFLYENIFP

SEQ ID NO: 944745 - protein, 111 aa, Homo sapiens
MTPSARYGGKIEKTLQIDAATAMRKRELDEADLPPGEFIDDEETVDDTAYSYDTCHIDHHSHDTSAQLLTQPLILKQQHTTHGIKQGQISMLLLAHLSLELRLQSLVRVIC

SEQ ID NO: 944746 - protein, 204 aa, Homo sapiens
TSQDLMNKSCAEAVMNAAMAHEADMHYLIAVVPARTAQLCVSPAGTDMCLSMHALATGYVLTVESSCEDKVDRLTSEYLVVRHRPPYVRMYEHHSEILLAEETKGMKDDYLTDMFEDSCLRSETMTGRSEGPLTACTCDNVPSHDSELDMSRPMLDILRQKSVSVLRGDETFYGVRVAVSELHYMTAAGYDDRRLISPDDVRPS

SEQ ID NO: 944747 - protein, 56 aa, Homo sapiens
MSWRESYYRTEGDDAEEEQEENLDTSGDYRYSRRDSSILLDEAFDALLSLTSDRWL

SEQ ID NO: 944748 - protein, 68 aa, Homo sapiens
ERESYSEDDEDYLCSEQASLACGTMLLILASPTIGLMETLNIVSYALPMTAKTTRQTLMAEMNDCPGP

SEQ ID NO: 944749 - protein, 52 aa, Homo sapiens
MTRVSICMMLAMLLLTLSGTDSIECILFLVLNDTCSDETATYAVPELDVTYV

SEQ ID NO: 944750 - protein, 70 aa, Homo sapiens
SLKPDVYSYAPLRCWTSRTMVAFSEISILAGHSLTEAVGECVVMCVCLALASHGKYQCKEDTLNPLGGVS

SEQ ID NO: 944751 - protein, 137 aa, Homo sapiens
EIKLARAVEEVTLLVPAAERDDSLTKMQLMELAILNGTYRDASIRSPYLALSVAATVQAAPRIITGPAPVLPPAALRTPTPAGPTIMPLIRHIQTACMLNGTPDPTAAIVPPGPEAGRYTPYEYPYTVAPPTSILEF

SEQ ID NO: 944752 - protein, 135 aa, Homo sapiens
ELHVEYSRVPEELVGLTEACEDAVNSMWLLAIAKPSATCRYAILKKAGCAYMLGAQCKSDSGMITVAERHMPTSAMGGATPACSYRSASARTGTDRVHCLTKLLPHAPLVDLGPDTHYSTTLYDYEYTEQLDPGF

SEQ ID NO: 944753 - protein, 80 aa, Homo sapiens
  misc_feature (65)..(65): Xaa can be any naturally occurring amino acid
MTSHSRDYSIGDSRDGFCLLHRLADDTYTARSISTIGVAYDIRTLELDGNTICILYGTQIAIADXAIRSSDYSGDTGLML

SEQ ID NO: 944754 - protein, 82 aa, Homo sapiens
MLEDQDACTVSDRRRHVSGYVKADWLHARDTFCVTPSLWNSIMMAVTLRQSGYIPSARDSIYIELCNCYRHSDPTIVPSAMA

SEQ ID NO: 944755 - protein, 134 aa, Homo sapiens
RNLIDESTEEVKKLLVPAAEGEYSLKMMQLMELAILNVAYRDANIKSPALALSLAVTAHAVSRIITGPAPGLPPAVLRYSYASWPYHNAFEQTNTDRCHARNSSPNCCNSCSMARSWFESIHTYEYPYTLAPAT

SEQ ID NO: 944756 - protein, 83 aa, Homo sapiens
ELSPVLDNQTLSIMDYTGVVAANTGLTIHPDELPIGAPITRALFDETLTVLILYPLTLTIRVRTSLYALLTHTMSVGTVTEAL

SEQ ID NO: 944757 - protein, 103 aa, Homo sapiens
MAMLELDVDHSLLGLLDRSVYLMVQVVSIELERRNHCRYSACVTSKENVNLSTYGRIVEVQEHGTLTLKMCWGFRSYSIGCWYPDRGGVPHEKLPNLSDGNGR

SEQ ID NO: 944758 - protein, 83 aa, Homo sapiens
GYYTASDHGVVALGFVGAQGIPITPVGWHVYRAQEDDAKHDVYGADADCTVTFLHILDYNETSRMTYVTTLVHAPGLAAIQKE

SEQ ID NO: 944759 - protein, 73 aa, Homo sapiens
MFDTDIETAVCVHGIQSITLDYPKMEYCALRDDGRGFVTGKALPSISVRIMIRAPVYLTDAVTCVGIYPAVVA

SEQ ID NO: 944760 - protein, 136 aa, Homo sapiens
KATDFFDLKNFTGPGAVLPKRGPMGFKRFESEGGGEGWAPKSFQESWELSPGNWQGKKAGGGLLKRKSKKKFKGFGEKTPKNPRSPSGGSPTIAFFSFEKDRGGAPTRLKTLDGGWGLKASQRASQEGVAPFLKAS

SEQ ID NO: 944761 - protein, 91 aa, Homo sapiens
DGLTLTVRRLRETQLVLYGDVHEREEERGRAPQHRVITAEGALQVHTLLSQDQAYAARMACQDLLDRLSCIDNLKASLSQVEADSKMRHDC

SEQ ID NO: 944762 - protein, 124 aa, Homo sapiens
LRKSTVLVVHITFYAWPATHILPHHRWDRLPMMIDQIKSAALRYRQRMRTLCEALEDECLRLEARILSSMNCQNPEKRDPCFKDLLMDAHMAPSQMTCNCYQALVWLRMAGFQVSSDNPRGFLY

SEQ ID NO: 944763 - protein, 117 aa, Homo sapiens
MWLDALLTTHGLFKPGGPSSFKNLTLQCFAGVSTTCHVKPEHQMLIYKDDVLLYNIYYMKSTESYLIPEVLIYDSRTYKCTAIVNNTEKTTAHDQLVAEESPETLVSLDKKKAFGAT

SEQ ID NO: 944764 - protein, 137 aa, Homo sapiens
TACRRKQRMFWARISALSEMELRYTIYVNGLCQREYSPGTTRQGLFYTVFGYYMIIISYVTTNESMVDDIWGTHLVGSGQQEYERERCIIFANNRRSPARRHQRRRRDRLSDIMAVVGMMTMTIYITHIRIRQDPLA

SEQ ID NO: 944765 - protein, 141 aa, Homo sapiens
RRERERERERERERERERERESEHYTARPCQLGVGASRTLRTGPALLSERTFTSFLYWVTSVYGVSAVAICCFAHDALSDVAHCLLPVLGTYLCLLDVLGALYCVIAAIYLFLLLRFASVFRDLLRSSGLVSCLVLVCWLA

SEQ ID NO: 944766 - protein, 82 aa, Homo sapiens
MTSAPMLNSAEMAVDVSTLTALITVPASHDWCWMDRSAAASSTRARASMTLYEEADNKWRLTEYAVTLCCRGAPTRVLCLLP

SEQ ID NO: 944767 - protein, 102 aa, Homo sapiens
MLTLAVRSLASIVANLSIAKTSNSYTNDEPCIGGCTDIISQFPTAIFMCLDQDGIIYYWHWATTLATHIIVGSYVVYLCVVLIPVALLDTRDIIQCSLWAIY

SEQ ID NO: 944768 - protein, 94 aa, Homo sapiens
  misc_feature (15)..(16): Xaa can be any naturally occurring amino acid
  misc_feature (20)..(21): Xaa can be any naturally occurring amino acid
  misc_feature (23)..(23): Xaa can be any naturally occurring amino acid
GCGAYRGGVRVEQWXXGLQXXAXCAQPGQGTGGLLEGMRFLIGAAGWDAPQFSKKKGSNIFFGGPPPPPGCFSRGGGGGAPPQKKGGKKRGFFS

SEQ ID NO: 944769 - protein, 83 aa, Homo sapiens
ARGEREREREREIDILREPYKNVVVRILSSGIIVSLLVCVENAYDYFQAVKICIACSLADPLDTTPDSTHGLVVESIHDSYMS

SEQ ID NO: 944770 - protein, 187 aa, Homo sapiens
MLSGCQADATVAPDSGLRGDMALLESLSPYLSPTGLLLVSCDLCFVRADRSTCTVNVTVTQLRANSVTVSCDVPQGNIVVGYSIFQLRHNVPVQSVIREVNTTTRCCALLSLAEDSDYTVHGMSIGLRRESPPRARLHFRTLKGSDRLPSTLSSSDITVEGLMESGHCILVESASFGRCCSCGLMLA

SEQ ID NO: 944771 - protein, 92 aa, Homo sapiens
VGMVNQIFQPSCPLRVHHIKSFGTSGIISSSSATERTIPALPVYVAGNEITLVAKGLQNTVEDKNTAFPFSSESKKELSVEVITGSNTDLKD

SEQ ID NO: 944772 - protein, 93 aa, Homo sapiens
FLRRPRLASQSKARDTKVLIEDTDDEANYLNFLKSSLTSLVFLLYNPFLDQRNLKYLSSRKQEKTHNTFSELFRIGSYGLQTSSLGFFSFLLG

SEQ ID NO: 944773 - protein, 154 aa, Homo sapiens
MAGRIYISSLAPLPSLPKTQLSTHRIRNGYRSQRGHYRGRIHISRRSFLAMWLSLFSTEDSNLGSNIYHDFRMDWLAPATCEPIQSAFFFSGDKFYRLNLRTRPVDTVDPTYPRSIPQYCLACPSTGHLRSHSPHGRALCYSLLSSPFPTPIVP

SEQ ID NO: 944774 - protein, 178 aa, Homo sapiens
GGHIMWLNIVKGSIPVGSRVLVKPSLSSYREIEEHDSYYHTLSLMQAETKCNPWITVRGKECTVQDSFKGVDAALTRHNWLDQSDSQFVLHRITEATKTVASDTIHSFMYEIKEGDCAERGEDSRELTCTDAVEALTVECTASEEKRSCTETCHNESLEMCGIPILRAQTWSPYLDTV

SEQ ID NO: 944775 - protein, 107 aa, Homo sapiens
MTSSHTHRYFVADPMGDKPVGSLAGIGEVLCNMLVGCFDNAYVVLGLFLVLIIDEDLFREWLTDTFGANAFLSLDCFLCLQIVVRRLLVMLSVMLSFPTPYSYFAAE

SEQ ID NO: 944776 - protein, 161 aa, Homo sapiens
ILQTGLTLIEDTEILYSAMYRSRANLERKAVTVPRCIRTEGTLCLSEAQDSDAHLLQDSTEPRTYRVPYSDEEVVEVPYSRRTRMSIGTKGLKVKLFDGLSRSDLTAKLCTRNRSAEEGELADSQSSHTVCGVQQIEMLYGPRTVKAPHVTFQARVLKVTD

SEQ ID NO: 944777 - protein, 100 aa, Homo sapiens
ERERERECVRLILRHCLFSLLCSSHITCLYTSIRASLIAATFDCSASPIWSSHTCLHLCTSLLTLPLHRGSLWLRLLITYIPCSTVIPMLITLVHVTPKR

SEQ ID NO: 944778 - protein, 83 aa, Homo sapiens
APVSQLLNVVVSLHWTSFSSFPPLPDDRSYKPDVSCLDGPGEAWTRDMGVISMIMHLPERNPRYLLSATGPGVLRPTLSTLIW

SEQ ID NO: 944779 - protein, 108 aa, Homo sapiens
  misc_feature (14)..(14): Xaa can be any naturally occurring amino acid
  misc_feature (20)..(20): Xaa can be any naturally occurring amino acid
  misc_feature (23)..(23): Xaa can be any naturally occurring amino acid
CYFLRLRYHTRRPXLHNHEXSLXCPPVVDALELADSRTARIRHEAQTQTSKFGGVALGTPDHTHPGYGKTQYMAVVLCLCHTVTIGKGCVLLSYIARDSYSECFLGAC

SEQ ID NO: 944780 - protein, 54 aa, Homo sapiens
MSQLKQVTHHYIPYLETDYAQVPLEEPLEKWLTDEHTMNLREMLLIATQIGQPI

SEQ ID NO: 944781 - protein, 206 aa, Homo sapiens
AGYAALCTVTNMKLLAATELLLTICSLEGALVRRQAEEPCVESLDSQYLQTVTDYGKDLMEKVKSPELKAEAKTYFEKSEQLTPLIKKAGTGLVNFLSYCVELGTQSDTQRSVHAIVFQPQLVSRTPTEQSKSSCAYPLCATIDAEWSRYMRRNALLAQPTRGGVRDLNSPIVMRITMHCPSFYNVLTWRRNSEQARRSTFPQVRL

SEQ ID NO: 944782 - protein, 104 aa, Homo sapiens
  misc_feature (86)..(86): Xaa can be any naturally occurring amino acid
MVSWQYGLLEQFATVVEAKLIHKMGIVNEQFLLQWLADGAIDLYAMVVVLSRALRSLSEGHHTVHHECYVTPGVIKAAARIREGMXGLKSDPWHQELYRNFVGL

SEQ ID NO: 944783 - protein, 113 aa, Homo sapiens
MMTESKNDFIEQSTMRLNSLKLGYRHVHLTAKNGDQDSLATLCVKISLQDYGWRKPGVSRLRGLGPLSTRRDRPGVAGPSLLLRAMAHARPAPVLSFIAQGITAALYTIRPER

SEQ ID NO: 944784 - protein, 125 aa, Homo sapiens
MPRASVTQMETRQLLFIILDILETDRGSLGPRAFVKVQCWSRTRASSCRDSLSWTCTPYMVFWATWLSRHARCIHCLAATTASEKPLERPRGERLAGALTKLSVLNLCMLRLNRLGLQMDTLCLP

SEQ ID NO: 944785 - protein, 81 aa, Homo sapiens
KEAAGSSQPKLPPFGELDQAIFRKATLVGPPKKVPRVQVPPLERLTKRRKAPQQIVVNVFIEKIIPVITNCLSVDVNDLCM

SEQ ID NO: 944786 - protein, 103 aa, Homo sapiens
MCQQSDVGSCCGPRGSCSVRRECVGWCMATGATLLKLSGSQARSVSAVGVVQAFREPENAQQASMGMLGPWERPADQGELKSDRAHLMGKTTLLWLKSLMGAS

SEQ ID NO: 944787 - protein, 132 aa, Homo sapiens
MKCPPGADCLSTRLDFFGNWERTSISKLAPASRLPFRLCSHPPRKGPKAALGQWAWPARKHLTLTLQKYAKSSFMPTSPGEGVRLSGSHFYCSLRCCRRSHGHINFASVQPCAQKAKTVFTKLVCNQHSFRS

SEQ ID NO: 944788 - protein, 93 aa, Homo sapiens
MSPATTGTFLLTVYRIFFKVHFDRNVYPLAGVLFGHGLEREYFKGEFPPYPLAEISDEPITFNTNLMGYPDTELDGFDIFGHHIVMESYMGPP

SEQ ID NO: 944789 - protein, 70 aa, Homo sapiens
PDVAPWRPWGPSPSMISVRPFLIINDQDRMYRLMGLEALRSHIMASKAVANTMRSSLGPNGLDKMIVDKD

SEQ ID NO: 944790 - protein, 69 aa, Homo sapiens
GFPAGFVTMPTGEEVKSTLSMLPMMLSGMAVVPQMFGVGGLLQSTHVNHLDFHWFGVSIKHNEKWYRSD

SEQ ID NO: 944791 - protein, 123 aa, Homo sapiens
TSRNGKWRFLCPLFQTEVAPLFRKQSNMPDKYINISCNYIKIGLESADGDFKNTWFKSMYLSSLKLTGVLCHLQSSVHTSYLAKNTTSFSFFPCCRCGTYYYWKLRCPVFFSLFFLLKNGVSF

SEQ ID NO: 944792 - protein, 140 aa, Homo sapiens
SGAPGLHEFGTRGVPAVFCTMPTGEEFQRSLSMLPMMLPGMAAVPQMFGGGGHLSATHVNHLDLHCSGVSIKHNEWYGSDWTAEDKPSGPDVSEPAITTIRPVAFNPFLIPRVSSGLIYPSMFLSPGMGMGLSAMQRQTS

SEQ ID NO: 944793 - protein, 68 aa, Homo sapiens
MYAHDLRRRTLIRSCSYSLRQTEAMQRSAGPQSILVPAVPTGARKEDLWAKSTLYLGSNARALSASKS

SEQ ID NO: 944794 - protein, 115 aa, Homo sapiens
RVRRVTQAAAGTVDCKVRGVLPAPEGGPGPRVLSGGPIQLQQDDLGAAFQTWMDTSGALRPESYSYSDRLVLDQGGEIFTKENPGRVCKDLMDCEQEVDGTYWVDPLGWSSDTIG

SEQ ID NO: 944795 - protein, 122 aa, Homo sapiens
  misc_feature (30)..(30): Xaa can be any naturally occurring amino acid
HARCDTRPQERSLWPHTLFSKHTLRGQSVXIWPTPCGLSFPPFQVTGKWTQVKCVGFISASLWERHTHLGITCEFPGSVALASFSFEGQGPLTRTSHYRPKAQPPSFTQREPYWLGGLSFGV

SEQ ID NO: 944796 - protein, 88 aa, Homo sapiens
MEWPLPFGVGLLRLVLVLTHTNLGEGNSPCTHISVTKLLRPNTQGRIDGSVKGLKENGAELTPVKDINTLYKGTQAQIGLLARIGPSR

SEQ ID NO: 944797 - protein, 67 aa, Homo sapiens
RQRLLTYEDHGAPFAGHLPRGVAVTTREPTPRLQEGEWRVHGREWGGRLSGEAVPPHPPLAYLAPGI

SEQ ID NO: 944798 - protein, 68 aa, Homo sapiens
MMDYSRSEPERAVTLVLRLATTLLCSTESSWDAAITCACYAQLHNECPLFHEPEPFTKQECYVVSPDE

SEQ ID NO: 944799 - protein, 135 aa, Homo sapiens
QVLLHNQCLSTVYTWTAQAGREPKLPPQTRNLQTSAAAQVADLPTVPVSHGSSHEWPSVCGDWCLQRYWTWHCLAAVRMRHRLHQLAAIWTTFTVLLKRHHPFVANACLPCAIQAKRSEGAACLNKWILNSNAPR

SEQ ID NO: 944800 - protein, 126 aa, Homo sapiens
VRGYSFPAPVGEMRVVQKPGTSLLRSTESSWEGAITFTCLEQSQNGGQPDFYAVEPYTKKELVAVTLPDMIRTYKVMAAENIPENPLWSPYTNIDLDHAFGKYYSRSWEASEPMGLDGPGTGYIDW

SEQ ID NO: 944801 - protein, 122 aa, Homo sapiens
FYKPYKALHDTAIISGIPAAAGVDLHEKFIESARDLHMLRTDGSELFQHVPQFDIDRMKLVHPIAILHYIASKYILYGKDITERALIDMYIAGIAESGELSLLLPERTSAVDANLASISERH

SEQ ID NO: 944802 - protein, 127 aa, Homo sapiens
PKWRLSYEPPASGRGSRWLMDMTHRTNLLNDYGYAIYGKRLLDPVLPNYYADLYAAHNSNSAEASVVCIIYTHNPHKLIDGSQAICIVAESRCTRLLSCELVRFSPVGYSFIYSYRLRCHVCDDSSI

SEQ ID NO: 944803 - protein, 114 aa, Homo sapiens
RLLIMIYNPQGHCNTVPIIEGQICKAMHTVKLRKRTEPDPSGSLAGHNHIYNVHATSKAYVLMKFVNLLNHVVRMSYWIHASSKRRTRYGVYPCTQHTLLTITVVTAASGGMTL

SEQ ID NO: 944804 - protein, 137 aa, Homo sapiens
PGYTTCSYVGLDRAGSDSQMGRSSSCSAGSQRKVSNADTLVQAELALASCLLLLNQDLAVCPTCSLMEPAGGNMGDTRLWRREDEKFIQSHEPKSTRLLMELGLISGICIIVGTIIGSGINISIKNALRTMGCRALP

SEQ ID NO: 944805 - protein, 94 aa, Homo sapiens
PSLLRCIPAVIASRAEVTHSEFQKAAEEVRHLRTKPSNEEMLVIYGHCRQATVGDINTERTGMLYFTGTAWCDAWNELNGTSKEDAMKAYISTV

SEQ ID NO: 944806 - protein, 126 aa, Homo sapiens
MSILLAATGHQMHREHYYLRHTFMLVDSVRIASVEVSYSLITRTAVQTMRDAAELDSEYYIDRVGSDTSRSRLDHADMKRIRTDHISTSLAKLEHDGVPLLQTRTCTSQLHNIKLDSYCRILTDRP

SEQ ID NO: 944807 - protein, 222 aa, Homo sapiens
  misc_feature (217)..(217): Xaa can be any naturally occurring amino acid
KIWRRDPHEFGPQSQDTKFRDFFLPKVLIRPHPPDYGDFQPLSVSPAIPPTLEAVWTLSRSLNQSKSCISADSLGQENQTHVPELPILGNVSPLGIRALGRWGRNLRSPLLPRRTWTPCLPDLRGQRCEPSIPRSCCIRRPQLLHACHLPFTWGTLGAAAAPGAFTNPPTLLMAHNFLLATRATEVYPMLGSGLRRPQFCCKPQDWESRKWVNEEGXWRVVR

SEQ ID NO: 944808 - protein, 209 aa, Homo sapiens
LQEFGISYSWYPHTTQEEGIIMSDDYLWFEGISFPYYGFQIRNLKVRDEIEIRYEDVIVLTYPKLGTNWLAEILCLMHSKWDAKWIQSVPICERSPCVESEIGYTALSETESPRLFSSHLPIQLFPKSVFSSKAKVIYLMRNPRDVLESGYFSGFVKELRYYGSWFDHIHAWMPLREETNSLVLSYEELQDTGRTLERTCSFLRKKFEL

SEQ ID NO: 944809 - protein, 101 aa, Homo sapiens
DERGCNCPSYTYGVIALLTVGTALLLTETRHAQLPQTIHDVERYSAPTSLHEGEIAHEACSELSGSGGWPSTEALQHMLGEQNGTPCNSSWEYRTLWLGTE

SEQ ID NO: 944810 - protein, 122 aa, Homo sapiens
MGTKGTAIKRYSRHSLGSSKPLMLAEVKVVIAMANEERIQIMATCLWHTDTTVIDAQLESLANPGIEGHDAASHVERMSPLVTDAKHMYTVMAIYAPLWRICKKRMRTLTNAGRNMSLLEDC

SEQ ID NO: 944811 - protein, 99 aa, Homo sapiens
PWHLLDARCYMKGTVQLLHSGECDIGYGSMYITLGNIGYIEADLCDYQALIEHPYAVRQLHMVFLIARPVTQTYTLFARDDNMASKCEDDNACDCDLDE

SEQ ID NO: 944812 - protein, 116 aa, Homo sapiens
MGTRLLPALFLVLLRLAFEVQGTQQPQQDEMPSPTFLTQVKESLSSYWESAETAVQNLYEKTYLPLYDELRDLNSTSTGAMSTYTGISTDQGLSVLKGDEYQPDPPSVDGESALHT

SEQ ID NO: 944813 - protein, 117 aa, Homo sapiens
MQRRHIVAAVVAMTRGNQRELSLPEEYEQSDSVKGRRDDRLSVVARKQRDLEIMQQKQNPFGLRLCAWSQCHTRSAFPPVVLTGSRTDGIPSALSLPGPFCALFPQRASLPLCHFRG

SEQ ID NO: 944814 - protein, 118 aa, Homo sapiens
RHHEMGLAPPEFKALLLCSLISLFNMCSICVLPQTHWWILDERDPRYWPTTCGIAEFPATYQTQVDTGLQALEDILHLGGNPTSEVKPVVKAIPLTYKPEGSSPHMRDAATLFPEVRF

SEQ ID NO: 944815 - protein, 133 aa, Homo sapiens
NHGHPHGSHTRAPTAYVYATHSSHPQRKANSTAHIKGQPLPPPKKDSSYHPRHCKGPYSYPGSTGAAVGAHDACGDARSALIAKTQIRPGSSGAPENLTFKERQRLSSHGQEVSHRVKASRILTELENELYTW

SEQ ID NO: 944816 - protein, 136 aa, Homo sapiens
  misc_feature (45)..(45): Xaa can be any naturally occurring amino acid
HGVLGSVGALRIPEGLALGYMHAMRAYCRLAGAVAAAHRSGAQVXPFAKGGTPAHSPENLLLHRAKGGWGPPPAPIFGLGKPVIMGFRDPPPPKKGGVKSPPNSSSPGVGPNLVFTGCPILNRGGGPPVWAGGPFF

SEQ ID NO: 944817 - protein, 141 aa, Homo sapiens
  misc_feature (96)..(96): Xaa can be any naturally occurring amino acid
RTWRMKWVTFIPLISLFSSAYTTGAFRPYAHMSEVAHRLKDLGEEKSIALMLIAFAQYLQKSPFEDHVNLVNEVTEFAHVLLMSQLTIVTNHFIPXLDTNYAQLPLFWKPMEKWMTAVHIKNLTEMNASCNTKMTTNTCRD

SEQ ID NO: 944818 - protein, 235 aa, Homo sapiens
EREREREREREREREQRDFIDQYTDRESARVWHLSMGDTRIRTVAYSAWLLGLLGRRGCRRVLGVACDTGVGSIVAVEDVLGVTAVDGGGLMLQYALGVLWNRGHGGRVRWGRGGGAAAWRLGTMWPGHEMGALMLGSAGGAGWVTCGAGEGGGVSAGCGWGTLAASSVRGGCWAVVVGPASASVVQGGGLREGDVGRSAGRTAWVRADGEQAARVVALGSRVDGAGPGRVGVGV

SEQ ID NO: 944819 - protein, 68 aa, Homo sapiens
GCYVTSTQVVTHCKPWMCTNHRHKMYKDKYILKNSDQTLNCEGTVSTDYALNVKLAESANNILCIVKQ

SEQ ID NO: 944820 - protein, 121 aa, Homo sapiens
MEGGDGSYYTQTVFLQGEYSSSDQRFFKGIGNYLRAEILYQLEIPPFEKDQSDLEALQQHMPSPELTLSHKIRTKLQNPDLLELCHSVSKEVVQLCEAKDGSNLCFSKRLCNPVALVPLWT

SEQ ID NO: 944821 - protein, 101 aa, Homo sapiens
MQIEIRAHSHAARTFLSEQALAVYAMVLEIVPRDIEDRIKERAVMYDEVTMSDNTDFMCEQAFTLKLHMTVGGNMQCLDGSYIRWVYMRTICDELGTRCGY

SEQ ID NO: 944822 - protein, 117 aa, Homo sapiens
DDVSNGERLAVVYHTVYLYIDEDCETRALVKLMSGVQTKNLLTELEGISELETKGLSYWASFNRILQILTLMVHDYTRSSEAVGKSIYGEKFGDENVILKPSGAGILNMVRWTPHCW

SEQ ID NO: 944823 - protein, 69 aa, Homo sapiens
  misc_feature (68)..(69): Xaa can be any naturally occurring amino acid
AVRIRHAENLMTHLVDDRGYASVPRESERGDTMSARKCDTHLRAQSTHEMWTPVLYKKTHNITHTHTXX

SEQ ID NO: 944824 - protein, 115 aa, Homo sapiens
  misc_feature (69)..(69): Xaa can be any naturally occurring amino acid
VNYMIGQKWYRQGEYGQMMSCTCLVKDKENPSVTLMRHRVMMMGRHTTCETCAEVYLSAICYCHALEPXGLALCQLQIPGGDPMSEGHLAVLNKILGVPVEPTLTFFAKRGSCLK

SEQ ID NO: 944825 - protein, 113 aa, Homo sapiens
MAYGTHGMTEVNRPSSYSVTDLGEPNLYCLLLIELAAMLNQRALRRIGTTRGKTVHLTGDAPDMMACPDFPPVEMWYPETMPIQMRASVDLTVKTVTCANNTRFHNSRACWYQ

SEQ ID NO: 944826 - protein, 49 aa, Homo sapiens
MTIGKHRRAIQEQKSSRIPYFHYKEHLCSLYLTTLDTRGKCICNVWPLW

SEQ ID NO: 944827 - protein, 53 aa, Homo sapiens
MRPATGADCSDILRLIKELAKYEYMEEQGILTDAEVPEHWTPGTQLGGFFLGA

SEQ ID NO: 944828 - protein, 119 aa, Homo sapiens
TIKALRNVDTADTREYTAGTEADDIIELAAEAHGPGVPHTLADGADAESLLEFNAVEMCIGLLTDVEADSGKQFVQAAEDIDDVPFGITFNSDAISEYQIIEDGAVLCKKLMNAAATVR

SEQ ID NO: 944829 - protein, 111 aa, Homo sapiens
GWRNTVRGHLIEGHRRLTICGGPNTNTEHPLTETHVDDVNAKSYCYLSLQTLLYEGEDALFIWRIRNIPEDEPITVFALVLHHDCIYFIDSRVDARQLSLISHNPTINALG

SEQ ID NO: 944830 - protein, 175 aa, Homo sapiens
MCAEQASIIITSSVVVAVAPIDVADRTTDYIAVMYTSCDTMQYFRSTWHHIRVVRILDHMHTHTTHTELWLSVLFTHMMSAAVCLIIYHDYDHKHPEPRLDIHHATRRSTLCGRSDAIVPREHWEHFSHNEGAADCETTQSASSGPSVEGSRPHDFCAHEQMTLTYTSKEDLTGL

SEQ ID NO: 944831 - protein, 63 aa, Homo sapiens
MPQSKSRKIAILGYRSVGSSLTIQFVEGQFVDSYDPTIVVDTAGQDEYSIFPQTYSIDIWLFL

SEQ ID NO: 944832 - protein, 112 aa, Homo sapiens
MASDYPRICKPAPDFKATAVVDGPSKDVKLSAFNRKFVLLCLYPFDFTFVCPTEIIAFTIRAHDLSQLRFELLGSRWTFNSPPPLGFTPPRNEGSFVPPDIPPLACMTTPLS

SEQ ID NO: 944833 - protein, 128 aa, Homo sapiens
ECTEYGGCCQTAAPSVGCTDMMSASSCSIAATEALRPAACERTSLTDLLSSGYNQALLFSTSCLCHAPADTHNAPYFKETSAVNGEFKDLCRDDLRGKYSMLVFYPLKCPLRGLHLEILVTEVDYHAP

SEQ ID NO: 944834 - protein, 143 aa, Homo sapiens
ERESRERERERESSVERVTVSESASVRSIPVFPLLFYPCALPIGVPLPCVPSLAPFPLLFLLPCSFASWAPLVSIHVSSFHVTSALLRSPVSPCCGHFLDFSILFSLLSLPYFLLMFFFFSLTVFFCFILFHALFLSPFGLPV

SEQ ID NO: 944835 - protein, 173 aa, Homo sapiens
MTASLVAAINVSPPPNLNMSSLYTYLFSVLQDAPVTGAKITIAQMHVFKSDYSIFEPIGAPAVFRPGRGPFFKTNPFYYRLRKTIQLQRILDITCLRIPTWRNSENLLKQPEGLSIHEPSSKGFKHETASLGLQTVSGAPHLDKHLNKSLKLEQNKKKLANKYPTSPNSATPP

SEQ ID NO: 944836 - protein, 135 aa, Homo sapiens
PGGVRGGPCRCARGSPLALCVSLSVAPGALRLLLPLSSVSACSSFSRCAGFSRPFVSFWPPCCLLPLCGPCSGLLVACGPLVRLVRLVVFLRLVRLSLPVSSPLFGVPVALLLLCSCRCPFLARLSPRSFFPSFG

SEQ ID NO: 944837 - protein, 140 aa, Homo sapiens
YNEAQRILHETAIMADKPKLHYCNARCRMEYTRWILAAPAVEFEERSMTSCQDLDRSQNGCIFDFQHVSRAEIEGMNLVQARATLNYSASKYSLYGKDITERAMIDMYIEGLANLGEMILLVPVCTPEDKDAARLDQRAP

SEQ ID NO: 944838 - protein, 77 aa, Homo sapiens
VTASPKRKDCCKEPQAVEDNWLEYFVTDTDLVLFVMNNVYRFGTDKIIANVHYNGKIARVYSPAGVWLYGGHDDKYH

SEQ ID NO: 944839 - protein, 145 aa, Homo sapiens
ETRSMKAFEQTYRENLRIALRYYNQSEAGSHIIQRMYGCDLWPDGRLLRGHDQTVYDGKDYIALNEDLSSWTVADTAAQITQRKWEADRVAEQLIAYLEGLCVERLRRYLQNGETLPRGPPQTHVTHQPVSDHEATLRCMALGFS

SEQ ID NO: 944840 - protein, 104 aa, Homo sapiens
HIKSRSIQRSAAAVVATRTVRTNPYVDSVVTMEDMNQYSNIEEFQRDPRYNASTNQQEDGEMVIGGLSSDTSQNDLTENLARFSEDVDCASDAASADGLELREH

SEQ ID NO: 944841 - protein, 120 aa, Homo sapiens
LRSFTMKAAVLTLAAHLLTGSQARHYWRHDEPPQSRLHRVKDLATVYVDALKDRGRDYALQFERLRLGQVTLMLLDSCYSVTTSFSKLRYSSHLRPTSSGITWAMVQSYRDDLQRWQEEW

SEQ ID NO: 944842 - protein, 133 aa, Homo sapiens
GRVSLIILLTDGDPTVEETNPRSIQSNEREAVRDRDRLFWLGYGIDVSYAFLEKLALDNGELARRIHEDSDSDLQLQDLYQEVVKPLLTAVTLECPSNAREEGTQNNFRLLCMGSEMVWLRLQDRYSDELTAT

SEQ ID NO: 944843 - protein, 132 aa, Homo sapiens
GSVSLIILLTDGDPTVVETNRRSIQNNEREAGGRYRLCCLGFGFDVRYAFLQKLSLNNGGLARRIHEDSDSDLQLQDFYQEVANPLLTALTLEYPSNAREEVTQNNLRILFKASEMMKAAAPGPWSDVLTAT

SEQ ID NO: 944844 - protein, 109 aa, Homo sapiens
SYMAAPLGGVVSGQPPGPAQGSPGLAGQASVVQAGPGASRPSSSTLVDELEACFEACCASLVSQDYVNGTAQDVRTGKHCVCVHNGLGFRCLCYLLVICFMCFSAALIL

SEQ ID NO: 944845 - protein, 110 aa, Homo sapiens
VSTMYAQAEDVYLGMGAHHCARRHPDNSDGLLLRLAKTYETTLHKCCTSVDPHECYDNVCDESKPVGEEPQNLITLTCELYEHLVEYKLHNALLDRCTPKVPQVSTSTID

SEQ ID NO: 944846 - protein, 134 aa, Homo sapiens
ERERERERERERERERERERVDTDCHLLLQSSKPSSHLLVCSRWPAVLSLPPLLSLSPQHILVPTCTFSPCAATFQPPMCTFLTCVVSLCVPGYASAALAHCLLVYSSLHALWTLSLLSVTALHVCHASAIIGS

SEQ ID NO: 944847 - protein, 209 aa, Homo sapiens
  misc_feature (173)..(173): Xaa can be any naturally occurring amino acid
PPGRRGPSPLALLLLFLLGRRLVLAIFFHLPINSRKCLLRGDSQGPALTGAYEISDQSGGAVGLRSHLKITDSAGHILYSKEDAAKGKFAFTTEDYDMCEVCFESKGTRRIPDQLVILDMKHVVEAENFEKIALRSSNHYRYSCDAYKTFFKSIADDLAYMKKREEEMRATNXLTNTRGLYFSIFLMFWFIGLDTWQVFYLRRFFKGTN

SEQ ID NO: 944848 - protein, 243 aa, Homo sapiens
  misc_feature (228)..(228): Xaa can be any naturally occurring amino acid
RHQGGAVLLRIVELVLMLLLPTLILGIFLHLPMNSRKGLLAGDAATTLPLIGAYETYTILETLSACAATSRAQTLMAIFSNPNRMLPRGNVPLHTEDYDTFHMSQSETRNMSETRPTTVDIHDTPRGGELSRLDSTSFVSLCIERRYATPIRPLREYTRRDEIHQELRRVDACCLPDNKHICTILEDLTNVAVPCTRYLRGVLPAELLLANKLIVYQRWIFSHSVSTXPRSLLSIFFRGGTRW

SEQ ID NO: 944849 - protein, 70 aa, Homo sapiens
RAQECEAVVSYDHATVLQRGQQSKSLSLQSPKEADSDRGVANGDIAFELDRMFFCSQVICMASNFTVVFY

SEQ ID NO: 944850 - protein, 116 aa, Homo sapiens
AHQRCRGPFPLAQLLLFLLGPTLVLGIFFHLPINSSKRLREEIHKDLLLTDAYEISNQPGGCWRRRRHLKITDSDRHILYSTEDAYTGRSASTTDDYDICEVCVESTGTGRRPYQR

SEQ ID NO: 944851 - protein, 112 aa, Homo sapiens
LQALIDTRELLCYEPDGRPTFTTCTAEHTQRHKPSEETYDLAMDRLSKGGRVWLSTDRAGRLTMGIPPPCTTIREPDLQERSVLQDSTELFTIHRHLTVETPMPVAPTVHGV

SEQ ID NO: 944852 - protein, 92 aa, Homo sapiens
ESRASSVNCTNEDYICYTLLNTLKTILAALGEQLIYTRGAYIESASDSYATYEGCRVPKTHDVLLLLDELCAGEATCSAAFRGSCAANKYHT

SEQ ID NO: 944853 - protein, 185 aa, Homo sapiens
  misc_feature (5)..(5): Xaa can be any naturally occurring amino acid
  misc_feature (172)..(172): Xaa can be any naturally occurring amino acid
SEVPXWTAETYKLYVITTASTSDSEQTLIRLYSLWYHIQTHLLTYTSSLLKINLNTDLRINCTISITHSHTLIYNLITFTLLFMSIYQRVHNSTSTVLSTSPSITYYNAYMYYQNLLPLHSIFTYTLLLLISITALLHHPRITSFTSFYYHIHLSILSTFTHSLFHPTIAFXTTLTPTTSHPSLP

SEQ ID NO: 944854 - protein, 198 aa, Homo sapiens
MVHYKEGWEPVSNGANKIWLVNGRILLIGNRVLSLSIRVNWEIECEEQYFNLAMSSGTGVLQDRQIYSYSVVGSRKCLCRFNSAMTPSSRFFASHKGGSSVPGTMTIRHLKASVLNSMDLVAALRVLPLALSMQASQGGIFSQACTPNGNDSGMIWSTCESRWSSMTKPAMEVIPFSRLTIGEGPQRHLGASKQAGNV

SEQ ID NO: 944855 - protein, 128 aa, Homo sapiens
DAAGRLRLGVDLATRGGATFSCGYSAERVIRRQQVVMAMSVDLGSINITWAGHTLRCWLASFRPTIAMYELSIHVHAGAVDYQCVLQWVEQQASQYVAATLVDLLTSLRSVAEPAAPSDACDHYVVFV

SEQ ID NO: 944856 - protein, 60 aa, Homo sapiens
MTCVKFLSVMCHPPFDVVSLKYLKIQSQHLLSSFPSFMEFLFQNKGSDSPTALKVKIYNY

SEQ ID NO: 944857 - protein, 101 aa, Homo sapiens
  misc_feature (48)..(48): Xaa can be any naturally occurring amino acid
HEGAWNNCFTEEGPSSVRFTPDGKYLIVAQLNLSRLSVVAAPPVGSIXECSVISTIQLADQVLPHLLEVDRKTGAVYVAEIGAKQVQKYVPLNSYVPSLGS

SEQ ID NO: 944858 - protein, 96 aa, Homo sapiens
CNRCHAGNPNGRYYWGGQFTCDMAIHGTDDGVSMDELDGVMGLNVEDEYEDHGLIATAIVHNTEILALVYVTTFLYIMLLEFYFIHYIPVILSQQT

SEQ ID NO: 944859 - protein, 109 aa, Homo sapiens
MISMRKWHCTSSICRCDIYTGCRIWRITGTQELTAEGANAHGIATLSIRHRAHDITCTLSLNEVHLLTNASHTVRCRAMSNGLNVNSCLAPDVQAHAHALDPIDRHTTV

SEQ ID NO: 944860 - protein, 105 aa, Homo sapiens
MGTSKDGKKLELSIKTQISKIRFLKKRSPLGLVCCPTLKGAKEPVWSNEWSLGVKYRKISHLERFKGTVLPPHPYRAIWVPVFYQTVSYHTVMCFHVESTFGFFL

SEQ ID NO: 944861 - protein, 37 aa, Homo sapiens
MSIAGSQVLLQFLGIFRFLTAPSLLCSCFLEVGVKST

SEQ ID NO: 944862 - protein, 108 aa, Homo sapiens
TRDDVLRLRMYASGNDLRAQGSLHCWMMYLSTVRINRRTYGVTLQGQTLLACLTLEAAIATGNCVSGSTTQHTTCGSHVHCTLLADSQIRSPPLPYGTCELYGLSDTY

SEQ ID NO: 944863 - protein, 113 aa, Homo sapiens
RRTSVLHKCAAPGGQGPKTHGQKTGRVVKLTNKPWFYELKVPNGLHSSPLAHMLYYNMGFDLTFQNPQYRQTGCKRFPVARLAVCLVRFQACQALDSKMSAHGPGCALELLTS

SEQ ID NO: 944864 - protein, 234 aa, Homo sapiens
RRGWIRQAGAAGSRMNFIPAVLSCRRLGLPGPPDVADHAAYHPFLRLSILPASAPPATSNPDPAVSRVMNMSVILPLSVQRVERLCVDPRHRQGPVNLLSHPEQGGEVTAHYEREAGFSWIEVTFKNPLVWVHTFTEHVVVTLNRISSVYNWKETLFSVMPGLKMTMDTTGLLLLRDPHTVTISLLLWDGRGEGLQLLLRDTDRFYSHAGGTLGQIYQEVLFGSPQHHMTADAH

SEQ ID NO: 944865 - protein, 80 aa, Homo sapiens
MCPRLPRVPIAPGFTLCVSTSGPICTYRALRYRNETLRGSPGPNRAGTSAAYGMLSTSCARFSLVQAGIVRISALYSMAM

SEQ ID NO: 944866 - protein, 121 aa, Homo sapiens
  misc_feature (60)..(60): Xaa can be any naturally occurring amino acid
MAKIIARDLRGKKKEELLKQLDDLEVELSQLRVAKVTGGAASKLSEIRVVRKSIVRVLTXINQTQKDNLTRYYTGEMYKPLDLLAKKTRAMRRLLYMHEENLETKKHYREERLYPLAEYTL

SEQ ID NO: 944867 - protein, 109 aa, Homo sapiens
  misc_feature (44)..(44): Xaa can be any naturally occurring amino acid
EAVIAPRDEVVRSAGTEALPVLDRDNYRTTGSTVGLLLLPILHXTDGDWSCAGLRDRGEAHRLAKRSATLTQLDKSTHEKASQVTIGDHCLQLGTARMSKSAPILKGTS

SEQ ID NO: 944868 - protein, 110 aa, Homo sapiens
MKCVTDMSLLCLFSSAYFRGVFRRDAHCSEVAHRLIALPEESFKALAMIACAQYLQQRSFEDHDPSETEVTELALYGDKLCTVATLRETYADMADCCAYQEPESVLLASQ

SEQ ID NO: 944869 - protein, 248 aa, Homo sapiens
GEPGPNPRGNRDPCHGPKKRLPAGRAQFCVRRNSGVLVNRQLPPPVLKFSTSSGIRKFQKASFLKKWRGPELLQIGCRKVAFDWAVSTPGHEWGHENIRGEWVCSEGKHLSPNQSNEELIVAVMLLYPVEAVRLLVCHPAVSDKLGTVRWDMHLSSMLLSAHLAKLVLNQLVWNQSSIRTMELKCHIQTIRRVPSIIMSLSQMFISLTGTPGYLVHLLQAIMSRQKSYPAPMLLEGMSGVAALNQPPG

SEQ ID NO: 944870 - protein, 136 aa, Homo sapiens
VAAGSPRRRPHPFPLGGTRLLATLAGLFPGSPFSPRPLRRAAGPIGRALPFLSHTFPTLRSFPFPFCDFLFFPGWALWSSATLLPRSQISGHTFGLASRATASGVSFPPLLVGVGEDIYRKEIGGLFPLRAGSGHR

SEQ ID NO: 944871 - protein, 99 aa, Homo sapiens
MSDSAGCLPLPCALFMSAYGLVLLLELCFPGAALYRVLVVPPVWASSVSSASPCELTVEASYPPERLADLDTFMRYCTRFGDLIIVISYNFAFFQSTLW

SEQ ID NO: 944872 - protein, 107 aa, Homo sapiens
RGQEEGGSPQSKASEYSASFYAYYGGEIDPENRMRHVKVRAGLVQEIRELAVSGRFAADEDRHTLNKPTRLRLTDSVNWRVSQVEQEMVDDNRCWIINMDMTLQVKR

SEQ ID NO: 944873 - protein, 95 aa, Homo sapiens
QRLTLRLLTDFYEAALRHKAQPIALRDLHVDYTLGPSYVLVRLDISLALISGITDDVSDDGVSVPSSSRPLNRQTPTAIHDSIAVTRRYGVTRVD

SEQ ID NO: 944874 - protein, 72 aa, Homo sapiens
MRSGVGPGSRERNRIRRSSLKNMGCAEIIRGYRIMDATNLHGGSLVYLYPDILKEEAFRRVCRARSDHPEAA

SEQ ID NO: 944875 - protein, 113 aa, Homo sapiens
APIGERRCCKTLCEKNEEGPGTTACCGIWTCFRERPGLWSKVCKEFSHLGKEDFTSLWLGLCTGFLTEACCAEGADPDWYDTRTLALSAKCCESDSPFPVSPRHCWVLYRGLA

SEQ ID NO: 944876 - protein, 142 aa, Homo sapiens
LCTIYRERWYRISLVEETHMRGSGSLVHHYLLRGRGATTEMKEWGSRHLDLLYPTILGHEGAGIVESIAEGARTAKPGDNSITLFLSQCGECASLLRSEGKFCIQLIQGRTQLMSDGTRRLHCRDSQYITYVIPRPSVDTQG

SEQ ID NO: 944877 - protein, 137 aa, Homo sapiens
QILYQARTTVSRAHSSCIELEDSTLTHYYGRRCSTAWDYRLTEGYADTSKANGLTCAVTWTLCCWAYSYIRICCAGTSLAISEKVRGLRYVAQYIADWTRWEMTVNTCGYHAESYLGYEAHIIIILLRDIDDVCSGL

SEQ ID NO: 944878 - protein, 108 aa, Homo sapiens
MEPFRALLLRIKPDLVDNLPNAPFFLSDPMGLKPVLSLAVIVVILCTNLEEMGFDMAYVVLCQFLVLKDEDLFREWLLDTCGAYAYALPGLLLMPSTVVRPPFLMLSW

SEQ ID NO: 944879 - protein, 137 aa, Homo sapiens
EAQRSRDTGSYDLAASLYRWQRREEAVLQRRTHYHYGGGATSRRHAYTEHKPRAVYRSESEPHGAMVGPTQGAAPAAGSGAHTDCGTDLAGTERRRAQSAGANSDASMNDADESHSSAQDTLHQLRHTGMCRQFIGA

SEQ ID NO: 944880 - protein, 119 aa, Homo sapiens
KKASWGAGLVYNNRNLLEVPKLQLLRWGLHRRFCVGVGGYCGNQQSAYVKVSRERVPHERSNPSFIIQVPAHPRRLMKEYSPIWRFMSGGFLPHDNSSSMCILCIKCLHGRIRLGTCAG

SEQ ID NO: 944881 - protein, 68 aa, Homo sapiens
MSLELELVLHNVDEYRKHTLAVNWRWPCFIDHTGPGKLAKDTAFYFRLNHAGAVDDAMRAYRDPEPRW

SEQ ID NO: 944882 - protein, 71 aa, Homo sapiens
MGLLVASSFVIPPCTMVLFTYDLACSGGFLSAWICSVCSMSVHTFILHVLSVQICVMLFVFAFAVLSLVAS

SEQ ID NO: 944883 - protein, 31 aa, Homo sapiens
MTDCRAKPANEHRQMKVYTGSEPESEDDGGR

SEQ ID NO: 944884 - protein, 86 aa, Homo sapiens
GTRSQLTVPHDLSEPQLLEETCSHDRGEALSHGPGCKVLKAAAAMAARHPPEPQLCWQTSWCEITTFCICKRSPYILKTHVTDSDY

SEQ ID NO: 944885 - protein, 192 aa, Homo sapiens
HEVYGDCDFQLGKLDGMLSAVYAANAVQTQAEDVRKECQDCPLLATLNDTSVVHSQKAALAAFNAQNNGSNSQLEEISRAQLEPLRPATYEEYTVTGTDWRCKEAHRQQVNLLEEPAGVQHSRDYSPQMSMRVHRWDQCTLINGTDSQCYPDHGLSPRDMTRHTDHSVRYRHSKLARSPGGIRLAVSGSDLL

SEQ ID NO: 944886 - protein, 84 aa, Homo sapiens
  misc_feature (32)..(32): Xaa can be any naturally occurring amino acid
HEVDCDWYLTQERLIQICHYKGITVTAYSSLXSTDGPWAKPDYPSMLEDPRIKEIAAEHRRTADQDLNDAYPEEGCIEAGTSRM

SEQ ID NO: 944887 - protein, 109 aa, Homo sapiens
KKRTQMLIPTLNSVSEITMLTAQTLMRADRGVRIWSAMNTEIASDVAVPIPSEHPDLITGHACGAPAETYIRSGTYSRTLLLPYTPGSDVSAVIDAVEDRICFHYRGPS

SEQ ID NO: 944888 - protein, 72 aa, Homo sapiens
GPHTQFEQWVMEERVDCLEQGGRGSVLQVMPFTSASELVKVSAMFSPKVDLAITDLMLPLGRQEAARAIDAL

SEQ ID NO: 944889 - protein, 73 aa, Homo sapiens
GHCPNEKCTLEGEAYRADTHVHKADYEQRIPAAEREEALTLGEENAFHLCREKPIRSYIIVDTSIELCAELDY

SEQ ID NO: 944890 - protein, 66 aa, Homo sapiens
AVLSCRAVLSDSPVFDAPFSPPDSLSDRDSYLSGSMSSSSLSGSESASLDPGRRLPIVSRLSIFDD

SEQ ID NO: 944891 - protein, 113 aa, Homo sapiens
HFEESQDVCANYTQAKDDFLSMKDMNMQEGILITVARCCSDCLDISTLEKRCAAANPDECYTEAYDEYEQLGQSKFQNAAISALHQERTTSVNSNRTGLKRPRYKGQHNDVTC

SEQ ID NO: 944892 - protein, 105 aa, Homo sapiens
DRLASTGRNLCKTQLVLYDDAEELNRSAGELPKTGESIHTVQEEVDTLLNQDQAQGARMPAKDFLDRLCCLDNLKASLSQVGVDIEMLKTAVDSLDAYSVNIETN

SEQ ID NO: 944893 - protein, 126 aa, Homo sapiens
MTGAYRVFFKNSRSYAFHYKDAGLTYTPESELTEDYTYTSYYHSTFWKTLTSDRASAVYNENPLREDELHNSPASVLYLTFRGMKTYTYYEGSTQVHISGSNPPVLFHDRRPMFMGFERLGLPEAP

SEQ ID NO: 944894 - protein, 131 aa, Homo sapiens
EQLTTGPSACLDIVAVSGRETDDDDRMDIPLDLVLCAGSGKRRRRGNLPKEAVPILRDWLNEHRYNAYPSKHEPCCAIQTHLYKLQVCNWFINARRRLLPDILRKDGKDPQLTISRRGAKISAELCRVRDG

SEQ ID NO: 944895 - protein, 111 aa, Homo sapiens
IIPAAGYFQKVAQYVHGARGVSIADEDQVGFGRVGKHIWSFQMYGEDFVPDIVTMGRWATGTRWHVWLQPKKLPKPSAGLGWNIVIRMEVQYLVLMDEAVLDIIVLDEQKA

SEQ ID NO: 944896 - protein, 105 aa, Homo sapiens
MSIDIESSDVIRLIMQYLNENRLHRALVTLQEETTETVNTVDSIESCAADINSAHWDTVLHAIQSLRIARPLIDLYEQVALELIELRVVCCQVTYETDDPMIMFY

SEQ ID NO: 944897 - protein, 124 aa, Homo sapiens
IVERSGYSDVMSEALPPAVYQYNCMLYNVTIQDVYTYVATKDNCYILHERFSKNGPTTSAIVYVQDTKQIQVDKDLQYIGRHVTSEMAAQLDVEQLVHSVHLTHNSDESSIITYDASIFTHDSR

SEQ ID NO: 944898 - protein, 97 aa, Homo sapiens
MATKAECVLKGERPEQGIFNLEQNESLGPEKVWGCIKGLTGGPPGLHAHEGRDNTARCTSAGPECKPLCSKVGHRMYWHVGDLGYETADDGVADVSL

SEQ ID NO: 944899 - protein, 151 aa, Homo sapiens
MWAQRMGVLGEEAPMFPNQTPGLRETDDLEERRFHHLAQERCHTCIGRLQYERSMLPTGTRAGREPNIDRSRLSKSAPYTGCLGNLPYDVAEESIQEFFRGLNISAGRLPREPSNPERVELGYAEFEDLDSLFNGLSVNEESLGYTSSSGL

SEQ ID NO: 944900 - protein, 78 aa, Homo sapiens
GSLWCVYTRGTQIVPVLVFVIVGLGLKGQLTQQWLEDEMILHVLTHSGVCILLVILIVRDYRRSESVRGDTCQLDMRA

SEQ ID NO: 944901 - protein, 214 aa, Homo sapiens
  misc_feature (1)..(1): Xaa can be any naturally occurring amino acid
XTHPWARFVHCVKGFGNLDFRGGLRGVGPGPIIAQGSFVGLPIINSFRSSDWAGAAILSGGPVGQGNFDRNVSLMVKITPHVRFQKWIPHGGADHQRKVGPPGRHNFAPGPQYGLWHGWSLDFTRPSLMSPGYESWTFRGPHQLNQKKWQSQGLPGTGEEVSSQLVMSARAGTEALYSRTYRPAGYEKSMVWARQSAAAMSPASGICTPPGLSV

SEQ ID NO: 944902 - protein, 108 aa, Homo sapiens
QKRCLRQGTWSCARGVKEALPLLAETTPDHGRHRRLLLLTILMLLLTTGAVHGWATEDRPRTREEDCHLYAAGHEYSREAYPVSVADHSLRPKQSQYMQDRVLLRRNS

SEQ ID NO: 944903 - protein, 132 aa, Homo sapiens
CLPQQTCDSGPVSRFEMMVKGSGFQAVELLTTAPAGELPEPSAQNAMLEENRAHLSTCPDHQTRTPHSMHREQLACIYKTGSCLTSTLISRVAVIRQEALFGILPVSSMSDMRTQLAISKQGNWLFNVPSSC

SEQ ID NO: 944904 - protein, 35 aa, Homo sapiens
MTRYTEYDMTMYRRTVQLMRKLTERLTKRPDDHVC

SEQ ID NO: 944905 - protein, 141 aa, Homo sapiens
GAAARCSSSSGRGGRLWSGAGGGSAGSTPPPRIPTERRTSMMRTSAWDRDRQDWRTYTLQESQPYGVLGDAQNAQCHPALMYLACACPPTLMDLHYCTVSLLGFIRTGLIELIIACHTSHHSNCTLHIHSLCTYHKCISYL

SEQ ID NO: 944906 - protein, 68 aa, Homo sapiens
GFMVRVKRLGLLRLQIRLAQCDIHMTLTLRIDVSGGDRDSISCHASKTIGHSVACCLHENQTATKLMT

SEQ ID NO: 944907 - protein, 103 aa, Homo sapiens
  misc_feature (101)..(101): Xaa can be any naturally occurring amino acid
MSSRLMLRETLLNSAGWNDTCDRCIYFVALSEMTMNLCRCYKRNAGFYHKHAVSVTFKVCPLTNPLSVKIHASRLWEITCYTECLRCELRQCACALCSRTXYV

SEQ ID NO: 944908 - protein, 186 aa, Homo sapiens
MGGPELAQHEELTLLFHGTLQLGQALNGEYRTTEGRLTWLRNSLGLYGRTIELLGQEVRRGRDAAQELRASLLETQMDEDMLQLQAEATADVLWDSGHAQNVLRDNVHRLEDHLKSDCLSPCYRAIEDLAHDDKQSHILWALTGHEQLEKREIVEQEDRLRQIQEDYTQRRIQAEYACMELMTSCC

SEQ ID NO: 944909 - protein, 43 aa, Homo sapiens
MLRLINTTSAQLLIAYIGYPTVSPPGECLFHRESGRSPVRVVT

SEQ ID NO: 944910 - protein, 73 aa, Homo sapiens
RVAKMNYHSRAYYIMDNRYTFWLMEYLEITLPGEPMLRPGKPESYLTTDKRAHSPMLLNIVKIYLSRGLTYRA

SEQ ID NO: 944911 - protein, 168 aa, Homo sapiens
  misc_feature (115)..(115): Xaa can be any naturally occurring amino acid
  misc_feature (165)..(165): Xaa can be any naturally occurring amino acid
SLHTGLLRETRQSVRLDTRRLQYEYSFKGPYLMQSDSTVPFRAYTWNAIERADQVCVARIDNKPERLIRGKYSGLWNWEVEVTFGVTGRCLIGGQGLGFGMRDAYDYDAEGSGVXSSTGILMIGHNGQSDCDHENYGTGQAWARCHRDYRANTILCERRIPIARXHWL

SEQ ID NO: 944912 - protein, 117 aa, Homo sapiens
GRAYVPIAQVKDVCVVTDQISVFVTMFQRNDRNSCDETFLRDLPIMFDVLIHDPSHLLNYSTINYKWSLGDNTGLFAFTNHTENHTYVLNGTLRLPHCGYSTRTLSATVTTTQTFDP

SEQ ID NO: 944913 - protein, 105 aa, Homo sapiens
SLRYVLAPTVVHSIIVYDKWLAIDVLVPLHIECPCRMKHYVPGTYHYYGRCMNLATDSQDSTYSLSTRVDAQAAILMRLADCGSISTFESLAVMQRRIRHRHTDC

SEQ ID NO: 944914 - protein, 120 aa, Homo sapiens
DVGGKRSSKRDAESGFLGLLPTSVDPALRRCMARPKKKKRSWRLLAHEPLMLEVDQVLEDVRLQERSSGGLLPEAPNECLFLVDTGFKERPLLGDLILENTFKVPARDVLVHHVPSAEAE

SEQ ID NO: 944915 - protein, 139 aa, Homo sapiens
DDHHTLLEAQEVVTRAQLWHSLLAPDYALTAAVTATHITIMAIYMCDPDWVGDTPNRRTYADDLNECIPKVMHAEVTMTMEWTLLWPYEIHCKKASVDDDLEHHWKRHCSSARVRLTTHLSNDYGMYYSVRMHGMGSVA

SEQ ID NO: 944916 - protein, 101 aa, Homo sapiens
AVKETKRERRPHSRTVHGPPWTADAAQEFQCHGGHAFLAPLAATLVTQLKGFGILWPHCEEIRVWVGGYEEDFHFLESGVKNAGIQAPFQGGAGEQVCETI

SEQ ID NO: 944917 - protein, 99 aa, Homo sapiens
MSLECGAACGPCSVPCARARYPPRPVRREPWQLGVGAVRTLRTGPALVLVRKFTEHQWVTTVALEQWESAILHRKRWERVWYWRLPESWDVRLYSPLSR

SEQ ID NO: 944918 - protein, 66 aa, Homo sapiens
GTSIEWLPVDAMIENSRPPSHCHPSWYCSQPEMAMTYLHRLGSIGLREMAQLYGTTNATPTGDVYR

SEQ ID NO: 944919 - protein, 218 aa, Homo sapiens
  misc_feature (193)..(193): Xaa can be any naturally occurring amino acid
  misc_feature (205)..(205): Xaa can be any naturally occurring amino acid
MVDSVYRTRSLGVAAEGLPDQYADGEAARVWQLYIGDTRSRTVEYKAWLLGLLRQHGCQRVLDVACGTGVDSIMLVEEGFSVTSVDASDKMLKYALKEGWNRRHEGAFDEWVSEEAGGVTLDKDVPQSAEGGCDAGICLGRCAHLPDVRRDQSEHRLALNCDHILSTGWAPTGNNMYYESDLTKDVAASVVIXNNGPHGDAGLYXGSAGGCADGCAGW

SEQ ID NO: 944920 - protein, 111 aa, Homo sapiens
DLFTREEFMQGAGRLVLYKPCVVSDQNMNMHLIHDLRIGVRSCDTETGDTVESMRESGYTALQSNISSQAACLDGVVRYPICESRIIVTLRAWSTGTVSTMILLGCDSLLR

SEQ ID NO: 944921 - protein, 60 aa, Homo sapiens
MNTRYVSQDALQRWKNAPLTIPEMRQCVNRIGETECQYIWLRNCANDAFYGLAYPWRDTV

SEQ ID NO: 944922 - protein, 104 aa, Homo sapiens
VSVSSVYEHHESTPLIGGQRTGLESPTVIDFSDITGNSFTVHWIGSLSHHYWLQDPALFRALQWETSRRTGAPLLEFHYPYQPYFRHRVCGQHRCVLMAERVPY

SEQ ID NO: 944923 - protein, 105 aa, Homo sapiens
TRCTCVCDSTIAHSVAPIFCAHVRALTFYQSRGKSLSRTHATSLKKAFCLRASLCPDWWCCDQASETLASWSPCMPNCAYMVKALKQHIFTVPGKNVGSLQPLVS

SEQ ID NO: 944924 - protein, 141 aa, Homo sapiens
SAEVIAGLLQSLGGQRPVLEADGRKAFAEDDGVHRTNTAGAHDSYCSYTSSQAVRKASLVTERHQTSWHRCMLDSRLTAVRYLVGANRVPAEQGTLGIAEQYYSRVHINNRCYDLDVGSGHPERADAIKGSLVQRLKCYVI

SEQ ID NO: 944925 - protein, 127 aa, Homo sapiens
  misc_feature (109)..(109): Xaa can be any naturally occurring amino acid
  misc_feature (121)..(121): Xaa can be any naturally occurring amino acid
MSQLNETDVILLEQNAPCCGHCASLYNVYEKDVKELILRATSIARTTDYADADTVLPKCLAASNYATLDMIREGMPYQYYDPCETVTHKQVQDYYEDEHELQSYLQLTXVKDLSALQACSXDLSYST

SEQ ID NO: 944926 - protein, 120 aa, Homo sapiens
KTSLRAAGQGLPGGGVPCDSEEIPEIQQKYPGPARSYLCGGHQPPGPKRKKLKCLAYDCYPGGPLFFTTETALTSPGSWWCPLRTQPPTPATCSTADWPSLSWGPASAVRKQGLKAVGSQ

SEQ ID NO: 944927 - protein, 199 aa, Homo sapiens
PFKVIFRSTTSEVIEWSTTTVPPQIGQRFDRTSQGALRTLCDVQGSSVAFKCIYVCHWWGKQILSRLVIDLRAPGRRMDPRIQGLLLSRVEVHSSTTDPQRITSAPVVAHSQSKGDQCPPSIHTNSSRFSRILPIAYMGATFRSTLSSPVTPILQISDNTGAWLPAHHAMSNNQVQITGGNHNLKGPLKSLQHKRHEQD

SEQ ID NO: 944928 - protein, 80 aa, Homo sapiens
  misc_feature (8)..(8): Xaa can be any naturally occurring amino acid
DQVSNPEXESLPESRESCPHYDYVGDDSPEPYLGAGSHYEASAEYPDHCRALLAYLLCRADYRHVCLTSLCLHPHSYIHF

SEQ ID NO: 944929 - protein, 143 aa, Homo sapiens
  misc_feature (110)..(110): Xaa can be any naturally occurring amino acid
MLNCCDCCGLEDVRECLHSDADMEDEATRDSAMICFMFHLMWTGRFTCLSMCIDKTWRRIHPCVSTQTYSALVLMTYTPIILTEGQSTGTLMKTLALTTVREIQSLCATXMPPMLNLVSPHGASGYSDWGAPYSLAYRIGDVA

SEQ ID NO: 944930 - protein, 130 aa, Homo sapiens
  misc_feature (100)..(100): Xaa can be any naturally occurring amino acid
MGTFSATELTGYPQSVHELPASLSSLSKNCEIVRDCRVWSVNLSNGMRDDDHLRCRTRADIAMMSVSIMILAADALNDCCGDTLGAEATFDDTYGDEVSXVHNTNLLEIMADCEDREHNYSRRTRGVTRR

SEQ ID NO: 944931 - protein, 96 aa, Homo sapiens
MELERAPLPMRILPHSYRCTNERVPFSKLSSNMMPHMTYQPGTYCEAGLMPGGYTAIELMPPGHISPLSYTLPIFFHPPLSGIQEFQELSPTRFTL

SEQ ID NO: 944932 - protein, 178 aa, Homo sapiens
MTIICTVVRVSTLSTATETLKWTRIYRTVLTGSSPAWQTTSHLSTARCEDGSLESSSPTRYWKSLAPDRSDDEHYLLDNTSRPRYSHSYLSDSDTEVILTETNTNPMGVVGSHFTLDPGVAWHLSQKRRAPVLTTRLSDCMETLRLFLHGHFKVKGKMSSPIEQVWKTIIFIIFSFFI

SEQ ID NO: 944933 - protein, 144 aa, Homo sapiens
MLCLTLWTRWTTDSGYYTEVLGVLLGMTGLRYEVQADLQLLSSNDSPAYDSQSAETTCMSHCATARNRGDKNSAFYVNAYCTTYDLQIPCWICRLKATQSINAYDVTDALRMPQSSHVVDLRTHALRYTLTWLSYLPSHDPVPA

SEQ ID NO: 944934 - protein, 132 aa, Homo sapiens
PGLQEFGSRGLTSFMFSNRRVTGRRLYIQLTMGNLNRNLIALNPDGLYHTLVLKSITRFEHNECCHYTMKSLLPCQEHLNQHYIDPKDRPFYPVLENFMNSWTDECIVRLGLNMEQSLDIQLDHSMRYSWQS

SEQ ID NO: 944935 - protein, 135 aa, Homo sapiens
TRVSVDDSRTPPVKRLEVDTSVYRKRVLDFLRSPYTAVGTGGRPHLRTSALDFFCESGDSFSKRCLCPAFPTVGYTAGFGLWFYGRGSVNPQRGRPLEPCFRPNERICLACALMPPAPVDGLWPFIRLWDVTALF

SEQ ID NO: 944936 - protein, 129 aa, Homo sapiens
KARRRDAKLQSCQEPEAPPSQHVVLMQGRANDLMKYLWAKDHTTIPIKRSDMLKDIIKEYTDVHHEIIERACYSLKKVFGIQLKEIDQNDHLYSLLSTLEPTDAGILRTTKDSPKLSLLMVLLSIIFMW

SEQ ID NO: 944937 - protein, 126 aa, Homo sapiens
  misc_feature (123)..(123): Xaa can be any naturally occurring amino acid
VKNQARFCQFGPGPKIRGGLPPPLRGVKKSSRCYYIKSAFCVKKKAAKAARIPSAQPQGFGGPFVKRRRGGPKWRTHDCKPFRTGNRPGATICAGHEEMTCCSPIHLDSYEEQVFSVRTNMKXPSE

SEQ ID NO: 944938 - protein, 137 aa, Homo sapiens
VRSAEHGAMVSMEAELNYVVSTRLDSDSAGTNRLRRRRPDGLHMTIMLTVNIDVRSLVISVGMTKVLRLQRLSHTLNHGDSYEDEHGHQSYELRAVVYRLRFESVNGISQWLLQGTSTPLIRMLVIIDDRTTGLADG

SEQ ID NO: 944939 - protein, 139 aa, Homo sapiens
HEGSSESLLGHEHGCPPGDDHGYPVLHMARYTAYVDYPIYDVLKKVGHANRPLQDEGRCVIMCQGSKKDIFKKVLYETLAGESQLDHCMHEHFNGEIVTKTIENKQDAVDYLNWTFLYRRMTHNPNYYNLQGIFHSLVG

SEQ ID NO: 944940 - protein, 118 aa, Homo sapiens
ERNDARGRESCVMMLYTRLWNDAPCDTEKDRWICEGTTGDPAQCAWSRAHWSMSDSGGWSHFLASGADWQRGFSFSYTAGESQKHSGQHRPVQTRAWALGPSWRPHTNFTYADPLFTG

SEQ ID NO: 944941 - protein, 140 aa, Homo sapiens
TSLTVRVTYMDRSPCYGYQCTSEEHDKAHHTAYLEFSPSKSLVHLEPMSNELPCGLTQTEQAHYMLNGGTLLVLKKLYFYYLIMAKGGIARTAPHGLFVKHVDMKVHAVISIHVKTDIAPGDRVLMYAALPTGDDLGDSA

SEQ ID NO: 944942 - protein, 119 aa, Homo sapiens
MEEVQVLELDGRGHLLGRLTAIEAKQVLLDRKAEVVHCEGINIIGYFYRNTMQYLAGLRKRMNTNPSRGSYHLRDTSRILRRTVRGMLMYPPPYDERKQWRFLLASERANEAYGLPIWA

SEQ ID NO: 944943 - protein, 104 aa, Homo sapiens
  misc_feature (60)..(60): Xaa can be any naturally occurring amino acid
VVRVGSVHGRSVLNRSVRSVDVTLLKFDKLDSEKAGRCVSYSSQVEYSWILMGLRSIVDXQNCLFISLGAVAQREQVCAWVLRLIHGRAELHALAFLEGLMDLT

SEQ ID NO: 944944 - protein, 258 aa, Homo sapiens
  misc_feature (83)..(83): Xaa can be any naturally occurring amino acid
PGRGSSVHSPGSGSGSSPGHRPRPPRRDSSSSSSSISSSSSSNSHHHTFSLMGQPPRVGAGGDRYPNPAAQCSFDLTPYGTAXASEDIWLTVITTTVDVELMVSFERSVLSPTGNRKKWLCVLLSTTIWGKSAFLDRQDLTTSSWAYDTDLLPGYMPFSELVFRENITPTDLNGYTELMDACINVHSLAKLIQLGGRCSRDRYGMTLQNLVPGGHGPYGFPPYVRRLDYCRTIGWASQISVRPQMHRPIVLFVPATEV

SEQ ID NO: 944945 - protein, 135 aa, Homo sapiens
  misc_feature (73)..(73): Xaa can be any naturally occurring amino acid
  misc_feature (133)..(133): Xaa can be any naturally occurring amino acid
MAETIKDVEDDEYKAVYISCSKESDDPMAYINSTAEGEVTFISIVFVPTFAPRGLFDEYGSIKSDYIKLYVRXVFITDDFHDMMPNYLNFVKDVADSDDLPLNVSRETLQQHLLKVIRKKLVRWKNVDQHQAXCD

SEQ ID NO: 944946 - protein, 115 aa, Homo sapiens
AAFLRTPESMKTGTRKPTLLKISTLGNFPRVLGGPKGGPQSGKGVFFWERVVFLEKKFFGGALGAKKNPRGKMPFLPRGGFFFFQKGFFLKKSLGKKKKTPPRCFAPQKKNPAPP

SEQ ID NO: 944947 - protein, 76 aa, Homo sapiens
DSVRGSLTLSANIDICTNNSCIILDWYSLDRKNNLPNEPLVLEHRILAHYAWICHLRTLCQRGQVCLSSIQACIAR

SEQ ID NO: 944948 - protein, 111 aa, Homo sapiens
MCSSPHLNLPNLFNQGLFLLGFPVEIRLPKEFVIKGDFGQLIWPPYGLPCVCVAIYVKFRNMPRSDNFRSDLLYDLYARNAFYYSYQIGQSSRISHQVAPMLVYRTAGSLD

SEQ ID NO: 944949 - protein, 141 aa, Homo sapiens
  misc_feature (8)..(8): Xaa can be any naturally occurring amino acid
HEVGLALXTSPGNKTPPKKGAPTPGYPPISPGGGRRAQKYFWCAQKPHKRGKGGRPKKFTPQFVGGSWCGKKKKFPPPGGDILGGGGGGGFFFFISPPRLFFFFGGEKIFFFFSPAGGGGGLLTPPPSSPPPRGGGSSFFL

SEQ ID NO: 944950 - protein, 124 aa, Homo sapiens
MLRLSANILLDSIMACGLGASNLNLKPESAFECQSEVASDAMSFVLNLGKDTDNLCLDSNPCVNGHGTANTIVCNSKDRGAWGTEHEEAVFSFQAGRVAQVCIFDQANLTAKLSQGYQFRFPRL

SEQ ID NO: 944951 - protein, 230 aa, Homo sapiens
LRSRSGLSAEGPAPGQFYRIPSTPDSFMDPASALYRGPITLTQNPMVTGTLVLGVQFQGGVVIASDMLGSYGSLARLRTISRIMRVNISTMLGASGKYSDAQYQKHVIGQKVIDDELLRDGHSYRPRALHSWMTMAMYSRRSKINPMRNTMVIRRYADRQSSLGHVDMHGDIYEAPSLDTGYGAYLGQPLLREVLEKHPVLSQTYVRHLVERCMRMLHYRRAVFDQFSDL

SEQ ID NO: 944952 - protein, 114 aa, Homo sapiens
NGQKFMEYVAEHWEMHRLEKERATQERQLKNTRQRQRCCMAELLEHTSKRRGLASNTPGARKLNTITMCNATGNSSIRAIFGGTVYHFPVSRLPPSGSKPVAGFTCSGGQHTEC

SEQ ID NO: 944953 - protein, 70 aa, Homo sapiens
SRNAYIQVIELLVEEPCCIIGSLLMHICYSGTDADEWDNIQIDDIDICIRTSTAVPVDYLSYLTDFKLCS

SEQ ID NO: 944954 - protein, 120 aa, Homo sapiens
RCTCHAGLHTAACALDTCLERPVKSHNILRELNTQHMMWPRVATAGFELLALMATGHLGLPKCLEYSSLSHWERAKGKLLWNRLYLERVWAQDMLKWCVGKRTLASPREAENSHGMWHVS

SEQ ID NO: 944955 - protein, 103 aa, Homo sapiens
VRDGTRGIVTHHSIHSLGTHYAHRRLSARPLWRKGGWCAQHGPVRNGRFLEHKGGHPNLPRYGETPKVRGRALGFKAMERHFWILSLVKGVKVVLQEGGQLLR

SEQ ID NO: 944956 - protein, 39 aa, Homo sapiens
MPWLIILIVACQRIASRQSLRPDLERPPPADSSASTSDR

SEQ ID NO: 944957 - protein, 184 aa, Homo sapiens
  misc_feature (120)..(120): Xaa can be any naturally occurring amino acid
MLTRKVELAMPHSPLLHFSLGLSARLRLIAIWGRLTSIAGLSLQRRYWTHARTLCASNHRLQNRIYSSSSSTQPSMHNRIPAQHIDHSHMWLYQSRHRQLESLMYAIPPPRDHTPILDTXTIPQSRCITGSTLQQDETIYMVDHKISCERIVVDVCAWIIIDLEVIAFLVSALITTQYGTIAEY

SEQ ID NO: 944958 - protein, 102 aa, Homo sapiens
HELCSFLETASLKHIALAMRESEPCVRMDPPAVCISLCETTAVMPAGHVRTFPHTHTMPQVKGLCLTREPFHDGFLGRDRRGEVSLGAMKPGPHTLCEVSLT

SEQ ID NO: 944959 - protein, 117 aa, Homo sapiens
QGESARRARAKRRGARASEERGERRHRAAAVLTEPASEGTGMASRGGKKKSTKTFRSGKAGVIFSVGRMLRYIKGHPKYRIGVGAPVYMGAVLEYLTAENLELAGNAPRDNTGTGHP

SEQ ID NO: 944960 - protein, 138 aa, Homo sapiens
VLRVRGRRTARGGRQASSSPCRRVYGLRRLRWTPLLNVEGLRGAHLGSYCSARYAPATFCAEGSRSPLRGTALGTYRHYEDASRAEHSGTCSSGHGASCAARGASGSDRGVPGLALDAYDHVLPERLTMSEESDGCQL

SEQ ID NO: 944961 - protein, 99 aa, Homo sapiens
LSDSSKMNIRNIKLGTRSRKGPCLLSCLSVTIRPDLLALADAPVRESKANTDWKSELLGQSMTFTIASLISHMDEHEAPSQRMIIAYLTSVNVWVSANL

SEQ ID NO: 944962 - protein, 134 aa, Homo sapiens
MSVLTGTQSSRLSRSEVRSIILYEIMHRWKLAQVHVHIDSIEAVTKIASEHTAVREQAEEACIAAAEQAISVRQQDRLENAAQYRERATCDPWTQIRYTRGNDLRMSKKPKDPQPPDKEFTPYDYSQRDFMAVA

SEQ ID NO: 944963 - protein, 114 aa, Homo sapiens
TTVNSCSVATANVCVVDGWQPHDVIRTHIYMRDPICDSCTAFGHTLIDHEEGMGDELAVTVRPLLRQVYCGNCVLLHQDARITMHMLDSEEKHSSQTHYDSDLDDILVVASMGI

SEQ ID NO: 944964 - protein, 145 aa, Homo sapiens
GRVLGLAKVAPVDYLSQYGYLQKPVEGSNNFKPEDITEALRAFQEASELPVSGQLDDATRARMRQTRCGLEDPFNQKTLKYSAAAPLEKDAPDFSHLEPALHPFTPHSPGRPAISLTRLQQCGSLDLPRCTLVRLTSDSTSWPSL

SEQ ID NO: 944965 - protein, 139 aa, Homo sapiens
MRDHIIAKNVAADIAVQSSVNRDANALEGVKGTFSMGTCTVKKPYSEALERNLQTHGRSIHAERDVMDATLARTYVVTDWRVNGVGACTHMARICYKVKSGFSGLIAACDTLCAGVEEQLRPLTAACECPTLSIAAWWR

SEQ ID NO: 944966 - protein, 126 aa, Homo sapiens
MQVYLGLYWSLLWSTYFVYTWECSTPYHCLKASLCPDCCWWYHSTETLPPWSPCMPRCSYCLIALRQLIYTEPGKIVGELRNPCLYDLLLCTTVRAPFQVQHVLHGPPAVALCLTEEACSSYCFYA

SEQ ID NO: 944967 - protein, 70 aa, Homo sapiens
PAISHVHHSMNLIAGYQVLNELSPQGIAPRAHDMRLPLALTKDLYASLQLCIWKQAFASTSGLTKHFVYR

SEQ ID NO: 944968 - protein, 221 aa, Homo sapiens
LNFGYVLAPLDMQGLVTGAKRIRKAAAAVHDSMFRPGVLLSWRLAHGMHYLWGLGGEETFWALVGQRLRVCTGLRTPDRDDNWEGVAVGRAGRDARGRLEPGLGQCVQATCRHSRDDLKRGRETARMEQGDRHGTKGRGDDRDRGRMTGQGLTGRSTGKPEDDQGGRAARWRSRVHGGVGRGTENGARGHERRGLGMSGREGRKCEGGTAEQMGGAVWMGR

SEQ ID NO: 944969 - protein, 95 aa, Homo sapiens
MGQSADRLTGHSAASLLEHDEYALCTDSVTLKAQDEGLLTDVIPITEPRLETATRAHGNRPSLLELMYLLMPAFMMAYSAETDAQYSLFELMRMA

SEQ ID NO: 944970 - protein, 144 aa, Homo sapiens
AAGIRHDRDRVRERERERERERDRERVTPVIAIYFSISPFPLSSLSLVFHHVLLPPAFAFFFLTDFSLSLFLLLLSSSPLSLCLILPLFCSIPPLTLSSLLIFPSSILSASYLSPCLLLVFHFSLFCPSSFFPPFLPFSSSFFS

SEQ ID NO: 944971 - protein, 98 aa, Homo sapiens
GDLSLRRDVDFSSSEYHVCKSEECVNTGTGYSCYGSNGYYYHTQRMQCMRYDRVADEEPPCEGGRCGITVAYYHWTCESSLMLDGSKSRMRSYESTEL

SEQ ID NO: 944972 - protein, 75 aa, Homo sapiens
MKAALHCTTVGCGSCTCIEVAVGNTGLTVFSDELKVGRTINGTFYGGCSVHSVLLVTDYPNMDALRLMYRYRAFV

SEQ ID NO: 944973 - protein, 127 aa, Homo sapiens
RIQHEIARNCANQRSTFRTALEPLADWLINIVCAISTYADLIAVAVTDMIIKRDSNSDAAESYVIYRTLSTPRTLAKYDNPSYATARLASSTGPVSNYADSINLQILCVATVITTAASAHRYYHHGR

SEQ ID NO: 944974 - protein, 105 aa, Homo sapiens
MRLASTHRSLCATQLLLYEDAAEHARRAAERCTTGESLHTVQAYVHTLFSLDQAQGAHVPAHDFLDRLCCLDNLEASLSRLEVDKRMVKTVVDSLDAYSVNIETN

SEQ ID NO: 944975 - protein, 90 aa, Homo sapiens
IHRPAIIGTLARPHSNSARTVRSMTRRAAERCNTSESVHTVHAYVDTLCSLDQTQGRHVPAHDFLDRTCCLDDMEALLSRLGLDIENGLN

SEQ ID NO: 944976 - protein, 67 aa, Homo sapiens
  misc_feature (61)..(61): Xaa can be any naturally occurring amino acid
MTTTVACYVRQSRAPHGHKYVRLKPGMDDEPPSQVLGGAGHAKVGPHSRLSSVSYCCRPYXGDSVAP

SEQ ID NO: 944977 - protein, 75 aa, Homo sapiens
RNERCRVCGMHNLDSIITFAEASKKMILLTAVTCGLYAYRRITDKRRAEPYYWPSIADDYDKTKLGTASKKKYAM

SEQ ID NO: 944978 - protein, 131 aa, Homo sapiens
HTAMAPKPQPWVQTEGPEKNKGRPAGREEDPFRSTAEALKAIPAEKRIIREDPTCPLNSDPGTQAYEDYNCTLNQTNIENNHGKLYMIQLLQDSNRFFTCWNRWGRVGEVLQSINRLTRLEDAKKDSEDFR

SEQ ID NO: 944979 - protein, 153 aa, Homo sapiens
MLLGKVSLAYRAAVQSRPTRRFEELGLMMSTVSLSKLSSSHDLTQIIRVDLVWPSSGGAHGQLCACPEFSSSTVSQSEYLIYQQSQCRLRYLLQVLLWVPALSHGVVQGETVIFNHQAHLWYRYIAPFFQESNPLLLAIVPMLYKIPVFMPPN

SEQ ID NO: 944980 - protein, 71 aa, Homo sapiens
GRSCQHEEEPERDQNLRYALTQMIQTGERAKLPVPWKYSKCCKSTFTLYSFRTKAMHSILLLRTYCSVIFL

SEQ ID NO: 944981 - protein, 67 aa, Homo sapiens
GRPGQDVKEHEREHNRRYALTPMIQYRRVGLAYNTVDKYSNMVLKSTDHSSSSFWTKAMHSNFLLRT

SEQ ID NO: 944982 - protein, 54 aa, Homo sapiens
TEDWTLYGSHNGYTLIDNMSLYTFTVPVRHGHYRHPRFHVLTGAELTYSIPTHL

SEQ ID NO: 944983 - protein, 115 aa, Homo sapiens
MLTAYIRALVLLDDGAPEMDTVMPGHGMRRAEVHVTDAGLNGTDLVQGHRDEGIRAEARLDDATEDTYDVVVLPRGDLCAQNASESAAAKEILTEHDKRQALELASAQATALLAL

SEQ ID NO: 944984 - protein, 140 aa, Homo sapiens
SLRPDGDSQAPGRFWAVSAPQVGRRCPFTSDSGCLRRPTLILSSIDPAQPDLVAPAFSRIMPDLAQIAFRLYRHLCHRSYITSAFFGPLSVRCRLLNRRPGDQGWLFTVKALEALHFALPGVQRLALNAFLRLRPLDQLS

SEQ ID NO: 944985 - protein, 73 aa, Homo sapiens
  misc_feature (39)..(39): Xaa can be any naturally occurring amino acid
  misc_feature (42)..(42): Xaa can be any naturally occurring amino acid
  misc_feature (47)..(47): Xaa can be any naturally occurring amino acid
  misc_feature (53)..(54): Xaa can be any naturally occurring amino acid
  misc_feature (69)..(69): Xaa can be any naturally occurring amino acid
PAGSDRHLIPAKSMVYDSQRLLIFSRMDLCRLLVMKTAXDAXYAWPXPGGLTXXLEAWMPVVDPQSGFXFTPI

SEQ ID NO: 944986 - protein, 78 aa, Homo sapiens
MSCQIRQNHSTSVEAGDNRLVNLYQLSCYTYLSVGSYFNRDDVAVQGVRHYLRELAEEKREGEERILDALTSERVALY

SEQ ID NO: 944987 - protein, 83 aa, Homo sapiens
LYDCCYSSVRSVHIPGLCPKLETALPLYRSLEPFERSCRPYSCLLTCLEPIAWLSPRCQPMHFEIAPDHSTGLEGLRHTLVIL

SEQ ID NO: 944988 - protein, 68 aa, Homo sapiens
IPQLNFLLSATVNEQIVRQSTELVCTAYGEVHAIVMNPINEYKDPENIFTDRRIMCRRFFPDYLISLS

SEQ ID NO: 944989 - protein, 76 aa, Homo sapiens
DPTCRLYSKCESERADRITMYRTSLQRLWRSACKPDEYSECIRWFRGHSSTIGSACADDHCVTSDVIVLAMTSLYK

SEQ ID NO: 944990 - protein, 80 aa, Homo sapiens
IDHLRHIVSDEVVAVSSSVYTGLNQTTYDSGFDHYTDSHYADGDAEELIDRSGYVLTLCLCVCKWTCLDVIHLYVATTME

SEQ ID NO: 944991 - protein, 80 aa, Homo sapiens
SKVELTHKPPAVEIWTNSGCSLEHLWGGETRAKPAAGNPKRFAFCRGKTRLLRPEDPGRGKALSAYRWQSPQRGPHPEAD

SEQ ID NO: 944992 - protein, 109 aa, Homo sapiens
AQSIGLRLLGPGDRAGMTPVVEHASSPHTQRVPRPAPCEWGISEHWTEAPRASDNCGTHIGLRSHSVIYCLAGGGGLGGLADQTLVIPGLPIPCATDHTVPGCLSDLHA

SEQ ID NO: 944993 - protein, 113 aa, Homo sapiens
MSPVLSSHLSPSSSFLAFPASYIARSSSALSFIHSLPLSPSLFSPLHFPAALSFVSSSLAIVSLHLPASSHFHLCPCSSLPLPLPAFLLDSSPPLSLTSYSLPSCSLFSLRLL

SEQ ID NO: 944994 - protein, 80 aa, Homo sapiens
MRKVSLDAWWKQTKRKNNGKRCPGRDAESSLHSDLTRHHWQSALYTWTAHDTTDSSLHSTIGLDETPLTAGYTRTSRRRA

SEQ ID NO: 944995 - protein, 119 aa, Homo sapiens
KTSLRAAVQGLPGGGVPCDSAVIPEIQHILDRHDPTSVVVTSHQAPGEQTKLKCLDYDFYPGADGLHNGGTYQSWTVETVTSKDTVLYSCHVQNISLTQPLMVPWKASYEAWVGGCGIS

SEQ ID NO: 944996 - protein, 110 aa, Homo sapiens
DASIEVKQAFAELESFLMDREVALLAEMDKVKAEAMEILLSRQQQLVELRADIKHFVSERKYDEDLGRVARFTCDVETLKSIDSFGPVSYIQEQVFDQIPMELKYIWGLE

SEQ ID NO: 944997 - protein, 93 aa, Homo sapiens
MCSCYWLSVYPVTNGLCGWTMPWLELFWCWLVPAPVKPVVGGGSVLTRGAPGIQDASKGLWLSALMKDNAFASTLCCVLCSGLPEPCFGPLDA

SEQ ID NO: 944998 - protein, 90 aa, Homo sapiens
MWSSPDTCIEMVKVKRYISTEDPMEALDPVDTIVLHMTCTQWKPRECSQQMSVSNWHRTWTGCAWHLQYQNGTDTHRDCQRRVITVTEPE

SEQ ID NO: 944999 - protein, 125 aa, Homo sapiens
EAHRSTVNRKSTESVEGERSICGFISSVPRFPEVTTHIGERILAVQVPWHKDRIILKSGPTHLYAEQLSRTAFTCARSTNKRSWLYRILPSGSHKPFESIDQGHVTYNWDEVDPDPNQLRWPFES

SEQ ID NO: 945000 - protein, 149 aa, Homo sapiens
APAERRQTERLHPLARRQSAPGDRPETTGRRVPGPTLRPPPALSGPGASRVCRHRALRFGRRGNHERRQDGPRPRRLRGPPRPLGDGRASATTVKGRAGARTSRRRAVRRALSLVLDSCGCCRVCAKQLGELCTEREPWNRTGLFCDLA

SEQ ID NO: 945001 - protein, 134 aa, Homo sapiens
MFPLISCQGRGGDERLWRDLSFVPLGGARVLSPAHECARPRHAGQYNHILGTPTNSVLSLSLSTPLQTDRETDHRYRDEDTCLYQEIVEFMTLLCFGDSFTAGRASQPRACWRIHDQGGPRYSPCLLVPRGLAV

SEQ ID NO: 945002 - protein, 234 aa, Homo sapiens
  misc_feature (219)..(219): Xaa can be any naturally occurring amino acid
  misc_feature (228)..(228): Xaa can be any naturally occurring amino acid
DRETASEELDNKSVAEIMNSIPPPPPTALTTEAGAPRLMITHIVDQNLISYAGEKYWDRYISAFPVLSGPHGRGESNVIDTMLSVSGYRAQLIRSKKLSVLIHTSDEHTDIHSCTREGHLLQIIDNEKDDYEVIPNTEIYVIQSDLQRNTPVYHIRGRRKTFKDVVNLVRSHGIDLDHTRYLILQGEVEQLAVMRPKGQTEHYEGMLEYLEHIIACGRXNEPILSLVXESRNIK

SEQ ID NO: 945003 - protein, 144 aa, Homo sapiens
RASTQDSSVIEDTEITRQRTCVCSSANLRRKRVHTAPVIRAEGTLGLVWAPDLDATPVPGLYRDTGISDAHLQMKRWWRNLRADRHRCPWAPHGLKVNLFAGLRPLVLKGKLCPRNLSTEEGELAESESSHNEFAVQRTGCKVP

SEQ ID NO: 945004 - protein, 152 aa, Homo sapiens
ASGPRRQRQCLAVARGGRTLRAAGRNISACCFGAAVSASERDTASSRWRSPFLIVSTDWPLVLVLDRSRLTPPSGAFRWADCRPLSTAYHRSSRNECFHLFRDEPDYDASLSQEKFVSIAIKDLITSFLSLIGLASPLELTPAFNLTTWLIP

SEQ ID NO: 945005 - protein, 58 aa, Homo sapiens
MTLYGVTFLEVRTLQRSQSRYNANSALSCDLFFCKRFEEEVPSQRVERYHYVGAGLIA

SEQ ID NO: 945006 - protein, 70 aa, Homo sapiens
VIPTNDFMRIRGTAMGYCTKLNYFLLIYTTSHIDDHSHLKLLISNDSPNYINVTAMITDPNNDSLSSNTY

SEQ ID NO: 945007 - protein, 34 aa, Homo sapiens
MHLSYNGPHLKVRSYCFLVLWVALACMGAYLDDI

SEQ ID NO: 945008 - protein, 114 aa, Homo sapiens
MIARARDHYTWMHRINIGSGRSLVVIHQHYEGRRHRLDYEIEIEPTVILCLEQIKCLPGDIEYTDLAFEWNRPAHWTALRRETFDGTHDSIPVNVNNNYERRLINAPATCRTAK

SEQ ID NO: 945009 - protein, 114 aa, Homo sapiens
PGPGGAKGDKTPGGPKPGDGPGLSTPGGHPKPTHIGGDEPRGGRQHHPTYQQQHHQGPSAGEPGGRIEEKISDSEGFKANLPLLRRPGELTHSDVGCMLGIYLLISRRMFGFGF

SEQ ID NO: 945010 - protein, 193 aa, Homo sapiens
ILRGNHESRQITQVYGFYDECLRKYGNANVWKYFTDLFDYLPLTALVDGQIFCLHGGLSPSIDTLDHIRALDRLQEVPHEGPMCDLLWSDPDDRGGWGISPRGAGYTFGQDISAFNHANGLTLVSRAHQLVMEGYTLGHDRNVVTIFSAPNYWYRCGNQAAIMELDDTFIPSLILPRLLVVSLMLHGAPQTTS

SEQ ID NO: 945011 - protein, 105 aa, Homo sapiens
PRAVGFGTRGERARLECLFMFFELESHSVAQAGVQRCDLGSMETLPPGFKFKRFYWLSQASSWGYTRLTHHAQVIFGFLVEMEFHHVGQAALKLLTTRFGLPDEL

SEQ ID NO: 945012 - protein, 196 aa, Homo sapiens
  misc_feature (4)..(4): Xaa can be any naturally occurring amino acid
  misc_feature (63)..(64): Xaa can be any naturally occurring amino acid
MVRXHSLQHLQDGNEHVVAEATTTERYQAQEERVSRPHRHTTHAKTAADQGVTHRYEQTMRDXXNARRHTEHNTGTTDRTGTHDHKDSAQLQCTRTVTQPETKRHKSRRAQERHTTAHEWRIYCIEAPHSQALQKRKGGGGMANHKLKGGQISKKWERGSLKEREMDLERGQTLLKRGWKNNHRAQGSKWTQGEGI

SEQ ID NO: 945013 - protein, 149 aa, Homo sapiens
VNFPVPRCRNSGEGSPRFFWRKGSQPFLCLKPAFPLGPPPFVHPILLPRPFEPSTHPSALDSTLLRSGSVFQPFSFPTKRSPRDPRAVVNSANSLGKPHPQITPSISEREDRGSNKVLILLKPKFLGPTFTNFCSFCAPYKVAKVFHFL

SEQ ID NO: 945014 - protein, 96 aa, Homo sapiens
DFFTEYWFAVLMSGLYQQMVDSAYVDVLLLIIIDCITGPESCNYIMVILTLAHDGYRLTVAYIPLPQAILAFYGFQHCATTSTHCSGSDTIPATYT

SEQ ID NO: 945015 - protein, 108 aa, Homo sapiens
GRGGVPPSLCLGGSCGGGVGVGLARGCHRCVALGSGGGGLAAVGFVGRWWLGRGLGWRVCVCGVPWSFLGSEFVGSGGEFLAGVVCWPRGLEWKSRELVCWVGSGGGV

SEQ ID NO: 945016 - protein, 49 aa, Homo sapiens
MRYLRHRLSALSYTFSASVMDDTRLRIPADADANIFRGPPQSMIRQIQA

SEQ ID NO: 945017 - protein, 75 aa, Homo sapiens
ERKPVLECPEREVFIEHITLSDEERESYKSVMKAEPLLEEVLMEGLCCDNMHKCRVFWLDSGKFVWHTYTFTGRL

SEQ ID NO: 945018 - protein, 146 aa, Homo sapiens
  misc_feature (8)..(8): Xaa can be any naturally occurring amino acid
MSRHVLSXTAVSSVKALSLKMVVTYEIWQCCSNCTHTPVSTCYMASSYNTIVNRHKHQNHLADQRTFKYLLKYVGLKRHATSKFVLHNRTYFRPGMLAHSCTHISYIGQCGLIALAQKFQTTLDHVSHSLFLHCKIKLHKGGGEHL

SEQ ID NO: 945019 - protein, 109 aa, Homo sapiens
RRCGAAATCAHMQWMCVRDCSRFLSKRNKQTYRTEPNNLEGRNFFRFNGLIHTKSVGVEPQTTAFYVRTTIKNGRATLRRIRHMIRKNKCRPDLCMGDIRKGRAILCRR

SEQ ID NO: 945020 - protein, 134 aa, Homo sapiens
AREEREREIDTAAFCVVGHTLCCQTSCCLVPCVPVCGSPRRGCPQDRYTPHMIRITPTSNKSTPNLAEFGSRLYRQVAHTANTANISFSPESIGSGFAMLSLGTKGDTHKEIPEGPNFNLTEIPEALHEGSQLP

SEQ ID NO: 945021 - protein, 151 aa, Homo sapiens
MEHYYEDLGVHGHALTEDIRHIQNVKLKCCPDTYEVLSDAKKRDMYDTYGNEGSHGGGGGLSYYSSAIVGVCQLSKPQGELWEQCELRDPLAFEYTDDSTEALFETQMRTRVIENLRTVSELCAEQLSACFRTPVPVHRVRVCFIGYTTVT

SEQ ID NO: 945022 - protein, 89 aa, Homo sapiens
PALALDTDLALLMRSGLWVTPWACLRTWLMTSLDPATLSDPHMVLTMLNLMPLVKSALGHYEVIAMLCLLSTDVLDYALILTEERDLCN

SEQ ID NO: 945023 - protein, 107 aa, Homo sapiens
ERERERERERERERERESDRVLEPPGSGLSSAMVPSRSSFLRDCMCPCLLLAFSVSSHEVLLCHTLIIGCSITYCRCSVSSLCVLDAFRSLDLVESPCLLPLLGLSL

SEQ ID NO: 945024 - protein, 112 aa, Homo sapiens
LWNYKSRILNLLTDEEVNIDLPTQSIVPRTFELKPGMVLILGAIGRIDFLQGQSAWFTDLASNILTVHITYLDRADALYQKHAGYTILQILMGTDGLGASEASADMKVACAC

SEQ ID NO: 945025 - protein, 84 aa, Homo sapiens
  misc_feature (79)..(79): Xaa can be any naturally occurring amino acid
TLGSSLGMAQKTFLEGGETGGLPKPLKPSGGFSQPPRVSKRAPRFPKRPPNWEKFFFGKKGATNGGQKAGPPPPLFVGXGPPPF

SEQ ID NO: 945026 - protein, 88 aa, Homo sapiens
DGGRLSVCSVCSGGRDGQTRCCPVVRLTHYRTLGGSEPPPDGARSRLSARTSEWDIIFVESQLYMTLRQSQLTVQTTQLMLPAFQHAT

SEQ ID NO: 945027 - protein, 92 aa, Homo sapiens
MVDSMDKTSSSISPIILLQFLHMAIATGAETGEQGQDLQQDANECCIQMMPVLQQKYGALEDESVKETRLLICIGCDTFYSESGEEEVTIGV

SEQ ID NO: 945028 - protein, 94 aa, Homo sapiens
ACALRALEELASRPFLTADLRDMLDCVDITSFSITPILLLWFLHRAVPQDAEIGAHCQLIEYDANDRSIQMMRALDHKLAAIQADICELDRVLI

SEQ ID NO: 945029 - protein, 241 aa, Homo sapiens
  misc_feature (202)..(202): Xaa can be any naturally occurring amino acid
  misc_feature (237)..(237): Xaa can be any naturally occurring amino acid
RSSHSLSESSYGQTTRSPISPELHSAPLTHVARDSSRHLASEDTSSATPELALDEQSVQPWERRTFPLAHSPQAECEDQLDAQERAARCTRRTSGSTTGRETEAAPTSPAMDPLKSRHMVAAATAERPTTDERKTDIYTDSLTIGVKAPDISAYDIQTSYAWTFSQFLVNLRNIDPTLVVIILGIMLVLYLNPCGLVTHLSXFSRWPEVQDETLLAWALHILCTVESLDLLILDDPXYFTL

SEQ ID NO: 945030 - protein, 93 aa, Homo sapiens
MKAVLDCTTARCGSCTFIGVAAGSNGLTVFPEELVIWTYYQWNILWRTGVDSIPKLVTDYQNKKSNLDALVTHTLPFDTISEAFDLMNQGLSD

SEQ ID NO: 945031 - protein, 40 aa, Homo sapiens
MNHNQYYQSVLIINTHNGYSDPYDMRTGESHMTPIPYLNL

SEQ ID NO: 945032 - protein, 63 aa, Homo sapiens
PNRAEPPEVALRALAPRYVHAVMGSALTALTWSLADLSGRTASVDRTCVDSVRDQTPGSLTPM

SEQ ID NO: 945033 - protein, 112 aa, Homo sapiens
MRPEAGSSMRAFREPPHVRGRIETERELSVNNRAVAIYGLGRGLTSSSDQSQSSYCLNIANGIILGTPYSWGTQDPSFLEVKIGDKGQILIGLKGHWNIVTGFPLYGKHKTR

SEQ ID NO: 945034 - protein, 50 aa, Homo sapiens
MCPVRHGHITRGTPCERCGTRPRVEALRHGKRRECVAPLCGDIGGLNCVG

SEQ ID NO: 945035 - protein, 86 aa, Homo sapiens
SNPRGLTVHVSCDAVTVELELTGVSTCHELVNAERVYGLSFTVKWRQAVTHENYKRVDKAELVLMSIAGREPTSTPARGVIVVMAG

SEQ ID NO: 945036 - protein, 88 aa, Homo sapiens
RENIHIDVIGPQYEESERHRLKVGALYHQYPLYKNGGEEKKKRKSGEIIQAQLKDHTHTLNGKRTMVEQFSIGNERIPKAVKWVGRLV

SEQ ID NO: 945037 - protein, 74 aa, Homo sapiens
PSPNNVYGLSCCPAHSGPGRTTNILRQAPQAQVRPRGGLSRLSTCYYDDICRPPAQPGDCYRPSSGLAADSAGP

SEQ ID NO: 945038 - protein, 203 aa, Homo sapiens
PSVDHGASGPAGPSVPIGPPVPVGPSVKDGANGIPVPIGPPGPRGRSGETGPAVPPGNPGPPVPPGPPGPGIDMSAFAGLSPREKGPDPLQYMRADQAAAGLRQHDAQVDATLKCLNNQIESIRRPEGFRKNPVCTCRDLLCHPEWKSGDYWIDLNQGCTLDAMKVFCNMETGETCVYPNPAHVFQKNWWSHQSQAIWSNTAR

SEQ ID NO: 945039 - protein, 94 aa, Homo sapiens
MQVSSVCQRCSQALKLDTSLKILDRVTIHELTAPLLTTGHAKPGETQQDETNSWEEPFIETTGQDGVSRRFILTARMMSTGAQLDSDWGGICGG

SEQ ID NO: 945040 - protein, 145 aa, Homo sapiens
PLGGGGHGEGGPRTTCGTRGHGWQVPQGFLDAPALAGAPNCPVPRVPPDPAGEELIRWLISSPRIHDCTSPLSGAGGAAWRQGTGLRLVSTCLGQRHNRLKRWDFEAYPDGIGRRSARARLPQYAVHVSSGRTRLQDYDDGSGRL

SEQ ID NO: 945041 - protein, 104 aa, Homo sapiens
  misc_feature (1)..(1): Xaa can be any naturally occurring amino acid
XRKAKWEAQHGASGILPVAPGATGVEHSRRKPIFAQVFPSGRSVCAKCFLLLISTPKVSTLGYKVGHVSNDHSFFFGSHEGSGPHNRITSRSPPVQQVFSFGVR

SEQ ID NO: 945042 - protein, 84 aa, Homo sapiens
ATQPRHHGTCWTPEGQNCEFRALDPSGAAGRWAASESVHTRRAYVDKPWGLGKTLGRDVPEPEFFPRTGCVDDMEPLLGAWRCT

SEQ ID NO: 945043 - protein, 134 aa, Homo sapiens
VAYSFAPRHQHRGPWPTLRQLRQCFPVRTPPSVDHREKPDAPFRVYRDAQDTCAIHRNGPDRPHECHLVQVGGAHVSVLQPIVEPQIVLPVSSQFMLTFGSSRMQFYYTAVYKRCFSGLTSCDIQLFLAVRQLC

SEQ ID NO: 945044 - protein, 69 aa, Homo sapiens
EALLTLRSDRIDPVSVPCIDCPVPSLLYLAWGLVHSTCTDDIRKRHHVRQDEDSLQRLDGMMPGTFCGP

SEQ ID NO: 945045 - protein, 145 aa, Homo sapiens
MQRLIPPFREDSAKLTTLVDADAEDFIGYLEALKLLKTHLRRQALSGPTRGSDARSLCATDAVVDTRPHCELTLHELYRCVNMACRSDLHVAGKALEIRVFDAYFNGLINLRDMTDEAFNDQIHHRVYSLLHEAKTQTALVLDCL

SEQ ID NO: 945046 - protein, 59 aa, Homo sapiens
MSDSTDQTDYATRRWTTLIVLLRRQLDDNVGRDEDAAGLELDDIVYKTSYDLRYLHQIF

SEQ ID NO: 945047 - protein, 117 aa, Homo sapiens
SSCAIVYMARTVSYGASYMATQSLSPAAVIGTMDSLYLIALYHTTDRLPAILGVPWKAEQGLLVAQGRADSQAQLMLCTEVDVVTVPDLYLKQTIVRQSVYTPVVLSRTMDLTAAVA

SEQ ID NO: 945048 - protein, 234 aa, Homo sapiens
KARSLKQMSGIGRIETVDLVGSCLLYINLIRKCMLFYGCLAHLWHSYGSSVALVVASESHFLQVQRRFRAEQPWMSSSVACLSAAGSPSSISLVMSRSALSYQVQLHVTGAPFPPCPAGRGAMSRAVGSYSTEERLAGSASIRTDKRRESLQEYTPKERRGPSPVASTIVPCVSLVYIMMHGAPTAIIGPEGAQHHVNHLYVKKDGESPISGVNEIMHELRTRLPQSAAKDIKI

SEQ ID NO: 945049 - protein, 100 aa, Homo sapiens
PLEPCVTSQSPGPCCCGRSYSCCCPYAGTSTAAAICHHALSRIPSLATYSIRNENNIPTSFTRVGQRFVTLFTLYVDSQRMRDDARINALNEALLDYDKV

SEQ ID NO: 945050 - protein, 86 aa, Homo sapiens
LYCLYAREREDAVNEITEASSGIWLALCKGMMSEDDQLQYEVGVQEYEHGKAERAALMSYHPTAEVTHCTPGCQQPGTIVTVLQRS

SEQ ID NO: 945051 - protein, 97 aa, Homo sapiens
MLRLPTVFRQMRPVFMVLAPHLTLPYATDVFGAYALAFNASLCLPFTRCCGRYFGAIRNNSDYCAYLPKSSLLIRCCYCLKSIDSFDLHLPLSSLVL

SEQ ID NO: 945052 - protein, 132 aa, Homo sapiens
MWTIYAYFAVSLSSAMTPLCTLDLTLIRVMGIRSEHDMLSILTHFTRLYGSCLYSVIMGDTSGDFPEATARTLRQRCLNSRSLNDRTALITLQTSTVMFLRCYYHHVMTLTTMSNAYSCLLDCRLSVLLFIY

SEQ ID NO: 945053 - protein, 166 aa, Homo sapiens
MRQNCYMRNLSMFFPGTDCQRLIEVDHERILRTFYEKRMATVVDADALGEQWKGYVVRIRDGNYTHGLHETLGVVTCLRVQSATEQGTSLNTPRQLRTDRENQFAGSIADAHLSVHNLTIVIKDSTIITELTDTTVSSCLSSTRASRMRRLFNHLYEDDVLQYAER

SEQ ID NO: 945054 - protein, 105 aa, Homo sapiens
DGLPRTGMSTGETYLVLYADADKPYRSVGYLPSSVESLQKVPEDPYTLLSEEQAHAEQVHPQDFLDKTFFYSGTVSLSYPSGSGFLMLETDDDTFVAYSVKQESH

SEQ ID NO: 945055 - protein, 118 aa, Homo sapiens
GRVSLIILLTDGDPTVGETNPTSIHNNVREAVSGRDRLFCLGFGFDVSYAFLEKTGLDNGGLARRIHERLKTLSCSSRTSTQEVANPLVTAVTFEYPSNGVEEGTQNNFRLLFRALGG

SEQ ID NO: 945056 - protein, 109 aa, Homo sapiens
MHPGLTLRIGCETSETDTLQPCCATLIHILISSVPFNITLNKRMKQLSLQRLQMLMTELKIVSNDCAHYIGTSYAQVQVSLPMVRGVDCGAALEPERLECSERTDIPLP

SEQ ID NO: 945057 - protein, 70 aa, Homo sapiens
EGLAMTVWNLGETTIVLYADAKIRTVELASSTVPWTYSNRYDSTFTLCSFCTKPLPTKFLLLTSSTDFFL

SEQ ID NO: 945058 - protein, 114 aa, Homo sapiens
EGVAMTWWSIGESTIVLCADANDPYSRAWLTYRTVEYSNRYDFTLSDCCFCNKALHIKFLLLTYIHSLIFVASLGDLTNPVKAALDMLETNDDSIVAYIYRIPRGTFLIEPNGY

SEQ ID NO: 945059 - protein, 106 aa, Homo sapiens
MLYTCARSPNMTVYAVWLSSSMADSCTRNNMLCRATGNTAGHDMVTILAHLTRLYGYSLYSNFMGDTSGDCKQELFGLCGSSDESTYTTLKEDSEDLALYYIMFIH

SEQ ID NO: 945060 - protein, 80 aa, Homo sapiens
YSGTTDILCDRRLPISLVLGHCLYPVLFWDTSTLFFVNTLARSYVTVACMQVYMCMSEPENVQPSAREPRHTAFMDEWDH

SEQ ID NO: 945061 - protein, 55 aa, Homo sapiens
TEDRTLYGSHNGYTLLTTGVRTLSQSPCVRATPDIPDLMPYTLAWLTYAMPTHLA

SEQ ID NO: 945062 - protein, 129 aa, Homo sapiens
MASFTRPVISLVMNIDSSATPNELAPVITAFQEDLDEHCFSPGVPCQRGQHRYASSGQHTLYLLAEHGGTRPWFLVCGCSMGGSSELRVLSAQCPVLAHLLYSVCHRVTRCLKKKGCILSAGYYNSARH

SEQ ID NO: 945063 - protein, 81 aa, Homo sapiens
FVAMHILNIARFGMAATLTGTMRGIIANAEITLTDSIGYPSRLLTDHLYHVTLITAGTHYTSISYPTSSSTCYLRSPSTVY

SEQ ID NO: 945064 - protein, 119 aa, Homo sapiens
VTCISLLFLFSSAYSSGEFRRDAHRSEVAHGFKDSGVHNFTALVLICLCSVSSPDEPFEDHVTLVNEVTEFANTCVADESPALFGKPMATRLTAVQCGTLLQMCSLSHTDDSRLPRLVS

SEQ ID NO: 945065 - protein, 100 aa, Homo sapiens
MRTHLQRWHLSCIACTTDCCTCQVRATCPCSSDAHAVYHLHEHVLNRATVTHDHAMHDARMLQPGTIEICVSRTNIASAVQPSLHDAEASVHDALRSSLR

SEQ ID NO: 945066 - protein, 88 aa, Homo sapiens
MPHRSCFTAWPMDKLAQMTIEHLGLDLRLADGLAGADDRHADHHLTLTEHVPAVRVQHFRFSHESRIRIDLALALQDRVLLELGPAIA

SEQ ID NO: 945067 - protein, 79 aa, Homo sapiens
VISVLAQGSQVLESTPPPHVMRGENDHISSFIYQKAKRTFGSFLTKNLEKSSTLFLGPKLGIGGNGKLFGGQKNPQWET

SEQ ID NO: 945068 - protein, 60 aa, Homo sapiens
MQVLNTLLALLLITITCKTTTTELAYINSYIEEQLAAMTYLLSTYYVRLEYTYHELYQLL

SEQ ID NO: 945069 - protein, 122 aa, Homo sapiens
MALPWVLTDLSLLPLLEAQIRLCANLVPVPITNDIVYRITGQWVHIVSAFLTFNMTDDTIFLREYQTLSELRAVYDFSYLNGQRENGNVVRVYGGREHVAHLLFIRDTKKHEDRYYLDYEIC

SEQ ID NO: 945070 - protein, 113 aa, Homo sapiens
GTRWDVPAGLGRDSVPCMGLCAMSDSPLILKPYLWRHSTPERQAQGLGFPCEELRHHCAMVTQAKADIGPSLSQTPEGWPWVRQNGPRTLAVESSSGWEWLCVDHGLTGPFFF

SEQ ID NO: 945071 - protein, 210 aa, Homo sapiens
  misc_feature (137)..(137): Xaa can be any naturally occurring amino acid
  misc_feature (165)..(165): Xaa can be any naturally occurring amino acid
AGAPPPASLPTCSLISDCCASNQRDSVGVGPSEPGVGYSLVVRRFLSRSEKRNIRVVVTDFPVTADEWNSNHTIEIEMNQTLEIPCFQNSSSEISSEFTYAWSVEDNGTQETLISLTSSAIAHYLKIESSLGQTTDXTCLQSKSSMMGGSSLATLESGQHRLTGXLLSSALLFLEEEAPYYAAEHATLWQCLRPVSLVLAFFVGQGDEGG

SEQ ID NO: 945072 - protein, 98 aa, Homo sapiens
PPEHRCYEYYPYESQCGPERLMLNIVCIRTRYMLQSAPVLVICMYKCEGIDYRPLTNLRRSAAETLASYFEYARAMCKLTAEREQWICIRHVLEQYRD

SEQ ID NO: 945073 - protein, 87 aa, Homo sapiens
RLKIGSPPPDSAPQPVGIQTLGVGKIRWGVVKQHIPMGPGPTVGLLGLQTPDIPLKTFPCTEHALVPDNPLEIEKKKLLVTRREISL

SEQ ID NO: 945074 - protein, 74 aa, Homo sapiens
RQSRPDVETHGILEIRFWRNACDKRDFLQRVVHRQTFCTYGTKQTKTVETLAAQGDCFGTMELFLWDTFSFHRF

SEQ ID NO: 945075 - protein, 120 aa, Homo sapiens
KLHDETDRVTGPSRIPDIKDRQEMPYMDAVEHEIQRIITLAPYNLSHEATRDTILRGNLNPKGTVGVPTVDSVLYDRPRISCSRFKPEHFLNDNGKFKYSDYFKPFATGCAILQQLSASR

SEQ ID NO: 945076 - protein, 206 aa, Homo sapiens
MAVLRPSALASSELLVPNSAQRSVGCSDPNLGGFKRGACEMDHQVPLCSLPCRIGCEYDGLVCGIADGPDWVNGPEGRPSAADGGGGGEGRTEEAPRESGVKRLSLMLGPLWRHADACRHLTLSGIGGSLCMGDPCAGSQAVGASVHWRRGVTGHQTLSGPLALSGLGALEDRRPGRVLEWRTSWGWGRAACVRRAADVVELGGGG

SEQ ID NO: 945077 - protein, 133 aa, Homo sapiens
GTRRSFPTPDGRLYTAVRHLLTAPSDCPKALDTALHLASTIDDNVYAYSDSDDRVHLQVRQTYYHDSEAAINRRINLELCACYNDLAMCNYSDRDDMGSNNSALWVDSDVMGTGGRADKLMNLYNPRGGTNRT

SEQ ID NO: 945078 - protein, 69 aa, Homo sapiens
MCGKATGRDAKVNNKDSGEAVTIVKTPPTVVVGIAGYLAPLGLRTFQTVFGVHIKENARGGAIRIGHYE

SEQ ID NO: 945079 - protein, 75 aa, Homo sapiens
HEPAGNGVHDELALPDYTFFLYEELSCTGVELKYTGTARALFMLPDHRQDGGCGSHAATRDPESVERLYQANRDK

SEQ ID NO: 945080 - protein, 225 aa, Homo sapiens
HTPAVKAGGMQIVQKHSHTGDTKEEKDEDDQEWESPSPPKPTEFICGVIDQSDRGGRPAAAQVAHQKPGACMDKQSCAKNPAHPAATRVILESTSLPTWGRVCCTWGWPDRWNGEGGGGPTVLVNLRQNRGLWALPYMGLWRTRDRSSPDVVYGDAGWMSFEEHCARRGAHSRNLPRCEKGGAVGLMEQWPDGLGYDRRSNNGTVREDERGLRGPEECMLGERGQ

SEQ ID NO: 945081 - protein, 115 aa, Homo sapiens
FNVAMHILNNGRFVIAAALAGTMTGIIANAVSTLPEYISNPHRSLTDPLAIVSLITIKLSLHYKLLPYQQPDSLAYVSIQRRLNSGCMPTDPQRDVRTLFQVDHATSYPLRGASR

SEQ ID NO: 945082 - protein, 130 aa, Homo sapiens
HEEITTIPSHRESCRNANSHHHSYIEAHIKKATWLTKLMNFPGYAYTPTLWEHQTNGRGMGGRLLRMCVTCMQGSYMDSHEPEGSWVCRGRVVTLLSTPGRLMRPVGGGGGGLRGGPGGGGGSTGPEALV

SEQ ID NO: 945083 - protein, 93 aa, Homo sapiens
SSRSSELLGEAALNTVLHEDDILHSQDMFNEDGLNDSSIFNTSELAPSMNYMLQNHYTWAAFMDSVLQHFAVGATVGVKVGAPKDDFLEGADA

SEQ ID NO: 945084 - protein, 115 aa, Homo sapiens
RTCVSHDKNDNSSSDHQQRLLDHQLLNMMLIVIHDNDRIAKGLMTTDHAMTRPHQSADGPWKKQRLMSSRAMRSIIPDSTGAVEEADLGIPDLAVKLTGMSYTSSSVNESVKDLS

SEQ ID NO: 945085 - protein, 92 aa, Homo sapiens
MCSVYREFSVLTAIRSSEIHVVATEQNMNANDVSAGSKDREYYTKAWDAIDSMGPMRSDAYTSVLTFYGVSLDTLGEYTVANDYTMRYRLYW

SEQ ID NO: 945086 - protein, 125 aa, Homo sapiens
GKDWDELEEEARRTEKVVTEEEEEHSRSMSRKTKASVHSSVRGSNRGCRHSSAPIKIKRKLLLNFGPELHSSSSQPLLPFVYMGLGGHLRGPIYSGNYSATRTRANGPIQMAREEVHLQTVGGYC

SEQ ID NO: 945087 - protein, 168 aa, Homo sapiens
PTQKTKDSLDRSQSELHNDCLISKESACLMQDRICSCEINVSDAIMTFGLEPKDLMSVLNDNYGDKTEVISSLRNANSEDHESGTETNTYAVLNSVYLMTNSHTRLLYMKTMGWQEIRHAISRLTDGDNMGGSTKTAADHMREMLNINQPSHDYLDIYAIDVNMLDVD

SEQ ID NO: 945088 - protein, 222 aa, Homo sapiens
FGTKGHFDYTCEGATLSSLDVYCGALASIVTTFIIAPKLDTYTSSYLGMELTATLDARLLPVAIGRIPKPSTIKSCAKFSYYYHLLRHRYYVNFPSDNLTYITMLLQILLLDAKAHCSPKLSLTRVSRHARSCRLLQKLQIYTLGYHHHAFVHTLYPNKYPKNSMTWSPRAHYEAIFVMALPATGELSHHAQTSALLTPGLQPRVCLYPPVGAPTDPNFPDL

SEQ ID NO: 945089 - protein, 95 aa, Homo sapiens
EKACVLFFPCVSGPRGKGTPPPYQAGVPKWSRLPRPTLAAIEAHCPPYEGSNPPPCKMFGFCDTITVMAQLPVVGLNPVVRHPCRLRVPAPGEEA

SEQ ID NO: 945090 - protein, 177 aa, Homo sapiens
TRLSGVPVKRRLPISGGGARGPSGLTMAVDTAAAVLTALGGALRLAARRYMRPRVHQMRIGGDPGLMHGKTVLITGANRGLCPRHGRRATAHGSADDHGLPGPRAPRGRGGSASPRATSGRGVRPTPCRQRGGRSHNPEAGPRLAALGARLLTRNAPENSLRWMSGSITQGSSSALT

SEQ ID NO: 945091 - protein, 114 aa, Homo sapiens
SYQTIGLRLLGPVDRAVMTPRVVHARPPQTQRVPLQAPCEWAIPNNGHKPKEPCHNCGTHIGLRYRFEGPPPEWVFPGALGDQTLVCPRLEVSPGALHSGPGWLCDLRAKTWVF

SEQ ID NO: 945092 - protein, 158 aa, Homo sapiens
MSQLKIVATDFIPYLETYYAQTATLRDTYGETADCCAEHDPERNECFLHHIYDNPYLPRLARPKVDVMRAAFHDSEETLLTDAYLKLPEDVLTFMTRNSFSLLEGIKLLLQNAVKLLIKLAACGQTLMIFCMYGWLGLQTALKRGSSIGDLRMCLLPG

SEQ ID NO: 945093 - protein, 45 aa, Homo sapiens
  misc_feature (32)..(32): Xaa can be any naturally occurring amino acid
MYIGQEKVGLLHEVPITVNCTISLKYIANTTXDRFISMTLDLKRD

SEQ ID NO: 945094 - protein, 120 aa, Homo sapiens
MSQGVHRAGAGQGVAAAVQLLSTLSVLRSAVEAHVTGVLDDSLCDIDSIDNLNTYKIFHITETIARYETMLRDYKDNLKRPCPFCAEDGHCSMTGMWSPVQRVKVRLESKLRILRSTRSY

SEQ ID NO: 945095 - protein, 227 aa, Homo sapiens
VFKPCVVMPDAPPRCPAKTGRPAKYNYLLKIIQLLDDHPKCFIAGADNVVLKQMHQMRMSLHRMAVVLMSINTMMRRVIRGHLENTPALEKLLPHIRGNVGSAFTKEDLTEIRDMLLANKVPSAALAGAIAPCEVTVPGHNTGLGPEKTSFLQALGITTTISRGTIEILSDVQLIKTGDAGACESTLMIMLNISRFYLGLVSSIVYDNGSVYNPVMLDIIVGIAYAL

SEQ ID NO: 945096 - protein, 73 aa, Homo sapiens
RWYTNPGEHHLLTHALLTSTLKAHMSPIACTPRVSHYTLYKSCELDTNAAYGSTAQYFGEAPRYGDLLRFPHE

SEQ ID NO: 945097 - protein, 77 aa, Homo sapiens
EMDHAVQLTDREPERSTSDIKGSESYICISLEQLRLYTSVTDDRDYRSLDLSKCDPDYLWGHCAKMNHGVTGDQYPC

SEQ ID NO: 945098 - protein, 117 aa, Homo sapiens
SCLTGASTIMVMDTCGPRGMDFGGDQGLERGYRTVRKMSTTMMHVDNTTSRRLYDALIYYSTDEGCMLACVYLYLSYTVRQSAYIGVTFITDIGVRSDYQNAYARLGQNIVPCYRDS

SEQ ID NO: 945099 - protein, 153 aa, Homo sapiens
  misc_feature (66)..(66): Xaa can be any naturally occurring amino acid
AGLFVRRSELHSLKVIAGECRRGVLARESPRSLQRGLLSLTVRFLLQHVSHGLLPAGACLDRGSIXQSMLTHIRMHHPPTHAIVRLLMYKMGLRPDTAQLSGVSRCIFNLSCIVFFALYDLSNVCITAYAIIVSVMWLSIRKVQEPQVKANRH

SEQ ID NO: 945100 - protein, 79 aa, Homo sapiens
GCDLRLEQLYPRGMCVVTVGRDCGRRLEAVTADPNYHNPGLSICVAGLIDDLAASMSLCGLLPYNLLILYDADRTSLWT

SEQ ID NO: 945101 - protein, 103 aa, Homo sapiens
PIVADCYCHQKLLRQLIIISVSAELEQVPIFMTDTDIPMAGPGAVYNIRFPIQTSIFSPDTEERCLDVSHEAGGQLQGETISKNILSSAQSMETVIRSCLCTV

SEQ ID NO: 945102 - protein, 114 aa, Homo sapiens
MVAVTMNAGSHRPLLDELSASSPVDRLTFTLELNARHIMDNGNELFKPNRAGLTDVHDEHVAIVLIVEMQDDYCMTPEIAETRVYITCTSCYETIENDDAILNDTAGHFVVSGN

SEQ ID NO: 945103 - protein, 117 aa, Homo sapiens
VVEKSEARSTDRQACDLERRVWGLQHGCDHYHIIWSETLTLSTIHKTPFVENTKKLLRIDFLDPFFLSITGFPFLIPILESIKYLCVSKRSYQFFKKICKKDERSLEDTRTEWISFS

SEQ ID NO: 945104 - protein, 121 aa, Homo sapiens
MTEELVGHGRDNRRRQCGPTYGISITTSIRTVAPGPYEHELYWVKLKLAAIIHRCLCLRKQCRMHSLEDMTVTEIKEPLIYSFDWSIDRDTVSADALRERAHIAPQADGPIATCLLTCTLN

SEQ ID NO: 945105 - protein, 116 aa, Homo sapiens
ARGTAQNRRDQTRVRPHADFSEQTPTKEKLTIMRIAVFAFASLGITCAIPVKQADSGSSEGPILEAESSDPQNAVCSEETNDFKQETLSSECNGHDHMDDMDDEDDDDHVDRQDFI

SEQ ID NO: 945106 - protein, 131 aa, Homo sapiens
MEHYITSATAASLDDAMPAIATRLWTNAEYYAATEAWRRYGLVVRMSLPNQREGYVSRIGHVDYPGPLHVTLCTVNYSVIVGDTAGDCIDAQQYYEAQKVEITIPQRHVGAYDLATWNISNLDYMIIIEEC

SEQ ID NO: 945107 - protein, 130 aa, Homo sapiens
TSEDTVVAMCRRPARCYRYCESKPYPKCRFCRGVPDAARYRIFDLWRKKAWMNFRFVATWCQMNMNSCALKPWRLSEFVRNKYMVVIRINKMLACAGADRLQTGMPGPLGPKAAVARVHIGQVIMCIRTA

SEQ ID NO: 945108 - protein, 78 aa, Homo sapiens
VGGMLVRCVYDFEIMDSWPRQPMATLSGLRLSLLIKEDELRESIEIINTDHLGFLRVATLFSVVPGSQLETRWPGLYS

SEQ ID NO: 945109 - protein, 119 aa, Homo sapiens
MRSLSVLILMLNACLAVSADPVPTTPDIIQVHDNYNIYRIYEKWYNLDIGSTCPCLNKIMDMMTDSTLMLGEDATDAEISMTSTRCRIGVRNETGGAYETTDTDGKSLYHSHWILTMVL

SEQ ID NO: 945110 - protein, 107 aa, Homo sapiens
MAEDLIVTRSLSVMLSMLSACLAVSARPVPTTDDNIQVQATCAWLNNIMDRMTDNTLVLGEGATEAEISMTSTRWRKGVCKASGTYDTTDTDGKSHYPRSSWNISWS

SEQ ID NO: 945111 - protein, 126 aa, Homo sapiens
ADMLSDKELWALLEELERQEELLCELDSKPDTVIANGEDTTSSEEVYFFVIRMVQGYNHSEVKRIVSGTVSMNGSRSYHSDEDDDDDDDDDYHIDDHDGDNDHDALGVGESIPTLYFSHTGEPKRV

SEQ ID NO: 945112 - protein, 97 aa, Homo sapiens
RHYSQRCPAWTIWLLFCDGRGEGLRLLLRDTDRFFRHVGGTLGQFYQEVLWGSPAASDDRRRTLRVQGNDHSVTRERKLDYQEGPPGVENSCWSVEP

SEQ ID NO: 945113 - protein, 82 aa, Homo sapiens
LLVTCEIDLSVYEASMTHQDEKTLWSFNLLVRTVPITPTGAKLPHLHYKLPDEATSVLNLTYEQYMLKTSSIKANYYTQLIQ

SEQ ID NO: 945114 - protein, 230 aa, Homo sapiens
  misc_feature (1)..(1): Xaa can be any naturally occurring amino acid
XKYFDQLLPMSGHRLQKFCALLAFHYGKLCKGFYEIPYNLKRACQCISRCHTRALSMSSCAICEPLGPLLYQLCVWATIVGSLSGQLLQERAQSWDERLRTLMDEMASRILYCLDKVKHQVSDVLAYLEEQAQHIRVQAESFLDRLKIWFQPLVQNIQYQWAGLMQKVCFAVAPERSLCSVTIIDRPSLQPCDPSPSRASCLSAACIVETLSPPQRSSGVVPSLIKIHRV

SEQ ID NO: 945115 - protein, 98 aa, Homo sapiens
EDVIIEVNGVNVLHEPYEKVVDRIQSRGKNVTLLACGKKAYDYFQAKSLIVASLADPLDTLPDSKEGIEAESNHDSHMAERAHSTASHSSSNSEDTEM

SEQ ID NO: 945116 - protein, 177 aa, Homo sapiens
  misc_feature (125)..(125): Xaa can be any naturally occurring amino acid
  misc_feature (164)..(164): Xaa can be any naturally occurring amino acid
  misc_feature (167)..(167): Xaa can be any naturally occurring amino acid
  misc_feature (169)..(169): Xaa can be any naturally occurring amino acid
GGQDDGKRQQQDDHAGGEHLVLGSVSVASAGQLEQRRQLTDEVVQQAGRAQRPLSQERGLRNRVGEAACQEALASVRHRRGETSPAERSGRHTAAARSRAITARRTHSAEPRASDAHSWAVQWLXGSRALVRQVGHTGGTNASNEARVYQGQVEEEVYIGLFKXRSXTXRSTAANCR

SEQ ID NO: 945117 - protein, 156 aa, Homo sapiens
MIPVERACCCGRCAVEGPCMLNADLEDDQQGLCPWRLTGSQMEDYYQIFGLRKEYAMLLRFGPNRLNRLGHGRDALHELVAYQQMQPVMVVQASGNRSADFSLTLAGAGCRGWAQALRVCSATGLPLSGLPWRVCDQVDGAGPLEPSTQEQTSAFS

SEQ ID NO: 945118 - protein, 118 aa, Homo sapiens
MCSYVLSQELSLLGKLCHKLLAGANGHLPHSNQDVRAASRQRLTISRPVQGGALMWNCLDCWTVDAGACDSTQPVAMRAEPQGVDDVPTIYRVMLGYVESPEHDLTILAYRHRGIHPE

SEQ ID NO: 945119 - protein, 77 aa, Homo sapiens
QDSGRALNEYQGDAPYVPADIVAQLSSGGHHGSELSTSVSFPSFLLLESTTDGTTDLRRLVSIELTEMLMLWRPTKS

SEQ ID NO: 945120 - protein, 126 aa, Homo sapiens
ERGPAGMAVTDQAARKKERVLWLLDVDGTLTPARQIAVEGGSDYCQTAEQLTDGDEVIEKIDYVLAESVTVQDKHGRLLYKQTIQNHLGKELQEDLINYCLSYMALIRLPKKRDTYTELRNGMLLS

SEQ ID NO: 945121 - protein, 265 aa, Homo sapiens
MEAEDASACRPSLPDYTKAEEPIPMKSLGALLYLLNACTGGEQLALCQLLPDNIHVQENELSLRIYGKWYNLYIGCTCPWLRNIMDRMTENTLRCERALHTRNHHDQHSEEERRLKGSGLELTRKHILIEKSLYHTAKWDITMESYERHTTYDEYAIALTHILSRNHGPTITDKLYRRTLQMTVTLQDDYKLCAQSVNIPADYIFTMGRRGECVPEEHEPEPILTPRVRKAELPPDEEGSRREQLVTVFTGDTLQLGYHADPACD

SEQ ID NO: 945122 - protein, 126 aa, Homo sapiens
SLEDMLLPVNGLMVLYVDLSCFMGLKRLKLGQNGLRHLAAWTLAESLEELDLRVNRFSLAPDRDLGGPETSLRRLYVLRDPLKSCANDKLADQLDQGREDVDATHDLNWRFSCQYEVHLSHGRAEH

SEQ ID NO: 945123 - protein, 70 aa, Homo sapiens
ATQARDHGTCCTPAGQECEFRPLDPSGAAGRCAASESVHTRRAYLDSPGASAKHLDGMCLRTNFSLERVV

SEQ ID NO: 945124 - protein, 69 aa, Homo sapiens
PQSRGTMAPAERAGAKKVSFAPSILAELLAAGLLSDSVHTRRTFLDKPCGLGHLDRMVLSLNFSLSRVG

SEQ ID NO: 945125 - protein, 44 aa, Homo sapiens
MSTDPVTGRARGVGFALFKDAANDDTGYGTEQNTNWMALIVPGR

SEQ ID NO: 945126 - protein, 95 aa, Homo sapiens
FTADTHQSADIHRVNDITEDNLRVLQVNGWLMMFGDDDLKIMEQYCNMSTELAWTCCADELIMPLRQTHIDTPSGDLMHTSNFLEAYSAMADCCA

SEQ ID NO: 945127 - protein, 141 aa, Homo sapiens
MLRMKGDTTVILTNTWLDDRAERDGLAQLMCELKMHFDFLIESCQVGMVKPEPYIYKFLLDTLNASPSEDGYLDDISANLKPARDLGMVTILVQDTDTCLKELEKVTGIQLLNTPVTLPTFAIRDMSHGYLTVLTVRLHIV

SEQ ID NO: 945128 - protein, 122 aa, Homo sapiens
MRSSTEYQADELRRTKLNAESTAPVLFTGVVDARGERTVLALAGSMAGTSVDAYHLVTDRMRRTVKFLCALLRGIFNLSVDWLHQARKAAFYIPPDEYVVTDPEQEKNYGFAFDALSRALEL

SEQ ID NO: 945129 - protein, 127 aa, Homo sapiens
DGLASTGRSLGETHIVLYGDAEEPYRSVGELPSTVESLQKVHEHVYTLLSEDQAQADRVSPQDFLDRLSSLDNLEASVSQVEADLKMLKTDEDSIVAYSVKIETNENNLVSAKGLLDDLRNELDRCL

SEQ ID NO: 945130 - protein, 189 aa, Homo sapiens
AGNLRHVGEGSATVTKEETLVASIHTLGCVVTARALIQMPVTSEMSVLRLYQAPVDIISKKVATSHVHTLLILDQALADQVSPDDFLDRLFFLDDLEDLTNPVKADLEMLKTNDDSTVAYMVKQETKQDNPGIAEVLLDELTNELRMLIVTVANNDQMASTYCECRALLFKPNFYRPLQREFYQTNTKA

SEQ ID NO: 945131 - protein, 183 aa, Homo sapiens
  misc_feature (178)..(178): Xaa can be any naturally occurring amino acid
NIKNRIDASVLLAEASLARKQRKTHTTFIPLMLNEMPQIGDLEGLDAELVTLNEDEAELRCDGTKSTIKPCQMSVARITCVRSQRPNEGIPCIDDYIYTHEQVVDYLTQYSGIEPGDLDAFYYMHLTTLKCTYWELHILIDIGVQHVGHGLQKDLPDINRMVPKDQWLDTDYLFHMPXQRGNP

SEQ ID NO: 945132 - protein, 91 aa, Homo sapiens
MAVALILAYLSLTGRLSRYLWQHEELPQSPWYRAKDLVNVIEDVLTDTGMDYADHIEGVLLVLTAELYSYLTTGTVSSTFSQLRLQIDHVT

SEQ ID NO: 945133 - protein, 95 aa, Homo sapiens
PRELACRVQLLSLDSIEATESYDTCYPGIPRQLQVRPPLLLCALIALAAYLAHSRQQILYNVYANTGCTVLNTNYECDILISTRTDMYRRMIVTR

SEQ ID NO: 945134 - protein, 166 aa, Homo sapiens
  misc_feature (83)..(83): Xaa can be any naturally occurring amino acid
MSLLMSQLIMETDHCVPFWATNDALLQLFVNAYGEVADCCANHDPERYDCLLHHKDDNPILPLLMRPEVDVMGTASHDDEETXSKYYLYEAARRHPYYYAPELLFSAKRYTAAFTECCQAADEAACLLTKLDDLPDERNASSAKLYSSAPVSKHLEELSQRGQELC

SEQ ID NO: 945135 - protein, 91 aa, Homo sapiens
MAWISSKRALTTGVLLMAPGQLYVIVKGNVKLTSDVPILNSRCDLISDPITSHPNSLLHLSSPLRTTAPLYTDRACLWCYALNRLIARALC

SEQ ID NO: 945136 - protein, 59 aa, Homo sapiens
MRREHRHELLGRDLLQIGRHVSNWRSMIWYMTESSISSMIFTESVYTLHLMVESTDDTL

SEQ ID NO: 945137 - protein, 115 aa, Homo sapiens
LELDGEFRTDVAGYIRYLRPGYSVLSHYGHEDSRPDLGGDYRSVEKLYLADPMKARSILRDRHTDGNLSVSRSDEKYVLMIQPDDAEDDKKTDMFHSHVRRLMVAKAARNETMAE

SEQ ID NO: 945138 - protein, 120 aa, Homo sapiens
  misc_feature (15)..(15): Xaa can be any naturally occurring amino acid
MYWTQISFYHLARLXLDEQNHERYMSEYTEGEFDSEEFRFTVRWIYSQYTRSLILIDCLRHVGTEMVRYACSETRFYDFMNLETDVRDVLSLYRVLDSIGLDRSLDPHFREDPGPWLFPL

SEQ ID NO: 945139 - protein, 81 aa, Homo sapiens
RLVHAWFQGDVLLTSLPLVRLCMSESRARIEHDELTCMSVEMKMRPDTYYDGMFGELIATTDDVHRDDTTQQASHSCVTVP

SEQ ID NO: 945140 - protein, 109 aa, Homo sapiens
VFNLNPVKIDFRAQRKAPQAFVSSVRQGSIFGLKVLLSSIKCSLWWSTKVVGLHQNPGEGHYFSCRPRSGVKAFHITPGTYSRPSGIVYSRSLGFFVPPYVSLLIKSVL

SEQ ID NO: 945141 - protein, 255 aa, Homo sapiens
RHEGDCAISARWGPWIVSLPARRNAVHGPKGHGGGGAEPAGPTLSPSTESPESPLSRIWTYRAGSQGYKAGAEEDFAGTGNFLPAGEAAARGFCGLGLKLQELEQEDGEPFLAVMEKRLFEYLSQMEKALPTPQAQQLHDVLRWKQPGVSITSSLAWRQYEVDMGWMLPERNVTDSENLGEPMEQKPPQQQRLGLHNPLPKAKPWHTSASGTIFKDAPRTSSWPRLLAPLGRRRAQGQWGSTRGGPERPTAAVSY

SEQ ID NO: 945142 - protein, 114 aa, Homo sapiens
QHEIARNWASQRSALGSALDPLADYSPVSIYVSKTYAYLIPVALTYMIISRDVTMIADVNYARYRTMPTPRTLAKYINPCYATARLTSLAAPVVYADSIYLQILRRYTALHRMP

SEQ ID NO: 945143 - protein, 108 aa, Homo sapiens
FEAALGSYENTHICGGCTGDNSYGHEEYVGCCFCGTGNALFLNDLVSRDLNGYTYCRLSILMTYTCANFSKESTVHDHTTSITGAMTGTLSDALAISSDKWADGGLTA

SEQ ID NO: 945144 - protein, 94 aa, Homo sapiens
DENAEQFFRDQGRQTSSLQPASPDSVYNLMLQLVNNRYQGPSLIPRNPPCAPSTRRRVILSVPDHVPTGSGPPSKTYRSPMPMPLQVVTHTPYP

SEQ ID NO: 945145 - protein, 65 aa, Homo sapiens
MESYKVLDLHFVLFSQLTGMLGTSSLRTVATNSPAGIADIQRRDRLIAIGGVVLVYYERPVVLSS

SEQ ID NO: 945146 - protein, 170 aa, Homo sapiens
TPGCTNLAREQSTRDYNGHCEPSTDVRIKERGKNVKGAWEILTRLCTEFENYVADIEVDGKRVERALWDTGCQEENERLRALFYPDTGRILRRVSIYRPERLENISRWSPQGKDLCANVPINLCGNKKELQNDEHTKRELAQMKHEPVEPEKGADMARWRSWGHGVVTTA

SEQ ID NO: 945147 - protein, 186 aa, Homo sapiens
HESNQHVIITLTVNPAHTCSYGEGKKSERDLGNITPAGTVFENYVADIEVDGKPVEVALWDTGVQEENERLRALFYPDTEGILGGFSIDRPDMVRKHSRWTPQVKRFCANGAIYSGWEYKKEIRNDEHTRRELSQMKHEPRKPRKGGDMANRNGAFVYTECVTQTTNRVREVFVATRDALKLYTVE

SEQ ID NO: 945148 - protein, 63 aa, Homo sapiens
EYMRARMVTLTEREVTGDTGEYLETPGAIARAFSPRTRLLEYTYPKSARTRFYYLRGPPQRIF

SEQ ID NO: 945149 - protein, 121 aa, Homo sapiens
MATEPARETELERRATDFLATEGADTFCCSTVYVRLTCQRCRESVLDSSCKIMDCWIIHELTDSLLTTLQAEPAMNQDEETEYREKLQMVTPSQEDVVRSLMLPGGQMSTHSADSYSLNGG

SEQ ID NO: 945150 - protein, 117 aa, Homo sapiens
STDRPHLVIGTHFLSPAHVMKLLEAIPSQYSSPTTIATAMNLSEKINNDWSRCRQLFRICGESNVESLLQSGIFACRRRQLTIGGRSGAGRARILGPCTVPDLAALDVDCALNMELG

SEQ ID NO: 945151 - protein, 112 aa, Homo sapiens
GPGALHLYTLARYSEARPVDSCVGSQHSVRPRALELHTAYPIAHDVNLNLQADWTTSLPCPENGHKGFLGYDGPEALGGVYIPGRLDKGELSLHPGRLSHGTRTGVLPCPNT

SEQ ID NO: 945152 - protein, 154 aa, Homo sapiens
AVGILHERSHNLYKITPNLCEIAFRLYTPDDDTQCNSANIFFSPVSIGTGFGKVSLGNKGDTHKEILEGPNFNLTENPEAQNHERFQELLHIPKQADRQVQVSTGNGLFLNEGPKLVDKFLEEGEVDHSEDFTVNSGDTEEGQKQINAFAEGTR

SEQ ID NO: 945153 - protein, 138 aa, Homo sapiens
KSCHTALGRGFAWDILKANFTETYLSHVNLLRKQGPISARAAVPLVLDGNGLYCSCVNCVQSEADFTLNQYFGYQGAYKCLQDDAVDEAYGKHKTIFENLAKADRDQYELLCLDNTLKPVDEYKDWHLCQVPSHTVVA

SEQ ID NO: 945154 - protein, 63 aa, Homo sapiens
MWCLVTEEKAFGRTRSAHPLRVLWKHGPDEEVTLPEGDSLKGSGTRSLSRNDWFTVLVIDPLW

SEQ ID NO: 945155 - protein, 140 aa, Homo sapiens
HEAAQTAREELDNRKVEKILSRIPLLPPLRNDTHESCGSSAYDNSYCEPQLQILCWGEKSGTFPYNAFPVLSGPMAVANPKVLNLCLLWLAIEHHKNLVTREGHFPKIIGYGGDDYEGISYSFYVFTTGRGDNTSVYYMR

SEQ ID NO: 945156 - protein, 119 aa, Homo sapiens
MTTRNGLCPLRGPETLDKFLEEGKKVYHSKTFTVNFGDTEEGQKQINDYLEKGTQEDGDLVKELDRNTSFGLVKYIFFEGERERTFEVQDTEEEDFHMDQVTTVKVAIKRLSMCNIHLW

SEQ ID NO: 945157 - protein, 82 aa, Homo sapiens
RKYPKCELQLLWRAQETYEKWAANVCEHSEAKRMRLCRRHIYIAVLNHVCVVHERQEVKESPNAATESLVNRRHMLFNSGSR

SEQ ID NO: 945158 - protein, 105 aa, Homo sapiens
CRNSARGHLYSTFVEPYDRHLLSNSVAVGTLDAIGVWWNTTFFYYGRDRSPLGGAGAMLPTGGEGYRYGPESELSQAFATTPNSLYEMGRYEPEQYVDRARDSTF

SEQ ID NO: 945159 - protein, 104 aa, Homo sapiens
MCILIGENDTFGAETKKNCDLDENIEKGLLDRAFNVLLIQHRCLQIPVWRHPLSNPPELEESDTLGVRRAAQRPLKAELRISLEEGPPQEINYLTRIHYAQSGF

SEQ ID NO: 945160 - protein, 140 aa, Homo sapiens
AREREMLLSVLFDTCIMCKTMWHCVSTICVCGGTEGFIFSSGTLYLARTEGEELSHHNKKPGKNFKGHKNQVNWLWMCTERNVLVLRFHNKNARLWEVQRKQWIRTRGLSEFKARLAVCHFNKDLVGAEHRDPRHGGFLW

SEQ ID NO: 945161 - protein, 36 aa, Homo sapiens
MTYFNAITISANKYVTTTDLTFLPLLLLNRNANLWC

SEQ ID NO: 945162 - protein, 68 aa, Homo sapiens
MDTREKVSTNAISGAKAIPTERFEAEMTFRGLPRWSKGLGLYTPCQSGITCGPPQDGVRQLFIASVSV

SEQ ID NO: 945163 - protein, 30 aa, Homo sapiens
MRVSVLICLEASVRAAIAPPTLGGTSDLIG

SEQ ID NO: 945164 - protein, 123 aa, Homo sapiens
MTYSRMSFPSYHLQGRECSHLEQTVTCARMLAYITCFVSSDRIRHGSEPIYPTSEQTVILMQVLDEVTASYHQFVEHQDIAELWCSLHMLDAHLTDQGASVVYAVMPDGLWVLSPAFELASRR

SEQ ID NO: 945165 - protein, 134 aa, Homo sapiens
MLSTLQVTYCGGLELRRACRYSETVCEYDEKTYSRMSLSSYHMEERECSHWEQTVHWPPMVACLPSIVSYDRMRHSLSLSTHAIAAALCLQVLDEVIRSEHLIVAHRTLLSCGIAFTAEPHSRHGAVYMLIQIA

SEQ ID NO: 945166 - protein, 110 aa, Homo sapiens
RQLASAFRGNIRCTYMARLRVRADICHAQHSIFAVQVSLEGLCAIINIALEDILDTETGLRNRWLFFFFFNCKHISFNDFTSLVPKCSKGCLRFVCSWNFWSPKVSICRN

SEQ ID NO: 945167 - protein, 121 aa, Homo sapiens
MLWLPTDFRQMRPLSRVLAPHLTRAYAKDVKFGADARALMLQGVDLIADAVVGTMAPKGRTVIIEQSWGTSKVTKDGVTVAKSIDLKDKYTLELNLFKMVPITQMKKLCDALPMLLYWHAL

SEQ ID NO: 945168 - protein, 138 aa, Homo sapiens
SALYEKALQTLHEASEMTQIMWPAGMLTCSEDTLTVGTADHCDGFTFAGYTPRVISIGGLAPMLSDTDKKSFTDILYGTGPGYKVVDSERENVCMVDYAHTNYQAQSAEPLRHETHGAEDVRRCSGPMAHLLHGMHER

SEQ ID NO: 945169 - protein, 149 aa, Homo sapiens
MTLTRLYSLLLTLLGYQYQPGQELTTLREPLLHKAVPSCDQLRTSGCSVAMPRYTVHVRGVWMAMAVQDAQVNVDMLGTDAYRRYIKNKLCNSRYTFRGDSHFHVPRSKGMGLWSTEDRVLMAYHPVRRFVMTVMQGYCFIHLTGGFLS

SEQ ID NO: 945170 - protein, 88 aa, Homo sapiens
LEFCTRTAVCTQEKSSLCSWELYKNTLWRCSCVERRANTCGAGHGSAQAQSLNGLVHPELSPSGELCLPALEQFGTVVEGQLVTRRGL

SEQ ID NO: 945171 - protein, 91 aa, Homo sapiens
HEKRFTHRGVISRLILRSWQNQMAERILWLCELGPTGYIILFHRKNTWAKRGHGTEAIPITKYLYTVSEIISRGYKICVSYLIPVKPLRVV

SEQ ID NO: 945172 - protein, 94 aa, Homo sapiens
PLRTSRLSEYLMEDKMEVDVQYVHMSLWVYETIDDYIVRCRYSWCKSMLTNCYEHDSALTLHQADYTRSWDADAYSPYQAYALFTAVACIIWLR

SEQ ID NO: 945173 - protein, 31 aa, Homo sapiens
MRDLRRPAYSGEPSLHLLTLPYPIDMQIDSV

SEQ ID NO: 945174 - protein, 100 aa, Homo sapiens
MRRLLLKLAAVALIAGLQASAHRLRFLTCAECVNNSSKSTHLRGYIRLHFGERPFSCEEFEPRFYQSSHLAAHLDHHAPDRTFAGPDCGGLSRCPRCGVF

SEQ ID NO: 945175 - protein, 95 aa, Homo sapiens
MEKAISETGVTTVYLFTSEMYTYGAETDRDGADCTDGPTDELFGPTGELAGLSVAVTMSKLTYGGIDQLVSRTDLLLPDTKHAQLSETMRRGEDA

SEQ ID NO: 945176 - protein, 112 aa, Homo sapiens
GTRVPFFPLSYATGLLWGIFIFFLPTVHTDLILPNVDKFLCPHIGLPTIGSFIHFFSGVRFDLSEAYTRLWVLLCDLLTRGSESPESLLVQGFKFYPRPTGLASGGGTPALF

SEQ ID NO: 945177 - protein, 45 aa, Homo sapiens
MSAESMYACPHAVRALMVVIRINQMFPVLGLTGSTGMRGAFGPPA

SEQ ID NO: 945178 - protein, 128 aa, Homo sapiens
QTLIGTQSTDIPAPTELKFTQVTPTRLSAQWTHTQWSDHWISSARDPQGEDRANGRESTLVLTGHTRVYQDFMVATYEVSVYALKDTLTRRPAQGGVTTLENVRPPRRARVTDASVTTITIWWRTDWD

SEQ ID NO: 945179 - protein, 121 aa, Homo sapiens
GRVSLIILLTDGDPTVGETNPRSIQNIVREAVCGRYRLFCLGFGFYRSYAFLEKLCLDNGGLARRIHERLKTLACRFRTLPGSGNPLLTARSFEYPRNAGEEGTLNISGFSFRGFHEAGPP

SEQ ID NO: 945180 - protein, 109 aa, Homo sapiens
RAVFRILQASAAHVGSGSLVDRITDLSVQMCFLWVSNKLTLDKLDVKGKRVGMRGDFNVSYGEQPGYNNQRIKGGVPSIRADGVPMPDKDSLEPDAVELSLLCKVVCVW

SEQ ID NO: 945181 - protein, 116 aa, Homo sapiens
TQLTMRAQRMNTASELELLELVTVETRQAAYFRQRSLESTHTMALLHEEPVIALPMPGVGPSHVSGGECYSSLTEDPLVRPDYDSMVDEICRKVAGSLDGALPDPRWPSEALDSPL

SEQ ID NO: 945182 - protein, 34 aa, Homo sapiens
MDCPNRLGPYTVHTMASSILTEGPHVLTLAYTAP

SEQ ID NO: 945183 - protein, 71 aa, Homo sapiens
MVTNTIDENLPLWTVQFMMDYVSAWLYPTGYILANIVHTITLTDSAEYVLEEAYMLFMRMQQLHAANADSG

SEQ ID NO: 945184 - protein, 104 aa, Homo sapiens
EPCTSASMGEVLVLCRIAEIGGSGGGLMYGVERSAGCGENEPVEILVAEGREPPMVCREDVQGDVGVEATIGGASDGASVMVSSCRGAGFNSRGLAVLMRMLLP

SEQ ID NO: 945185 - protein, 154 aa, Homo sapiens
MDTPINCLLAPPLMFSSQQCTDGYEWDPVRQPCIDIDECDIVPDACEGGMKCVNHYGGYLCLSAERTSGATTAVVAVSSMATSVVFPGGVFVGSAAAVAGPVHTGPDNFVIRRNPADPQRIPCNPFHRIQSASRLLAKCTPRATTYTSALQGPT

SEQ ID NO: 945186 - protein, 118 aa, Homo sapiens
KEFRTNDKTVPGRIGATAGGSPRSCMLSFPSFLLVPFLFTLLFLSFFSFFPFSSFPFSPSSFPRSSIHCPRPHHFPFALHSPWFLSYSGSFPLCFLFLYSLSLSFSSLSPLTSHFSFI

SEQ ID NO: 945187 - protein, 119 aa, Homo sapiens
PRTGLADGMDTVLLICKMYITKLRLKDRQQLSKLIITQLLYDRYMSIAKGLITELKPQSECAHSEQFLHLIRLGRVGTHIHTSHGEECLAQVTTCYAADRHTMHSEAIEYACYVTSHVG

SEQ ID NO: 945188 - protein, 108 aa, Homo sapiens
MSEHGSETHYRSNTYSVEMDAQPEYLTERPDSDYRLCSTTLIGKGLYIGMSHGLEKEPDMNALRMWTDFNEAYTSKTKSQHYRSIEHAELNDDGLSVSAVHLRYCYAD

SEQ ID NO: 945189 - protein, 95 aa, Homo sapiens
PRPAPADGMATVLLISKTYITKKRLKDRQQLSKLIITQLLYDRYMRISEGPINEIKPETECAHSEQTLHIITLEESVNTNPYCPCGGMANDDTIL

SEQ ID NO: 945190 - protein, 139 aa, Homo sapiens
QTQESILQPLLPQTQESILQPLLPQTQWSILQPLLPQTQESGPQPLLPRTQESGPQPLLPQTQESRPPTPSPSDPGVQAPAPPPSDPGVRTPSPFSLRPRSPGPGPSSLRPRSPGPQPLHPQIFWNLGPGTVAHACIPA

SEQ ID NO: 945191 - protein, 70 aa, Homo sapiens
PVGERADKARRAPATYCLKMGDLIRTALHCFNGIILNCIYQRPLHRRLTTMCTDGNEVQEVRQGQRYLIR

SEQ ID NO: 945192 - protein, 233 aa, Homo sapiens
AAGIRHEERERERERERERERERERERERDRESCYRYWNCRFGLSLITMSTSHMHLVFVAVPMGAKPVRSLAGIGEVLSMKLEECGFDMAYLVLGLFLVLKKDLYLFRVWLTDTCGANAKQSWFCFLMPLRVVLRLLVMLSGKLSIPSPHSEFAARLGLLPFSLRRLLLFSYSPSSYFGVFLEFSSLTIFTFFFDFCFFMPFPVLFPLSIFLCARFPPILDWIPRPFPSPLLF

SEQ ID NO: 945193 - protein, 218 aa, Homo sapiens
  misc_feature (178)..(178): Xaa can be any naturally occurring amino acid
  misc_feature (192)..(192): Xaa can be any naturally occurring amino acid
PDVEHDLKHCQYDTEKGLAAGYKGLNDHHVYLAGTLLNANMATAGHACTKKYTPEQVAIDTVTAIHQTESEAVRCDMMLERWHERRGCHYEPECKQTVHCSIVLETKHVLWTEPARQCTGCKTGLAANKDATHEAVMKLANAILHAARGHDDYTGIVGLVFIQYVVTAWYTYYGPNAXIAIAERLMGRLQRXHTFLLFSKFHTIDFYCWKSTPVIEVR

SEQ ID NO: 945194 - protein, 56 aa, Homo sapiens
MSTINITNKCVLSLHRYDNTGTPLITPAIMTLDHTMVYLHTSRDQPPTSILPQDRP

SEQ ID NO: 945195 - protein, 76 aa, Homo sapiens
DIQNYAIEAYILRVRYIGGCCGFEPYHIMAIAEELVPERRFVPPASDMAAGEVVWTCTPHPELEQGPGTNTGRIFR

SEQ ID NO: 945196 - protein, 98 aa, Homo sapiens
RLPTRVAEAYGCEPRTPANMALRVVRERAVPALHPAREPVTRRALPAEVMADEGGRRASTAHWNSSDLGGQFTENHEWGSTEHDIATVLMSNFAQEAM

SEQ ID NO: 945197 - protein, 102 aa, Homo sapiens
MAALLLRHVGRHCLRAHFSPQLCIRNAVPLGTTAKEEMARVWNKNIGSRALAAHITIYSWSLTMAMSICHRGTGIAVSADVGPTYCDGLYGAGSHVKRRLPG

SEQ ID NO: 945198 - protein, 112 aa, Homo sapiens
QKRRSRQGTWTCAREVMEALTVLAATTTDHGRHRKAASAAATDDPAAEWSCAGLLDIGQATDSEEECHFYAAGQVHTREASKRSIDDHFLHLSNAKISKTEPYWEGTAESAG

SEQ ID NO: 945199 - protein, 65 aa, Homo sapiens
MVTAGADELIDTNVTVNMILSVKEMHDTGIDELHLNRINMETVCLTSSPECLLHAVTIYGDYDHP

SEQ ID NO: 945200 - protein, 199 aa, Homo sapiens
KTPQKEAKKSSKKRNRKHSGDDSFDEVQQCQSLMSDVMRAGQADGGERMEADRSAQWRQEKPKDEDMGEAQGRRGLELKPRRAKKLSLFMRNIAPNITRAEIISLVVPGLERVALSEPQDREEVKRRGVGELRAVIVNILEFCRKHVEEYRVRECELSAGVNMGYEQGAFETLRGMCHVLIVRIDNKLDDKLYRTSMCW

SEQ ID NO: 945201 - protein, 88 aa, Homo sapiens
GRTLYAVSVRLSCCVIIVTEWETASPEIVHYRYLNLYDKWSTGDAHITVVDIEITWLFRVCMPDCCLSIDPNLAADAIIAISEALRGK

SEQ ID NO: 945202 - protein, 66 aa, Homo sapiens
DIQRKTLWHSVLLTPRLGSECVAGLSQTLHATLAAIGSEDSRWGQMLPLDKIGASPALTCCSDSGD

SEQ ID NO: 945203 - protein, 114 aa, Homo sapiens
MLVATGTPAYCVGPCAVGIECYDAMLLNIISNMTEQLMIPETSAESYMRDSVIDGQLPGALRITCLLIIPDYTMIYGQCKTVRHHCRQPDITGGTADMSIPTHYILLTNQLYLV

SEQ ID NO: 945204 - protein, 141 aa, Homo sapiens
MTLRTHCAPYGCKYTHCATRAPSALIPMEAVMRPREEIGYLTCIDSVTQSTEAPDYLTTADADSKAAQHCQCIELTDIYAKCEHALVQTSQCLTCDYWMMRYVPDDKGIGRGDSVLVYGTTCDETATCKRSARVALLAYDS

SEQ ID NO: 945205 - protein, 68 aa, Homo sapiens
MRIAQGHGFSPSGSEDQKISLWTHVAHTFCYRKRHSSAGLWAKSNGDSLDCALTFWLALGGAPRGGAG

SEQ ID NO: 945206 - protein, 68 aa, Homo sapiens
RGVPRIRDNSCNPNSGYWDIENTALIRPCRRYSSGEIFHTGTLRRRPFILDEALGHKLSKIKIYPIPV

SEQ ID NO: 945207 - protein, 105 aa, Homo sapiens
MSTEYHMVSVVFTVEHWTVRCLQLKPLVGVVEKRVQITYAVHTEEHQACVVYNRPRFGWSLLEKQLILSYVYCCNRPKYCQCDDVLNNVGQIYNNRIDRGYLSMR

SEQ ID NO: 945208 - protein, 30 aa, Homo sapiens
MWPNPAVGFYRVGSPRSVIKRMLCRTSSPK

SEQ ID NO: 945209 - protein, 136 aa, Homo sapiens
MAATYAMRRLCMIEAVMLLIGPIRMGRRLNICTIDRHRLMHPNRSAQLQYESSAVHVQLAFHKAKPTDYSRNMVCLKTSLHFKTSSDRGYLRDAHKEKEEKVEGDPGTQATYSEMNNNKLGRGYDDETEITVEFLT

SEQ ID NO: 945210 - protein, 116 aa, Homo sapiens
  misc_feature (19)..(19): Xaa can be any naturally occurring amino acid
MQAMLVRGASDNSTCGKSXARDIAIQSGGAQQANDKNGSLSDTLSQWYPVALNVQYMYLINPSTALFVSRGGQVSARYVSACPKKLNSKCQVNDANDPFNLPKKRIILCGPLWPTS

SEQ ID NO: 945211 - protein, 76 aa, Homo sapiens
MLQALTPRSNCYSHELSCTGLGYMVSCWVSVYTFTDYYMAECNDPLAHRRCSAESLSALTTTDTDYMELTSLRSED

SEQ ID NO: 945212 - protein, 122 aa, Homo sapiens
MIETGWAFLYPDDSYHTVNYEMLTVEHEADELVAHNSEVFETFTEIHIQSAILVRDHVKVPLVNTLIYEPVLTGLNSIGLLMEVSGEDDGMALCRDHRLAVLSKCLDIWIMFLVILKTLLVS

SEQ ID NO: 945213 - protein, 94 aa, Homo sapiens
MSDHDPIMYGELGGGIVTIHQDARLDVDDSHGLTLAMVYTSTPKYSYCYIAECEVTPQTTTAMVGTIRTALKLFEQSKRCLEEHACTKPGTLVS

SEQ ID NO: 945214 - protein, 154 aa, Homo sapiens
MALQQAQKTLSMNRLYAMADVQQNNTEIFAVALCHLAELHAEQGCFAAHSEVFKHLKERFPPNSQHAQIWMLCDQYSCDRAMNDGTYHLADSLVTGITALNLIEGGYWTAVVLQAQNPMSEAHKLLHTVRGRGELAIFLPTNALPMLLQVWPLR

SEQ ID NO: 945215 - protein, 72 aa, Homo sapiens
QEFGTERDMFTGGCACMELGVQRATVFVSCVLQSSESSLDPVINTCFHGINDREKALVSPEALETQLPLSKV

SEQ ID NO: 945216 - protein, 42 aa, Homo sapiens
TIHYMQKSRLVMDPDSETDVYTHSSLTLENIALRIIRRAICA

SEQ ID NO: 945217 - protein, 133 aa, Homo sapiens
QKDCGGTDKTNQCPQAFFSCVKRRPQGVDFLKGPRKENLVTPSIRENKLEKGMDKVQLITISVLECRGQAPVTVIVGSSLAYGVLWVMTGKEPVHDIKGGKVGLKTEYLQEAQQAAAKKYNNHVRQQLAQVKT

SEQ ID NO: 945218 - protein, 122 aa, Homo sapiens
MNHFMDILLLHTLLMRYSLKLLNKHCTSTSRESFTVERDLITLSSDAHKILTPYQYVILKTKQDNQDIHKHGMEDTAHRCIVTEYQEIITSWENCENRVDIYSYVYKENAEILDAPISVDTA

SEQ ID NO: 945219 - protein, 228 aa, Homo sapiens
LQEFGTSWYVLNRDPEAGCLRMDYRQCTDERSVRDQLMGPLNAGTVPADTDVGCSAPTAYIDSARHTLDPKIAVAAQNCYKVTNGAFTVEISPGMIKDCGATWMVLGHSERRHVFVESDELIGQKVAHAMTEGLGVIVCIEEKLDEWQAGITEKVDLELTVIVDNVNDCSKVVWPMSLCGPLVLARLQHPQQAQEVHEKLRRWLKSIVIYAAAYSTRLFIGVCYWGTW

SEQ ID NO: 945220 - protein, 99 aa, Homo sapiens
MCIIFFKSEPLPVFTFKVADFWGNNNEILNGLDMEEGEGGSTWVCIENTVEGVRTYQLPVKQLDCEAREASTGGDVICYYGNRGEPEPIEFDTRVEPVI

SEQ ID NO: 945221 - protein, 81 aa, Homo sapiens
KRATPIRYIPQVNTPLLLMLAQKNRCVPFKQGMEYHRALKTRNVPVRLLLYPKSTQALSKVKVKSDSFINCVLGQRTHLGS

SEQ ID NO: 945222 - protein, 64 aa, Homo sapiens
IISNEHCSAQRDLALSLSICAIDLQNRAKPDDLPSVTQDLLETLFDQDYREGITHECGPYTVWV

SEQ ID NO: 945223 - protein, 102 aa, Homo sapiens
MLVRLTGSVEVKPLNDGSRVVTTFGEHMIIIRHEWIYSVWSRVVYTSLSLYSASVSTLRIRFYNTSRSDVKATNCWNKPKWAPCDFTKVIELWAHTKEVGVM

SEQ ID NO: 945224 - protein, 155 aa, Homo sapiens
MPEDEYTGYDKGQEIQAQTKGNPEQTPVLKPEEEAPVPEVGASKPEGRDSKAETPYSGRPQSPERRSVCTGKAFDTLTELKNGSLFGFREADSDELDEKAMRPRDPKLIRDSWGIKGPIDADFNRINCEGKTYLFGSQYSGSEDGAPGPDYPRVS

SEQ ID NO: 945225 - protein, 86 aa, Homo sapiens
  misc_feature (1)..(1): Xaa can be any naturally occurring amino acid
XTRPTKRAEDLSKYKCENVCSPMQIPRQYKIPDWFLHTQKIVKVGKSSRVQANGLDNKLRRALGVQGQHPKTIGPRARPVGVSKKK

SEQ ID NO: 945226 - protein, 47 aa, Homo sapiens
MTQYFAKKLLVEATNLTGELKVADRDGTLHDLKMCIQIGLNAPVNGR

SEQ ID NO: 945227 - protein, 126 aa, Homo sapiens
VVLTAGPGVASTGQDRWAAPLSPTFREPRVLTPLWSEEHCFTHPYPWSFRTVTLPVQVDARRCIPDHTSPLIIFTARRRADRGRIPALVQIRYRDHTFIACEMLAFACESRQYWAEQGLKAVKALV

SEQ ID NO: 945228 - protein, 91 aa, Homo sapiens
CTRLYCGRMRASVELHLVVVGTVPPDPSSLDLLLFAGPFGLLWDKTPHVSLEVIPNWLCPLLSTLGPLALRMRATNTPHINLNLNWALAIP

SEQ ID NO: 945229 - protein, 172 aa, Homo sapiens
MRTRSLFISTLCPGAVCGLMLVIPALCEAQGPGAPPCLPYVHDVSPNLQSDRTICPPCPQNVHKGSLGYTRRIRFLPTIPTLAQSDWCEAPAVLCVQYYQGPLDKAELFITYWKSVHRYTLRRATFRKYDLNLSLLLKLASAKTIRALAQRDQDRRTARCCETQGHDGHYGA

SEQ ID NO: 945230 - protein, 74 aa, Homo sapiens
GPSGLQLYAITYYSVERSVDRCLTSQHLARSTALEHYQILHYAQDVNLDNQAHLTNLTHVPTGHRRFIGYDRWI

SEQ ID NO: 945231 - protein, 119 aa, Homo sapiens
MGKKSTHWYVMTDVAHEHECICSSGTDLAGSENPLWADTGPCMTCVGGIGPDTRKGVSSTEETHSLAQPLSLHGKYRYSFSHAKLTRTRCVMRIHKNGCRFLESQYPDRLDCMYKALFC

SEQ ID NO: 945232 - protein, 203 aa, Homo sapiens
  misc_feature (32)..(32): Xaa can be any naturally occurring amino acid
VTTSTHFPVSTESQEPRWRLYSSLSCRDTICXDASSMTIRALAACKAVTLDHLHETQRSAEYALDAQAWIFHLERDVQDSLELFQTCAVLVLRELLTSSMWTDPDFLWDIITAAIDDIMKQLISATIDGEISLTYSMYIYLKQFNTAHDQRHNALNLNRLDLDLYNAAEDPLLDGDYGMVTAVHKISVEFSPARTHSDILTTH

SEQ ID NO: 945233 - protein, 104 aa, Homo sapiens
  misc_feature (1)..(1): Xaa can be any naturally occurring amino acid
  misc_feature (7)..(7): Xaa can be any naturally occurring amino acid
  misc_feature (11)..(12): Xaa can be any naturally occurring amino acid
  misc_feature (20)..(20): Xaa can be any naturally occurring amino acid
  misc_feature (24)..(24): Xaa can be any naturally occurring amino acid
  misc_feature (26)..(26): Xaa can be any naturally occurring amino acid
  misc_feature (29)..(29): Xaa can be any naturally occurring amino acid
  misc_feature (35)..(35): Xaa can be any naturally occurring amino acid
XCDAEQXADPXXPATVPRLXVPSXVXDSXPDPFAXGTQPMPILQPFTEFFKKKPWSRYWPFTGPPLKIFFKSFKGKKKFPPGFFKNLGKNPRKFFLKNLGVWKL

SEQ ID NO: 945234 - protein, 71 aa, Homo sapiens
TGLNQVKPQVLLSPLNTTEVIVRVDNFFKRHPGKVSLITTLVKHSHVLSIGTVSTKVVFERFSIKEACGIC

SEQ ID NO: 945235 - protein, 71 aa, Homo sapiens
SYMRDTVVIVQLPVALQISCVLITPQWTRIYTALEDILHQGEKHKHQKSNTLIKAIQLTYNPEESSKPNMI

SEQ ID NO: 945236 - protein, 142 aa, Homo sapiens
LHESSFISHSSPQPHIQNTLAKLWGKKRKVPYKKERKRTAHISKHNGGHFRVIPKNPPRGDSKSLRRDKCEPVQVSMRDNSLICFAWYNTVVGGFPVGHRQPCDQNICVALTLWAEPGLLASFLGTHHILHRPSVFTPITVW

SEQ ID NO: 945237 - protein, 145 aa, Homo sapiens
MSPLKGREKIEEHVINLCPQVAERENVIWVCHIFAFFNDTFVHVTDLSGKETIWRVTVGMKVKADREESSPYAVMLAVQEVGHKCKELGITALYIKLRATGGMTQTPGTGAQSGLRDLVRSGMKIARIEDVTPISSVRTLRGGAP

SEQ ID NO: 945238 - protein, 143 aa, Homo sapiens
HTYSPGQSTSYTDLKSLFWTRTHSLWQTQFLYTLCQSPSASLSKVHGPLHNISNFSCAIFWIYTGNLYIAFGSDIFNPHYRIPLPKHKRQSLRSCCDTVSHTFRENNSWWNTALHDCDHRMAEMELGKRHTHILFLSGYFYSA

SEQ ID NO: 945239 - protein, 139 aa, Homo sapiens
ADILTERAYRMEKLPRSYKNICLGFKTPKEAIEGTYIDRTCPFSDTVFISGRILCGGVTKMKMQRTIVIRRDYLHYILMYDRFRSCHKNMSVHLSDCFKDVQIGDIVTLAECTTLSTTVRFNVLKVTNAAGTTKQFQKF

SEQ ID NO: 945240 - protein, 169 aa, Homo sapiens
MDRNAFGNSLERKWHSDALLTGCRLMADNVNLSGDYEAQSGYWLTPSLSPVSLSQKTMDDEMKAIGLWEDTHSLCWVTEVLTNATSHNIKCHIENPLPHYVCSTSTNYADIVGELEEVTGYQLAGEVTTITLNCPYGYDVAPGDGLTSKTARTKLDFENVSSLYDQRLP

SEQ ID NO: 945241 - protein, 39 aa, Homo sapiens
MRPDTNGYLQFVSQTLSGLGRSLLDSNLSDTPPVASMES

SEQ ID NO: 945242 - protein, 169 aa, Homo sapiens
  misc_feature (1)..(1): Xaa can be any naturally occurring amino acid
XKKLEAFLLIIWAVNVTWPNCSEGYCVSPKTRGLFIRGPRTRQGYVIFKRRVCKEIFYENIGALKNLPLTSQVRVHTPALTVFGFGSFALYAKGPCPPENLQKQNDYKVLLPFLCWPSQVQVYLTWPLNNFITDWTFAVQMFFTRGIISGSCDLQVVLSSIFLYLTFLR

SEQ ID NO: 945243 - protein, 116 aa, Homo sapiens
NLKPEVAEFYGTGLQMNQLRGRTSCHTHLGGYAGWNILKAYFTETYLSHVNLLRQSPISSRAVVPSVPMARTSASCVNCVQSVAATPLTNYFRYLRAFKSVKDGAVEVNFDALRYI

SEQ ID NO: 945244 - protein, 80 aa, Homo sapiens
NLEDDLELGKSLCLGRCLITDKSECTGLPSHVSYMEWDPTLDAVPQTLPDDLSIILVRTGYAAWYCVALYGAGRHVPNGG

SEQ ID NO: 945245 - protein, 103 aa, Homo sapiens
RSYTAIAQCGRRGVYLYSLSVPVSCAEAHNAPTRTEDWTTAYTRLGPKYRGALTWFTINTDLTPFHRRDVLKLGKAPMIKGIAGYSEEYDICIRAKSAFRGGC

SEQ ID NO: 945246 - protein, 129 aa, Homo sapiens
PQTRPLVARVGSLVQSAACACCAQRRAVCVRGADRMSKWTSKRGPRSFKGRKGRGAKGIGFLTLGWRFVQIKEKVPEFVVPDLTRFKLKPYVSYLAPESEETAPDGRAALQRRGACHMELKDRTFEPAL

SEQ ID NO: 945247 - protein, 139 aa, Homo sapiens
VRLPVGVRHAGPRALLTLRPVVSLTRTQHYPFICTGSFHTSGPLAQEDYYQILGVPLNAPPKEIKKAYYYLGKKYYPVTNKGDSGQGKVFQMAEAYKGLSDEVKRKHYHAYRSVGFDTGGSGFQHRYWGRAHCGPRGAV

SEQ ID NO: 945248 - protein, 196 aa, Homo sapiens
GGKMVLESTMVCVDNREYMRNGDILPTKLQAQKDAVNIGWHSKSPSNPENNVGLITLANDCEVLTTLTPDTGRILCKLHTVQPKGKITFWTGIRVGHMALKHRQGKNHKMRINGFVGSPMEDTEKDLWKLAKRLKKEKVNVDIINIGEEEVNTDMVTVPSGPRFGDALIRVSNMGGEGGAMLGLGPGILIWSVRCL

SEQ ID NO: 945249 - protein, 75 aa, Homo sapiens
NSWSPRTAPPLTCQLKPARVPAWRTWANAAISVHSYLSATDELEPTSHYPFMANTDVTSTSIIATSYQEASQVEY

SEQ ID NO: 945250 - protein, 83 aa, Homo sapiens
PPPAEARPPLAPEPQPAASACSLVRLNSSYLLYMARWLVILWELFWVGEVGSGTMTGPYPLTVLTRGRGTASSQAKGQSHSGG

SEQ ID NO: 945251 - protein, 97 aa, Homo sapiens
RCSSNRGAMQSRALLAVALLSLLACARASYAQDACLLSFMQGYMKHATRTGEDALSRVHESQVVQQAWGCMTGGFRSLKDYWSTGNDKFSETLELGP

SEQ ID NO: 945252 - protein, 127 aa, Homo sapiens
SESVGTEYATTGVRLTAGATGVLYAIFPELPIWCQVKGRVLGNLLKRPRGGPKNFWKNFEKAFQGGTPWENKNVPKGFPKIYKRGGGALGIFGDPPPRTNSWGDPFGAHLRVLARGAPRGFWGPSPG

SEQ ID NO: 945253 - protein, 100 aa, Homo sapiens
TRLVMLGESDLRCCEKCELTLDMRGVFEDSNYSERTTDLDVQLLCLGHIVTLFEAIMPTDFRTVSLLRAGLSMSDIETLVTIVCYHKIREKGAYSTELRS

SEQ ID NO: 945254 - protein, 70 aa, Homo sapiens
ARADSLPSPVWVFVTRQLVCVGPHSLSKANAMCKLFVCTDTKGVNRRLFCDGDTVTVETTPMKPTVEGFI

SEQ ID NO: 945255 - protein, 118 aa, Homo sapiens
MHQQNEAADTVASCIADESCGKCDKTLYSLIGDRPCTVASLSEHYAGVLAVLNTSLLEMKASCRTLMTTDTYSYGQTMSYTMCTACHDKQDTLQTIGLCERARRHPYMYAPGTLIVLL

SEQ ID NO: 945256 - protein, 166 aa, Homo sapiens
  misc_feature (82)..(82): Xaa can be any naturally occurring amino acid
LQTAWADRARNFVHFSAQTETCEEPLTYGGLEPVLVVHQFNAIMCQSLQVVNIFIGDKGNSFRTWESEYNKCSHRCTKQNVXGRCRTMRTLAHAEQFINQVALVQLVQLKLETTMAQLGPVRNHVGALVKKSLMDLISVDRLSIGEEQLRCFKAASLGVNASQFEA

SEQ ID NO: 945257 - protein, 85 aa, Homo sapiens
MTSRNNVLLDVISAEEILEFGKTLIMNYDADNILYNQVACLGSHLLTNDVMVHDMLDTMHIWDTSKTGGSSRTSVRFYRGADSAF

SEQ ID NO: 945258 - protein, 80 aa, Homo sapiens
AQSIESSTTNSQCIITAPLLSTLRISPKLCLIQEANRPSQTRCHNPGLLSTMTEGTLALSFMGLQLNAHYTIITKEIQSI

SEQ ID NO: 945259 - protein, 77 aa, Homo sapiens
MTTASTSQGRQNYHQDSEAGMNRQINLELYASYVHLYMAYYFDRDDAASKNFAKYCLDQSHDEREHAALMKLENPGG

SEQ ID NO: 945260 - protein, 108 aa, Homo sapiens
TRRTGAGGGMIVTWIDSENPDGSHILTSCLHGGFPCATAHHARVTLSSEPPSSLLTLSTIKRIPYMDYATVTDIALITTLVCTMDYVSCMAWSSDHHRIAAFTHYATY

SEQ ID NO: 945261 - protein, 85 aa, Homo sapiens
LTLMCATVGALDTCWPDVVCRHALKMGQLTGFSMIGNPVRTLQSLYAQSPRLAQEHQDTRARQDSETSRICTLKGGPMCSRASWW

SEQ ID NO: 945262 - protein, 78 aa, Homo sapiens
MRKQDSVILGSTHYRGLDCLQPYDMTAQSVHAPSYRAPETNRAFHDSEISSDAELETKLDHELSELSFRVHCSMWHTA

SEQ ID NO: 945263 - protein, 118 aa, Homo sapiens
  misc_feature (95)..(95): Xaa can be any naturally occurring amino acid
  misc_feature (107)..(107): Xaa can be any naturally occurring amino acid
MYSLRMKPLNSRIHVLLMSKLIMVTTHYIPSLETYNAQMWLFVKPMEGCLMDAHDPESKECFYEHIDDEPYLSTHERPYDDVMSTAIHDNRKTVXQERHCMNMSEDXLTFMAQNCVYS

SEQ ID NO: 945264 - protein, 145 aa, Homo sapiens
NTPFLGFSLPPKKSFFPGSQLLLVSPKKNFFSFIPPSRSPFTNPLPFFSFSHIPFPLSLFIFGSLLGKRLPLLFSSNRLSLSSISNSIAAPATLSISTVLFISFILYCHPILSKVILLFLFHHTSTLIPSLPNIQISPCFSAVLL

SEQ ID NO: 945265 - protein, 103 aa, Homo sapiens
  misc_feature (29)..(29): Xaa can be any naturally occurring amino acid
MISSRSSMGYVRYTTVCQELQPLDSSTRXRTSSMTWTTLSPCERPDIAPHSHLRHIYISSDVNRPCDIFLLDGINKTRWGDRESHEDKVDKVLEGPGAHMPLW

SEQ ID NO: 945266 - protein, 128 aa, Homo sapiens
SANANRSAVRTLCCRLSAERCVDLGYGFNKCELWASLWWPLWLANAQGKPSFHTVSDELGNYVNKRDTTWQGGHNFYNGDMSYLERRCGTLLGGPKPPQSGMCTEDPKLSGSFDAREQAQCATLESAA

SEQ ID NO: 945267 - protein, 96 aa, Homo sapiens
VWATYHRVFDKVELMLSEKLRPRCTHSASARTGFFWASIMKWGLVCAGLADMARPGEKLIHSSIWCFDGYRVYLVKILTCDYSLFRIWRYYPELKA

SEQ ID NO: 945268 - protein, 129 aa, Homo sapiens
NLSDDAPQYGNQNLSPPDTPGGGTAQTPEAGTSQPMPPGMGTRTFHQPNTPGGGTGQTPEPGTSQAMPLRKSTPYSSGGPSEDKRFSVVDMAALGGVLGALLLLALLGLAVLVHKHYGPRLVLLCGFGA

SEQ ID NO: 945269 - protein, 67 aa, Homo sapiens
RSWVTDGFICLKDYWSTDEDKSSEIWNLDPDVIANFIRGCLRPQYPKCICLYILSAPGELQYPELPL

SEQ ID NO: 945270 - protein, 209 aa, Homo sapiens
  misc_feature (172)..(172): Xaa can be any naturally occurring amino acid
MARGIRHNQGNLIRVDICEITECASIINLTLADKHSQRKRMTYPQIYGAALTREQCYPHWCIAHDIAWCRIMDIDNMVGLHLAVMLNPLNGSVNFDIAFMLTYVRMSLYHHVNNMLKSMYENDDGFEWQQSMICNGYIVIQSGKPRMRSSKLIMVVSRIAAFLGFVPMWTSXECLLEHSRDQNECKNHILDQSADGAGDVIGYPRWLSE

SEQ ID NO: 945271 - protein, 204 aa, Homo sapiens
ARENLHDATSPIIVTIITCDGRSLISNIHHLTTETLMNGDTRNYGCQADTKADGYYTFLRIPYSADWVNGQVPYQDSNLLSNVTERTLHTDYGRMSPRSCILRSLYREPGDLRHLYDDINCMTNQRSPHSYTIHITRRIAVMSLPHILLKNRCHLRIVKPNHQHRYTSGGIYGQCSDICGANHRFMPIGLLIGLQVLQYGPYLR

SEQ ID NO: 945272 - protein, 77 aa, Homo sapiens
  misc_feature (31)..(31): Xaa can be any naturally occurring amino acid
LAQCLHWNVRKKQAHFEEEEEDVVLLFLSFXLAHSLPFICFHVHLEFCYSIGTVTVHIHAGMVTTYTVLLMTPNLSE

SEQ ID NO: 945273 - protein, 240 aa, Homo sapiens
EQSVPLALHSDPVLRDTICSYSVMELCTKGLGNQEEVLKTTGINLSCVRTWEVVSNERHHVALQQSFSKLFKDIGLYPRAVSTTFGSRVNVAICLQRTSTPDATTVYVVLYSLSQSGKILPGVKVGIANSVTEPGGDSHPGEILVIKSHTASGYYTIYDIETLLADHINTTLRFGDAAQTLWALTGYLGFVRRTVLTADTGEKYDALDVVGALDALELIGYIHPLDLRLRVRITDDCDVP

SEQ ID NO: 945274 - protein, 62 aa, Homo sapiens
MCIISTAVSSCNTLAKMVVNQKPAFLWTLISPKAMLFRVPSSVAVTCEVNFGNIELLRKDPV

SEQ ID NO: 945275 - protein, 196 aa, Homo sapiens
RERERERERERERESASDRHAPLSLLVSYTKSYLSMVGSCCTSASPTVCFLKERLQLKHLSLLTTLSNRVCSQYAAYGEKKSRLSNLIKLAHNILSKCCECASEDCMAKELPEHTVKLCDNLSTKNSKFEDWCQEQTAMDVFGCTYFMPAAQLPELPNVQLATNKDWWDPRYTVMDKYTFGYADGLIFRRFPPSVL

SEQ ID NO: 945276 - protein, 138 aa, Homo sapiens
LDYLYGTAYAEERASVSLAWGYDENMALKHPNRNNTSSVEMYAQPEDLTERPDSEYRRVLLSSMAGDQDRNESGHGERTYIDALRMWTHFNEADRSKRKESALQEALVTLTERMMVLSVSVVHLSMVRYLVLTDEVYG

SEQ ID NO: 945277 - protein, 70 aa, Homo sapiens
GIRHERTPTAHDSQTGLDALCIGVSDMRSDRRLPGAHIYMSRYGTEPVISDHGQYTSEDYMTVHFCAICD

SEQ ID NO: 945278 - protein, 132 aa, Homo sapiens
SYRVTCTPHHRTGDTWGIYTTYEYTHCLCDSIEHITHSLCAKGFQARRSFYFWLCNALDVYWPVQWEYGRLNLDYSWGSKRKRLQIGATRAVPDSEDPRVFTLTGLRQRSFPPEGINNSCARGGVTVAPTGA

SEQ ID NO: 945279 - protein, 143 aa, Homo sapiens
EERERESVCLNVGCVFNYEDLTAITDMLLSYIVPTAGLTGAVRTCYISVPADNTGLGSHNTSISHACRLTTYDFADSIGILSVDNVMQSGDYVCAVESTLLFMLIISWFCFELFIHHVFHNRIVTYDYELDFVTRLFIVPSLA

SEQ ID NO: 945280 - protein, 113 aa, Homo sapiens
PELCLCLTRDYSFFTVEHVLGVQRHACYHRSDNGQGNFGARGLCPGADAGSEPKRACLRHRVQQQVKSKHLLQENEVQVLDTGDANTAIDLGQREAAVPIAHRVSMRGVLSGF

SEQ ID NO: 945281 - protein, 220 aa, Homo sapiens
TRREIERERERERERERERERESERDSERVRECECESVRVCVSLPLSDLPFLFVSCFSPSHTVPDPFFSFFYFSVAARDTLILHQPAPALHYVYGLFFSIDRSLTHPLTFFLFLPYLFVCLFNHPFLLPCLSFWFADLSFTYTLFYPSTLIFFSPPVLAPSILIPPPPFFLFLFPPPLLPDPSLSCFLSFSGFAPPPFSVFSFSSQSCRPFFLLIDFSSL

SEQ ID NO: 945282 - protein, 110 aa, Homo sapiens
RESERERERERERERERERERERERERERVRSTERESALVSVLISTHPSCCLCFTTFSYPCVVHTPVIPTFSALSVSSRSIPDPSLLLGRSLPSLLSIFPLSPHSFLHSS

SEQ ID NO: 945283 - protein, 70 aa, Homo sapiens
MRLNPTPTAWPPLQQYQEVDLPSEHRYRRLQSSRPQTRADTHDELLEGTDVSLTDTTEAQIHQGLQAHLF

SEQ ID NO: 945284 - protein, 103 aa, Homo sapiens
MLTNRLSAHRLLETHVTMGTFFLDGYCKVETLSTGTQTKAPNDSQPLMQQQEFRLLRISQLYTPDGFTPRTHMFTRHTWPMRLGLTVQAFVSLSRDADFYGGG

SEQ ID NO: 945285 - protein, 82 aa, Homo sapiens
MLTLPSGSDVLEVPSGGVTLIDNTIAEPVHGGPCYFSPQQAQMEGHTEIKMTLYEPLPIWSHSEAIRPGNTALSSSSSIYFR

SEQ ID NO: 945286 - protein, 70 aa, Homo sapiens
MRFRDWSLHETVHAPIFVYDLLSWWLKESARRLIITNSLPEGLQALKGVRSTMQEELYAAHAINYCVGLT

SEQ ID NO: 945287 - protein, 77 aa, Homo sapiens
GLLAVYTMLTIDLLYDARLLNRLQLYDQVLYFGMDRLIITKSSGRTYWTSLGHECTIVLLASVARWSLRCIDAIWSF

SEQ ID NO: 945288 - protein, 128 aa, Homo sapiens
  misc_feature (6)..(6): Xaa can be any naturally occurring amino acid
PPGRGXRTHGGDPPLQGGEGTPSLTTRTKFLAKGNLSRFLSARGQGDIFFLLGPPGRGTGGGFPLTPPRILGGGNKRLITPPPRGAPLFWGTPPKKKRGPFFPPPFFFCAPPPKKNKNPSSFPRFFSL

SEQ ID NO: 945289 - protein, 414 aa, Homo sapiens
  misc_feature (72)..(72): Xaa can be any naturally occurring amino acid
SNHTLHTHTTKKQPKKTKRNKYEKKQKKQDENTDKKNEKNERTLEQTHGDRIGLEPPPPPPPPPLVKLREGXFFCLKKEPVLRKWIGSIQHDQGGTPTVGPSVFFKKRVAHKSSGQGMPTTTSWTYTITAATRSHTRTVLEKQREREIGPPQARTGTQKVGLPGGLELSSKGHSKRHSAEERKPEEHEERERRRDSEGSKGEAQQQAERPRTRKQAAGQDGAQERRSRMDDESAERHEQSAIEETQQKRERTKRKRREGNDDHKEETGTTRGGRRGATKHRREEEDRRQERQRETTEDRLEHARAREGGGRKRPRARERPGRSKRRRERAGTEGAGRGTVKENRKREEARAHRGKEATRRWRTSERRGRTRTGRRQVRDEGENDGRPDNGGGAQQQERDRRRRHSARARAAEAG

SEQ ID NO: 945290 - protein, 121 aa, Homo sapiens
ISPESAYHPGAFRGCFRLLSPPLHDMISLNWRQQTNLELGLHTAYGRVYSMFIWDCILYLMTTATTWHHRTTVFITVDLALRLLCQFEFQQSNTSSIHSFPTQHPCNSYSVTITSGCVSFS

SEQ ID NO: 945291 - protein, 232 aa, Homo sapiens
FNKRGLPCGVGKLYERHEENLHLPGYCLLERVLLQRGFSSPWPDMVLELASFSIHGKQHLPYLPHLSLAWSFDISISTFSPAPRTIGSGRGLHGPQRNTGDFGLSLGYMVLVQAGRGSPASLMWGAVRQHLGLGLERKDVGFLFLSGERSLRQQNKFGSWSLRKLQIPLHAGREWFAGGQVLLFWLTLDMKIENFTLSLPSRQIRSFLSVCLYVTKAFRCYSSCLNNDYYFK

SEQ ID NO: 945292 - protein, 111 aa, Homo sapiens
MNAVLDCATGRCGSCTFIGVAAGSTGFTVDPEELVIGRTINGTFFGGRTSVDSIPKLVTDYQNKKFNLDALVTHTLYFDTITEAFDLMNQGACEQSSSFEDARSTFGVLSD

SEQ ID NO: 945293 - protein, 122 aa, Homo sapiens
MPVVLDERDFTVNFTDVCTGLCKCITKRRGARLAKYGAYYETKVKQELYENLVADNDIYDYTDNTHRWEYMCDGIAHYGYALKTVCDRNIVGVIHYFPYSEHTKMMEVLHCVQAASMHAVFV

SEQ ID NO: 945294 - protein, 108 aa, Homo sapiens
  misc_feature (86)..(86): Xaa can be any naturally occurring amino acid
MDYIGYKNHEDIVIVPDDGTKLNGRLHFCAKLYRSVTNCLDSNHVLMLESNLQLENCALKITCIISNASYVLAEGVENDMTNIDIXSGAVMNMYEHHSMCSVHALFGA

SEQ ID NO: 945295 - protein, 172 aa, Homo sapiens
PFYTLRFETAVFSTFAAGMAVFCPCLSIWPIPQPWGPRSLSQPPTLLMPLLDYGPNSSGLGIGPPYPGIFTLGTRRRGKPSSWRTVPTNPFYPGLRAQMGYLCQTPAVCLWEKDIVPISRASAVTLLVAAEFLHSGCPPPDRTLELCLFQTSARNQHFMKISGSGHQQDLST

SEQ ID NO: 945296 - protein, 124 aa, Homo sapiens
ERERERDRESETVRERHRESETYRDRAPHTRLGIHHLGFGFLSCAWPGSLCWSCCLPRCSRPGTGGHGSGARAPSYAFCAPYYDAHLLDLGPLTKAWFLHSCDSLWFMTHKLCPTLACGDEVLC

SEQ ID NO: 945297 - protein, 133 aa, Homo sapiens
AFLCSRVQDLCSIVRRADRAHAPIMEPLRTSCCVPRCESVCVSSSERSAEDPGHASSSLTARTVLRRPHTGPRRTCGMARTPNGRKLTAERTGRQWRTEASLGTGQAFLLLGGKLSGAESRELALRLFVLCVV

SEQ ID NO: 945298 - protein, 111 aa, Homo sapiens
MCFISGGRGFRLSHITSLSYSGFSTRGDPRPRIGVAIGDQILDLSIIKHLFTWPVLFHQDGFNQPTLNSFMGLGKLAVKEARVVLQNLLSVSQARLTDDTELRVCIHLPAS

SEQ ID NO: 945299 - protein, 105 aa, Homo sapiens
MTMCQGPMSNRPKKYERDDPPGGVPVKLRDTPRVCNGAEHYLPYASQSRGKIRYEHDKMYAAHSVKFVVHTEIYLHMMNLIHDGKQHSRCINSGQQGKESLFLKC

SEQ ID NO: 945300 - protein, 117 aa, Homo sapiens
LSQRSALPLFPPLIYPTLIPPINPCFAQFSPSSYPNKMPYSTTLLVNKPYVPPAFSNNKFISHKYLSQAQGIPLQTINQNILINLVNQNPQITKNQLKAVIPDFSGLLKKFCQCHQH

SEQ ID NO: 945301 - protein, 119 aa, Homo sapiens
RAQHCQDQTRVRPGAAFSVKRRPRLTTMRIAAICFCLLGITCAIPVKQADSGSSEDSSYEQTLLAPQNAVSSEETNDFKHETLPRKTNGHDHMDDMDDEDDDDHVDSQDYIDSNDSDDV

SEQ ID NO: 945302 - protein, 84 aa, Homo sapiens
MTIKPDKRPSDLGLEEPNRIPSCSLLRINLNQDFIDLSSALNSTVASVLRAVCAGTRLAWLDYHARDLILFTDLIGRTGIYVHD

SEQ ID NO: 945303 - protein, 99 aa, Homo sapiens
GKLPSHWIFIHWEKNNLFVLSSTRDMLKKYAAANRIGPMTHFSRNLVGPEIPKNEWTKGFASTRLQEDVRMFIIGPLKLARTKSKLLACIKGLRDLIPA

SEQ ID NO: 945304 - protein, 151 aa, Homo sapiens
AIPAYPSVQKLLQDYFNGRDLNTSINPDEAVAYGAAVHAAILMGDKSENVHDLLLLDEAALTLALETAEGEMTVLSKRKCTIRTKQTHIFTTYCDNQPGVLIQVYEGERAMTNDNNLLARCELNGIPACPRGMPKIEVTLDIDADGILRHV

SEQ ID NO: 945305 - protein, 96 aa, Homo sapiens
VWATYHRVFDKVELMLCEKLRPRCTPYRRCQNRFLLGSNYEKGVGVCWIGCYGQTWRLSTGQSGVLMGTGVIWARYLLVIISKIFRIWRYYPELKG

SEQ ID NO: 945306 - protein, 65 aa, Homo sapiens
IDVDIPGASVWSAYRMPSRTPCALCEPDAYESVYSPEECSDLGPDLPRRLIRHRARGGRVQMKLV

SEQ ID NO: 945307 - protein, 134 aa, Homo sapiens
  misc_feature (24)..(24): Xaa can be any naturally occurring amino acid
TRRKRLESFFSFKNKKSDQGGAPXPGTTPPPKETIGKMGTPQRQRPTGRDQEKGTDQRTSRRKQGPQEEGARRNKRGRAGNQHARKGARGGTKGRKQRRRDDKTANNATARSGGRTNGAKESGEEGGRRDAPDG

SEQ ID NO: 945308 - protein, 185 aa, Homo sapiens
RAPGLTDDGVYCRRRAIQVCTSCLQSKPKVFSHRNTETCGYSVILVDRHKFSHLAKVIGGLSASVEATPSGLAEGWCAHRCGMAGVSSSPQAVPMSPCADQWHSKLAQISGHPFVILARILSMATRIGHREPHGAKLKNKRFHYALLRVIYEAGLAHRSTERVLRVSQHCLPVVQSIPHLCIVPT

SEQ ID NO: 945309 - protein, 130 aa, Homo sapiens
RIVCTEWVLMEEHDARVPVLEPRRVEQAPPVIYYVPDFIFKEEEECLVRQGFNGPKAKWTQLSGRKVQNWGGLPHTRGMGPERVSPRVQGFVDKECLYLFGGLPDYHVLVDQNLSGEGIMGHTPLVRVPP

SEQ ID NO: 945310 - protein, 131 aa, Homo sapiens
EVVEGVHWAIYEIITVEDVIEATPFYTDTRGQLTELILIARALEVSMGLDPGSATDVRLPIKPLMLMLTVCKTGSSLQEMGCRLKTSGESGSETHACDPSTLFAEAGSRGQVIQTPQKTGLSPIAAIAEPW

SEQ ID NO: 945311 - protein, 108 aa, Homo sapiens
MCMRRHHRTDVTHDCTMSAKCSYLCHYMDHMYRCQSKPVFTGNGIICHEDTDLDGLPNENLVCVDNETYTLSDYCANLSNLRPEDTDKDGIGDACDDDHYCYVSQSVV

SEQ ID NO: 945312 - protein, 95 aa, Homo sapiens
PAVLSSSLFLDRLLTGRHIKKEAILNLNAFNLERQQKAMKLNIYYGRTVQAMCTECMAWQDAYKEAPLEAIIKRARSICQRSEGQYVDRSSCGGL

SEQ ID NO: 945313 - protein, 113 aa, Homo sapiens
MRRVLIPLSLWLCARGVGVAELTEAQRRGLQVALEEFHKHPPAQWAFTETQVESAVDTPFPDGIFVRVEFKLQQTSWRKRDWKKPECEGRPNGRKRKWLGWITGLCGGLGRVV

SEQ ID NO: 945314 - protein, 60 aa, Homo sapiens
RSSARRLMPTRNADRHAHRTSAHSTYNQSAYHGRDANRRSLQCPTHLDVLYWLDSYSAAH

SEQ ID NO: 945315 - protein, 117 aa, Homo sapiens
RILHESTCQYRSLYYTRHKGLYVGLPEERLFGNTDLLSPSGTWQPDYTGGDCCNARSTKTHGRLYLKNKIHTLELLEERHNRFLDTGVTNKTLAAEMQELRVPLAEAQETRRTAERP

SEQ ID NO: 945316 - protein, 70 aa, Homo sapiens
MPRGQVFYRTLVCNIAILSDSVTRVRWILIAKDAFRKKHNLEPAVFKRYSCEFADVKVLDDNGNNGVAEL

SEQ ID NO: 945317 - protein, 74 aa, Homo sapiens
DTHIYTPYGTGPNNWIIMRCCYDEHDPDYTQSCRDLIHLTLTRYTGPLEIRHAQTCTPRRPLRPNGGQMRCSPN

SEQ ID NO: 945318 - protein, 74 aa, Homo sapiens
MAYCMCEVNSQVQYVTHTDLHKYDTEDARKHTLGKPLTLVTGSLHEDLTYMSATVRHTDDGPHTAPMLDKLQDE

SEQ ID NO: 945319 - protein, 148 aa, Homo sapiens
MTYSIYTETLWLNLFMKMAMTHNEECCEGHIALLVYCNVSIVTEGYEKRRGELTQREATKERGELMMPEPLNQKCRLYLRPTLMKSHRFVSHECKRTHMHRRPYLRCNEVGTAVSSSIGWQHSERGIIEYRMSELVQDYTAHTLVTSL

SEQ ID NO: 945320 - protein, 69 aa, Homo sapiens
MPFRYVGTRFFAIVSAISSTHFISIFLYSLYSLVLALSCFMVPTSCCHISSYDFFTSLFGPLVSSGLSG

SEQ ID NO: 945321 - protein, 69 aa, Homo sapiens
ERMCDSEARHGDSHDMPLELGLVEPLKFRCEAHADIGCCLAKRLVIGLMFELAAEGLSTVATVEYIGRL

SEQ ID NO: 945322 - protein, 129 aa, Homo sapiens
PPLTCDSESTLPRFVSRGILLLSDLCCLCPVSLAEDPQGEAVQKTRYIPHMIRITQTFNKITPNLCEFAFKLYRQVAHQFNRTNIFFSPVSIASGFAMVFLGTKGDTHKEILEGPDFKLTEIPEAQIRV

SEQ ID NO: 945323 - protein, 138 aa, Homo sapiens
HELRALMDETMTELKAYSELEEQLTPVAEETRSRLFKELHAAHARLGADMEDVCGRLVQYRGEVHAMLGQSTRELRVRLVYHLGKLCKRLLRDADDLHKRLVAYQAWCHEGAERGLNAIAQRSGAPGGRGACGPSCGL

SEQ ID NO: 945324 - protein, 102 aa, Homo sapiens
MVLGTKNHTFAVDCENRQDINGSGNTLKAETWDAPNLVHKAGVTYTSDMYATQDPQIRKTMEVCVLAHTWTTQAFFAVMTRNNHAHIVHAISTMNMFRVTTY

SEQ ID NO: 945325 - protein, 83 aa, Homo sapiens
PCVCFTVCLSPSSYGCIWAFIPHDRGWVTIQGYWTVDVLLCKLYVSCTALKASWTIISYECKGWSYSLLSMRSDRSPDSREFH

SEQ ID NO: 945326 - protein, 61 aa, Homo sapiens
MVAEFDSCIRDHMATERNRFIILRLTEQFANSRSDEEGVATTTHQYDTTLTSLLGMRYDCV

SEQ ID NO: 945327 - protein, 118 aa, Homo sapiens
MHDTFKSQQYAHVLGYQHDCKRSVRAQCGMFRFKSGIRRQEARSSDSIVPILKMGTTFSTRHKGTVVTLTGITSAACMYENRNVNALFSWETESLKHLHVLEALFGISINMMVLRMNT

SEQ ID NO: 945328 - protein, 123 aa, Homo sapiens
QSNTSMAVNGGHKRNGQTDATEQWTSSKESSPILCPTSERKAKTALAAQRAVTLPGRTHETPSVQMEGFLNRKHEWEAHNKRASSMFWHNVYCVINNQEMGFYRDAQTADTGITYHSEVRVVW

SEQ ID NO: 945329 - protein, 103 aa, Homo sapiens
MVGACHGVLEGHRQAEGRIGGHCPQGASGEPVPRQTYSLTPLAGSVLNHNSFNTFSCVILGCLFHVKGLRHPVIRVGPKVCASGSQSADIWLGLFFSLGFLCT

SEQ ID NO: 945330 - protein, 99 aa, Homo sapiens
AVLCIFLCTQLYIQIFFSSLTRHGYDTTTSWAHGLLFKLWVWLPGHMTRTRECPRRPWQLFLDFPGPMMVRLIPFGSSLCVPIGEKGTGTLHLTPTTPV

SEQ ID NO: 945331 - protein, 224 aa, Homo sapiens
  misc_feature (224)..(224): Xaa can be any naturally occurring amino acid
MGTVDSDPNNELSSYNARWFLSTRDTRHELPRMDGIIPSTGTSPLVLNPPMPLPCPSNKPWALEKLVLLLALTAALAPPTGRCSKLSESPGVCASSSNPGQVILGKLISGNFGCLILKKGHGRAVEVINWQRRMKEIRRFSLTTLRLRGGPVPNSTYSETNDTALADDLQRTDWENPGYTPLNAMQHIPPFGRWRDSEQALNDALTNSCALSMANCIIVRRYLX

SEQ ID NO: 945332 - protein, 71 aa, Homo sapiens
HELSLRKHVWLMRELRIVTNHFIPFLETHYAHVRLFVKPMGKWLTGVQNKNLREMKAFCDTKMTTQTFPEW

SEQ ID NO: 945333 - protein, 188 aa, Homo sapiens
PGCRIRHEHQCKSALCSYSQLQRFSKVYGPVFTVYFGMNSIEVFHGYEAVNEALIDDGELVFGRGIYPISQRITNGLGRCTYICVSFGNWSEGDGKQSPKKLVIRSYPICMDAECCITFYLGCEYLPDSAPEFYYGMISSNGQRWKEIRRFSLTTLRNFGMGKRSIEDRFQEEAHCLVRELRKTKVTI

SEQ ID NO: 945334 - protein, 79 aa, Homo sapiens
TDSICHQFRREQLEQGPPTVLLHPVPGLQPVVRPHGEGMACRLLGPSFDSYLLPELTIYDCEVNVPVLEDPRYCKEGTF

SEQ ID NO: 945335 - protein, 130 aa, Homo sapiens
MQHGGLFVLYEPKKAGSQEVGGHGASDTQKTGATCTLSDFRTSLCEPEPRCAVPSVTSGCGTHHFVHSPCVPSHKVWFPWFRQSIKQHGALGERYSAPWGKNGPLWGSNVPLCALCQREKCAIPSWRYEG

SEQ ID NO: 945336 - protein, 110 aa, Homo sapiens
LIDFKVRSQIEGRAMPQITSIIVNQLKKSIKRKHTLSNYTDQGGLMGIYKVVDLPFVLSRQLRGMLGTSSLKLWLQTRLLQLRNFSGENDLSPLEVWSWCTMKGLLATSV

SEQ ID NO: 945337 - protein, 119 aa, Homo sapiens
ALIYDMFSHPMRHELSQVNCNVSPRHMCEQNDLGGRIPSVTHVHLSEVYKQGGTGSKSPSHEWYNKGSVLDHLKMRVVYQLEIRYDTFSQSTVSQMKQHIYTVRVKPNRLELFKVRFPT

SEQ ID NO: 945338 - protein, 108 aa, Homo sapiens
MPCLLTVAFLPLPLIFFLAIFLSPLAVSFCPLILIYIFTFSSSLVVSSLLITGFSSSPCSFLLTSLPLLSLYDYFPLLLVAVFSPVHCLVLLFPLPPCCLPCFSFCSS

SEQ ID NO: 945339 - protein, 119 aa, Homo sapiens
QRSWSCEEIRAVTLPPLRSAISRFCPLTHSNTLVMVDYYDALGVQRHAYPEDIRKAYTKLALKGIQIVLRIKTKHRGTFMTNMAMNDSMVEEHAEVILTDHLNRAAHSVTNMMSSGCLV

SEQ ID NO: 945340 - protein, 81 aa, Homo sapiens
RNVTCCTRAGHEGEIGAPVESGGGDYGIGGFSYTLEKRGYVKAGLWTSEAVIEHPDAGRQLYMGFLRAGSNGMQTFTLFWQ

SEQ ID NO: 945341 - protein, 118 aa, Homo sapiens
HPREWVLQKGMPHKCSHAKTGRFYNVPTHAVAIVVTNQVKAKILAKRINVRIEPIKPKSRNSFLNRVKENVQKKKEAKEKGPWVQLKRQLVPPREALFVRPNGKDLELLDPIPYEFMA

SEQ ID NO: 945342 - protein, 36 aa, Homo sapiens
MPQYNAFVLSLTSLMHSTGMHGLESFMGGFSDVCPC

SEQ ID NO: 945343 - protein, 114 aa, Homo sapiens
MRTTERYERDTEKKSVRGKGKGPKPKRKKSRYKSWNGPCGPWSKRRKHLVVQDTQTCECVLRTHSRCKARQLELNQRTCGCDKPRRGDAHEERASLKVSGTTTLSTGLVHAIGP

SEQ ID NO: 945344 - protein, 110 aa, Homo sapiens
PAVWPWTSVNMSYDQLIHLHSAPQRRRLNRGLRRKHHSLLERLRKPKKKAPPMKNPKVVNTHLRDMFFLPKMCGQLVGVSTGKPFNQVEIKPKMIGHYLGEFSFTHSSLK

SEQ ID NO: 945345 - protein, 62 aa, Homo sapiens
MCGQKGLIGYAHHEPESFNGSLRNVAVDETEHAGLYLTVADLHAMDFEPRVTDEYYSDSLFL

SEQ ID NO: 945346 - protein, 111 aa, Homo sapiens
VIPRGSCYRNRGAVQSRVLLVAALLALLASGRASEAEDASLLSFMHGYLKHATPTAKDALSIVPESHVGQHAKGWVTDGFTSLDYWKHVYDKFSEYWELDPEVRPTSAGGA

SEQ ID NO: 945347 - protein, 133 aa, Homo sapiens
RALGVSECAVHCGRNLSQLLERALWRHGSQTCGFYMGVRSAEDMLDSLERDYAGKRPGTHQIREKGFTFLRYGRLERLNGYAHQEPKAFNGSLRNVAVDELSTQGCTVTEAELYAMNSEPRATDDITGTLSSW

SEQ ID NO: 945348 - protein, 93 aa, Homo sapiens
HEGCVYTARVCDAVKALKAVRCDIPVASEALYFQLDTTHLKTRLEEIRMAVEEGATEIDVVINRSLVLTGHREALYEENRQVRKGCGEAHILY

SEQ ID NO: 945349 - protein, 99 aa, Homo sapiens
GTRCIRCDADNPNGRYYCGGQCTCDMSKHGTDDGVVWMNWKGSCDSDGEDEYEDQGLLSTEIVPNTENFASSVCDNIFVHYGIGIFFHTLYSSKTLKQT

SEQ ID NO: 945350 - protein, 134 aa, Homo sapiens
MSEVLLLLGHDLMTLSQTWHWFICLKRISLAENRLTHLARWTQADPLADLHLQDTSYSLLLDPALGGPETSLRHLYLLGNPLRWWTIGWLRDLLHHGRDDVNSTHDLNWRFKVHQEQHLSHVRYEHCKKGMLNH

SEQ ID NO: 945351 - protein, 66 aa, Homo sapiens
AAVTDYRQSALSSLASDIIDRLAVRIYYADVQQVYQSVSLDAYATGPSDYFVDHVLTFDSTYEITV

SEQ ID NO: 945352 - protein, 130 aa, Homo sapiens
PGCRNWHQEIENYRTCDPFWKYYYYGYDYIDFNTEIPPCVPCESTAQITKQIDRQNQSTCIAPEAYLEDDCPATLQKYLIYSINILHRQDPTSVMVISHQAHAGRNWRLAYYYYLVGDVLYTGGTYQPWV

SEQ ID NO: 945353 - protein, 118 aa, Homo sapiens
FAREAVRDHEPGGHAEHTADVHETHATRCSRTSIDEERPGPELWWDMARLCKRETSNSRKVQITYSSLVNKEQDLLGIVLQDTNLLEQVLNQGTGISASFGAKTTAVSRNINVRELTK

SEQ ID NO: 945354 - protein, 66 aa, Homo sapiens
HEQGSNCLGVDSSAPKACASWLIYCPDFPVTTLCSARSIPDCPSGLIGWHTHTAWVTTLPTPKTNS

SEQ ID NO: 945355 - protein, 61 aa, Homo sapiens
MSQLKVETNHCIPFLETDYAQSHLFEKPMVKWMTAVQNVNLRVNAFCDTEMTLDLPTIVEP

SEQ ID NO: 945356 - protein, 121 aa, Homo sapiens
MGGCPTGQQPIPEICPIPILAEKLHEQIYTVTGPSRIPAIKDRHDMPYMDAVVHDIQRFITLMPYNLPINQPETPFSEDTSSPRLSNEPAAHSMNTILSANLLPASEHDGGPMTLPFDWGH

SEQ ID NO: 945357 - protein, 68 aa, Homo sapiens
MGLRVIEVVQGQGPGKKGGFQGRATKMSRRMQAQALLQDYISAQSATQSGLRALPSCFHRNLLVNVID

SEQ ID NO: 945358 - protein, 78 aa, Homo sapiens
RTLDPGELKYVHRVPTTKEELCGVLGSTMRSDLQIHIKCFKRHLQGGRMLTVHFILFDAAPFFPHCSLTLDSRDAPLV

SEQ ID NO: 945359 - protein, 92 aa, Homo sapiens
MTRYSWSSFIPMCCPYEVHTLQADLRFEHRAVLYIAQMTVHDVKLIWMPLDDCTFLPEFCAASLRTLHHSRLCDLGFYGTGDYSWVQLSHAK

SEQ ID NO: 945360 - protein, 109 aa, Homo sapiens
MVLWEERDIYACQFTTTVEYCCAAELFTEGSIRKAEVLSREQVMLDDKALFPDGCGQADDRGADHDIYVLRVTHPPEQTGHFTLTPLNPERHPLVPADRQRVTDHMLHT

SEQ ID NO: 945361 - protein, 82 aa, Homo sapiens
GLGTFCWNQENNVPNWKGPQKRSPFPPTEKGTGACLPVGQVGPPKEEYKGPPFPTQGGFCFGPQKKREIFFPFPSYQWKKFY

SEQ ID NO: 945362 - protein, 69 aa, Homo sapiens
RNAVDCANPQTMENATYYGHEESVTERMLPIEQSRLYVETCCSYASPHWMLDVREPLSETCVTTNRSVQ

SEQ ID NO: 945363 - protein, 80 aa, Homo sapiens
ARTLAKCACPEAKPSVTSSYSPDLERSQLVIYINPMYMSHRSDLHVISGQLVIALAFEDIVVRRQTGVRCMTQVSNRNHV

SEQ ID NO: 945364 - protein, 350 aa, Homo sapiens
  misc_feature (339)..(339): Xaa can be any naturally occurring amino acid
  misc_feature (341)..(341): Xaa can be any naturally occurring amino acid
MTAPRATHIRGGTINRRTSTPRCTSTEHNQIASTSHGSSLNNYKLYTTKHQQRVQHITHHQTSAVELLWHAPRERCQLAATAANSPRLYPNLMYQTVSLDTYLTLAFYTRSISSEVPGAIIVDSHKTHPVRQHLLSSLSASSNGYFYFSHQRSALCIFPTELESTCQGRHICKRGIPAPRNSNKPHLPGSSMSNALTPTILAKQTVTVQHYSTLCSTDDSLPLGQTDSKTIYIVDHAQTQLPTTKPRELHVAPHLERLQGDYYIFMDANTRSYFMQHFEPSLTSQLLTAAVHRIQTQRSTAGARTRLRSLGHHCRISGGAHFCDLVPYTARRTYQFVFXLXRSPRATTTP

SEQ ID NO: 945365 - protein, 119 aa, Homo sapiens
GGTPRPFRMKAAVLTQAVLFLTVSQARNSWRRDEPPQSPWERVNDLATVYMDVLKDRGSYSVFYVEELLLGQLNLKLLDNWDSVTSIFLKLRQLGPVTHEFWDNLEANAHAYVHDVQKS

SEQ ID NO: 945366 - protein, 219 aa, Homo sapiens
  misc_feature (149)..(149): Xaa can be any naturally occurring amino acid
TSSTILAYGLRAYDSPWPSTCQSPYGNHALEPSHDGKDELLLPSIISLGLTRYTVCLQTEIQITSNGWPKLKPSRPDYLPKTTYMSTRVYVTQSDKIYELMRHTYRAWRLLVDHDRVLVQLIIDHRTLYIPMHVKLIVRRGSALWTLGXYLVQRVMLLTGMRCLTVLNHKAIILDTHCLMYPIHITELLRPNWTNLSPYRRTNGSICHMHSSLGLTCVF

SEQ ID NO: 945367 - protein, 134 aa, Homo sapiens
  misc_feature (5)..(5): Xaa can be any naturally occurring amino acid
TTDLXQRIDNADFCTYVLHTTDATPELTFIISLPEDSQGDAAHKTETYEPVTEHPTLYKDNSNAPKCRLLYPKERRHGHMTNFFLCPQSIDTVFCNDLLGTEGDHHKEYPECADFNLPEIPDGHIHECFQAPPA

SEQ ID NO: 945368 - protein, 213 aa, Homo sapiens
MIHSVKLTPSSCMQQLEDNYRFAHTNVETVVNEYDDNGYGIILFGSSHVTNKLEDKTVAYTVHCAHMTDDNKDLIQGKDWLIAYYDVDYEKNAAGCNYWRHRVMMVAKKLLDAGHKLNFAVAAAEPLAHELYDSGQESTAGEIPVDAIITAREKFVMQEDLSRDGNALDRSLHEYYDGNLKRYLKSEPMPESNDGPVKVWFREFDELANNEDR

SEQ ID NO: 945369 - protein, 219 aa, Homo sapiens
YDSGTETYCEHLTVVNEYADYGYGNMVYGSSHSHCQIRRQYCPIHNAPNDHYISCISMAMKSLLVYKPCMTDYTIDAITAAWTDLLMTMTKTHEKHAAISILLQTLGLMTDVYDCMLLAGKLCCDSPSNLDYDQGDDSSRALLERPLLTYPELIRDKLGNHEDLYRYRDAHDRLLQHTSDGILMEDIESMNICMMAMIDLLTGLVAENLTNSFVMVHIW

SEQ ID NO: 945370 - protein, 129 aa, Homo sapiens
NCDPPRTPDYTCLLSDMKINYTTIFIHHAWHDSVSGKKYPVFNPAPEEELCQVEQGDTEDVDQAVTAADRLFRLGSPWRTMDASERGRLLYKLADLIDRDRLLLADNGVNEWWLYSNAYLNDIAGCINT

SEQ ID NO: 945371 - protein, 118 aa, Homo sapiens
REEVDVSKQLHSGGPENDVTKITKLRRENGQMKATDSCHQKECQGYKPLSKQQLHQKLTETQGELKDLTQKVELLEKFRDNCLAILESKGLDPALGSETLASRQESTTDHMDSMLLLL

SEQ ID NO: 945372 - protein, 181 aa, Homo sapiens
  misc_feature (12)..(12): Xaa can be any naturally occurring amino acid
  misc_feature (34)..(34): Xaa can be any naturally occurring amino acid
  misc_feature (56)..(56): Xaa can be any naturally occurring amino acid
RHTSPSKREVEXQADNKVSQIQRMPMVQAIACLXPHQRGRKLKIRHGAVHCRHREXPARQLLRTRLSLLMLVNSRRQELECTRAQEGVGPFSVTSSAPHRPFYTCGISFLIRTASPCIAQVQLDKNPHSTSAKVSPGQAARIGARSQGIGLAPAVVSMSSVRFTVRNPLDSLGSRIFSMDQ

SEQ ID NO: 945373 - protein, 108 aa, Homo sapiens
MYDTPQEVTEARLSYLTETISEADADDGHGLEEQQKRIVLDPTGSMNIYLMLDGSDSMASSNITRARMGLGNCIEKVEYCYAWTRQNGISLMLQDSSLIILVTMNQGH

SEQ ID NO: 945374 - protein, 86 aa, Homo sapiens
VAEVHSEHLNLDSLMAEPKRHNVLLSTERSCSRVLCAYATDGCEANTVYSGTHRIMVELICLQECSNLSYYCTPLSKARISMRHLI

SEQ ID NO: 945375 - protein, 93 aa, Homo sapiens
MCDTPQEVTPALLSSLTETIDEEMLTYGTGYVSTDAYDSTVTLELHEHISGARKIIQHCRQQLYPSHKATRQLNGGPIVLYLRARRMVIADAP

SEQ ID NO: 945376 - protein, 189 aa, Homo sapiens
MAPFFSPIFLPFSQGPNRTLKVLANCACQPPKKEVLPTRDIKPLSACEEPKNMSRKELTIQNGHNKASCERAAQYASAYDRVMCISEVVTPRLLCTEGVSPYDHSNTWRHDSVHPLVAHNTSRFIQVGVITWAAVDVCHNRKRQNLVLAHARDFLINLFQVRPALKKMPRISLGVLSKGFQPTRGPIKN

SEQ ID NO: 945377 - protein, 85 aa, Homo sapiens
FRGHLNTTQDYGHHEVSRVFMDGTRTFPYYGDEILDLYVRDELVIPYDILPDALHGGCYVDPMCAHLRAITLCMREKIGFPATSS

SEQ ID NO: 945378 - protein, 115 aa, Homo sapiens
IVSFPLACGTLKWLTFMSLLYVFTSAYSKGAFRRDAHKTEVADRIKDLRDEHFKALELMAFGQYLYACGIRRSCHTSDVKQLNLQKHVMLMSQLYLCLKPMLKWLTVEPRKNYYS

SEQ ID NO: 945379 - protein, 234 aa, Homo sapiens
  misc_feature (26)..(27): Xaa can be any naturally occurring amino acid
STLYDDYKTTLRPRDLTTRTPLECTXXDNAQELVDQPGLKEFGTAFLLLVTMCRQVHSRWNMAAGPIPLTIIGNLFQKELKNIPKSFTRMAQRFGPVFTLYVGSQRMVEMHGYKAVKEALLDYKDEFSGRGDLPAFHAHRDRGIIVNNGPTWKDIRRVSLTTLRNYGMGKQGNESRIQREAHFLLEALRKTQGSLSTPPSSSVCALQRHSQTILFRKHFDYNDEKFLRVKHMDL

SEQ ID NO: 945380 - protein, 153 aa, Homo sapiens
RPCRRHLAEKPAMGAGGSSTLARFDLLAQSRPGWLAVASLDLTAEALGAVAWRRAWPTRRRPLMQQVGTAVQLWIYPVKSCSGVPGSEAECTAMALRSGNLRDRQWLVINQEGNMDTARQEPPLVLSCLTCDGDALTLSAHYTDLLMPITAHH

SEQ ID NO: 945381 - protein, 118 aa, Homo sapiens
SLSLSLSLSGSLSLWMNIPPEEREREREGREEQIEANRGAHGGTGARETERERERQRERERERERARQTNDVRADKRKSKCTERGRGKKSKSEREKREEMRIRGREEGEGEQRHREHR

SEQ ID NO: 945382 - protein, 40 aa, Homo sapiens
MPAKVLYSLCCPSGPYTWSTSDLYKCINVGRIVYSGHGPD

SEQ ID NO: 945383 - protein, 152 aa, Homo sapiens
MQIHGKLLWRRMQTELHPVNHTIKIPLYSWCMSMFRQSSTISISPVESGTISNGPFISSTCYNRCYGPTVLCSMGPLCDSKTEQSIEVLFLIHWTPLMCCRSAVAVKIQMNFRVVREHWIIPDIAALLACSSGSPHYVPCINQYRPLGKTPS

SEQ ID NO: 945384 - protein, 96 aa, Homo sapiens
TETLAEAVIHSVASMKLLAATELLLTMCSLDGADGRRQAKEPCVVSLGAEAYQTATDYGKDLMEKGKSPELEARAKYDCVNLLSYVEALGTQPATQ

SEQ ID NO: 945385 - protein, 78 aa, Homo sapiens
HESNLHVSINLSVNPAQIMLKGKGYVGAPGILTRLSTVFENYVADSPVCCKRSRVGFVATQVYRKSMRRLAPMLSTYR

SEQ ID NO: 945386 - protein, 213 aa, Homo sapiens
AFVGHTRTSHCTRSLRNRQGAAFLRGVSSERAQDTDCAGSASSSAHMPFTGYEGWVGTLVQNPQNGERKPQRVPEAKKVCGPSSFQIVLVKLERTVTLNHTCGPELLAPERDVVPSETKCENASWGETQGAGNDTHLVALLNGIFNHEVTLSTEDTVPESEICTRGLLAPVGASEGDYTGPLGCVNHNVGSWKEIYNPRVCAQCPLGTCVYRV

SEQ ID NO: 945387 - protein, 64 aa, Homo sapiens
ITRTSHCADLCCAIHCREHPVANRQVFIYVRNTDIAIGSVDIMKDMCMVNFYGHKDRVLGLKAL

SEQ ID NO: 945388 - protein, 107 aa, Homo sapiens
MNSPWGSQQTDHGYIRYLRCTDDACHKHIVGGGNFFLYVELDLIACFEAHFNLDQSPFYELLSYDKARILLFQINAEPWQVKMSLWKSTLSEPVDVCTGIACAGHLI

SEQ ID NO: 945389 - protein, 193 aa, Homo sapiens
MGPDTVWRVFRTRGPRYRANNEARYPTDTLLCPDKLRKRASHTVPGTTTPKNLHSLTRNYGEPWVTNRCELLGKHQSAQTFPCHLQRERPFQGASFDFHDIYQGKGFTLWRTRGLRTHWSCQSSNTVAEFKKTFRRAGSLALSKAVSKASRRRGTDALDFDILEIQTACSDVCCVPRHTDLYPEQVLGHSQRP

SEQ ID NO: 945390 - protein, 90 aa, Homo sapiens
HEGKPCQRQTRREPDADLWRDALRDTSEELRYPRQAPQEFTAASGNFFFEPNLDINNFLGKGKERAHQKRTSKRAPQKDWSQRNELFRNL

SEQ ID NO: 945391 - protein, 157 aa, Homo sapiens
HERMSCATIEHTGYHVSGARTHFTHADMSYLERERIVGPFCGGPKAHPERYGYQRTWSWLEGLIAREPWAQCATIESRDQGFWGFWWAFGAVEGISERIWIHTNGHVNVEVFAEELRYTAVAACVGTGVMVGIPVKLGTFGQAPFLPVSATLRGSGP

SEQ ID NO: 945392 - protein, 143 aa, Homo sapiens
CCVQTCLCLRPYKATDLTFVERTMCTVGLENTNSGTKLSDICDTETRYIGDTLRSGAISLIFSLKEKVGAMAKALRLIEEKDVNLDHIGSRPLRLKKDEYEFFNHLDKHNLAALTNIIYNLKDDIWATVHELSRDKGHTALCP

SEQ ID NO: 945393 - protein, 197 aa, Homo sapiens
GTRLLRAHTSLCSGNNLNYILPGEHRAWRTIGFARRIYEDSEAHLQLQGFYEEVANPLVTGVEIGVPRERYSGPYIQNTYQHFYQGSENVVAARLWDQDMNRFKAEVKGHGATNELTFTEERDLKEKEKGLHEPDYIFGNYIERVCAYLTIEHMLEKRKNAHVEEENLTGRPCTCASRSLCDSTELNGVTKPEDNAD

SEQ ID NO: 945394 - protein, 139 aa, Homo sapiens
IAPSVPTTIHVCKDTLVGALLRPDTIDLPLRILVLTQRAGAIIVPEGLTIQNITGQTQSRFDIRRTENSGAAENPVTVHATPYATYEACRMILEIMQSEAYETTLAGQSPLEILRHTGFGGRLIGECRPLKNIGHDSGP

SEQ ID NO: 945395 - protein, 74 aa, Homo sapiens
MWKQQRTYTQCQSPGCAIGLSGHVSNEHTLVQEQTLKRFEYRLVCTFCDLRNPKPVRKAFTLQHMMRLALVVCA

SEQ ID NO: 945396 - protein, 108 aa, Homo sapiens
MGTCVCQIVFVLFPPFGTPEWDHEDDANLMFITMCFCWHYLCGLNIVAANYSLGYWLLTRMKRHGRGEIIGIQKLNSEDTYHTALLSGSHEEVSRDAEGADVPLRQLE

SEQ ID NO: 945397 - protein, 113 aa, Homo sapiens
MACCLPGEYGGYANDKIRQLTKMGPTALLIELEDWRRHKVKAHYGGTTVHNVSNKYQISQNMFTGSSRHALMNGASHPMADNRTMSTHNSMFFITCDRDNDALVDITFQTSAF

SEQ ID NO: 945398 - protein, 34 aa, Homo sapiens
MCIAVTYDVKRILWVHGVSKGVSHEGAVECIRLP

SEQ ID NO: 945399 - protein, 224 aa, Homo sapiens
WVLWHFNIYLSIGNKLRLLGGLGLNTFECQNKNFPRGPLSIFCEKPAARGRGEGAPFLLSGPPKEQRVVNLHTHDIVDKLVDNVDNRSTGFALPRMSPKGTYGLKSKLDHLGIPKVCIDVADLSKVKNEAHMNIVQSVHMSVLNNSEKVIKLLGPCVLEAKHMSIPGEVELNKRCVVLIIEAHFECPIVMGQVVNASYMIIASSPKGVTSIPEASVDAIKQRLS

SEQ ID NO: 945400 - protein, 96 aa, Homo sapiens
MFLGSTAYAALRTRLHARERTFDYLLPTLTTGVTFSYTSVGMPLGDCYAPDGADGACPKGKPGHYIGTERDPGYYCSKYTYVCPNEIRILGRGRYI

SEQ ID NO: 945401 - protein, 58 aa, Homo sapiens
MVAYVVTYCGGSQALANCGPIFRTILFPSAKGFDLRIPPYSYKPSLGLCRPHELTLVL

SEQ ID NO: 945402 - protein, 130 aa, Homo sapiens
KVCILSLLRSTYSAISTVTVFRLCKRVKRTAWRILGRVDPLTITNGVKVEQLEHKPIGRCLMILTNEYWNIDRPYFGERLMRVIDAEVRSYATDLGRGSIYIRGNTALQDCASSTTGLTVAFTGCWYTFP

SEQ ID NO: 945403 - protein, 122 aa, Homo sapiens
AQAPQSATATLKKARYNASVPGDHTRDQALYPQDHRKGQSQEREGKGLDAKPGCQGAPVGHGACATALPLPRPRSDPPVRFCELGSLNQTCPGLCLLHCRPTPKCPKWGRTRDSVKLEPSSL

SEQ ID NO: 945404 - protein, 106 aa, Homo sapiens
MYTVERGGNLLTFFPGGGRFTAEPICLSTVTDDGYHTHLHTRLVGLGASWLHRRCDVGCRQGALSDTNVEEVNGSCNISERRAILCRNQGPINEQGKGPACLLAHL

SEQ ID NO: 945405 - protein, 69 aa, Homo sapiens
VIPSLNFLSSWITRVRHYTQLIVVFVDNTVFHHVGQADLKLLTSNDSPTSVFQTAGITCDNHHAMAVLK

SEQ ID NO: 945406 - protein, 35 aa, Homo sapiens
MGSAISLVKVFLWDSELMSRYGHRVLELWVFWGEP

SEQ ID NO: 945407 - protein, 111 aa, Homo sapiens
LIRVLEQSRHFVMRPEINTIHLDTRQGQLLSEMCILIGENDTFGAETKKNCDLNENIEKEYCIELLEASYINTVVYEYLVETSIKQSSELEERDALGVRRAAQRPLAELVP

SEQ ID NO: 945408 - protein, 131 aa, Homo sapiens
MTCTNGTSKGEGEEGGAGHQTRTSSGCRERMYLVCAHIFAFFNGTFVHVTDLSGKETIWRVTWWDEGKGGTEMNPYHMLVWWLATEVAQRCKELGINGLHILRATGGNMTQTPCDLEAQTGLRDLGRLGMS

SEQ ID NO: 945409 - protein, 125 aa, Homo sapiens
GTGFVPIARLTEEAPHLFVARAPRCSDLSLCIPCGNEHRRDATRLWLIWGKDPSGPRRVPGQVSAPAFGLSHPGGEPPSTAESLCTAPRTGGAGLSHPRTCSHSQRGERWPRLEPGSPTSPPHPP

SEQ ID NO: 945410 - protein, 69 aa, Homo sapiens
RYYGLYVIVYHTRVAETHSHAMTARSDTEQVRQSVPEDNRTSVVVFHPVQLLIARLPRMVATYLAYAQR

SEQ ID NO: 945411 - protein, 77 aa, Homo sapiens
PEANQRPTCNGSDMLIAKVIDASTNPVKKLYLDQTLIPVRRISSLNHPQCRKFTMNPGKYAQSLQCQIAEQIRKTIG

SEQ ID NO: 945412 - protein, 34 aa, Homo sapiens
  misc_feature (29)..(29): Xaa can be any naturally occurring amino acid
MAKDEEDLELSTQLSLLPKDFQCAYNVGXGGAPP

SEQ ID NO: 945413 - protein, 128 aa, Homo sapiens
GLGTPTAPLCADCAVDSLVERCVDLEIRGFNTWEIWASLWWLVVWAKGRSKASFHTVSDELVNYVNRDTTWEGGHTLYNADMSYLKRVCGTLLGGPKAPQRVLFTEDLKLLEASMHGNTGHRVPPFEI

SEQ ID NO: 945414 - protein, 112 aa, Homo sapiens
GNTVSADHNSDVYAHDEMGHPEIGDAIGRVKEVLECGIGGKCNRGLTVVVAFPELWEPREQDAVRLQRARTVGCGVELLQGFFLWGDDIMDSFLTRRGQICWYHAGRGFGCH

SEQ ID NO: 945415 - protein, 92 aa, Homo sapiens
PGCTNLARGRRKMSVAAVADTSDDARSLADRSHQGPRGRGKRLTPTLRRSKWRPKPRLCTDTPYRRTEPGVGHLAVCAQRPQPPPVESSWIK

SEQ ID NO: 945416 - protein, 131 aa, Homo sapiens
PESGEGGAAADPFTLFSHPLLQTCFYGRVKHSLDIIDPRTLFVTEGRHGCDLSGPWAFVPCDFRICGSLREGEDGGVKRIWEVRGERKVTSLYLELAGYGSVWLSVSELIHCAVCSLHYIIWISQQPSDRF

SEQ ID NO: 945417 - protein, 120 aa, Homo sapiens
VLNVLPPSHAIETTAHSTPDTCYRLAYTMTLLYEMCHAPELIEVIIALMYLTILAQHSWYWNTLSYIILLLESHSYMCATRTDSYKITIITSDSATTKENSLLLLTKMSPVSIRQSLESS

SEQ ID NO: 945418 - protein, 73 aa, Homo sapiens
MCSIEHTTEILLCLSPGEVASLNEGVKFYRNKSTGKDYVLHETTSRLMSCKNMCMHHGWLFITDIADLAGMCG

SEQ ID NO: 945419 - protein, 102 aa, Homo sapiens
DDYETGRYGTGVFDQNEYLRYQEALNELATADNARIESSQRHDQTAVKDLTQVPEVSPTTMQVTYLPYSQRSKRAKHYLELKSFKDNYNIIVEYSVTELNDS

SEQ ID NO: 945420 - protein, 83 aa, Homo sapiens
  misc_feature (71)..(71): Xaa can be any naturally occurring amino acid
MAAMCSPNVLCDDMRKLKARMHQAIERCYDSSDDCEGYLGDSDWLIMTSSTQSSHVYLEQNEMCYGAEATXSTVHDVDESRTR

SEQ ID NO: 945421 - protein, 215 aa, Homo sapiens
  misc_feature (191)..(191): Xaa can be any naturally occurring amino acid
PGCRNWDRAAVRGSMQMMAVLATVPGVCSLFQIRTSYRQAQILCVEALVREQWILTVRQNVYYRGAYLGFADPVYYDLHVFSMLSSEPCAHGLRVTPDQSQLISQPYATKDYAGSELTLFQIPLLAEPGLQRGPVALMHDVHLSFQLDLLELERPESLNQSVVLSCWRLTDMWSLQGPSVREAAGVRPTVXVDTDLRHVADSETCTEGLLDLWWP

SEQ ID NO: 945422 - protein, 137 aa, Homo sapiens
ERPEPAGAWTWVTHGPIREVCMARSGSDEDAPEQSRNHDRRRLQERGEERHEAELITDSDSTVHLPERRDHGHVAVGRKLQIHVKMRMDHCTITEHIVDVLHMHYTQKLEYGTDYDEMADYQPYDFELDACQVIRAG

SEQ ID NO: 945423 - protein, 141 aa, Homo sapiens
QTRAADDPAAAMAMLRRVPVYAAHPTPFGAYGGLLKDFTATDLSEFAATAALAADKVGPETDDREIMVNDLQSSSDAIYYAMHDRLRVGIPDETPALTINRICGSGFQAIVNGCQELRVHDADVVLCQMNRMHKPMLTVSC

SEQ ID NO: 945424 - protein, 68 aa, Homo sapiens
MRQGLEKEPGVMHVTDVDTYSRKQTGPRRMSDHYRSIGHAHGTQKALSSIRVHLRNWYSDLLLTDVYR

SEQ ID NO: 945425 - protein, 134 aa, Homo sapiens
EEHATFREHTLIVTIYRCAERRFRECIVAHYNYVPQAETPVLSHTTYMRANSCAFYVMGYTDLCDLGQTELKPLKPPEVSYDRLLGCTPICILDSVKTNQIWLLNYRGCRLLVVRDLNVISVAFARNTLSPHVW

SEQ ID NO: 945426 - protein, 108 aa, Homo sapiens
MCTPRGVRLSAEARTQVEVLRRNLFQEAVEFLYRILPQLTFLRAPLDIPIPDTFTQEMMRRKHDKPEKKEVPKCGFLPVNEKVLCLFGLCKPQVWTLRVRSVEYMDST

SEQ ID NO: 945427 - protein, 30 aa, Homo sapiens
MDNSSNPILETILTIGFTNSMLDQDIPGAA

SEQ ID NO: 945428 - protein, 81 aa, Homo sapiens
MLHTPGLSQTLTPGHTRRPCAVSLFACERSFQTSWARGALRLFVYPRHMHQIPYESRFVHKGLDPSGLFHIASTKGRVFGL

SEQ ID NO: 945429 - protein, 122 aa, Homo sapiens
VSASVLCETGESSLSKLCGLYFRALYREDMCRAQTLMNVYMTARVLLYCGPNSLAWTFQISESFNYMGTNWIPIGHREEPKWLKDLTGILFNQCWKDALYLSEATSSFGIDVSLGVEHVTLM

SEQ ID NO: 945430 - protein, 114 aa, Homo sapiens
MRPVLREGVTSIPAAFCLSDSVDLVVTWECWLWRIPDMTYYVSLAHTDTTAACRIVAHPSADAARVIELVKIMLHAYARVTVANICAVGLRLHVDTAMYYLVYYKRCCYVLCIL

SEQ ID NO: 945431 - protein, 70 aa, Homo sapiens
ETLAEDALLTVTNMKLLAATVLLLIICSLEGAVVRRHAKEPCVESRVSQYFQTVTVYVKDLMVKVKSPQL

SEQ ID NO: 945432 - protein, 82 aa, Homo sapiens
GGGTETPVGCEAAQHGGSTKRNYLLTAGSSHLIIKDLGEIHSWLLDHRPVIQSETRYFVKDFEDKRGLREMRDLENLKNMIH

SEQ ID NO: 945433 - protein, 202 aa, Homo sapiens
DLVGELLGDARSSAYNHPKHMCTDYIDRGACVGVYMHTHTLYIVSVCVSHSLLLSNKRDSVHSCLLEEADYATLMGVPDSIHHSPKTGVVRNSLEHNTDSELVRARDTSSPIARALETNLLRTDALKVIDRQTNVPKAQGRSGCVYIHIQVRYCFVMRWTLDEFISIHPRVLLSSYEQHKLMKSANSVTDETAGYNYRRVSL

SEQ ID NO: 945434 - protein, 70 aa, Homo sapiens
ETPGFHCVCVGPKNKGGGTTVDLPQKKFLRQKIPTWTCNQVLVNKASKAGFQSPESVLPASIFSFAIIKS

SEQ ID NO: 945435 - protein, 128 aa, Homo sapiens
EREREREIERERERERERDRERDRESHRDRERPCERLTYFVPFTLFLPVLLSPSIHHLSKCSFCHVVFLTIVLTASLALISSCSLSCSLLSLMYLYILPRSFSIFSLLSYFLCFGYFCLLMTSFCLFS

SEQ ID NO: 945436 - protein, 118 aa, Homo sapiens
VSWSFHKLQGVNDIEEGFFSARGHRPLDKKREEAPSLRPAPPPISGSAYRTRSAKAAVTHKIEKEKPLMLEAVFTLTHTCMRCVLQDVSLHEALLQHGPIIHSADELIFNVEAVQPAL

SEQ ID NO: 945437 - protein, 102 aa, Homo sapiens
KGPSSRGRLAGAPEAQVHANRTLRVQVNDRSHAIERSLDHQEGPPGVDIILVVCGAVVLMKGAVPTLFFGFTPQLQGRFLGLDPHGEEESPSLQIKKAGVTL

SEQ ID NO: 945438 - protein, 83 aa, Homo sapiens
MQGQAPEAALLLPGEAKCPGRPQILPSELQLHRPAGGFHSGGPLWEIQPALSDGRVVIDLPSVRVCRHQTLMQIPRAPTGRAG

SEQ ID NO: 945439 - protein, 120 aa, Homo sapiens
REREREREIERERERERERERETSTTPQALAAFHIMGSRLFPPFACSVTALALTFAAPDIPALSATPSALTSVHAHRSHNTFFNCPDLSAFLLMYTSRIHVLVSTELHEYLIPPLSMDSY

SEQ ID NO: 945440 - protein, 110 aa, Homo sapiens
MHVRGGGTTRTLTPDTMSTKQITSRYSMHSACREGCQCLFSHDLANSRPFTICMYYQKGYCAYGTRERYDHTTPSAAAGGAVCTMDHCVPYPSLHNSQPSSEGTCVHCED

SEQ ID NO: 945441 - protein, 109 aa, Homo sapiens
PPGCRNWDQACVELGEKCARCVVDIVDDVPGAGRLYAGALSQLIELKLYGTAETNEGMTYMIGSDCMDARVVLHVYAAISAGRTFYADSGLCRIGACVLVTRSCDHIMG

SEQ ID NO: 945442 - protein, 163 aa, Homo sapiens
MPMTTIAVSWPRRKHSHNTNRITCIKHITIYQMYTNYIHEMNVQHDHALKNTMLSLRKPHLYTHTHTLPLPPYGMVIHKVSTWTHTTLTLLSTETDSHTTETTRTDAHSNHDYPPLTATSMKHDTPRAIATCNYDNYTNARVYLNSAAATTHTHTTTLEGHIT

SEQ ID NO: 945443 - protein, 106 aa, Homo sapiens
FLPDEETSNTGYPRLMGTNGKGIKCIAGIAKKANRPLSVEQVKVAPTTAHEVRIQIIATSLSHTDATEIETECVGLALPVIGHHEAASVRDSFGPLVTNVPGDRGS

SEQ ID NO: 945444 - protein, 101 aa, Homo sapiens
RAACIGHRMARSVCAQASGGPQVRKRETSSPGDECLVCHCTITSLSGVNLTSCKAQSVSKLMFLAVDEDHEYCLWYRYGVHAEYHCPVRSVIERTAYIAVC

SEQ ID NO: 945445 - protein, 104 aa, Homo sapiens
MTDIALPYIRSCDPRHVLCQESTMCMTEDLDSLAIEPIGDIQEDRWDIYHTVHHVCVQTHNVAHTGETVFDGYETVTGYDESVNCRLSHADMHGALGFIFGLST

SEQ ID NO: 945446 - protein, 122 aa, Homo sapiens
MHSEYIAQRTSLPYSYPQRRTSEILKRSKRLTLTAEHDCIVEDLELPSEFAGRRQHVRLDGTPYHTGSFRQSTDERCWYTRFKRFSDATTTFTAYDASGVPTFNLLIFMTQLEVYNHRCFHL

SEQ ID NO: 945447 - protein, 140 aa, Homo sapiens
LDWTDHPESDHVGYHGLNVSLDGAQETGCISKSDASVYYELYRCIANLDLHQRCLTDAQTPYPILPCLMTVNNPGQSDICQVKHCRHREPCHFYHIERLISSLHTLYVRSTSDCMYAENILMHNSKVLIPDHLSLIILEG

SEQ ID NO: 945448 - protein, 188 aa, Homo sapiens
PPLHLYKSTGKKSQESRDLIKLWTSSLIDLSRLSTPNHKNIIFLAPHHHDFKNCPQLGSKALLSKCKRTEFIQTYLSDHSAIKLELRIKNLTQSRSTTWKLNNLLLNDYWVHNEMKAEIKMFFETNENKDTTYQNLWDAFKAVCRGKFIALNAYKRKQERSKIDTLTSQLKELEKQEQTIQKLPEGKK

SEQ ID NO: 945449 - protein, 133 aa, Homo sapiens
MTSAKHMLTSPSLVTLKGKRIEPGGYPYAESEFKEHELKMLHKLTHHSVTGCSLGPGNLLASGTISGPDPENLGSMLELSCKGTKPIALGNGQSRKFILNGNIVIITGYCQGDGYRIGFGQCAEKVLPALLPS

SEQ ID NO: 945450 - protein, 201 aa, Homo sapiens
EEAMKQINDYVEKEYSRVVDLVKELDRDTVFALVNYILFKGIRERPFEVKDTEEEDLHVDQVTTVKVPMMKRLGMFNIQHCTKLSSWVLLMKYLLIVTAIFFLPDEVKLHHLSSASLHLPRLCITGTYDLKSELGQLGITKVFNNGADLSGSQKEDPLRLSKAGIRWADIDRERTEAVGPCFKRACQCYSPEGKFNHFGFW

SEQ ID NO: 945451 - protein, 121 aa, Homo sapiens
MTAIRSTRPWTDSLRNTIGTTVRFPKRGTVVAVFGDMPLEAGNIYLSPGGATQKIGLLACLPELCYLSYNPTPLGGASISVGDLYVDEQWILTCRGGSPPGEPALCLETKSHATLNFPQRS

SEQ ID NO: 945452 - protein, 203 aa, Homo sapiens
TRWRKGVCEETSGAYEMESYADHTNYDEHAIFLTKKFSRHHGPTITAKLYWRAAYLRETLLQDFIAVAHSVGIPEDSIFTMAEEVNEFLGSENQSRILIRRVRRAVLPPEEEGSGGGLPDTEVTKREDSCHLVYSIDPCMEDDQDVILYSYIHGQRDSPVRRLDEQRQQLRNSGEPCYLPLTEGARYYRISAPQPTLMHLWLL

SEQ ID NO: 945453 - protein, 71 aa, Homo sapiens
DNYSTLTADCLFKVVFRSTFYTCLALDTHNLYILATLTTIEMLMATILIITDSIEHASKAVLLSIVRVTNI

SEQ ID NO: 945454 - protein, 242 aa, Homo sapiens
AIASDSKLSQSAFGYFMTACAVIILTIICYLGLPRLELYRYYQQLKLERPVEQETKSRSVQTCNSQPTNESHSIKAMLQNMSLLALTVCFISTITIEMIPDATVERKSSIAGRSTWERHFISVYCFLTFNIYDCVGRRLTDVFMWTGKDSRWLVSLVLSRLVICHLWCCATLSAAVLNLVFEHEGWVIFLMACFGVSNEYLADSDFHSAPVNSARRPPNHLAFFFVLAWAWGLFLLSLPALV

SEQ ID NO: 945455 - protein, 95 aa, Homo sapiens
MLAWNLLEGADDSAYLVRRICDNQGSMCSKLKECCERPLLDSTALSKSSADACTYAEAEDDFLGMYLCEYARRHPDYSVELLLTLAMTYAALKRV

SEQ ID NO: 945456 - protein, 30 aa, Homo sapiens
MIYCVFLHPYAIRCPGYSVELLLTFAWTYG

SEQ ID NO: 945457 - protein, 131 aa, Homo sapiens
RNAAMEICMNVLDDRADLAKYICENHDSISSKLKECCEKPLMEKCHCNVEVLMRCLLTEPSLAAETDESKDVCANYAEAEDDLLGMHLYEYARGHAEYSDALLLRLAKTYETTLEKSCADADPHVLCQSDC

SEQ ID NO: 945458 - protein, 55 aa, Homo sapiens
MVLYAFYPYHAFTDHVQLVRGYDTAYHRVSHVIYISLSTLLLLESKRILDVDTLD

SEQ ID NO: 945459 - protein, 102 aa, Homo sapiens
PKQSDYNVIEAYFNSLVGVYLQDEYTYLYVLSRCRHRSYSLYKTRSTFSDNRPRRPMMTTSVSLRRKNRATYQLSFKTSRLHLTMNHLLTQHTIKASPALAI

SEQ ID NO: 945460 - protein, 90 aa, Homo sapiens
MTYIKLYSSHPVGPIYHPMEDLMYVQEKENILLRISLRTSTALTFEQTIITMNAHGSSTLTGGVARDPNSSYTGCCTIHWHEIYTRGGAV

SEQ ID NO: 945461 - protein, 109 aa, Homo sapiens
WSPGSRIRAQATKSLEKKKAGKTKPGPLSLFPPETRAPNSPQAGGERFPAWMNMPFKSLALSSLGGGGGKGSPKKKFFANNNRPSPGGHERKLVPKLQNSKRKNRGARL

SEQ ID NO: 945462 - protein, 213 aa, Homo sapiens
MATPEAAHADKLLRALALWPRLLSAASQAVQLTSRCWLNLQEYQSKILMSDNGVRVHRFFVADTANEALEAATRLNAKEIAIKAQILAGGRGQGDFITGLNGGVHLTEDPTVVIQLTKQMIVLNLRMTNSDGVVNTEMDAEASNIPRDSYLAFLMDRAVDCSRAGRYAPVERPHWRCLIQTRSSVFRSRLTFLMHDGHASSPDGRIPRIRWPL

SEQ ID NO: 945463 - protein, 126 aa, Homo sapiens
GERERERERERERERERERERERVRELVRATFPVLPLRLHFPLCVFHLSVRSFTTLTIFAADPIVPLHAISESCSGDILYLVFNRLCVFHPHCSLLYSSFPIFPNFLCSQATRHIELPSVMTTYPS

SEQ ID NO: 945464 - protein, 102 aa, Homo sapiens
MPCAEDYLSAVLNHLCVLPEKTPVSDRLTTCCTVSLVNRRPCFSALEVDETYVPTEFNAETFTFHAHICTLSEKERPIKKHTALFELVKHNPMPRATESFFW

SEQ ID NO: 945465 - protein, 82 aa, Homo sapiens
CTNIARDVIEGHTLISLYTERVRYTNRQHYCHEYLLKDPLILNVPPGFQFCAYGQHAALKHRWAPWFTHRMYRHTCSLSSDA

SEQ ID NO: 945466 - protein, 123 aa, Homo sapiens
EEPYGLSGSELLLLTLAVLFLTEVTLDISGSKMNPSRAHVIELKDLDTVNVDELKDSGRYYVPQLERFDFGQLNLLLDNWDSVTYTFNKLSEQLEPATHEFWDNLDAKVQAYSDDILTVAGGD

SEQ ID NO: 945467 - protein, 124 aa, Homo sapiens
MALLTGFNNNVAVTDKDTFEFKHISLIPGKHTDMSQMSFLSSEVLVGDLMCPFEQSGLGAERKPRLLNGYLEGAKHFPQGFSSDKAEGAFFQWLAVDGLGNACNNSGGGLLRDRLDVVVDHVRC

SEQ ID NO: 945468 - protein, 56 aa, Homo sapiens
MAETVGSFFMAVIHSLKNGPRATHLFHFIGFNRVKPRPDDGITHSDMIATVARSYE

SEQ ID NO: 945469 - protein, 209 aa, Homo sapiens
MSTKCGNMWTRLLHPSGGHEKDTKEENGYLAWIYRNTSTEGPDYLATVDGDPKASQNCQVIHRLAMPNLKDQLYYLRGNNCSSWFGDMHQVAHTSWCCPDSSSLCIYVVDMGSETRAPKLHKGYEPKGIHAKLRTGLSSHQTLAVQTGSDDQIPGDTKGNGKGGFVLLDRETFEVNGTCEPVGAVPLAMTFGTRLYTVMSSTVEGRSHV

SEQ ID NO: 945470 - protein, 167 aa, Homo sapiens
  misc_feature (81)..(81): Xaa can be any naturally occurring amino acid
MTPGGRPCQSASDAEGPSGKRPVSGPFGTLDRSPKSANCDNCGTHIGLRYRFEAPLTWPFVRTHHPHQCYILACRRGWSRXHIGEQTLACPGLQISPVPLTILCRAVCVNFVPRRGSPSWVLSVVPNVFRGGPPSWVPSSVIYLKSPTPHTECDLCLSRSATFGGPV

SEQ ID NO: 945471 - protein, 208 aa, Homo sapiens
  misc_feature (208)..(208): Xaa can be any naturally occurring amino acid
RAVGVVDHDSVCREEKHNEHMWQQRLLLDKGPHSEADPLCSVNPKALLKDTGPLRNFLLPGLRMHRKTFTRGGDAGGWGFEVPGSKRMPHTSCRPQRPCRRNRNGLSGGGSVNGLNGLHVDYLDREQSESDRPTDQCEGSHGGVRVLRFCAFQAFTGLWLREATMTHSHAETQDAMHKDRIGHTQTLRTYMCQVESYTLNVGARIISX

SEQ ID NO: 945472 - protein, 224 aa, Homo sapiens
MIRDAAYLRSKGDENPDLKYAPMRISAEHTRSTPAAVYAMRSNHSFLGSKGIGGKKSRTESRALAGPNGEAGATPGLTFHSNPLSGFKLFGLVAHVFLLGFITLELVGVELGVNPRNMGRQVRKGLSAVIGLGVGPQVGGFGLEEGGVGFVHRRFAFGGDALELSMWPTVAMIGVITAIRLARLSPLWWACSRGVFDMFFRGAVDFEGFDMGACMGIRVDTYPR

SEQ ID NO: 945473 - protein, 87 aa, Homo sapiens
MTNYFLRMIHLSDDNTKCYIVGADNVGCKHTQQMPMYLRGKGARLKGNNTMKRKGIRGHLVVVTNEDLTEISDMWVANGSQLLTVLV

SEQ ID NO: 945474 - protein, 139 aa, Homo sapiens
MSEPIILLVTGAGAQIAYSLLYRIGNGSDFAKDQTIVLSTVWIITPMMHVLDSVLMQLQDCALPLLKDVIATDKEDAAFKELDVDILVGSYAKKGRHVEDLLKADVKVIVVAYPHNTNCLTACKSAPSIRKENSRCLTR

SEQ ID NO: 945475 - protein, 135 aa, Homo sapiens
AFGTMECVTYITLLCLCSSAYSRAAFRRDAHMSEVPSGLDESEKVQSLGADMPSLSLFSSVHQASIVQSVNEVTEFDSHELLMSHLQLYGKPMMKWMTAVHNKNMRATHAYCSTKMTTHSSRDWRDQRMTLCHCF

SEQ ID NO: 945476 - protein, 105 aa, Homo sapiens
MCLSPGAFRYLPQEKMELRPPCTLANSMRTARSGTFVTLKRLGVCRASDFHYQQFTILPWTACGVKLPTMWVQAFISHDLPELCLMNQQSDTLYPLNRNFPLSPH

SEQ ID NO: 945477 - protein, 75 aa, Homo sapiens
TVSISPVMGPGQEVEKARTEAVTEAVAEIVDRTEATIAVPGTIKADPSKGNSASPKAHTLTHTEFPVLLEGALLL

SEQ ID NO: 945478 - protein, 111 aa, Homo sapiens
HEETLHTDYIDYMDELSSFIVAQPNIPWLFLTDPTLAMEVYCGPCSPYQFKLVGSRAAATARYAILTQWDRSLKPMQTRVVVRLHKPCFFLHWLKLYAIPILIIARVLVLT

SEQ ID NO: 945479 - protein, 105 aa, Homo sapiens
PLLGLCTLCAHNGVQLSDAHSSDGDHRFKDPGDHNLMTCLSIAFAHNRQNRSSDDDVQLMHAVTACARTRAGAVSITSLLATYCEELMADEQHTPDIETLVAATT

SEQ ID NO: 945480 - protein, 114 aa, Homo sapiens
MDICSNVLMTGRTLPSLSVKIKIRSTSKLKECCEPAVASHCIAEPGTDVRNNYAEAQDDDLGMTLYEYARAHLDYSVWLLMTLAWTYDATLDKCCAAAHPHECYATECYEFSFA

SEQ ID NO: 945481 - protein, 68 aa, Homo sapiens
TYTCVLWIMSPMLVDCDYTQTFSDVCQTEHVKHKVIVSDRPRRHAAQKRYALLGWLTHEGSEMLVVYG

SEQ ID NO: 945482 - protein, 92 aa, Homo sapiens
MSMAAGMDYRDGTTQNRETCVAAIVAVLLEPGHYTEYSCGGDLAVALLTLQLNNGDEVIRSIAANVEIDRVQTDCMQGLSRILFNDDDEFRD

SEQ ID NO: 945483 - protein, 134 aa, Homo sapiens
MGRDFPYSVGDPSTRGVSVDHKYTTSSLGVMRRKGVCPSFDSVQSDQRHSFQAGGSSSAMLQPMLDNQVGSKNVPYVQHGTLSVNRTMRMVKNVFVYADHRDVYTRHARRICIVTQQGIKEENCFLKPGQIWAI

SEQ ID NO: 945484 - protein, 94 aa, Homo sapiens
MLNSIYQWPEHSELTTLGVDGKEFPEVHLGQWYFIARAASTKEELATFDPVDTHCLQYGWWLCPDADPPSCYHTHEMGSVCPGGSTTWLEGAQS

SEQ ID NO: 945485 - protein, 82 aa, Homo sapiens
NVHGHSMWAHMTQSCEHTTHTNLWLSALYPKSDRPEDRSQVQRVRTPALTTEFGEAQDNGGFGESLHKVYAHIGPKGTGRKI

SEQ ID NO: 945486 - protein, 112 aa, Homo sapiens
AVHCGEGTHSSISLHVKGSFRVSYSKNETYQLFLSYSSKKVAMLCSQQPLWMILKLWQLPMERENILAFWKPMELTSVALGLLEDSMNSYMFWIKPPRSAKALDSDMRCPGF

SEQ ID NO: 945487 - protein, 151 aa, Homo sapiens
EREREREREREREREREREREIERARDTLCARYPSFVLLASSLPLAYVSFPPLLSPFSVHSLCLLLPSSCSLSSTFHSLFCALLHLSLLSVSHARFLPSISLLSGILSCLVLVLICSLCLSFLLCLFVLFLLLSHSCGFLHTLCFSFLVCP

SEQ ID NO: 945488 - protein, 132 aa, Homo sapiens
PCLILALLSSLADSGFPRSPFRLLGKRSLPEGVANGIEVYSDLNFKVTSRFAHNVVTMRAVNRADTGKEVSFDVELSKTGFITNFTLTIDGVTYPGNVKEKEVAKKQYELEKFTVSGNVAVGSVTFELLRGL

SEQ ID NO: 945489 - protein, 130 aa, Homo sapiens
TKRALSTLKLWLNTDILSSVGIYNLGHKALKPPPIKLYWETQWTSGNHRPGPLIHSTSGLVLAIDTKRAQIYGRRQIILGKEGTEELKPVDDPRLMLKGFKAVVPVKHHYLRAFLFVYPQESLVNGSAPC

SEQ ID NO: 945490 - protein, 122 aa, Homo sapiens
MSPRATIFASDTSVSTIAYGCVVLRDRNMGTPRDIEMLLARSRRGRSAKALGQGNTVVDRGGSNPGAVGAHGTRCRLAPQGPDCGPGVEHGQAFFLWAEDTMDSYRNRPGHEWWVSPRGFGA

SEQ ID NO: 945491 - protein, 81 aa, Homo sapiens
GYNKANVGHLKNPLVFHEENPYRDIPIPQTHNWRSTAPPPGGYRPSEQRDIILHIAQCTCKASLLFKSKSPHVETSTTVLC

SEQ ID NO: 945492 - protein, 105 aa, Homo sapiens
MSSLESVRMVAFVTCGDMTRQDVLAWVSSEALHPCCRALTRDLEFLILVLSRPFTGWLYLICFKEVDLLMYEEWDALDLKTKDRCQRAALALMCTAVAAADAQCL

SEQ ID NO: 945493 - protein, 142 aa, Homo sapiens
RERERERERERERERESERERLTAPQLAPDISLSSLFLFVILPSTSCPLICFSAFSIPCIPDPSGLFFVLPFYTRFFFTFDLSTLSSISFLVSFLSRSSLAPPVSPCILLFPPFLPLLIYLLFRPLFPSSSPSCPPFPFLFP

SEQ ID NO: 945494 - protein, 117 aa, Homo sapiens
LKRHLSETQSCSSAWSGSKGPLDQLEKGGETAQSADPQWEQLNNILSMPLLTADFHKEDTAANDWTPEGEEDDDYLDLEKIFSEDDDYIDIVDSLTVYPTDSDVSAEHVLQLYHGGR

SEQ ID NO: 945495 - protein, 82 aa, Homo sapiens
QRQTKREEKRRGREPPGPEDEDSTLDESDLYSLAHSYLGGGGRKGRSTREAAANTNRPSPGGHERLVTKLQNSERKNQGARR

SEQ ID NO: 945496 - protein, 110 aa, Homo sapiens
MARQHLAGSTLTEDKCIHNPEYLAERPDIEYRQYTTELMSYGLCVAERQGMENESVVMHYGCREMSRKQTGVRRLSQHYSETLLSITERMRCLSDDGDTGVNAALFNAHG

SEQ ID NO: 945497 - protein, 72 aa, Homo sapiens
MTRCCYFPLPIRDDMCVLCFQADIEIRNTGLNTHCALVRSRSEGYFYNADYYFLAGNDFMVPTVYAHLAIAF

SEQ ID NO: 945498 - protein, 78 aa, Homo sapiens
VSLDQEMFSEVCSPGGTSRVTYGTGPGSFYPTTGTDDALKDRKSDITSELSTTIIDVASMRIVRTVYGKFWILNYLSE

SEQ ID NO: 945499 - protein, 69 aa, Homo sapiens
GPSRGSPGSLVSFFNPQAQDGEEVFFANPKGSLILLLVQFVAQFFGSVSRPIIVGESRALIGITETFLL

SEQ ID NO: 945500 - protein, 114 aa, Homo sapiens
DLGHGSRLRIAENRYLTMHIFRKTLTDKTITLKVEPSDTIQNVKAQIQDQEGIRPDQKKLIFAGTLHLVLHLIGGMQIFTKTLTGKTMTLEAQPSDTIENVAMIQTRGISADQQ

SEQ ID NO: 945501 - protein, 140 aa, Homo sapiens
VTSAEIFPAMAGFQTHLGKAVYQQTTWIKALSRWLRIHACPEPSGAQDARDSVSSSGHPLATIAEKSAGRSFQGRTGQETEQVPCTYADRGVDCASVIVVTSNPDDLARILMHVMNSNAPIKPGIAVHRQSEEALSTPLS

SEQ ID NO: 945502 - protein, 70 aa, Homo sapiens
PGCRNPDQEEAMFVLSASERLRLVDHSRPGIQYQPCQHETLPTLQTQNQLRIAAHACEPSYYKTLMQENL

SEQ ID NO: 945503 - protein, 42 aa, Homo sapiens
MTRWTGPTDLVALLTLTEVDYEKHTDYVCDVTYQGLSLAGTA

SEQ ID NO: 945504 - protein, 103 aa, Homo sapiens
PRGYQDMRDSRVTFASDFRDAEDFSGPEYLVFMLKKKHISSQGYEYHEVSGRTRLADESRWCHNTSSKSFIARAETCGPAFMQLMDAPASFIGVTVVQGGCGT

SEQ ID NO: 945505 - protein, 131 aa, Homo sapiens
  misc_feature (130)..(130): Xaa can be any naturally occurring amino acid
GVKEANRERRPYSLHCAGTALDRSCRPGIPASRWTRLPRALVVHMLTQLMSCGIMWPHCEEIGSESEAIEDSHMLSGAMNAGIQTPFQGGAREQLCESSSLVDTYFYLKERVIQLTLQRRKMAVFEEDDXG

SEQ ID NO: 945506 - protein, 76 aa, Homo sapiens
SPGLQGIRHEASITQRFFLFLGVDLTRGPKPGECKSWSYHFTFLPTHNTVGQKSSINYWQKNPPIYILLGPFFPQI

SEQ ID NO: 945507 - protein, 59 aa, Homo sapiens
MSLCVAIPTSDSMKPIMTESMRSPVYYYFTSVLVVILRYLRATFFPRIAKADDRYLYCR

SEQ ID NO: 945508 - protein, 77 aa, Homo sapiens
RGLQDSGTGPIRFICMYLARTAMETGTACCKNRRECRIFVDFSLLKFYHTAVLGFRRIILEAEKMDRAASLGWPQCL

SEQ ID NO: 945509 - protein, 99 aa, Homo sapiens
LLDRNIPGGLEGAMCLYGDWDHRMVPTVETTFSSLYCLTREAASALYASTDQLTLYYLYIGGCWKPMPPYSFQDLLSLVLMMPLTIPLTYYFRLHSLDF

SEQ ID NO: 945510 - protein, 134 aa, Homo sapiens
DDHDVHMIRLLSLRIRYEVIMITRKNHFLRREPDAEMHICDLNRITALTVERPICGHLAPDEHYQTTCEALEAVRICANMNMVPSLCSESLHIPEALHPLHDVRINGACTAQLIEVFNRHAYEPLGLIALVGAH

SEQ ID NO: 945511 - protein, 191 aa, Homo sapiens
MDRSLDRGYRSGKNYRTKVLASCLGVPDAKIGIHDLGRKKDKWLSFRFAATWCQINISSCHMKRWSMTKFVPISTWYYVGKDGFHIRVRLHPLRVIRINKMMSCAGVARLQAGMLGAFVKPQGTVARVLIGQVIMSLRTNLQSQEHVIVALRRAKFKFSGRQKIHISKKWGFPTFNADEFEHMVAEKRLIP

SEQ ID NO: 945512 - protein, 171 aa, Homo sapiens
SCLIRKVVLRRKSSCEAYGEDMDSYKSRVPCVCPGTRRAAVATIQRSACLRPLYDCLLVMIVIPRLSFSTVQSYSTTSPTMSLNWLDMHKTTYWRSVFFMETLRMLFLRDNECRLFMQATNSGRGAITLMHTEVNGKDRQHVTVAMILECIVYQKVYTLTAVSLLNPAELY

SEQ ID NO: 945513 - protein, 57 aa, Homo sapiens
MMTPDTNLFEDLATVDWSNTSEGKSLASISIKLYAFIRTVAGNMTDVHAFDVGLRCC

SEQ ID NO: 945514 - protein, 132 aa, Homo sapiens
MGDGPPCTEITRDLVGCPTPLKPNTNQTPMQWRLILGTENPPAACKAWAINIITVGEVEHNQIPQDPLEPPDFLGTDRTHGRRKPKTKEGATSRERGNKHRPGGAQMAHWKTQHELPQTRKFGQTAPSSHSA

SEQ ID NO: 945515 - protein, 66 aa, Homo sapiens
DDDDDDDDDDDDDDDYDDDDDDDDDDDDYDYDDDDDDDDTDNYRIRELRRQPETAYYIYDYTSSLF

SEQ ID NO: 945516 - protein, 73 aa, Homo sapiens
  misc_feature (56)..(56): Xaa can be any naturally occurring amino acid
  misc_feature (59)..(59): Xaa can be any naturally occurring amino acid
GIPPACLGYLHPGGEHLVLPVLGDILRGSLIKRGARCLHRLIYQKYIIWGIIGPFXIVXIMREGAYWGQYGVC

SEQ ID NO: 945517 - protein, 156 aa, Homo sapiens
MSDESDMDKAIKETSILEEYSINRTHKLGAGISGPIRVCVKKSTEERFALKILMDRSEARNEVRLLMMCATHPYIGQIIEVFANSVQIPHESSPRARLLIVLEMMEGGELFTDAAENRTYHRSMPVNTTTHSSGSAALVVMGTDTSSLIDLPRLPK

SEQ ID NO: 945518 - protein, 86 aa, Homo sapiens
GAVSTEQTDASSLYSIVLVMASGYIGCVLEYGRLWTGRALIHYILSIRSTILAVRHTSNASLIGYSVREIFHNTTVYLSSNVNLEY

SEQ ID NO: 945519 - protein, 147 aa, Homo sapiens
MGALTPTNGQELGTPPKLSDGAWVGRVHSVHSPGAKIDSEELVSRKKKNTLDGFTGGGHKPVHPVKIKVGGSQVGLLTGKQGQPHGAGWPAGVFVAATVVASLGTEAFAVATPKPLFFGTRGAGAMPEKKKRHTWVCQLPWKTGKTR

SEQ ID NO: 945520 - protein, 136 aa, Homo sapiens
MALFVSKENKNLPRKKVSSKKANNKASCERYAQYAPGYAKARAVSKVVPPGFLCTAGVSPYDDPNTSRGDSGGPMIVHKRSRFIQVGVISWGVVDVCKNQNRQKQEPAHAPDFHINLFQVLPWLKEKLQHEDLGFL

SEQ ID NO: 945521 - protein, 35 aa, Homo sapiens
SCIHLSYLIWTITSNEEIWCPIVTYDRSCLSGRIL

SEQ ID NO: 945522 - protein, 35 aa, Homo sapiens
MGSNWITPRYWTVANSCFCRLVIVDVGTVLIYLPA

SEQ ID NO: 945523 - protein, 148 aa, Homo sapiens
MAQKIRPPPASKMLSPKSPELGLRKMSKETAFHGTDIKGESPGTNTRGRFPRKKKKARPKLKKRSNPGHRCSLCKMDNPSQVVKYFQHFSAPETIPTTATEIPNKNTRVKPQTGELVKIKLTRYLWNKAPPPGIESHGQPGKFKLDPQ

SEQ ID NO: 945524 - protein, 32 aa, Homo sapiens
MGKSFKRRKPMVLLPHIVTLNGEGKFAGAYNL

SEQ ID NO: 945525 - protein, 103 aa, Homo sapiens
KNFFFLKRGGGLNLKSPQKPIQKKPGPKGGVNQRGVWGQQTKPGSKGQGPPPKPKTSPPSPKKAFSSKGYQVFCQAQNSPFWGVGPNNEKGGPLGKRKVKKTG

SEQ ID NO: 945526 - protein, 101 aa, Homo sapiens
  misc_feature (74)..(74): Xaa can be any naturally occurring amino acid
  misc_feature (89)..(89): Xaa can be any naturally occurring amino acid
ASSVEYQCQNLYQLEGNKRITCRNGQWSEPPKCLHPCVISREIMENYNIALRWTAKQKLYSRTGESVEFVCKRXYRLSSRSHTLRTTCXDGKLEYPTCCKR

SEQ ID NO: 945527 - protein, 40 aa, Homo sapiens
MWRILTHALRNADGKGGATNPIRPLGEENNAQADRSHRGE

SEQ ID NO: 945528 - protein, 218 aa, Homo sapiens
IHTLVILFFSVSGRPLSEGGREPGESRNSGGEGPPIPLTPPSKKREPPPPPKALYHKKKKPPPEKISGSTGEMVPTVQHKDILAPAQATQPKNPTNHVPPYHPPKTPPKSTPRCSPRPIIPYHDQTSIHTIRSPKQTMLCAPPTRVPHTKAPAHAIAPSYNPNDSAAQTSHQRPPPQTNGNHTPKNHHTTTHQRHTTRHPRGYLNEPHPTPHNAPMTP

SEQ ID NO: 945529 - protein, 186 aa, Homo sapiens
GGAPPAPLKKPKPPPGFSEKKEQSKGAPRGKPGAQKPISKKKGKRPLNLPAPPQKGPIPGPQQRGAPPEKKKKTSPQPGGGAKIRQKRVPGEKTGPPPHGKDPLIFWARGFPHKPPGISPRETPRKPPPPGAPPKKTPPVSWVYAPPLEKKKKTPRISNWAPKKGGRKTGDTLSSGGKTPPPHLPH

SEQ ID NO: 945530 - protein, 136 aa, Homo sapiens
  misc_feature (4)..(4): Xaa can be any naturally occurring amino acid
  misc_feature (55)..(55): Xaa can be any naturally occurring amino acid
MGLXTPEEVPHTGSKTGSDLNFDRRLEGILKGLGLREHFDFVLTSEAAGWPKRDXRIFQEALRLAHMEPVVAAHVGDNYLCDYQGPRAVGMHSFLVVGPQALDPVVRDSVPKEHILPSLAHLLPALDCLEGSTPGL

SEQ ID NO: 945531 - protein, 102 aa, Homo sapiens
  misc_feature (53)..(53): Xaa can be any naturally occurring amino acid
  misc_feature (90)..(90): Xaa can be any naturally occurring amino acid
YKNLRENLGIPLPDNGLCREIYGLRPQKHSHQKPKLDKWDLIKLKSFSTAKEXITRINSHPTEWEKIFTNSVYDKVPISRICKELILTSXNQITPLKGGQRI

SEQ ID NO: 945532 - protein, 98 aa, Homo sapiens
MRGNNTTQTTVGRWGQTRQHLKIFAAPPPKEGQKRRRFRPKPQKNAAPPPPEKKEKPPPPQKKGGDTKPPQNNLLGGAHLLNQIKKQNLIPPKNVGRA

SEQ ID NO: 945533 - protein, 219 aa, Homo sapiens
LFYLSPKKKPHYHTPTPPKTPHQPTYNNTSQLNHPKPRPNPRTTTSTTITSKTPNPPQPLPPQSRPRHTRHASTLPRTTDPSPTLQYPPPPYPPKPPTQTTSTPSHTPPHTLTPTLPLHPTPPAKSPTPTRNPPNKTKKHHPYSPPTPSRPQPSPHNGHTLTTHPHTHPPPPPNTNPNNPSAPTPTLTHPTTPNRPLNKLHIITPYHHTSHTPTNTHTA

SEQ ID NO: 945534 - protein, 181 aa, Homo sapiens
NGNTTPSHFFNRLCHQSSFCRLGEIRKGPVPRKIGGTGMQGFPFKQGVFAHVRVRRLIVQEHSCSVASSPAERKRNPVCGCIVYANMSVRHLALVKKGPEYTPGVSYFTVPSRLGPQRANRIRKLVNPCKTDNVRQYVVKKPFNKEGKKPRSKAPKIQRPVTGCVQQLKRRRIAVKKQRAK

SEQ ID NO: 945535 - protein, 182 aa, Homo sapiens
PTKPYKRGPKIPPQNLGQGAPQKNPGLKKKKQKTAPPKKKKQRGPPKRPKTPRQKKGAPSQKKKKKAPPQPRPGEKNRKRAIRGKNTPHPNRSGPTQFFAAPVPQNPAAIIHPGNPVTLSTRGARQNKLPPKLLCSAPTLLHKTRTARHIIIGTPKRRRQHRYKVVLPPKQFFSPTLPTQCP

SEQ ID NO: 945536 - protein, 111 aa, Homo sapiens
KRGSAPSQNNSVFPPGVHLTNTVFPPGKQWGLGAPAPPFIGLGDHKTSPLPEGPFFPGVPVGPGWPLSHQFWSPSNIFKSICGPPPQGGVPSREGGPFIPPPPGRPPPLGR

SEQ ID NO: 945537 - protein, 130 aa, Homo sapiens
PRGVRRSKILGPPGAECPDEITCEDDPPQAAKIILFYKEQGVLEWPGGVNPYKDGFPPQAPQWGDNRRKFRPDGDTRFFRQKISFAKRGQLRKDFEGVWVREKYRFLFVGDGPGFLLGEKNRTGKPFPPP

SEQ ID NO: 945538 - protein, 98 aa, Homo sapiens
KSAAPRGPKRGGPPPVSPPPKVREPPGVQKFGPGARYKRARAKFCGQNQGGRYLEFRERNPKQQLQSQKGTLKGKRACISPSSKNKWKTQSKSFPLNL

SEQ ID NO: 945539 - protein, 176 aa, Homo sapiens
FPYPRPFVLDCNRNLFSRIHYAMFPKLDLPPLRDQTGAPPVCGRSKLVIPGLQDFGTSLVDQEARYAGYVVAPLNDGFETAPLSPGTSTQLSELIALTRALNFSKGKVTNIGTDSKYAFLVLHAHAAIWKERHFFTANGLSIKYHQGPGSVAHACNPSPLGGRGGRITRSGDRDPG

SEQ ID NO: 945540 - protein, 109 aa, Homo sapiens
GGKTPAFFLPKLDPMGRGLSPGGGGGLWVTLGGAHSRFFTAYGGSRPKDGPGPHLVLREGGVKSFPRPLGPWGGGKTPPPSLSGGPPPWAQTFFGALGPNFGGRGDPFF

SEQ ID NO: 945541 - protein, 115 aa, Homo sapiens
  misc_feature (9)..(9): Xaa can be any naturally occurring amino acid
NLLSIWGWXEIPQDKVFFNLKREEYWPGVKFVPKQRLQSKSAWNPSYCPGITGIGTWRPSLWVFLAWKPNRQFSPFPGKILFHKHIFSPNGSILLNKSYIRPAYSQIIFVKPYRL

SEQ ID NO: 945542 - protein, 160 aa, Homo sapiens
KGGGFKPWIFPKTPPQKTPPQRGVDPTGGLGAPNPTRAPRPRAPPKSQGQVPPPLKGPVPQKGPSFLAGPKIPLLRGLPQKLNRGDLGKGGILKTRWGGPGPPPGKRSPRGERKEPPFFLKKVGGVLGIPPPAFFKRECSPPTPKKAKPGAMAYKGPQNF

SEQ ID NO: 945543 - protein, 72 aa, Homo sapiens
LNLRALPPALDYWIPGLHLMQACVNLLASSDPLAWARKGAGVIGISHCIGYARNTSLAVYAHLNMRITYILC

SEQ ID NO: 945544 - protein, 158 aa, Homo sapiens
NVFSSFVSQGRHNYKGRAMKTQGPPSPANRRGPITWPLPPWKKTPPPLMAQSPNPKKRALSQKKKKKPPHIHKFWTNKENRATPPKNVALYTGTKPLKSLPQKKNKNPPQISHRGNPGKTLPPGSPPKPLPPCLGLIPPPPQLKPKLPLDFPPGPQRV

SEQ ID NO: 945545 - protein, 219 aa, Homo sapiens
SSFFFFSPPFLPKDTTPHHKNNRSKKRPKERKQPPPKSTTQSGKNTHIPQKRYDKRKPQPHHNPGNNTHNPRQTQPTKPTALNLRYPTKTNKHSHPNLRHNSRTNNNPKQPQNAEGNNPLHTYSNTPPATPTNIAAAPTTRKAKKNTANVLKTRRSTTNAPTRHRTRTPNNSQNHTTRPRSLYTSTNQQTQTPRSKTILIQQHADLQHIEHTTPTKPLL

SEQ ID NO: 945546 - protein, 152 aa, Homo sapiens
PIYLGNLKNKPNPYPNLEQGDKWIHTPNAVLARTNTRGAPPFKKKKPAPKPGIGLTKEKNASCGQKFPPPHLSKLFLLQGPGPIPRSHLFFSSRDPRQILQRGEHSTITPRFLFLYPDTLFFAHTSPLGYPLGKQIQLWHFVKANARQKGFP

SEQ ID NO: 945547 - protein, 210 aa, Homo sapiens
MNLMIFPKETLVSRWVTHHSGIKLPPLVWGAIRFEALFRIIQGHVQKEIDLIMGPNGKPLGTGNAKIPYTEAVCNEFLRFCKLVPLGISHRPSQDTPVRGYSFTKGATVIPNLYSVHFDKKYWRDPKVFHPERFLDSSGYFAKKKTLVPFSLGRSHCLGEHLARMEMFLFFTALLQRFHLHFPHELVPDLKPRLGIPLQPQPYLICAEKR

SEQ ID NO: 945548 - protein, 66 aa, Homo sapiens
MGLEAPAICSKGSLSHCKDEELNEVILQLFLLHKCLVEDYKLDFLSHILIILHSLKENGPRFLSNG

SEQ ID NO: 945549 - protein, 121 aa, Homo sapiens
AQGVPVALEGQNAAHAIQASPGPSMGGTKLFRRSFPRQMKRSFAGLLDVFMAGVWCQLRPTADILGCPVPGMDSYVAKLALNLCQQGNHVWIFKIRRRYEMYARELSEAVKSIFSPTIVKE

SEQ ID NO: 945550 - protein, 168 aa, Homo sapiens
MHHHTRLIFLYLHPKPPSPHLFLPPPSLSSQPFPTTPIHTTSSPTDPFSTPRSHTTTYTLTLQPPPSPAAFQNEPPPPPLHHNTSPNPLLKKHATLPISYLTTTPIFPTKHTLQQHSLPSITTHLIVQTPPPDPPTTTTELSPPLFPFPNPPPHEQPTPSTTSLNPIL

SEQ ID NO: 945551 - protein, 67 aa, Homo sapiens
AIPAYVQLLVDYSKMEKISFRNPVRQGQGPLVLRPPRCTLESLGEGWIRWFHAFWEGKAGGLLKPRN

SEQ ID NO: 945552 - protein, 201 aa, Homo sapiens
KFYPDWVSQGFRKLKGHRKKPESSLPFGMALRFNQGGISFKVWEPVQCLGPLLSGEELPSHFAIHRGMPQRRGLSRYQQLKNFQGVILVSNESKKLQQASERVNIAFKEDRPEDSNTYLHRVARAGRFGTKGLAITFVSDENDAKILNDVQDRFEVNISELPDEIDISSYIEQDTVEDSATFGNVPSCPSGERHQVWVVKR

SEQ ID NO: 945553 - protein, 83 aa, Homo sapiens
ASTIFSTLFFRNRMLPQHLELNIFFTRGTPMHHNYGKLRVNPREKGTKAGAPPGCGRFYFEWIPRGHVIRHEGKPKNSEAAII

SEQ ID NO: 945554 - protein, 97 aa, Homo sapiens
  misc_feature (6)..(6): Xaa can be any naturally occurring amino acid
VLAYKXSYIATETSMFYWLCPLVVLVTLPQQCIWAKILLAGWYKAKSENCHLGIVLKIVPKNPMPVKYCNSDVTPCELPVLVIGSAFPVTKISYVAR

SEQ ID NO: 945555 - protein, 119 aa, Homo sapiens
SRQPRVKLWHFNSNKFPPGLAIRGHLSKNCFLRVSQSSILRVSPQTKSLVRASKAPQTFKFLKKQNGRSRFTTENLRSKENQVFLFYAKLLQTDCGSRGNLMPFRTFDWQQYLCSFDNK

SEQ ID NO: 945556 - protein, 102 aa, Homo sapiens
MERICISLGARRNLCGKDIKKEAELGMYIQGLAVLGLIVRVVPVCPHEEENAKPAFIEGNLRVLCSFRCISVREPWPSLPCWRVVETGPHYPGGNSVIRRGV

SEQ ID NO: 945557 - protein, 108 aa, Homo sapiens
SSFFFLYFNHPILPNIHFSTLTITILIYQITQHSSNLTSYHPTKTHISNYPSSHTQHLISSTSSINNQHPPSPPHFYLPHPHTPPTSHHYHFNIINIPTTNHPHKPYQ

SEQ ID NO: 945558 - protein, 102 aa, Homo sapiens
ARWGAPFYFFGPPPLFWSQKSSKSPPYLQNPPPPPPKKNTSPPKSPPKTFKILQNSPPPPFLEVSPIPPPTPKKNPPPPENLKKKNFSPKFFWGKKFLNFFF

SEQ ID NO: 945559 - protein, 108 aa, Homo sapiens
LFVFNKIPKKNLKMGGFVFVQTPAKVLVFWLPSRRGRHCHRGLAYWKRVKSAEVVIFSQRVQWFPKPQNPRRGHTGNRHLSRFSVQFLAVSVDYPDFVLIHSPWNMWT

SEQ ID NO: 945560 - protein, 197 aa, Homo sapiens
KQRLALKKRRGGKGTKSDNGNPTANSTGVQGSFRPHPPKRLGQQGPTTTPGELQHFKKKPGLNTPAKRADTPGPKKRAPFPRKKKKARPKKRPGRNTGKTRFLGETDAPHKARAPKLLAPRNTQKPPWKLNREHPRKPSPGGRAKKTPPHSSASPPTLRGKKRGLPWAFKRGTPKGGGEKRAQRRTLREKETPPQKP

SEQ ID NO: 945561 - protein, 112 aa, Homo sapiens
MQFSKIDPHQYTKKTPQQQNTKNTVQPTTPGPVNKHHQKFEQNTAPTQRANHRAPFKHKKAPHKQQAATPKTRPPSRKQNRHTIKTKNTPTTKTKTSRAPQTRKPPTKPRAK

SEQ ID NO: 945562 - protein, 204 aa, Homo sapiens
  misc_feature (63)..(63): Xaa can be any naturally occurring amino acid
GRSGTPAMVEGIGRPITCARFERPTFFKVGVPLRSVSWRAQNGGEPAPMGIGPILGVNQAVLXRGGLRHVSFVLVNQHVFAVGSLIVQEVVYIPERAIHYRFLKRVGHALRVCVQIVLHCVHQHCILSSTGAVEPCRCLWMRWTPSRVLKRSEAFLAEPSAFVASAPVSAGTPSAPAEAPAPDKVHVKQHSEEWFQHVVFGHVD

SEQ ID NO: 945563 - protein, 79 aa, Homo sapiens
MLALRLTHVGQLPDYTPPVQPEAGLPRNTGYERIARRPLSPFCGRLNNTSELTDQVGQVLLVVDNTDCKAPAIPCDDRW

SEQ ID NO: 945564 - protein, 211 aa, Homo sapiens
  misc_feature (45)..(45): Xaa can be any naturally occurring amino acid
ENGFSLYCPGRSRTPGLKLSSRLLASLRAGITGVSHRARPPSVDXSYPFLCPILSPLTSSFSSSSFLLSYIYSLFTSDTLLSPLSLLLPFLPLLYFFLSPSSFLSPSPPSPSPLLSTPFSMYLLSPLSLLPFIIPLLSFHPSPSSLPLPSYPSSAPSLLLSSPLFSHYLFPPPTSPHDLTLLPLPLYPFLFAVPLHLPSFSPPSALPYLLF

SEQ ID NO: 945565 - protein, 104 aa, Homo sapiens
MSTEDDRRESMTLGFRLVKVYSTKKTGMRLLDEKVTLFTDYYDMRVHASKIIVKLFIWALSTHLKPSLKCKWLIWERGMLTTGPEKSCYDGLKNAMRCQNMCTK

SEQ ID NO: 945566 - protein, 109 aa, Homo sapiens
MVILNRSGQRLRQTAAIIPAAIPNITRQTILVMVSHSVGIKRLANLIGNRTTRHHRQAKIPLTALLIEARTGDTAADQPQLLTHQFYNLRISFGPGNQSRRIAGQHMDK

SEQ ID NO: 945567 - protein, 76 aa, Homo sapiens
AIKLDDRINGRFDYGCETQLEGNRFGPSLSISSYKITHARIPVPVSSPSKSHRSKGPSIKRAAMQLKTFSLAIKLC

SEQ ID NO: 945568 - protein, 117 aa, Homo sapiens
VRNSKRLIALISAIGMSIFLQNYVSLTEGSRDVALPSLFNGQWVVGHSENFSASITTMQAVIWIVTFLAMLALTIFIRYSRMGRACRACAEDLKMASLLGINTDRVIALTFVIGAAM

SEQ ID NO: 945569 - protein, 150 aa, Homo sapiens
VVRLPAFKRKTLVLIGTSGVGRSHIKNALLSQNPEKFVYPVPYTTRPPRKNEEDGKEYHFILTEEMTRNIFANEFLEFGSYQGNMFGTKFETVHQIHKQNKIGILGIEPQTLENGPTGRPGATGKGFEGIRKPDAYYFGLLLVIMVVMNP

SEQ ID NO: 945570 - protein, 140 aa, Homo sapiens
MGWSCLETRVLGLGAQRISRLLLKDKELKDIRALDKAFIPELREEFSKLQNRTKLTVLEGDILDEPFLKRACQDVSVGIHTDWILSALGALTESPFDCHVKEPQFLLEVFRQNQGATLYNNQTNKRNGALFPQDVAEART

SEQ ID NO: 945571 - protein, 40 aa, Homo sapiens
ARQVNGNPSLTTTPPLMAVKGGRWGFFFTTGGFTPKRKLF

SEQ ID NO: 945572 - protein, 126 aa, Homo sapiens
MFYLKKWSAVVMWIWQWSAIRALSAVSRGWMPVLDDKLKTNKRTVSGSGENVIISFHNWCMSLWVKQNNRCPLCQHDYVGQRIRQGERLEGSLTDLFRDLQVLVIHCPTQARTLQGMNSSHMTPRI

SEQ ID NO: 945573 - protein, 136 aa, Homo sapiens
  misc_feature (24)..(24): Xaa can be any naturally occurring amino acid
  misc_feature (29)..(29): Xaa can be any naturally occurring amino acid
  misc_feature (67)..(67): Xaa can be any naturally occurring amino acid
LSAITLFGFTNVDGLQGYEAALSXIDDDXISHIRAHTNYQGPLTKANEQADLLVSSAFMEAQELHIXTHVNVTGLKTKFDITWNQAKNIDNIVLSVKSYTCPLKRQELIPEVYVLMHYGKWMLHMYLHLENCHLSM

SEQ ID NO: 945574 - protein, 71 aa, Homo sapiens
PFDPYVLWAPLKSARMRNEMEKPSHDQRLSLMIDGYYASTGNQFGTLLHCIALYMLIIDGRAYSTDPSFGS

SEQ ID NO: 945575 - protein, 182 aa, Homo sapiens
IEKRVRTESRARQEKEKTPPWKPIDGSASKCRNQAMTAIRAGGDMALASVLERPLPENQRGGYGLGGRAELLDQGPGSLRDGLSLAAPGWGDPEEPGIERLHGTTTRALKSRHGDKVAADSRATAGANMATQKVKKVIEINPYLLGTMAGGAAECSYWERMTARKRQIYELRKKERNYGAAG

SEQ ID NO: 945576 - protein, 36 aa, Homo sapiens
MYMNFPHDDSITTMINERSVQVGQTHTIARSVMHVP

SEQ ID NO: 945577 - protein, 205 aa, Homo sapiens
MCLQGTKPMGLFSAIREPELHDWGTHIHLPSGTAEGASHSRCLPLSINSSSYPLTIINSFSRPDISSRIHFTCIENYTEIYALITSRQKSAPSYKTIGGRLAPISLMTCLTTSHCTSNDTALTGKRRQHTYGMRPDKHAPFFPAGALLTSPTPIDLPNSLPTLNDHRLYANCHIRLTRSSNCSRTTYIFDIRSTTVPTSSNIQSS

SEQ ID NO: 945578 - protein, 50 aa, Homo sapiens
  misc_feature (37)..(37): Xaa can be any naturally occurring amino acid
QGARKHSRGRHVGVPHTAGYARRGRLSGFSTLGPINXDVLVLSSYATSYP

SEQ ID NO: 945579 - protein, 117 aa, Homo sapiens
MIKPDAVVHALIMDAVDQRMLSNTILIVPMRELLWTKEDCQRFHREYEGRACYQTLPESMVRWPPRAYILAHEGAIQLWRTPMGPTRASRARHVGPDSMAGRLCLTDSRSTIHGSGV

SEQ ID NO: 945580 - protein, 114 aa, Homo sapiens
  misc_feature (106)..(106): Xaa can be any naturally occurring amino acid
GKKRRRCPALATVAWRSGETGTENLSLLGLTVVMSFKREGDDWSQLNVLKKRIVGDLLASYIPEDEALMLQHGHFACAICPHQPILYTLTMLTAHRACNKHLSSLXLFYDNKHP

SEQ ID NO: 945581 - protein, 157 aa, Homo sapiens
  misc_feature (51)..(51): Xaa can be any naturally occurring amino acid
  misc_feature (65)..(65): Xaa can be any naturally occurring amino acid
  misc_feature (77)..(78): Xaa can be any naturally occurring amino acid
  misc_feature (120)..(120): Xaa can be any naturally occurring amino acid
  misc_feature (144)..(144): Xaa can be any naturally occurring amino acid
INCVPLLSLPSVKGRTHIYSQPNYIPLPFSLFLHTINSLYLHYHPFNHHLXPKKKFYHITPLFNXYYNNLFSEVTAXXTPQPPHLYTTLSLITPDLNLFYPYHQQPITFNSPFIKTKLNXLTFIHTGAPNFPHNFLKNTHSHLXILRISYSKFYINQ

SEQ ID NO: 945582 - protein, 69 aa, Homo sapiens
TIAVEATVEIHVDCCLDLYSQLQGTIETANIAVYSGSRDLILIAEPPLITGSMLVEIKKDLHELNNAGI

SEQ ID NO: 945583 - protein, 114 aa, Homo sapiens
  misc_feature (37)..(37): Xaa can be any naturally occurring amino acid
MTTLIRTARPSHRSSTITLCDPYLIGPLNQIVMETVXALTRITYATVGIDLEYLALSDLMNSLNRARTTLMENIDSSETPGEHPLRTTDTYSLTTYGKSIYTDLPNKDAIYYIP

SEQ ID NO: 945584 - protein, 69 aa, Homo sapiens
GGRLAVWSVCSGGRDGQTRWCPGVRLNHYKTLWGLVATSAGAKNPLNAKTLKWDHFFGKDPFPVFQHPT

SEQ ID NO: 945585 - protein, 117 aa, Homo sapiens
MYVWTTTHWGSLAHHINNIKPSFSRDDSVKLIHLSSMLMLSVNLDINSGNSSYSESNYIHLAAFYNVMNGKTLAVSNQMALDHSTLLPAGEIPRKLAQFAFLKGGPTEWRWIQTRNS

SEQ ID NO: 945586 - protein, 146 aa, Homo sapiens
ARGKTAFQPFQAILVCVCVCVCERERDTHHHPTHTPSPPPPPPPPTPHTPPTPPTPPPPPPPPPPPPPPTPPPHPPHPPPPHPPPPLPPPPPPPPPPPPPPHPPPPPPPPPPPPPPPHHPPPPTPPPPPPPPPPPPPPPPHPPPPP

SEQ ID NO: 945587 - protein, 111 aa, Homo sapiens
MDKDNAEIMVMLQEAMQEHVNANRDRANPVTDPVSVAVTFTFTEGEDVNRASLITSTNTNTSYGDAYASPVQNSNTTTLATATVAAVAAASVSISHCHTATANAEVIRDGN

SEQ ID NO: 945588 - protein, 86 aa, Homo sapiens
MTLPNSLTDRLSNRTANGTTSAINPAKNMSNSPVNNPKIQPTVPPWAKSIIELKECSHHMARLGCHMIRTKKPLITEPKTRNVTGA

SEQ ID NO: 945589 - protein, 132 aa, Homo sapiens
RLVRERDAYKEKYEKLVSSGFRENGSSSDNPSSPEFFMESDTRFQLATLISAPRGSGSGVGLLVLEPCSPPPHHPHPHRVWPPWPPTHTQTHTHTPHTHTHTHTPHTLLKFVVVVAVLNWGGNGCLAHGLPI

SEQ ID NO: 945590 - protein, 123 aa, Homo sapiens
  misc_feature (34)..(34): Xaa can be any naturally occurring amino acid
  misc_feature (105)..(105): Xaa can be any naturally occurring amino acid
  misc_feature (107)..(107): Xaa can be any naturally occurring amino acid
MLSPKPQQLNQQNCSPEHYEPQLKTQRTLLEGDXPQEEPDLYIDKPQINLTTYCSAYIPTSSANPDEGYKVSASTHVKTLGQGVANEAARNGLHFLTQKTTRALXEXKGRRWIKPETESRALN

SEQ ID NO: 945591 - protein, 183 aa, Homo sapiens
FVHVRAGLKDGFVQDESPMFPVGKNVVYTCNEGFSLIGNPVATCGEDLRWLVREMHRQKIACVLPVLVDGIHSHPLHPFYTVGEKVTVSCSGGMSLEGPSAFLCGSSLKWSPEMKNARCVQKENPLTQAVPKCQRSEKLLNSRCVCKMAYECGPSLDVCAQDERSNRILPLTACQIHVLPLSR

SEQ ID NO: 945592 - protein, 44 aa, Homo sapiens
RHPLRTTQPAGLIAAQGPPVADFFFTIVGFSPDERYPFGPFPEV

SEQ ID NO: 945593 - protein, 138 aa, Homo sapiens
MPHVGRCMDHPMAAYHSVWPSAPRSVYISSETRSQGSCEAITSTDHGHVMSKVRGYCAISSIYYRKLRDTNQRAMRMGDCWLTEKDQIPKLCQVLCHRDKDQPAGYTRTLQIPNRHLHRAKMAQIEYEGNCLPPLPID

SEQ ID NO: 945594 - protein, 132 aa, Homo sapiens
MCWSCLVTWVLGLVCQRISRLAVEENELDDITTFVKAFRPELKEEFSKLQNRTKLTVLEGDILHEPFLERACHDVLEDIHTDCLNDEFGGTHRESILDGNVIGTQLLGRGPGPTQVPTYIYNRRIKGFGPNF

SEQ ID NO: 945595 - protein, 67 aa, Homo sapiens
LWVCSLGVTRLGTTGAPRFVYLRLLSANPVWVESMNSMSGSDQTEPREKYVLRTIVTIVQEQHAGKS

SEQ ID NO: 945596 - protein, 109 aa, Homo sapiens
  misc_feature (53)..(53): Xaa can be any naturally occurring amino acid
  misc_feature (67)..(67): Xaa can be any naturally occurring amino acid
  misc_feature (73)..(74): Xaa can be any naturally occurring amino acid
LFYSTVKAGANSLPLTIFPALTPFPPAFSAAQFPPCNPPLARKKILPPYPLGXKGDPKFFIGEGGAXITPTPXXISRRATPFLSAVWRVFSHLFPPALIFWPPLSPNFL

SEQ ID NO: 945597 - protein, 106 aa, Homo sapiens
  misc_feature (79)..(80): Xaa can be any naturally occurring amino acid
  misc_feature (82)..(82): Xaa can be any naturally occurring amino acid
  misc_feature (87)..(87): Xaa can be any naturally occurring amino acid
  misc_feature (93)..(93): Xaa can be any naturally occurring amino acid
EDPQSSHPVKKKPSKNVFRAPPQAPFNSPCLPGGGKTPPPGGGPKSGPKENLFFFIPGGSPPQREEKIGAPPLAVFLKXXFXPPPPXHFFIFXWGGGGPPPTPLLK

SEQ ID NO: 945598 - protein, 77 aa, Homo sapiens
TCPPKHTHTFATYSDTEPAVLIPVYAGKRAVTMALTADRNAVNAHADRLNPGGTQIEVTLDVAANGILSVTGVNGTA

SEQ ID NO: 945599 - protein, 195 aa, Homo sapiens
  misc_feature (1)..(1): Xaa can be any naturally occurring amino acid
  misc_feature (11)..(11): Xaa can be any naturally occurring amino acid
  misc_feature (72)..(72): Xaa can be any naturally occurring amino acid
  misc_feature (113)..(113): Xaa can be any naturally occurring amino acid
XRGGKAKKKKXEENRPHEDKRGQPHKTEGERKALEESKKRGKEKRGSQHTRKNPKKRGEEPRQKQTSAKAGXRGAKKGTTGAKGQNPKGAMREKRKREEKDQAQRSQKARGKXAPKGKKAAKPTQTTNKKEIEKKKGKREEENYRPPYKKRARGEGEKLEGTEEERGKKTIKQLGEKEETERRTRARMQERKERE

SEQ ID NO: 945600 - protein, 81 aa, Homo sapiens
RVADSCARMSYQLTDVVASQGQEIKIILLITEKAVSSKCKRASGCDNGCLHSHVLGMLRHDIDGDSVEVQFAKSRYPFTGL

SEQ ID NO: 945601 - protein, 95 aa, Homo sapiens
QYRYLYMHRGLHHYFRHLTFLNSITHLGGYLTVDGYLYMRHHDAFSTHILISLHILIIADLSTMTTDFPIALLTQTMSLRHMTATHPLLIHEYYF

SEQ ID NO: 945602 - protein, 129 aa, Homo sapiens
MTRPSLYRDYQLDFSSSHDTQMSTQTIITSLLIAHPHADPIPNTSSTQFITTHPRLTLYKIPSIQCITSHSHTTNPQSTPNQPAPYIRTTLHTQYHTYPPLQQTPTRTRQSKRLKPSYSTNIYTHPTNL

SEQ ID NO: 945603 - protein, 96 aa, Homo sapiens
RGVSGEARPCQHPDLRLPASRTVREYMVFGPCTCYGHFFLSFFLSFFLRQSLALSPRLECSGAILAHCNLRLPGSSDSSASASRELGLQAPVTTPG

SEQ ID NO: 945604 - protein, 190 aa, Homo sapiens
MIAYTYYEKAHTKGSIHDLSKKAFVQGYPINYVISSDLPKTFLSTLPLENSNYVTNWEGTGLTTDLSRLHRLEVPLLNTCVLLALKYRSPELTHRLIDNNRCQLVQALLISNELDQYHTLLQSVHIYECAYTICDGVYCSTCYECTGFHGLHDDIGSTLLTMCVIRRLIFHDPLIITLGMDTSSELTLYR

SEQ ID NO: 945605 - protein, 40 aa, Homo sapiens
ASGGVLVPVFLLRFWAGLPPLNDPFVSYFSKVFKSFGPLR

SEQ ID NO: 945606 - protein, 150 aa, Homo sapiens
  misc_feature (7)..(7): Xaa can be any naturally occurring amino acid
  misc_feature (130)..(130): Xaa can be any naturally occurring amino acid
NRPPPTXTRTPDEKQPPGQETALGGANPPKSRDPTAKAHTTPKPKPNDHHGARKATSNPKPPTNDNRGHAREAQTQGQSRTKGAGTKGGHQNHQGPEAQTKKPTQQATNNHKQGNQTPPPKETREGKQTXRQRQPPPQGGAGPKGTAKQR

SEQ ID NO: 945607 - protein, 75 aa, Homo sapiens
STIYASGQAQPLSQPETLVMPWGHINASVMNTRPCYKYIVSDTDQGNEIFNALKLNYRLHSLDRVVVNYEHLWLS

SEQ ID NO: 945608 - protein, 201 aa, Homo sapiens
LFRTGFADTTQEWRKLPLTAKMGKGPTHINMAIVGHRDSVMYTITGHLSYKCCVIDKGTIEKLDNEAAEMGKGYFKYARVLDKLKAERERGITIDMSLRKFETSKYYVTIIDALDYRDFIKNMITGTYQADCAVLIVAAESGEFEAGISKNGRTREHALLANTLCVKQLIDGVNKMDSTEPPYSQRSIDEIVTEVSTYIKV

SEQ ID NO: 945609 - protein, 35 aa, Homo sapiens
GGGGPESPNRDPNGGPVLRLDGKPPTWEERRGEAK

SEQ ID NO: 945610 - protein, 215 aa, Homo sapiens
AGGGQRGTFFLAQVLKRGLEEITGHGGLRGYLRFFFRTNDAKVGTLVAEDKYGNKYYEDNKQFFGRHRWVVYTTEMNGTNTFWDVDGSMVPPECHRWLHSMTDDPPTTKPLTARKFIRTNHKFNVTGTPEQYGPYSTTRKKIQGRSPIYHLTGKTMKTRGNMPNFERFLELLFSWLPIPYQSTLLIVGGLSSNRFAPPSVRVLGLARRLQGPNWA

SEQ ID NO: 945611 - protein, 78 aa, Homo sapiens
  misc_feature (15)..(15): Xaa can be any naturally occurring amino acid
  misc_feature (46)..(46): Xaa can be any naturally occurring amino acid
  misc_feature (49)..(49): Xaa can be any naturally occurring amino acid
SFVEWGGDPAHLTVXKLLALRSKTSVLYGEILARQELFLIMAWLLXRLXLQVPDEGQLPYLESILKVAFLSASFKGMI

SEQ ID NO: 945612 - protein, 195 aa, Homo sapiens
ATFFCVVSNLPELDMQAWASPINQFLVDASSNNGRQSPPKTTPDFMTNTGTCIPWRTPYCYVHGQKKHQRRNRAETCPLAAEYSKRNGGTSNQPTWRNNELVKKQLTIDAQLKPVAPIKTMAIIDKIDKFRTLSGNSVVTRKALVAALLTSAHDCRAVQASGAIKRSPGPKLPKSGAVYKLRGRAYHIRGRGLGA

SEQ ID NO: 945613 - protein, 126 aa, Homo sapiens
GSPSVNEPDLDTRPPPGCKRPDRTGTCRPASMAVEQWRTKSGTRALLQDQLCPLIIKAVVQIHQTGMKTVVLCTKKEIKNLKKMTVVQLQENRGKIRMMTMMMMMGFLDRPFLQDSKSRMILLQGP

SEQ ID NO: 945614 - protein, 146 aa, Homo sapiens
MGLELACDRSMRTSWSEDSHDFAGREGSASDRASDKDFIPDLREESSNIHISTKLSVLQGDILYEPFLKLSLARRLGRNAHRLNDCCLCSPHRESILIANRKGTHLLLEACIQASVPVCIYTSDIDVARPNCYKGTMQYGHEQESL

SEQ ID NO: 945615 - protein, 75 aa, Homo sapiens
VALAEAGLLTLHFPTLLKRANRGVRILVMSGDYICAERHPMRRTTHSQLSKTTPADADRGGYNLQEITLTSDKLQ

SEQ ID NO: 945616 - protein, 125 aa, Homo sapiens
  misc_feature (16)..(16): Xaa can be any naturally occurring amino acid
  misc_feature (22)..(22): Xaa can be any naturally occurring amino acid
RRRGEKNDQGERGQSXTIGNDXRCVGQGTRGGRKNGNKRKGKKYRMKILGEKRRGENRGRRRKTKRGRKKRKKKKEERKERGKRKKEKKKGRKRRRKEGKRTKREKKEKRRREKKKKREKGKGKK

SEQ ID NO: 945617 - protein, 70 aa, Homo sapiens
VSSCPTPRDCASFFSPGIWMGLLTSLFMLFIFTYGLHMILSLKTMDRFDDHKGPDYFFDPDCVTLCQWGG

SEQ ID NO: 945618 - protein, 260 aa, Homo sapiens
GSLDLESWGGAFNNLIYTLFWVTLESDLLSSIFCFLASVSCYFGLATMGWSCLVTRSGGVGGHRIVRLLVEEKELKEIRALDMAFRPELREEFSKLQNRTKLTVLEGDILDEPFLIRACQDVSGRHPHRLYHEMSLGVTHRGAIMNVNVKGTQLLLEACVQARVPVFIYTRSIEVAGPNSLQEIIQNGHGEEPLENTWPTPYPDSKSLAEKAVLAGMGWDLKMGTPGHLGVKTPFFFGGGGHSFFANKRSPPHTGPLQGL

SEQ ID NO: 945619 - protein, 108 aa, Homo sapiens
  misc_feature (2)..(2): Xaa can be any naturally occurring amino acid
MXRTLGSPEAPLGRIMLVAAITHRINYCKYHPCYFGKVAMNHYHLKRNQSLCPTVNLDKWRTLVREHTQLNAAKNNTGADPIIDVVRSDYYKALCKEKLPKQPVIAKG

SEQ ID NO: 945620 - protein, 64 aa, Homo sapiens
METVGGGIFKYRSYEKNLPFVANLYPQEIINRFKGARPKWVFQKKSEFSQFKKLGAHWAIIYQL

SEQ ID NO: 945621 - protein, 74 aa, Homo sapiens
  misc_feature (5)..(5): Xaa can be any naturally occurring amino acid
  misc_feature (16)..(16): Xaa can be any naturally occurring amino acid
ITYSXTVGGGGCFSPXTYMTSRYTMYLAGTQSTKTQTFRKTYPIIYEIVEGYSSERLNPLAREDGPLKILSLDK

SEQ ID NO: 945622 - protein, 104 aa, Homo sapiens
MQRRAWYEDATFRVSEKKLITCYDHALIIIVLICFLVLYAIFLTLTTKLTNTIISDAQRDRHRLNILPTIILELIALPSLRMLYITDEANDPSLTIKSMGHQWD

SEQ ID NO: 945623 - protein, 108 aa, Homo sapiens
  misc_feature (72)..(72): Xaa can be any naturally occurring amino acid
  misc_feature (84)..(85): Xaa can be any naturally occurring amino acid
RSILPKKGAAYGSNQKYHPLHTFYQGIPANPLSPFNILSAVIDSPTTSLSNLSKRFYWWDAPIPPHPIFHIXSFTSLGYLPFTXXSIIPKKNINWCVHDKVRQLPIFL

SEQ ID NO: 945624 - protein, 73 aa, Homo sapiens
RAFTLGESQSLSCLCFLECPTSCTIDTICWQTDGYARITAYGKAKQDYLQHLLHKDWAVHHDETGSPTRYVML

SEQ ID NO: 945625 - protein, 102 aa, Homo sapiens
MGAQIPFPKRDAPALIQSPSGISPEIPILDRSLLSKKRDPHRTHLLRDHKFYHVWGGQKKTSNFKKRNLDRLQTEHRKIIRQLILSGLSTSCLNLSQENSHL

SEQ ID NO: 945626 - protein, 157 aa, Homo sapiens
  misc_feature (129)..(129): Xaa can be any naturally occurring amino acid
MVRAAAAGRISRSIPGHVLRYLGYANEVGEAFRSLVPAAVVWLSYGVASSYVLRRIAIDIGKKAGEEPSPEAGRIARVTVAEVDTFVWHALAYVDIPGYTIKRTCAASIYVLGTATRWPLDDRKWTTTXLGLVTIPIIIHPIDRSVDLLLDSRLGKL

SEQ ID NO: 945627 - protein, 128 aa, Homo sapiens
MQEIEELPNAFDISNLNRSHGRMTQPYLTGYICLPFFTKTATHILEMGRLSKNGLSKSWIPPPPAPMISLHARNPSQCQILLNKSQVMAISIHNLYTLSRPLNSYLSKNPEIASPRISTFFILNNGVF

SEQ ID NO: 945628 - protein, 175 aa, Homo sapiens
MRIFAPNHVDGKSRFWHYVCQIKKMKKFSGEIAYWGQALEKSPLRVKNSGIWLGYDSRSGTHNMYREDRDLSTAGDGTQSYRDMGARHRDGSHCNRNMKVEENADSKCRRAGGKQLHDFEAKVRLPHWELGPAVQGTLEEQRGPTPFVRVKGPSNGEGPKKAKEGPLVEETGRRG

SEQ ID NO: 945629 - protein, 170 aa, Homo sapiens
  misc_feature (131)..(131): Xaa can be any naturally occurring amino acid
GDIDLNDPGQQRTVYATPCCALRYNQVMLFSILPKRAKWWLRTLDMHDGLYLPRYTSSRSDGSDDSSSAALRKPSYREQGLLQHLQTLIETCIASLQNNSKLTVLERDTHVLPYLRRGCQDVYVVIHTACXTDGSGGTYSEAMLNVTCKCTHILVKGPCTRQGFNFMSTS

SEQ ID NO: 945630 - protein, 68 aa, Homo sapiens
PSNEWAGSEREPITAVITDLLPVMMTRDGGCEDTANGQGLWIHVKKNRWPSGSWAQPEYQPHTVILQH

SEQ ID NO: 945631 - protein, 70 aa, Homo sapiens
AGEQPTVEPQKIMPPSKPHPPVVGKVTHHSIELYWDLEKKAKRQGPQEQWFRFSIEEEDPKMHTYGIIYT

SEQ ID NO: 945632 - protein, 85 aa, Homo sapiens
HEDIRGVGRIQNAFPNLRYSNTHTDSFRLFNSIPILDGSQLSTLRDPSKTPRLQITNINTFELNKRKPPILTESVQFDYSLNIET

SEQ ID NO: 945633 - protein, 71 aa, Homo sapiens
TDDIYFDGDMAVVLYLDEAWWRRLCMDDDVDDSIHKLKEKATTRNGPGFASDELSQAQMRLDYHSIVALWR

SEQ ID NO: 945634 - protein, 33 aa, Homo sapiens
MRIFFFPTGRVYNPKAKFVWENLQDFNRRGGPP

SEQ ID NO: 945635 - protein, 222 aa, Homo sapiens
GVPKVDHPILAQTINISLLGEHYIALITTQSPNITEHLTTYIDHLKVTQTNYVKINDCLNVLTKNNDLQELLHPLTSTTNNPVNPLKHAHALNRCMSRVPCNDYSWGPTYRQQTNTDFLTHYTLNCSQLYGEHSMQHLLSNKRSTSIQFALTLNHATLLRRHDTYRKRRPGTPLERGFLQMLRFYWIKRHLRSQSSLKDNSPPNSRNIISAFTQVFSRATLD

SEQ ID NO: 945636 - protein, 101 aa, Homo sapiens
TALGVGGGSVPSMARRLLLINGAKMPILGLGTWKSRTMQVIEAVQVCIDVEITHINCLHVDHNETEVGVRIQDMIREPVVKLDKLFIVSELWCTYHEKGLG

SEQ ID NO: 945637 - protein, 70 aa, Homo sapiens
DLTGTACSKAQIHLPKTDIMDETLKLPLTYSSTAKHGDHPELPGSRCSRAGPVSHKNMRMICTGEEMMDM

SEQ ID NO: 945638 - protein, 70 aa, Homo sapiens
SPVLLPTPRRVTARPRLPEIQMCKPFSETLAKLELIGEEKAIVYNDITIKATATPCFVFWAEDSLKTSCS

SEQ ID NO: 945639 - protein, 182 aa, Homo sapiens
MAEKPKLTTSCTGQNGVHPVAPGCSWSIFEEKFIKSADEPVKLTNDGYLMFQHVPMVEIDGMKLVHTRDILNYIARRYNLYGKDIKDRALLDLSIECIAHLGEMILLLPVCAPDEKDAKLALIKEKIKNRYLPASEKASKSHGQDYLVGNKMSLADIIWWNFYTTSRSFAPEVSPAVLMLRA

SEQ ID NO: 945640 - protein, 237 aa, Homo sapiens
  misc_feature (219)..(219): Xaa can be any naturally occurring amino acid
PTDSKGRPQQAPTLRSREGPHAQREPARDRQEQRIPITVGGQRPAERVSDRTPPGRRQAPTPRRDSREKKGNHSPKPSRSRDARRAGKEGGGGPLKPRRSRPGRGGRAGDGRSAGGTHKPDGEAAGPAKEPRTTQPTEEPSAGGAPRGTGHGRHARRPLNGGSRAEAPAGGAGAEDAAKDHREGREGDHGTTRYRPPPPAKQGRAAGDSGEPTSQGRRXGKGARQPHPPTTPPSHPP

SEQ ID NO: 945641 - protein, 260 aa, Homo sapiens
  misc_feature (204)..(204): Xaa can be any naturally occurring amino acid
VSSLTRGTRPLATTGIRTEHNQGLFSSLRPPSDVLSASNLRDHLIGHVLLMGTVNTAYVVRLFLTTNHELHIRQNHSTVVEAARNSLANLDLQDSYNNLSLGLYLDKNDVALEGSKPLIPEIGEEKQEAYERLIETQTRVGGETLCMYFKKPTLDEWGKTPDAMKGGMGRGEKANPGTWEYLYPGILPNGTPISGNFMETYFLXEEGEVKKKMGETLPNLNRLVVPREGLGKFFYKGPIFNLIKVSLPNYFKGPLKKKGF

SEQ ID NO: 945642 - protein, 186 aa, Homo sapiens
LRGHHQRTETILIWTKRRVGTPLMERNGKGPRQSEGTRQSGHYGRGGAGRRWKHADVGRCRDHPGPRITPYGPGPESRIHLWRNWLTGLERHERIEAPWAREDEMRGYAEKHIDYGKLGDTNERAMRKADIWLTEKDEIPKLDQARAPRDKDQTGGYTRMLKSPNRRLERAKRAENENKGKRLPPR

SEQ ID NO: 945643 - protein, 236 aa, Homo sapiens
  misc_feature (14)..(14): Xaa can be any naturally occurring amino acid
  misc_feature (19)..(19): Xaa can be any naturally occurring amino acid
  misc_feature (49)..(49): Xaa can be any naturally occurring amino acid
  misc_feature (120)..(120): Xaa can be any naturally occurring amino acid
  misc_feature (133)..(133): Xaa can be any naturally occurring amino acid
  misc_feature (138)..(138): Xaa can be any naturally occurring amino acid
  misc_feature (156)..(156): Xaa can be any naturally occurring amino acid
  misc_feature (163)..(163): Xaa can be any naturally occurring amino acid
  misc_feature (185)..(185): Xaa can be any naturally occurring amino acid
  misc_feature (201)..(201): Xaa can be any naturally occurring amino acid
  misc_feature (222)..(222): Xaa can be any naturally occurring amino acid
  misc_feature (228)..(228): Xaa can be any naturally occurring amino acid
  misc_feature (234)..(234): Xaa can be any naturally occurring amino acid
TYVKGVKLYIKLIXLWAHXTKPSMRFLPPHFRPICEAYSVIQSTNDLGXKRNTKFSLGGGPPHPFSTPPHIGFGNNNRPDDEEKKRPHHRRKFDNEPRSLGVEESHYWPLDNRGHHASLXGYISLLSRCWLEXNIPTXREMRPLEQKNVLLCRVEXTRRRPAXLARRWDLSGYSLSNVPETLPQXRAQPELRSKRHLKSRXVSRRAINRRIISHGARNSGYXSRWVFXRRAEAXTL

SEQ ID NO: 945644 - protein, 97 aa, Homo sapiens
STECEAGWGPLNVGKTLLQKRLQEVSSRRGKGVLREPSTPRPTFAMDAYDPTHFSVSCVQILIYFMDNNLKTHATLKLFNKTEPTLLHSHAGDEQLN

SEQ ID NO: 945645 - protein, 76 aa, Homo sapiens
MDKLAAYERIDADTGAQWEQGTAYGYKVDADCRTLATEKLTQTLECNHGNTTCAVPYGGEFWHHRDLRLRPRSSTI

SEQ ID NO: 945646 - protein, 207 aa, Homo sapiens
AKRVAACGAALHDQSELVDKLKKCNMNTQLPTLRAAECVLVHMTPEQAANLQKWAANTSGRAMHINYEQVNMVDRLAAYDDRKLRRTPVRPRGRDDLQAIRVTPRTLPDKWAGYMIGRKHDGPLQQDTSSCTEHDLMTWLGTKGRNELGLTEIPINRTKAYNEPERVPLGLPEENCMLFSSARPRGDVYTTLLSYSGPSARPKVLFR

SEQ ID NO: 945647 - protein, 124 aa, Homo sapiens
  misc_feature (9)..(9): Xaa can be any naturally occurring amino acid
MMAGAPHLXPEGEGASNKPHHHCMKTLLCYTVQMLAMDCKTKNSPPYSKSTNNCKAISQLNVLDRGKHPSMKKFEMTDDWIINENDNRACRQMEIRAYVTKTVEIIDGNISSQGLFYGNMTLNF

SEQ ID NO: 945648 - protein, 140 aa, Homo sapiens
YLLTVHSAWLILTSTVHERMTRKCHLAPMVDPPHIGGPRHPSYGNSISRTRGLLCTVRAHNTVSVSKVNCILHLVRHRAVPIWLIVGREKGLVALFDHIDIILNHANHSKPLIKLAHTRLHLWKRECNNNTGLPNDNNRD

SEQ ID NO: 945649 - protein, 104 aa, Homo sapiens
MRHTDKRDVHTSHDLNPWSYSFNHIALGVPVTDHITAGDLLMHLIGSASLAISTINLHSTIMILAIRILLAILEIADALIQAYGYTLLVSLYLHDNTSRDNNRI

SEQ ID NO: 945650 - protein, 56 aa, Homo sapiens
MGETRHEIKVERINSGRQSAFRFGGDLVIYRMVDLATPIILMHLACKPMGVILGFQ

SEQ ID NO: 945651 - protein, 126 aa, Homo sapiens
MGAAGNKPELYEEEKLFKNAREREKYDTMPDLYAEDKTMLALKKDYIKDLSLPQLQVQGSRISSIDEFCRMISLDCPLAMERIREDLPITIKDYKGNLNRCIADVVSLFITVMDKLRLEIRAMDEI

SEQ ID NO: 945652 - protein, 239 aa, Homo sapiens
  misc_feature (2)..(2): Xaa can be any naturally occurring amino acid
EXPGHAYSVTGAEEVESNGSLQKLIRIRNPWGEVEWTGRWNDNCPSWNTIDPEERERLTRRHEDGEFWMCFSDFLRHYSRLEICNLTPDTLTSDTYKKWKLTPNTFWMNPQYLIKLEEDDEDEEDAESVVNLTRVLIQKHQTRHRKMGDDMHTIGYGIYEVPEELSAQTNIELSCNLFLTNLARERSDTFMKLREVLNQYKLPPVEHILVPLIFEPIMDGDFRIRAFLERKLTDTLTKM

SEQ ID NO: 945653 - protein, 128 aa, Homo sapiens
RHLVQGRMTHLRWVQAQDRYGNAYRVFKGETEYCDIEECCSVINGYYNLRDLPQLTIEYKDPSKRITSSRRALKTTPEKYVATHRHSIGAPGMLNDTDVGAALSTVKGLRYVAGLNSQCESTIKQMHN

SEQ ID NO: 945654 - protein, 184 aa, Homo sapiens
MTRVSCKAHKGNFVMQTQVSTAELIKQKKEYQSLKTVFAKIRQAEKIREKRMKRNEQNLKELWNYVKDQTYDWLDYLKETRRMEPRWENTLQDIIQKNFPNLARQANIQIQEIQRTPVRYSTRRSTLKTHSHQILQDQNEGKNVKGRQRQRAGHLQREAHLTKSGPLSRNPTSQETSGSNGQHS

SEQ ID NO: 945655 - protein, 118 aa, Homo sapiens
SNSNSMSSYTSQTLDQVTGSVSNLSRLNHVAIALPDVEKAAAFYKNILWATFVKRSLLLNMEYHDGYVNLGNTKMELLHPLALDSAIAGSLHKNSAGGMHHICIEVDYINAAEMDLII

SEQ ID NO: 945656 - protein, 76 aa, Homo sapiens
  misc_feature (18)..(18): Xaa can be any naturally occurring amino acid
  misc_feature (21)..(21): Xaa can be any naturally occurring amino acid
LCDDVCVICISPTRPLDXRWXVPKRCAGVYQWILQTGRIQHEVKFNYYTQLIQNLTNGTSYPKDNNAILFYNPYQQ

SEQ ID NO: 945657 - protein, 80 aa, Homo sapiens
FPRDIFLHERVICLGGAISRVSSLDKEEWVKRTVARFQKVEVKGLIPRPLKTVITVITAEPPGLRDPIYALRSVAPRSEV

SEQ ID NO: 945658 - protein, 136 aa, Homo sapiens
SGREGGVRLNFVGLRGDFSESLSLNFQPQSTAALVPDGHGPGLMTVPSRFLTLLAHLVVVITLFWSRDSNIEACLPLTFTPEEYDKQDIHPIPLCRLVAALSVTPGPLLLEELAGFLSGSLHVQQGPRAHFRWGSL

SEQ ID NO: 945659 - protein, 104 aa, Homo sapiens
  misc_feature (5)..(5): Xaa can be any naturally occurring amino acid
VAHPXEKVDVKNDMEYIATAALLVPSSTPKVQCMASRHRRNQNKSLVKLLLNHYCQMYLWISLVTNCVIGCLEICSQSKPEGGKSSLREIKKEEYVVIQTLGLY

SEQ ID NO: 945660 - protein, 70 aa, Homo sapiens
MRANLARSGHLSLFGPLKSIGGSSHRLDGGTLRDSTLTPPDAMLFSRLAYHARTRTAPHLFQTTARFGHN

SEQ ID NO: 945661 - protein, 188 aa, Homo sapiens
MTPWGRATYTLLLTEKLRKFRFRKETDNAAIIMKGDKDRQMVALEEEFQNSFPRGAQNGVAGQTAQVRGLQLQVPCMTMAECPTLWVIILSRPVGCKPEQQMIDGGEVKQAGADQKATKWFEIRPLKTYMRRGSRKAPFFRNLWLGNRILEAGPSGDLGPWNPRNRATKKFKCRTRRSLAPPPGAHLI

SEQ ID NO: 945662 - protein, 274 aa, Homo sapiens
RGHNVSADNTNSNLYFISPTSAPLRGGVLRADGVRPSQNKIFVAQRDSEPHAQRTDRIQHHDITRRRGTKPRIPPSPDGRERRKHFPQRTSHTVQTPAKPARSSPTNRLKGAPPRQLRPQQRGQECTRGEREQTQHETRRIARLVQTYDTRRLQRQREAHTRPRYTPWRQSTGLRPQPRNRLFAHLGNKHSRERGNNKSATQTHGLTRTPTQLQKAGPSTTSAITPKETDTNGTRHARRARRANAPMRDSNTYEQAREPRAGPTEMAKLGRQTA

SEQ ID NO: 945663 - protein, 225 aa, Homo sapiens
GREAPSNIFHPGTAEQAERDPKTVQDPTPRDAIFFRQEMQEKTGNQLADQINGRNEEPSRRNDDPEENIGDLMTEAGEEEPGSANKIPATQNSRRPLISDTGRSDLSKAAEDRKGSEQPTTVKKQANTKKNAPSEPSKQPRAKRQAAPSRINTVGHTGKNPAKGGNIINQTLKRLGGGVPNTSKSAPKRNPRILPERDQAPTRKFATQLSPQERVSDPHWRDGCG

SEQ ID NO: 945664 - protein, 99 aa, Homo sapiens
RLVFPLLKKDVAVEVSIRIKDRTYHASRSYAKTSMRGLLSRRVRNHMVGAFELSLACAALYKIRVADQRKKAYADFYRTYDAMKDFKEMRKAGIFHSVE

SEQ ID NO: 945665 - protein, 81 aa, Homo sapiens
  misc_feature (50)..(50): Xaa can be any naturally occurring amino acid
YGRGSSAETFFFDGNLCISLNGFGLCRLCLTGINGAHCRTKIPVDRKWIXNYVMQNGFQAFRGYRSIAHYSGCVIESVKPR

SEQ ID NO: 945666 - protein, 119 aa, Homo sapiens
  misc_feature (86)..(86): Xaa can be any naturally occurring amino acid
  misc_feature (114)..(114): Xaa can be any naturally occurring amino acid
MTTSHGREAATAAVYSAAILEYLTAEVLELARNASNDLTSKRITRTHLELCMRGDEEKDSLIWLQMTAVVTLHTSTRFFLGKKDHXTLSKGCVVPCCTRTLNTITGAPWWRGQXTVITA

SEQ ID NO: 945667 - protein, 149 aa, Homo sapiens
MAGGAFFKLSAFGPRCRGSVALVEAPLLSLSGLEAIQRTPKIRVYSRHPAENGKPNFLNCYVSGFHPSDIEADLLNTGQRIENVQHPHLTFSKDWLYNLLYYTEFTPTEKDEYACRANHVTLSQANIVKRDRAIETSILRVTDPPFGIA

SEQ ID NO: 945668 - protein, 104 aa, Homo sapiens
MAKSLRSKRKRKMRAEKRKKNAPKEASRLKSILKLDGDVLMKDVQEIATVVVPKPKHCQEKMQCEVKDEKMTWKWRLILRETKGLFRPAWTVPNMDEPKGKEKA

SEQ ID NO: 945669 - protein, 140 aa, Homo sapiens
  misc_feature (14)..(14): Xaa can be any naturally occurring amino acid
  misc_feature (21)..(21): Xaa can be any naturally occurring amino acid
NKKGREQSLFPEAXKGTTQPXLFLITYGRHTPSIKMVKQIQSKTDFQKTLNTAFDKLLVINFSSTWNHPCKIINPFFHSIYEKYSNVIFLEENADYCQHITSECEFKCIPTLHFFKNEQKVSEFPIANKENFEATINELI

SEQ ID NO: 945670 - protein, 119 aa, Homo sapiens
  misc_feature (10)..(10): Xaa can be any naturally occurring amino acid
  misc_feature (32)..(33): Xaa can be any naturally occurring amino acid
  misc_feature (36)..(36): Xaa can be any naturally occurring amino acid
KKKASLLIFXRGTENGNTPPIFIKKTEEPPPXXKEXFSLFDKDGEGTITTKELGTEMRTLGQNPTKTELQDMINEAQAHRNGTIDFPETLTMMARKMKDTDSEEQIREPFRPFKKDGNA

SEQ ID NO: 945671 - protein, 150 aa, Homo sapiens
MAGVDAWPQLFLEDDDEHIGGHAIQIIHYLTGHNSVHGLGNAIINSGPREDCTRIGRAGTVRRQAVDVSHLRRVNQTICLVSTGAREDDLRNIKTVAECLPYEHINADTGCWNSYAIKKKDYWTVRPSPTYDFASCCPLNLLPYVAHSAL

SEQ ID NO: 945672 - protein, 230 aa, Homo sapiens
ALMERGISLRHAVFLWHEGARGAAGGSLRLGYHAYPAYVFFASNSHLCEGTSSVKALRRATTLRSQLIWTGVTTPCRRWPMSSTLSASQKALKEKEKAFWSTLSMDDKAEMYPIKFKESSVEMNRGSNEWKTGAGGATFFIGSTALGNMWQNAYGSAPSPVKLLPRAGAQPDPEDAGHAGETHPALTLPAGTTKEPAAHSEMRPALYQPPRLHPQQPTASYRKPVPPPSD

SEQ ID NO: 945673 - protein, 214 aa, Homo sapiens
GRHYRTGAEKALFVSEQLLTGLTRLWEKCRTPPSEYIILKKPDGRTKPIPKKGTAEGFEPADNKGPLRATDGKKKITTVGSSKEANKLQMAHSNLPRANMDGPKKRDKRTKLRRPKQQEQHSSSHLAQQPQQQQQAAPTAATAAQERANIPCLHQETTEWLFFSLRHKAWLLGPPKRGIHTRPRAPRKEKVHRFRAERALHTPGQQNNKAPKTT

SEQ ID NO: 945674 - protein, 244 aa, Homo sapiens
  misc_feature (23)..(23): Xaa can be any naturally occurring amino acid
ELPHPVSYSARGSARRAARWEDXPSSPPTQNFLSARPGAPPPPPSHTTATADPHLTHSPPPPLPPSPNHPPTTQQQLTGPNPHPPPAHANTRATLHTPTQHATPHTPHRDHDPRKPRRPATPPTPNNIHPALTATPTTPQPPTGAPHTHARRTPPLPAHASHPLPHRNPTPTTAPHATDRSPTHTQRYPHPTRSPARTPPHRTPTPTQTPPTIHPPPHTHTPRDPTTQPTPTAHDCHRHKARHP

SEQ ID NO: 945675 - protein, 232 aa, Homo sapiens
GVNIGQALTPPQIFFFSARPPHGPPGRLRRSHMAQPKRIFFDATPESLQENKIPSKKPSDTNRTKLRPPKRPRRQNLQTITQNRQHPLHTRRPILQTHTRNAPTHEPHTNLLPLTHGAAGELLPQFWVLLTLRQAPSRYQCTANPLQNRDDTARISTAQIEHTAFPSAHERNNPTSPQALRRPPSAQSNPRPAPTACCAHGNSRYPRAQPAYARRSYHNHIGRRDLQPSGEC

SEQ ID NO: 945676 - protein, 57 aa, Homo sapiens
PREIGSRELLKTERADHLVEINMHDSWRFKYKGWRRAGTVNDGTVAVRRNEAYLEFG

SEQ ID NO: 945677 - protein, 270 aa, Homo sapiens
  misc_feature (2)..(2): Xaa can be any naturally occurring amino acid
  misc_feature (4)..(5): Xaa can be any naturally occurring amino acid
  misc_feature (256)..(256): Xaa can be any naturally occurring amino acid
GXTXXGGQPNRKRARPTGHKGKRGSRKTSPDNKQPGRDKERARQQTLTRSKRDANGFDSGNAPRTHNTERAPETRHPDQGALDSMHHQPNNKETPRIENQTHGGRPSREERNSTAKTPKKTNAQRQEATEIQTGGKRNGGAKPQKSAHRRNRPMTQRAAHPRTVNRAGPQKQDGTSKGGPEKRTHTAPKRAALTRKANALKKTTREQRPGEKTPQRDPKPPNKGNARGERHTTQEGHRGASGQQHTSSNGEKRGDXEQRRRDTTQDTHHR

SEQ ID NO: 945678 - protein, 64 aa, Homo sapiens
MHWTIIFIGVNLTLFAHYFIGLSRMPRRYSDYHDAIHQMKQTIMCRRTDLCNRSMFHPFHELGM

SEQ ID NO: 945679 - protein, 73 aa, Homo sapiens
  misc_feature (9)..(12): Xaa can be any naturally occurring amino acid
  misc_feature (18)..(19): Xaa can be any naturally occurring amino acid
  misc_feature (21)..(21): Xaa can be any naturally occurring amino acid
  misc_feature (26)..(26): Xaa can be any naturally occurring amino acid
SAINARSNXXXXSVSFLXXEXEYRGXGGRFIENSFTPYNFNRPPRIANKNQQTASIHQYHKTKTEKKSNLQHT

SEQ ID NO: 945680 - protein, 370 aa, Homo sapiens
  misc_feature (11)..(11): Xaa can be any naturally occurring amino acid
  misc_feature (90)..(90): Xaa can be any naturally occurring amino acid
  misc_feature (134)..(134): Xaa can be any naturally occurring amino acid
  misc_feature (155)..(155): Xaa can be any naturally occurring amino acid
  misc_feature (222)..(222): Xaa can be any naturally occurring amino acid
  misc_feature (233)..(233): Xaa can be any naturally occurring amino acid
  misc_feature (237)..(237): Xaa can be any naturally occurring amino acid
  misc_feature (298)..(298): Xaa can be any naturally occurring amino acid
  misc_feature (315)..(315): Xaa can be any naturally occurring amino acid
SVQFLSCLSIXGTGQVSSQARTSKVFPVSSMRKCRVRLSFFQAGTSSRQHKLGTGPSHQHSAVHNTRGTMSRTAQFHTQQHSKPWLAAQXHTISQAVGLVLLEIAHPSSGAGIHQSGPPHARATFQGKEPLLQXYLATSGVHKRKQNTRRYIQEXHGRSNGKGQIKQVASKAKGPFFIATKCEANAHRRTHALVARALWHKVFTTTPRKICDWQQTALDTWXQQFTQYFSTLXMEFXQFIQRIRHKEDNTTHQTTQTHWYGPALRAPRSELIEARRRAYMHCGPPNSKPHMCALSPHXRSRNYTYQGRCITTVRXCGNSVGNHSNMHVAIPICSGGIAKAPRMSSQMCPHVCEYAYVYTGNGSHFTKRRN

SEQ ID NO: 945681 - protein, 66 aa, Homo sapiens
SAIMAGELADSVVKPGWRLGWGVSSYYIRCRTPQQTFYYSTTLSLIPIIHKPKTDKHYQATNEFTP

SEQ ID NO: 945682 - protein, 135 aa, Homo sapiens
MPRSHQDIATSMPSIVSDRIKTLVDTPHCTDAMKTPIMLSRMLANSDLVKVFTVGGLTGIVLANSELDIGLHDTYYVVAHFHYVLSIGAVFAIIGGFIHWFTLFSGYTLDQTYAHFFGLSGMPRRYSGYPDAYTT

SEQ ID NO: 945683 - protein, 172 aa, Homo sapiens
LTPEIFAFAKGTTQTVGEEGGRVIEQSLHRTASLGAQLILNKLATSRSSTVIQCYNWVYPDKLLLGKRRETGLSSVSADVLMKTGHCRGVLTPPKSAYTRSRVPHLRNLDLNRLQLLTSKTKGHPLLLNMVRLNTGYLAPARLQRLHKGTPRSIAEVRYMTIAKADVLMLGA

SEQ ID NO: 945684 - protein, 123 aa, Homo sapiens
  misc_feature (24)..(24): Xaa can be any naturally occurring amino acid
MSARMLLRALAGSRSLSFAWGFQXTPKIQVYSRIQQRMEVKFPELLWLGYPSDIEVLLRMERELKSGHSDFLQQGWLSIFDYTDTPTGDRHVAAYGVEDADLIGEFNSVAAFKLNAYHLPYAT

SEQ ID NO: 945685 - protein, 153 aa, Homo sapiens
SPTPTFSVKLEVEIIGTLFFLLVDGPSKSLGRGPEYLGGSYVGVVGSVISRFLEEYLSSTPERLKLLDAYLLDILLTGALQFGYCLLVGTLPFNSFLLGLIYCVGSFILTGCLRIQIIPHNKSDFQGIFPERGFGDFIFASTMLDLVVMNFVG

SEQ ID NO: 945686 - protein, 113 aa, Homo sapiens
VFRHYGPGQILTNSLFPHFPHPTTHKERDLCKTFKTPPYPPKTSQIISQKKNFILTKLPKPPKKPPQFLSILLNRTIRRPKPHHPFITTKPKTNLKNSPIHPPQKIQFQINTL

SEQ ID NO: 945687 - protein, 112 aa, Homo sapiens
FFTYDSSDKLGRGLTWPALLHLLAWRLFSVLQRFRLTHVIQQKMDSQNSRIAMRLGFIHPTLKMTYWRMDREMKKRCIQTCLSARTGLSISCTTLQLPPLKLSGIETCKQHY

SEQ ID NO: 945688 - protein, 242 aa, Homo sapiens
SSKRDRPKMEVELPLSDFRTEARLAKGISMHRFHMRRKIMSCTYYLNHAETEVQGAIHAHPTQDAMTVQVVRGTVEGQQYGDVVPGLHGKKYVVYIERFARGNGGLSGTTGPWVGIVYPDAEVGSLTKAVILWTRRPPETDPRNGRVLNLAKVGSWTKGEYEERKPIEKDAGSKGLSLIYRCFDLHLEAIELRKHNHNTQQTMSADSARSTLNYMNACHGVLYQIEGNRGTTLSPKDTHYWL

SEQ ID NO: 945689 - protein, 66 aa, Homo sapiens
  misc_feature (66)..(66): Xaa can be any naturally occurring amino acid
SVLVFKGSIVLGGLASSIVVSQLAVCPAQRGDGTHASDDSLLDLQTSVGTLRDLETTDALTSSHHX

SEQ ID NO: 945690 - protein, 70 aa, Homo sapiens
DQSLEDEECSGQSSEMDNDQLRTSSKLILFNYKRAAQELNVDHFMVVRHLKQIEKVKKLNKWVPHELSEK

SEQ ID NO: 945691 - protein, 55 aa, Homo sapiens
  misc_feature (8)..(8): Xaa can be any naturally occurring amino acid
RALGAAPXEEAVPPVSAGPGEKPSRCLWEACCLEKEQGALKVWWHSVGLELNGGM

SEQ ID NO: 945692 - protein, 96 aa, Homo sapiens
MDHDGTPENEGEETAQSVSHWCPLGISKFRGILKLGFHHGTTAIHTTETVYKSIEDNCLKLAEPRFRRLNYRDPVQTVVSHNPWSPEEGTLDLELW

SEQ ID NO: 945693 - protein, 193 aa, Homo sapiens
  misc_feature (138)..(138): Xaa can be any naturally occurring amino acid
  misc_feature (145)..(145): Xaa can be any naturally occurring amino acid
MFVATLCQAGLFGTIFPTACAHFMSLCHILVILEVFQPCSLLHLYGDLWSVIFEVTLVTVLGHHDPHPYKMVNLIDKCCVCCDFSTNWLAFLTLSLSPGLSYSVRHSEENNLSCRIRHELLQSSPARVMVVGRGLVRXRSLGALXARCARRGLGPALLEFFAHRFAEGPGPVTMAPIEVEVLACPDRQLHCPG

SEQ ID NO: 945694 - protein, 136 aa, Homo sapiens
  misc_feature (73)..(73): Xaa can be any naturally occurring amino acid
  misc_feature (100)..(100): Xaa can be any naturally occurring amino acid
EREREREREREREREREREREREREREREREREREREREREREREREREEKPTPDESGHDPTPPPAGPTTKNXPQTQTPPQHPSHTRAHTHPNQEPHKQXTRPKPKRHPTTNQHTSPKPAPRAKPKGQTEPEKGPR

SEQ ID NO: 945695 - protein, 125 aa, Homo sapiens
  misc_feature (111)..(111): Xaa can be any naturally occurring amino acid
STCVLAGMATDFGNMPEQKGVIRAEHGPTCMVLHPLAGSPSKTKLTWLLNINLKGWLPKSIINQILSQTQVDFTNHLHKRLEPTLPLKPGVEDQPAIPNCAQLHWYTHSSXESLLETCKSKISIW

SEQ ID NO: 945696 - protein, 113 aa, Homo sapiens
  misc_feature (38)..(38): Xaa can be any naturally occurring amino acid
HVGPSGEVTPIPHSAKEETEALRELNPCRVTQPWTGLXWNPVSPDTSMGLPLAPPCCGEMRGTHMLTGLNLFYPIKTLETGTQVVCSHQPGCGLKAGCVGLWGGAGLPRSYIP

SEQ ID NO: 945697 - protein, 78 aa, Homo sapiens
  misc_feature (2)..(2): Xaa can be any naturally occurring amino acid
MXIFNITHTESIMNVNVKGTQLLLEAYIQSNIPVFMYTISIKVTNPKSYKEMIQNGPRRRPCMKTHNPLHTRTGKNLL

SEQ ID NO: 945698 - protein, 128 aa, Homo sapiens
MAASVLLLVPGFPLINAVADMFKGHIKYRTGTLGDRQSADTGYLRRRSDGTDDLGATRMGVIEFLLALAQDMILAAIPAVGFAMVFNVPVRALRWCALLGSIGHGSRMILMTSGLNIEWSTFMASMLV

SEQ ID NO: 945699 - protein, 86 aa, Homo sapiens
SGVKNVKQERGGSSGPKFRISLGLPLEAVTNCADNTGAKNLKIISVKGIKGRLNKLPAAGVGNMVMATVKKGKPKLKKKVHPTVVI

SEQ ID NO: 945700 - protein, 71 aa, Homo sapiens
LEDDSRDGQEDMEASLENLQNMGMKDMSVLDETEVANSSAPDFGEDGTDGLLDSFCDSKEYVAAQLRQLPG

SEQ ID NO: 945701 - protein, 127 aa, Homo sapiens
MINLCMIIAHTGLRQSPSGRRFPPPSSTTSCTVTLASIPALSLTLARSLQLTPYVTLIFTFCSPTSPYSPHPPLNPSLLPPSPISPSPSPFSPHWPFFPNPYSATPARLHFNPLDLYFSSFVISQSP

SEQ ID NO: 945702 - protein, 74 aa, Homo sapiens
VNWMCHAEQKDESLFDSLESSMDTGSQQTCLGGGVSNLTSSGLNTIERYSEGLGTGYDDVCIGHGAGMPEMAQH

SEQ ID NO: 945703 - protein, 124 aa, Homo sapiens
  misc_feature (48)..(48): Xaa can be any naturally occurring amino acid
  misc_feature (74)..(74): Xaa can be any naturally occurring amino acid
MVGLLQVIWSEGEGCRSGNQVRRSGRKKPALVGSCRLCAPCLPACPPXDPSSVRITDRRLHCPPGTNEHLEGLXVPGARRPAEGRGGRLVEETSRRLLGGFGAGELCVNNTRKVFWRRVLRPVS

SEQ ID NO: 945704 - protein, 185 aa, Homo sapiens
  misc_feature (66)..(66): Xaa can be any naturally occurring amino acid
  misc_feature (79)..(79): Xaa can be any naturally occurring amino acid
  misc_feature (174)..(174): Xaa can be any naturally occurring amino acid
GGEGHPSPLITFLARCQAKVEQAVDTEPRPKLHQHTRWQNDHHWKLALDHFWNYLHWMHTLSGQVXEELLSSQITQYLXALMDYTIKEFKAYKSELEEQLTPVAEETRSQLSKELQAAQAQLGTDMEDMCSHLVQYHCKVHAMLNHNTLELQIHLTCHLRKLHKQLLHKSHDLXKHLAIYQARAH

SEQ ID NO: 945705 - protein, 117 aa, Homo sapiens
MMTMAALWNRKRGKVGKRLRNRMVAVSVWKEVDMGDFSFCSVLRKILILLICDLTPNPVLSETCAVSTQGEMDEGRYKMCFVKQMLEGSMLLKSHHHSLNLKYPGTQTLRKAAGSFA

SEQ ID NO: 945706 - protein, 78 aa, Homo sapiens
  misc_feature (24)..(25): Xaa can be any naturally occurring amino acid
PTPKAPTPLDPLEDHTPPPMTPSXXPTIKTQKGIVKEQFLLQRLADGAINLYAMEVVLSRASKSLSEGHPTAQHEKML

SEQ ID NO: 945707 - protein, 110 aa, Homo sapiens
  misc_feature (88)..(88): Xaa can be any naturally occurring amino acid
  misc_feature (110)..(110): Xaa can be any naturally occurring amino acid
MGKTQGTIYPESNCSCCEPRKSNMLCASKIQWLERHRINIPIPERRNRKEERSNKFQATPDWIFHLLNIVVQGLVPSGLQDALALELXWVQLQCSSHELEVHSLQVSRLX

SEQ ID NO: 945708 - protein, 164 aa, Homo sapiens
  misc_feature (105)..(105): Xaa can be any naturally occurring amino acid
  misc_feature (108)..(108): Xaa can be any naturally occurring amino acid
  misc_feature (126)..(127): Xaa can be any naturally occurring amino acid
AGRWLHHTGSHAGSSGLLRNRGPDGSTEASQSLNISTQTQDSSEYKITIHFINQNGETLTTKGKMGNSLLNVKVKNNLDIDGFGACKGTLTCSTYHLIFKYHIYXKLXTITDKENDILNLAYRLTXXSQLDYQIYLTKSIDNMTVQMPKTMANTKQSIDIDNTC

SEQ ID NO: 945709 - protein, 330 aa, Homo sapiens
  misc_feature (5)..(5): Xaa can be any naturally occurring amino acid
  misc_feature (18)..(19): Xaa can be any naturally occurring amino acid
  misc_feature (30)..(30): Xaa can be any naturally occurring amino acid
SISSXSSSSSSSSSSSIXXSSSSSSSSSSXSSIIITCITISTTFSCTPLLCSSISLFLSSFFVFPSSLPTLFSISVSSSSSSYFLLLSSLFFLLSFFLSLLYPLLFPSSSFSLFNQSFSHLLLFFLSPLSSLLFSSLLFSSFSPFFSFLFFLFSSSFLPLPFPYLSLFSLFFSSLFSLSFFLLSPISFSFSFSSPFLSLPSSFLLLFSLLFSLLFLSLLLFLSSSLSLSPFLLSFFSSLSLFLSSLSPSFFLSLLLFLFSSLFLSLFSPLLFFFCPLFPFSLSLPSLLVSLFLSLLSLSLFSFSLLFSSSFSLSSLFLSLSFFSLFLLSS

SEQ ID NO: 945710 - protein, 75 aa, Homo sapiens
  misc_feature (3)..(3): Xaa can be any naturally occurring amino acid
  misc_feature (31)..(31): Xaa can be any naturally occurring amino acid
MGXYSSETKLSREQSGSNIGLLAIFAGLQPXLPIPRQTGSGVDLRQTQTALQLRVLTCRMKTNKQKGTWHPKMGE

SEQ ID NO: 945711 - protein, 97 aa, Homo sapiens
PRWGQLASVFAHAPAAASMPQAGPLGDLRACCPQGKFPDPMTVCSPRDGKRTKCGTMPSDLPASQRCQIYGMTHGCCTPILKYIDTYCKLYGKDLTY

SEQ ID NO: 945712 - protein, 153 aa, Homo sapiens
MLVLEIITNETAGALNLLAQQATKMRNVIYQNRLALDYLLAQEEGVCGKFSLTNCCLELDDEGKVIKEITAKIQKLAHIPVQTWKGESPDSLFRGWFLSLGGFKTLVQIVLAILGVCLILPCLLPLIVKNIQTAIEALVDRRTTTRLMALTKY

SEQ ID NO: 945713 - protein, 103 aa, Homo sapiens
QSPTHAAARQTQPVKPYAHTHRLDIGTTFAPCPGALSRHCNHKMLFIELAPGHGRGLPYSEQPTQERSSRERPGQGPCTNTNTSSPAQSSGSRPACAFFRKHS

SEQ ID NO: 945714 - protein, 89 aa, Homo sapiens
RAFLSSPFIFTLLGNHFFSFDMALLPLSSFAFLSFFYRLEVQQWSHFSLAITSKGDCSGATFFIYLLNLRFITLSIFTPDCHTLVSYFP

SEQ ID NO: 945715 - protein, 206 aa, Homo sapiens
LVSMSVRELNRHLRGFTKDEVIRLKQKRRTLKNRGYAQSCRYKRVQQKHHLENEKTQLIQQVEQLKQEVSRLARERDAYKVKCEKLANSGFREAGSTSDSPSSPEFFCESWPVLAPALAPARTPCPTSLVPDYPGPCPCRGPSLDLFDLSERDEGRSGRGRLSGARSGRGPWLRREYLTPSPAPRLEHSRTERRDGCKSLYTLLPG

SEQ ID NO: 945716 - protein, 109 aa, Homo sapiens
PRQKAIILGSFSGSTPNDYDAGYNLESVYAFLRSRLSIPLITGLDFGHEQRTVTLPLGAHAILNNTREGTQLTIERSLSRFTRTRFPGDDHHLVITNRFENVLFFLTNR

SEQ ID NO: 945717 - protein, 101 aa, Homo sapiens
MDRVKAALALAGRPPSQTSLEERVQHLLDAVEHRQLDLLDIIASCHAIALPFGPPHHEPVACQRLIQTLDVPPYCSFRTMLVFQMMLATDFPHPDHTRIQY

SEQ ID NO: 945718 - protein, 146 aa, Homo sapiens
MAEKPKLHYFNARGRMESTRWLLAAAGVEFEEKFMHVPMVEIDGMKLVQTRAILNYIASKYNLYGKDIQERGLIDTYIEGIADSRDLDLLPPVSSPARLRAYLRLIAGWIPLAAPLAESQLSDSRSYPLLAARSGTLPPSAGTPGP

SEQ ID NO: 945719 - protein, 73 aa, Homo sapiens
HPAESLAPHLHLLEHKVFCLNTSFDLMPLWCCPTAAPAAAAAPAKVEAKEELEESDEDMGFGLFELITKKQPT

SEQ ID NO: 945720 - protein, 30 aa, Homo sapiens
MRNVYTIAPCRDKSTFFRRQRCYIGLLRYG

SEQ ID NO: 945721 - protein, 69 aa, Homo sapiens
GGLVTNVDSQGVLCHLEPTLDPPLSQKDDPKVRPKYPLTPTLPIRCEGLTGPRASLCRKPYLFSLHYNS

SEQ ID NO: 945722 - protein, 71 aa, Homo sapiens
  misc_feature (3)..(3): Xaa can be any naturally occurring amino acid
  misc_feature (29)..(30): Xaa can be any naturally occurring amino acid
TSXPIVFAYPSKTHTHDSYTHKIKTHKDXXATRKESQLPSRLISHRLKAKAFGTSLFQNRSVSLHLAFADP

SEQ ID NO: 945723 - protein, 71 aa, Homo sapiens
WPAERERMVFFLDHELHEEEAQWVNYHEDELCGKDEPAFWIFDTLITHTNEVLCPIRENQRPTYSCRHIAK

SEQ ID NO: 945724 - protein, 127 aa, Homo sapiens
LLYGDDNLRTREHAFAQDLLNPSADEERRTRSRNRLAHSPKSYAMDAKCPPRYKTTTVFAMHKRLFRGSVAPLTSASLHEEKQGLQKDAPLGGRCTKSTVSPDEWEPFGINTFWKKKIEHAYAARRN

SEQ ID NO: 945725 - protein, 124 aa, Homo sapiens
MAEIEKFDKSKLKKTETQEKNPLPSKETIEQEKQEANRNEACAANMQLYIPQALPSYITSFSCLTFEDAKELDQRLNDCAAPFTIKTTDHQSPPAFPICYHTAARKERLHVVKKKWVKKMAGHK

SEQ ID NO: 945726 - protein, 228 aa, Homo sapiens
GTTIADHTEEEVEEEEDGQLPNTGLLIYRRRPPSPYYTSRRIQTTFHISIILTLLLGRPDDFLKPALELAYCLGAAPFIVSCLKGEQRLLKLGDSYTFYDDSPAGGELLLSFCLSVFSLLCSKLRAARTASFACFWYCPCFARSEVPIAQTLPVWAFLPGSGLLRRGPPRFLVPGLASFSLHRLGSSVRFFVPMGGLPLPVGARKAPTKRPRPSAPATPQPIYSSNVL

SEQ ID NO: 945727 - protein, 134 aa, Homo sapiens
REHMILIPRNCKFKPEIFGRSTTSWMPRSLCPHPPGGPRSLHFAVVGLIVEECKLLIEASESVHLLKAFKEEKPGPASGSVSLPFVLNFLFFFFLKKENFKKTPIKNKTSLCFCEKKHQKCRNLTFKWDGGRAF

SEQ ID NO: 945728 - protein, 100 aa, Homo sapiens
TSRGWNSLEGSREDREMWESLELPRELLNGFDKNADSDMNNKVQTEVVSYGDEEVVGNWRKGASCYVFAKRLVAFCPCPRNFWNFELERDDLGYLVEKNF

SEQ ID NO: 945729 - protein, 166 aa, Homo sapiens
MHDCWEEQHTVYASIVNVQFSLLIVATHCHSQSQSLCILSPRLHPSASVSFYQPCISPIHSLYPSLVHAGLHVNCNTLDIIYPQATGLFPNFTLAKLKLSAHIPLLLNRIKRNDYLYLLFTSLPIIVRALPSHHGPHALTPVLITLRNNYRSFYAEELHSLTLEEP

SEQ ID NO: 945730 - protein, 140 aa, Homo sapiens
  misc_feature (3)..(3): Xaa can be any naturally occurring amino acid
WPXGKNTMMRKAIRGHLENNPALQKLLPDIRKNVGFVFTKEDLTEIRDMLLANKAPAAARAVAIAPCEDTVPAQNTGLGPEKTYFLQTLGITTKTSRGTIEILSDVQVIKTVDQRCGVKKGSPPPQKGVLRGEKKYPAGC

SEQ ID NO: 945731 - protein, 163 aa, Homo sapiens
LPNQEDVVQLGELDKMLMMQKLLKCSRLVLVIALMLALESSDQGYPTQSARYQWVRCSPDSNCANCLGEKGPLLELLSGESNKIPRVRTDLSPKTRMQDLNRIFPLYEDYSGSGFCSCSGSASGSVSAFLTQMDQDYQLVDESDAFHDNLRCLDRYLTSDRQD

SEQ ID NO: 945732 - protein, 70 aa, Homo sapiens
LLGSMTYSHENVPIKRDIIGAYPEDEKREHDPFRLKHSPNVNLTDVNSLRCFEMTLVFCPDRTVVWCDGC

SEQ ID NO: 945733 - protein, 69 aa, Homo sapiens
  misc_feature (3)..(3): Xaa can be any naturally occurring amino acid
  misc_feature (6)..(6): Xaa can be any naturally occurring amino acid
  misc_feature (9)..(9): Xaa can be any naturally occurring amino acid
  misc_feature (20)..(20): Xaa can be any naturally occurring amino acid
GTXPKXKKXCFNSGSANHTXIQKIQGLLNVNQAKERKSQKFPEIANGALGFKPSRQMKVDLTERNGKKK

SEQ ID NO: 945734 - protein, 113 aa, Homo sapiens
  misc_feature (8)..(8): Xaa can be any naturally occurring amino acid
LPGVRVNXLITLTHYLTPSILRPPPTPTKKHTAVFLQTKTDPLPPNPPRLNLLPPIPLLHLTQPHSHTHLTPHPKPPSPPPTTPPPPLQPHSHINHKHSPHPPPPTPHTHTPT

SEQ ID NO: 945735 - protein, 78 aa, Homo sapiens
LRLKRDAAEAFYIANDEIPYFTCSYGKGYNLTECHGDDVIQLKRQLLPSENLHTIEECKDRVPEPREEKLLQDDQNNC

SEQ ID NO: 945736 - protein, 110 aa, Homo sapiens
RGSDDNFFFSRGPYRSEGEYYRCGYPPPMVRKKGTSTLKERCAANRLETGLRGRDTNFGTEFPPHAEYGRSVDVNGTAQLGESTKPDMEERKVFKRTDSGIWDEKDPNMW

SEQ ID NO: 945737 - protein, 225 aa, Homo sapiens
CVTDLDFKFGGNGNRDPECVPVGLASSALATMLESISIHVRTGCGTDCLSLLLLYCLEHGIQPDGQMPSDRTIGGGDDYLNTCLSATYAVKLVPRAEIGDWVPTVVGEVWTGAYRQLLHTEQISSGWGYAANSYARGHCTMARVINGHELHRIQTLADQSSELNTERFTTDLEKDMILELICLLMERVYAMTAGSTAWSAHLPVSHVCQVARTLRSFLTRKELGY

SEQ ID NO: 945738 - protein, 137 aa, Homo sapiens
MRECISIHVGQAADQIGKPEVSCTDCNTEIQSDGQMPRDKTIGGGDDYFNTYCSETWAGKHVPCAGIVDLEPTGIDEDCTVTYRQLFYAEHLITGREDAAKCYARGHYSIGKESIDLESDRNAKLAEQCTGLQGCLA

SEQ ID NO: 945739 - protein, 119 aa, Homo sapiens
  misc_feature (3)..(3): Xaa can be any naturally occurring amino acid
  misc_feature (29)..(29): Xaa can be any naturally occurring amino acid
  misc_feature (31)..(31): Xaa can be any naturally occurring amino acid
FRXEALNTYRRPTTPPPRIFENTSGPPPXIXADQPELYASYVPAMSYYFYRMMFFEELSKTFFTNLMTEEHPRNYKLQTNRARSSLTIKNRLDTLERLNQRQSLHCKKVNITTAPPNCH

SEQ ID NO: 945740 - protein, 72 aa, Homo sapiens
VANSKRLSCFHAGCPRPPCWGRFPGCWPRPGSQSAFNRNQSSTSREPPNAKPDCLKVVFTFSTTVFLWVSII

SEQ ID NO: 945741 - protein, 151 aa, Homo sapiens
QGASAYFGRMCQMTQGAFEVPEADRIACIHIDAMGSESQGIQQLMQAETRQNVKEIEARKRKNRRLKQAKEEAQAEIEQYRLQREKEFKANEAAALGSRGSCSTEVEKETQEKMTILQTYLRQNRDEVLDNALFFDCDIRAENHENYRING

SEQ ID NO: 945742 - protein, 170 aa, Homo sapiens
  misc_feature (39)..(39): Xaa can be any naturally occurring amino acid
LKTPPPPPNFTPCFTAHKKHRRTPEKKLKSPTTPPHYQXKLLHIPPRQPRLTPIPASNHELHPTTPPQHPQDPQITNPTPPPPPPPTPPSPHSFNITTHTHNDHLPPPRTPNTPTTHHSPHTHAPPQTTRLHNPPPQPAPPSPPHHTKQTTTPTTHTHSTPPTTPHPIPP

SEQ ID NO: 945743 - protein, 133 aa, Homo sapiens
ELEAYTISSAGTARGGSADAPKVADPHQAHRTSWRTDHSICYYIPNHGVFTLYPRHTIPKKNPGTCTKQHYLQTDCHHFLSRPYLPPSLHPPPTPPPSPRLPPPPPSPPPLSPPSPPTHTPLPPLTDPASPIL

SEQ ID NO: 945744 - protein, 137 aa, Homo sapiens
  misc_feature (1)..(1): Xaa can be any naturally occurring amino acid
XTKAFIKKKWITHPPPGEFNEVFNDVRLLLKNDNLLREGAAHAFAQYNLDQFTPVKIEGYEDQALITKHGDLGNGKFLDPKNKICFKFDHLRKEATDPRPCERKNAAETRKTSIETALRAYLKEHYPKGICTGNGKK

SEQ ID NO: 945745 - protein, 145 aa, Homo sapiens
FSKRAHGAYKESYSSTKGEGYAGALKAKKGGSQGVHGHDTKMIHISPTLRSANTLRVQIQSKDPCQSAPSRTMFYHYAIIKLWVSTEAAMRQHRTSNTLGCIGHDAANKPHFKQAVWNLCDLGEHNVNTLIRADGVVEGLCSTAS

SEQ ID NO: 945746 - protein, 138 aa, Homo sapiens
QIIQNMPQILNFFYNMYMHWMQARHHYHQTLLQLPPAMGEEGEEDHIQVAESETEEEVMTVQAAIIARPTDTSCRHEIPALQPEPSLSGTVPISIQEPSLHYLGQSLNWGGVSTRQGGRPKRRPPLLFFCSQKTPWTG

SEQ ID NO: 945747 - protein, 174 aa, Homo sapiens
QVVLHRTALSYTVGLNSLASSRPTSPRATYAGLMRECMSMHVLHSSDQIVDACMQLYCLEHQIIQDFQMLRVTDTAEADAKLDEMFTGTFTDNDVPYQEYLAGILRLLLKLRTAIYRHVLHHWHISTGMQDTDRSMPEATAALARVSLASISAMYERWATSSTNIHDYLDLSQV

SEQ ID NO: 945748 - protein, 117 aa, Homo sapiens
  misc_feature (3)..(3): Xaa can be any naturally occurring amino acid
RPXRKRKVVLLKPHEAGGQGGAIYKDEDGSTHKLKEKAKKPKGRGFGSQKGSPTPMPEDYDNVEQDGDEPGPQRSVESWNLFVTGIHEETTRKNIHDKIPEKGENKNIHSNPDRRTR

SEQ ID NO: 945749 - protein, 104 aa, Homo sapiens
GHYGRGNTYDAFYFGSFTLNKLNVSHECVAQYHPKFCHMLDRSLASVLAWPPKEYPDIDAPEKMGVLVCGYTVGIVTWTYASLQAGIEWTMNPEDVFTAAVGEE

SEQ ID NO: 945750 - protein, 135 aa, Homo sapiens
MEALFGAFLFISIGPYSRSVTPAAKMVKQIQSMTAFQEALDAAGDKLVVVDFSATGCGPCKKIKPSFHSLSEKYSNVIFLEVDGDDCHDVASEREAKCMPTFQCFKKGHKVGEFSGANTEKLEATIKEFSLTMIS

SEQ ID NO: 945751 - protein, 288 aa, Homo sapiens
  misc_feature (236)..(236): Xaa can be any naturally occurring amino acid
  misc_feature (238)..(238): Xaa can be any naturally occurring amino acid
RAHSWRGRGHASPFILHNGSTDKHTCVCVYYPIVEAASFKYTQLLIQRPKAERDATKSLILRLSDSEEQGRQISPVGTQLFEAWITTLVDKLGTRVYKFLHNTIIWKEMPPCLEDTQGTRCILPVNYPRKQSNLSRTQINSISEGSRTTIAYAGCSLPLTTTKLPTGTKGNFPYSYSVLMLRPLSPMNAYFTGEKNVTVGSLIFMSNTLLLVGFRSRAQRRSPRTSAPRFIAIASXLXITASTWSPISVPMSGAVINHLQTDRSVYNKGFAQLDKYLSGVSLHIKISR

SEQ ID NO: 945752 - protein, 117 aa, Homo sapiens
HYGRGGIPEADIIRSEMSRSEALGELGLLFISGLEAIQRTPKIQVYSRHPAENGKSNFLNCYVSGFHPSDIEVDLLKNGERIEKVEHSDLSFNKDRPFYLLYYTGFTPTEVKWDRDM

SEQ ID NO: 945753 - protein, 87 aa, Homo sapiens
SNYIQKASALVLINQRVFRGMHKLILQPEIHSRMFTQMIQTPFIMIKLLCFFAYENCPFSHKTFKNLYLLRVALTLLSIFDRVMNPL

SEQ ID NO: 945754 - protein, 102 aa, Homo sapiens
MTPAPPQSQPPSSADHLFPPPPTSSPTSPYLPDHLPPAAPPPPLLSPLHLLSFPLPLSPPPPPTPPPRPFPTTSRTPPPSSPPSPPPPPPSPPSAYHPPPLP

SEQ ID NO: 945755 - protein, 153 aa, Homo sapiens
  misc_feature (66)..(66): Xaa can be any naturally occurring amino acid
MARTKLTGLIKTAEKAPEKKGAIKAGRKKRSQQKGAKNPLGNMGYQRQFIPAFEDNTPPTPDIPIXTHRPAVFTTIPPIRPFFTLTPISPNPTPSYRHTLTPPLPPQLTPPHRPSSYALDTSHTTPHPPPAHPLHPARPHPTTRPHHTHSTHP

SEQ ID NO: 945756 - protein, 140 aa, Homo sapiens
MVPEARIRSQTCGNVADYLQGCCLQKDPKLEKEAKDTDPFSDRSDCIQSRLTQNVVTEGRVGRHIQDVKTVIKCEGTRLNASGPKYDEEPKPDEKPEEDENLDEEVKAIHYRHLSNDDVFREADEIDDIKESQKQTYSDA

SEQ ID NO: 945757 - protein, 395 aa, Homo sapiens
  misc_feature (2)..(2): Xaa can be any naturally occurring amino acid
  misc_feature (7)..(7): Xaa can be any naturally occurring amino acid
  misc_feature (9)..(9): Xaa can be any naturally occurring amino acid
  misc_feature (14)..(14): Xaa can be any naturally occurring amino acid
  misc_feature (23)..(23): Xaa can be any naturally occurring amino acid
  misc_feature (135)..(135): Xaa can be any naturally occurring amino acid
  misc_feature (175)..(175): Xaa can be any naturally occurring amino acid
  misc_feature (273)..(273): Xaa can be any naturally occurring amino acid
  misc_feature (291)..(291): Xaa can be any naturally occurring amino acid
  misc_feature (345)..(345): Xaa can be any naturally occurring amino acid
  misc_feature (361)..(361): Xaa can be any naturally occurring amino acid
  misc_feature (393)..(393): Xaa can be any naturally occurring amino acid
PXPAPPXLXEPPRXRAAPFYKTXRRTADSTALWFRRRDTTPRSRPPRRSDARCVLRSAGRGPAACRRPAYPAPARARARPPPRRPAMGTAREGGGGTGGGGGEGAGKAGTAKGEREPPRITTQAPAVVTCACAVXQDGEIIVHITMIYNIITHTSYFNNTYNIIRSIMDVMKYQXRKYMRIVRREQERQNAFRNQIQVSDSRRDVGARYRRVYVLVILNSTSCPVVRQQYVYVALGDAAAPRDYLVSVPIASMYYYLLIRNPVTDHSIRVMLXGQRVLVLRRRIAYRAVRXPAHTRRISRISCKRVILVTLIRTYDADTVLISMIMLYENTITLRTSHVSVCSIXRRNVRASCSARRERSXAAVVYRSYGVVCGHARTTHSPHPPPQTARAAXAS

SEQ ID NO: 945758 - protein, 113 aa, Homo sapiens
MPRPRATPAVYSAAILEYLTAEALELAGNAPADEESAIFIKVTFACWSRPFHTTTDLLLCEERSPPALSKAMPENSLFSQTSKSPSPPPPRICHPRAPPTLGTSHRLQLRKVN

SEQ ID NO: 945759 - protein, 140 aa, Homo sapiens
MNTSYGGRYIAHRNDYKVDRTFIADTNMSDYDPEAFNDRYSEVYYHALERNEPQQRDNSNKLRQKQTQLGEMFDDPVTTRLMLTISDGSMLCDYLEYKRGFSIEDLATLYSYAEFQYESMLNSRAEQYLHHFRALDHCAA

SEQ ID NO: 945760 - protein, 66 aa, Homo sapiens
GIVTDRKTGSSKGLGFVDLTSEEDAKVAKGAMEDIPGQFPALGPPWKSAYLTFKGQYRVGFDWIFI

SEQ ID NO: 945761 - protein, 73 aa, Homo sapiens
VIICSEGYEAPDATIYYSVLAAQWPELWISYYARAFTGHVDSLSADDKHDMPMVTLMIGSLYFSILVHSAYCI

SEQ ID NO: 945762 - protein, 78 aa, Homo sapiens
  misc_feature (1)..(1): Xaa can be any naturally occurring amino acid
  misc_feature (5)..(5): Xaa can be any naturally occurring amino acid
  misc_feature (57)..(57): Xaa can be any naturally occurring amino acid
XGELXELRHLGRVVPLVFGTNHPLFFAHNSLRGRAKPARTQNDCKINGALQNNSYKXTILNMITIELIEKKKITLKYA

SEQ ID NO: 945763 - protein, 168 aa, Homo sapiens
  misc_feature (29)..(29): Xaa can be any naturally occurring amino acid
  misc_feature (31)..(31): Xaa can be any naturally occurring amino acid
  misc_feature (49)..(49): Xaa can be any naturally occurring amino acid
  misc_feature (69)..(69): Xaa can be any naturally occurring amino acid
  misc_feature (120)..(120): Xaa can be any naturally occurring amino acid
  misc_feature (168)..(168): Xaa can be any naturally occurring amino acid
MPVAEVVRVGRACRACTARVGGAVTAYVXRXAPLSDAACSGGELLVDEXVSCQCAKTSHSKRKYDKLQXDHIFILVLYGTFAAVTECSRAMSACECNDVVNAGLSCVARCEVDCADNDWXHICSIAALCVDSDDDDAAYRRESISSNHRRARDDDDIKRTMSVASRDX

SEQ ID NO: 945764 - protein, 120 aa, Homo sapiens
GKALDQHAEFTEIPVPLLATVSGGSIRYNMAKTYDHTVTQMSCIETLIGVFQKHAEKEECKYSLSTTEHLRFMYTDLADLTENLYDPVDQVPMMKKLDTICVAYLDCQELTILFDVLAKG

SEQ ID NO: 945765 - protein, 128 aa, Homo sapiens
  misc_feature (2)..(2): Xaa can be any naturally occurring amino acid
  misc_feature (11)..(11): Xaa can be any naturally occurring amino acid
  misc_feature (13)..(14): Xaa can be any naturally occurring amino acid
  misc_feature (36)..(36): Xaa can be any naturally occurring amino acid
  misc_feature (54)..(54): Xaa can be any naturally occurring amino acid
SXVVWVPNYTXIXXAMTQTMDLHGEKPFKLAEGPSXNIMLDDINKQFLDDPKYXIDEEISPPNFHIISLKQMLKKLGVPKTHLYLKKLIGEVSIGLQETFIYPDFLKIMLGKRSAILKMILMYDQKPR

SEQ ID NO: 945766 - protein, 363 aa, Homo sapiens
  misc_feature (17)..(17): Xaa can be any naturally occurring amino acid
  misc_feature (27)..(27): Xaa can be any naturally occurring amino acid
  misc_feature (76)..(76): Xaa can be any naturally occurring amino acid
  misc_feature (80)..(80): Xaa can be any naturally occurring amino acid
  misc_feature (83)..(83): Xaa can be any naturally occurring amino acid
  misc_feature (87)..(87): Xaa can be any naturally occurring amino acid
  misc_feature (91)..(91): Xaa can be any naturally occurring amino acid
  misc_feature (98)..(99): Xaa can be any naturally occurring amino acid
  misc_feature (159)..(159): Xaa can be any naturally occurring amino acid
  misc_feature (175)..(175): Xaa can be any naturally occurring amino acid
  misc_feature (217)..(217): Xaa can be any naturally occurring amino acid
  misc_feature (240)..(241): Xaa can be any naturally occurring amino acid
  misc_feature (275)..(275): Xaa can be any naturally occurring amino acid
  misc_feature (277)..(277): Xaa can be any naturally occurring amino acid
  misc_feature (284)..(284): Xaa can be any naturally occurring amino acid
  misc_feature (307)..(307): Xaa can be any naturally occurring amino acid
  misc_feature (329)..(329): Xaa can be any naturally occurring amino acid
  misc_feature (343)..(343): Xaa can be any naturally occurring amino acid
MIHRSHYQPSLSASQYXSKHQLITSTXHTRAAKEIGIVKQKKRVTSKKYQNHAIKDNGDLRITTDWMSHRASYGPXSVCXIYXVSIXFHIXNMKSTKXXLINIYRISSYHAIIFNHHVDRPRYNRIEENDSYHDIADVNIIDNSQTHDTSLMIRPYLYXPHTIITNTVTILRIRXVPPLYLHTPHHSPLSQLYSHALDSLLLVSHLYTSTHYSTHIXTPHIYHSRSADPTSHRPSNGVVXXLWSFYNIFCKSTSEHKVQRKLTHTQQMSDSDSVXLXIQRRCRXETIELARDAADEADGVDAISVSXREREARIYLIQVIITYETHIDXITSRGASRSAREYXSYAMHVICYAHSRAVSGVSV

SEQ ID NO: 945767 - protein, 98 aa, Homo sapiens
MQDKGGSPDAESRIGHPKVPGSSIPKMKDDLPWTFGRDCCCETEQTFCIPYRKGPDLEEKCTRLTVMRIPLALACVFRKAQFIIGKKGNITMPMGTWV

SEQ ID NO: 945768 - protein, 72 aa, Homo sapiens
RLQCIGSRMGYERLSLTRVIGMNPVPNGLRFCQMTSIFKMRWASKEIGIESLGTLLKVFTGGNQQNTPKRRE

SEQ ID NO: 945769 - protein, 141 aa, Homo sapiens
PHDDRPDLNFDWTRSHCSLEELKLINKRAVYQNNHRVEVRTVSTTEQLTHLRYACDCLTLCDYECLMIPYHYDDGLIAILKKNRLTLWQRHRKVLRRFDDLELRVESFQPVWQIGKLLCMRNLLATYSLNVMKDKDYIMLW

SEQ ID NO: 945770 - protein, 204 aa, Homo sapiens
  misc_feature (24)..(24): Xaa can be any naturally occurring amino acid
  misc_feature (28)..(28): Xaa can be any naturally occurring amino acid
  misc_feature (46)..(46): Xaa can be any naturally occurring amino acid
EEPRQQDAPSAPPPACECHSLGHXCHCXPQSCCMRKTELAPLIALXFQPSKVIQHQPLMPCTRCHPAAPYFKGTAAANGELTDLSLDDLKGKYSALSPYPSDFHPLCVLQTFVLLATYANEFYRCELLKLSHPQRIPHFSPPPPVKYTQTGTAPWPTTTPDYRPPRPRPFPTTTGALVESSWICLHRIIPYLPPRRANKNSPLH

SEQ ID NO: 945771 - protein, 66 aa, Homo sapiens
PEDDRLHAEVSCSGSYSEFELHYMFDLEASQTTTMTELYSEFAVKKERATYLEKVCDCVTFIRHES

SEQ ID NO: 945772 - protein, 75 aa, Homo sapiens
GEGLTCTLKFFVFAMASHPWALKLRLRRYFFLSWPGRLIQRTSIDSEFTPRHSQQRHGKSNFLDLLWAWVSSIRH

SEQ ID NO: 945773 - protein, 105 aa, Homo sapiens
MTLTKPELIYNDEAEQKRPVDAEQKNAQDTAQVHYFMESYRDKCVEKQRKAKTLALKEVSPAVETGSVKTVLASPDVLAKRTRKVGREPSPRRTTEANDIVSKQI

SEQ ID NO: 945774 - protein, 154 aa, Homo sapiens
  misc_feature (47)..(47): Xaa can be any naturally occurring amino acid
  misc_feature (58)..(58): Xaa can be any naturally occurring amino acid
  misc_feature (73)..(73): Xaa can be any naturally occurring amino acid
  misc_feature (81)..(81): Xaa can be any naturally occurring amino acid
  misc_feature (88)..(88): Xaa can be any naturally occurring amino acid
  misc_feature (104)..(104): Xaa can be any naturally occurring amino acid
  misc_feature (107)..(107): Xaa can be any naturally occurring amino acid
  misc_feature (129)..(129): Xaa can be any naturally occurring amino acid
  misc_feature (132)..(132): Xaa can be any naturally occurring amino acid
  misc_feature (146)..(146): Xaa can be any naturally occurring amino acid
MPRVMRSRCQSPPDSSRVVQAAAAPPCGQRVKECVTVAAIEAVARGXARTRSLACVTXRAVDGTTACRYVRRXDYTLSVVXVDGSTSXLSVCLRATRRANRNAXTTXTHLSYSVDTLIVQSRQQTLARXSAXRARVLQLRCALTCXHTGTVTTH

SEQ ID NO: 945775 - protein, 69 aa, Homo sapiens
QLVVGQSGTRLRSYSCASLRFSSATMSDKPDMAEIEKFDKSKLKKTETQEKNPLPSKGGGEQEKQAAES

SEQ ID NO: 945776 - protein, 130 aa, Homo sapiens
STMMIKTIDHTECKDSVQIEASIRTYLIDLKHECHHTHEYDESRPVICHSICCYEDYNLAADTICKRNLTCAKPSMPLPWLYLTVIDSLHYWPTQQLMESFLVEQSFCWTPKETFVSGASNYKARTPSTS

SEQ ID NO: 945777 - protein, 189 aa, Homo sapiens
RPCPRYPGIAAIIGRVLQDPDHSWCENLHFQSMQARDTVLIIEGTLETDVKCAQGAKKHYDDKRQGVEAKFKILQDHTSLWGALSEPPKRTAGRKSAICHRKPPAHRPPLVAHALGGDAAKKRAGRGSACRRVRAPPIGSLTLPTPPPFPPRITTYIAILSAVSSVIALLMRLLAAVALDNRFEQAYYL

SEQ ID NO: 945778 - protein, 127 aa, Homo sapiens
LLFPLFSASRPQFARSLYAVPQLSDTADTMGYVDLMEVYEPSQADVAELDAESSPLPETGDMPYVDILTLSVTTEDKASLPVVKKALANKDLPDEEDTTGSGAPDSIHDDDIDPFVSEDDEHSYQAN

SEQ ID NO: 945779 - protein, 92 aa, Homo sapiens
  misc_feature (52)..(52): Xaa can be any naturally occurring amino acid
  misc_feature (58)..(58): Xaa can be any naturally occurring amino acid
  misc_feature (76)..(76): Xaa can be any naturally occurring amino acid
KTIPNRKRAYSRALGLCAAHQPAPLSPCIPRPLYHALSDEYKTHPPPHAPHXPKTANXSKKQYKEQQPTKQHPPNXQPLNTTLKSSTNAPAA

SEQ ID NO: 945780 - protein, 124 aa, Homo sapiens
MQAIRLELSLGVLPKLRLEFPEFEQGELTALDRLLLETCVEKAEGLHQPKPDAVAIVWGTQPSGVKAIGLRKYLSFLRDRNETDEAADSTRYHRCGPLRLMAWNESNRGYASKRMLARKGQGEI

SEQ ID NO: 945781 - protein, 52 aa, Homo sapiens
MSYELRSTSRPFFMRGGRRGTIRTIPEKGETTNNKSEFTLPPVLNKVKYLYT

SEQ ID NO: 945782 - protein, 115 aa, Homo sapiens
MTAKDDPNNRDLQTPAETQRPSNNARDQGKDKICPKSKPCNKLNNYTLIDTATMAVRLCHRGYVCRAPLYELLSDRLINLCPKHRAKSITPQTPKVQMVQLLAKEHDLHNRLYIF

SEQ ID NO: 945783 - protein, 102 aa, Homo sapiens
NSAIMAGVFKTQMGHIMATDFRSLDLDYHCRDYWGLNFLKPDHWDYGVWKFSRTLTGGKNRPELWETFGKVKSDFKLIMEIQFHGKVVQKVLEIIWGCWNLK

SEQ ID NO: 945784 - protein, 161 aa, Homo sapiens
MARGPKKHMKPLAAPKHWMLYKLTGVFDPRIIHRSTHDEECLPLIIFLRNILKYALTGYERKKICMQRFIVISIDKTGENFRLIYDTKGSSAVHRITPEEAKYKLSKVRKIFVGTEGIPHLATHDARTIRYHDPLIKVNDTIQIDLETGKILFHQVRHWYL

SEQ ID NO: 945785 - protein, 76 aa, Homo sapiens
MSGLKANSKLFNPKFIKELKGIESGPHWANTEFMVRFSDGRELCLDPRENWLQRVVEKFLKRPEKFIKANLLNHLM

SEQ ID NO: 945786 - protein, 180 aa, Homo sapiens
  misc_feature (5)..(5): Xaa can be any naturally occurring amino acid
TLSFXFGSAGRPGVWVLGGELNNHHGEEKGEDQDHQEGASGATSRGVGMVGQAQSEEVKGGFNMRGQNRGGFIGKGDLDDMVGSLGKNPTGGYLGGMVNEEAQGPINFTMVLAMVGEEVNGTDPGDGIRNAFGWFGEEATGTIQGDYLREVVSTMGDRFTGEEGDGVTGNTYGQDKGTEG

SEQ ID NO: 945787 - protein, 188 aa, Homo sapiens
MVYSERWVCSWHNHWCSLLATWTLQDDAAMMDAQRHKDRIDIIVTGTCEYSLSSHERSRLRVLNEALTSATLSEPKAGMNEIRTADEPLNEAEHRWMALGLRECPYRMRELLTYETCDHYEDITVRPCACELSVKRRISSRYDGQPSEPRCLGYVLDASTTRLIAGIVTDSAEFYITGAIGLVRVDYK

SEQ ID NO: 945788 - protein, 68 aa, Homo sapiens
EEDEEDEEDEEEEEDEEDEDEEEDDDDEKLVLAAAFFFLVYQEFNPPVHNITPFKEKIRTRLLSKLSF

SEQ ID NO: 945789 - protein, 69 aa, Homo sapiens
APVHVLTSTDRMHAVSVYMDPSDQNSARHCQLYSLLHKLGTALIRTYGLNITRQTYRQYAKDIQSIKLN

SEQ ID NO: 945790 - protein, 185 aa, Homo sapiens
  misc_feature (138)..(138): Xaa can be any naturally occurring amino acid
MALKHVLSDLPTKLASNALVFKICHSSEDIWPSRDINTIPGELTDRFACENILRFIQCAPDEDMSRNFLRKRDKTLSDMHHIVNIDLMLEMSTYLAAVTPIIERDSVGHHYVNMTIPANAAISVATEETWRKVRKLLXDAIHNELTDMVDFLFQGYKAGQFISFRNTNAGCSLWKEYMIFYLLRR

SEQ ID NO: 945791 - protein, 177 aa, Homo sapiens
  misc_feature (78)..(78): Xaa can be any naturally occurring amino acid
  misc_feature (177)..(177): Xaa can be any naturally occurring amino acid
MLATWEAGLLSHYYASLYFFSDPCSDKPCYVMMIAKFCYVFICNTSRHALTNIHCLSTLNEGNSEKQRILIGMMASAXQYCTVHLHYVIVLMLVGPSFPARLHFRYECRSTRLDHMFNIDVTPAPIVTITHPSANPSRSVYGERYRAYATLAIVLRDRERTAVSLVKYVDSRRSTVX

SEQ ID NO: 945792 - protein, 123 aa, Homo sapiens
MLSTSRYRSNVSSSYRNTTPSQCCCTWSSTCLPYQPFQIYDTVSQIHTIKLASHPVSLAIVLYSLVFHFVLRYVLVQCRPLQTPVHSHSMPARDTLSVRSFTISIFLFSRHARTPLLTTPEYP

SEQ ID NO: 945793 - protein, 185 aa, Homo sapiens
MTEKAPEPHVEEDDYDELDRKLNYTPSPQKALKELEEMDKDDESLIEYKTTLLGDGAVLTRSKSPQCMCYPIDPGLRECPGTKSPWTLLEIWKPSKRKPLVLMVDSEYRVHTYRTGVKVDKATFMVGSYGPRPEEYEFLTPAEEAPKGMLARGTYHIMSFFTDDDTQDHLSLEWNLSIRLSGQNE

SEQ ID NO: 945794 - protein, 347 aa, Homo sapiens
  misc_feature (2)..(2): Xaa can be any naturally occurring amino acid
  misc_feature (231)..(231): Xaa can be any naturally occurring amino acid
  misc_feature (288)..(288): Xaa can be any naturally occurring amino acid
YXGGGFVLVGVGRDAGPSPSGALLFFFRVCEGSRICYVLTVSASTRTTTPLAVPPTTLNLGPHQRVLGGALTQICPGAGIGSTSAGSTDKRRTHYSEKDTTVPSHEAVTHNFQIAINFFQPVVGVYINSAAYVFDMLIMTMRVMWRVVNSTVVRVCAIHDTFQPPLTESKKHKQGACNVRYTTDNQHAPGHPPSSQPHISHPRYRLRRGAERSTRASAVVGARMSCEESRXSRSSPIYVVSTHTQPPYHHARMRHARGNTTGGTNSSCHAYYPHRGRGTRGLASSLVXIYNHYPLFIAVPGLNIKDERLRSEVEVTSTSIHNQRTQRRVVVLQDASAREIPESLRSR

SEQ ID NO: 945795 - protein, 187 aa, Homo sapiens
  misc_feature (5)..(5): Xaa can be any naturally occurring amino acid
  misc_feature (28)..(28): Xaa can be any naturally occurring amino acid
  misc_feature (30)..(30): Xaa can be any naturally occurring amino acid
  misc_feature (51)..(51): Xaa can be any naturally occurring amino acid
  misc_feature (82)..(82): Xaa can be any naturally occurring amino acid
SPRFXLMPEIGLGLAFGLALRKISHASXPXPESSPSNSPPPTRISIKHPTXAHPLPPPFTPLTLTYPHPLPPPPYNLLSSPXEFFYLSLSPPQLSPPLQPLFPLSLPPTTPVFFSPLHSRSHPSFSILLPPPPSLSLNPFFYPPLPLPLPPPSPFSSPPPTPPLPPHYIPPTLSSRSLSPPPAPLIF

SEQ ID NO: 945796 - protein, 94 aa, Homo sapiens
  misc_feature (21)..(21): Xaa can be any naturally occurring amino acid
  misc_feature (49)..(49): Xaa can be any naturally occurring amino acid
  misc_feature (86)..(86): Xaa can be any naturally occurring amino acid
MHVNTTSHLQQNTHRRTLALXPPPDLTYLGRSSPESYANTYVHRTSEIXRRGIELAHLRTTLIRLTRAPAIAILIYYRLIFAMPTXYDALLRAI

SEQ ID NO: 945797 - protein, 199 aa, Homo sapiens
  misc_feature (35)..(35): Xaa can be any naturally occurring amino acid
GPSTFSVSCRRMRLDCVKKITSPLSERNLVTYSPXLATKVFMDGPRNCPQAPKVLPQFYTPFSPNTRFLYSPPHRPSETPHNPAHRPSRTPPHAARTANTSPSVQSLTTCQAPPHLNRPSPPPCPLPTTTHKPTFTPPLPNRPTRGHPNHTPYPPPLPISTTSPLLHHISPPFTPPLSRPLSRTRSTPTTAPPRQRTSY

SEQ ID NO: 945798 - protein, 241 aa, Homo sapiens
  misc_feature (1)..(1): Xaa can be any naturally occurring amino acid
  misc_feature (3)..(4): Xaa can be any naturally occurring amino acid
XRXXAITRAGGRHAPPNGTGRHTGNNGSGNRTHTQHPRTEETSKNHQQGNKAILGGAHNAHPKESETQNGGEKPPTKAHTQNRKRPNRAKTKSGNEKTPTAPKPQKPRHPKDETTQSTNRKPAPKQRTQAKTPKNQKPPTADSKQGAKNSRTKLKDNPKAAHTNKRPPTRKMRTKKTTPSKNPRARPKGPPNKPKEKTREKGRDQKAQETSHNNNQHLGKTRENKTRANKKPGENNLKTNN

SEQ ID NO: 945799 - protein, 138 aa, Homo sapiens
MYALLPKAQAVGWTTAQHDPLVLTSEHFLVVVNQNDLYCAVIILDLMGLPSLRIPYITDEDNNHLPYHQFNWPPMVLTYQYTDYGGLIFKSYILPRLCLEPGDLRLIDVNNRVVLPIEAPFRIVITDKTFSTHEQAPH

SEQ ID NO: 945800 - protein, 101 aa, Homo sapiens
GKPFHLNAENDALKEPSEQRRGLEPTQNMGVIKPHSDLSPHPQKLLSSAHREEGSAFVFGGVCFCRKHGYQQVLNPPAEGTDCSVIPPASVKRLYLDKEVI

SEQ ID NO: 945801 - protein, 85 aa, Homo sapiens
LVQCDTLHLEARREAPPVDTGGNMVQLKQTGMHARDSKAGDSKADPPVLAAGTTANEIYTRTNQAKLAPNMPVGTHCHTRQIACR

SEQ ID NO: 945802 - protein, 70 aa, Homo sapiens
TGVKVDKASKMADSYGPRAEEYELLTPLKEGPKVMLVRGTYHNKSFLTADDMQDHLSWEGDLSIKKEWPE

SEQ ID NO: 945803 - protein, 103 aa, Homo sapiens
TLTAYKKECFTFGLTAHIAVSAAVFPTGTKGHLLDSFARTDLWDLGLDYSYGTGHGDGSLLNGHEGTCGLRETQPISITALINTSPIVFVPNALEEGRNVADP

SEQ ID NO: 945804 - protein, 69 aa, Homo sapiens
  misc_feature (1)..(1): Xaa can be any naturally occurring amino acid
  misc_feature (3)..(3): Xaa can be any naturally occurring amino acid
  misc_feature (5)..(5): Xaa can be any naturally occurring amino acid
  misc_feature (7)..(7): Xaa can be any naturally occurring amino acid
  misc_feature (13)..(14): Xaa can be any naturally occurring amino acid
XGXTXGXAAAHFXXDVTPWVMSGPIYGAAVSSTLIALSDTRRQLGGDVCQGRNRTLQRIPARDLIGMKR

SEQ ID NO: 945805 - protein, 105 aa, Homo sapiens
MKCHLDIAEMREPVTNLGEMARTISLVGDKGTYTHALAHGRSTTGATHYEIAEGTRPAQELTDDTLYDIKIALRLASGKIGAERQRRLSSTDTCNWATQPMGTSL

SEQ ID NO: 945806 - protein, 122 aa, Homo sapiens
MAGGHWGSVLVHLIPAPRGAGIVYAPAPKTLLMMVAMDDCYTLSQSCTVTLGNSAKATFDAIGKTYSYLTPDLGKETVFTKSAYQEFTDHLDKTHSRVFDQSTHISGEVYNMGSFYKKNKVN

SEQ ID NO: 945807 - protein, 103 aa, Homo sapiens
MTGLTISQIEDDSDSTTMVTHKTVPGHGPYYERIPASTALAPDLTGERYHSNQLETRLTLFESRIHRLARYYKTKRLLASNRKYVSSTDFVLPPKFELSRQLY

SEQ ID NO: 945808 - protein, 155 aa, Homo sapiens
MAGELRVFRNLGSCRSNWSLRTRDNLRVPFEINWEDATVLCCSVSLYVSSLLPSVPHNTNPSPTLMYYITSDEMKCFLHWYANWSESQRERFLEDLVAKAVPDQPPFIFECQLHLWDQWFLGWAEQGPNEFVRQLEFKEPEFAAKFYQAMAAPAW

SEQ ID NO: 945809 - protein, 144 aa, Homo sapiens
  misc_feature (1)..(1): Xaa can be any naturally occurring amino acid
  misc_feature (5)..(5): Xaa can be any naturally occurring amino acid
  misc_feature (7)..(7): Xaa can be any naturally occurring amino acid
  misc_feature (14)..(14): Xaa can be any naturally occurring amino acid
XGIRXPXHHNANLXLFSRVRARPINSSQLIQPPSPFYKIQLTQPNYNLYNHSLPIKNIHNITLLTTFYPTLFTVFTLLTPLNHHKKQTPKTLITPSKPILNISSHTPFLSNPFIKTSLPLYLPSYNYPNFYQIFSNNPNFITNY

SEQ ID NO: 945810 - protein, 37 aa, Homo sapiens
MAANNRGGVTVRNLHFFDKDSTVTARLYKPCPQYEFT

SEQ ID NO: 945811 - protein, 69 aa, Homo sapiens
VHSEKPLTIGYTYCVHQQAAKAMARYQPPELNLLSLQGTIAESAAVDQKCASTLILLPALTKYRILENI

SEQ ID NO: 945812 - protein, 82 aa, Homo sapiens
LSALLPSFLMPMRHWSHDEADLNALTEAHENIDEARVHVTLVACCTEQAPVALTRNAKAVTARYKLRNCELLARVLLTAALT

SEQ ID NO: 945813 - protein, 72 aa, Homo sapiens
VLQIRKKNTQIESHSSPDVQNSLLEDKTYPDSEERTSIDIACSEGENSNSTDQDLFGGCQLNQRHSNMSHRK

SEQ ID NO: 945814 - protein, 118 aa, Homo sapiens
MPVLTRWAPFVRVEGRLFKTGCPRTAEKGEVRNAAGGVHIEPRNKQFPQLPNPRGSKASFSGNSGGSESSGAFAMTQKRRWATFRILTLPSDQMKNEESLLMMKTEGVNSANSDKSQV

SEQ ID NO: 945815 - protein, 324 aa, Homo sapiens
  misc_feature (21)..(21): Xaa can be any naturally occurring amino acid
  misc_feature (177)..(177): Xaa can be any naturally occurring amino acid
  misc_feature (303)..(303): Xaa can be any naturally occurring amino acid
  misc_feature (317)..(317): Xaa can be any naturally occurring amino acid
EICGCCFPYLLFCLGYYNFSXFVRTAFFVFSDLLFVFYCYMLFFFLFHIKKNRARTRPTSHHHFTPPPPTPYTPLPTYKRDKEQLEKHRDANIPQRPTNTTHTQQYFKVHQCPLPLVASRCAGARSLYQHRYVVHLVCFVVQLYMISRTKQAECFVACADDRARLIHIMGVMESSSXMWESAVARRYEPAARGVQPHNEKTGPEVLADRIIYIRPSRTSNAEVALSARSESVMVAKDRIYVFGVGARKRVLHASTHSRAVYPRSVTDREMIPPRAFIQPTNYAFTRTIIQSYYITTPDLDEDXYRMFVVGVSKERVXDRHCMLS

SEQ ID NO: 945816 - protein, 202 aa, Homo sapiens
  misc_feature (3)..(3): Xaa can be any naturally occurring amino acid
  misc_feature (80)..(80): Xaa can be any naturally occurring amino acid
  misc_feature (128)..(128): Xaa can be any naturally occurring amino acid
  misc_feature (141)..(141): Xaa can be any naturally occurring amino acid
  misc_feature (180)..(180): Xaa can be any naturally occurring amino acid
NVXHNERTGGGHDLSSSVAMTRDNQRELARQKNIKKQSDSVKVKRRDDGLSAAARKYWDAEIMQQKQKPSCHSPVNLKPXLTTVMFPSAALTASQDPLAFFLDLRSAAEPLPGWGCPYIIRSSYVPLXDRTPFLLPSLFLXPTAKPLLLESSPHPPNSFKPSLCFPSGSNAECLSTQPSXLNHTLFPATCNSFVRASPVGGS

SEQ ID NO: 945817 - protein, 104 aa, Homo sapiens
  misc_feature (18)..(18): Xaa can be any naturally occurring amino acid
  misc_feature (63)..(63): Xaa can be any naturally occurring amino acid
MTYDVRVVLSLLALSFTXLPSLSRSSRTRGIDGRLDVVLFWALTPAVHLSTSSISNDLTLRLXTIQFVFRTLELVYVRTDALPIRSLKPPVLINSHISAPNRTL

SEQ ID NO: 945818 - protein, 108 aa, Homo sapiens
EEVVESSGRGATRIVVDYLQNILDPDECPLALQAALAYALLSRATIIPTLEEPAYSLWGGSTDAFPNKRGRLQTSHPYLEPVSLKSLWTSHGISNPALLWTSVLSDLH

SEQ ID NO: 945819 - protein, 101 aa, Homo sapiens
  misc_feature (6)..(7): Xaa can be any naturally occurring amino acid
  misc_feature (11)..(11): Xaa can be any naturally occurring amino acid
PANEEXXDGGXRRNGADSNKTLPLCPVSNIRVGAIQALNGGEGPLRPTKRRTNDRPPHPPTPPLPQLHPSHQTTRAAPTPGTRECILYPSPRATQAEKDAW

SEQ ID NO: 945820 - protein, 157 aa, Homo sapiens
MAEIEKFGKSKLKKTETQEKNPLPSKERGEQEMQACKKKRGVRRQYALCIPQALPSYFNSFELINCVRCKEVGSSLNDCAALFIIKELLTTKAAPAFPICLSICLAGKEKNLHVDEGRIAVEEVGRYDSEFYKKSKLAPGGTGGCIAVYSQGHFFFW

SEQ ID NO: 945821 - protein, 102 aa, Homo sapiens
  misc_feature (25)..(25): Xaa can be any naturally occurring amino acid
  misc_feature (28)..(29): Xaa can be any naturally occurring amino acid
  misc_feature (34)..(34): Xaa can be any naturally occurring amino acid
  misc_feature (39)..(39): Xaa can be any naturally occurring amino acid
  misc_feature (48)..(48): Xaa can be any naturally occurring amino acid
  misc_feature (54)..(54): Xaa can be any naturally occurring amino acid
  misc_feature (58)..(58): Xaa can be any naturally occurring amino acid
  misc_feature (78)..(78): Xaa can be any naturally occurring amino acid
  misc_feature (80)..(80): Xaa can be any naturally occurring amino acid
  misc_feature (102)..(102): Xaa can be any naturally occurring amino acid
MRALLTWCSPVRLAPRFARCATLAXAPXXRLSAXRAPTXSEKKSQTRXHGTRAXRASXSRRRARSTIHNVERPPDDHXAXTHDTRSSRRGRLEGATNSDERX

SEQ ID NO: 945822 - protein, 130 aa, Homo sapiens
GWFGWGSWLGSLGLNVVGDGQDPGIRYQAKRQILGKTFTGRTITLEGEPRDTIEKGKARIQDREGIPPDQQRLIFAGRQLMALRLKGGMQILGKTLTGRTITLKVEPRDTIEIVKAKIQVKEAILPDQKR

SEQ ID NO: 945823 - protein, 145 aa, Homo sapiens
NKHLCLCLLNKIKKTNSRASLKMGRRNHSRQTPLGSKQKYTISENCFWRPPWPQSPLAWAGFFLRAQLGPLWPFPPFGGGFPSSRPGVSPRWPGKTRGVPPFIPGGAHPLWPGGGIWQEGPPGCPFPTWAPPEGEWEFGTVNFLC

SEQ ID NO: 945824 - protein, 99 aa, Homo sapiens
RYHGNRERDAVLQESATHEVYYTGDCTQKPRIIYQTKKRKSSVKTHVDSDLPHLTKNDSGVDNSRAAYYEKIFSMEECHSEDSILRLEIDASDECYAQS

SEQ ID NO: 945825 - protein, 227 aa, Homo sapiens
GDLVRNPTKKATHGPLGIDLSRRRGVEMDILPRMKSSVFFKSNDVGWEETSPYRLGAQGRERIAFPSALFLITPRPPRGAPPHTSRPPRITPPVLYMAPRVGVEESSNREYIGKNTRGRRNDKTERLESGGTEVNSKQINHKQKRQEEGCGRATRTQEHAARRLLSPTHPHPSPDQHTPSDHSSTHEKSKGKTTTHPDTKPPHHATPHNTKAYDKNIATNRRNTLTS

SEQ ID NO: 945826 - protein, 139 aa, Homo sapiens
MGGKPAETILAGIILGLIGLPSLRILYITGGGNNPSLTIKSRGHQGDWTYGDTGYGGLIFNSYILPPLFLEPGDLGLLGGGNRGGLPVGAPIRIIITSQGGLRYEVAPHEGYAGGYYGQGSEIWGGNHRFMPIGLGLIP

SEQ ID NO: 945827 - protein, 169 aa, Homo sapiens
MHCCHCSPHANCMIEHQCLMLCTCCHPSSPYFKGQPHSKEEFKDLGLDHFKAKYTVLFFYPSHFTFGSTTHHVAFRDISNEFNDRYLYLQTLTQWIPTVAILPVYLHHDRMVDEAHMIIALLADATMQNIRDYVWAVTRNGLSTKTVFIVDPMDSSSTFAITISHRTDA

SEQ ID NO: 945828 - protein, 99 aa, Homo sapiens
RGEQVPGSVLRLNYGQNKGTKPKEGKRASHNPHEKKSKTNTKRGLEAGAFFYITGLGLAVSPSLPFSVFNRLLIFFFNVRLFSRAIVVYAGAVPPVKVG

SEQ ID NO: 945829 - protein, 43 aa, Homo sapiens
  misc_feature (3)..(3): Xaa can be any naturally occurring amino acid
  misc_feature (19)..(19): Xaa can be any naturally occurring amino acid
MVXDRYKSVYNTRPLLSAXAMTERLSCPIYTHARTPKTPGEDE

SEQ ID NO: 945830 - protein, 47 aa, Homo sapiens
  misc_feature (19)..(19): Xaa can be any naturally occurring amino acid
  misc_feature (29)..(29): Xaa can be any naturally occurring amino acid
  misc_feature (45)..(45): Xaa can be any naturally occurring amino acid
MTIYVTVSAKVSRSQRRLXDDVGRLRVIXLCDRTHLDAFEVSRAXCE

SEQ ID NO: 945831 - protein, 195 aa, Homo sapiens
  misc_feature (9)..(9): Xaa can be any naturally occurring amino acid
  misc_feature (60)..(60): Xaa can be any naturally occurring amino acid
  misc_feature (62)..(62): Xaa can be any naturally occurring amino acid
  misc_feature (68)..(68): Xaa can be any naturally occurring amino acid
GAVGGGKNXPLTKGGKKGAKKKGGDPFSKKDWYEWKAPGMVNIRNIGKALGTRGGGTKIXSXGLKGPXFKGRLGDLQNDEGAFRKFKVVTGDGQGKNWLTNFHGMGLTRDKMGSMGKKWETMVGAHGGGKTTGGYLVRLVWGGFTKKRNNQIRETSYGQHQQGRQNPEEGDGIMTREVQTNGLKEGGNKLVPGRM

SEQ ID NO: 945832 - protein, 220 aa, Homo sapiens
MPLVALVRRVPSCGRGGAFLVSSSLLAVFVFFILFNNLIYCYIISVVSNAFDLFMFNVIFGCSGCGRCCVGGTAVLTHHISFSHTRHLRAPLRRLITLSRTAVLPAVSKTGKLNSTLDLLSNLHSIAYSLLIMIDESRTQHMITQHRTSLPVTAATLSQSIVTTLLDMSCLALAFTHCTSALIPVIAVRKHSILSCINVCTLLFAPYCIVESALRGASIG

SEQ ID NO: 945833 - protein, 145 aa, Homo sapiens
  misc_feature (139)..(139): Xaa can be any naturally occurring amino acid
MAHASQVGVRGATSPIIEELITFHDHALIIMCLIYFLVLYALFLTLTTTILPGSILELIALPSLLILYITDQVNSPYLTMNELATNDTETYEYTDYGGLIFNLYILPPLFLEPGDLQLLDVYTRVVLPIEAPIRIIITXQAALHL

SEQ ID NO: 945834 - protein, 70 aa, Homo sapiens
KTEVDGRSRGRGGMKDDRRHRYSADKRGGFNTFRDRENYDRGYSACLKEILFFKRGDALTVLQITPMGAL

SEQ ID NO: 945835 - protein, 107 aa, Homo sapiens
AAQVGRQDATSPIIEELITFHDHALIIIFLICFLVLYALFLTLTTYPARHHPRPYSPSIPTHPLHNRRGQQSLPYHQMNWPPMVLNLRVHRLRRTNSSTPTYLPDFS

SEQ ID NO: 945836 - protein, 260 aa, Homo sapiens
  misc_feature (12)..(12): Xaa can be any naturally occurring amino acid
  misc_feature (16)..(16): Xaa can be any naturally occurring amino acid
  misc_feature (25)..(25): Xaa can be any naturally occurring amino acid
  misc_feature (38)..(38): Xaa can be any naturally occurring amino acid
  misc_feature (67)..(67): Xaa can be any naturally occurring amino acid
  misc_feature (77)..(77): Xaa can be any naturally occurring amino acid
  misc_feature (85)..(86): Xaa can be any naturally occurring amino acid
  misc_feature (174)..(174): Xaa can be any naturally occurring amino acid
TLSSVLPAPARXPFVXADPPTTSLXSSTPRHSGMCVSXALDRERGIYINVSIERLMDSREVLSSLSXPPPPVFALSXAPPHSSPXXAATTNCERILLTLFRLRSPPITLPQPHKRKVIRTPIYKWPMNMRDFIKMHTPHSHTSNHSHLSSCQRVPPCPRDAVCLIYPTALHLSXTRVRPPPPRRPRQPSFAVYVQRGWLVSARGYQYHPPRQSHAHEVHRRELRKVCSHLPNIPPRRLGHVTTAVTATAIVPLTHVYLLL

SEQ ID NO: 945837 - protein, 102 aa, Homo sapiens
LFYQNRVRGLGTFTIEDSLLWVPYFLLRVFIFFHPHQTFEFHTYITFHGCLLLLISFSGGRDSFFSPYWSSTLANALDRQDAVHISTAQLCHTNNALLPYQN

SEQ ID NO: 945838 - protein, 71 aa, Homo sapiens
  misc_feature (2)..(2): Xaa can be any naturally occurring amino acid
  misc_feature (4)..(4): Xaa can be any naturally occurring amino acid
GXPXITSTKQNTRPYHLFQQQTTQPKYHTYTTTLNHNNIYNITPSTNINQNYLLGGHLNTHTPPINNNATI

SEQ ID NO: 945839 - protein, 104 aa, Homo sapiens
MLVKTGGVKHLIGAINKMDDPTVNWSNEKYEECKGKLVAFLKKVGFNPKKDIHFMPWSRLTGANLKEQSDFWPWYIGLPVIPYLDNLPNLNRSVDGPIRLPIGD

SEQ ID NO: 945840 - protein, 50 aa, Homo sapiens
MADARNKLEDTWNNTDGDEKQAYLNKFVTLEEKKRKGYLGAILRNESLDL

SEQ ID NO: 945841 - protein, 55 aa, Homo sapiens
MFTTSVGGLDEEGKGAVSSFDPERAYQKRLLKSLEATTVPCFRPLLDNQIVFKNI

SEQ ID NO: 945842 - protein, 113 aa, Homo sapiens
IRPLWPWEPEANNVGSLKPTYAETQRLMADEQHKAHFTAQVHNFMELCWNECLENPGNRLNSTTENCLFRWADPLIDTTLDITKTVAQIAQIGGLYSIPQENDRSKGLVTKQN

SEQ ID NO: 945843 - protein, 81 aa, Homo sapiens
AVFPVVAAEMGKFVKPGRWACLLTLLRRKLHRKNIDDGTYIALQPCSGAELTVPRKVTAAWQEKIAEIKDKIFWKVITTIT

SEQ ID NO: 945844 - protein, 212 aa, Homo sapiens
  misc_feature (112)..(112): Xaa can be any naturally occurring amino acid
YELVAARNSQRLPHPVDSKTTSDVLRFVLEQYNALSWLTCNPATQDRTSCLPVFLWVGTQLYNAIMNILQLEKHLFSLAQFLLPAASVQGTCYTLQITHMLFFRPLSTGLYXDSFSVGTCQFCSCHYQSDFLTLFSWTLGTSISGDLQPVLWGVCCPNHWVPSKPRRVVAFSGGFLFRPVFFSLSFFPFPPPFSSRFVSLPFSLYSFSLLSI

SEQ ID NO: 945845 - protein, 105 aa, Homo sapiens
MSYNIGNASSPTDTDGSIKAVIGVLQKNAGITDLVGLTNSQMDPVDLDRMMKKRNTTSDGKLDFQEPINTVEVLPIDCHDSFLKALPSQKRHWDPFALVVKPTRF

SEQ ID NO: 945846 - protein, 99 aa, Homo sapiens
TFIVALTISLQSLRVEVFSFIRASDRFSKDMCNTPTYCDLRKAVNDVSNKGYGFGMVKIDLDTVKASRMLETKYNVWNYGLTFTHKWTTDCTLGTETSC

SEQ ID NO: 945847 - protein, 82 aa, Homo sapiens
IINYDLLSTRELSIPRMGRSGRYGRKVVPINFVKNDDIGILRDIEQYYSTQMDEMPMNVADLNLKQQISGMRKTVHLLGTPV

SEQ ID NO: 945848 - protein, 103 aa, Homo sapiens
ISRPACHLNPMIGDIPAPVQTSTIGTTQKALINRSGKEWHLRKFSATRALRYRIKLLTMFVVELTCKTKLADYLPPMAETGKSPATGLILRFNWHRCKVYIIN

SEQ ID NO: 945849 - protein, 134 aa, Homo sapiens
MHTNPHHPNTPKPPPPPLTPKTNTPPPPHTPPPPPPPPHHHHPPPPPAASPPPPPPHTPPHHPPHNLPRIHPPPTPPPPPPPPPPPPTPAPQQTTPHPPNPPPPRPPPHNTPPPPLPPPPPPPPLPLPTTHHTQ

SEQ ID NO: 945850 - protein, 84 aa, Homo sapiens
LDAGHCADHTWLVLSRFGLTFVAIMSDQPDMDDIAKFSLVETDDDRDAGETSTAFHRNDCNSRSTQANRIEACAANMHCTFHKH

SEQ ID NO: 945851 - protein, 128 aa, Homo sapiens
MVGHRWGLELGDLHIQHRCTSLPVKFKKLLGPGKIQHIFCTGNLCTKESYDYLRTLAGDVHIVRGDFDENLNYPDQKVVTVGQFKIGLIHGHQVIPWGDMASLALLQRQFDVDILISEHTHKFEAFEH

SEQ ID NO: 945852 - protein, 111 aa, Homo sapiens
LFDPELGQVPLLLLVLNLEPEPDMGLEDEQKMLTESGDPEEESDTESKCACPQFFWGGRAKSAQAFRGPPQIYFLLGAFSPLVVSVFTINPPSINKPPTLLGSLVEHLLAW

SEQ ID NO: 945853 - protein, 246 aa, Homo sapiens
  misc_feature (1)..(4): Xaa can be any naturally occurring amino acid
  misc_feature (59)..(59): Xaa can be any naturally occurring amino acid
XXXXPRTKRARHTSKNRKQGNPHNHTNNHTRDPQTKAREHNTTEPKGTPTAFYRGEPPXNRQPHKEGRGNTERRTNPTPQVAHQPNTRNPRNKTNKRGRATRKTQHDEEARKTTRTNCTRRARDNDQKGRPKKSAHRRKTPIKQKAQHGGTKKRPEKTTKNEPETEEPQKPPHTEKRGPKPKEANNRTTRAKRRRKNKRETPDHRKVTTTPHKAPRSQEGTKRQSAHKNPTTTREHTTKQEQPPTK

SEQ ID NO: 945854 - protein, 92 aa, Homo sapiens
WGAIGRPKLGWNSGAWFGFSSEPMSDKPDMVEIEKFDRSNLRRPEPQEKNPWLSKEPMDQERQAAESNGGVRGHYARTIQQAWPSNLTSLSG

SEQ ID NO: 945855 - protein, 189 aa, Homo sapiens
  misc_feature (7)..(7): Xaa can be any naturally occurring amino acid
  misc_feature (20)..(20): Xaa can be any naturally occurring amino acid
  misc_feature (50)..(50): Xaa can be any naturally occurring amino acid
GGGGAIXHGQPHAVLRHCRXREALGRVSFERGADKGPKTGENFRALSTGXKGGGYKGSWFHRSIPGVMCQGGGFTRHKGTGGKAIYGGKFEDENFILKDTGPGILAMGNGGPNTKGSQVFIWTGMNIGEAMERFGSRNGRPAGRSPLVTGDNSDKVDLGVILTTRSFPLDARRAPLHPMCSEVLESLGS

SEQ ID NO: 945856 - protein, 69 aa, Homo sapiens
GNPWRSTVQTILGSYSGALLGFGSVAMSDKPDLVENEKFDKPKLRNTETHDKNPLPSKEPIEQEKQAGE

SEQ ID NO: 945857 - protein, 221 aa, Homo sapiens
PKSQGQYWEKPRLKSQVEAQAFVFCCFCFLRQSLILSPRLECSGAILPHCNLLFRGGSNSPASASFSSPDYRCIPPHLSNFCIFSRDGVKPCWTGWSQPPDLKCSARPSLPTLPRSFALAPPHPGQITESFNSSPPPLSPRLMTAKELPLLVRPFLPMKPPFLCATPNCPPLLPLLYTYHSLFLSSPFCTLLGRPPEYSLHPFPFLASYFFFPPPSSTTKL

SEQ ID NO: 945858 - protein, 147 aa, Homo sapiens
  misc_feature (135)..(135): Xaa can be any naturally occurring amino acid
  misc_feature (137)..(137): Xaa can be any naturally occurring amino acid
MSDKPDMAEIEKFDKSKLKKTETQEKNPLPSKGGVEQEKQAGESNEACAANMHCTFHSIAFLFYFFELINFVRCKEVGSTLNDCAAPFTSKNYWQRRPRLPFPSVYLSWLAGKERTCMLMKEEAGVKKCRCYNSXIXSKTKLAQGVL

SEQ ID NO: 945859 - protein, 105 aa, Homo sapiens
MTGVIYEKDTLYETTGTEEDLLSDHNVEKTVLEDVLMTGKMTERKSGTLLEKFLPQLFHETEKETETFKEKVKKRRPNGELLKIGNLSVELKMRLMKMVGPHYRR

SEQ ID NO: 945860 - protein, 168 aa, Homo sapiens
  misc_feature (21)..(21): Xaa can be any naturally occurring amino acid
  misc_feature (121)..(121): Xaa can be any naturally occurring amino acid
PGPPRPPGRGDAKKEKQEPYXEHREGEQMRVTRGASVAGGSELRERTEETSYSRWEDMACTKVTLGGEVSESIQTTVPPRRDTPARTTRRTNSTRLLSPRRNDSPAADERTQEPQTHNHTXKRERSRQRNAKRRARDTISLTPIVYPGASPPNYTYSKRTLSSVCLII

SEQ ID NO: 945861 - protein, 114 aa, Homo sapiens
SAFDDDGPGTRMRYSIPVTGALGVVPPGLDEELCRKHSIGEAYALCSSASLNHARNTLIAGRAKILIPPKSMPSCRTNRWHECTPAMEHDRSVSHVGIEATDSTLAWRYGGLTK

SEQ ID NO: 945862 - protein, 67 aa, Homo sapiens
RVVTSGSGAEEFYNHRLKREFNMGPNSETHEHSYNEADPGTHHKTDTKSHHNDIPPFSGGAEYIPHP

SEQ ID NO: 945863 - protein, 72 aa, Homo sapiens
  misc_feature (35)..(35): Xaa can be any naturally occurring amino acid
  misc_feature (46)..(46): Xaa can be any naturally occurring amino acid
  misc_feature (65)..(66): Xaa can be any naturally occurring amino acid
AGGVLVYWGARRPDFFLKGADSLGWTGLPCVLRSXRSGSLCTGAGXGWCCILSFCPPPFLVGVGXXPGRALL

SEQ ID NO: 945864 - protein, 146 aa, Homo sapiens
MAIPLCAGGVPIGCRSKIKDALGHFLPHGTPTLLIPILVIIETIRLLIQPIALGRRLTANITVRHLLMHLNGSATLAISTINLPSTLMILTVLILLAILEIGGVYIKAYGFTLFGRLFLHALTTSASPGFCSLRFFRATFSIAPIR

SEQ ID NO: 945865 - protein, 160 aa, Homo sapiens
  misc_feature (81)..(81): Xaa can be any naturally occurring amino acid
MNFFWGGAFIAPTLLGLPPRVLLILFPPLLIPPFKYPTNNRLITTEQCLLKPTPKTFFPPPHLFWLSLSCYAGSLQYMFSXQPTSPTCPLLLFHPPPTSLFSYVCSPPLLLCAPFIISLFYVFSSPYHLLPPVPSTPQDGSPGFFGTLFLLILFSVQIYK

SEQ ID NO: 945866 - protein, 141 aa, Homo sapiens
  misc_feature (2)..(2): Xaa can be any naturally occurring amino acid
SXLGDEDIVATPCYRPPEIMLNSKGYTKSIDIWSVGCILAEMLSNRPIFPGKHYFGAGGHILAILGSPSHEDLPCITNLNARNYFLSLPHKKKAPWFRLFPNAPPKALDLQHKPLPFNQQTRIHAQHSYPHPYPKQHYGPR

SEQ ID NO: 945867 - protein, 88 aa, Homo sapiens
MVNASPPQSISQIMHVARRADANNARAPLLPNLGQRNPFIQIYINNKTVDASIVRIAELDDIYVVRDAAIFNSYCSVGDPGRGSVNGR

SEQ ID NO: 945868 - protein, 129 aa, Homo sapiens
  misc_feature (15)..(15): Xaa can be any naturally occurring amino acid
YGGGIPLLEIKPESXLLALAGSRSLSFAWRLSSVSKDSGLLTSSSREWKANFLNCYVSGFHPSDIEVDLLKNGERIEKVQHSDLSFSKDWSFYLLYYTEFTPTEKDEYACRVNHVTLSQPKIVKWDRDM

SEQ ID NO: 945869 - protein, 193 aa, Homo sapiens
  misc_feature (147)..(148): Xaa can be any naturally occurring amino acid
MVWKFPDRSCSAVGFTVRATITDTDFIEAFQLMDKISVLELYTYRQSERGPVLSRYTCKSDERTISETSEKLEVQFDVQIDKRKRGGQTTRVRLPADFVVRAHTVLHSTYQATQQQYALHTHIQYREHNNTFTHISTAIELSLTLIXXTYIRRMYVCRCSLDAESQSEYSMDDSDCHMYVSDSDVRPRSWWSA

SEQ ID NO: 945870 - protein, 148 aa, Homo sapiens
MELHDSTYVDANCPYVLSIGAVFDIIGGFIQLIGRIIRLHPIPYLRQIPFHYDIHRRTTIFIATTLSRSIQDALALLGLPRRIHHKKHAIICWLIHSSNSRFINITHDLRSLRLEAKGSNEEKNRPYTWRAYLDAAETIRHSKNLHHI

SEQ ID NO: 945871 - protein, 100 aa, Homo sapiens
ECRTSTGSGSASPTLARAMCLVSLLPKVNYTPPLYHEDPDTETKLYVVMEPIKPAYYKNFSLGGPDTVANAHIPRGPNCTLDDRCCLFKNAYTTNCQTPK

SEQ ID NO: 945872 - protein, 102 aa, Homo sapiens
MAEEDFAMVASDTRLSEGFSIHTRNSPKGYKLPAKPAIGCSGFNGDCLTLPKIIEAGLRMYKHSNIEGHDYGGNCCKAAYNPEFKGLLSILGNTIIVGLDED

SEQ ID NO: 945873 - protein, 184 aa, Homo sapiens
  misc_feature (33)..(33): Xaa can be any naturally occurring amino acid
  misc_feature (44)..(44): Xaa can be any naturally occurring amino acid
  misc_feature (62)..(62): Xaa can be any naturally occurring amino acid
  misc_feature (70)..(70): Xaa can be any naturally occurring amino acid
  misc_feature (73)..(73): Xaa can be any naturally occurring amino acid
  misc_feature (84)..(84): Xaa can be any naturally occurring amino acid
GHYFERLRRGYCKGPETFFVFKVLKMSNEEAAXNLQVALLRGGXRHAHSFMTGPHTVPQLAXSALTSLPXPLXAHLPSLNYSSXQRLVSSLKFGLFFCSLTPTPLFSSSPTLLFPRLPRSPPGLPPPPLLSSSLFLSSSPLLHFGPPSLPPPSFFVSTILYLFSPSSSLSSLPLSPLLPSYTYI

SEQ ID NO: 945874 - protein, 130 aa, Homo sapiens
RVPEMAFETMGGPDWKRRGFYWRNGPQDQGVNMEPRIEWEKMLKGIGEHPVYFAGDELPTVRRNLDSRGVEVDPGWIKVTGHQVYGGHFLKPVLNHCNLCRDVAWFWRIQGMLVITANTLGHQLTITEVR

SEQ ID NO: 945875 - protein, 116 aa, Homo sapiens
DLTLNGWRQGCKGLRKGQDKGGFPLAESPLAVPRGPFFFRAEANTTSHGRKSATAVLYSGAYWSTSPQRYFNWPEMHKKTQRSISSPPSKWQFAIFEGYQLYSFNKGTTTKGQPPS

SEQ ID NO: 945876 - protein, 135 aa, Homo sapiens
PRLLFLGQKAEDQLAYWNGPLLESESSLSVSGIPLCKGDFYGKGIIPGKMDPSRDPTRENLVMEESKTLNSEDIPKAWKEKGPTGVAHLNQFKPEPDPMGKRLEDPEPPGQRQPPRDGRRLLAYLPTKHGLSQDY

SEQ ID NO: 945877 - protein, 242 aa, Homo sapiens
  misc_feature (4)..(4): Xaa can be any naturally occurring amino acid
  misc_feature (7)..(7): Xaa can be any naturally occurring amino acid
  misc_feature (56)..(56): Xaa can be any naturally occurring amino acid
  misc_feature (69)..(69): Xaa can be any naturally occurring amino acid
  misc_feature (101)..(101): Xaa can be any naturally occurring amino acid
PGGXVFXQVLLWGGFLFSPFFFLSLVLSWVFSLFSCVFFFRPSSLLAPPAPRLVFXAGLPFFLWVLGPXPGAAPPADSVSRPVLCSPLAPPSAPWPPLWVXVSAAFASRLVRFRLFASSLSAPPAGSFVCLLCPCRRSAGSVVCLCRPVWCRRFPAASLVLGVGWVFFALSSPCALRGPSLLPCPLSPFRSPCSVLLLRLPLFAFFLLRVFVLSRCLPSPLRSPSSLSSLCLFLSLNRLCIL

SEQ ID NO: 945878 - protein, 250 aa, Homo sapiens
  misc_feature (70)..(70): Xaa can be any naturally occurring amino acid
  misc_feature (72)..(72): Xaa can be any naturally occurring amino acid
  misc_feature (198)..(198): Xaa can be any naturally occurring amino acid
  misc_feature (208)..(208): Xaa can be any naturally occurring amino acid
MWCFLLEKRGNNDCFPARFRHACSLCPFFPQVLLPVLAVLEASPLLLSCRGRRCLLFSDPQFIVGVGVLXLXARASSGTLSPPILLFLLFPPFFPPFCPPPFFPWSASLLPVFPGRLSLLRSSPVFSFFFASPTPPPPSPAPAGGAPRPPLLGRPLSPRRFPPPPLSGRRRRALFSVFLLPSVAPLLLLLWCTVASLXFSPRVLCPLXLLLSSPLPRPLSFFSPLLPPLSFSSPALLAASPPSLLPASFI

SEQ ID NO: 945879 - protein, 151 aa, Homo sapiens
  misc_feature (12)..(12): Xaa can be any naturally occurring amino acid
WNRGGGGLGKKXDRCLGGAGVKIGTGFGLGIGFSLTFFKRRMGALAFGSGMGLGMGGSNWQDDFQASIIFYTENMAKGRSRGFTWEHPRGRAREIMVIPQEYWRGLEEGGILLEQGYQEGFKLQDLGMHLKPRLVLGLDFLSGRWKGRGLK

SEQ ID NO: 945880 - protein, 85 aa, Homo sapiens
FRRALKIKDFANTMPGHGGIMDRFDCHYLMATFDNVYIASFIRGPNPSKLIQQLLTLRPDQQLHIFNTLRPNLIDKGMLTCTTED

SEQ ID NO: 945881 - protein, 190 aa, Homo sapiens
  misc_feature (10)..(10): Xaa can be any naturally occurring amino acid
  misc_feature (12)..(13): Xaa can be any naturally occurring amino acid
  misc_feature (24)..(24): Xaa can be any naturally occurring amino acid
  misc_feature (59)..(59): Xaa can be any naturally occurring amino acid
  misc_feature (62)..(62): Xaa can be any naturally occurring amino acid
KGGGGGNSNXSXXNPHSTPKTRPXLLWKDRGKKATQPYTLGQAHFNNGEDAEAGGGGSXYIXRCGGGASRDEGPGSKCSPEDLATGYNNRGQIKDFRGDFYEAMDDYTSGIEGQPNFGGPYYNRGLRLDRLGYFDDALEDFKEGLHLNPGISRCYFELKTDYSRQGRKTRKEWGQGIRDQNLDIGYFGYI

SEQ ID NO: 945882 - protein, 81 aa, Homo sapiens
  misc_feature (69)..(69): Xaa can be any naturally occurring amino acid
  misc_feature (71)..(72): Xaa can be any naturally occurring amino acid
  misc_feature (81)..(81): Xaa can be any naturally occurring amino acid
APLCLPPAHSAIMAGALTSLEMVRARWFTQKLYCIHPQKSGQGPRCLECLKKLGTGLITENMSLNIEKXVXXDKNVEGIEX

SEQ ID NO: 945883 - protein, 70 aa, Homo sapiens
SPAVSLVALHEDKLDHTPDELDPPVNIGAGVKTLDGLVQTDAAQIRTYGLTMGRQGFRQYSKDLGAINSD

SEQ ID NO: 945884 - protein, 133 aa, Homo sapiens
SNAEETGVNLERTDHDEPIKHVLERDDTEIAPEALGGRIEHQFTICAHSVSTQQYPSANQVLKHCETTEPLVGLLEALNHDSDKRQGNVNEVPLRGTGMERSRPCNNDRYMSDMFLRGYSAMADLWNPFIARS

SEQ ID NO: 945885 - protein, 108 aa, Homo sapiens
  misc_feature (1)..(1): Xaa can be any naturally occurring amino acid
  misc_feature (5)..(5): Xaa can be any naturally occurring amino acid
  misc_feature (7)..(7): Xaa can be any naturally occurring amino acid
  misc_feature (15)..(17): Xaa can be any naturally occurring amino acid
  misc_feature (20)..(20): Xaa can be any naturally occurring amino acid
  misc_feature (82)..(82): Xaa can be any naturally occurring amino acid
XKPNXPXPPPANTFXXXNKXALPLTHRQTTYPPCTFSYKPKGSTPHYYHRLFITTTTNERPAPPPRHFTPPPPRALIQSASXTPPVAAVAMSGSLPAFVLLRPRLTFL

SEQ ID NO: 945886 - protein, 136 aa, Homo sapiens
DGGRRSTMYAGSNPVAIVSGARAIIGSFTGALAAVPVQDLGSTGIKEGSKRATAAPEDVSDAIFGHVLAAGCGQDPVRHASEGCKNSLLCSSMELPDDLEVGLAAGGMANMNLASYWAYLRTGAKIGEIPLTAGIL

SEQ ID NO: 945887 - protein, 67 aa, Homo sapiens
LKCGVCALRATMDRKDARTEKRHVLAQRLDHCRYWTASSCAMKILYHRHLLLKLRAAKTKLSQAQSA

SEQ ID NO: 945888 - protein, 31 aa, Homo sapiens
  misc_feature (3)..(3): Xaa can be any naturally occurring amino acid
  misc_feature (12)..(12): Xaa can be any naturally occurring amino acid
MQXLPHTETIAXVSSISTTRLESTPVRYIAS

SEQ ID NO: 945889 - protein, 85 aa, Homo sapiens
GGEMTTLGLDNGVHNAKIGYGHENVSVIPNCQFRSKPARFKIFTANQIDELKDLSGLFYILLFQKGYWLNWNVQRQVWDYLFGYF

SEQ ID NO: 945890 - protein, 288 aa, Homo sapiens
  misc_feature (164)..(164): Xaa can be any naturally occurring amino acid
  misc_feature (191)..(191): Xaa can be any naturally occurring amino acid
  misc_feature (236)..(236): Xaa can be any naturally occurring amino acid
  misc_feature (249)..(249): Xaa can be any naturally occurring amino acid
  misc_feature (262)..(263): Xaa can be any naturally occurring amino acid
MDIENNNELAVARGGVRRRNDRESRTLLSESRRRDAAHSTTCRLTTYVTHDDITISDGDTTTLSNIRYRLYPSYINLCIFYWVVHCGVCDVFRTIRMNAVCLCVSTRYLYSPLLQQDKTERCDAQSDTKLTGSACVDAQTRDAVPPDGHTHICSTAALARSSRXLAAHNDSDSCYTTIQRDVTDVSTLIPXLVLNNRTCRLIRIRAVHISSSVTYYTGYRACRHTSRSSLQQEQHXLHGEMTHARSSVXLVSYSRTSVMLSXXLNCRTEQHQRHTYLSEGRTHTYTAC

SEQ ID NO: 945891 - protein, 147 aa, Homo sapiens
MILNKALLLGALALTTVMSPCGGEDIVADHVASYGVNLYQSYGPSGQFTHEFDGDEQFYVDLGRKETVWCLPVLRQFRFDPQFALTNMAVTYHNLNILIKRSNSTAATNEVPEGTVFSKSSVMLGEPNTLIFFVDNIFFSCGQHHMS

SEQ ID NO: 945892 - protein, 72 aa, Homo sapiens
  misc_feature (61)..(61): Xaa can be any naturally occurring amino acid
PYMARENLIVRSNCNSTISSNLIIMPTLDEGIGGPNFLAGSKAALSEGDQKKNYIKVAKRXVRRAARRAKDL

SEQ ID NO: 945893 - protein, 262 aa, Homo sapiens
  misc_feature (5)..(5): Xaa can be any naturally occurring amino acid
  misc_feature (46)..(46): Xaa can be any naturally occurring amino acid
  misc_feature (75)..(75): Xaa can be any naturally occurring amino acid
  misc_feature (159)..(159): Xaa can be any naturally occurring amino acid
VRPPXLPLFRFPAPFFFSHGSKRHSMVSTEPGDITTRVRGRGVPDXHRQGSKRTARRNRERRGCAWRAVRPPPGXTDHTTTSAPQCERRQGVRVRRNHAFACFSPPPTVPSICFLSCPPPAPPAARAPSPHSLPPTPPSHTATRPAPAHGYSSERCDDXSHSFILVPASGQSNYLRLARRIVFPVYRGSGLALSPPRRLRCFPPRPPPSSCVPVAHCSTHPHHSRVSYYLKPESTIHHNTLASPPHSTNTRTAQIRQVNYYT

SEQ ID NO: 945894 - protein, 104 aa, Homo sapiens
  misc_feature (8)..(8): Xaa can be any naturally occurring amino acid
MTLSNIRXPTTHVPRPSHSIVEPDSQASQYDTPHIPNTNSRVQHKDCDKSERLNIDNNRDMTRRDARPIRITPLYNKLRRRSTNPHHIVIPHIFIIHRILLFTL

SEQ ID NO: 945895 - protein, 137 aa, Homo sapiens
RSCSVRAVMPRSAAFSLSLGPTLFIVWPGSALQRDTQRFYVYSRHSAENGKANPPNGYVSGLHPSDNEVDLLKNGEGIEKADPSHLSFSKDWSFYLLDTTEFTPTEKEADARRVDHATLAQPKKGKGNRDMKQHHEG

SEQ ID NO: 945896 - protein, 111 aa, Homo sapiens
MSSGGVIGCEWSDTEACRGCKKGVLAETQDVPESDRRGNRLDCPAFRLTILDLVSYCSDASPPTAFSVRNTMRERLGRGLAAGPRLRGRIRDLVCRRVRRFLTREPIVMYR

SEQ ID NO: 945897 - protein, 159 aa, Homo sapiens
  misc_feature (20)..(20): Xaa can be any naturally occurring amino acid
MVFVLILYVRARRTSVAVVXVLAADAVYASVRTEALHTAEHSTKRSGTVREREERQAVMRDTRVSCNNIATRGSVMSDAVTALIRYVIYTRSSRHAPTRQESRSVRKRRRLCTVSAFSAAMPHGGRSDPSQIDGGTTYELYDERTRGDVTSIMQQGESR

SEQ ID NO: 945898 - protein, 163 aa, Homo sapiens
MPSIKLHSPDGEIFEEDVEIAKQAATIKTMMEDLGMDDEGDDDPAPLPNVNAAILKKVIQWGTQTTGGTPLLLEMMRPKKKRTDDIPGGDQKSRKLTKEHFVDLLWVKLLKHKEFVEVHANCCQYVKGKTPEENPQTSNIKNDFTGKEGSPRTHKGTPGGEKK

SEQ ID NO: 945899 - protein, 353 aa, Homo sapiens
  misc_feature (36)..(36): Xaa can be any naturally occurring amino acid
  misc_feature (344)..(344): Xaa can be any naturally occurring amino acid
  misc_feature (348)..(348): Xaa can be any naturally occurring amino acid
TLISSSTLPPHKLFFFPTSAQQRQPQATTSHTSRRXMYDAHGPVHYKNNDLPAPRWGAAAPGATTRGKGEEPGRPEGGGKEGEAAEPPTARARNHPTPRTDLERRHTVEHKTRQTRPPNPLPHPLSYYKLRKIRRGDTQPDAEEDVGEVLIDTQNDIILQNHSGTEYDVELIKAAESGEQMKTTKIVSRTTSRQRREERRDENIERRYRKHDTEKVNKKRKSECMIRRNDADVNHTSASIQAAGPIHSESMAKTDVTQRVRTNVGSDYKHERRGTLHTWRNHSEDTATHIDPGARILATANQSRDLHAQYEQIDAYEHRHYAYEYADLTVHIEILVAHIRHTNXTEMXVTIDT

SEQ ID NO: 945900 - protein, 134 aa, Homo sapiens
TRPLWSGQPSIKKAFKLITHYLKNPKHITELLTPNWTNLSPYRRTNVRISNMKTLFSAYSLRQIKTLNWQLTSQYLQSINKVLLPSLAAQHRHAYMERLKKGKELGKSYPAWLPKNITFSITSIRGTVCPVTHV

SEQ ID NO: 945901 - protein, 74 aa, Homo sapiens
TLDAGRTHFAYPIDEERFLNSLGVTNSCAPREPLQGPRMTFQLLINHDPFLREGAAHAFAQYNMDQFTPVKIEG

SEQ ID NO: 945902 - protein, 114 aa, Homo sapiens
GGPRTKGWTLDTAYRIIKEHISCYDHALIHRSLKGWVGLHAVLLTVTTELAYTHILDTQGVQTVGTILRGIMLHRISLQAFRIRYINKRGEQALRHDKVTGSAMLLMYEYTAYV

SEQ ID NO: 945903 - protein, 175 aa, Homo sapiens
  misc_feature (95)..(95): Xaa can be any naturally occurring amino acid
  misc_feature (99)..(99): Xaa can be any naturally occurring amino acid
  misc_feature (102)..(102): Xaa can be any naturally occurring amino acid
  misc_feature (106)..(106): Xaa can be any naturally occurring amino acid
  misc_feature (115)..(115): Xaa can be any naturally occurring amino acid
  misc_feature (120)..(120): Xaa can be any naturally occurring amino acid
  misc_feature (122)..(122): Xaa can be any naturally occurring amino acid
  misc_feature (124)..(125): Xaa can be any naturally occurring amino acid
  misc_feature (130)..(130): Xaa can be any naturally occurring amino acid
FIRTHKTASSLNPACQSLTHRRHAQGMTGRTCKSNYFLKIIQLLDDYPNRLIAGSSGGGSKQTAISPKKPPKVVFFAPFMNTMMPKAIHGNMGNXPAFXHFXPHNXRDFGLFLPXRPTQXCXGXXPPPFXSTFSCLGVHTALIVPIIHLLLSPLLTGIFSSFPSLYYFIILPILP

SEQ ID NO: 945904 - protein, 197 aa, Homo sapiens
QLHRRVFILLSNSCKAHGKIFADYRVERKCQKSNEAGMHPYMAVELIVPTLDELDQKMKKLKQNRMRERGKWNFLWSIFRSHHQKTRYIFDLFYKWKAISRELYEYLIKEGYAYKNLFRNMEPTSGRTWIAGCPNQAGSGPNHRVHTLRLSRMLMAEAGALHPGPLDFRRFLAVTPPPFLEATGQCPQAPDWEHRLS

SEQ ID NO: 945905 - protein, 90 aa, Homo sapiens
TWLLSPGQGGAASSYSQISAYSTPWYDYQRVHVRLMSLTTCQRIDHRVTGHRNKYWKLGLNMDMGVDFPVGGDDICMLTQHYWVLEMFYL

SEQ ID NO: 945906 - protein, 85 aa, Homo sapiens
  misc_feature (1)..(1): Xaa can be any naturally occurring amino acid
XKGRGGARIFRRCARDVISSIRDFLIYGGLLRGREGLPGVGRGDQGGGHRRAPLNSKGAWGPSNWGERSIYLKEIGQRMKAGHHI

SEQ ID NO: 945907 - protein, 80 aa, Homo sapiens
RTRMAAYFGGLILHAWLVACTKDRFSSCHLNIRDGYHHAMILLTTISLTHDHIPINRWWHEQPLYHVDNQSAPLLCNTKA

SEQ ID NO: 945908 - protein, 141 aa, Homo sapiens
MVGGKAGKDSAKANTEADSRSLIGGGHLPVGLIHRHLKSRTTSHGPVGATDAVYSTAILEDLTAEVLGPAGNASKDLKVKRLTPRDLQLAIRRDEKLHSLITATIAGGGVIPHIHKSLVGKEGHPEDCLKVAWIPCFLRTI

SEQ ID NO: 945909 - protein, 202 aa, Homo sapiens
  misc_feature (2)..(2): Xaa can be any naturally occurring amino acid
  misc_feature (61)..(61): Xaa can be any naturally occurring amino acid
LXPSVKSGAYPLPSPFMLPLHTQPFVSKTARCEQNSHTRTHNSFYQNPHQRLLFFWGVGQXKCPPLKKITPNSPLRAVIYLSSHSLNKPPLPTSFFLLFRGSSPLLFPFSRSSSPSTSLRPPPHNITFLPSSFLFPLFAPFFFSLPPLPFLPLFFFSFSPPSPPSSSFPLLFPPPSSPLSLSPPSLFPPLSLPLLSIFRKKK

SEQ ID NO: 945910 - protein, 212 aa, Homo sapiens
ISPGLKRGNAIFTFPNTAVKCAAAPEKIMYLSEAYWRKTGKRSKANIIFNTSIFSVVWVKKYADALQEIIQERHLTVNYKKNLTEGRAVKQEAEFENLDIPGETQVVSYRIASCYTSNEPHHLSSRPGLSLMLLNWWMGLRYSSPRRSLNSFGCVPCPSFACNIRVAVLLHPPFLPVTFFFFWPLLPARGFSFVPISSLLPLLHRLALQWKK

SEQ ID NO: 945911 - protein, 156 aa, Homo sapiens
KGSALRVAGVTYLVSCFRDMAFNFGAPSGTSGTAAATAAPAVGFGGFGTSSTTAGSASSFSAPTNTGTTGLFGGTQNKGFAFGTGLGTPPVPSTDLGTALGTGLAFAGFTTHQQQQRSTLGAVFSQSTQAPTQPNQLLNTASALSAPTHDADERAP

SEQ ID NO: 945912 - protein, 85 aa, Homo sapiens
MPNILPLLCRPHPSHHQVWIAGRGPPDPPLSSRVLSHPQNLEPPCHSLKVVVFLTSPAPLRAPSTSPTRSLVLPPKLLFRRHHIK

SEQ ID NO: 945913 - protein, 43 aa, Homo sapiens
MVAFRISSSRDWNIQAPIQSPEEVRGLHLCTSLMDMLKAWLRT

SEQ ID NO: 945914 - protein, 75 aa, Homo sapiens
SSSALQMAAAVGRLIRAPAALHVLSMSLGHYCHCSTQALPHLPRTVQGHRFPGFQNSMLRGEGSTNKAPQAYSFL

SEQ ID NO: 945915 - protein, 117 aa, Homo sapiens
  misc_feature (63)..(63): Xaa can be any naturally occurring amino acid
VLLLIGAESTLTTFCKDFSDYDSEGKSDGMDSTDCNFLYLELKKKVSRTEIHVKYFEPGGVSXHGDVDVLSIEEDSYLVTGQGFVSSTELDCHMRLYTNIPPTWKSIEDDLGTNILR

SEQ ID NO: 945916 - protein, 104 aa, Homo sapiens
  misc_feature (51)..(51): Xaa can be any naturally occurring amino acid
MPYQSRKDCLAPSMGHVPPTLNHVFQIVPPPLAACFLIQLCPPATVKNTRXIFRGICASLTTWARKLDPRPPGPGNLGPGNVQIVSYLRKQQWIIAGRACNKRL

SEQ ID NO: 945917 - protein, 362 aa, Homo sapiens
  misc_feature (1)..(1): Xaa can be any naturally occurring amino acid
  misc_feature (6)..(6): Xaa can be any naturally occurring amino acid
  misc_feature (14)..(14): Xaa can be any naturally occurring amino acid
  misc_feature (17)..(17): Xaa can be any naturally occurring amino acid
  misc_feature (22)..(22): Xaa can be any naturally occurring amino acid
  misc_feature (33)..(33): Xaa can be any naturally occurring amino acid
  misc_feature (39)..(39): Xaa can be any naturally occurring amino acid
  misc_feature (59)..(59): Xaa can be any naturally occurring amino acid
  misc_feature (70)..(71): Xaa can be any naturally occurring amino acid
  misc_feature (75)..(75): Xaa can be any naturally occurring amino acid
  misc_feature (120)..(121): Xaa can be any naturally occurring amino acid
  misc_feature (132)..(132): Xaa can be any naturally occurring amino acid
  misc_feature (136)..(136): Xaa can be any naturally occurring amino acid
  misc_feature (161)..(161): Xaa can be any naturally occurring amino acid
  misc_feature (174)..(174): Xaa can be any naturally occurring amino acid
  misc_feature (180)..(180): Xaa can be any naturally occurring amino acid
  misc_feature (206)..(206): Xaa can be any naturally occurring amino acid
  misc_feature (231)..(231): Xaa can be any naturally occurring amino acid
  misc_feature (233)..(233): Xaa can be any naturally occurring amino acid
  misc_feature (237)..(237): Xaa can be any naturally occurring amino acid
  misc_feature (284)..(284): Xaa can be any naturally occurring amino acid
  misc_feature (290)..(290): Xaa can be any naturally occurring amino acid
  misc_feature (299)..(299): Xaa can be any naturally occurring amino acid
  misc_feature (359)..(359): Xaa can be any naturally occurring amino acid
XPGPFXGRHLWVQXSRXLSRRXAGTTLYTNSQXHIPDRXPRYNVLITNPLLHPAETLRXRPPRHTTVDRXXPRHXISHDCSVCMIRVEELVEIVAFLLVSLLGAPLYMCGAVRHLRLHHXXRDALREAERDXTDTXVSSRPLPRLSRTHQTTPRDRDTTRXSSSPCFFLSQRPXPMVLCXRAYEYYATIYTTCSFTIYIWYSRYIXIMRGRTKYNPNTFHTIIFFYHTSLXKXVNCXMLTTHRCPHMSPQHLVILSRRLPRLWSCKYRMSAEEDGGEKTEKADXYRQTQXEATKHTQQXDLSVSLTALLHISSRISLATHALRSVPHLTPLLSFPDSFSSSHIFTSTPSTRTLQQRDRXNYL

SEQ ID NO: 945918 - protein, 224 aa, Homo sapiens
LGGRTPGIGALVGGGGGGGAPQDPRPGRAPSRARTRSRRFSFDISPIAHPPCAHPTPQSVPLASNRRAGGLCVRLPPYTHTHTRQARSMGPAFVPARRSQSSRSSPPTPLRTARCCPGRRGALQREKRRMLEIIDSTRLLAPRTYHHHSRPLRLPPPPPTPPSTDTIPRSIASPHSLAATGRARASPADGCERHPYSPSRYPIHLSCAHRASHKLKCARCNRRA

SEQ ID NO: 945919 - protein, 121 aa, Homo sapiens
  misc_feature (85)..(85): Xaa can be any naturally occurring amino acid
  misc_feature (120)..(120): Xaa can be any naturally occurring amino acid
VKTYSLIEGYAKDFDPAVTECIQRKKFPPDNSAPYGARYVGSMGADVHRTLNYCLWGVARPRYQEEPQWKAELLYEGNPMAYVMXTAARMTTTGKVAVSDAIPTHIHQRPPLTSGTPDDXL

SEQ ID NO: 945920 - protein, 225 aa, Homo sapiens
  misc_feature (64)..(64): Xaa can be any naturally occurring amino acid
LFKIRLRRAGPILCLLPAFGLRLFLATVLHAFSSFVPPFSSPPRRLFPLSQQSPFLFGVGPPPXAPPLNKLPPYSLPPAHPSIPLSSLSFSFPPLPFPPPRLLSHLPSVSPGFFFFFPFFSPPLFFSPFLLPPLVFLPLLSLSSSPVAFLFPFLFSSSSPFSPPPFPPSSLLPPFSFLLTLSFFLKPFFSFPLFPFFLLSSLPSPPPPSLSPSPLPLFFPPSYYH

SEQ ID NO: 945921 - protein, 148 aa, Homo sapiens
MSNRLNELAMRVINFEETCFAKKRQDTCIHVCNELCKMQCSCRTIVNKINTSFFVSVFCCFKECMRFINYNLGNEATVFVQRVIQGVLATNVSNKRINEESDMLDTEQRVNVLDKETKEFVDRCKLTPMKQGFTTSHFIFEKVTLYKK

SEQ ID NO: 945922 - protein, 101 aa, Homo sapiens
  misc_feature (30)..(30): Xaa can be any naturally occurring amino acid
GDPENSAHYEGGASDRVLSNGGEGEQYGSXSKQQSAPTTRVRYYLAGERHMQRAHLSLHILNRGSKTEQEGRNHNETKIRPICRGGGGVCWCGFRGHKMTL

SEQ ID NO: 945923 - protein, 173 aa, Homo sapiens
MAELQRMFLPHVLIMDRTERLARDVRKEMAGHHIVALCVLKGRYKFFADLMDYIKALNGNSARSIPMTVDFIRLKSYCNDQSTGDIKVIGGDDLSTLTGKNVLIVEDILATGTTMHTLLSLVRQYNPKMVKGASLLVKRPSRSVGLKPDSAGFEIPNRFAADMPLAINPLPGW

SEQ ID NO: 945924 - protein, 101 aa, Homo sapiens
MTSKLPVVLLAAFLISAVLCEGAVLPRRVKDLKCKGIKAILKPFPPKFNQGPEGDGKGPPWANPEFIARFLGGKKALFDPKGNRVQSGCAQFFEEPWHFLL

SEQ ID NO: 945925 - protein, 168 aa, Homo sapiens
  misc_feature (111)..(111): Xaa can be any naturally occurring amino acid
WYSLLRLDERQKLGNLGGSPQVVLLCCAFGRRDDLEDTGIMCGSSSCLTGRSSSTPWLKGGRRWFLSSPFAMIFLPFIMREFLKPGVYIYFLAPVSAPGIQLKDSASSFLXKFPQEISNQPLFHLGAPPLPPWVWGCCPTGNSRVNAPVCSRPPLVEIRESLPFLAFP

SEQ ID NO: 945926 - protein, 201 aa, Homo sapiens
SKSSYAEEGCSLTVTRPQSQVTLVTVSGSLPKDDGTLAGLSGLRTINGPTGGDLADALDYTGRGSRNRSASLTGEVTLGTALFKRSEAGTTDIDSIYEGIDFYFLNYPDPDGEIGTLTCARAPSAHLRPPLEMPFWSGNRSMIVPCVEVLTESPRDTISGNTAPMDENSVGASTLMKLIVIVHMTKHPSLVQTGLRLDKII

SEQ ID NO: 945927 - protein, 104 aa, Homo sapiens
  misc_feature (83)..(83): Xaa can be any naturally occurring amino acid
MQDHAASRLICTSGELGGCMPPPSRYIHPFFPSAPYSHEGLASTCAAPRTQEGSEGARTLSYDYGPIRGMVGNSDRVTPTHHXTPRLPRATQLRVRHTRIDSMS

SEQ ID NO: 945928 - protein, 142 aa, Homo sapiens
MTASGPAYHSAKRVCGGKQRPVQKEGRNQNRTIRRTALSKTWVCVRPTSTAILSQIGIRDQTLPCRVNDEGMMTRKVKKNFASPSLRDCQGRYMDEGTLEREYNIAFFTLCRHTLTGTKDEYNAPTTTYIPLTSGRREACAE

SEQ ID NO: 945929 - protein, 77 aa, Homo sapiens
RPIRTVGTQYMVHGRGALISQESLRDVSLSPLHYERKNCQLVDQGIACPTGKGGSCKYEQGELHGDNMVANLTYVRQ

SEQ ID NO: 945930 - protein, 132 aa, Homo sapiens
KSDPQRGRGRPRHLFCENRLQVLTASYVTEQIIKTIELPKGFQGVGPSSNDETLLSVVGRAFHTSFAPITGQVSAVLKKNPAVYLNTSKPLCKAFIVTYEDIRKQEERLQYVRMKLQKALMPHILSRAADSE

SEQ ID NO: 945931 - protein, 393 aa, Homo sapiens
  misc_feature (1)..(1): Xaa can be any naturally occurring amino acid
  misc_feature (5)..(5): Xaa can be any naturally occurring amino acid
  misc_feature (81)..(81): Xaa can be any naturally occurring amino acid
  misc_feature (116)..(116): Xaa can be any naturally occurring amino acid
  misc_feature (160)..(160): Xaa can be any naturally occurring amino acid
  misc_feature (197)..(197): Xaa can be any naturally occurring amino acid
  misc_feature (239)..(239): Xaa can be any naturally occurring amino acid
  misc_feature (251)..(252): Xaa can be any naturally occurring amino acid
  misc_feature (258)..(258): Xaa can be any naturally occurring amino acid
  misc_feature (271)..(271): Xaa can be any naturally occurring amino acid
  misc_feature (287)..(287): Xaa can be any naturally occurring amino acid
  misc_feature (303)..(303): Xaa can be any naturally occurring amino acid
  misc_feature (306)..(307): Xaa can be any naturally occurring amino acid
  misc_feature (309)..(309): Xaa can be any naturally occurring amino acid
  misc_feature (340)..(340): Xaa can be any naturally occurring amino acid
  misc_feature (353)..(353): Xaa can be any naturally occurring amino acid
  misc_feature (355)..(355): Xaa can be any naturally occurring amino acid
  misc_feature (364)..(364): Xaa can be any naturally occurring amino acid
  misc_feature (384)..(384): Xaa can be any naturally occurring amino acid
XRPRXAAEIVDGISVSAWRYKEVDGIMIARCQERMVETDKTRTTRLERRRQMAYMSWRQTRDTYNQHITARHTTTHRTNHXSPPRPLHAPPSPAAHHTTTRPPSANPEHATRSRSXDMETAVADHTISYKQLNIRYSSPNSIAHYRHSRGRTMELADMRXKSAQRRINALYQRCTVHTTLYPTRARTRRTRALAAAXGDFKRRVARNVMSLRMLRLPLRASTRISVASQRLRALLPLRXPHATAPTSLARXXYVPSEXHHDSLCDVCHITXQIALKNDDTRHEEHTXTARTHDVNSRMHDTRXARXXPXYIDARIRLHTLRPTHCDRDLAVQYNYYRGDXEETRACRASSVNXWXSVVRVYYEXRRDTPDVLCICSLSAALVRXLYIHRGIAR

SEQ ID NO: 945932 - protein, 202 aa, Homo sapiens
  misc_feature (1)..(1): Xaa can be any naturally occurring amino acid
  misc_feature (136)..(136): Xaa can be any naturally occurring amino acid
  misc_feature (151)..(151): Xaa can be any naturally occurring amino acid
XTHSVPGGGTVKLKLYEDSAIPLPAESPKKGPKMVASRVLSPPPADPPTSSFSVLGDVGPPIRKPMNRGTLISLLVGGPHMFVSDSLMAWPRPSYPPSLTILYSPAGLLPAPAPPLSYPLPSASARFPYVGPAPSXGFLRSFSPPLCFLFXDRVVLLSFPPLFPFFTTILDFPRPLSPLTHSPHPSTPSPFLFSLSPPPSVC

SEQ ID NO: 945933 - protein, 65 aa, Homo sapiens
  misc_feature (36)..(36): Xaa can be any naturally occurring amino acid
  misc_feature (54)..(54): Xaa can be any naturally occurring amino acid
  misc_feature (58)..(58): Xaa can be any naturally occurring amino acid
  misc_feature (63)..(63): Xaa can be any naturally occurring amino acid
MIVGLRILFRSRCSSFDVTPSSTYTDHTPLISDIIXSDISQTHYRKTITRVVDXSRPXILVFXTA

SEQ ID NO: 945934 - protein, 172 aa, Homo sapiens
  misc_feature (1)..(1): Xaa can be any naturally occurring amino acid
  misc_feature (7)..(8): Xaa can be any naturally occurring amino acid
  misc_feature (21)..(21): Xaa can be any naturally occurring amino acid
  misc_feature (25)..(25): Xaa can be any naturally occurring amino acid
  misc_feature (30)..(30): Xaa can be any naturally occurring amino acid
  misc_feature (33)..(33): Xaa can be any naturally occurring amino acid
  misc_feature (43)..(43): Xaa can be any naturally occurring amino acid
  misc_feature (50)..(51): Xaa can be any naturally occurring amino acid
  misc_feature (73)..(73): Xaa can be any naturally occurring amino acid
  misc_feature (168)..(168): Xaa can be any naturally occurring amino acid
XRGGRRXXKGEKGRKKGGISXRRGXKKKRXGGXIEKREETAPXGGREEKXXGEEKTKGGRGGEKGGKKKEGRXKRGEKKRRRSRQGRGGKREEGQRAEGKEERREKRGKGGKGKKGTKGRGEERTEPETGKQGEEERAREKREEKKGGEEREKTKKPRKGRKEKRRKXKGEP

SEQ ID NO: 945935 - protein, 117 aa, Homo sapiens
  misc_feature (1)..(1): Xaa can be any naturally occurring amino acid
  misc_feature (11)..(11): Xaa can be any naturally occurring amino acid
  misc_feature (42)..(42): Xaa can be any naturally occurring amino acid
  misc_feature (81)..(81): Xaa can be any naturally occurring amino acid
XQGSGALQEKXLPSVPHNTNPSPPLRAYITSQEMKGIRGGFXKGAGPQGERFLGDLVAKAGPDRPPSIFEGQVHLWDQGFXGWAEQERNEFGRQVEVREADFGAKVYQGGAATGGKG

SEQ ID NO: 945936 - protein, 341 aa, Homo sapiens
  misc_feature (1)..(2): Xaa can be any naturally occurring amino acid
  misc_feature (5)..(5): Xaa can be any naturally occurring amino acid
  misc_feature (12)..(12): Xaa can be any naturally occurring amino acid
  misc_feature (14)..(14): Xaa can be any naturally occurring amino acid
  misc_feature (22)..(22): Xaa can be any naturally occurring amino acid
  misc_feature (29)..(29): Xaa can be any naturally occurring amino acid
  misc_feature (32)..(32): Xaa can be any naturally occurring amino acid
  misc_feature (41)..(42): Xaa can be any naturally occurring amino acid
  misc_feature (48)..(48): Xaa can be any naturally occurring amino acid
  misc_feature (87)..(87): Xaa can be any naturally occurring amino acid
  misc_feature (90)..(90): Xaa can be any naturally occurring amino acid
  misc_feature (95)..(95): Xaa can be any naturally occurring amino acid
  misc_feature (104)..(104): Xaa can be any naturally occurring amino acid
  misc_feature (106)..(107): Xaa can be any naturally occurring amino acid
  misc_feature (143)..(143): Xaa can be any naturally occurring amino acid
  misc_feature (228)..(228): Xaa can be any naturally occurring amino acid
  misc_feature (313)..(313): Xaa can be any naturally occurring amino acid
  misc_feature (337)..(337): Xaa can be any naturally occurring amino acid
XXILXRVDPVRXVXLETLRHTXLIPVISXLTXYHDILCNPXXHLFHYXVLIASTRGSSRIRTTFSIRCIILASSTRFSGSDSKIDTXTIXTSTRXQCRALTDVXHXXYDHTCSCIIITRRAHVSRIISNIRYSILHMTSHKNXTEHILAPGANSREAQRSPLSGYYFKMNTHKSHHVIFLTSSSVLYYERSTTLALWATLLRDEVHYRELASNIVAPLTYVTNKFAPXGSCSILTKASGSLTSTSCTLLIRGLSQQHMCHCATNGELLSYTLLPLLDAYLCALTCSTLHSETRIEWPITIQALLNHTNNREEXLDGIARAALIHGYARAGVSPQPMXQLLH

SEQ ID NO: 945937 - protein, 127 aa, Homo sapiens
FKGPKAVCLVLKIVAAMVGQSKGIKKLLQAEKRPAEKVSEARKRRNRRLKQAKEEAKAEIDQNRLQREKEFRAREAAELESRGSCSTEGEKGTQERRTIFQTYFRQTRDEALATSGFWPVTFGQKSM

SEQ ID NO: 945938 - protein, 189 aa, Homo sapiens
  misc_feature (1)..(1): Xaa can be any naturally occurring amino acid
  misc_feature (10)..(10): Xaa can be any naturally occurring amino acid
  misc_feature (14)..(14): Xaa can be any naturally occurring amino acid
  misc_feature (51)..(53): Xaa can be any naturally occurring amino acid
  misc_feature (72)..(72): Xaa can be any naturally occurring amino acid
  misc_feature (74)..(74): Xaa can be any naturally occurring amino acid
XGMGGGYKPXSSGXQSYRSVGFLRGLNLKEKIMPFMGWCVGTHTSDEQNHXXXWGGGIIPKGDAQEGASHGXRXKGEFGGFGSVTGKIGWEIKINHEGEGNRARYMAENPHIIGTKTPSSDGWGFDYTKHPGKPDPRGEWNPDLSIKRAPEGRVGALLGFKFEGHLLRASDDHTGWLGDINAGAKEGGA

SEQ ID NO: 945939 - protein, 85 aa, Homo sapiens
GIHASGSFQFQFSRFRALNGLGLLYLFDLEAMQKTTYLQVNSRTPAHKEKINPLTCYGGANYAIRQCSCLTEQGRENSDTGALSA

SEQ ID NO: 945940 - protein, 102 aa, Homo sapiens
WLLDVGFDCLFVLCLRPRSPPIPHPHHERVYFDLFFFQLSLPSLLSVNVGSSAARLYLYVVVRGRPPVLYLGKFQTPPAFPHPLAPTSPHQPPHRHITGESK

SEQ ID NO: 945941 - protein, 141 aa, Homo sapiens
MVNKDKRGKSRYMIRYKRTLEPSSLSSTHDPLVKREPKVFNRGDATYYRPNSRMFHHEITYNLDFRGTYKFNTTDNSLKPHYNEQIRACAALAEDPNLSENFMMCQGRGHWYDIESGSYGRNVSCLQKAASVCSLSLCMFS

SEQ ID NO: 945942 - protein, 271 aa, Homo sapiens
  misc_feature (81)..(81): Xaa can be any naturally occurring amino acid
MAGLPSQLDRCGPMVGGRGLGALKPRKGVNTMPHSSSQSQLYLCRRVAVMRLADALYRGSREGGVVDAGEQLCYEITNKLXPPHNPYNPTTRDDRGVVLWGGSSRALNGSADAAADFTNLNGNSVLTQTKGDKDDDQLRILYNVCDGVAGRRRLRPSADERFRAVLAAARHASCSGVMYSRPTHPATPECRVPTSCMSVRDTAHTPYVRFINTHLIDVCNHIHKQNTLSPCSVRGQDGIFLIPTLIHHIKATPLIFTESGFEGARTASGGE

SEQ ID NO: 945943 - protein, 316 aa, Homo sapiens
  misc_feature (215)..(215): Xaa can be any naturally occurring amino acid
  misc_feature (239)..(239): Xaa can be any naturally occurring amino acid
  misc_feature (258)..(258): Xaa can be any naturally occurring amino acid
  misc_feature (274)..(274): Xaa can be any naturally occurring amino acid
  misc_feature (311)..(311): Xaa can be any naturally occurring amino acid
DCRRGAATWGGGHPVDIVATYGSEVRICKNSLQSKLTPRRITNTTDISEKDTSNIEQVHNKVPCWSLVLRITQELRAGGDGEERRAGIVLIYDFLRYRDELCLSVLYFRWSCYSARRAPSSTLCYTLLSLYPCPEYGCCSCSLVVRVVGESVVVSSVYVCSIVVGRGGGSLLLYVMDCNPTERYDTHQGRTERRVVELGDKTFSLLLRYCLYILXDRRATVTVESRDDNIKSSIQVREXMISVCVAEYAKRLSSFSTXHEPNTTSSCIMATSHXVHDTLHTDACRKRYVVREIERSIERCSRRVVHVSSMXCAVVE

SEQ ID NO: 945944 - protein, 74 aa, Homo sapiens
GTSTPYGALAWPGISGLGCSDAETAEAGELAHTRSINSLWCLRNHQQTNLTVCDTAECPPADFHDSSDADSSAN

SEQ ID NO: 945945 - protein, 84 aa, Homo sapiens
AWFTELCPDIPALYKDWIKEMIYVLLGRQAQQAGKKLSWKHWRVRGGLEPQWVYSALQWQSYNLGILSRLCKNRYKIARIYGKD

SEQ ID NO: 945946 - protein, 70 aa, Homo sapiens
PPRAARHCPAAPPVKKGPLYPREHHKEIKIEGKGEESLVTTMTHNSPLYFISLIDGGQHKTTTRNSPPVT

SEQ ID NO: 945947 - protein, 193 aa, Homo sapiens
  misc_feature (181)..(181): Xaa can be any naturally occurring amino acid
MGGFLGWWDEGKVNLAIDRNIRYTQQITANTRKDSEDKCQQGDTQTEAHPTTLLKGVFARYGFVNGWVWTVGGWGSAVYYRLCLSGAHASFEGLYLTRSVTSASSSPLSVRPPRNVIWCNMSCHGEETSNYGGVMSNDGTERTSCDGKGRNNAYAYISVESWSALLAILHIVDMKIHTSCXLLTNDYTPSFEA

SEQ ID NO: 945948 - protein, 395 aa, Homo sapiens
  misc_feature (49)..(49): Xaa can be any naturally occurring amino acid
  misc_feature (64)..(64): Xaa can be any naturally occurring amino acid
  misc_feature (132)..(132): Xaa can be any naturally occurring amino acid
  misc_feature (136)..(136): Xaa can be any naturally occurring amino acid
  misc_feature (171)..(171): Xaa can be any naturally occurring amino acid
  misc_feature (185)..(185): Xaa can be any naturally occurring amino acid
  misc_feature (193)..(193): Xaa can be any naturally occurring amino acid
  misc_feature (198)..(198): Xaa can be any naturally occurring amino acid
  misc_feature (225)..(225): Xaa can be any naturally occurring amino acid
  misc_feature (378)..(378): Xaa can be any naturally occurring amino acid
RSGALYSGRHPPGNSALYQGPGGTGSAVICSGALLYDDESPHRLAVRLXARVLAECQEERIRGXLYIPAHRAGSITMCHAEIRFMWVVGRVVRTRARRGVSARLERIRREEAEEMEGEDGWSGVVLFADDKXNNMXRGRKSTKSAVGVGAGRRVGGQVRRLARTRIPSAMXDSAAGKKERPFVSXTRTGATEXRMTRXEGAPPALPSNPTTHVPAAVGLLPLRPXVPRAFDSSNDSRAGDVRARSLSLSRRSYAEINVSDLREADASGGRARCAELMQPYRRTARRLLARGRDEGCRGLSAGRACGFRRCWRWWSRVRSCECRVICGGRLFASCVAVCDRGVRRRSSEWWVSRKRCSHSVCDGRRATPRSYVLRAVYXDSLNYMCAANPSMCHGR

SEQ ID NO: 945949 - protein, 104 aa, Homo sapiens
MVRARRPSDVVLSELVHVDIFDPSANFVETQKLITIYYAYQESHQSVLIKHQQPHPPHIAHYFSTHNKWPVDVTAINSRWSYSRSTVFAFYFLLFIFRFGRCTV

SEQ ID NO: 945950 - protein, 50 aa, Homo sapiens
MSETMWEFYDCIAIFVLELRNVSYTIDALTYRPPLSRFNAHLFPSRGLGP

SEQ ID NO: 945951 - protein, 321 aa, Homo sapiens
  misc_feature (23)..(24): Xaa can be any naturally occurring amino acid
  misc_feature (37)..(37): Xaa can be any naturally occurring amino acid
  misc_feature (166)..(166): Xaa can be any naturally occurring amino acid
  misc_feature (168)..(168): Xaa can be any naturally occurring amino acid
  misc_feature (174)..(174): Xaa can be any naturally occurring amino acid
  misc_feature (194)..(194): Xaa can be any naturally occurring amino acid
  misc_feature (209)..(209): Xaa can be any naturally occurring amino acid
  misc_feature (264)..(264): Xaa can be any naturally occurring amino acid
  misc_feature (292)..(294): Xaa can be any naturally occurring amino acid
  misc_feature (318)..(318): Xaa can be any naturally occurring amino acid
WRTVQAAAICTRERSAGYICAHXXGHRRSRVTTSCSXIYILWLQRTYMCVWCRCCGDRRSEHYRVQGEERERKWQRVRMLQTQYDATPTEQTVTSQHSKHNHSIIVPVRTGQAVGAPRERQREEHTTRTCETQGVMWLEEMWVGRSRLAHKDKSNCSNDTHNTHNXRXHTRQYXQTHVTQLLQLSTVVSGYSGXMLSITPYARPRRVTXRVRYGCSPRIVLNEDSDAPEYHRQYMSKSYREQIIVSGTLHALINYQTGIFSHTXIRRHIPTIMMNINKCIDNQKLNGIILSXXXVIDVILFSAHLHEIVTTHLALTIXVEL

SEQ ID NO: 945952 - protein, 30 aa, Homo sapiens
  misc_feature (8)..(8): Xaa can be any naturally occurring amino acid
MSDHTTQXQSLVRYSHCAVYPRRQYAASRS

SEQ ID NO: 945953 - protein, 161 aa, Homo sapiens
MRGKNNIETRKKERKTTESGRPKPVREEKRNNRYSFQQQDEERRLVEFTPSLRATCAEEKGGRHRHAASGYREQDEDKRAWTPAKTQPKNNDETEVSRSKGTLENELTPRSRPLPSPQSTPSYLLLYDLRCECVNHASLADASAVVDELKICRTSNKRTTY

SEQ ID NO: 945954 - protein, 225 aa, Homo sapiens
DVAIFDAGDQSSDSSDQADAEDSLGSSTDCSEADKHCFPQASYKYKIRRSNTVPGRTDELALNLKGGGAEALLYRATMISYSMSGTAYAIYELGGASFPTKREWLRTSQHSLGSLTFSSLWTSDQITNRALLCRSIFIGSVVTATTKALSAMTNLDPQRETPPARLRPSCSTFLQGYASDRRPSSFAISSYGAAITIDLAFIHIVMLCAKYGLVLDDRHPIVLLQ

SEQ ID NO: 945955 - protein, 104 aa, Homo sapiens
  misc_feature (22)..(22): Xaa can be any naturally occurring amino acid
PPLSLLTPSLPPLTFPFYLSLXYPQVYRVPTNIIKYFSIVLHLNISTISITITNSPLIKPFSPLYYLILSHSANLSSISTPLSFYGVPLHALPLLTSIKLHNNL

SEQ ID NO: 945956 - protein, 103 aa, Homo sapiens
  misc_feature (28)..(29): Xaa can be any naturally occurring amino acid
  misc_feature (31)..(31): Xaa can be any naturally occurring amino acid
  misc_feature (64)..(64): Xaa can be any naturally occurring amino acid
  misc_feature (67)..(67): Xaa can be any naturally occurring amino acid
  misc_feature (73)..(73): Xaa can be any naturally occurring amino acid
  misc_feature (90)..(90): Xaa can be any naturally occurring amino acid
  misc_feature (99)..(99): Xaa can be any naturally occurring amino acid
  misc_feature (102)..(102): Xaa can be any naturally occurring amino acid
MRDRHTARKRAREYRITHISRPSAVDDXXVXTIVISSSSYQVSHTSALYSIQTPNNTSSLTRLXRNXNTHISXYNTVRSCRVAASTHARXRSRSHRAVXSLXA

SEQ ID NO: 945957 - protein, 70 aa, Homo sapiens
  misc_feature (29)..(29): Xaa can be any naturally occurring amino acid
MYQRIVPRVRNVWPEDTIVGFGLDRAVEXRHTNENNIACRGRSDDCVPGATRLCILPRCLFAVSCILVVA

SEQ ID NO: 945958 - protein, 119 aa, Homo sapiens
SKSMNEGRGGNSSARHVSCNIARATLRSTRPVYKLLTVIHYMRVILARKETLYGFPLGDSALKGSHSTSELLTKGRLLKYIASIPQWHTLLQIHRMSPLLEPCICEQLIYLDAFHGTRP

SEQ ID NO: 945959 - protein, 193 aa, Homo sapiens
  misc_feature (115)..(115): Xaa can be any naturally occurring amino acid
MRLPPHRRRRYAERHPTLTPRPRHPTTCLTTQCPALARRRHVLVCGDEGRSAGAAAHAVVLLVANIETHAPPPRPKPKRELPLTLYLLYQMIKKNTVLDICYPCADSRVRICAIXLEDDVYILSKRHALPPNHFAHHHHRIRCNLLRSASLLLHTVLRGAVSGCGYNRCYVMVTLSDAPLIDNHMRARCNVVR

SEQ ID NO: 945960 - protein, 130 aa, Homo sapiens
  misc_feature (30)..(30): Xaa can be any naturally occurring amino acid
MIKFSQTVTSNHSSYTFIFALFTRSSNANXACNMITTSTIDTHNVVIWIGVRRYCWLLAGVSEYVGRVEIRKNTNKGADIKPTYRSVISLLVTVIGVEVISMYQYTSNVYTPTLLSSFLYYLLIDRQHDR

SEQ ID NO: 945961 - protein, 198 aa, Homo sapiens
LDGYRDAKSKPTHLTLIPFCPADFEFMKRLHCKNGKYGNSAGQIVSLGSDKASQLQAIIGFRHTLNYITVNVHHWYEQNIKQMYQLAHIKCSSDIIKTSVGPGSTTLENDETLIISDRILETVICPYLKEPLHTSDDNISNGNTAYNLCTTVTLYAIEKHKELENEPLSLVKSRVFRNTVASKRNQQMAPSQSYANSE

SEQ ID NO: 945962 - protein, 74 aa, Homo sapiens
PRRPASFGPREFALWSGAEVASPEVEQPATRKSNQQGNHIKAAGAVFLDSLTQHTNIYIPTHPLPIPPLPDHCK

SEQ ID NO: 945963 - protein, 108 aa, Homo sapiens
MTSDIHSIGWPTALKDAKHPTVIPDRIALIEKTDLSQVQMLTSDLTAPCVSAAYILRWQVNKNILSNTSQHSLYYKYKHIPTRCGGACRCRYSRGYKHENVVNLRGRG

SEQ ID NO: 945964 - protein, 51 aa, Homo sapiens
MNCNWRRFITQNSHAEKHGTRGPCATIKTEHAKCGYAETAPRHGHYTEGSK

SEQ ID NO: 945965 - protein, 73 aa, Homo sapiens
FGFKNMYAKVSGSINMDSPPQGLFRGLSRQASHQHMGYKKGPHVVENREECGPLPIVVASPRGPFRKDPKPKN

SEQ ID NO: 945966 - protein, 132 aa, Homo sapiens
  misc_feature (119)..(119): Xaa can be any naturally occurring amino acid
MGSCYVAQAGLKLLGSSNPPTQPAKVLGLQAEPPCHLLLSSFRSLPSPGPPPPWLLMDYCSCLVPAVPPSGLCPHALLLSLRSSQVAAQLPSLLKHPLTREACPGHPLRQLYLPLPFIXSYSVLFFLNDPTN

SEQ ID NO: 945967 - protein, 191 aa, Homo sapiens
FFLRPILALLPFFVGVQCLYLGALLSTPPGSFLFSFFFFGDKVFPFSPPPPGGTCVFRDPPNPPPPGCLGVFPPPPLRPQNPGAPPPPPPILLFLRETPFSPIAGPPRGVFLPPTPPGVPLCDPPPGSSFWGTCGPLLLEETPITFFFPPPNPLNIFPLFPPGAGAAPLGTSPPDLFGGPLFYFSAPRSRA

SEQ ID NO: 945968 - protein, 69 aa, Homo sapiens
YRGKTAGGHFAFSILKNALPWEDQFQTVFNNLEHAPELSSKFDLSGPTNTSYAGPIALDSPNRAIITGG

SEQ ID NO: 945969 - protein, 113 aa, Homo sapiens
MTALNMYIWKLLRENHANCSMTFFSMNNSLIWSALHLNNNMKGNCITKEMMQTFYSRCYREAHTFKPSCICALKLGYRTSTPTKSGKLRMYFRIQGLPSYPCRTYCSVCNEKD

SEQ ID NO: 945970 - protein, 107 aa, Homo sapiens
MVNAIICMALECMGYPCFVHVALRNAIVITIRSGRLCVSAILVINCIEYGRVTLVHAATRSIVLSTDAYILTSVIDPRTELHAIMGCEELVTRIIAKIKSSEGTVQH

SEQ ID NO: 945971 - protein, 156 aa, Homo sapiens
RGFSQTPGKVSRDPFNFRPPPPFQKRGFWGPPQGLCSGDSWAFGGVTAPPFGKVPRFVAHRSPFKQVGVFKMRGPPGAPNSPGPMGGGGAPKFFSWGAPRGPQETPRKNLPRVWSLGSGGFKIKGGKKKNSPPPKKPPPHPPKEINLGKTTPPGFF

SEQ ID NO: 945972 - protein, 124 aa, Homo sapiens
  misc_feature (34)..(35): Xaa can be any naturally occurring amino acid
APPKLFLRPQPGATEARVNPRGYVSPGGKNLIFXXPPPRTAPTPKAGPKAGTTRPRPAPRARRPPPRPIPTSRAPRARTRRRPTPPGTHGRNGATRARTKPRPGCPPHRPAKGRPKRPGDFPRL

SEQ ID NO: 945973 - protein, 116 aa, Homo sapiens
MALLGFVLQLEHPGSRVHRGGRKDPLRKTSLRETFRAGLKQKLFKPLLNDLFEQSPSLGPGDPNINKARQSFFLHHGRVKRQLSILQFKGATESWAPHKGEVLNAKRCNGMETGQD

SEQ ID NO: 945974 - protein, 145 aa, Homo sapiens
AGPCMGIPPRFFYNGTPMACETFQYGGCMGNGNNFVPKKKCLQTSRIVGACNLPKVRGPCRAFIQLWAFYPVKGKWVLFPHGGCQGNGNNFFSKKKSKKYSGVPGNGYKKILAFPNYNWPVSKSKNGQFFSRGPLAGSPKQPGSK

SEQ ID NO: 945975 - protein, 101 aa, Homo sapiens
MAYKEPCFTHLHKLRDHAPQFSPAVLKPGAVCHRSKPAVRPLIGDIADACNVRGDVECEVSNLRDDVSWTYDSKSRILCTKSVGELVALGLLRNLSKKHNW

SEQ ID NO: 945976 - protein, 106 aa, Homo sapiens
LFPFKPALLCIMKPFQKAQSLIWEFLLEPRQTLNDVDENGSGVSLYLLLTLPEFASYTEFPTDYTCLNETDLFETRPGAVRLTLERFVGGIGTDYSTPEVTRGDQL

SEQ ID NO: 945977 - protein, 117 aa, Homo sapiens
MVAELLPKNGELTIYTKLKGVFYKKEGLTGPSNRTKPSYPGTNARSGGTPHFLFQKPDLGWQKTHYFVGPPHNSFPREEPNPFGAVNFLSNGKNTPQPKNLWLPKPLPPFFPTFSFF

SEQ ID NO: 945978 - protein, 117 aa, Homo sapiens
FYFMPFFPSPQHFFFLMSLFKLPLFYDAVLVIFLRLAGNSWNMGGRGPPKQGGEINPPLTPGWAWPPGGGMAKLFPYDGGIILRRNNNLREPQSPVFWGTNPKGGGPPQKQGNSSPP

SEQ ID NO: 945979 - protein, 141 aa, Homo sapiens
PVGRGGRVRRPPHPPPPGAGTPPPGGKKEEPPGGARPATRQSPAERRDRGRETPPSRPGTARQGTSPARGAGHPGGGQAGRAARAPGRAPAGGPGPLPSRGPGEPHHGRRGRGPHVAGAPSGRAGGRTPPGGGPGPRPAPA

SEQ ID NO: 945980 - protein, 95 aa, Homo sapiens
MSGLRDRRRMGDRCMNMRVYSFVNAGSIQLMGRQSPPHSPGLNIEFLGKTGTHRVSPDSLEVLTYEDNRLGLTKSCDYRLKTPGPAPKRILAVYY

SEQ ID NO: 945981 - protein, 102 aa, Homo sapiens
VSPGDCTPPGNPVQGFFKGKNFPLGPPLGYSCENRDHLGGVQKHQCVFGEWNRALPVCKLIQEAPKPKCEKALFAFQESKNLCEPMENFMHQLRKGACQWGS

SEQ ID NO: 945982 - protein, 35 aa, Homo sapiens
MRALLRPDLLLRGSLTPVYTDWETPSNWGLTTPYT

SEQ ID NO: 945983 - protein, 182 aa, Homo sapiens
  misc_feature (6)..(6): Xaa can be any naturally occurring amino acid
  misc_feature (22)..(22): Xaa can be any naturally occurring amino acid
  misc_feature (30)..(30): Xaa can be any naturally occurring amino acid
  misc_feature (33)..(33): Xaa can be any naturally occurring amino acid
  misc_feature (40)..(40): Xaa can be any naturally occurring amino acid
  misc_feature (60)..(60): Xaa can be any naturally occurring amino acid
  misc_feature (67)..(67): Xaa can be any naturally occurring amino acid
  misc_feature (70)..(70): Xaa can be any naturally occurring amino acid
  misc_feature (82)..(82): Xaa can be any naturally occurring amino acid
  misc_feature (85)..(85): Xaa can be any naturally occurring amino acid
  misc_feature (111)..(111): Xaa can be any naturally occurring amino acid
  misc_feature (132)..(132): Xaa can be any naturally occurring amino acid
  misc_feature (136)..(136): Xaa can be any naturally occurring amino acid
  misc_feature (153)..(153): Xaa can be any naturally occurring amino acid
  misc_feature (167)..(167): Xaa can be any naturally occurring amino acid
  misc_feature (171)..(171): Xaa can be any naturally occurring amino acid
MSRRTXCRQDVRVHACDHCTDXHVPCALLXDIXLYYIWTXLITASRAYTLARTSRYRSVXSRYSRTXSVXRVCDDAMAVTGXVVXYCAYTLLSLTVITNYGCILCCHYCVXYSIGYFTRHAYCAHICALGLXAEQXVDNNCHVIAYVASTLAXTLSTYDVETITVVXVAHXYNPHWALAWSY

SEQ ID NO: 945984 - protein, 122 aa, Homo sapiens
SQKKNFFLGKGVSIPSPGEGDTPLRAKPHFKFFKKPVGEIGKARGPLLKKGGHPKPKGPLFPKTKRGPGPPGPPGFAPNEKGGPTKPPLGGAPNLGPPPQFGARGQMGQQIGEREFFPKIFK

SEQ ID NO: 945985 - protein, 279 aa, Homo sapiens
RQEEEREEHGGNSAREKRRVEDIGTARRIGKPPGEKTGTRRADTMTFKCKENRSKALGQRSRKEKNRENDKQKNEEAKQEERKLDRTEKERKENKHEGKKYKQKKDGRKRRREGGEEQKERDKQGGTNREENEGREKEERDKWEKRHNITKGERDEEKTQKKEDQEQAKEQVRAEREKKSREPEHGRNNRREAERGDGRRNEQRRSGEDTAERREGDEASRNETENGLKREEREHNEYEQTARERSRRNETQAKADGDGIVMTKGREEEGAQPTTDTNT

SEQ ID NO: 945986 - protein, 128 aa, Homo sapiens
QRERISSEPPPPPPQRRRSVAPFSEVLLSGNSSKSSGLRNFFVLVLYSVRTTLRLVKTRSPKENRAKPKRTTSIDRPTLPTDKPPQDQNKRLYGKRIIERIESLSQHLLSANFRPYDSGYGPSRRTPR

SEQ ID NO: 945987 - protein, 131 aa, Homo sapiens
VVRTWYEGIRLLVRIEHGTLIQHRGTSSSKIRLSPIVPPRNMTYLRQKQTYTAEDLDGVAPSTDVKTNPDLNLVHVKRKLPTHRIGFRKTKGIKTSLKVNSNHTGSDGNTGRSAGVGQVTVITDTSYGGIL

SEQ ID NO: 945988 - protein, 100 aa, Homo sapiens
MSTKNRKSASRGIFESLKDPPVGEEKTEERANPKGRQRKKSTHPRLDEQSFQNSFLSRDHPPSTEDDNPFSSFRRPYTTQDDTREEPLTSHPRYGTHHRL

SEQ ID NO: 945989 - protein, 128 aa, Homo sapiens
FQVEDYLPRTPHLRSEKPAIYDDERRYGRSRRRKPSGIGGIIKIHQLSAGILIYIRRLSRKSRRSQGRKPEVKTRKLSLRITHTKLYASPQRPLNNRYTKQKKARDRYFLAPRPSSTTPLPSRTDLAM

SEQ ID NO: 945990 - protein, 189 aa, Homo sapiens
ITTSNKITFSLVYFKLFDSWYGWQDPSRTTLATARGKEASLSKSVMEIPRRRTMERSGGFADVGTRVCLSFYRRWTNRVGALQVCVTMERETGGIHGIQPWACYLQYEAMSQRNLNAKTEQGPTGVTMTSNPITWGQIKKTTHEAEKLLERQGQATPDSMFLAMLAVVSCAVCFPCVEAHIGHMFLIHL

SEQ ID NO: 945991 - protein, 123 aa, Homo sapiens
ELARGISISSLNENKARNSLTIQNNPERTKNAKLGQSDDDQYVRNKSSLLDPVIDPPRHDPARKSSPPFLSRGTLLTSNTPAIPPRHNLYIPKPIHPKGITQRPPAHLCRAIAIIANPSTLPL

SEQ ID NO: 945992 - protein, 148 aa, Homo sapiens
AELAHAGETAYSGDPSPKPAGQAAEAQGRQKLQGDSEGREPHAEGDRRPEGGRCGTALLLVFIHHLPSPILPYFRYSPDPSPLLFFPILSLPSSPPDSLITSLPPVPHPLLSIPSFSHLHSPHTSPLLNPTLYLSSSSPLLLPLSSFP

SEQ ID NO: 945993 - protein, 197 aa, Homo sapiens
  misc_feature (119)..(119): Xaa can be any naturally occurring amino acid
EEPVESNVSMASLGEKRDHHSTHYRASEEEPEYGEEIKGYPGVQAPEDLEWERYRGRGSEEYRAPRPQSEESWDEEDKRNYPSLELDKMAHGYGEESEEERGLSRERDAITEAGEGSHXPISCLTPENRKGSWVKDTTLSNKTKWTRQGGIHKVRGKSWTQIISTTVKNDPPGSGNIKETHMTLIKTWRKLSFKINI

SEQ ID NO: 945994 - protein, 93 aa, Homo sapiens
MGQQLSTQQKQYIKVLKQLLKASRASVSQAQLRDPVQTVVSHNPWSPEEGTLDLSFGKKWGEIFDIMHKGNGSQFFNRMGLSKATFALLYTGP

SEQ ID NO: 945995 - protein, 126 aa, Homo sapiens
SSRRKRKLRHPPTHPEPRVYRKPTRQRSFYFLLDPLPHIPLCRHRGRSGTCVRSQGSTPNSRSVNGIRIPPRLTSSKYSLVTPTPNSPRTPGARGARARCVPVASVFLRHTVFPLLSLLPHSSLPP

SEQ ID NO: 945996 - protein, 44 aa, Homo sapiens
MIRAKHETEVSKHRDIPHKTYKNKPPKDCNRSPREPFASLADYS

SEQ ID NO: 945997 - protein, 110 aa, Homo sapiens
MRQSIALPKNHTPQHYYPQTKRPIPISGGELRYQGARNPQLSRPLLDRIRLYSSKTSRVPTFRTSFYLIYANFSVDNVINRGTPPTRVSEGATYISTTPINTSSASVVPS

SEQ ID NO: 945998 - protein, 66 aa, Homo sapiens
MVVGVSRASDVRRSPGFVIGLSQESRFDAEVEYTDTDYSYYSVIKYSKGRFFDSGRCGRFGRDLRH

SEQ ID NO: 945999 - protein, 112 aa, Homo sapiens
MGKITISEAEFLDMTEKQRLRLRTRKEPSSTSRDRLPSVSSRKTDASRSIITPEKELISYSAPRSCGGVKKRKKKLHIIFKKNKYKRKKAKSVASHHKADELVQLFLLRRFL

SEQ ID NO: 946000 - protein, 141 aa, Homo sapiens
TNKSPSIILSLFFITVRLLEIILEVAVSDQRTFWVVGTWYESSVGAYRRGLVVRSRLVIILPIRCGTRRFNRLVLGIRIQATTCRRVRFMRFLVIRYTQKVLIRRITFLRLPITVFRSSRKAHFIPGPLRIITFGLVIVIR

SEQ ID NO: 946001 - protein, 51 aa, Homo sapiens
MSDEKDLWCSPEGNVSSWWSACTGASDEGKTKSDHTSGSDRGPSREMFVDL

SEQ ID NO: 946002 - protein, 75 aa, Homo sapiens
RQNYQTEGKLESEGELGSEIRVVGKCLVEDDAFRKVKRKINKGSVYHSKELKEVTYDTNPSNEDTTREPDNTVKA

SEQ ID NO: 946003 - protein, 122 aa, Homo sapiens
MTSRDPNEQNCGLIKFWLLSQTSPPFEKCQKLLREALANLDITGTHGAAPASSSCHHHNASISTIWQISYPSNLFPALLMGCVHFLKNQLDQGVELEFKEAFKSLLFCFAVLNGTDKAFPLV

SEQ ID NO: 946004 - protein, 46 aa, Homo sapiens
MNQTEILEVKNAIDVLKNASESDSSRIDQAEERISELGETIRYTEE

SEQ ID NO: 946005 - protein, 113 aa, Homo sapiens
MLCGEPTRQPLTPTKTFTLPGQGRSHRPRFGNAHFSPSHPPPPTPTLSRSLDPIRTPCRPTNASLHHHRPTARHPPLLFFHLSATIPFFYALRYPFPASVSLPSPPPSLLHFP

SEQ ID NO: 946006 - protein, 137 aa, Homo sapiens
  misc_feature (60)..(60): Xaa can be any naturally occurring amino acid
  misc_feature (66)..(66): Xaa can be any naturally occurring amino acid
PGLPEFGFRRSVVRTPGWQDFGKTNFPVRKRRGPRGSSPPLPPLRSPSLPLPPLPAPQPXAPTDSXAPAPPAAATGPPRPRASPPGPLRRRRLLKYRKGKGTYVPLLPHLIHIYLRPTVAFACTSHSTESCNFINLP

SEQ ID NO: 946007 - protein, 166 aa, Homo sapiens
MAALLSSLVGSPRACSAFGSRCFSPFLFRLPPCLGQPLSPRACHSQPLGLLPLSLRAFSHSPPFPSLLFGPSCVPPSSFLLCHCQHSTLVLFALTSVASPILLALSPFCSSQLALRRLPFSALVSCSLFPPPCHPFQASPQYIFSAVYHRFRFLLCTTSLRGLVSS

SEQ ID NO: 946008 - protein, 141 aa, Homo sapiens
AASRRLLTEQDEIRTRGMKNFRHIQADEAKPLTRQGLRAPDNPPYDKGAFRSEINCPAKYPSKPPKITCKTKIYHPNIDEKGQGCMPAISAENWKPATKTDQVIQTLIALANDPQPEHPLRADLAEEYSKDRKKSSKNAEQ

SEQ ID NO: 946009 - protein, 130 aa, Homo sapiens
  misc_feature (1)..(2): Xaa can be any naturally occurring amino acid
  misc_feature (13)..(13): Xaa can be any naturally occurring amino acid
XXPGESRGNLKSXLSQPSSRDHKCAPPRPAKYRNIGEKGLLHGGQAGREQPTKGTTLAKDYRSAGKTGVSHHARPTHHIFPELQSYVTQGRHTNRKIREMETELTTEAENRRTDGPRHNNPGNTQSGNRT

SEQ ID NO: 946010 - protein, 132 aa, Homo sapiens
MSFFTRQQQKVQSEGGKIPYKTIKSHDYSLTIMRTAWGNYPHDLITSHEVSPQHVGIIICITIQDEIWVRTQSQTISFYPWSLPNLLFFTFQNTIMPFQQFPKSLTHFSIHSKVKIPNLGLTKGKSFCPPTL

SEQ ID NO: 946011 - protein, 147 aa, Homo sapiens
MALSAPRARPSGPSPYPFLSSSQVSMWVSGWPPVCRLSPCAVPRAPCTFVFMAPLPPSPLPSCLVARCLFLFLTSRLPFSWDFFTACSAPFRSYDRPSPLAFWSVTSASRHLCVLPVPICFAPRPSGGLCFPLLPLLFSFSFRDPVA

SEQ ID NO: 946012 - protein, 103 aa, Homo sapiens
LLPWAAMGGAPLFCGPGVFLHPARVPSGAGACFFEALVWGGVPPPLSGTPFFVFFGRAPEAPNPFFPGPFDKRECFLAPPAGSRQNKRGFNFFSTLSQGSGRG

SEQ ID NO: 946013 - protein, 408 aa, Homo sapiens
  misc_feature (1)..(1): Xaa can be any naturally occurring amino acid
  misc_feature (5)..(5): Xaa can be any naturally occurring amino acid
  misc_feature (15)..(15): Xaa can be any naturally occurring amino acid
  misc_feature (27)..(27): Xaa can be any naturally occurring amino acid
  misc_feature (37)..(37): Xaa can be any naturally occurring amino acid
  misc_feature (40)..(40): Xaa can be any naturally occurring amino acid
  misc_feature (49)..(49): Xaa can be any naturally occurring amino acid
  misc_feature (61)..(61): Xaa can be any naturally occurring amino acid
  misc_feature (63)..(65): Xaa can be any naturally occurring amino acid
  misc_feature (80)..(80): Xaa can be any naturally occurring amino acid
  misc_feature (90)..(91): Xaa can be any naturally occurring amino acid
  misc_feature (94)..(94): Xaa can be any naturally occurring amino acid
  misc_feature (114)..(114): Xaa can be any naturally occurring amino acid
  misc_feature (117)..(117): Xaa can be any naturally occurring amino acid
  misc_feature (133)..(133): Xaa can be any naturally occurring amino acid
  misc_feature (172)..(172): Xaa can be any naturally occurring amino acid
  misc_feature (183)..(183): Xaa can be any naturally occurring amino acid
  misc_feature (195)..(195): Xaa can be any naturally occurring amino acid
  misc_feature (219)..(219): Xaa can be any naturally occurring amino acid
  misc_feature (266)..(266): Xaa can be any naturally occurring amino acid
  misc_feature (289)..(289): Xaa can be any naturally occurring amino acid
  misc_feature (296)..(296): Xaa can be any naturally occurring amino acid
  misc_feature (309)..(309): Xaa can be any naturally occurring amino acid
  misc_feature (315)..(315): Xaa can be any naturally occurring amino acid
  misc_feature (342)..(342): Xaa can be any naturally occurring amino acid
XRIIXSSSRRHCFDXVVFSHLVYTISXRHLTVSVYVXTSXCSLSVYQYXSMTSSSLLCQRXLXXXDDSAYNGMSSPTTWXSRSISRTLWXXEIXRYLLSLCGCYIRSHSHDHSXTHXVSSLASMCEGVRVRGXATTQTPLVSRRYRVDVGYITMKRGVGRAFTLCFALTYQXALRVVSSRHTXKALHVASYHTLXLCAARRGGLAPSVVFCIIYSYVSXRHDTLLSSAFVMRDERDIYLLGVHPHALYLLCFHLNEGREGCAFLTXRLPFSTLEKRAALVFLYSYYKSXYYTKRGXVFIDINTRVVNIXTVRAAXLVVCIKSQKKYMFLFRRGTSSLRSSVXRVSTKETNYTHSSIVEGVSPTTSPPGVWRAPALVKRYNTYIFRERGGGGSQRVSFSRAAACARGMS

SEQ ID NO: 946014 - protein, 138 aa, Homo sapiens
MWPDTVLGICCGGNNQQYNFVNGDICGINQELIPLTVRNARLNMNSSRHHDKGVTVIYRSACYEGHVYLLCIYGNGPALKYRTGSSSTIQAELIGLSPDRVGEGKYFVMVAKPKRSWADISEPTDLWLSRPHGGKQHS

SEQ ID NO: 946015 - protein, 76 aa, Homo sapiens
  misc_feature (14)..(15): Xaa can be any naturally occurring amino acid
  misc_feature (17)..(17): Xaa can be any naturally occurring amino acid
RRSLALSPMLKCKXXNXAHCKLSMHGERQYPAQAWKEIGSSSVSLESPKHIEANVGGSNEDLGAKTNQGNMGAPNA

SEQ ID NO: 946016 - protein, 73 aa, Homo sapiens
YWMHIDKRLLANRNYGFVHRVWALHLPQGLTADAHACYTVHGYHSYDNLKGLKRYDVTLWQFDELATSYYTCS

SEQ ID NO: 946017 - protein, 141 aa, Homo sapiens
SAPFFLHRCLKGKRAPYRRGFFLPLPPSFSLSGGAPGGVHTAAWGPSVGKRGGPPPCTLKGGLDWGTLGVGSSSGGGLFLGPKGEFFWGRFKTHYPPGFFGAGWFIGTFKHFPPPLEGGGSPTGYSFFPGFVSGKGKNNTK

SEQ ID NO: 946018 - protein, 167 aa, Homo sapiens
NKRTHLSRPPAFAHPHRKGRQFGGEKRATPTNNGARENTNKTTPRAPGSEHDKRNRERRQKQEHARQGTRTNQRTETQPDEQRHTRRRRNDRTRAGTQGTGRNNHTTEQTEDRRKETPQQSSSKQTQAERQAEEQTGTTHTHTASTRADRGHHKNAANAGTHSHQPT

SEQ ID NO: 946019 - protein, 141 aa, Homo sapiens
EENRVLLAMVNPTEFFNIAVNGKPLDHISFELFAYKVPKTAENFHALSTGEKGFGYKGSCFHTIIPRFMCQGGDFTHHNGTGGNSIYGEKFKNYNFILKHTDPDILVHGKCWTQHKWFPIFHLHCQYVMVDGKHVVFGKLK

SEQ ID NO: 946020 - protein, 134 aa, Homo sapiens
MELFCPSCHVRPPLDATICDPLILSLHPLSLLHPPSCTSSSPLLFYIIACCLLYLFSFPISSLFSLLALPFSDSLLSRPLFSPLSPFLSPLFLSIPLLYPSYSPPFTSSFPSCLFPLQSLPFPLSTTSLSSFPC

SEQ ID NO: 946021 - protein, 144 aa, Homo sapiens
LTIQSGGCTCVPMSAPSRVIGAWATQNAGLTLTQVSVYPFWNRTNLQTKARMGIKELNNAKHTLHLIMCRERTYLFKSMKYSHKKSCIVPHNSHTNCQMCHMIRLHIKYNPRATNCSNTVDGLMSLRYRETHFGQLLHYYYAQT

SEQ ID NO: 946022 - protein, 99 aa, Homo sapiens
AGPSALQFRVVGLPLETMTSEGCSTIRGGKSSWRRRDPTKHDGIKTSFNISLSKPSVFTWVPDGEIKLFDYPTEHYFMFLFVYASHKSSQFLCRIGRYQ

SEQ ID NO: 946023 - protein, 36 aa, Homo sapiens
MGAACRDQLGQGDTNPVVLEELKTQHRYRGVEWVRV

SEQ ID NO: 946024 - protein, 106 aa, Homo sapiens
GLQELARVSTGTAKLCLFCHCHIERRAVFRGHQISIGFRYEIHTKVHVALGPDVSELITGSTFISCVFRQIYQPFPPQKETGVSNTMFRATMKNTAYATVWLRVGH

SEQ ID NO: 946025 - protein, 119 aa, Homo sapiens
RIGKPISGVSIYSGEDRSLPFFMKEEDQYINLLPSSWLITPRNGAISKAQCLFLLLANWAFSSVCSQVSLGEWKSMLLNPCVTSIAATMATLFMGSLDDDRSGWGRSLGKEAEWVIPST

SEQ ID NO: 946026 - protein, 102 aa, Homo sapiens
  misc_feature (95)..(95): Xaa can be any naturally occurring amino acid
MLDYIYWFVYIEPALHPRDEAHLIMVDKLFDVLLDSRCQYFTEDFCINVHQGNWSILFFGCVSARLWYQDDAGLIELGRIPSFSIDWNSFRRNGXQSSLYLW

SEQ ID NO: 946027 - protein, 118 aa, Homo sapiens
MAGCRSRALPHGEAAKAWRVKQQQLLAQMLSPSLPGACRRASRSECGAAEPTPTRNWRWPTSATRIPGSCPCLSLHTSSQAEAAGSGLSQPREGLPWCSGRVKGSSSTASGRPGRGGT

SEQ ID NO: 946028 - protein, 221 aa, Homo sapiens
EGIAGIDWRVGRGCMDWPWALTSLGSPKSLALSRYLIWEERGEWEERQDEGKPSLDYQALSHHQRGDHLALSPPSHRESFSYLSSSIITAFSGEHTGTHSILLNHRMAYSTLQPGHVTDACYPEVTMILRPSATEDSLIEPCREALAAIFPAQRITQAPTVYSLSIHGPAVNRHSIALILILFHKRYTLGHTPNPRMFFPAWPTGLGPPHCLSLVSPGRWG

SEQ ID NO: 946029 - protein, 109 aa, Homo sapiens
RQSLALSPRLECSGAISAHCNLHLPGSSNCCTSASQVAGTIGIHHHTQLIFVFLVETLVGFSRLSRFCHVCPAGLQLLDSCGLPTLASRAGITSMTTASSLGGEDPVIT

SEQ ID NO: 946030 - protein, 144 aa, Homo sapiens
  misc_feature (111)..(111): Xaa can be any naturally occurring amino acid
QVLKMPGPTQTEDHTPQKKGKGPDRDRSEDTTVWKPSPWTTLTEKAPPLSTWRPRLLTDREQTPVDGKIPRPTQRLQNGPTPITHTDSLDETRATCTQVKETARGLTQSPXDGLLTRTRMKPTIKPRIPDQCQATRAKYGTLQG

SEQ ID NO: 946031 - protein, 113 aa, Homo sapiens
MRVHWNCEGHPRSQRGELPANSRCDGIQLIKVSEAPVSEKGKEPPSVTLLSTGDPNNPDLCYSQALEITWGEAWRCCERKKSRLQTFSQTQDQEQDTIFNPDACVSHSLTLAR

SEQ ID NO: 946032 - protein, 80 aa, Homo sapiens
AGIRHEMEYYAAIKNDEFMSFAVDMDEDGNHYSRQTNTGTENQTLRFLSHKWELNNENTWTQGGEHHTLGPVGSGGLGEG

SEQ ID NO: 946033 - protein, 77 aa, Homo sapiens
LVLPRDLLYCCEQNANSDTDYEVQAEVVSDGDEELIGNRSKGHFCYVLAKKLEALCSCPRDLWNIELERNDLGYLAE

SEQ ID NO: 946034 - protein, 134 aa, Homo sapiens
MDRAVLKLSFCGICKWICGPLRRCLWKREYLHIKTKQKHSQKLLCDVCVQLPEFHVAFHRVVLKHAFRSVCKWTFGALSGLWWKTNYGHIKTGEKRCQKLLCDDCIQLTELKVPFPAVSNHSFCGICKWIFGPL

SEQ ID NO: 946035 - protein, 111 aa, Homo sapiens
MARVGSEASEQGLPACCHLSLPSLSLSFIFETGSPSVTQAGMQWSNLSSLQPPPPELNPSHLSPYHLPSSSHFSPSSSWDHRCAPPCTASFFTFCRGRACYVAQAGLEPLI

SEQ ID NO: 946036 - protein, 72 aa, Homo sapiens
AWKVRHLAYHQPRLMPVQGVVDFRESRDPYCYFLIINWFEYEQYPVMFNILRRFSFTFRCPIPFADLLLFGP

SEQ ID NO: 946037 - protein, 174 aa, Homo sapiens
MGFHHVGQDGLDLLTCNLPALASQNTGITGMSHCTRLEVTLELGNRQRLEQFEGSEQDRKMWDSLELPRDLLNVFEQNADNDMDDEIQAEVLSDGDEELLGNWSKGDSCYVLLKQLAAFCPCLRDLWNFKLERDDLGYLVEEISKQQSIQEATWVLVKGIQFFKGKLSLKIWKN

SEQ ID NO: 946038 - protein, 198 aa, Homo sapiens
GIQLGKEEVKLSLFADDMIVFLENPIVSAQNLKLISNFSKVSGYKINVQKSQAFLYTNNVTESQIMSEFPFTIASKRIKYLGIQLTRDVKDLFKENYKPLTAQGNKRGYKQMEAHSMLMGRKNQYRENGHTAQGNLQIQCHPHQATNDFLHRIGKATLTFIWNQKRARIAKSILSQKKIGFFLFFSFFLFINKGSHLL

SEQ ID NO: 946039 - protein, 81 aa, Homo sapiens
MPVSKPECTATTDQGFPAGANETRSAKRMLSCSQHPAPQDSTAYTFTGSLPIGHRTTLAIEYTRTHTCQLRTHHTSEGLWP

SEQ ID NO: 946040 - protein, 199 aa, Homo sapiens
MNLSLLCRFSFSWQTNLLCNLFCYFVILPFLLIISVKRFQGGMNQSPPLSHCYLDASELPFLLTMGTALRVTRVSSSLVPRSPTVALVILRPGFEPPRMGAACRDQLGQGDTNPVVLEELKTHAQKYRGVEWEIRDLTAFRAESFEQRFTHVFIDSKSVISIVFIDYRLTKSIPYRKQRDGSKWDGLASYLQQENVLKA

SEQ ID NO: 946041 - protein, 78 aa, Homo sapiens
KHCILVELVHERLRSQDRNCIHVSETCVECDRGDSTDILTFKDKSLPTRGTCIQTLNYGLQRASGLLNTLRCWEGVMA

SEQ ID NO: 946042 - protein, 222 aa, Homo sapiens
WYLSQVNDRMTAKEREKFPTGQQAVSSIGSPLGPQLRSGPLQSKHRLTCFLERLRRIRKKPMNYSMMSTITQGKEENPSAFLEQLEEALRKYTPLSPGSLKVQLILKDKFITQSAADIRRKLQKRALGPEQNLEEFLNLATSVFYNKDQEEQAQKEKQHQRKAAALVMALRQTNLGGSEMTDGAGQSPSEGFLSVWFEGHFKMSNENKHPQSCHYAEQSWAP

SEQ ID NO: 946043 - protein, 135 aa, Homo sapiens
IRHEVHWVPNCRQCSEGDFHGIMEVCDRGTSLIQGVVKEGFLEVGTLESKPEEHLAVNWAEERGWDRDRTFQAEGSLLCKAPEIGRCLRHLKIADVAVVGGAGERGIVERREVHTVPLIPYWILIMVWRAGPMGQ

SEQ ID NO: 946044 - protein, 48 aa, Homo sapiens
YTLRNGPYIMKKWGYYCFPYENRERTIPLQELNEWSFLFIGIRTPTSL

SEQ ID NO: 946045 - protein, 58 aa, Homo sapiens
MHTPAGEKQKEERKDSPKKRVRRLYDQRQIERVYTKRKALYSRRIDTDIAGQNRGTRD

SEQ ID NO: 946046 - protein, 134 aa, Homo sapiens
SVKAVFHYIFQAGFQLLGIPDSHDLGFPTYPSISLAPLLPGFPALEPLHRDLSDASPASSTVPSFQAAPFSPSSAPRPPPARLLIFPRPAQLCLFLQPACPDHLPFSTSPPLPTYPSPSVLSPLSRPHSPFLSF

SEQ ID NO: 946047 - protein, 127 aa, Homo sapiens
NEEMSAGFQGRGDDGAVRPRARYSLMGAGLSSAARQLLESWECQLPKAMQAVCLIAMESQTRKHKGFLEGKVYFSRLGSRWEKCSNLSLRSGGWGRFYRQRIMRCDLTASCHEVMSGLDLIRSQIKP

SEQ ID NO: 946048 - protein, 198 aa, Homo sapiens
  misc_feature (149)..(149): Xaa can be any naturally occurring amino acid
  misc_feature (176)..(176): Xaa can be any naturally occurring amino acid
  misc_feature (179)..(179): Xaa can be any naturally occurring amino acid
GIQLGKEEVKLSLFADDMIVFLENPIVSAQNLKLISNFSKVSGYKINVQKSQAFLYTNNVTESQIMSEFPFTIASKRIKYLGIQLTRDVKDLFKENYKPLTAQGNKRGYKQMEAHSMLMGRKNQYRENGHTAQGNLQIQCHPHQATNDXLHRIGKATLTFIWNQKRARIAKSILSXKKXGFFLSFSFFLLINKSSHLL

SEQ ID NO: 946049 - protein, 70 aa, Homo sapiens
GIQLTKEVKNLYKENYKTLLKEIIDHRNKRKSIPCSQTRRINIVKMATLSKAIYRFNVIPMKLPSQFSQN

SEQ ID NO: 946050 - protein, 234 aa, Homo sapiens
  misc_feature (203)..(203): Xaa can be any naturally occurring amino acid
  misc_feature (207)..(207): Xaa can be any naturally occurring amino acid
  misc_feature (216)..(216): Xaa can be any naturally occurring amino acid
EFGTSWYLSQVNDRFTAKEREKFPTGQQAVSSIGSPLGPQLRSGPLQSKHRLTCFLERLRRIRKKPMNYSMMSTITQGKEENPSAFLEQLEEALRKYTPLSPGSLKVQLILKDKFITQSAADIRRKLQKRALGPEQNLEEFLNLATSVFYNKDQEEQAQKEKQHQRKAAALVMALRQTKPGGSEMTENGAGQSPSGLFISVVXKDTXRMSNEQATXQSMSTMPRQSLEGTCPEC

SEQ ID NO: 946051 - protein, 129 aa, Homo sapiens
QKPINLSKTTEVVQRPDKSQRTFLERLQEAYRIYTPFDPAAPENSRALNLAFVAQAAPDIEKKLQKLERFARINISQLLEIAQKVFDNQKFNKQKQATQAAEKAADKAFKRQTKILVAAIQEVQNEIAH

SEQ ID NO: 946052 - protein, 115 aa, Homo sapiens
  misc_feature (5)..(6): Xaa can be any naturally occurring amino acid
  misc_feature (21)..(21): Xaa can be any naturally occurring amino acid
  misc_feature (29)..(29): Xaa can be any naturally occurring amino acid
  misc_feature (58)..(58): Xaa can be any naturally occurring amino acid
  misc_feature (93)..(93): Xaa can be any naturally occurring amino acid
  misc_feature (97)..(97): Xaa can be any naturally occurring amino acid
PGWRXXARDTSDTHLSHTPAXTEHLRDFXATHRQHTQETPAHRTHPHRSSTHHTPAHXTTHTPHTRRHRATHTATHDKQPTHRTADTPDTHTXHTAXTTHLHTSQPPHMTQCTHT

SEQ ID NO: 946053 - protein, 134 aa, Homo sapiens
  misc_feature (62)..(62): Xaa can be any naturally occurring amino acid
  misc_feature (91)..(91): Xaa can be any naturally occurring amino acid
PLPGRPYWGEEPLCPASRPIREGGGEGGREVSPPPGQLPRPGGGGGVCSLFVLLFCLVCVVXFCFVVLFCACCLFFSVSLAFCSSFRFSFXRFFSFLLVPLLLSLLLPSPSFVRSSLFPLLPLFFLLVFLFRLA

SEQ ID NO: 946054 - protein, 121 aa, Homo sapiens
EVSLGAFGDTAGRGGTPQPALPADATSICFSRICILETLVPASPGHPTEVSTPCRFRRGVWVHLVTPQAEGGRHSQLCPRMPRPFASAGSASWKPWFLPLRDTPLRSAHPAGLGGVSVCIW

SEQ ID NO: 946055 - protein, 150 aa, Homo sapiens
ERERERERERERERERERERDCAYVRKHVEKIKNSMDGKNVDTVLMELGVRYHRLIYEHLQQYSYSRMGGMLAICDVAEYRKWAKDFKIPMVLHLSDTLHALCNRLVVAPDNLKQVCSGEQLANLDKKYFTPSDNFVLNIELPRLARHFS

SEQ ID NO: 946056 - protein, 107 aa, Homo sapiens
  misc_feature (64)..(64): Xaa can be any naturally occurring amino acid
  misc_feature (86)..(86): Xaa can be any naturally occurring amino acid
MRKTSLLRFQRCWGSVPRNTDEEQIHIYNITHITDPPDFCSKGLYLASCYLSPDWLPLALRPLXCSSLGRRALRKDRNLSCFVGHXLGGTSIWWSQGVAAPAFVMGG

SEQ ID NO: 946057 - protein, 134 aa, Homo sapiens
MKGKRTNRRERVRAQNLHTVMQELANKNERSVREWTKDLNTRRVRAKELGSNESEAGKVDIGRVGNMTREGRTLCRKREFWKTRIPKVGYTKKALQGDTGKLNHAGPLLRGSDIEGGWDVCEGSWYHSLGQGIG

SEQ ID NO: 946058 - protein, 109 aa, Homo sapiens
TREHKQIFSAEKADFQLLRTPCSTWKLTCPSPGTHAKRPFFQASVPGRCCAWFAAPANDGLHCVLSALFLLDSLHCVLITLSADSGHCSVNLLMDNRPILPPPVPSPNQ

SEQ ID NO: 946059 - protein, 105 aa, Homo sapiens
MDIACLSTAHIIDYLTCVPALAPARMAELIQKAKLADSRALRRHGTCMKQADRAQLSNEERNLLPGLQERAGPQVAGGHLSMTEDRHLDRSALIRLSEKGSRLNH

SEQ ID NO: 946060 - protein, 228 aa, Homo sapiens
QEFARVLIFHCCYNENSLPSYWFYATMAGPLRAPLLLLAILAVALAVSPAAGSSPGKPPRLVGGPMDASVEEEGVRRALDFAVCEYNKTNNYMYHIRTLHVVHTLKHIVSGVNYFLDMELGRTTYTKTQPNFYNYPFHDQPHLTRKAFYSFHIYTFPRQGTMTFSKSTYHDSYGSIPDLPIPITLYSHPPTSYIPPLYILSPTLTKASPISSTSIHTYKSSTNLYYSQ

SEQ ID NO: 946061 - protein, 69 aa, Homo sapiens
  misc_feature (10)..(10): Xaa can be any naturally occurring amino acid
NTRIYKYSLXTLSECRVDMNHTDTPPFDSPADPTMIAMEHARRISRTVEPRAAGIRYEPQSSLGNRAKL

SEQ ID NO: 946062 - protein, 149 aa, Homo sapiens
  misc_feature (85)..(85): Xaa can be any naturally occurring amino acid
  misc_feature (95)..(95): Xaa can be any naturally occurring amino acid
MNLALMERKTDLDIAYKFGLWLSCEGYESSEDQYVLRGSWGLEYNLDYTEFGLEKLEESGQHRFASFSEYYYKGALADSLNMSGXDTIVVLLGIXFVVYKLFLSDGQYSPSPYSEYSSFFHRYQRFTNSAGPPPQALSEFTGPQDTWHG

SEQ ID NO: 946063 - protein, 123 aa, Homo sapiens
  misc_feature (102)..(102): Xaa can be any naturally occurring amino acid
RSYACSVLGRLNLSKTHDSSRHILYNTHGKSLTQNSAPSITYLIKNPNKFHGYQEPYFLKHQIAHTIEKNCVYNECGKAFHYKSQLIIHLIIHTGYRPYQCXKCQITFTTNSNLNAHQILHTG

SEQ ID NO: 946064 - protein, 70 aa, Homo sapiens
GGSAGGDFRQQELENSRCEKKTSGGSDLNTGSAGAGPEPAVGRDIVREPSNTDPSLGKARCWMMGAEEFG

SEQ ID NO: 946065 - protein, 68 aa, Homo sapiens
PSVNANSNTPDHMGGFQNTNVENSEGPSFSQQGSLHQILKTLGHPECGQQSIQDQIGVSKQHDSSIPK

SEQ ID NO: 946066 - protein, 139 aa, Homo sapiens
MFHVTNGISAVTKINSACQRFNKFLQTLWSLEGPMVSSNLEALKIYRFLGPNVDLLNHNHLDKARICVFNNSYMILTCQVATYENTRPDDIERAFHTSLILLLVHVIGGNIHRGRSIDSTAQMCGLKPNFVSHYLDVSE

SEQ ID NO: 946067 - protein, 68 aa, Homo sapiens
GSWEVQDLGAASDEGLLATSSHGGSARAREQVIELAASSPFIICIAPFMKVEILITLINKCLVLGSTS

SEQ ID NO: 946068 - protein, 229 aa, Homo sapiens
SGICIQVEAEHKCWENVQPVDVIEKKTPFSWEKFKFAAEIRISNEEWNVNHQDNGENVIQGMLETFMAAPSITDRDLRGKNGFVELSPGTPCSMQPWDMVPCVPAASALAVAKGAKVQLRPLLQRVQALSLGGLPVVLGLWVHRSQELRLENLCLDFGECMETLWMVRHKVASWVETLWRTLTKAMWKSNVPLDSPKVPLGELLLELVRKGHFPSPQNYQFNHQFPLNA

SEQ ID NO: 946069 - protein, 225 aa, Homo sapiens
  misc_feature (184)..(184): Xaa can be any naturally occurring amino acid
  misc_feature (191)..(191): Xaa can be any naturally occurring amino acid
  misc_feature (196)..(196): Xaa can be any naturally occurring amino acid
  misc_feature (204)..(204): Xaa can be any naturally occurring amino acid
  misc_feature (208)..(208): Xaa can be any naturally occurring amino acid
MLDQRYVTIVFRLTTYPVTRNKRMNVFIISALRSARSLKRWNTSLRACSLSISMPRASNRCLKAFRPDSLPSTILFADQPTSSAVMIVVGLASLEHTVLVNTRRMGKGIGTHNCFVGLHHETGNIADQAAGGHDLGGVDAHIQIEEIPTGFDGHHNLFKRAVASAFAQSVDCALDLTLLTNGNXCQELATXMPKSXWQCTDHTXLSLXGVNVRSRMNFAYSEGTA

SEQ ID NO: 946070 - protein, 70 aa, Homo sapiens
NHSGQAFLQACLPQELAASARNLATGSRNAHSPGFLLNRVPSVQDPTENRTVQLTWQPLPEPLELWPKAV

SEQ ID NO: 946071 - protein, 129 aa, Homo sapiens; identical to SEQ ID NO: 946051

SEQ ID NO: 946072 - protein, 65 aa, Homo sapiens
MSEYHDEILLADVGHYDQLEERHYEKWPEHDNSICRIWAEREDIIMSREFVYGWNSEIMHQDLVA

SEQ ID NO: 946073 - protein, 134 aa, Homo sapiens
MFPRYLFDCGSTKIPLDHRHCFPRLSHKWTSSLTLNYFLWRDRKGAISNFVSFLAMLVMIQLLLLLAYESLWPDAWHFLSIFSGSAWLMTLLWLFGLMVNRIVQRVIFVTGYYGLTQGLLSVLRLFWGNLILHG

SEQ ID NO: 946074 - protein, 76 aa, Homo sapiens
MGRGLTTGGREKPGGTQIKPPGRKSPFGQRGKNQRGPNRWPFQTVAHPEGQRENGKRKNLVKIRVFGKPSYFFHGP

SEQ ID NO: 946075 - protein, 209 aa, Homo sapiens
  misc_feature (181)..(181): Xaa can be any naturally occurring amino acid
FLHLLPGHPGISVHLLKSRQRFQTFIFVFCTPTGQNTMWKLPRLGAYTFRSNSLSYTLAPFSYSWSGWDAGHQVPRLYTAGSPVPCPRNRFSLLDLWACDGRGCRQDLCHALKTFSPLSWLLLTSANFCSWLEFLPRKWVFLFYSIIRLANFQTFLLCFLLNIISNFRSSHSSLKFHRSLXQGLLLVSLLKHYRSDLCFSLDKYSFHLT

SEQ ID NO: 946076 - protein, 39 aa, Homo sapiens
MGAACRDQLGQGDTNPVVLEELKTQHRYRGVEWVRDLTP

SEQ ID NO: 946077 - protein, 153 aa, Homo sapiens
DPRDIDHYTVSAVFGGGAGGSFVSILTDAGAATLLKQEVLLMFFYTDKLLDRIEFYTYLLVNGTQRFEGGSPLYAQKHISPTTVGPGLRDLTVHQGEKSKGLKRISTVEVFLCAPPPDICVKYQFLSLNVFPPVSEPIGISQIEPFYLISLFN

SEQ ID NO: 946078 - protein, 159 aa, Homo sapiens
KQEEKPQRFRKEWDRAKPIEEAEHESTDQKPDEGNVFRHILLPIYLWEANDRNETWLCFTGESIKRPSIVSWKTGVFRNQVDSETHCHAYQVTWYTFWSPCPNCAREVARFLATDKNVNFTILKPPAFTTFQFPCYQEGLRSLSQERVPVEIMGYWIFL

SEQ ID NO: 946079 - protein, 103 aa, Homo sapiens
HVQHEGLPKPLTLRWEPFSQSTVRIVGIVAGLAVLAVVVIGAVVAAVMCRRKSSGGEGAGLKLRAATVPRALMCLSQLASLCDFKSLWHLFLRHLNVSASLLA

SEQ ID NO: 946080 - protein, 80 aa, Homo sapiens
MREITKAVLVKKMNDKYNVRPGVEAHACDYSTFEAEVSESRGHEIETILTDTVPRIYYRSKDAGLVVMPGSRSYSELSGA

SEQ ID NO: 946081 - protein, 162 aa, Homo sapiens
GGRGYLPMSGLGRLFGKGKKEKGPTPEEAIQKLKDTDNILIKKQEFLVQMIQPELQTGKKFGTKNKKAALQALQEEKKILTTSGTNCRDIIHLGVLARGHCATTNAEVLRTMDLAAQSMKKVYQDIDIDKVDELMTDITGPTGGGPNQDPVWGAYKSLAPGC

SEQ ID NO: 946082 - protein, 136 aa, Homo sapiens
GIDLKAGQDILANWENPNVLKNELAACGGCCLKSQVLKNLVQENHWDPGSKWCGGAKIGPLGWQARDKEGTVGERDGGRGVSKADEEGERRGTEGGVRGGGGGEGRGGGEVEGGGLGEAGGGGGAGGVRGGGRLLA

SEQ ID NO: 946083 - protein, 104 aa, Homo sapiens
MEWNQPEYRGMEWNGMQWNGIIRNGMERNGMEWNGMEWNGMEWNQLDCNRMEWNGINPNRMEWNGMERNGTERNGMEWNGMRNGMECNGMDGMHCYNHLMNIVL

SEQ ID NO: 946084 - protein, 51 aa, Homo sapiens
MRPSFNVHFPVRIYIGLCLTFVLTNRFTDNCRRQDLLRLLFLQIHSDVFLF

SEQ ID NO: 946085 - protein, 184 aa, Homo sapiens
GSPGLQARPGQDISPIGHDIKRGECVLAKGTHMGPSEIGLLATVGVTEVEVNKFPVVAVMSTGNELLNPEDDLLPGKIRDSNRSTLLATIQEHGYPTINLGIVGDNPDDLLNALNEGISRADVIITSGGVSMGEKDYLKQVLDIDLHAQIHFGRVFMKPSLPTTFATLDIDGVRKNIFALPGKS

SEQ ID NO: 946086 - protein, 78 aa, Homo sapiens
QCLALLQLTHGALHPLSCTHCLALPSEMNLVPQLEMQKSPVFCLAHAGSCRLELFLFGHLGSTQSYTFYKAEWMHFLF

SEQ ID NO: 946087 - protein, 105 aa, Homo sapiens
HKVSLSLSCLDHYGGLQPRVTEDTLTSINELFETFEDAKADWGQSDKKVYFWFHFREREMTYQGFVPPLTERISLVHNQIRVVPVFWFWRLKLINKLIASILYGH

SEQ ID NO: 946088 - protein, 150 aa, Homo sapiens
KHHEKRKHQPEDGKGVRPCGFQPDVSGLAVLRKTRGITASSVMSSLPLWAQEQLAKLASINDVRHGGFDFAGPAECSVCLNPYSDTVEYRNRLHLSSAQEVRELGLGPIARKQQSQELGPWACPLFTGSIISCYQVEVASTKPESSVEKR

SEQ ID NO: 946089 - protein, 72 aa, Homo sapiens
QEFGTRPSPPTRHLPPLTEWEKLVCAKIVLSPQMLYTVNYSIMPNAAKSSSCTLQVWSILKLDILVCHYVIL

SEQ ID NO: 946090 - protein, 220 aa, Homo sapiens
  misc_feature (6)..(6): Xaa can be any naturally occurring amino acid
  misc_feature (195)..(195): Xaa can be any naturally occurring amino acid
  misc_feature (214)..(215): Xaa can be any naturally occurring amino acid
MDTRSXSSDYTHLPECQNPWDSEPPMYHTIERSKSSRYLATTPFLLEEAPIVKSHSFMFSPSRSYYANFGVPVKTAEYTSITDCIDTRCVNAPQAIADRAAFPGGLGDKVEDLTCCHPEREAELSHPSSDSEENEAKGRRATIAISSQEGDNSERTLSNNITGSKIERATATRRGASAHMTHQKSLSSVPNRARXDTAGLQNPFREASPPSLRXXGTGLS

SEQ ID NO: 946091 - protein, 73 aa, Homo sapiens
  misc_feature (12)..(12): Xaa can be any naturally occurring amino acid
  misc_feature (14)..(14): Xaa can be any naturally occurring amino acid
  misc_feature (73)..(73): Xaa can be any naturally occurring amino acid
ETAHTAPGMGAXSXPWGVCPGALPYNGTCPAGLLRDSRDKPYSSPVRAEEEGTAMVAYSLLSDKLIKAETHPX

SEQ ID NO: 946092 - protein, 81 aa, Homo sapiens
PVLQEFGTSSYRCDENVLELEIMMMFVYIIRECTKSYVIVYFKERIVWYVNYLSKRVIKGEIKRIETMNRVLENSEIASRI

SEQ ID NO: 946093 - protein, 68 aa, Homo sapiens
GRLEIIDFTFRPFSLWRCEIGGISGAAEARNEQEEQGGNSEIKRRLTRKVIQRPTVEELPEKKNPHPL

SEQ ID NO: 946094 - protein, 73 aa, Homo sapiens
ALKFITKLVGTHIRAKRKPEELTNVLAGMRKAAAKKDCAPTLPSPEIKNSLTEKANLDYKEIEKLEEGARRPT

SEQ ID NO: 946095 - protein, 107 aa, Homo sapiens
AEGKMEDYQAAKETALVVDEVGTIVKEALEGAIGGNAYHHSKGNQGPTNVVDQTLSQLTRLGKPFKSIGTWVIMQKNGAGFHTAGSCFWDSFTAGSCTVRWENRTMS

SEQ ID NO: 946096 - protein, 197 aa, Homo sapiens
GLSKGQYPTQTTYPEQPPGNPVYPKTLHLPQATPYTDATTDYSELYRSSFVHPGAATDPTMSDAFPGASMHLPMVQTVAVGPLRSTIPMAYYPAGPMYPPGITVLREGGHDAGARFGAGATAGNIPAPPPGCPPNADQLARMQGANVLVTHRKANFFMRGSDGGYTICRGTKATFVTGKTSHTFSTSDNVTAIGILT

SEQ ID NO: 946097 - protein, 103 aa, Homo sapiens
GIPEADSIRPERSRSGALAGLALLCFSGLEAIQRTPKIQVYSRHPAEKGKSNFLNCYESGFHPSDIEVDLLKNGERMEGTIQTCLSAGTGLSISGTTLNSPPL

SEQ ID NO: 946098 - protein, 163 aa, Homo sapiens
MARPSALLTTIACQLIAILNDQPETCDYPKPMCNTFILLHVLIEANSGGPLTNLAEEVIVVNTMTVTGEISMAIHYDRLREFLLLGVRMVTLSPSILDELQLWEQWFPDANHDELIHIVILGFLLHTGLLLGPVDANFAIVEQMYPTVRNVNELVKPHLVGVP

SEQ ID NO: 946099 - protein, 39 aa, Homo sapiens
MRFHRRCALPRCCPFCLPTSSLPVFGPGRFRALLGPFGG

SEQ ID NO: 946100 - protein, 129 aa, Homo sapiens
EGFENPGSRYCLPEAADARRPRGEATVIMCDQEAKPSTEDLRDKKEREYIKLKVIGQDTRAIHFKVNMTSHVTKLKESYCERQGVAMNGLKFLFEGQRIADDHTSKELGMDEDDVIEVYQEQTVVHSTD

SEQ ID NO: 946101 - protein, 68 aa, Homo sapiens
AETLTLCGLMDTGQPKLDLTEYCIVLLMSMELPTTTHNLEPMPNSYLAFQTIVACFKQLKIYMETLKT

SEQ ID NO: 946102 - protein, 134 aa, Homo sapiens
  misc_feature (59)..(59): Xaa can be any naturally occurring amino acid
GNIIKRKRPSCAVKRKMSAVGQSYTIHRGTRDTRQATQQPKSGVTLHPRKSRKQSSKVXPCIPAGTTRAKLHLKTNQSKINQTKKKNPTKMSKEVLKLRWGWTQWLTPVIPALWQAEVGGSPEVRSLRPAWPTW

SEQ ID NO: 946103 - protein, 105 aa, Homo sapiens
LRIRGRFQLSAHGPASFKTVYWFTGILCKLSLEGDHFTPSRAYGFVKAYTNFDADRDALNIETAIKTKGVDEVTIVNILTNRTNAQRQDFVFAYQRRTKELASPL

SEQ ID NO: 946104 - protein, 81 aa, Homo sapiens
HESTFNSIMKCDVDIRKDQYANTVGPGVTTMYLVIADRMHKVITALAPSPMKIKIIVPSERKNSVRIGGSILAILYTFQQM

SEQ ID NO: 946105 - protein, 102 aa, Homo sapiens
MTVQGYKDDGGNNPELELAGKLPRAFLGKNSRRADATAETIRCWGQKLEPRSWASPESSRIFQNRPEPSESFPGPPRFLWDPPGQRRTQSRRVEVNFPPKLQ

SEQ ID NO: 946106 - protein, 144 aa, Homo sapiens
ELSRSNTLICHIDMVFRPALNVTWLCIGELVTAGVAESLFLPRTDYSIHMFHYLTFVPLLEDLYDCREEHCGLDQSLLKHWAAQEANPDAWDIGYCALSPVPGAGPSRQIIEGTVLIIKSLCAAHDPRCQWTLSYTVKETQYVN

SEQ ID NO: 946107 - protein, 129 aa, Homo sapiens
SARCHLEIPDVNIMTQRYLLSKNVNMESEKFLDPDMYTLLDDFTSDLRSKKFRKLTKAICGLTDDYSMDRLLPYDQSDEESMTIVLQHIDFAIHYAEVLEFKEPKEREDESCSMLDEYFQECQDECRAY

SEQ ID NO: 946108 - protein, 190 aa, Homo sapiens
  misc_feature (169)..(169): Xaa can be any naturally occurring amino acid
HRVTRALAINCGQAITGFDFHGGYSHPVTDGSIVRRGILETLLLTACEHEQASIERKAMEKEEKQALGNWKQLAKGLLIREALKRRYGPKSEAGDPHTDAGGGLCSDEQAVTSSEAEADRVLAAFWPQYREDEEEHKLMGGPQDDQSGPVGDPPDDAAHYRPGPCLGIXSPCRCGIYACRPCGACTPEGT

SEQ ID NO: 946109 - protein, 205 aa, Homo sapiens
  misc_feature (186)..(186): Xaa can be any naturally occurring amino acid
LGDLSPKALFWKYRLLQTILMEPTILKAPTAGKAWEANYNHPPEADSVGTAFNLGPTVNQTEPNGDSTTGATDLSPEPKGFNYPWFSLEIQLTQQLQSFIPNTIVRGLISKVIRTLKMDCSGAHVQVTCAKLISRTGHLMKLLSGQQEVKASEIEGDTDQWKTENYIMESTEAQSEQEERSLELTXEVPGSRYTDKLILAFVTEL

SEQ ID NO: 946110 - protein, 152 aa, Homo sapiens
MAGQRHLSREPLSRKKLYLSILISLQISLIIPFTAPDLIIFNIFFETTLIPTLVIITRWGNQPERLNAGTYFLFYTLVGSFPLLMELIYTNNTLGSLNILLLTLTAQDLIKLLSQQLNMTGLHISFNGKDDLFTDSTYDSLKPMSKPPWLGQ

SEQ ID NO: 946111 - protein, 81 aa, Homo sapiens
RVSGECAGQNQPVEWERHLFVHRVGFGNRKELLPTSDSNKPGFAAYKCESNPKNSQIKCPLLFLGPPDDPGLFTDEEMEAS

SEQ ID NO: 946112 - protein, 103 aa, Homo sapiens
MEGLYYFLGFLFLVARLPLDAAKRFHDVLGNEGPSAYMREHNQLNGWPSDENDWNEKLYPGWKREDMRWKNSWKGGRVQAVLTSDYTSLGGLKYNIGGEPDIP

SEQ ID NO: 946113 - protein, 145 aa, Homo sapiens
GAVFSGYAHLWKKPETFRSQGKLRGVRVGEGYSFGNVILASGLSSPLGLPMGSLKQPMQREGGSPGPATIRTLCLAALLDRGAQSPTLTIHQVLCEEQSGGGLWLEGAERATRLLAGHWTSALEQALGLAIGEVLQGSVLMRAYT

SEQ ID NO: 946114 - protein, 233 aa, Homo sapiens
ADTDLKGLGSRAMGPSRKFWVGGNWRMTGRKQSLGKLIGTLNAAKVPADTEGVGAPLTAYIDLARQKLDPKMAGVAQNCHKGTKGALTGEISLGMTKDCEATWLVLGHSERRHVFGKSDDLMGQKVVHALAKGLEVIACIGKKLDERKAGITERVVFEQTVMEDNVKDCSRVVLAYEPVWPIGTWQTEQPQQAQEVIEKLRGLLKSTVLMPWLEHPTNYGGFELGHLEGWPPP

SEQ ID NO: 946115 - protein, 206 aa, Homo sapiens
MPHLSTIVWPTIRTSILETVYRIRQLELVNTDCQTTFLTKAHKGLTYPILCEANMSEALYVESIVTTIVGLPAAILIILSTRIWSPPRNIVISNRLMTTQERVIKLTSDHMRAMHNTNGRPWPIIRRIREAFELPHLTNGDSRLNDLHHATNCLLTYPWLCHYERAHSELAYSVRFLGINGTIRLLIQPITLAVRLGLHFRMAILG

SEQ ID NO: 946116 - protein, 152 aa, Homo sapiens
ATLLSADASWQPTISSQSRESYCTDLLASGYSQPKSYLQASYTYLSLGKYFDRHDEAMDGVCHYYREVALEKRKGYERLLKMRSQHGRHAMLQDMMMPPDDERRPYTLMNAAMILKNPHLCDYLETELLDEEETADTKMADDLTDRHRLIRT

SEQ ID NO: 946117 - protein, 137 aa, Homo sapiens
MAGEVELVELEVFSEDGTDLLQSDIKLDLLTSCFFLFVCFEMESVLPRLECSGAVLAHFNLHLLGSGNSPASASRVPVISATREAEDENRWNLGGLGCSVAEIMPLYFQTGLHNETLFQNKMESAFLRWNLMLVEML

SEQ ID NO: 946118 - protein, 163 aa, Homo sapiens
RGPLVTMNHIEQTFCPVNSIQTPNYEMLKEEQEVDILGASHNLATHTHTGIHIRSKTYVLRPHLFGTVEHPLYDTCCQALITFSYSAKNRYKKMDTIFPETKANSYTVKSLNIGRLKESMYTDHSAKGDTDRLTDPNVPQEGFIDVMISCRDLYPTIYRSSSL

SEQ ID NO: 946119 - protein, 67 aa, Homo sapiens
NHHVKERMVQDGRIVLTSDGPSIKTSIRITIHKKDFTESYENQVINQIPGYSIIRKEARHDGSYLKS

SEQ ID NO: 946120 - protein, 125 aa, Homo sapiens
MAAGMKAHTGRLDIADHTSTSHLRTGNEDLTIHEELQAQYQRVVCYQDDIGDIADYGFSEVEDHVEEGDVAGDDDDCDYDSPGPQCPYDSDCESQSLIEEFADELQASVHTDAVEDPTSSGAFCI

SEQ ID NO: 946121 - protein, 201 aa, Homo sapiens
IENFFSKMAACKFNIIARAFSSSAPQNQLVKTPIQVFGISGRYATALYSAGVKSKELDGIEGELVKIQDAIKTDKKFRQFIKDPTIKRSIKTEALKQVSSKLSLSNSSKNVLSLIAENGRLKEFDGIVNAFKILMAAHRGEITCEVTSAKPLDDATKKEVEDIIEFAKANQKILMTTKVDPSIIGGLIVTIGDYVDMSIAG

SEQ ID NO: 946122 - protein, 206 aa, Homo sapiens
  misc_feature (199)..(199): Xaa can be any naturally occurring amino acid
MAGEIVFEDPRFPGGKHLAYQNSWGLPPGPMGVMTMVNGATMGEVLPPGVACVQVGIIPWGITKALSEEAKEALIAKGMDYRRRLLRVNIRVRADLRDNNSPGWKFNHWKLREVPIRLEVGPRDMKSCQLVAVKTEYWRLPVAEIEAETKLQAILEDIQVTFLTGPSEDLRTHMVVLIPLEDFQRILDSGDCSDSILVXLTVRTGS

SEQ ID NO: 946123 - protein, 125 aa, Homo sapiens
  misc_feature (14)..(14): Xaa can be any naturally occurring amino acid
MAGEVREEGIAYSXEVLESVFWVLVILRGSAGDSVKSLKIQTVRKVEVMFRRPSSQYLFSLLDMIRNYQFDSCKNPESVCTYLGEWVMTLALSHVEGYIECYQLVVVILQITLSIFLISVMSYFL

SEQ ID NO: 946124 - protein, 72 aa, Homo sapiens
YGRGGPAVGVGMKAEGTMRGSENCVYGRLERRLLSRNSEILTTYSLLGIRSPMVTANSIIVLDDDDEHEPSV

SEQ ID NO: 946125 - protein, 136 aa, Homo sapiens
GSRRTAGRMTQITVIVNGVVMAFGASHPTHVNVHIHQESVLTQLLKAGGFSEFLFHPGDTVPSTVSIGYEHLALGVTQILLGVVSCVLGVCLSLGPWTVLSASGCAFWAGSVVIAAGAGAIVHGFATAMAAVVLCV

SEQ ID NO: 946126 - protein, 108 aa, Homo sapiens
IEDGNTSVVPDQEKEIERLTSLHTMLEGSHTEICKDLSEEVTLRLKQPGSSQVTDYRYLWHELDEADYRCIRLMAMKTCNAYAGLYDIILTNFEKFTKPRIESLAMTY

SEQ ID NO: 946127 - protein, 115 aa, Homo sapiens
MGWVWWWPPVIPVIKEAEAGGSLEPGRQRLQGTEIVPLHSSLGTRAGLHLKKPKTKKKLLLKLKELKIKGFLKKQSNCHHITFLLCTVKASQNQDGNLQKSKERKPLQPTITILK

SEQ ID NO: 946128 - protein, 42 aa, Homo sapiens
MATLALSRFRVPARSPLSVPRPLTGSPFRGYRVPRHLAEGRA

SEQ ID NO: 946129 - protein, 79 aa, Homo sapiens
GTDLQRLGSTAMAPSTMSFVGGNCKINGRKPTLGNLIGSLNAANVPADTEVVWAPPTAYIDFSRQKLHPNIAVAAHNCY

SEQ ID NO: 946130 - protein, 79 aa, Homo sapiens
HYGREVRSGLNRVDCFCKTGALWNVYLAELGKEMEKGKKITGVVYNSVWAEPSHPSVSIHFKRSICFLFNISSFFNMNK

SEQ ID NO: 946131 - protein, 164 aa, Homo sapiens
  misc_feature (22)..(22): Xaa can be any naturally occurring amino acid
  misc_feature (24)..(24): Xaa can be any naturally occurring amino acid
HSEKRRATRKTRMKSVEPHEPXEXPGKWGERNGGKKKGGGKQDKRGLEKREEGRERGEKGEEKGDTKEEGKGRKRRKEKGREEERGGGKRKRGEKGRRGGKGRRQERKKERRKRKEREGEGKEEREEGKEGGKGGGDGKEEGKKGGEEKKGEKKRRREGEEEER

SEQ ID NO: 946132 - protein, 139 aa, Homo sapiens
RGASYHLKTYMPLAAADLTAAKGGENFTHMGRIFLDHIAGTRLLSCPNSNPNLTNRSQLISTRFTGATARPFLFNKVANLQYSQVHYRFMLTGRHMVPDVTCKRLRKRRVILERVLVLQSQAFEDHVPSHNSCIHRVLF

SEQ ID NO: 946133 - protein, 55 aa, Homo sapiens
MTCCLAAPQSCVRQISRSASVRMLMHDSEHRDQWHFHLGGVELQFSGSDMAYMQW

SEQ ID NO: 946134 - protein, 140 aa, Homo sapiens
ITDVRQVTRVKSVWIHSSPQAKAGGKQGSHQCKHTLDYLPYKNTLLLEDHPTGENDMAIMKPANKYQYNSGFDLPEGPLTTSFKGKYGCVYYWMKAFFDRPSQPTQETKNFEVVDLADVNTPDLMAPVSANELTDTALCA

SEQ ID NO: 946135 - protein, 142 aa, Homo sapiens
AAARTKAEACKGKLNHKEVLNGLKVTYLTYHQLMAFPKKKLQGLVAATITPMTDNGEINFSVIGQYVDYFVKEQGVKNIFVNGTTGEGLSLSVSNRRQVAKEWVTVKDKLDQVIIHVGPLTLKEPQELAQHAPDQRYPVFPG

SEQ ID NO: 946136 - protein, 85 aa, Homo sapiens
RGGTEAFSVSRVVIKLQEEMEVDAPGVDGQDGLRERPGFTEGGRHNFNVRPHFGANGLPKHSYWLDLWLFILFDVGAFLFVYFLP

SEQ ID NO: 946137 - protein, 198 aa, Homo sapiens
FEAAVKVLVEVGLDGAGGEIMVASGKLSTGRFLPLPTIREIIKWLRLQAAKQLSQNFLLDLRLPDKIVGKAGILPKANVNEGALGPGGITGSILKADVVELLGVERATRLIPGLQMLSDAAPGKLRMVHGDVLPLKVERAFSEGLKGPWEDDPPKVYIMGKLPLRVSLPLIIRCLEFPGELQRDLSHYRRPGYRFSVC

SEQ ID NO: 946138 - protein, 164 aa, Homo sapiens
FGHYGRGTFGESRFLDTKRLCLAKLVWDETFLPGRRNNQEFVAEPLSIHRESEEPDDRHTLMALKRINRELRDWARDLPEQGSAGPVGDDRFNWQATFMGPKDSPYQGGEFFWTINFPTDYPFKPLRVEFTPGIYHPNITSIGSIGLDILGSQWPPALPILKVL

SEQ ID NO: 946139 - protein, 128 aa, Homo sapiens
MGQSQSGVHGPGGGRKDARARKRNYGPPVPTRVGKRKRKPRGPDAASKLPLGTLNIKCRLKLLKLERFKDYLLMEEEFIGNQDQMNPLEEKQEEEGSKVDDLRGTPMLVGTLKEIIDANHAIGLTSVA

SEQ ID NO: 946140 - protein, 113 aa, Homo sapiens
MTEKAPEPHVEEDDDDELDSRLNYKLPPQKSLKELQEMAKDDESLIKSRKTLLEDGPVVTDPKAPNVVVTRLTLVCESAPGPITMDLTGDLEALKRETIVLKEGSEYRVFTSK

SEQ ID NO: 946141 - protein, 124 aa, Homo sapiens
MGQKGQNPPKGGGKKKKGPGLKKGGPGKTRGSPKKKPWEKNPLCPRGEKPKGPQPGALPKKGPTQRAKGNGRRKNWGKKREKTGEKKANLKPKGPNRKKPLKTKRNHPEKGSNVGPKWEQGAPF

SEQ ID NO: 946142 - protein, 93 aa, Homo sapiens
PAGKMAVGFKTGEPLRVSRRFLKENCRPDGGKLGEFRPTIVNMGSISPENGSVLGKLENPTVIWGVKAELAAPSTDALDKGSVVPKGDLPPLC

SEQ ID NO: 946143 - protein, 145 aa, Homo sapiens
  misc_feature (36)..(36): Xaa can be any naturally occurring amino acid
  misc_feature (141)..(141): Xaa can be any naturally occurring amino acid
MLTLLFQIHFLMILSSNWAYLKDASKMQAYQDIKAXEEQELQDIQSGKRQLNFTHKCLQKCSATYYSLTNHRQSSETDVIHQLMRCQHLLLLKLWMILGNLTGNPFLDKYDAHVAFKGTLANDVILGIVMVHYVGIYRHYXMSTL

SEQ ID NO: 946144 - protein, 227 aa, Homo sapiens
  misc_feature (180)..(180): Xaa can be any naturally occurring amino acid
RAAGIRHELPAALRSAGWHSGPGKAGPALLQVCGAKCPGGAPRGENREKEETTRIGPGVMESKEKRAVNSLSMENANQENEEKEQVANKGEPLALPLDAGEYCVPRGNRRRFRVRQPILQYRWDMMHRLGEPQARMREENMERIGEEVRQLMEKLREKHVSHSLRAVSTDPPHHDHHDEXCLYALNLMASLKSYGNRPLLSTYIVMMCPCVNLNLSLATWVSITTSN

SEQ ID NO: 946145 - protein, 158 aa, Homo sapiens
DASGRVLAGRLAVRNEDYKQVEHAIGDIMLGSTSVLIHTSEGAGLVVLKRNTWLLTETSMIGIYVHIRAYISEAMHVTVANAKSIVAEGRVLTQNHMLTYNDTMTHCQCDPSCVQMSLDRMMTLIKNRVHVLACKSNLIHVGSIENDRIGLYGPIWDL

SEQ ID NO: 946146 - protein, 74 aa, Homo sapiens
NRIWDKVDEELTGQKSNECFTGKGFFREFMACYSSRMYAPDHPAGLCSKCSKAKSFRLKDLRHLLAGDPTCRRS

SEQ ID NO: 946147 - protein, 82 aa, Homo sapiens
TDRGCARVRDRVTVRECELTDTETVRAREIMINHVLKTRQMVIDVLHHAKASGPLTAVNIQLAGMIQTTPDVIDSIGCTAYI

SEQ ID NO: 946148 - protein, 91 aa, Homo sapiens
  misc_feature (1)..(1): Xaa can be any naturally occurring amino acid
  misc_feature (16)..(16): Xaa can be any naturally occurring amino acid
  misc_feature (48)..(48): Xaa can be any naturally occurring amino acid
XKRISKKKTHVKKCTXNAVFNELLVFDIPCEGLEDISVEFLVLDSERXSRNEVIGQLVLRAAAEGTGGEHWKEICDYPRRQIAKWHVLCDG

SEQ ID NO: 946149 - protein, 204 aa, Homo sapiens
KGKEQARKPDNNSIKTRLFLCVRNFAWEIKLDLELSDRESEAWDMDRSLGWQGNSVPEDRTEAGIKRFLEDNNDEGKPNQVLKGFLRNANFNQQKVKTWDSRPKFPKPRPKARDLYDDDLKLALLSQSARPRSPWGKLDPYDSSEDDMEYVGFATFPNQVHRKSVKRGFDFTLMVPGRAALGISTLVNSLFLTDLYRDPETFLV

SEQ ID NO: 946150 - protein, 145 aa, Homo sapiens
LQEFGTRIDRRMYHRLILKAKGNVGKYELIIMDHIHWLKADWDRKKLLADQAEGRMYMTNEAVSAVNSCLQAKNEESIKTIFKEEDVMKMKPGTLTVHTGPRDFIDQALQYDMATEYNRTLGDVRYPIAPIVSRYTDEWTSSTYA

SEQ ID NO: 946151 - protein, 134 aa, Homo sapiens
  misc_feature (17)..(17): Xaa can be any naturally occurring amino acid
  misc_feature (22)..(22): Xaa can be any naturally occurring amino acid
  misc_feature (122)..(122): Xaa can be any naturally occurring amino acid
  misc_feature (132)..(132): Xaa can be any naturally occurring amino acid
SPGCRNSVRARMAPNHXRGIFXDNQNPSYQAPPQHGAPHGPHLSITRASPQHHTGPTSAPHGPHLSITRASPQHHTGPTSAPHGPHLSITRAPPQHHTGPTSAPHGPHLSMRHPSLTSGLVXPKKPYPNYSXLG

SEQ ID NO: 946152 - protein, 144 aa, Homo sapiens
  misc_feature (9)..(9): Xaa can be any naturally occurring amino acid
  misc_feature (99)..(99): Xaa can be any naturally occurring amino acid
EEAMSVSLXKVSGIKEEIKEPENINAALQETEAPYISIACDLIKETKLSAEPAPDFSDYSEMAKVEQPVPDHSELVEDSSPDSEPVDLFSDDSIPDVPXKQDETVMLVKESLTETSFESMIEYENKEKLSALPPEGGKPYFENL

SEQ ID NO: 946153 - protein, 47 aa, Homo sapiens
MNAFSVSLFILAYNMNSATLSSIRLFYDVPVSLNIIYYPVPFLSVPI

SEQ ID NO: 946154 - protein, 159 aa, Homo sapiens
GFAGYSPPLGCFHGLALMFMAFPGAQCKLSVDLPFWGLEDGGPLLTSPLDTAPVGTLYGGSHSTFAFCTLLVEVLHEDSTPTANFCLGIWCFHTYSEIWVEAPKHQFLTSVHLQAQHYMEAAKTVAERASVEPSSCRIRHERQREEGCCAEAAAGLRGV

SEQ ID NO: 946155 - protein, 217 aa, Homo sapiens
  misc_feature (151)..(153): Xaa can be any naturally occurring amino acid
  misc_feature (155)..(156): Xaa can be any naturally occurring amino acid
  misc_feature (179)..(179): Xaa can be any naturally occurring amino acid
  misc_feature (203)..(203): Xaa can be any naturally occurring amino acid
ERGHQGQRCPGRIQGPHCWDAGCSGAPQAQVPSVFSFNFAAVLVLLLYPQELDMDPNPQAALERQQLHLQERHHLHLKSQRPPIGSISSMEVNVDTLEQVELIDLGDPDASYVFLPCEDPPPTPHSSGMDNHLEELDLPVPTSYRTTSMTXXXSXXNCCTNLHNPDPSDDEHIHPLHIXMKRMKGVDDGHNLDPALTLAPFYXLPHLLFSHDTTAQP

SEQ ID NO: 946156 - protein, 116 aa, Homo sapiens
ACPEDWLLYGRKCYFFSEEPRDWNTGRQYCHTHEAVLAVIQSQKELEFMFKFTRREPWIGLRRVGDEFHCVNGDPLDPDTFTIARPGECVFVEPTRLVSTECLMTQPCVCIKMAYT

SEQ ID NO: 946157 - protein, 173 aa, Homo sapiens
  misc_feature (13)..(13): Xaa can be any naturally occurring amino acid
  misc_feature (24)..(24): Xaa can be any naturally occurring amino acid
  misc_feature (26)..(26): Xaa can be any naturally occurring amino acid
  misc_feature (29)..(29): Xaa can be any naturally occurring amino acid
  misc_feature (102)..(102): Xaa can be any naturally occurring amino acid
  misc_feature (144)..(144): Xaa can be any naturally occurring amino acid
  misc_feature (155)..(155): Xaa can be any naturally occurring amino acid
  misc_feature (160)..(160): Xaa can be any naturally occurring amino acid
  misc_feature (166)..(166): Xaa can be any naturally occurring amino acid
  misc_feature (172)..(172): Xaa can be any naturally occurring amino acid
ILGLQEFGTSPEXASPGAAALPYXTXGGXMNIFRLTGDLSHLAAIVILLLKIWKTRSCAGISGTSFISLYNTSMKVIYLACSYATVYLIYLKFKATYDGNHXYLRVEFLVVPVGGLSFLVNHDFSSLEILWTFSIYLESVAILXQLFMISKTWEXRDHYXPTTPVXLGPLSXS

SEQ ID NO: 946158 - protein, 72 aa, Homo sapiens
CRSGVSNPRAMDQYRPVACRTWAARPEKMSSGQRALLPELRLLSDAVVALDSQEHAPYCELRMRGIYVACSF

SEQ ID NO: 946159 - protein, 132 aa, Homo sapiens
MGARKDLRAGDRHVTGTPKVELRIQNLGFNCRIWNLEYRIGKKNRDDKRPLEEEVPNTRQMESGLAGFPCILALKTKCGVQSFYAESFLPTFFLQANIQLDPGTYLDPGYLIAIYQPTLILEAPLVWRCREG

SEQ ID NO: 946160 - protein, 140 aa, Homo sapiens
RHELVPNSARGTLLHCWWDCKLVQSLWKSVWRFLRDLELEIPFDPAIPLLGIYPKDYKSCCYKDTCTRMFTAALFTIAKTWNQPKCPTMIDWIKKMWHIYTMEYYAAIKNDEFMSFIGTWMKLEIIILSKLLQEQHGHRK

SEQ ID NO: 946161 - protein, 187 aa, Homo sapiens
MREATVPSQYMIYRRQLGNIYQESLGRAPRVNPASQPFGCPIWLSAPSLDDAHLPPPALLDPAISSHRLLHARSLALPTSPYFPGICSPPPTARTEPPAAFFMVGPSPPTLLRAMLPLPSSSTSSPPLPPSFAPPSLCNVHSPPHPRTSSPPLLPTLSAPRLTRPPRAAFLTASPSTFVSLRTPPPL

SEQ ID NO: 946162 - protein, 72 aa, Homo sapiens
QTKPIILGLSHPTSLILMVCLFDGFEMEDSLSHHKLKCSGIDLGSLKPVPPEYRRRIWLNLPSSPYYRCLTT

SEQ ID NO: 946163 - protein, 114 aa, Homo sapiens
MSVFKLRPSFCLGPNFGLLWPFPLLGGGLTFNGPSFNNVGPGKPLGFPNLIAWQHIPFSPVGVIGKRPDPFALPKSGPTLNGNWNLYPFFFFKIRLNFFKKAFFLPMGRMGKIP

SEQ ID NO: 946164 - protein, 97 aa, Homo sapiens
SKGAASTILASEPFAQKYGLQSKRVEILAHEMMTDLPSSFEEKTIFWLAFILLNNLQPTIAFLPTNSLLMNHCHFVQKDKVQPWLLQDIIHLEETWP

SEQ ID NO: 946165 - protein, 72 aa, Homo sapiens
  misc_feature (27)..(27): Xaa can be any naturally occurring amino acid
  misc_feature (67)..(67): Xaa can be any naturally occurring amino acid
  misc_feature (72)..(72): Xaa can be any naturally occurring amino acid
MSSLIILKCYTVLVWYFVLILFFFFIXERILLCFPALSVMAASRLIASSASRVHAISCLILPYYLGXLARAX

SEQ ID NO: 946166 - protein, 166 aa, Homo sapiens
  misc_feature (15)..(15): Xaa can be any naturally occurring amino acid
  misc_feature (17)..(17): Xaa can be any naturally occurring amino acid
  misc_feature (43)..(44): Xaa can be any naturally occurring amino acid
  misc_feature (48)..(48): Xaa can be any naturally occurring amino acid
  misc_feature (77)..(77): Xaa can be any naturally occurring amino acid
  misc_feature (82)..(82): Xaa can be any naturally occurring amino acid
  misc_feature (87)..(87): Xaa can be any naturally occurring amino acid
  misc_feature (145)..(145): Xaa can be any naturally occurring amino acid
MLKGGARGRWGRPKXLXPDVPRCSTSRSEASVPRPCRLVLKHXXHEPXAAWGFIAFAYPCKSRDRKMVGDVTGAPGXCLHRXSAWTXWALILGILMTILLIVIPVLIFQAMDRSGGITEARSSAHDLYPTYSNFHSSPCPRSRVXYQPFILTRFSTMAFNKVHVFL

SEQ ID NO: 946167 - protein, 67 aa, Homo sapiens
  misc_feature (61)..(61): Xaa can be any naturally occurring amino acid
NSRPASTEKTTEGERRFRGKGPGTSHFQSRELQVLPGETLHVEPSPLPFSAGSGVRAGATXPIPEWD

SEQ ID NO: 946168 - protein, 177 aa, Homo sapiens
  misc_feature (97)..(97): Xaa can be any naturally occurring amino acid
  misc_feature (115)..(115): Xaa can be any naturally occurring amino acid
  misc_feature (130)..(130): Xaa can be any naturally occurring amino acid
  misc_feature (155)..(155): Xaa can be any naturally occurring amino acid
  misc_feature (164)..(164): Xaa can be any naturally occurring amino acid
MLFPPRWTGAAGAGAWLRYRGLPPAVQFPDPLSVLIAPRRAGPELPGRLSCGREVLEAFEINNGRSSLFKVILLGDGGLGRVTYEQIVTNEVDTQLXHTIVWNFKSRLEWMDICXQQIGTRQSGAIPKPXDTIYRGSDCCCLLSVEITKLPELSXGGIIYKRVXSRELPLGIGYKMT

SEQ ID NO: 946169 - protein, 103 aa, Homo sapiens
  misc_feature (8)..(8): Xaa can be any naturally occurring amino acid
  misc_feature (13)..(13): Xaa can be any naturally occurring amino acid
  misc_feature (66)..(67): Xaa can be any naturally occurring amino acid
  misc_feature (102)..(102): Xaa can be any naturally occurring amino acid
AASDTGCXKTTEXPLLGPGASSKNIIIWNYWKMVESKAVFSLGEFRQYLHLWEEPWLGMWRNSSRXXGAPWADGVSLQDGAFGSCLGAPSTGPYPLALDSVXG

SEQ ID NO: 946170 - protein, 119 aa, Homo sapiens
  misc_feature (99)..(99): Xaa can be any naturally occurring amino acid
  misc_feature (101)..(101): Xaa can be any naturally occurring amino acid
  misc_feature (115)..(115): Xaa can be any naturally occurring amino acid
MDEMDKQNVSCTYSGMLLSLKKEENSGVGTVAHVCNLSTLGGQGGWITWGQEARDQSGQHGETPSLIKIQKLDSTSKKKEEKAEEEEEQEEAVETWYCXTXRNVDMMLSEISQSXDNAM

SEQ ID NO: 946171 - protein, 98 aa, Homo sapiens
  misc_feature (92)..(92): Xaa can be any naturally occurring amino acid
RRAIRLRETTEGGRKRTREERPGPPAPGSARELLEVVEPEVLQDSLDRCYSTPSSCLEQPDSCQPYGSSMHWRKNMLALLTWEKLKRRGRGXKEGGES

SEQ ID NO: 946172 - protein, 77 aa, Homo sapiens
  misc_feature (14)..(15): Xaa can be any naturally occurring amino acid
  misc_feature (23)..(23): Xaa can be any naturally occurring amino acid
  misc_feature (31)..(31): Xaa can be any naturally occurring amino acid
QLRHGSPTHGNSVXXGFLDHFCXGSKQKGGXAEYELTLEPYTDMAFLLYVIQSKYYPLEFSNPDVSSRYTTFSSNPD

SEQ ID NO: 946173 - protein, 110 aa, Homo sapiens
  misc_feature (55)..(55): Xaa can be any naturally occurring amino acid
  misc_feature (90)..(90): Xaa can be any naturally occurring amino acid
  misc_feature (101)..(101): Xaa can be any naturally occurring amino acid
ELTQMPINDRLDRENVISLHHGILCSHKKKHSYILCRDMNGAGRHFPQQTNVETXKQTPHVPTYKWELNNENTWTRGEQHTLELVGEGRXKRLRGIGIAVXKIVHAGVNT

SEQ ID NO: 946174 - protein, 34 aa, Homo sapiens
QGGAGAGDDEEEESPPVPPGLLDCLACQINRISA

SEQ ID NO: 946175 - protein, 63 aa, Homo sapiens
  misc_feature (21)..(21): Xaa can be any naturally occurring amino acid
  misc_feature (36)..(36): Xaa can be any naturally occurring amino acid
  misc_feature (58)..(58): Xaa can be any naturally occurring amino acid
AQQTPVGMLLYPQLTHSSVHXMLDNFYNFDFIICCXSGPDDTKPNLKCSSGKCGSEMXDFRRL

SEQ ID NO: 946176 - protein, 65 aa, Homo sapiens
  misc_feature (19)..(19): Xaa can be any naturally occurring amino acid
  misc_feature (21)..(21): Xaa can be any naturally occurring amino acid
  misc_feature (31)..(31): Xaa can be any naturally occurring amino acid
  misc_feature (46)..(46): Xaa can be any naturally occurring amino acid
  misc_feature (53)..(53): Xaa can be any naturally occurring amino acid
VGGLCSNGQDQGSDLRGRXKXELLKQLDDLXVELSQLLLALTGVRXSKLSKIXVRPVHCPGSPQF

SEQ ID NO: 946177 - protein, 63 aa, Homo sapiens
  misc_feature (31)..(31): Xaa can be any naturally occurring amino acid
  misc_feature (53)..(53): Xaa can be any naturally occurring amino acid
MTHKGDTPMTILRQLMHFDKSCHGEQLSVLXWAGADDIEHFSWRSRLSRLGEXIYISCDADSV

SEQ ID NO: 946178 - protein, 68 aa, Homo sapiens
  misc_feature (19)..(19): Xaa can be any naturally occurring amino acid
TQTPGHRRNRTSPWTWAPXAPQSRRSDENLGGLRDVTPIPLTALAGRGVAVVAVCEQDSSNTVNNCPS

SEQ ID NO: 946179 - protein, 67 aa, Homo sapiens
  misc_feature (16)..(16): Xaa can be any naturally occurring amino acid
  misc_feature (20)..(20): Xaa can be any naturally occurring amino acid
  misc_feature (61)..(62): Xaa can be any naturally occurring amino acid
TSVTGAECLRVQSRGXATSXGPVGRSRSLAWEHAYDLYSYLFYGLVIAQTATLWDLLNLIXXNTIYV

SEQ ID NO: 946180 - protein, 34 aa, Homo sapiens
  misc_feature (10)..(10): Xaa can be any naturally occurring amino acid
KGSQLPDRTXRLRGTKHVQEKENSAEGLNKGVYD

SEQ ID NO: 946181 - protein, 93 aa, Homo sapiens
  misc_feature (14)..(14): Xaa can be any naturally occurring amino acid
  misc_feature (17)..(17): Xaa can be any naturally occurring amino acid
  misc_feature (52)..(53): Xaa can be any naturally occurring amino acid
  misc_feature (83)..(83): Xaa can be any naturally occurring amino acid
  misc_feature (87)..(88): Xaa can be any naturally occurring amino acid
IPMGTDHLSAFKKXVDXGSFQAYTVSNFYASSTYTLYLQVSSIPPFCRLLRXXDDGREFRACNLRWVSSKQWDKKAAGAGQVXNSAXXAQKGK

SEQ ID NO: 946182 - protein, 148 aa, Homo sapiens
  misc_feature (71)..(71): Xaa can be any naturally occurring amino acid
  misc_feature (129)..(130): Xaa can be any naturally occurring amino acid
GCGLCLSLQSELQVWFLLLLKAQAVWPRVLQVLGDPQLRHRDLLEAKNGESEGPTSRERRGLVGTGDGCGXTQASPQSAPQSASPILLAQSAFILFQPLAAALTAGTGVLSLHARDYLAWSLSGSLHRXXASLQIVQEQGGGQGVLSG

SEQ ID NO: 946183 - protein, 118 aa, Homo sapiens
  misc_feature (65)..(65): Xaa can be any naturally occurring amino acid
  misc_feature (80)..(81): Xaa can be any naturally occurring amino acid
  misc_feature (83)..(83): Xaa can be any naturally occurring amino acid
  misc_feature (96)..(96): Xaa can be any naturally occurring amino acid
  misc_feature (110)..(110): Xaa can be any naturally occurring amino acid
LEMEKMCFPKSKHLTNICYEDPKKSSQRPHTDTRTEHENIVPAFKERKRTFQQADSKSLGVGHGXLMPVSQHFGRPRRVXXPXVGIRDQPGQHGQXPISTNTWPGVMVHXCNPSYPGG

SEQ ID NO: 946184 - protein, 35 aa, Homo sapiens
  misc_feature (25)..(25): Xaa can be any naturally occurring amino acid
  misc_feature (30)..(30): Xaa can be any naturally occurring amino acid
MCTHYDPYCSLREASVTMDEQRYLXPEFLXAVNGV

SEQ ID NO: 946185 - protein, 118 aa, Homo sapiens
  misc_feature (18)..(18): Xaa can be any naturally occurring amino acid
  misc_feature (47)..(47): Xaa can be any naturally occurring amino acid
VEAPEGFYNHWFTHSGRXFYFYVLYPSYFYLFYADFLKYPFNAFEKXEKKVCIYFKNCFKSQFATCLYQMVLCLNRLYATFMETAIRCYEHFLYPWSLILCFIFLQYDIMICYVVKSL

SEQ ID NO: 946186 - protein, 182 aa, Homo sapiens
  misc_feature (93)..(93): Xaa can be any naturally occurring amino acid
  misc_feature (98)..(98): Xaa can be any naturally occurring amino acid
  misc_feature (114)..(114): Xaa can be any naturally occurring amino acid
  misc_feature (117)..(117): Xaa can be any naturally occurring amino acid
  misc_feature (121)..(121): Xaa can be any naturally occurring amino acid
  misc_feature (136)..(136): Xaa can be any naturally occurring amino acid
  misc_feature (151)..(151): Xaa can be any naturally occurring amino acid
  misc_feature (162)..(162): Xaa can be any naturally occurring amino acid
GRSAAPTADSHSSSDKSVPGAQLLSTEDKQAAETMGPPSAAPRGGHRPWQGLLITASLLTFWHPPTTVQFTMKPCRPVLQRERCSSTGCNISXTIQAXMAQGKRQKEPSHAGYXTDXKQIXQGRYSGRETVYPNGXLLFHHLEDAGSTPTXHNASYDLTSNXAAPVHPSQAFCGASWHVWVW

SEQ ID NO: 946187 - protein, 74 aa, Homo sapiens
  misc_feature (12)..(12): Xaa can be any naturally occurring amino acid
  misc_feature (61)..(61): Xaa can be any naturally occurring amino acid
  misc_feature (72)..(72): Xaa can be any naturally occurring amino acid
IRGRVDRRRQKXGQGGQSLALSPRLESSSAISADCNLRLPGSSFFCPTLLSSWDYRRPLPXPAIFLYFFSRXGV

SEQ ID NO: 946188 - protein, 101 aa, Homo sapiens
  misc_feature (1)..(1): Xaa can be any naturally occurring amino acid
  misc_feature (5)..(5): Xaa can be any naturally occurring amino acid
  misc_feature (72)..(73): Xaa can be any naturally occurring amino acid
  misc_feature (87)..(87): Xaa can be any naturally occurring amino acid
  misc_feature (101)..(101): Xaa can be any naturally occurring amino acid
XKTTXGEEKSILCIRNMKHGTYTYSVATLIVLMGMNKPWVSWKALGLVSLHTWLFLKHFLSLIYGVPASVEXXGRRKGAGGSVLRMXPLSQGAPWFILEDX

SEQ ID NO: 946189 - protein, 67 aa, Homo sapiens
  misc_feature (50)..(50): Xaa can be any naturally occurring amino acid
AKSVKIKKNKDNVKKAMQPDTFTPWSSLTKRRPEKLKQSLPPGLAVKELXMNQNMIGNCHYIKSLKI

SEQ ID NO: 946190 - protein, 33 aa, Homo sapiens
MPNSPQLKPIQPKPTVMGEPFTVNPALTPAKDK

SEQ ID NO: 946191 - protein, 102 aa, Homo sapiens
  misc_feature (8)..(8): Xaa can be any naturally occurring amino acid
  misc_feature (24)..(24): Xaa can be any naturally occurring amino acid
  misc_feature (38)..(38): Xaa can be any naturally occurring amino acid
MREDDRRXALQRNESTRAIPYLEXYHFLISPHNHFLSXLSVCPFLTLTTKLTNTNISDASGNRNRLNYLPAIILALIALPSLRILYITDESTIPPLPSNHWP

SEQ ID NO: 946192 - protein, 36 aa, Homo sapiens
  misc_feature (10)..(10): Xaa can be any naturally occurring amino acid
  misc_feature (18)..(18): Xaa can be any naturally occurring amino acid
SPAVATHHPXTDVLATPXLDTDVSCTEIRTFLIKYS

SEQ ID NO: 946193 - protein, 66 aa, Homo sapiens
  misc_feature (16)..(16): Xaa can be any naturally occurring amino acid
  misc_feature (49)..(49): Xaa can be any naturally occurring amino acid
REDTEGEGGETETVRXEPKAVSGWVAGGGNSLKKSSQGNAKENELNGGXEGENKRPGIRRRARGKN

SEQ ID NO: 946194 - protein, 68 aa, Homo sapiens
MDKFLDTYTLPRLNQEEVESLNTPITGSEIEAIINSLPTKKAQDQKDSQPEFYQRYKGELVPFLLKLF

SEQ ID NO: 946195 - protein, 81 aa, Homo sapiens
  misc_feature (10)..(11): Xaa can be any naturally occurring amino acid
  misc_feature (54)..(54): Xaa can be any naturally occurring amino acid
  misc_feature (77)..(77): Xaa can be any naturally occurring amino acid
RPGGTEQKRXXRTYGKLLGGNLSLSHWPIPASANFKVKRRWDDDVVFKNCAKGXDDQKKDKRINDTLRSEFHKKSMXKYIK

SEQ ID NO: 946196 - protein, 76 aa, Homo sapiens
  misc_feature (1)..(1): Xaa can be any naturally occurring amino acid
  misc_feature (27)..(27): Xaa can be any naturally occurring amino acid
  misc_feature (33)..(33): Xaa can be any naturally occurring amino acid
  misc_feature (44)..(44): Xaa can be any naturally occurring amino acid
XSSLLLNLIIIGSDLHGQWTSSWQLPXERSLMXLDWKDPGYRGXKKGKIFNLTEVAGYIRQRVTSSGIIRGGGLTL

SEQ ID NO: 946197 - protein, 73 aa, Homo sapiens
  misc_feature (18)..(18): Xaa can be any naturally occurring amino acid
  misc_feature (27)..(27): Xaa can be any naturally occurring amino acid
  misc_feature (31)..(31): Xaa can be any naturally occurring amino acid
  misc_feature (39)..(39): Xaa can be any naturally occurring amino acid
  misc_feature (46)..(47): Xaa can be any naturally occurring amino acid
  misc_feature (53)..(53): Xaa can be any naturally occurring amino acid
  misc_feature (58)..(58): Xaa can be any naturally occurring amino acid
TGLSSVARCPLRLVTERXLLKIKLKYXTNCXKKKSLKFXFVEPGTXXTPVSRXLGGPXRWIMRSRDRDLLANW

SEQ ID NO: 946198 - protein, 43 aa, Homo sapiens
  misc_feature (28)..(28): Xaa can be any naturally occurring amino acid
RPRDTAAKDDSKGYYSVVESEEPILRNXMPEPSKSAPAPKKGF

SEQ ID NO: 946199 - protein, 77 aa, Homo sapiens
  misc_feature (14)..(14): Xaa can be any naturally occurring amino acid
  misc_feature (39)..(39): Xaa can be any naturally occurring amino acid
  misc_feature (65)..(66): Xaa can be any naturally occurring amino acid
ARAERRAAPPLCNXCAVSLLTETSLELQLASNDPFRGQXLFSREGALDLKQMAMVADKPIFRKKXXPQEDFAKAGMC

SEQ ID NO: 946200 - protein, 102 aa, Homo sapiens
  misc_feature (1)..(2): Xaa can be any naturally occurring amino acid
  misc_feature (92)..(92): Xaa can be any naturally occurring amino acid
  misc_feature (100)..(100): Xaa can be any naturally occurring amino acid
XXWMCNNALLGLVLFLTNPAESAVYNFRCLIDHSVVFVFYALALQLYFLLRWQVATLPQSTSEVVGLEHRAANVCVLCDASNDESLCRLLAXYRRGGILXGD

SEQ ID NO: 946201 - protein, 45 aa, Homo sapiens
  misc_feature (1)..(1): Xaa can be any naturally occurring amino acid
  misc_feature (25)..(25): Xaa can be any naturally occurring amino acid
XREDDRRARAPRTPMPKKKDELERXAKSNLLTQLLPNKPVCPGQP

SEQ ID NO: 946202 - protein, 109 aa, Homo sapiens
  misc_feature (14)..(14): Xaa can be any naturally occurring amino acid
  misc_feature (56)..(56): Xaa can be any naturally occurring amino acid
  misc_feature (70)..(70): Xaa can be any naturally occurring amino acid
  misc_feature (91)..(91): Xaa can be any naturally occurring amino acid
  misc_feature (109)..(109): Xaa can be any naturally occurring amino acid
FAAASTEDDRRVGXGDRVSLCHPGWRAVARSRLTATSDSPVQAILLPHPPEYLGLXAPAATPGYFFVLFXQRRVSPCCPSWATRPPWPPSXVTGRATAPGLLYFSREGX

SEQ ID NO: 946203 - protein, 116 aa, Homo sapiens
  misc_feature (4)..(4): Xaa can be any naturally occurring amino acid
  misc_feature (12)..(12): Xaa can be any naturally occurring amino acid
  misc_feature (37)..(37): Xaa can be any naturally occurring amino acid
  misc_feature (40)..(40): Xaa can be any naturally occurring amino acid
  misc_feature (52)..(52): Xaa can be any naturally occurring amino acid
  misc_feature (54)..(54): Xaa can be any naturally occurring amino acid
  misc_feature (56)..(56): Xaa can be any naturally occurring amino acid
  misc_feature (65)..(65): Xaa can be any naturally occurring amino acid
  misc_feature (67)..(67): Xaa can be any naturally occurring amino acid
  misc_feature (78)..(78): Xaa can be any naturally occurring amino acid
  misc_feature (103)..(103): Xaa can be any naturally occurring amino acid
IRSXAKVTAPLXSTVSIACYRIRGRFDRLREDDRGRXGRXANSSTRGRLSIXEXAXASNSSSLGXGXSLPKPQLDPIXPLGLRVGVAYLAILFILPTSWGMMXWPGSYRLKACEYC

SEQ ID NO: 946204 - protein, 70 aa, Homo sapiens
  misc_feature (36)..(36): Xaa can be any naturally occurring amino acid
RGPHTVREDTEGGSRQGRLPFLQQPIPPSGLVKNLXGRMAHTVDPSIGEARQSYHLRPGVQTSQHSETPS

SEQ ID NO: 946205 - protein, 121 aa, Homo sapiens
  misc_feature (13)..(13): Xaa can be any naturally occurring amino acid
  misc_feature (16)..(17): Xaa can be any naturally occurring amino acid
  misc_feature (27)..(27): Xaa can be any naturally occurring amino acid
  misc_feature (63)..(63): Xaa can be any naturally occurring amino acid
GTAIGIMSGRGKXGKXXGKGGAKRHRXVLRDNIQGHYKTGYPPFCSARGVKRISGLIYEETRXVLKFLENVIRDAVTYNGASQAQNCSQPWMYICPKKSGAHLYGFGGVNLDKRSPENFKT

SEQ ID NO: 946206 - protein, 148 aa, Homo sapiens
  misc_feature (50)..(50): Xaa can be any naturally occurring amino acid
  misc_feature (70)..(70): Xaa can be any naturally occurring amino acid
  misc_feature (74)..(74): Xaa can be any naturally occurring amino acid
  misc_feature (78)..(78): Xaa can be any naturally occurring amino acid
  misc_feature (85)..(85): Xaa can be any naturally occurring amino acid
  misc_feature (110)..(110): Xaa can be any naturally occurring amino acid
  misc_feature (113)..(113): Xaa can be any naturally occurring amino acid
  misc_feature (135)..(135): Xaa can be any naturally occurring amino acid
  misc_feature (145)..(145): Xaa can be any naturally occurring amino acid
SSQVPGKWWISPPLLNTQKTGRAAGNTALSMNNSPLSEPWELSRRVKREXRFPTNWQQGKCGLSYGPSAXAEMXGFVXPFVVEDXSTGFRKCLLYRQNWGSLAPPEKFQXRWXQKRLQGMFGEHWHSRLSLAVIXQASDIGMARXLAV

SEQ ID NO: 946207 - protein, 54 aa, Homo sapiens
  misc_feature (32)..(32): Xaa can be any naturally occurring amino acid
  misc_feature (37)..(37): Xaa can be any naturally occurring amino acid
NSRPRTDREDDRREEVAVPPGLVGYVMVTEEXVSMGXRPLAGFRDDDQEEGRWA

SEQ ID NO: 946208 - protein, 68 aa, Homo sapiens
IRGRVRHGCAEDDRRGTGSVLIQIVCQELSLIYRNNIGSDWLSIVELCIIRLIAAACGNSNQFQQLKT

SEQ ID NO: 946209 - protein, 54 aa, Homo sapiens
  misc_feature (9)..(9): Xaa can be any naturally occurring amino acid
  misc_feature (18)..(18): Xaa can be any naturally occurring amino acid
  misc_feature (51)..(51): Xaa can be any naturally occurring amino acid
  misc_feature (54)..(54): Xaa can be any naturally occurring amino acid
IGSPHECRXRHLSRGPRXGMYLTPQPSGDEPLFSHHVFFISIELVAPLSLXCGX

SEQ ID NO: 946210 - protein, 37 aa, Homo sapiens
  misc_feature (25)..(25): Xaa can be any naturally occurring amino acid
HHSAWCVVPPGLQDRSGPTVSTPIXAVNVPLNKVGET

SEQ ID NO: 946211 - protein, 141 aa, Homo sapiens
  misc_feature (4)..(4): Xaa can be any naturally occurring amino acid
  misc_feature (61)..(61): Xaa can be any naturally occurring amino acid
  misc_feature (91)..(92): Xaa can be any naturally occurring amino acid
  misc_feature (100)..(100): Xaa can be any naturally occurring amino acid
  misc_feature (102)..(102): Xaa can be any naturally occurring amino acid
  misc_feature (137)..(137): Xaa can be any naturally occurring amino acid
GGLXSGNLKSPFWKLKFREKFSRAGGPPAGFPETQTGGPFGPEREKRKPGTQGKKGGGGKXLFPRAGPGVGGPFPNLPFPLGFKKKTGPLXXSPGGRKVXVXNPLGRVPLSLETPGKKARKRGGAGPKIGTLNPLTXSHSP

SEQ ID NO: 946212 - protein, 65 aa, Homo sapiens
MEVQTGMVGCAGHGDSSAQAPAAKSGANSAGRRAQVSNVFNIPRLCSSSVFQTVGNLQNFSNLFF

SEQ ID NO: 946213 - protein, 50 aa, Homo sapiens
  misc_feature (17)..(17): Xaa can be any naturally occurring amino acid
  misc_feature (46)..(46): Xaa can be any naturally occurring amino acid
DCDRNHVWSRQRRGLGXGGAKRHRKVLPGINIQGITPGFPPFGLRXPLAF

SEQ ID NO: 946214 - protein, 80 aa, Homo sapiens
  misc_feature (13)..(13): Xaa can be any naturally occurring amino acid
  misc_feature (49)..(49): Xaa can be any naturally occurring amino acid
  misc_feature (56)..(56): Xaa can be any naturally occurring amino acid
  misc_feature (63)..(63): Xaa can be any naturally occurring amino acid
MVDRPRIRAAFDXGCEKTTEGAFSKRLPKWRRCKSWCLMVEAIPGPPGXHSWLNSXLGPESGXLRCEGINILAILQQLVL

SEQ ID NO: 946215 - protein, 54 aa, Homo sapiens
  misc_feature (1)..(1): Xaa can be any naturally occurring amino acid
  misc_feature (18)..(18): Xaa can be any naturally occurring amino acid
  misc_feature (38)..(38): Xaa can be any naturally occurring amino acid
  misc_feature (44)..(44): Xaa can be any naturally occurring amino acid
XLITFHDHALIIIFLICXLVLYALFLTLTTKLTKLISXRSGSVXYLPGIILVLS

SEQ ID NO: 946216 - protein, 156 aa, Homo sapiens
  misc_feature (8)..(8): Xaa can be any naturally occurring amino acid
  misc_feature (10)..(10): Xaa can be any naturally occurring amino acid
  misc_feature (66)..(66): Xaa can be any naturally occurring amino acid
  misc_feature (79)..(79): Xaa can be any naturally occurring amino acid
  misc_feature (99)..(99): Xaa can be any naturally occurring amino acid
  misc_feature (104)..(104): Xaa can be any naturally occurring amino acid
  misc_feature (108)..(108): Xaa can be any naturally occurring amino acid
  misc_feature (114)..(114): Xaa can be any naturally occurring amino acid
  misc_feature (119)..(119): Xaa can be any naturally occurring amino acid
  misc_feature (121)..(121): Xaa can be any naturally occurring amino acid
  misc_feature (150)..(150): Xaa can be any naturally occurring amino acid
  misc_feature (156)..(156): Xaa can be any naturally occurring amino acid
GERSSFRXLXGPGVPSPQPDVTMLSRLLKEHQAKQNECKELQEEEEARGYRCSDLPDRSFGGSLMXVLPSLHEPELDHXVKTLQSKLPHLPSRQPLDRXVENFXRHSXNWDLRXARASXGXRTMHARICYKACICPSSLFLPNLSSTYRXEGGADX

SEQ ID NO: 946217 - protein, 104 aa, Homo sapiens
  misc_feature (14)..(14): Xaa can be any naturally occurring amino acid
  misc_feature (38)..(38): Xaa can be any naturally occurring amino acid
RGRATRLRETTEGXPSGSNSRMENQTRMFSTHKWELKXMRMQRHKNDTMDFGDSRGKGGKGLRHKRLQIRCSVCCLGDGYTNTSQITAKELTHVTKHHLFPNNL

SEQ ID NO: 946218 - protein, 108 aa, Homo sapiens
  misc_feature (9)..(9): Xaa can be any naturally occurring amino acid
  misc_feature (64)..(64): Xaa can be any naturally occurring amino acid
  misc_feature (77)..(77): Xaa can be any naturally occurring amino acid
MHYSPDASXAFSSIAHITRDVNYGLNIRYLHANGAFNILICLFLHIGEAILGSFSTQKPENIGXILLLQYSNSFKGXVSVRANIILRGTVILYIRHPIHGDRLVQCLG

SEQ ID NO: 946219 - protein, 110 aa, Homo sapiens
  misc_feature (4)..(4): Xaa can be any naturally occurring amino acid
  misc_feature (7)..(7): Xaa can be any naturally occurring amino acid
  misc_feature (48)..(48): Xaa can be any naturally occurring amino acid
MSAXISXSPEASELDPLLGIYWNWSYWSTTVSLRLALFIPDVCWDRIXLSLEQLGPMIIQFYSVMWITAAEEERPEFLNEMFHYERCFRMKVFQKPHPHNFPLNQEIFLL

SEQ ID NO: 946220 - protein, 142 aa, Homo sapiens
  misc_feature (8)..(8): Xaa can be any naturally occurring amino acid
  misc_feature (21)..(21): Xaa can be any naturally occurring amino acid
KPLSSRRXPHIAPDYTSYIRXQTQLRRITVASYPLSGLQIYSHIADDSSKPGNSLTPHITYWENSLCCNHVLLINITLLLQDSTYKSQPYTPLHNHNTWGSLTHHINNIKPSFTRENTLMFIHLSPILLLSLNPDIITGFSS

SEQ ID NO: 946221 - protein, 76 aa, Homo sapiens
  misc_feature (18)..(18): Xaa can be any naturally occurring amino acid
GDTPGTLAMRKSNYLIRXKWTPRVRRLDSDPRVQELRRVDRLREDDRGHHHCLSFVNQPMTLTGASQPPNDSGLAM

SEQ ID NO: 946222 - protein, 114 aa, Homo sapiens
MKTVFGVEPDLTREGGSIPVTLTFQEATGKNVMLLPVGSADDGAHSQNELNRYNYIEGTKMLAAYLYEVSQLKDYGQALCVPSPMRRNPALNFNLSNCPGMEFPLSFPLSVIQT

SEQ ID NO: 946223 - protein, 31 aa, Homo sapiens
  misc_feature (1)..(1): Xaa can be any naturally occurring amino acid
  misc_feature (8)..(8): Xaa can be any naturally occurring amino acid
XREGEEKXREDREKKIKTYRRKKIKNLKSRK

SEQ ID NO: 946224 - protein, 50 aa, Homo sapiens
GGAWSGGGGGGRNDGRSIAWTHDGRNYWRPGLEWVLVRKTRKEEEKNNKY

SEQ ID NO: 946225 - protein, 41 aa, Homo sapiens
MYKSVGFSIFTMFGTIPLISERFHHPNQFFSFFNYEENSNM

SEQ ID NO: 946226 - protein, 105 aa, Homo sapiens
  misc_feature (27)..(27): Xaa can be any naturally occurring amino acid
  misc_feature (88)..(88): Xaa can be any naturally occurring amino acid
  misc_feature (105)..(105): Xaa can be any naturally occurring amino acid
MGWNHPATFTANGASIFFIWPLPTHRXEAYITDHFSTQKPETSGIILPGLATYRQQPFIGYVLPVEAKYHSGGATVITLLSGHPILGXRPSSMNLRRATQWTSPX

SEQ ID NO: 946227 - protein, 34 aa, Homo sapiens
  misc_feature (21)..(21): Xaa can be any naturally occurring amino acid
MASICDASVSVIREDIGFIVXLALPSEDYPGHLL

SEQ ID NO: 946228 - protein, 71 aa, Homo sapiens
  misc_feature (39)..(39): Xaa can be any naturally occurring amino acid
  misc_feature (52)..(52): Xaa can be any naturally occurring amino acid
GGSRRDAPGGKMEDYQAAEETAFVVDELSNIVKEAIESXIGGKLINTANEPXDHKCIEQTLSQSPSWAFYI

SEQ ID NO: 946229 - protein, 112 aa, Homo sapiens
  misc_feature (9)..(9): Xaa can be any naturally occurring amino acid
  misc_feature (28)..(28): Xaa can be any naturally occurring amino acid
  misc_feature (34)..(34): Xaa can be any naturally occurring amino acid
  misc_feature (38)..(38): Xaa can be any naturally occurring amino acid
  misc_feature (53)..(53): Xaa can be any naturally occurring amino acid
  misc_feature (83)..(83): Xaa can be any naturally occurring amino acid
  misc_feature (97)..(97): Xaa can be any naturally occurring amino acid
  misc_feature (103)..(103): Xaa can be any naturally occurring amino acid
DCNRKSCLXAARTEKAWGRVVLSAIVRXSGITSXLTKXAIRRLDRRGGVKRIXGLIYEETRGVLKVFLENVIRDAVTYTGHAXRTVTAMDVVYALVXAHSVWXGGVNLGRGL

SEQ ID NO: 946230 - protein, 112 aa, Homo sapiens
  misc_feature (1)..(1): Xaa can be any naturally occurring amino acid
  misc_feature (21)..(21): Xaa can be any naturally occurring amino acid
  misc_feature (36)..(36): Xaa can be any naturally occurring amino acid
  misc_feature (39)..(39): Xaa can be any naturally occurring amino acid
  misc_feature (42)..(42): Xaa can be any naturally occurring amino acid
  misc_feature (45)..(45): Xaa can be any naturally occurring amino acid
  misc_feature (61)..(61): Xaa can be any naturally occurring amino acid
XPNGITPLIPRVHPKHLRNRXGVSSLSSPSLLKTTXPNXSAXYTXGSLTSYSFEYSSLLHXSDGIYGSTFFVATGFHGLHVIYGSTFLTICFIRQLIFHFTSKHHFGFEAAA

SEQ ID NO: 946231 - protein, 31 aa, Homo sapiens
  misc_feature (17)..(17): Xaa can be any naturally occurring amino acid
  misc_feature (23)..(23): Xaa can be any naturally occurring amino acid
EKTTEGEEKRKREEKKXEGEKRXKEKRRREE

SEQ ID NO: 946232 - protein, 57 aa, Homo sapiens
  misc_feature (2)..(3): Xaa can be any naturally occurring amino acid
  misc_feature (31)..(31): Xaa can be any naturally occurring amino acid
  misc_feature (39)..(39): Xaa can be any naturally occurring amino acid
GXXGCPNSVRALPAVRCFSTSVVIPFAKLVXPPVQYTVXRSLCHSSLFCCIQNKLER

SEQ ID NO: 946233 - protein, 45 aa, Homo sapiens
  misc_feature (8)..(8): Xaa can be any naturally occurring amino acid
  misc_feature (42)..(42): Xaa can be any naturally occurring amino acid
SPIIPPAXSAHPVEGSAPQPVVILGEEVGSHSSPPPGINPSXPSR

SEQ ID NO: 946234 - protein, 45 aa, Homo sapiens
  misc_feature (18)..(18): Xaa can be any naturally occurring amino acid
  misc_feature (41)..(41): Xaa can be any naturally occurring amino acid
GRPRWVAAAAAAIVPAPXVSVRPVDLQIGDKPFWSRLIHFXPYYL

SEQ ID NO: 946235 - protein, 74 aa, Homo sapiens
  misc_feature (40)..(40): Xaa can be any naturally occurring amino acid
IRGRYDTADEKTTEGEPSPAETSFTKEAYKNTSRLLKSIXGNEEQRPERVKPFMTGLQNKSSTSCYFKNYRSYW

SEQ ID NO: 946236 - protein, 87 aa, Homo sapiens
  misc_feature (52)..(52): Xaa can be any naturally occurring amino acid
  misc_feature (56)..(56): Xaa can be any naturally occurring amino acid
  misc_feature (69)..(69): Xaa can be any naturally occurring amino acid
  misc_feature (76)..(76): Xaa can be any naturally occurring amino acid
ATFPNQEVGVQLGELDKLVMMQKLLKCSRLVLALALILVLESSVQVILRGEXRYQXVRCNPDSNSAKCXEEDQCFXLLPVNPTKIPV

SEQ ID NO: 946237 - protein, 97 aa, Homo sapiens
  misc_feature (11)..(11): Xaa can be any naturally occurring amino acid
  misc_feature (20)..(20): Xaa can be any naturally occurring amino acid
EQTDYTLSIHXPWRLPRYGXQMAIIEIHKNIASSSPPSCHITSLTLFYSPIYPLNHISPYLTRKINDSLNIQTHPIPPHIIALPRYSYYLPFILIIL

SEQ ID NO: 946238 - protein, 71 aa, Homo sapiens
  misc_feature (6)..(6): Xaa can be any naturally occurring amino acid
  misc_feature (16)..(16): Xaa can be any naturally occurring amino acid
  misc_feature (34)..(34): Xaa can be any naturally occurring amino acid
  misc_feature (40)..(40): Xaa can be any naturally occurring amino acid
  misc_feature (43)..(43): Xaa can be any naturally occurring amino acid
  misc_feature (49)..(49): Xaa can be any naturally occurring amino acid
  misc_feature (52)..(52): Xaa can be any naturally occurring amino acid
STQHQXVQTLPPPGCXYTARKLPSQFVVDYYETXSPLLPXQLXYSNPKXKQXCADPSESWVQEYVYDLELN

SEQ ID NO: 946239 - protein, 105 aa, Homo sapiens
  misc_feature (4)..(4): Xaa can be any naturally occurring amino acid
  misc_feature (33)..(33): Xaa can be any naturally occurring amino acid
  misc_feature (100)..(100): Xaa can be any naturally occurring amino acid
ENAXPCLAALRFNPFWDGQGERKTFPKNADQAXVFVGRAFLTAKKEELTSFAMNNSESGGFLLLFSGCFLALLCCSLQPRLLGSRNSPASASQAAGTTGXHITSG

SEQ ID NO: 946240 - protein, 95 aa, Homo sapiens
  misc_feature (2)..(2): Xaa can be any naturally occurring amino acid
  misc_feature (4)..(4): Xaa can be any naturally occurring amino acid
  misc_feature (36)..(36): Xaa can be any naturally occurring amino acid
  misc_feature (46)..(46): Xaa can be any naturally occurring amino acid
  misc_feature (75)..(75): Xaa can be any naturally occurring amino acid
AXAXLTDLWDPYGGTLDVGMWEAFVVAQTYSLKDPXGEPLPVSVWXDLESSHLLTYRPHNEKPCCDNLEIFIYFXLYECRTSCFCSELLLLRRPT

SEQ ID NO: 946241 - protein, 80 aa, Homo sapiens
  misc_feature (23)..(23): Xaa can be any naturally occurring amino acid
  misc_feature (25)..(25): Xaa can be any naturally occurring amino acid
  misc_feature (38)..(38): Xaa can be any naturally occurring amino acid
AKAWVALGPTGKWKSSGSSGSEXIXQASEIGILATLPXLGNLNGVLCYVAKLVSSLRGNNIELGTLRKYYRVCTLAILIR

SEQ ID NO: 946242 - protein, 76 aa, Homo sapiens
  misc_feature (10)..(10): Xaa can be any naturally occurring amino acid
  misc_feature (23)..(23): Xaa can be any naturally occurring amino acid
  misc_feature (55)..(55): Xaa can be any naturally occurring amino acid
  misc_feature (63)..(64): Xaa can be any naturally occurring amino acid
  misc_feature (67)..(67): Xaa can be any naturally occurring amino acid
  misc_feature (74)..(74): Xaa can be any naturally occurring amino acid
PNRLKRYRYXEAGLAQFVRLLLXHSVLTSMLPSTRVVAASNCVAEQDVFSLAIEXKWLFIYAXXGDXLINGARXQV

SEQ ID NO: 946243 - protein, 77 aa, Homo sapiens
  misc_feature (12)..(12): Xaa can be any naturally occurring amino acid
  misc_feature (34)..(34): Xaa can be any naturally occurring amino acid
  misc_feature (46)..(46): Xaa can be any naturally occurring amino acid
  misc_feature (59)..(59): Xaa can be any naturally occurring amino acid
PGAASLISSGRXMVIILAPGRMPTKLWLVFYLWXAIEIFRYSFYCXRALTGLEGAHWLXYTLWIPYIHWDVWWKLSQ

SEQ ID NO: 946244 - protein, 172 aa, Homo sapiens
  misc_feature (109)..(109): Xaa can be any naturally occurring amino acid
  misc_feature (142)..(142): Xaa can be any naturally occurring amino acid
  misc_feature (153)..(153): Xaa can be any naturally occurring amino acid
  misc_feature (165)..(165): Xaa can be any naturally occurring amino acid
PNRILSDISPLQRVIIAVAVVIQAGLLIILLPRQRMKLLQLMRVLFIQQVTPFIVFCVPRCCPFRADKGQRQAAMVAVVQVNFSRRRVYRVHLALHLRHRQPHDASQRXAFLTHPVSQDSFPAGRALQQHGGNNTLPTSSPXTVKVSAKLRRXFRQSTVAVQPDXWVVPGCS

SEQ ID NO: 946245 - protein, 77 aa, Homo sapiens
  misc_feature (3)..(3): Xaa can be any naturally occurring amino acid
  misc_feature (10)..(10): Xaa can be any naturally occurring amino acid
  misc_feature (37)..(37): Xaa can be any naturally occurring amino acid
  misc_feature (39)..(39): Xaa can be any naturally occurring amino acid
  misc_feature (57)..(57): Xaa can be any naturally occurring amino acid
  misc_feature (76)..(76): Xaa can be any naturally occurring amino acid
DGXAYGSSNXTIKAREPARTDPLVWEDWVPPTPNKSXGXLIGRILTVLQHRSIIRVXMTKIGVTRYAQVSICPGSXV

SEQ ID NO: 946246 - protein, 107 aa, Homo sapiens
  misc_feature (24)..(24): Xaa can be any naturally occurring amino acid
  misc_feature (59)..(59): Xaa can be any naturally occurring amino acid
ASRGIRSTRLTPEHLPCSELLHRXRSLLQRTDEGDLCEYTAYCLLYHCCAFTAWVRGPXSGVERAQLLAEVIENLECDPRHYQQRTLTFALRADDPLLKLLQEAQQS

SEQ ID NO: 946247 - protein, 79 aa, Homo sapiens
  misc_feature (7)..(7): Xaa can be any naturally occurring amino acid
  misc_feature (24)..(24): Xaa can be any naturally occurring amino acid
  misc_feature (71)..(71): Xaa can be any naturally occurring amino acid
  misc_feature (73)..(73): Xaa can be any naturally occurring amino acid
ERHRFEXVSNKTHTFVSAAVASKXLTTFRKFDLLANVVTLPKRKRKYNGVPRLKEKYHRELVRMKAPKNCXPXIQAWVP

SEQ ID NO: 946248 - protein, 44 aa, Homo sapiens
  misc_feature (5)..(5): Xaa can be any naturally occurring amino acid
  misc_feature (24)..(24): Xaa can be any naturally occurring amino acid
GGVGXSWSGKRLRKICEEKNSEVXNRIIRIEGLDRWCVVALVCA

SEQ ID NO: 946249 - protein, 96 aa, Homo sapiens
  misc_feature (60)..(60): Xaa can be any naturally occurring amino acid
  misc_feature (96)..(96): Xaa can be any naturally occurring amino acid
DGWLLFSAPKPRHARPQKRPDSGAGLTDAGASDVLIFCYGTQTIRWNIYEFRSYTSALKXEMIPGKFETLIFGQLHSEWLDTDVDLEADDTCFKLX

SEQ ID NO: 946250 - protein, 196 aa, Homo sapiens
  misc_feature (30)..(30): Xaa can be any naturally occurring amino acid
  misc_feature (34)..(34): Xaa can be any naturally occurring amino acid
  misc_feature (42)..(42): Xaa can be any naturally occurring amino acid
  misc_feature (67)..(67): Xaa can be any naturally occurring amino acid
  misc_feature (120)..(120): Xaa can be any naturally occurring amino acid
  misc_feature (125)..(125): Xaa can be any naturally occurring amino acid
  misc_feature (141)..(141): Xaa can be any naturally occurring amino acid
  misc_feature (146)..(146): Xaa can be any naturally occurring amino acid
  misc_feature (159)..(159): Xaa can be any naturally occurring amino acid
  misc_feature (193)..(193): Xaa can be any naturally occurring amino acid
ISRPRSNNGCEKDDKKGLFFAKASFLEIDXRLLXPCVGKSLXRNRPLNAPRERTGRTWKFQLTSLKXHPTNWMIIRKCFIVGSRTMWAPSRCSRFRMFPFAGKAVVLMGKNTMMRKAIPXALENXPALEKLLLQSGGNVGXVFTKXDFTEIRDMLLGHXVPTAARAGAIAPCEVNVPAQMVFGARGTSFFPGXKYS

SEQ ID NO: 946251 - protein, 78 aa, Homo sapiens
  misc_feature (4)..(4): Xaa can be any naturally occurring amino acid
  misc_feature (27)..(27): Xaa can be any naturally occurring amino acid
  misc_feature (32)..(32): Xaa can be any naturally occurring amino acid
  misc_feature (55)..(55): Xaa can be any naturally occurring amino acid
  misc_feature (78)..(78): Xaa can be any naturally occurring amino acid
FAAXSTVGGHAACTVFARGLIFPLNRXGANEXQPRIHNHCQRFKSFPVESERPSXQETHNEYYKAFSEMGTFNRTWYX

SEQ ID NO: 946252 - protein, 180 aa, Homo sapiens
  misc_feature (105)..(105): Xaa can be any naturally occurring amino acid
  misc_feature (108)..(108): Xaa can be any naturally occurring amino acid
  misc_feature (114)..(114): Xaa can be any naturally occurring amino acid
  misc_feature (130)..(130): Xaa can be any naturally occurring amino acid
  misc_feature (152)..(152): Xaa can be any naturally occurring amino acid
  misc_feature (160)..(160): Xaa can be any naturally occurring amino acid
  misc_feature (175)..(175): Xaa can be any naturally occurring amino acid
RAAFSLIQENEVLFTMCFIPLVCWIVCTGLKQQMESGKSLAQTSKTSTAVYVFFLSSLLQPRGGSQEHGLCAHLWGLCSLAADGIWNQKILFEESDLRNQDCRRXMCXLPEDEXVPKRSGCESSTASSTXFQEFLRQYNCWKREGRDVPGIXELPAESDXLWKLCNRGIDLCSFXLLSRE

SEQ ID NO: 946253 - protein, 73 aa, Homo sapiens
  misc_feature (20)..(20): Xaa can be any naturally occurring amino acid
GSCPNSQWEDASLLPCEDGXLGLLGVLSSKENADLGLARWLTPVIPALWETEVVDHEVEVEIILANVVKPHLC

SEQ ID NO: 946254 - protein, 75 aa, Homo sapiens
  misc_feature (1)..(1): Xaa can be any naturally occurring amino acid
  misc_feature (28)..(28): Xaa can be any naturally occurring amino acid
  misc_feature (43)..(43): Xaa can be any naturally occurring amino acid
  misc_feature (46)..(46): Xaa can be any naturally occurring amino acid
  misc_feature (59)..(59): Xaa can be any naturally occurring amino acid
  misc_feature (68)..(68): Xaa can be any naturally occurring amino acid
XTEGEWKVGGSDGEGAIGLSRDPKSRNXINDRIGYKPQPKPHXRSXNVEVLKEMDYLAXQSRWEWDKXMGRVQTR

SEQ ID NO: 946255 - protein, 33 aa, Homo sapiens
  misc_feature (8)..(8): Xaa can be any naturally occurring amino acid
LRSAVKWXNDETAKSEHQKSPVYLMHDLYSSEK

SEQ ID NO: 946256 - protein, 113 aa, Homo sapiens
  misc_feature (2)..(2): Xaa can be any naturally occurring amino acid
  misc_feature (20)..(21): Xaa can be any naturally occurring amino acid
  misc_feature (28)..(28): Xaa can be any naturally occurring amino acid
  misc_feature (30)..(30): Xaa can be any naturally occurring amino acid
  misc_feature (33)..(33): Xaa can be any naturally occurring amino acid
  misc_feature (47)..(47): Xaa can be any naturally occurring amino acid
  misc_feature (72)..(72): Xaa can be any naturally occurring amino acid
MXPLVNTSRWDPAKEYRGMXXLDAWTAXRXRRXSELTNQMARECLVXCRKRVIHNLSLTDCWHPTLMPDIGXKSLTQVRAMMYSGELKFEKRTSSAQVEGGVHSLHSYEKRLF

SEQ ID NO: 946257 - protein, 95 aa, Homo sapiens
  misc_feature (15)..(15): Xaa can be any naturally occurring amino acid
  misc_feature (23)..(23): Xaa can be any naturally occurring amino acid
  misc_feature (87)..(87): Xaa can be any naturally occurring amino acid
FAAAYDYGLREDDRXGESSVLRXGLHVDCGKLGNKLTSSCGPSSNRDESAVDCSCHLPLCEVFVVLLLCIPFISPDGKKILQARLVXVVSVPMAP

SEQ ID NO: 946258 - protein, 31 aa, Homo sapiens
  misc_feature (12)..(12): Xaa can be any naturally occurring amino acid
  misc_feature (14)..(14): Xaa can be any naturally occurring amino acid
MRGDYPGLEPSXGXSATAAWRLSQIVQDQGV

SEQ ID NO: 946259 - protein, 74 aa, Homo sapiens
  misc_feature (16)..(17): Xaa can be any naturally occurring amino acid
GICRISCLSPPSYDHXXRVTSSLPQSLAPWSELRYTIRRIIFNSYIFPLIPRTRRLRLLDVDNRVVLPIEAPFV

SEQ ID NO: 946260 - protein, 70 aa, Homo sapiens
  misc_feature (1)..(1): Xaa can be any naturally occurring amino acid
  misc_feature (17)..(17): Xaa can be any naturally occurring amino acid
  misc_feature (44)..(44): Xaa can be any naturally occurring amino acid
  misc_feature (50)..(50): Xaa can be any naturally occurring amino acid
  misc_feature (60)..(60): Xaa can be any naturally occurring amino acid
  misc_feature (65)..(65): Xaa can be any naturally occurring amino acid
XPVIDNPRTSPPAQPFXPLFQQPLMRLQSSRKSPVKTLVKVSPXGGKKWXTFSPPENYDXLYELXGRRWI

SEQ ID NO: 946261 - protein, 118 aa, Homo sapiens
  misc_feature (87)..(87): Xaa can be any naturally occurring amino acid
  misc_feature (93)..(93): Xaa can be any naturally occurring amino acid
  misc_feature (97)..(97): Xaa can be any naturally occurring amino acid
  misc_feature (115)..(115): Xaa can be any naturally occurring amino acid
GGISVSSAILTQTNNDEFVIVGGYQLENQEMICNIISLEDNKIEIREMETPDWTPDIKHSKIWFGSNMGNGTVFLGIPGDIKLFQKXLFYMLXVLKXYYEEQTTFTNSQLTKSRXPLP

SEQ ID NO: 946262 - protein, 78 aa, Homo sapiens
  misc_feature (4)..(4): Xaa can be any naturally occurring amino acid
  misc_feature (20)..(20): Xaa can be any naturally occurring amino acid
  misc_feature (27)..(27): Xaa can be any naturally occurring amino acid
  misc_feature (57)..(57): Xaa can be any naturally occurring amino acid
ITLXEANEILQQHKEGKVAXVMKMMSXWPSCPDRPEEESDYPLASKDAKQLLCGAAXALMRMTIGWTCSPSWCGCSGF

SEQ ID NO: 946263 - protein, 112 aa, Homo sapiens
  misc_feature (1)..(2): Xaa can be any naturally occurring amino acid
  misc_feature (38)..(38): Xaa can be any naturally occurring amino acid
  misc_feature (50)..(50): Xaa can be any naturally occurring amino acid
XXKTIRRILVLKMQLRNVADDQQKKICELEDGYLKYTXETKQKIEINVIXLQDLENHFKRANLRVVGLKSEVEKEIEVGSIPNGIIKENFPNLKKDINSQVQEDYRTQRRFN

SEQ ID NO: 946264 - protein, 119 aa, Homo sapiens
  misc_feature (35)..(35): Xaa can be any naturally occurring amino acid
  misc_feature (42)..(42): Xaa can be any naturally occurring amino acid
  misc_feature (56)..(56): Xaa can be any naturally occurring amino acid
  misc_feature (96)..(96): Xaa can be any naturally occurring amino acid
  misc_feature (115)..(115): Xaa can be any naturally occurring amino acid
MAHAAQVGLQDATSPIIEELITFHDHALIIIFLVXLPGPVMXLFLNTHNLTELLTXSERLREIGNRSGTILTRPYILVPTSPYPSLRILYITDEVXDPYPYHLQLATMVLNLTSXTDWR

SEQ ID NO: 946265 - protein, 40 aa, Homo sapiens
  misc_feature (24)..(24): Xaa can be any naturally occurring amino acid
NSRPRRREDDRRGLLRVAAKPENXAQWASGNANENYRFGS

SEQ ID NO: 946266 - protein, 99 aa, Homo sapiens
  misc_feature (14)..(14): Xaa can be any naturally occurring amino acid
  misc_feature (25)..(25): Xaa can be any naturally occurring amino acid
  misc_feature (29)..(29): Xaa can be any naturally occurring amino acid
  misc_feature (36)..(36): Xaa can be any naturally occurring amino acid
  misc_feature (46)..(46): Xaa can be any naturally occurring amino acid
  misc_feature (95)..(95): Xaa can be any naturally occurring amino acid
ITLKEANEFCSAKXGKVALVNEDDXLVAXMPWTDLXRIGIPTSSKXARNTAVWGAIGTHEDDNIGWIALPSCVDVVVLDSSQEIHLPDQYDQYIXNTLL

SEQ ID NO: 946267 - protein, 83 aa, Homo sapiens
  misc_feature (2)..(2): Xaa can be any naturally occurring amino acid
MXMPANAVQICNDLSAYQQMSGLNNVIYIHSETLFGLEKTKEILSFVTTQMNLEGVMLSEISRHRKGNSELSHLYMKSKKVEL

SEQ ID NO: 946268 - protein, 44 aa, Homo sapiens
  misc_feature (24)..(24): Xaa can be any naturally occurring amino acid
  misc_feature (38)..(38): Xaa can be any naturally occurring amino acid
AFSQRVCRQNTGVVKTTPKSLGEXTRIHCRHWTRIFGXSTTTGL

SEQ ID NO: 946269 - protein, 102 aa, Homo sapiens
  misc_feature (22)..(22): Xaa can be any naturally occurring amino acid
  misc_feature (28)..(28): Xaa can be any naturally occurring amino acid
  misc_feature (33)..(33): Xaa can be any naturally occurring amino acid
  misc_feature (58)..(58): Xaa can be any naturally occurring amino acid
  misc_feature (70)..(70): Xaa can be any naturally occurring amino acid
KAPGRGELGDHSDRSSVISCPXKAPGPXPLESXQQLVEIDSLLFEQGVWVPELDVKGXDDEDVDETKMTXMETHQDGSTGAHSESPEITSLHSRKGNRARLL

SEQ ID NO: 946270 - protein, 73 aa, Homo sapiens
  misc_feature (13)..(13): Xaa can be any naturally occurring amino acid
  misc_feature (37)..(37): Xaa can be any naturally occurring amino acid
  misc_feature (45)..(46): Xaa can be any naturally occurring amino acid
  misc_feature (49)..(49): Xaa can be any naturally occurring amino acid
PGPYGVEANTQNXDPGGGGSSSSIAMAVAEEIRKQAXQERRAEKXXGSXRLQQICELSHSTVVAGLAATRDMF

SEQ ID NO: 946271 - protein, 66 aa, Homo sapiens
FAAASTRLRERQKGSMNILETNSFSKAQQSNRKSQQRNGKCKKITNGNSGIKKYKNQNKKLNGLTQ

SEQ ID NO: 946272 - protein, 157 aa, Homo sapiens
  misc_feature (20)..(20): Xaa can be any naturally occurring amino acid
  misc_feature (39)..(40): Xaa can be any naturally occurring amino acid
  misc_feature (46)..(46): Xaa can be any naturally occurring amino acid
  misc_feature (49)..(49): Xaa can be any naturally occurring amino acid
  misc_feature (51)..(51): Xaa can be any naturally occurring amino acid
VPDGPKTQGLVGTSIYGPLXLILPLRCLIQSGGPLISPXXRRIEDXLNXIXARFLDIYTNILMELNFQVRMCPETNLTLGFLSEPVNSGKDSDLASGVSVKLRLKECLKICSYGVKYNKSSPAHARTSLKCFIKGLDDLITCFYNPERKRETDTNVK

SEQ ID NO: 946273 - protein, 108 aa, Homo sapiens
  misc_feature (21)..(21): Xaa can be any naturally occurring amino acid
  misc_feature (66)..(66): Xaa can be any naturally occurring amino acid
FPGFFSFSETGSCSVAPAEVXWQDHGSCNLNFLASSNPSHLNLLSWEGLQAAPPAGYFFIFCRGRXPLCCPGWSQTPGIKQSFCLSPPKSWDYRHEPCARPNVLLKMQ

SEQ ID NO: 946274 - protein, 101 aa, Homo sapiens
SAGTPPPPAPQAEDHSSRILYPRPKSLSPKMMNADMDAVDAENQVELEEKTRLINQVLELQHTLEELSARVDAVKEEKLKQKTENQVLGQKKEKPMSASRV

SEQ ID NO: 946275 - protein, 81 aa, Homo sapiens
  misc_feature (10)..(10): Xaa can be any naturally occurring amino acid
  misc_feature (23)..(23): Xaa can be any naturally occurring amino acid
  misc_feature (32)..(32): Xaa can be any naturally occurring amino acid
  misc_feature (35)..(35): Xaa can be any naturally occurring amino acid
  misc_feature (53)..(53): Xaa can be any naturally occurring amino acid
TPSQPPRLAXQVLGTADHLPDDXYQVSLSRFXERXSIVCVFITTPFSVEMVYXSVRLSGNILGLRRDGLVGSTYSALLLVV

SEQ ID NO: 946276 - protein, 46 aa, Homo sapiens
  misc_feature (36)..(36): Xaa can be any naturally occurring amino acid
  misc_feature (46)..(46): Xaa can be any naturally occurring amino acid
NSRPLDREDDRRDCGNVVCDKIKPNQQPILCNQGRXCVDSLGFLAX

SEQ ID NO: 946277 - protein, 62 aa, Homo sapiens
  misc_feature (33)..(33): Xaa can be any naturally occurring amino acid
MQFPDVYNQTTTATRPGVYYGQCSEICGANHSXMPIVLELIPLKIFEIEARIYPIAPPLPPL

SEQ ID NO: 946278 - protein, 32 aa, Homo sapiens
MDVLLASGGRILRSGDRDHPGNAVKPRLYYKY

SEQ ID NO: 946279 - protein, 101 aa, Homo sapiens
STRLREDDRGEGALVGSVLSSRRQGTPQFPSNSLITPRIGILYINIEAGAGVVVHTVIPALWEAEVGGSLRSGVRDQPGQHGETLSLLKIQKLARRGGVHL

SEQ ID NO: 946280 - protein, 135 aa, Homo sapiens
  misc_feature (18)..(18): Xaa can be any naturally occurring amino acid
  misc_feature (21)..(22): Xaa can be any naturally occurring amino acid
  misc_feature (35)..(35): Xaa can be any naturally occurring amino acid
  misc_feature (44)..(44): Xaa can be any naturally occurring amino acid
  misc_feature (46)..(46): Xaa can be any naturally occurring amino acid
  misc_feature (53)..(53): Xaa can be any naturally occurring amino acid
  misc_feature (56)..(56): Xaa can be any naturally occurring amino acid
  misc_feature (81)..(81): Xaa can be any naturally occurring amino acid
  misc_feature (87)..(87): Xaa can be any naturally occurring amino acid
NDVARARNGALCWALQEXATXXCGWLLGVVLPKPXSWTSHANMXPXHFLPSCXPGXSSPEAQYMPFPAYASDGVICSFLWXHPTVSXFTVYIFTCNGWDQAIPSPLTIWLELNVTKVASPWLRDGRRGGICSWVP

SEQ ID NO: 946281 - protein, 166 aa, Homo sapiens
  misc_feature (10)..(10): Xaa can be any naturally occurring amino acid
  misc_feature (12)..(12): Xaa can be any naturally occurring amino acid
  misc_feature (33)..(33): Xaa can be any naturally occurring amino acid
  misc_feature (37)..(37): Xaa can be any naturally occurring amino acid
  misc_feature (44)..(45): Xaa can be any naturally occurring amino acid
  misc_feature (51)..(51): Xaa can be any naturally occurring amino acid
  misc_feature (55)..(55): Xaa can be any naturally occurring amino acid
  misc_feature (78)..(78): Xaa can be any naturally occurring amino acid
  misc_feature (93)..(93): Xaa can be any naturally occurring amino acid
  misc_feature (117)..(117): Xaa can be any naturally occurring amino acid
PPQMQTRHGXDXGLIMCRKSRFWYCISVEEVKXSSGXIVYVGSXXEVPPGXRIRXLVRYDSGAAPKHVREYGTDHAGXVTQCYRDMGARHRAXAQSIQIMKVEEIAASKCRRPAVKXFHDSKIKFPCPTVVLRRQHKPRFTTKRPNTFFQVQGPRPGVPQINSGTP

SEQ ID NO: 946282 - protein, 58 aa, Homo sapiens
  misc_feature (7)..(7): Xaa can be any naturally occurring amino acid
  misc_feature (25)..(25): Xaa can be any naturally occurring amino acid
  misc_feature (32)..(32): Xaa can be any naturally occurring amino acid
RPRDYGXEKTTEGYGREDDRRGGSXLWSAREXEAGGLLRAQEFETSPGNIGRPCLYSS

SEQ ID NO: 946283 - protein, 126 aa, Homo sapiens
  misc_feature (17)..(17): Xaa can be any naturally occurring amino acid
  misc_feature (44)..(44): Xaa can be any naturally occurring amino acid
  misc_feature (50)..(50): Xaa can be any naturally occurring amino acid
  misc_feature (59)..(59): Xaa can be any naturally occurring amino acid
  misc_feature (68)..(68): Xaa can be any naturally occurring amino acid
  misc_feature (77)..(77): Xaa can be any naturally occurring amino acid
  misc_feature (111)..(111): Xaa can be any naturally occurring amino acid
LRPYLSGWRASPARRTXDADRIESTQAPAIGPQVSEHSSSGFTXRIPEHXIHKVLQLMXSARRDPHRXQRRFSTASXSRAASWIMDSPSLAPLPLPAIDNVAGTSASPCSXRTSQAPSFLPQRKEL

SEQ ID NO: 946284 - protein, 155 aa, Homo sapiens
  misc_feature (1)..(1): Xaa can be any naturally occurring amino acid
  misc_feature (52)..(52): Xaa can be any naturally occurring amino acid
  misc_feature (56)..(56): Xaa can be any naturally occurring amino acid
  misc_feature (70)..(70): Xaa can be any naturally occurring amino acid
  misc_feature (135)..(135): Xaa can be any naturally occurring amino acid
XRTCQVGGFTIQETRDAEPHREQFNAAPWPPVSEQRIIQGFTKQNTRSSHPXVLQXMLRRCESSIACSAXSLRLNESRPLMDSWIAHASPYLPLPAIDNVAGTSASPLQPSNFPGTLLSAPEEGAVVSCCLWAPXSSAVLGSVRHPLIIKSTVCS

SEQ ID NO: 946285 - protein, 111 aa, Homo sapiens
  misc_feature (58)..(58): Xaa can be any naturally occurring amino acid
  misc_feature (83)..(83): Xaa can be any naturally occurring amino acid
  misc_feature (94)..(94): Xaa can be any naturally occurring amino acid
DRGSARPGTAFLCGFTAQRASWTWVSEPLHVRRNSTRVLDTQTDPVEWGWRMRVERIXVLPGEISSDWWALELLPENAPCCPXKGALPFRPGEXVSLLCHGDKGRAEIMSF

SEQ ID NO: 946286 - protein, 131 aa, Homo sapiens
  misc_feature (57)..(58): Xaa can be any naturally occurring amino acid
  misc_feature (66)..(66): Xaa can be any naturally occurring amino acid
  misc_feature (74)..(74): Xaa can be any naturally occurring amino acid
  misc_feature (87)..(88): Xaa can be any naturally occurring amino acid
  misc_feature (90)..(90): Xaa can be any naturally occurring amino acid
  misc_feature (96)..(96): Xaa can be any naturally occurring amino acid
  misc_feature (113)..(113): Xaa can be any naturally occurring amino acid
  misc_feature (129)..(129): Xaa can be any naturally occurring amino acid
MQSSLKTLYRARPINLEGGAPVTPIEKCERPRFQDKGKAFPPTQPEGSSLQASSWKXXPYSSDYTXRKEFDPAXVLRLKSGMQIFVXXLXGQETIXLEMEPSDTIENVKAKIXDYKKGILPTSRLIFSXTL

SEQ ID NO: 946287 - protein, 180 aa, Homo sapiens
  misc_feature (112)..(112): Xaa can be any naturally occurring amino acid
LQLLLPAGCRVFPEATAGSCREQLRCSAILCLPRPVPRLPAELTIYTSDNYTEEMGSGDYDSMKEPCFREENANSILLPTIYAIIFLMACGQWMVILVRVTRRNEKHDGQYXLHCHGRLLLSSRSLWGIDAVANGIWEFLCKAVHVIYTVKLLQCLILAFIIWDANWAMFQANNIRGQAV

SEQ ID NO: 946288 - protein, 41 aa, Homo sapiens
  misc_feature (35)..(35): Xaa can be any naturally occurring amino acid
QIFICSQEESIKPRNLWRRLTLTVFRIMASSPLLXCFDVLT

SEQ ID NO: 946289 - protein, 139 aa, Homo sapiens
  misc_feature (13)..(13): Xaa can be any naturally occurring amino acid
  misc_feature (21)..(21): Xaa can be any naturally occurring amino acid
  misc_feature (36)..(36): Xaa can be any naturally occurring amino acid
  misc_feature (47)..(47): Xaa can be any naturally occurring amino acid
  misc_feature (133)..(133): Xaa can be any naturally occurring amino acid
  misc_feature (137)..(137): Xaa can be any naturally occurring amino acid
KWGKPKKSPGKAXPNPGRGGXGAPAFLKETLKVGEXPPPGGLGQGEXFPAGAPAGSRNQPGPWPEEKEPDPRKKGDWPQKFLVPKDFQRKKLKGPNVESLKVSMAADTFYTLVHHWTKRRAEKLEAVPCPPVXAVKXLK

SEQ ID NO: 946290 - protein, 52 aa, Homo sapiens
EDTEDGCEKTRRLLLLRHEGYAARRHEGTLREDDEGTLLEDDRGYAARRLQK

SEQ ID NO: 946291 - protein, 68 aa, Homo sapiens
  misc_feature (9)..(9): Xaa can be any naturally occurring amino acid
  misc_feature (37)..(37): Xaa can be any naturally occurring amino acid
  misc_feature (43)..(43): Xaa can be any naturally occurring amino acid
  misc_feature (47)..(47): Xaa can be any naturally occurring amino acid
DAKSVKIKXNKDNVNLKFDAADTFKPWFIIDQEKGRXTEAVPXPPVXQLKELKLNQTHLIGTCIILKY

SEQ ID NO: 946292 - protein, 68 aa, Homo sapiens
  misc_feature (25)..(25): Xaa can be any naturally occurring amino acid
  misc_feature (32)..(32): Xaa can be any naturally occurring amino acid
  misc_feature (64)..(64): Xaa can be any naturally occurring amino acid
  misc_feature (67)..(67): Xaa can be any naturally occurring amino acid
MEAGKITGPQDRGEIKIANEVSGAXVIDNSYXEKGFESSNPLTNMAPRFYYNQLAGALWHIPVXPAXR

SEQ ID NO: 946293 - protein, 147 aa, Homo sapiens
  misc_feature (99)..(99): Xaa can be any naturally occurring amino acid
  misc_feature (124)..(124): Xaa can be any naturally occurring amino acid
  misc_feature (130)..(130): Xaa can be any naturally occurring amino acid
NRVSIHGNGAIPDTACVSLMTTNQTRWAWLLSCPRSHSSERFGDLAMRTELVVELGLSDPGQPSPFPWSWSSSGLLAFSLSKLLPMCVGQSDGEGIKPXKKGQTRAGVWWASHLLIPALWGRPXEGRFTXRFKEFRPALGPMGCPPP

SEQ ID NO: 946294 - protein, 82 aa, Homo sapiens
  misc_feature (64)..(64): Xaa can be any naturally occurring amino acid
  misc_feature (72)..(72): Xaa can be any naturally occurring amino acid
GLRRPRLDAKELQHPGDKMPTGKQLADIGYKTFSTSMMLLTVYGGYSAVSESTTISSGAGPAPXRRRTEDLXDHVELGGFFS

SEQ ID NO: 946295 - protein, 115 aa, Homo sapiens
  misc_feature (31)..(31): Xaa can be any naturally occurring amino acid
  misc_feature (39)..(39): Xaa can be any naturally occurring amino acid
  misc_feature (110)..(110): Xaa can be any naturally occurring amino acid
  misc_feature (114)..(114): Xaa can be any naturally occurring amino acid
MAPKAKKVKLLPLLKAEAKAKALKGQEGQCXKGVSTAHXKKIRTFTHLSGGPKTLRTSGRQPKYPREERLPRRNKLDHYGYHQVFRWTTGVLAMKEDRKTTNTLVFHCGXLPTXT

SEQ ID NO: 946296 - protein, 57 aa, Homo sapiens
  misc_feature (10)..(10): Xaa can be any naturally occurring amino acid
  misc_feature (21)..(21): Xaa can be any naturally occurring amino acid
  misc_feature (39)..(39): Xaa can be any naturally occurring amino acid
RQEGKDRMGXSPDPLSLTRGXEGEWHSSVSKCPQMPVGXALAWACALQGLAIGLLEQ

SEQ ID NO: 946297 - protein, 41 aa, Homo sapiens
  misc_feature (41)..(41): Xaa can be any naturally occurring amino acid
KNRPELMTLGIRDQIGGGWLCLNSHHKASNSLKKREERGAX

SEQ ID NO: 946298 - protein, 72 aa, Homo sapiens
  misc_feature (2)..(2): Xaa can be any naturally occurring amino acid
  misc_feature (54)..(54): Xaa can be any naturally occurring amino acid
  misc_feature (57)..(57): Xaa can be any naturally occurring amino acid
AXTDLSDQIRENDDMSESLDDWKDIADLMTRLGWRMEVKTDTATQRVEVAIFIXNWXQPEKIEWLFAANYYV

SEQ ID NO: 946299 - protein, 183 aa, Homo sapiens
  misc_feature (92)..(92): Xaa can be any naturally occurring amino acid
  misc_feature (98)..(98): Xaa can be any naturally occurring amino acid
  misc_feature (112)..(112): Xaa can be any naturally occurring amino acid
  misc_feature (140)..(140): Xaa can be any naturally occurring amino acid
  misc_feature (168)..(168): Xaa can be any naturally occurring amino acid
MLPRLVSNLVSWAQAIRPPRPPTCWDSRRELPRPAYLLFLLSWGSPSPSAWQEGGGARRKEVQNTQRCPRFRLALAFSHRPAIKREKQVQEXGPGIMXEAKKTSLGSRGDSXSGGSSSALWELRCSVPCPAFSHSSWLPXKKENTFEAGQGVTSVLSTGNGVLALLSXAWNCNGMIFGLQPRL

SEQ ID NO: 946300 - protein, 60 aa, Homo sapiens
  misc_feature (13)..(13): Xaa can be any naturally occurring amino acid
  misc_feature (26)..(26): Xaa can be any naturally occurring amino acid
  misc_feature (35)..(35): Xaa can be any naturally occurring amino acid
  misc_feature (58)..(58): Xaa can be any naturally occurring amino acid
MSTDTVFSLPSYXEDQGSKLIRKAKXAPFVPVGIXGFAAMLHMDYINWSRVLVHSSDXLR

SEQ ID NO: 946301 - protein, 51 aa, Homo sapiens
  misc_feature (5)..(6): Xaa can be any naturally occurring amino acid
  misc_feature (42)..(42): Xaa can be any naturally occurring amino acid
GGPTXXAPPRADWATAPDDFNTAFLLLPPQKSTVNMIGLKVXGNKVKSFQT

SEQ ID NO: 946302 - protein, 52 aa, Homo sapiens
  misc_feature (5)..(5): Xaa can be any naturally occurring amino acid
GSSAXPRVCLLASTVFGTEHIRGDSLPASDLPPISSPLGPPGTIFSAISCFW

SEQ ID NO: 946303 - protein, 79 aa, Homo sapiens
FAAASTLREDEQKGEKEREVEEIVELAKVYNKKKFQSLKAVSTELISANNTIKKLDNIEVIRKKAYIVSINEKTKGQKL

SEQ ID NO: 946304 - protein, 71 aa, Homo sapiens
  misc_feature (59)..(59): Xaa can be any naturally occurring amino acid
IRGRSTRLRDDRRGGGVRQKHQLYYKKGAFGGRSPGVSNLTRLTELEASYRYRGDRTLXCHRGLFDQTYPA

SEQ ID NO: 946305 - protein, 196 aa, Homo sapiens
  misc_feature (188)..(188): Xaa can be any naturally occurring amino acid
  misc_feature (192)..(192): Xaa can be any naturally occurring amino acid
MRGRVDVDANHAYQPYIFAAKKNTCNSRLAVQLNLKENNAKQGDVDQAKEVVADLLQTGKANTQQPGDRAYRFDPGEIITACPYWYMYQDILHTKSIFPPKRNVTPYYVIHVCSRKSSIRLSGTSALFSQPFINMNLVIASFLFYCLCDGLKAFMAIQDNARSAAGCNLNCGWCSSNSYLATLAAFVXNPIXCHML

SEQ ID NO: 946306 - protein, 108 aa, Homo sapiens
  misc_feature (22)..(22): Xaa can be any naturally occurring amino acid
  misc_feature (28)..(28): Xaa can be any naturally occurring amino acid
  misc_feature (35)..(35): Xaa can be any naturally occurring amino acid
  misc_feature (46)..(47): Xaa can be any naturally occurring amino acid
MGFQEAIAQNALPSPWNLPGPXELIWPXTQATEAXCRAASGHWPLXXPMHYSKTINPCMLWGQQRSHFRARILYFLAASIAAGQALNDSRCHCHFYKALFRVKSLFVS

SEQ ID NO: 946307 - protein, 46 aa, Homo sapiens
  misc_feature (5)..(5): Xaa can be any naturally occurring amino acid
  misc_feature (15)..(15): Xaa can be any naturally occurring amino acid
EDDRXDGCEKTQRVXCENDEGTLREPTEGRCEKTTEGTLREDDRKG

SEQ ID NO: 946308 - protein, 112 aa, Homo sapiens
  misc_feature (15)..(15): Xaa can be any naturally occurring amino acid
  misc_feature (29)..(29): Xaa can be any naturally occurring amino acid
  misc_feature (41)..(41): Xaa can be any naturally occurring amino acid
  misc_feature (46)..(46): Xaa can be any naturally occurring amino acid
  misc_feature (49)..(49): Xaa can be any naturally occurring amino acid
  misc_feature (56)..(56): Xaa can be any naturally occurring amino acid
TPSSSEEEELGQQAXAGRNFRNPLAQVSXGQESLRSLLATXTLPLXQLXQLEAPDXHLQGSLLLAPHRRGVRYRFLRTSTEAKFPGALWQLLALQSCNWPKSLSRLHFPPSV

SEQ ID NO: 946309 - protein, 104 aa, Homo sapiens
  misc_feature (78)..(78): Xaa can be any naturally occurring amino acid
  misc_feature (86)..(86): Xaa can be any naturally occurring amino acid
  misc_feature (95)..(95): Xaa can be any naturally occurring amino acid
YLDRYFKIAILKKLNKIMLITEKKFRILSDKFNKEVEIIKQNQAETLELKNATDILKNASESPNSRICQAEERINEPXDMYFKIQXRRLKKKERXKAAAVRAAA

SEQ ID NO: 946310 - protein, 58 aa, Homo sapiens
  misc_feature (4)..(4): Xaa can be any naturally occurring amino acid
  misc_feature (51)..(51): Xaa can be any naturally occurring amino acid
REQXGELGYIHPPQAGAGFLRESRSYEFYDLGGLQIPSWVFGLSLGSSPLXVFREFVG

SEQ ID NO: 946311 - protein, 95 aa, Homo sapiens
  misc_feature (25)..(25): Xaa can be any naturally occurring amino acid
  misc_feature (42)..(42): Xaa can be any naturally occurring amino acid
  misc_feature (45)..(45): Xaa can be any naturally occurring amino acid
  misc_feature (50)..(50): Xaa can be any naturally occurring amino acid
  misc_feature (54)..(54): Xaa can be any naturally occurring amino acid
  misc_feature (59)..(59): Xaa can be any naturally occurring amino acid
  misc_feature (64)..(65): Xaa can be any naturally occurring amino acid
GNPPTRGNKKLGASHPGRPFLELVXPPGLQNSRPRRLRLREXQTXGIPGXQKEXLEAVXLYEPXXLVVVGIVGYVEPPGCREDDRREEEMPVCVF

SEQ ID NO: 946312 - protein, 69 aa, Homo sapiens
PLSLSLRPSIAVRGLIERNGGFCVFHVDINLGAPEETSEVDLDKPFWQIIHPTYPSGAAEPAQCCRGVR

SEQ ID NO: 946313 - protein, 141 aa, Homo sapiens
QDSPMRGICHAKTHCCLSLSHFFTQAVLRFFPYCAENETKSFLMSPKSCGFVFPQSHKLDKNGIGTEYILNICMKNGTHTFSRASGVEATVMAGGDGDLTALKKILRKPLSTALPLFFPDVTLDGGSELGSSFVMLPPAVV

SEQ ID NO: 946314 - protein, 181 aa, Homo sapiens
MTFINTYVTMNYPQALPDTGYSSHKCLTISIGDMLCLAERLLEQGWTCANLFMYVFIYIQRTVQEPCDMRIRVYNSWRLLTVISRSTEVTRSGTESRPKTQMNIFFNLAENLPPSELRIPYKTIRTATNWRRKAGIPALETPKFLVVYPEGPASLRSRSFNQAYSSPIMENQAFPVFGPVG

SEQ ID NO: 946315 - protein, 68 aa, Homo sapiens
AAPLQAEQSRRQGAPTHGPQLIMMDLELPPPGLPIQQDMDLIDILWRQDIDLGVSLEGFDFNQRPKEY

SEQ ID NO: 946316 - protein, 152 aa, Homo sapiens
KGFTQRSHIQAHERIHTGEKPYKCGDCGKRFRCSSNLYTHQRVHTVEKPYKCDECGKSFRLSFNLYRHQRVHTGEKPYKCEECGKGFRSDSSFQSHHRVHTGEKPFRCNVCVKGFSHSSYFQAHQRVHTWEKPYKCEVCGKALKLSLEFYKH

SEQ ID NO: 946317 - protein, 79 aa, Homo sapiens
ARATVLPDNRSQTIYPETVYAIDNGTWRNSYESRTGEVKHYDHALYWLDKPLYLLYNGITRNNFARGARAMTRQNRRAI

SEQ ID NO: 946318 - protein, 120 aa, Homo sapiens
  misc_feature (52)..(52): Xaa can be any naturally occurring amino acid
  misc_feature (84)..(84): Xaa can be any naturally occurring amino acid
  misc_feature (110)..(110): Xaa can be any naturally occurring amino acid
LIHHDQVGFMPGMQGWFNIRKSINAIQHINRTKDKNHMIISTDAENAFDKIXQHFMLKTFNKLGIDGTYLKTISAMYDKPTANXMLNGQKLETFLLKTGRGMPSLTTPIXHSVGSSGQGN

SEQ ID NO: 946319 - protein, 121 aa, Homo sapiens
  misc_feature (12)..(12): Xaa can be any naturally occurring amino acid
  misc_feature (25)..(25): Xaa can be any naturally occurring amino acid
  misc_feature (28)..(29): Xaa can be any naturally occurring amino acid
  misc_feature (48)..(48): Xaa can be any naturally occurring amino acid
  misc_feature (51)..(51): Xaa can be any naturally occurring amino acid
LRRSSDLSLPSXWDYPCMTPYLALXFVXXVVLSFFTWFRTCHPGWSAXVCXRLTATCLSGWSDSRVSVFRVAGIAGVCHHAWLIFVFLVGTGLRYVGQAGLDFLTSGDLPPRPPKVLILQA

SEQ ID NO: 946320 - protein, 141 aa, Homo sapiens
  misc_feature (19)..(19): Xaa can be any naturally occurring amino acid
  misc_feature (31)..(31): Xaa can be any naturally occurring amino acid
  misc_feature (51)..(51): Xaa can be any naturally occurring amino acid
  misc_feature (118)..(118): Xaa can be any naturally occurring amino acid
  misc_feature (125)..(125): Xaa can be any naturally occurring amino acid
PEGSRGLEVALDCGLRAKXEFCIRLYNRSLXTRNPKLAPLEARTECIGSSXLYVSGYVPNCVAYCRKQVLNLSPHLRLEALCGLVSDACLSVRRSCSSLRVLYVNLRSPELYKYPRIXQTKRTKXLLPYLRPFGCLGGSLV

SEQ ID NO: 946321 - protein, 104 aa, Homo sapiens
  misc_feature (4)..(4): Xaa can be any naturally occurring amino acid
  misc_feature (54)..(54): Xaa can be any naturally occurring amino acid
  misc_feature (90)..(90): Xaa can be any naturally occurring amino acid
SLAXSSRLECRSAILARCNLCLLGSSDSLASASQVAGIIGTCHHVRLIFVLLVXMEFHHVGQAGIELLTSGNPPALASQSAGIIGVSHRXGSQCFISLSHCSVF

SEQ ID NO: 946322 - protein, 71 aa, Homo sapiens
  misc_feature (5)..(5): Xaa can be any naturally occurring amino acid
  misc_feature (7)..(7): Xaa can be any naturally occurring amino acid
  misc_feature (70)..(71): Xaa can be any naturally occurring amino acid
AGARXRXEAAPGRARNGKRCGGGGATGIAEERRRCAAPGSLLVALCREEVRRRVAAFCWLYLRSIFIMGXX

SEQ ID NO: 946323 - protein, 75 aa, Homo sapiens
  misc_feature (58)..(58): Xaa can be any naturally occurring amino acid
  misc_feature (70)..(70): Xaa can be any naturally occurring amino acid
ATLQSHTLADSIPSSPASSQFSVCSEDQEAIQAQFGRPSCLYGELQLIIGMPVFLQPXTDDIAPGYHSIXQRPMV

SEQ ID NO: 946324 - protein, 66 aa, Homo sapiens
ELPQEHTRKAKRIHRPLKELDHRHRLPEMAKNFCREDSYHSVVSCAAVVLTPMEPMIVKEKNQFPG

SEQ ID NO: 946325 - protein, 81 aa, Homo sapiens
ARGQLSKEERGGLFVLQLTGWEQLKKNGQRMDELFVLILDGFCSQLASSLASCCAGIIEFRAAGWKTTPAAHKYYYSEVSD

SEQ ID NO: 946326 - protein, 55 aa, Homo sapiens
  misc_feature (13)..(13): Xaa can be any naturally occurring amino acid
  misc_feature (50)..(50): Xaa can be any naturally occurring amino acid
  misc_feature (52)..(52): Xaa can be any naturally occurring amino acid
TAAQAKAKTTGAXRLILRYRLQRPPKIRNYHYGLTSSPTRPLGARGLRMXPXLSP

SEQ ID NO: 946327 - protein, 189 aa, Homo sapiens
  misc_feature (152)..(153): Xaa can be any naturally occurring amino acid
  misc_feature (180)..(180): Xaa can be any naturally occurring amino acid
KAAQDCPNRKLDLSEDELTRSTTCGNLGCSEAKNGTLPAFSVRCSQSLVYSTTLQTNRETKVLAVTVCETLEEHQIDRAHTHDDELTTLTELTLNLCKLSLTSDLGSYHTCCGMLTNSDVTSVYDQTVCTILATMQYAIQVRSLLNIHQFHXXRHEPHQHPRRGRALGVVLVCDMRCVAXRHYTTARPG

SEQ ID NO: 946328 - protein, 91 aa, Homo sapiens
FGTRFYCILGQKLGEKNKQTIFGDTEEFQAVYMELQNLVPKSARGTLSVNSSDGIQVIIDAYKFLSSEVICGNGHCEKALPLVTNVTARTE

SEQ ID NO: 946329 - protein, 121 aa, Homo sapiens
LDVCPCGMDVDGDRWDTRISDKWVKMQIFMTSLTGQNITHEVEPGGHLSANVMAMMHAIKGMPLSPKRADGSLLLQGKRDCEDGPYFLSLTYEDPLRESTTDTWLPDVCNSAGYGRLVSAA

SEQ ID NO: 946330 - protein, 35 aa, Homo sapiens
MEKGHTTENEPGGTPGDTTAEGQTQLPWRTHHYAA

SEQ ID NO: 946331 - protein, 107 aa, Homo sapiens
MAGPRREERKKVERRKETETQKGEEREENQHDKSSEGPTPGTRNKDSDKKRDRGDKPKEGRPPEKTAEPRQKETNTEGNQKSDHTRNEAQNPPAKRTGEKGHEQDAA

SEQ ID NO: 946332 - protein, 136 aa, Homo sapiens
  misc_feature (11)..(11): Xaa can be any naturally occurring amino acid
  misc_feature (26)..(27): Xaa can be any naturally occurring amino acid
  misc_feature (41)..(41): Xaa can be any naturally occurring amino acid
  misc_feature (75)..(75): Xaa can be any naturally occurring amino acid
  misc_feature (89)..(89): Xaa can be any naturally occurring amino acid
  misc_feature (97)..(97): Xaa can be any naturally occurring amino acid
MHIALFYKKTXIRDMLCPTRPSLTRXXPKRHRHAFNMGLSXNSSLIARYRDERKCTYLCQSSGYLQTRNQTCCNXRLKVQQHRRAFMMXLDNESSGXQSSRYSTKHFRVCNHAFGKTRKYALEVVREKKDSTAAIP

SEQ ID NO: 946333 - protein, 75 aa, Homo sapiens
LLTTSNLITPVCYVWNYLGIDDDDDDDDDDDDDDDVDDEITDDNRGYTRRQNEHLTQTLGYNESYDIFCGYNTHS

SEQ ID NO: 946334 - protein, 34 aa, Homo sapiens
MGLPGPRLRGAFHLSVIQHAIPGIYSLFYTRSLC

SEQ ID NO: 946335 - protein, 224 aa, Homo sapiens
MHHESFCEALPGDNVGFNVMIVSVTAPRCGKVAVDSENDPPMLAAGFTCSGDDPGPSRSNKRRLCPCIVLAHGLQCMEVFLSCPKSTVRCFLSFKVLPNFLGSYNAAISSLPPGMSYFSKRLTHFPPFWSLQYAPMLAYPFALPPLRPVIFPLNHFFEFPIATPNPNSSLLFFLLSRLLNSLPLTATGSLPIIPFILYSPSPRIQHPLLSSPPLLPSTPLLHFP

SEQ ID NO: 946336 - protein, 69 aa, Homo sapiens
  misc_feature (67)..(67): Xaa can be any naturally occurring amino acid
DAPGLLGILARGCLCKEPLFSKHRRKLHLYTLCGRLFPRWAKRSQDSKNNKMCAFPRVNVKFVCDFXLG

SEQ ID NO: 946337 - protein, 215 aa, Homo sapiens
  misc_feature (165)..(165): Xaa can be any naturally occurring amino acid
MQAGTMNRMMNALGTYTIRRSHRVIQQWHLLYNKQKHIYNSDDEIMTTPTALTCEHYTDTHSTDYTDCDTTHMTVLVDYAQITVLHILCSILTLTCDKLSTPHRTLIDYDTGQQTSTLEHVPNIVTFYLRSDQIDDRTENTSHYTRRINIIVDVTKQITRTTVDXHHTGYLTRLEIDRNDENSQQLTVDRYNIQYEIYIGTVRTTLTTHTTYIEH

SEQ ID NO: 946338 - protein, 628 aa, Homo sapiens
  misc_feature (356)..(356): Xaa can be any naturally occurring amino acid
TQRSCMTSTVACVPPVSCSLGRLALVLTTGVVVVGVCDCCDFCHNDSCTTRVSPVQPCRLASLLAWCCECADLRPLVVGSRAVRPAMVELGGWRGSRTSAQQGVCTQCWSAGPSLLHNTMQYTRRANQRIHRDPAYGVHSQSKRTILSHSLLPTRGIVICLCDRTEDEAERRYKRAGQQVAQGAEYHTIHVVRQFTVSTVTLYNATVTSRVGETDYGQLVSVSAASMRYAVGCSVVSNRTVVLCVYRLIGSVVSTVSAVDAWRCQSGDRLDGASPYMYTYLGRVVRRSSALAQYSVSTTLRLQWEHGVMYDRDRYRMAQYRTVYGSTRGCVNISQIDRLDMTIVYTSAVGDEDSEXSMKTSVKTVVGLQVFALCSVALYRRDTVLQNYSHFVTVRTYMSDVHLCHLLFVATSTYDDVDEGSFQSSDVVGGYCIDVWAQETHDHDAKYCTRVCRMPNNTLHYCDRDSLNNTHTSPYRSDQLYVAMLRLSPLTHCPPILDVTPNVSALLGFLGSIQIAISLAARRLTEWLRVECKYPRYHNYQNIHHTTRPTSSVDIIRRRVLTDICDARMQEYEQLCYVSIATVTSFLCERRNWATCFPAARPGQRTASVSDCGCARCGIVSGVLDSLS

SEQ ID NO: 946339 - protein, 234 aa, Homo sapiens
MHISATEQINTQYQTRRNSLHITMPPISKSTSPLVAGTCTVLCSLHSISTSVWLITYHYWSVLLSSNQTDVIVSSYTLHTAHVSQSHCRDYHLCRPYPPSNHHHHIILNGNIIILPHRDVLSTHVLAIISRLGRTASDTVTLHTPKIRSTRTSAHTNRTIAHAHISHTAHSHDLVSIPVAHSHTVHWPKDLRAQPIARCIIQHLQATYTSSNHTPPSQSSSTHPYHMPITLITG

SEQ ID NO: 946340 - protein, 115 aa, Homo sapiens
  misc_feature (98)..(98): Xaa can be any naturally occurring amino acid
  misc_feature (100)..(100): Xaa can be any naturally occurring amino acid
MSDQLPAGTSPRLGPVAVAALGKKHMTHKAAWRSAYEVYDHTPLQKPLKLVLKVVGSEVTELIRFGQDSRYYDDRSDHERERHDVLRRMKKRYPTTFXMXALGVFFFFMFMTGGY

SEQ ID NO: 946341 - protein, 239 aa, Homo sapiens
VGIRSELARERPGSQNRGKGFFLGRETPPAAPREADSKKTSRLARTKRDTKERLVGPSRERGLHRGGGAGPPPKKDSDRRAQHPPGRPQKEAGGARGATRSQAPPPRRKEGEGRTKNKPPRRAHPAGNRNPRRVSPPTARRKAPERGTAHRKRRHTRSFPGTPPPQSTRPDSPAPRGQNTPDAPRRRPGPSGGAAGGHPTRPAGGANNPAPPKPRRRAPREGGEQRHTAPPRPRPPARV

SEQ ID NO: 946342 - protein, 67 aa, Homo sapiens
MAPGGRRSYYSQVPKSIVQLLNWCKAHFQVDEWGTYLPNIVSCGNFQLANGLTGATSEPHSFFTCGS

SEQ ID NO: 946343 - protein, 118 aa, Homo sapiens
MPVAAVSEPVMLLFMPTTTDSSSSNRCCVSLALMLLPSYRRAQMALINLFIQPIGNLTTSVYFSPLRNDVTISVQPLIPKSYALVVLLMGAIAKSRYRCYKRSTFIVRPLIEAPLRTG

SEQ ID NO: 946344 - protein, 113 aa, Homo sapiens
  misc_feature (2)..(2): Xaa can be any naturally occurring amino acid
MXSSSVYVSEADNCSVASEGVRASVTPVTGAVWYTIRFAESSLYLGVCTGTDIRECVGGYKHVRACVTPDSELTRDAYALAACTQELVSRQVICGNDLRVISHYESSDGGEQN

SEQ ID NO: 946345 - protein, 118 aa, Homo sapiens
MRRMEMVRIETHINGMDLTIRVSHFTCQELHDVRAISAYMDEGSYTIDLHDVKDHSHQYSPRLWCPRGIVIKEESRGRYSIMSVANKSIFNRRLSRILARVPYHCTPLKTRGERDYCP

SEQ ID NO: 946346 - protein, 149 aa, Homo sapiens
LPMFQQQPPGRRAERTCQPRFREREQSGRETMLTRADPEPRWSEDEPPGDSASDAPTTQSDEEEPHARPKKAKSSDPSATKDKGQNEKRMLRAKRGPTAVEQSMPQRAKNSTTMTSLPVQSAEEQMLLHNITTITKKLVTQQKPATSNG

SEQ ID NO: 946347 - protein, 346 aa, Homo sapiens
RCCRNRHEKSLNDQPEIADVGSLMSAEETNRMVDTDSRHEERLYVRNAPYCFNAQKRTTTRPQAPHHGTRSNSPRTAVIHVKLQWSLQVDTYRHYRQPMEPQLQLGVNASTYVTLLQRDFRTKGMTCALRVVDIIQTCAPIHNNMSRPTGTDIIAYRLHTYELLDTHNCNTNTRQRHYVPPLVVVTASSYYRYAYGITLGAEQPQITLAIIIETLHISKWVGMTSCGIFAYLNQYTTLKDSSARHRHEVIANDEVPGQKSRDTRHALDTLISWNWAGRLRENLPTHNILIGAGSTTVRRLDITEQDFQLRSEGCLSVLLVHKSCPCGLNGDHQDYVTELKRTTTIN

SEQ ID NO: 946348 - protein, 117 aa, Homo sapiens
  misc_feature (58)..(58): Xaa can be any naturally occurring amino acid
  misc_feature (69)..(69): Xaa can be any naturally occurring amino acid
MDSQVVDNHPTDSFDDISLRGGYWVSDSQQVSCLGHRTVSLTIYRKSLSSLSVRYVCXYSLKEITDTEXRETRDLGRWVDAGRIIYRKGLCLITVPARVLSIRIRTLVCGRRAICIT

SEQ ID NO: 946349 - protein, 94 aa, Homo sapiens
  misc_feature (26)..(26): Xaa can be any naturally occurring amino acid
  misc_feature (93)..(93): Xaa can be any naturally occurring amino acid
GLDLRYMCEITGHEPSSNAGWQSRSXVTMLIFGPSILSSLLRTCTNGQAVHVRPSDFLHSFNVCLIRTNSFVDIPVVLGSLLVIPRSVALSDXA

SEQ ID NO: 946350 - protein, 84 aa, Homo sapiens
MEIRTHKRRKYIAKENPRPVHTKQSRLTRSDNPARQGAKDNICAPQGRGLSSDYQKPLGTTEHGRDSQQDQQPDAQHKSSPHYH

SEQ ID NO: 946351 - protein, 246 aa, Homo sapiens
VSKTSSLPYVELTFYAAYDREHVYLVKKDRHIGYRGKGTRHLLDWAGSGPGLPLTDDYGNGTGKTPKPPCWQQPDAQDALTRAEEERTLSPVGPQGTPCRFYRPHRNARPKTAGPAQKRQGSYAPGSTTQNLEPMERGATPRGARRPPGKRTNPPTGPHAPGPNDEERTAHSPNARPLLGDLHLRAAADPAPDDVPLEHFGITRQPLFSKSPTVAQRHIVSPLSLPLVHPNGVARNPDPLHNNTTH

SEQ ID NO: 946352 - protein, 169 aa, Homo sapiens
GIEVYSSMTDIPSTIGVSFHQSSISRLPVTSMGSENTEHASPDHMTLRHSISADLLTPSADGFVSPGASFLYCSSLSAVTRAWVVTGCPHRQANCLIDRTSTVISAARGRSQHSIVLVRDALCKHSVMSPQWTLRTRRRSETQNRIMHTVRPPKRHQQSTASASYLTRT

SEQ ID NO: 946353 - protein, 126 aa, Homo sapiens
MRLGGMPDPMSHTNLRTRIELRLVILYPHTHSSSILHPQRSPYVLFRWNTCFRTNGAWSVPYTRRAIAPLGPNVTGLNSLIYSRYYMNGGSALRRIGVYISSYKTCSLTCADSLNQPQAYPDHSTL

SEQ ID NO: 946354 - protein, 270 aa, Homo sapiens
IGTSHHVWEGGGGVTPLSGQPPRGGDGRWGVQPPHRPADPSGTGRSAGSRPPPTQAAPPRTVHECPLPTSAPYLGHMRGPLSPSAATHLDNCTHNYSHLSTVALAVYKRRLSLGSIAHMCAPLLLSPPHFIHSALPFPLYPCPLIARFTLGPPLFQIYVSFYLRPPTSFLAPSFNPLSTFLYDRYPPHISPDSSRKYYMMIAVSTSPASLASIGQSPIDVAMRIRPLHLTFQHSTVTYVIFISLSSNASPDCTITHRGYGAHGTPRAIFR

SEQ ID NO: 946355 - protein, 298 aa, Homo sapiens
  misc_feature (1)..(1): Xaa can be any naturally occurring amino acid
  misc_feature (9)..(9): Xaa can be any naturally occurring amino acid
  misc_feature (11)..(11): Xaa can be any naturally occurring amino acid
  misc_feature (19)..(19): Xaa can be any naturally occurring amino acid
  misc_feature (21)..(21): Xaa can be any naturally occurring amino acid
  misc_feature (49)..(49): Xaa can be any naturally occurring amino acid
XTYVSPQAXAXVYVLGGEXGXFNAENDTRAAGVFLERATSHHAPTTPVXHKGGAQHNTRGSPALRNPHGQAPPQQRPTNKQEDKATNSDTPQHLERPPPPKNAPHGGHRAHSDHRASPGANNTATTPIARATHTRATQNPHTRQGPPTREPPQTTTRPPGPLQTHHRQPRTPHRGERPPDHPDHAQTTTTHNPHSNKPAPPHTANPTPPPTAQRRTDHNRHREPAEPQQTTHTEQPHPPLTAHNPPRADHPQSARHRTPQQPPRHAPRPTTRHPRQHTHRPHPRPTGPPQHLDPPHRA

SEQ ID NO: 946356 - protein, 77 aa, Homo sapiens
  misc_feature (54)..(54): Xaa can be any naturally occurring amino acid
TVMVTHDVHIAMCSFSFSDSSITDVHATSLLLVITTVVMQLYGMDMTSDNVSKXSHTRSSMVPEGLYRDSSFSYCAL

SEQ ID NO: 946357 - protein, 178 aa, Homo sapiens
MSKYRGLTNAGGGSTAPASTLRHPDRNALQRWGEDWIARQNETAGDSRSAERKLRWTARGKATHAQESLSCDAGTIPGDEGHKRGELTNLPLRVISRADLRTDARRRTKPGRLGSYLPSFLSGKQAHIVVETKSKRAAPFIHREKGAPHYDSLSHEVNGERLMLPMNRIPPRQGLVAL

SEQ ID NO: 946358 - protein, 47 aa, Homo sapiens
KASRIKPRDQGRNGGTKAEQAQGRRPRGWATLLVNTSRPPLSALYGP

SEQ ID NO: 946359 - protein, 70 aa, Homo sapiens
GGIACDYGWLSEVKQQIVDIHKQALFTHCDQSMRACETITQQTCTCGQRDQRKHLALAASKSTTSTIHAS

SEQ ID NO: 946360 - protein, 122 aa, Homo sapiens
  misc_feature (63)..(63): Xaa can be any naturally occurring amino acid
MAASVSRAGHYPCRRMCSKRRKPFHDRSHKCSVHNQHQKTVVALVYLNIAAHQSMNCRKYMYXLDPCSFPSYHVSKYLTHTKFQRYRVQTLRTHNAESSLRSSTVTRRSREPEDFQWRVFIH

SEQ ID NO: 946361 - protein, 97 aa, Homo sapiens
  misc_feature (79)..(80): Xaa can be any naturally occurring amino acid
  misc_feature (83)..(83): Xaa can be any naturally occurring amino acid
  misc_feature (86)..(86): Xaa can be any naturally occurring amino acid
RRQRRRQRRRQRQRRKWRKAVRRVETVTARLVTLTARLVRWLRSPRPLQRMPKAKNDFIESLPNSVKCPVLALKKLQKXXYRXTQXDKEFSFWLMPL

SEQ ID NO: 946362 - protein, 72 aa, Homo sapiens
  misc_feature (44)..(44): Xaa can be any naturally occurring amino acid
  misc_feature (50)..(50): Xaa can be any naturally occurring amino acid
  misc_feature (52)..(52): Xaa can be any naturally occurring amino acid
  misc_feature (64)..(64): Xaa can be any naturally occurring amino acid
RMVDTFEGPRLFSGTIRFNLDLRGSAQIAHCGRPGNRQLKLVVXALQEAXCXITEGWENLAGQXSVCWPAFV

SEQ ID NO: 946363 - protein, 75 aa, Homo sapiens
  misc_feature (3)..(3): Xaa can be any naturally occurring amino acid
  misc_feature (11)..(11): Xaa can be any naturally occurring amino acid
  misc_feature (18)..(18): Xaa can be any naturally occurring amino acid
  misc_feature (27)..(27): Xaa can be any naturally occurring amino acid
  misc_feature (29)..(29): Xaa can be any naturally occurring amino acid
  misc_feature (42)..(42): Xaa can be any naturally occurring amino acid
  misc_feature (66)..(66): Xaa can be any naturally occurring amino acid
LMXPGPHRSGXPSLGPFXTPTKGSFGXGXFGGNGVAHQGGGXGKGGDFPPLGNKRRRLRSSGFFRXENAGDDTPE

SEQ ID NO: 946364 - protein, 80 aa, Homo sapiens
  misc_feature (6)..(6): Xaa can be any naturally occurring amino acid
  misc_feature (57)..(57): Xaa can be any naturally occurring amino acid
  misc_feature (65)..(65): Xaa can be any naturally occurring amino acid
KPVGKXRRPVKVYPNGAEDESAEAFPLEFKRELTGSDSGREMAHGLLMTAQGPGRPXAQAVVAAXKMTRALQDGDFRGSR

SEQ ID NO: 946365 - protein, 85 aa, Homo sapiens
  misc_feature (50)..(50): Xaa can be any naturally occurring amino acid
AYQEHIEEQNLERQVLQTQCRRLEARHYSLSLTAEQLSHSVAELRSQKQXMVSERERLQAELDHLESALLACNALPRGYLKGYPR

SEQ ID NO: 946366 - protein, 41 aa, Homo sapiens
  misc_feature (27)..(27): Xaa can be any naturally occurring amino acid
LLLVSLFCARAWPLAIVRRAAVQVTFXTVDRPRLSTTSYLS

SEQ ID NO: 946367 - protein, 43 aa, Homo sapiens
  misc_feature (23)..(23): Xaa can be any naturally occurring amino acid
  misc_feature (37)..(37): Xaa can be any naturally occurring amino acid
SSQECLRNSWCRRSDRTLYSKDXRRINLMEVDEPRWXLSSEST

SEQ ID NO: 946368 - protein, 112 aa, Homo sapiens
  misc_feature (22)..(22): Xaa can be any naturally occurring amino acid
  misc_feature (56)..(56): Xaa can be any naturally occurring amino acid
  misc_feature (64)..(64): Xaa can be any naturally occurring amino acid
  misc_feature (68)..(68): Xaa can be any naturally occurring amino acid
  misc_feature (103)..(103): Xaa can be any naturally occurring amino acid
  misc_feature (109)..(109): Xaa can be any naturally occurring amino acid
SLEVWGSQEALEEAKEVRQENXEKMKQKKFDKKVKEVVPAFLNEAQRAETGVDTVXIRHKELTXQVSXKAYNREELKARLYFVWELDLGPLWASDLIPKNLPXLLLMEXALA

SEQ ID NO: 946369 - protein, 144 aa, Homo sapiens
  misc_feature (48)..(49): Xaa can be any naturally occurring amino acid
  misc_feature (68)..(68): Xaa can be any naturally occurring amino acid
  misc_feature (72)..(72): Xaa can be any naturally occurring amino acid
  misc_feature (103)..(103): Xaa can be any naturally occurring amino acid
  misc_feature (107)..(107): Xaa can be any naturally occurring amino acid
  misc_feature (127)..(127): Xaa can be any naturally occurring amino acid
  misc_feature (142)..(142): Xaa can be any naturally occurring amino acid
MVPPHQCHPGCREGGLPVCITVNTTICAGYLPTMMRVLQAVLPPCLQXXCTYRDVRFESSRLPGCRVXWTPXLLSCGSQLPLVDPCRRKTSDCGGPKDTPWTXEHPXTLKAFLFLLKDPSPEALSKXQSRTSLGGPLDNPPXLS

SEQ ID NO: 946370 - protein, 78 aa, Homo sapiens
  misc_feature (22)..(22): Xaa can be any naturally occurring amino acid
  misc_feature (41)..(41): Xaa can be any naturally occurring amino acid
  misc_feature (62)..(63): Xaa can be any naturally occurring amino acid
MSKNDDDSSFEMEPPTVVLDSXLEGIKTELPEQHCFEITVXLAVRSSTWETLKTYWEDNLLXXSLSRSTEELDLSEPS

SEQ ID NO: 946371 - protein, 34 aa, Homo sapiens
  misc_feature (8)..(8): Xaa can be any naturally occurring amino acid
  misc_feature (23)..(23): Xaa can be any naturally occurring amino acid
MAADCREXDGELNVLDDILTEVXNQMMNCIIQRV

SEQ ID NO: 946372 - protein, 120 aa, Homo sapiens
  misc_feature (7)..(8): Xaa can be any naturally occurring amino acid
  misc_feature (35)..(35): Xaa can be any naturally occurring amino acid
  misc_feature (76)..(76): Xaa can be any naturally occurring amino acid
  misc_feature (85)..(85): Xaa can be any naturally occurring amino acid
  misc_feature (95)..(95): Xaa can be any naturally occurring amino acid
ELGCNIXXELKPFLDSTPKGRQTFEWKRYKLPVEXKTISCWHSGFLLLKVRPRDLGGPGLQCLRGQTWGIEGPLGXAGANSLCLXRAADSWSGLXACICIDFQIPFLQLRHYPLLMQGPA

SEQ ID NO: 946373 - protein, 134 aa, Homo sapiens
  misc_feature (1)..(1): Xaa can be any naturally occurring amino acid
  misc_feature (16)..(16): Xaa can be any naturally occurring amino acid
  misc_feature (52)..(52): Xaa can be any naturally occurring amino acid
  misc_feature (61)..(61): Xaa can be any naturally occurring amino acid
  misc_feature (79)..(79): Xaa can be any naturally occurring amino acid
  misc_feature (82)..(82): Xaa can be any naturally occurring amino acid
  misc_feature (85)..(85): Xaa can be any naturally occurring amino acid
  misc_feature (96)..(96): Xaa can be any naturally occurring amino acid
  misc_feature (103)..(103): Xaa can be any naturally occurring amino acid
  misc_feature (116)..(116): Xaa can be any naturally occurring amino acid
XLLLLLVSNLLLCQSXAPLPICPGGAARCQVTLRDLFDRAVDLSHYIHNLSXEMFSEFDKXYTHGGGHYQGHQQLPHFXPLXPPXDKGASPTDESXLFWSLIXSIMDPWNEASVSXGHGSTWYGKKPPEAFLRL

SEQ ID NO: 946374 - protein, 70 aa, Homo sapiens
ILLDFQRRLIPICWTLFHKIMKEGTLSNSFYEASITLIPKSGKDTTKKENYTPISLMNIDAKILKRILVN

SEQ ID NO: 946375 - protein, 123 aa, Homo sapiens
  misc_feature (99)..(99): Xaa can be any naturally occurring amino acid
  misc_feature (103)..(103): Xaa can be any naturally occurring amino acid
  misc_feature (105)..(105): Xaa can be any naturally occurring amino acid
  misc_feature (112)..(112): Xaa can be any naturally occurring amino acid
  misc_feature (114)..(114): Xaa can be any naturally occurring amino acid
  misc_feature (118)..(118): Xaa can be any naturally occurring amino acid
QAELTSNVLKTGVVRCCVGQCNNAIPVDTVLTMKKLPSPIATGRKTRGATSALLCGAAHRAPGVPDSLPEQVRAMERTVENIVLPGMRPCSSSLLRTRXTFFXCXAAWRGPXVXKASXGGFWS

SEQ ID NO: 946376 - protein, 127 aa, Homo sapiens
  misc_feature (2)..(2): Xaa can be any naturally occurring amino acid
  misc_feature (32)..(32): Xaa can be any naturally occurring amino acid
  misc_feature (38)..(38): Xaa can be any naturally occurring amino acid
  misc_feature (57)..(57): Xaa can be any naturally occurring amino acid
  misc_feature (66)..(66): Xaa can be any naturally occurring amino acid
  misc_feature (76)..(76): Xaa can be any naturally occurring amino acid
  misc_feature (108)..(108): Xaa can be any naturally occurring amino acid
  misc_feature (112)..(112): Xaa can be any naturally occurring amino acid
  misc_feature (115)..(115): Xaa can be any naturally occurring amino acid
TXARRRCCAHSVASPQCWPQGSLSLTCPRTLXCSPCSXWSPTMSSWKAIKLCLKDQXKSRYFCAAXSLHAGPWPPXWGPDWAGPRHGLLHRVYAILIPAPLFEGVFPXPLVXHFXYLMAVILSVLCA

SEQ ID NO: 946377 - protein, 41 aa, Homo sapiens
  misc_feature (31)..(31): Xaa can be any naturally occurring amino acid
  misc_feature (38)..(38): Xaa can be any naturally occurring amino acid
ICPAGCRCQVTLRDLFDRAVRLSTTSITLSXVFKRIRXGIP

SEQ ID NO: 946378 - protein, 120 aa, Homo sapiens
  misc_feature (34)..(34): Xaa can be any naturally occurring amino acid
  misc_feature (66)..(66): Xaa can be any naturally occurring amino acid
  misc_feature (73)..(73): Xaa can be any naturally occurring amino acid
  misc_feature (82)..(82): Xaa can be any naturally occurring amino acid
  misc_feature (90)..(90): Xaa can be any naturally occurring amino acid
  misc_feature (106)..(106): Xaa can be any naturally occurring amino acid
HNCTSKPAQLVCQGGARPVFPLRALLASDFIGGXVHVGFEVGTAGRRVRAGGHFDRSLLCRPHSCXKAWDSSXTLTTNHTLXRYLRCLAXNQASPTNSSIRIQKYXDRNFLWCDFVGPFW

SEQ ID NO: 946379 - protein, 35 aa, Homo sapiens
  misc_feature (32)..(33): Xaa can be any naturally occurring amino acid
MLEGPFSQPLHCGPLSGLAEGELAPSACGELXXEG

SEQ ID NO: 946380 - protein, 68 aa, Homo sapiens
  misc_feature (15)..(15): Xaa can be any naturally occurring amino acid
  misc_feature (26)..(26): Xaa can be any naturally occurring amino acid
  misc_feature (30)..(30): Xaa can be any naturally occurring amino acid
  misc_feature (63)..(63): Xaa can be any naturally occurring amino acid
LECFPRICGSALENXCNTNEFYMSYXLFIXACAGAGATVIALLIYMMATTYNYAGLKFKSREXCCTKF

SEQ ID NO: 946381 - protein, 53 aa, Homo sapiens
  misc_feature (37)..(37): Xaa can be any naturally occurring amino acid
  misc_feature (40)..(40): Xaa can be any naturally occurring amino acid
MLEGPFSQPLQLWKPLSGLAEGELAPSACGELWRERXGRXVPARFRVGAARRA
